United States Patent Application Publication US 2004/0031072 A1 - sequence listing, part 35

SEQ ID NO: 188026 - protein, 272 aa, Glycine max
  Clone ID: PAT_MRT3847_140801C.1.pep
MSGTVIVFDFDKTIVDVDSDNWVIDELGFTDLFNQLLPTMPWNSLMDRMMMELHSKGKTIEDIEEVLHRIPLHPRVIPAIQAAHAFGCDLRIVSDANMFFIETILKHLGIREYFSEINTNPGYVNEEGRLRILPYHDFNKASHGCTLCPPNMCKGLIIDRIQDSISQEGNKRMIYLGDGSGDYCPSLRLKERDYMMPRKNFPAWDLICKDPLLVKAEIHGWSDGEELEQVLLHLIAKISMEENSQFISSDCKLQTLSVSALEGLPKVLPVRP

SEQ ID NO: 188027 - protein, 78 aa, Glycine max
  unsure (1)..(78): unsure at all Xaa locations
  Clone ID: PAT_MRT3847_140802C.1.pep
NNPIEFEFGPGQVIKGWDQEXLEMFFVKNRNLKIQPNLGYEDQVPPPTIPGGATLIFDTELVGVNDKSLGEEKENSEL

SEQ ID NO: 188028 - protein, 58 aa, Glycine max
  unsure (1)..(58): unsure at all Xaa locations
  Clone ID: PAT_MRT3847_140803C.1.pep
FNNGTGFSFIKPDNGNXNLFHHQYSIRSDGYRTLLEGYRFEFAIVTDNNDKNNAVYFT

SEQ ID NO: 188029 - protein, 472 aa, Glycine max
  Clone ID: PAT_MRT3847_140804C.1.pep
RKTHREDWTGEKSVKARFPIKEELVNDYLSGKITMDATFNELRKKGKKSDKEIDSMIRLAKEVQASILNQKLEPVVRTFYNRTAFQLPGDARVRISFDTNLTLVREDNWDNGKRSGSNWRRMDIGIDWPFEQLPKEDLELFPYGVLEVKLQTQMGQEPPEWVRELVSSHLVEAVPKFSKFIHGCATLLPNRVDLVPFWLPQMETDIRKPVSTKKAALIERPTASNSHTPTTTSDTDPHAAGYTEPLSEDEDEGAEAADDDDSDDDRRGKGDPFSKVTNDEAGVAGLPAEVQAQVEDARAFREKNRLSQQHLSPNSSTARNGKAAILPLNEDSAASNNASTSEARTSGARATADLAKLTPRNLKKMLAAKYEAEGQPNGESASTTDGAVSAGANGQTGPGQSGISSSGEPNSTEYVNSFTYNGKRIAVPIRVEPKVNFALERTLLAWVEFSVLISAIGVGLLNFTSKHDHVGF

SEQ ID NO: 188030 - protein, 48 aa, Glycine max
  Clone ID: PAT_MRT3847_140805C.1.pep
RHMPSNSIYQIRYILLTQRDQLFGKPIQGNIGLSFNNYSSLKYCNVRT

SEQ ID NO: 188031 - protein, 34 aa, Glycine max
  Clone ID: PAT_MRT3847_140806C.1.pep
LKLASCIKGTHKRSSAHCFVTEAFLIESASTRPH

SEQ ID NO: 188032 - protein, 86 aa, Glycine max
  unsure (1)..(86): unsure at all Xaa locations
  Clone ID: PAT_MRT3847_140807C.1.pep
MCETSFCFFVNMEMRNSCGFFFLLLLLVFASQVVVHTEGTVCESQNHWYXGLSNINHKCALVCKNQCFSGGKCKGFRCRCFCTKIC

SEQ ID NO: 188033 - protein, 35 aa, Glycine max
  Clone ID: PAT_MRT3847_140808C.1.pep
NQPRHSKDRHSLKHTVPSHFDEQTTVGDCFSYYKD

SEQ ID NO: 188034 - protein, 66 aa, Glycine max
  Clone ID: PAT_MRT3847_140809C.1.pep
LPLSVVSQIVGGTGHLNATALDGGYYRCAMTPGSRCSLYRLQIWSCWTPQKGCYCRLSCSRSCLLN

SEQ ID NO: 188035 - protein, 77 aa, Glycine max
  Clone ID: PAT_MRT3847_14080C.1.pep
VAIFHGARAQARNRAGEARRPAAEEQTKELNLLVKTEAKKARKINGTTLAGERYTDETKSKERLEKMQGGTTEPEEA

SEQ ID NO: 188036 - protein, 68 aa, Glycine max
  Clone ID: PAT_MRT3847_140810C.1.pep
LRIPQFGVHGTPGRSTDWGRPASKNTGFKLSERLGHGAQQYPENVRLWPNSRLKNQKGFLDLTSVTNG

SEQ ID NO: 188037 - protein, 70 aa, Glycine max
  unsure (1)..(70): unsure at all Xaa locations
  Clone ID: PAT_MRT3847_140811C.1.pep
NSAPDDFSSTMXDLFLTHLSTLYSRRVFLFYPFKQPTFHIQLFFHHYNSSYYTHIYTLLHDILCSVNYSQ

SEQ ID NO: 188038 - protein, 49 aa, Glycine max
  Clone ID: PAT_MRT3847_140812C.1.pep
WYKSRPVVIITPLVITIRALPNIDPATIQHTDPSLHPRIDHPPLPLASR

SEQ ID NO: 188039 - protein, 85 aa, Glycine max
  Clone ID: PAT_MRT3847_140813C.1.pep
LLSLTLTYVSTPFYKFSFALVFCKSTSICILQNSNQTICSFTPPPPYIAAGYTIFLLLARATATILYMPPPPPPPPPPKKEDVIQ

SEQ ID NO: 188040 - protein, 139 aa, Glycine max
  Clone ID: PAT_MRT3847_140814C.1.pep
YSKYMSATKHTFSCGNVLVTPSALRSIAKRQVDYILGANPLRMSYMVGYGPYFPKRVHHRGSSLPSIEAHPQTIGCDGGFNPFFHSMNPNPNILVGAIVGGPNQNDGFPDDRSDYSHSEPATYINGAFVGPLAYFAGIH

SEQ ID NO: 188041 - protein, 309 aa, Glycine max
  Clone ID: PAT_MRT3847_140815C.1.pep
MFPTFEAQNLHNYRFLSAGSALVPLHQFLAEQNVDPSSIQAILCSPRQKISADAIRLLPSLSLIVTTSNGTRHIDLAECSYRGIQVASIPGDQLAVDVADMTVGLLIDVMWNISAADRQVLLSPAIFLLVPSFEFQLEGKRVGIVGLGKIGREVAKRLEAFGCRIMYNSRNQKPFVSYPFYSNVVELAGNSDVLVLSCSLNEQTRHIVKREVMLALGKEGVIVNIGRGDLIDEKELVRCLMEGEIKGAGLDVFENEPNVPKELFPLDNVVLSPHAASLTSHRIYDVCERVAECLEAFFSSKLPEYPGLG

SEQ ID NO: 188042 - protein, 223 aa, Glycine max
  unsure (1)..(223): unsure at all Xaa locations
  Clone ID: PAT_MRT3847_140816C.1.pep
IGQSGDLPYISPYSDFSGLRPGSREKEKHALXAFSRGVQILSAAEGQVDNLTHFVLCLCFSQQLRGMLIRHPDMFYVSLKGRRDSVFLREGYQDSQLVEKDRLLLIKEKLRTLVNVPRFPKGPARRIVEDSMRGSDSREDESGEEEEEWLEDVDNLMNDDGFDDIDDGDDWSDEEDDDLPPDFDEDAELLEMGQGKTIKQDSRQNDEMVLLPVLPDGRPREQW

SEQ ID NO: 188043 - protein, 65 aa, Glycine max
  unsure (1)..(65): unsure at all Xaa locations
  Clone ID: PAT_MRT3847_140817C.1.pep
DTXMSSFQSQTVIFLELLVVLELAIYLSLFPSYEQGXMXXLLFINPFISXIRFVLAAFGFTRLES

SEQ ID NO: 188044 - protein, 437 aa, Glycine max
  Clone ID: PAT_MRT3847_140818C.1.pep
RSRLQDYARARAESARVGSDLSWLKVSNVVRSGIVYNVVVLPFPFRNSQSKAASASTSPFNVTVVEATVAFLRQCHIQPQPPNHVQNSSLKLNSSSSSKLVLLSSTIVVTTAVANRVLYKLALVPMKEYPFFLAQFITFGYVVIYFSILYFRYRARIVTDEMLAIPKLRFVAIGFLEALGLVSGMSAAAVLPGPVIPILNQTFLVWQLMFSTLLLRRRYSINQLVGCLLVAVGVVVAITSGSNTGQMLSEVQFFWPALMIISCSFQAWASVMKESIFIDSATQLKHKSLDIFVVNSFGSGFQALFVLLSLPILSNLRGIPFAQLPSYFKSGAGCFLNLGADNPNCDGAPLLPLLYVIINLAFNISLLNAVKTSSAVVASLLVMLSVPISVYILSLPLPYLPEGTSLSPFFLLGCAILLCGLFLYNTTRPVRSSSEDD

SEQ ID NO: 188045 - protein, 102 aa, Glycine max
  Clone ID: PAT_MRT3847_140819C.1.pep
LEPIIQVSDCYGAPLLPLLYVIINLAFNISLLNAVKTSSAVVASLLVMLSVPISVYILSLPLPYLPEGTSLSPFFLFGGAILLCGLFLYNTTRPVRNSSEDD

SEQ ID NO: 188046 - protein, 115 aa, Glycine max
  unsure (1)..(115): unsure at all Xaa locations
  Clone ID: PAT_MRT3847_14081C.1.pep
MSFHKVNARVALLGTTIELYYTKTISLTLINSLYTIQLPXFKHLSFNPTNIKICFISYPYFNIKHVELPKHYISTRXLMTIFNRWVRVCKKNAIDLGDDNFTLSYYTNIPYQPVL

SEQ ID NO: 188047 - protein, 90 aa, Glycine max
  Clone ID: PAT_MRT3847_140820C.1.pep
CTCLELATQHIYLSVNLLKRRYGEFTLCPPGKGSAFGTGLTCSLFEDGKDRDRERDAATFSFSRSDGNISGILSWFLFWDRPTRKAIYLW

SEQ ID NO: 188048 - protein, 244 aa, Glycine max
  unsure (1)..(244): unsure at all Xaa locations
  Clone ID: PAT_MRT3847_140821C.1.pep
PRVRKMAKLVEEAQNSKTNIQRLIDKFAQFYTPGVVIISALVAVIPLALKQHNHKLWLQFSLVVLVSACPCALILSTPVATFCAYTKAATSGLLIKGGDHLETLAKIKVMAFDKTGTITKGEFVVTHFQSLSDDIDFNTLAYWVSSIESKSSHPSAAAIVDYGRSLSVEPEPEKVTEFEIFPGEGICGKIEGRVIYIGNKRIAARAGFETVPILQGEVXRRKTTGYIYXXEHPIGXFSXSDACR

SEQ ID NO: 188049 - protein, 53 aa, Glycine max
  Clone ID: PAT_MRT3847_140822C.1.pep
VCTFSSISLISLRSSLVIISPTHTQQKKPAYIHTPTAAQLLFSNYLVSSLVVV

SEQ ID NO: 188050 - protein, 99 aa, Glycine max
  unsure (1)..(99): unsure at all Xaa locations
  Clone ID: PAT_MRT3847_140823C.1.pep
SXXXQRKPXGXNXKSXPPQSRANRRXTRPXQANSRPXVXXKXKXASLXXXXXXHXXXXEXXKXPXEKXXTKXXXXXXXXXXQXXXXXXXXXEXXXXXXX

SEQ ID NO: 188051 - protein, 107 aa, Glycine max
  Clone ID: PAT_MRT3847_140824C.1.pep
HSLPPQCKAFHCTLTQFNLHEAIHKYPSTCDAIRFPCNYFTYFFLKYPLTLQLNQEKKTTLIQLHFKTNFQTAQCGCTHQAIYPLHSIGIQHQLKKYTKTTNFNFNF

SEQ ID NO: 188052 - protein, 73 aa, Glycine max
  Clone ID: PAT_MRT3847_140825C.1.pep
KGNIARLINHFCMPNCFARIVPLSDQENRIVFIAKTNVSAGEELTYNYSFDDERDEKKVVCPCKAPNCSGFMN

SEQ ID NO: 188053 - protein, 56 aa, Glycine max
  Clone ID: PAT_MRT3847_140826C.1.pep
AVRTLSIHTPLLTKLTSLKIITDKNNTTNNQTSNIITNNIYIYIYIYIYIYIYIYI

SEQ ID NO: 188054 - protein, 287 aa, Glycine max
  Clone ID: PAT_MRT3847_140827C.1.pep
MASSFSPSLSSLVPLLVSLFIVVCAAGNFNQDFQITWGDGRAKILNNANLLTLSLDKASGSGFQSKNEYLFGKIDMQLKLVPGNSAGTVTAYYLSSKGSTWDEIDFEFLGNLSGDPYILHTNVFSQGKGNREQQFYLWFDPTADFHTYSILWNPQRIVFSVDGTPIREFKNLESIGVPFPKRQPMRIYSSLWNADDWATRGGRIKTDWSKAPFTASYRNFNANACVWNRGKSTCKSNSPSSNAWLSQELDSTAQQRLSWVQKNYMIYNYCSDKNRFAQGLPLECTHS

SEQ ID NO: 188055 - protein, 63 aa, Glycine max
  Clone ID: PAT_MRT3847_140828C.1.pep
WTLESFQSGRPNSFFCTFRMVARVTSSNRTQELIISKVTKMATKQHSPSTQTHNKKLNEIHYQ

SEQ ID NO: 188056 - protein, 481 aa, Glycine max
  Clone ID: PAT_MRT3847_140829C.1.pep
MEIIYQSHIDREIESLIERIHPPRVCIDNDSSRDCTVVKIDSANRHGILLEMVQVLTDLDPVISKSYISSDGGWLMDVFHVTDHDGNKLTDRGLVHYIQQTLCEARSNSKEISSDIELTSCNEPPRLVNLAIELTTANQHGLFSEMSAVLLGLGFNVTSATAWTHNDRVACIIHLEDAKKLGPINAERLAQVQPELRNVVKARDRNGEEERVRLRLRSFGAGRNHTERRLHQMMYADGDYERCRACHVGDRNGEKKKGCEETQVTVGRYEEKGYWVVNVRSRDRPKLLFDTVCVLTDMQYEVFHAAVSSNGSMADQEYFVRPKGSSNLDNESEKQKLSLCLIAAIERRVSHGLKVDIRAENTTGLLSKVTRVIRENGLSITKVQIGVESDEMAVGSFCVANSSGQEVNPNIAELVRRETGGSVVANYNSPYRVPKSLSSSKTMHETKSSTEVGQRFSIGSMLWSQLECLSNNFRPIRSHKL

SEQ ID NO: 188057 - protein, 66 aa, Glycine max
  Clone ID: PAT_MRT3847_14082C.1.pep
HIFVKTLTRKTATLEVESSDAIDSVKAEMRDREGIPPHQQRLILAWKQVEDGRTRADTRSEKETPL

SEQ ID NO: 188058 - protein, 91 aa, Glycine max
  Clone ID: PAT_MRT3847_140830C.1.pep
FCRYIMHRPADHFIASMPAPFCRPWSHFRVTDLVRIHGIIRPDFARIAALVLRSRVNMLCVHILFPAVSLGCDITVLSYNSERFMVDTLYS

SEQ ID NO: 188059 - protein, 123 aa, Glycine max
  unsure (1)..(123): unsure at all Xaa locations
  Clone ID: PAT_MRT3847_140831C.1.pep
MATKRSAVTLKEGDLIAKRGLARFDLNVPLDDNLIITGDTRVRAAVPTIKYLTAFQAKMILPSHLRLSILLTPKYNLKPLEPRLSXLVKIYVTMTNNSIGDVVIKFATHLSECWALLLHDVKF

SEQ ID NO: 188060 - protein, 126 aa, Glycine max
  Clone ID: PAT_MRT3847_140832C.1.pep
RIANLVYGLKFGSAFVGEDKRTHTISVLAPLRIFISIHIFLIMDLAAKLHRLDLTGVVILDARKPSVLRHLPPRILTKTNTNLIYTNRFSGPSRPNSASSSTITVEDDIESLFSETNSEEERRSRK

SEQ ID NO: 188061 - protein, 69 aa, Glycine max
  unsure (1)..(69): unsure at all Xaa locations
  Clone ID: PAT_MRT3847_140833C.1.pep
KKKKKKKKKKYKKKKKKKKKXEKLKKKKKKYKKKKNIKKKKKKKKGPPFLKFQSFLPLPSNFKFFFWGP

SEQ ID NO: 188062 - protein, 76 aa, Glycine max
  Clone ID: PAT_MRT3847_140834C.1.pep
GKQYGLATNLKTEIEEKQRQKAAERKAAEKEWKPRFFTGAVTPVGRPDLTKDGEEALKGLHAENYQLPPNEEYAAF

SEQ ID NO: 188063 - protein, 95 aa, Glycine max
  Clone ID: PAT_MRT3847_140835C.1.pep
DASYHSKEAISMHHDFGTFLRNELCLLHSSTFVDDDFVDVQAQAVYSASYILWLKVQVPKSLENKLLQKIKDVDLKILLDKSCPERSSLFNYFMN

SEQ ID NO: 188064 - protein, 64 aa, Glycine max
  Clone ID: PAT_MRT3847_140836C.1.pep
LHGSETVNVELKHMENEARDNDREYPQAIAEIKPWRLSGQLRENAVEELTEEMYQVRGTVTLTE

SEQ ID NO: 188065 - protein, 153 aa, Glycine max
  Clone ID: PAT_MRT3847_140837C.1.pep
QVRFGLLVWQNLCAICLDPLSHKSKGSKAIFTAQCSHAFHFACISSNVRHGNVTCPICRAQWTQLPRNLNSGSTISTNRSDPILQILDDSIATFRVHRRTLLRSTRYDDDDPVEPDDAPEIHKLRFSLAPIPPKAPTSHLSPHPLSCGSSSLL

SEQ ID NO: 188066 - protein, 452 aa, Glycine max
  Clone ID: PAT_MRT3847_140838C.1.pep
MAPATPRFVVPIDLKKNPWEQNAPLHNRWHPHIPHVAAVNTGEVFRVEMVDWTGGAIKDNDSALDIKFLDLSTVHYLSGPIRILDNDGVPAQPGDLLAVEICNLGPLPGDEWGFTATFDRENGGGFLTDHFPCATKAIWYFEGIYAHSPQIPGVRFPGLTHPGIIGTAPSMELLNIWNERERDVEENGIKSFKLCEVLHSRPLASLPLTKSCLLGKIRKGTSEWDKIAKEAARTIPGRENGGNCDIKNLSRGAKVYLPVFVEGANLSTGDMHFSQGDGEVSFCGAIEMSGFLELKCEIIRGGMKEYLTPMGPTPLHVNPIFEIGPVEPRFSEWLVFEGISVDESGRQHYLDASVAYKRAVLNAIDYISKFGYSKEQVYLLLSCIPCEGRISGIVDAPNAVATLAIPTTIFDQDIRPKNNKVPVGPRLVRKPDVFKCTYDGNLPITRNPSATS

SEQ ID NO: 188067 - protein, 115 aa, Glycine max
  Clone ID: PAT_MRT3847_140839C.1.pep
QRSVCVCRSLSQLVPCTCTSHSHSKLAWSNSQTVRAASIARLAVLHLTSPLSMIQSSDSALHSVAPLWVPLAASAAVAAHAAVSPPTVRYASMRFQRPRINFRGHRPTKKQDRVT

SEQ ID NO: 188068 - protein, 65 aa, Glycine max
  Clone ID: PAT_MRT3847_14083C.1.pep
KNLKIKQPNHTLHTLFNILIGYNNKKKQCLAPISQCLYPQNLSFLVSQSELLILSSINIHTIHIT

SEQ ID NO: 188069 - protein, 145 aa, Glycine max
  unsure (1)..(145): unsure at all Xaa locations
  Clone ID: PAT_MRT3847_140840C.1.pep
XTXXIXXXGXAXSXAXCTXXAXXLXXFXXXXVPXLXXXXSXXTXXMRCXTXAXXXXGXXXXXXXHGXXXXXXXXRLRXXXXXXXTKXXXXXLXXXPXTXTXPXXVXXRCNXDYXXXXXQRVXXXXXXXXXXXSXXXXXXPXXXLX

SEQ ID NO: 188070 - protein, 246 aa, Glycine max
  Clone ID: PAT_MRT3847_140841C.1.pep
MASVHSSFLLPYNLLSLTTPSSSSTQILFTARPSATHLRPLLLTTRRRSGRRPFAAVAEQAATATEAAARRLYVGNIPRTVTNDELAKIVQEHGAVEKAEVMYDKYSGRSRRFAFVTMKTVEDATAVIEKLNGTELGGREIKVNVTEKPLSTLDLPLLQAEESEFIDSPHKVYVGNLAKTVTTDTLKNFFSEKGKVLSAKVSRVPGTSKSSGYGFVTFSSEEDVEAAISSFNNSLLEGQTIRVNKA

SEQ ID NO: 188071 - protein, 164 aa, Glycine max
  Clone ID: PAT_MRT3847_140842C.1.pep
MGGCEVEFEADQCKIPKLPLLNPPTMHSPERSGMKTPPLFTSASVPFGWEEEPGKLRPCTDIVSFSNPTPKCLELPPRLLLDSQSNNNKSMKLSSPTTVLEGPYPYVATTNNTCNSPSFRMSEDLYGSFGSERGQLGTMVLNQSVGIKEEEQEKGWFGSWREKA

SEQ ID NO: 188072 - protein, 82 aa, Glycine max
  Clone ID: PAT_MRT3847_140843C.1.pep
PNLKHLMLEHTVQEQRNLFFINRSINIEKNAVLRWSISHDHPYITLLIPTSLILFTTAISIPLHVSNNTKRTVADQNPTQLH

SEQ ID NO: 188073 - protein, 49 aa, Glycine max
  Clone ID: PAT_MRT3847_140844C.1.pep
GVCSSQGFWEKHLQEILVFTTSGEELVFHFNLRVFLIGGLLIFEKKCFF

SEQ ID NO: 188074 - protein, 316 aa, Glycine max
  Clone ID: PAT_MRT3847_140845C.1.pep
MVSYVNILLYGVGGLVVAGMALLVAFQEKLVYVPVLPGITKSYAINPSRLRLIYEDVWLQSYDGVRLHAWFIKLFPNCRGPTILFFQENAGNIAHRLEMVRIMLQQLHCNVFMLSYRGYGASDGYPSQHGITKDAQAALDHLSQRSDIDTSRIVVFGRSLGGAVGAVLTKNNPDKVAALILENTFTSILDMAGVLLPFLKWFIGGSSSNGPKVLNFLVRSPWSTIDVVGQIKQPILFLSGLQDEMVPPSHMQMLYAKAAARNNQCLFVDFPTGMHMDTWLAGGDQYWRTIQQFLEQHAPEQKEDRSSQNANDIGAR

SEQ ID NO: 188075 - protein, 85 aa, Glycine max
  unsure (1)..(85): unsure at all Xaa locations
  Clone ID: PAT_MRT3847_140846C.1.pep
TXPPXPRSXXXXFAXXIXMXLXCXXXEGIIXEMDRVXGDXXXRRXRGFAGCIGQXHGXSKLVGDXXVPXRGRSGKXCPLTLXXQL

SEQ ID NO: 188076 - protein, 63 aa, Glycine max
  Clone ID: PAT_MRT3847_140847C.1.pep
SLLTYLVLSKAHGTRYVSSVPKPSSTVGYTGYYSVLTLAYHDDEHTLILYDEFIGAEIAHDDY

SEQ ID NO: 188077 - protein, 132 aa, Glycine max
  unsure (1)..(132): unsure at all Xaa locations
  Clone ID: PAT_MRT3847_140848C.1.pep
VLKPLNCHLLCVDRLRSDAELHRETGAHFEEDLDAMLTKXDVIVINTPLTAETRGSLDTNGIAKGPKGVLIANNALGAIADTHAIADARSRGHVVRYRGDDRFPQPVPKEYPSRFMPNHVMTSYISGGTIGA

SEQ ID NO: 188078 - protein, 142 aa, Glycine max
  Clone ID: PAT_MRT3847_140849C.1.pep
VGVYDGHGGPEASRFVRHHLFQHLMRIAQDYGNISEEILRRAGSATEDGFMKLVHRSYMIKPLIASIASCCMVGVIWKGTLYIGNLGDSRAVAGSICRSNKIIVVHLSPEHSACWEDILHYSACVHLRNTHIVEMNRGPCRV

SEQ ID NO: 188079 - protein, 79 aa, Glycine max
  Clone ID: PAT_MRT3847_14084C.1.pep
SRVWATLLLIGVGPIGVLGFSNHKRFPIYGTSTDISLLRVYLFSHSFANVRVLVVALVDKSPSWFFAVRNEWSKDIWGS

SEQ ID NO: 188080 - protein, 181 aa, Glycine max
  Clone ID: PAT_MRT3847_140850C.1.pep
MAAAGACLFSAALFRRPAGKPSSSRISSTTPRLAVSVDRVPASTAAAAAAESGEGNGAVVREKRREEKNEKEKENRRMNGWKEYLEHSKELIEPDGGPPRWFSPLECASRLDNSPLLLFLPGIDGVGLGLILHHQKLGRIFDIWCLHIPVADRTSFTDLVKIAERTIMSEHQRSPNRPIYL

SEQ ID NO: 188081 - protein, 63 aa, Glycine max
  unsure (1)..(63): unsure at all Xaa locations
  Clone ID: PAT_MRT3847_140851C.1.pep
LLIPHEXSLIIIPCPPPSTPPPFXXXSVDXQEDLXGXXQLXSLKASHIVKXICTHXCLFXXXX

SEQ ID NO: 188082 - protein, 45 aa, Glycine max
  Clone ID: PAT_MRT3847_140852C.1.pep
GYLKSSNMHCSISLPFHIFLVCFYFVLPFNNTLFSHCPTAKSIHL

SEQ ID NO: 188083 - protein, 106 aa, Glycine max
  Clone ID: PAT_MRT3847_140853C.1.pep
SMIFFPAGTTVNRAGARMGGSFTGLKFMGGFPTKKNNHDLTFIGCNRGRIPCMPVWAPIGKKKFETLFYLPDLDDAPLGKEVEYLLRKGWISCVEFELEHRFVYRE

SEQ ID NO: 188084 - protein, 386 aa, Glycine max
  Clone ID: PAT_MRT3847_140854C.1.pep
MRSKDRIAYFYDGDVGSVYFGAKHPMKPHRLCMTHHLVLSYDLHKKMEIYRPHKAYPVELAQFHSADYVEFLNRITPDTQHLFLNELTKYNLGEDCPVFDNLFEFCQIYAGGTIDAARRLNNQLCDIAINWAGGLHHAKKCEASGFCYINDLVLGILELLKYHARVLYIDIDVHHGDGVEEAFYFTDRVMTVSFHKYGDSFFPGTGDAKEIGEREGKFYAINVPLKDGIDDSSFTRLFKTIISKVVETYQPGAIVLQCGADSLAGDRLGCFNLSIDGHAECVSFVKRFNLPLLVTGGGGYTKENVARCWTVETGVLLDTELPNEIPENDYIKYFAPEFSLKIPNGQIENLNSKSYLSTIKMQVLENLRCIQHAPSVQMQEVSSYLK

SEQ ID NO: 188085 - protein, 62 aa, Glycine max
  Clone ID: PAT_MRT3847_140855C.1.pep
WTHYARLNCEDPALMIRHDLPPSHSVHFISHEMTCSAALAHKVTPTARHDMQRDSSVLLANC

SEQ ID NO: 188086 - protein, 209 aa, Glycine max
  Clone ID: PAT_MRT3847_140856C.1.pep
LKVDRNLFYTIGLAKNSCPTCVNGTRLLASLNNVSFVMPQTALLQAHYFNIKGVYRTDFPDKPLTAFNYTGAPLTANLGTSVGTRISKVPFNSTVELVLQDTNLLTVESHPFHLHGYNFFVVGTGIGNFDPAKDPAKYNLVDPIERNTVGVPTGGWTAIRFRADNPGVWFMHCHLELHTGWGLKTAFLVEDGPGQDQSVVPPPKDLPAC

SEQ ID NO: 188087 - protein, 95 aa, Glycine max
  Clone ID: PAT_MRT3847_140857C.1.pep
QGKFMGGSLPKLFLLPPPKNLKKSRRPSGAHFTLIFLTLGRFQQQELKCGPNLKFNPLVFREPYLCRPLWGFFLKKKKQKKKKKKKKKKKKKKKK

SEQ ID NO: 188088 - protein, 70 aa, Glycine max
  Clone ID: PAT_MRT3847_140858C.1.pep
MQGGKTAGESIKDTATNIGASAKAGMEKTKATVQEKAERMTARDPVQKALATQKSRCKDEPGRSCDKQAA

SEQ ID NO: 188089 - protein, 71 aa, Glycine max
  Clone ID: PAT_MRT3847_140859C.1.pep
LTRSPISNRIVFSKSPNIARGNASRSVCPAQRVIFSPITNRTQRSRKPLTNSGRQVTLASVSGFKERHPVI

SEQ ID NO: 188090 - protein, 88 aa, Glycine max
  Clone ID: PAT_MRT3847_14085C.1.pep
IFPLPRIQTKNLTFQRRKKKPPSKKNPLIRGGNGCLPTPPKANLAQEPGAILFLWNPTKSSQGYQEIKGAGPVVVVVGTGTLTTITAT

SEQ ID NO: 188091 - protein, 194 aa, Glycine max
  unsure (1)..(194): unsure at all Xaa locations
  Clone ID: PAT_MRT3847_140860C.1.pep
HLIHFALFQNAFQITYFLWIWXLLGLRNCFHADYKLAIVKVALGLGVLCLCSYITLPLYALVTQMGSRMKKSIFDEQTSKALKKWHMAVKKKQGVKLGNSRVRALDGSSTASTIHSSGPTLHRYKTTGHSTHFTPNYDDQDDYHSDTELSPISPTANLIVRVDHDEEEAKENEHPTANNQEVPLRLTSLERSMK

SEQ ID NO: 188092 - protein, 46 aa, Glycine max
  Clone ID: PAT_MRT3847_140861C.1.pep
ARALIHNPFHFFRATTVGGDWAKDLLQDRRNLHGASSGHSGYGSFL

SEQ ID NO: 188093 - protein, 75 aa, Glycine max
  Clone ID: PAT_MRT3847_140862C.1.pep
MTCCGRNNGECVCAKEATCSCGKQPALQCTCDKAVTENKLPTSTCACGKRAEDSCTCGRSDNGSSALETDFTSKK

SEQ ID NO: 188094 - protein, 117 aa, Glycine max
  Clone ID: PAT_MRT3847_140863C.1.pep
LSENLWLYNVLYIPDFTFNIVFKLQLVCTLNCKLTFYQSYCDIHDMPLLKMIGHAKLNKGLYYLRAREIPVISCCLNTKIDSVYTNSLNSVSEIWPLRLGHLTFLMSKKKKKKNRPL

SEQ ID NO: 188095 - protein, 117 aa, Glycine max
  unsure (1)..(117): unsure at all Xaa locations
  Clone ID: PAT_MRT3847_140864C.1.pep
SECVVFIPIDVILCFQGGREHSLYFDAHVLDAQRLRHYLRGCHCIFLARYAHTQSXKFRRFRIFELCTKTLYRLQHLHALNDAAPMDQHKTEMDPVSHVNAPRATTTEPATNVNAAR

SEQ ID NO: 188096 - protein, 76 aa, Glycine max
  Clone ID: PAT_MRT3847_140865C.1.pep
KLSHGWPIFGSPLKLICIKGSDDLKRTSLSFHCKVEKLANSLDTHIRQNISSFVDAVEKVLMEQLQLDLRVGDNSG

SEQ ID NO: 188097 - protein, 107 aa, Glycine max
  unsure (1)..(107): unsure at all Xaa locations
  Clone ID: PAT_MRT3847_140866C.1.pep
MPRYDDXYGHTPLYVGHYSFWTLSRDLARAFSKHARVLGVLIKNDLNNGVSRDPRNADNAKHNLYGHYVDGSRIIVVLSESAPCGCLEYXGRRPAAGYGHCFNCVLD

SEQ ID NO: 188098 - protein, 64 aa, Glycine max
  unsure (1)..(64): unsure at all Xaa locations
  Clone ID: PAT_MRT3847_140867C.1.pep
RARRXSLVLRTALFFSFVLLPDECLISTIKGRWKHTVVSLYTSGTAVYIKLGHLKKAYICVLVY

SEQ ID NO: 188099 - protein, 35 aa, Glycine max
  Clone ID: PAT_MRT3847_140868C.1.pep
GFFFFHSWVWLGFPVSLIFFSVGHKAFLLSHLYLV

SEQ ID NO: 188100 - protein, 96 aa, Glycine max
  unsure (1)..(96): unsure at all Xaa locations
  Clone ID: PAT_MRT3847_140869C.1.pep
RASAGMGFXXYVLKXXEKXXLASEXMCTXLXXDVSPSFGYXYTPRQSPPRGKSDFPGCVSAFLEGRVNMGVKFILFAQLVPTEKGSTFGVGLTVGE

SEQ ID NO: 188101 - protein, 107 aa, Glycine max
  Clone ID: PAT_MRT3847_14086C.1.pep
PWKPRDNQSFFISKELSRRAPTSFIAFFSRALTLIQSRTNVLSLLSGPLQFPVPAGEEFPAHACVWVSIPSIHSFQPETHPVDQQYFAPPLSSACCRASAWENKQFR

SEQ ID NO: 188102 - protein, 79 aa, Glycine max
  Clone ID: PAT_MRT3847_140870C.1.pep
PAPVSGFGPHPPVPPHLSFAPRPSMFGVGQRLPPFFIQPFQPGFFPAMFYAPCNGQPPAHLPFLRSGSGTNSGFGSIGG

SEQ ID NO: 188103 - protein, 320 aa, Glycine max
  unsure (1)..(320): unsure at all Xaa locations
  Clone ID: PAT_MRT3847_140871C.1.pep
PARGETEETLADVAIRXVTVRRVQAQKAICGLESGMTGILLKEDYTDDWRDIIELSDRLHEGDMLTCKIKSIQKNRYQVFLVCKDSEMRSNRLPNTPASEPYYHEDRSCFQSDPNKAREXKELAKKQFKPRSIIHPRFQNITADEAMEFFYDKRPGERIFRGSSXNLXYLTLTLKINDGVYDQTDIIDDGXEWETITSLLRVEDVVKIGEDTFEDFDEVMDRYVDPLVAHLKSMLNYRKFRKGTKAEVDELLRMEKAEYPMRIVYSFGISHEHPGTFILTYIRSTNPHHEYIGLYPKGFRFRKKMLKDFDRLEEYFQRHS

SEQ ID NO: 188104 - protein, 74 aa, Glycine max
  Clone ID: PAT_MRT3847_140872C.1.pep
RTFYLIQCKVRQIRICCGMYLWLKFVYKNRPRRDISTYEKHIHMKKKLKESGVMINQPIGAYHCVCLGPKTPKE

SEQ ID NO: 188105 - protein, 81 aa, Glycine max
  unsure (1)..(81): unsure at all Xaa locations
  Clone ID: PAT_MRT3847_140873C.1.pep
HPPSQLNHVHTILGLTLKGYXPXLLPLQPLFSISIKMQTCAIFSLLLXISPHFQRMVXSXDKFHGGHNXVALSTSXLPLTP

SEQ ID NO: 188106 - protein, 149 aa, Glycine max
  unsure (1)..(149): unsure at all Xaa locations
  Clone ID: PAT_MRT3847_140874C.1.pep
KILAVVGDNSVYKCSIMFFPIGEGKDEHNEVYXAFYKTMPPGSPEGSQNYAHQVVVLGXPSTESGDDVPRLKDSCYLXMRKGSDNMYCLCGESNKAVQNPPSHEKLKKKGSEVLYMVXLLSRXAVGQLKKFEGKKLVFGYTIALALCES

SEQ ID NO: 188107 - protein, 74 aa, Glycine max
  Clone ID: PAT_MRT3847_140875C.1.pep
FGSRDNFIPTQPHIHYMRFFSPPNGRHTRGDGKPTLGPLALLPLTQKDSPVITTPPLCFACGFGCETKKRVRSG

SEQ ID NO: 188108 - protein, 173 aa, Glycine max
  unsure (1)..(173): unsure at all Xaa locations
  Clone ID: PAT_MRT3847_140876C.1.pep
XPYTIAQIEPHMNSRFQLLSTTTNGDFVQGKDLAMGKANVTCAAGGLTSSYTPTTLLESGLQKDRGLIAVYFGRMYYFAHNDNQPQEKDSVEGNFSFDIKFRSKLEKVCYTKAQFVSGKTFXYDINGALSHSSEDFPDKEDQXKPTKIDARVRQRIDPQYDEVQAHMETNLIK

SEQ ID NO: 188109 - protein, 69 aa, Glycine max
  Clone ID: PAT_MRT3847_140877C.1.pep
RSRDLPGAHPRRSAPRCGVYLQSTTLNIERSPRLGSASEAMAQTMMRRSRDSSPYSVGLQERPSPPVAE

SEQ ID NO: 188110 - protein, 90 aa, Glycine max
  unsure (1)..(90): unsure at all Xaa locations
  Clone ID: PAT_MRT3847_140878C.1.pep
EDFPETEDQDKPNXIDARLRQRIDPQYTEAQAQMETYLCKSPLDDVETPNGSMLDLKHSQSKIALPKNTVGGTILRXDLLANSWTEGNYR

SEQ ID NO: 188111 - protein, 489 aa, Glycine max
  Clone ID: PAT_MRT3847_140879C.1.pep
MNLYHSSTTTTTTTIFTVIFLLLAILFTLTPHKANGATCHPEEEAGLLGFKSGIRSDPSGLLSNWISGTDCCTWTGVECHYNSTRVQRLFLTGQKPETILSGTISPTLSKLKLLDGLYLINLINISGPFPNFLFQLPNLQFIYLENNNLSGRIPDNIGNLTRLDVLSLTGNRFIGPVPSSITKLTQLTQLKLGNNFLTGTVPQGIAKLVNLTYLSLEGNQLEGTIPDFFSSFTDLRILNFSYNKFSGNIPNSISSLAPKLTYLELGHNSLSGKIPDFLGKFKALDTLDLSWNKFSGTVPASFKNLTKIFNLNLSNNLLVDPFPEMNVKGIESLDLSNNSFHLGSIPKWVASSPIIFSLKLVNCGIKMRLEDFKPSETYFYDFIDLSGNEISGSAIGLVNSTEYLVGFWASGNKLKFDLGKLRFGERLKFLDLSRNWVFGKVPNSVVGLEKLNVSYNHLCGQLPKNKFPASAFVGNDCLCGSPLPPCNKA

SEQ ID NO: 188112 - protein, 262 aa, Glycine max
  Clone ID: PAT_MRT3847_14087C.1.pep
MDEENGYSGSSSSNLETTKAERSVWLMKCPLVVAKSWQAHPPSQPLAKVVLSLDPLHPEEDDPSAVQFTMEMAGSEAVNMPKTYSLNMFKDFVPMCVFSETSQGGKVAMEGKVEHKFDMKPHGENIEEYGKLCRERTNKSMIKNRQIQVIDNDRGVLMRPMPGMIGLVSSNSKDKKKTQPVKQSDTKRTRRDRGELEDIMFKLFERQPNWALKQLVQETDQPAQFLKEILNELCVYNKRGANQGTYELKPEYKKSVEDTSAE

SEQ ID NO: 188113 - protein, 621 aa, Glycine max
  Clone ID: PAT_MRT3847_140880C.1.pep
YEHLVNLRKLGGWLRKYQLKLNPTKCTFGVKSGKLLGFIVSQKGIEIDPEKVKAILEMPEPRTEKQVRGFLGRLNYIARFISQITPTCEPIFKLLRKNQAVLWNSDCPEAFEKIKQSFANPPVLMPPVTGRPIFLYMTVLDESMGYVLGQHDDSWKKEQAIYYLSKKFTACEMNYSMLERTCCALVWASHRLRQYMLSHTTWLISKMDPVKYIFEKPAFTGRIARWQVLLSEFDIVYVTKKAVKGSALADYLAQQPLQDYRPMHPEFLDEDIMALFEEKRTHEDIDKWIVCFDGASNALGHGVGAVLVSPDDQCIPFTARLGFDCTNNMAEYEACALRIQAAIHFDLRGEWDTRDPKLILYQTHILKLAEFFDDISFHHIPQEENQMADALATLASMFQLTPHGDLPYIEFRSRGKPAHCCAIEEEQDGKPWYFDIKQYVENKEYPPGISDNDKRTLRRLATEANYMIEEIHGGSFGTHANGHAMARKILRADVIGAIEPKASNDHRFILVAIDYFTKWVEAVSYTNVTRSVVVRFIKRELICRYELHRKIITDNGTNLNNKMMQEMCGDFKIQHHNSTPCRPKMNGAVEAANKNIKKIIQKMTVSYKDWHEMFPFALHGY

SEQ ID NO: 188114 - protein, 113 aa, Glycine max
  Clone ID: PAT_MRT3847_140881C.1.pep
NTGSLCYLRYRQLAASSVAYPACTQSPPPLLALPRVRTYLCINLRCPFTPPHQPLKPAQGHHLLAYAITNISTWAAVFCLGFSSALSFYLNTLCGPSGPSFLALSLSLTCYHQ

SEQ ID NO: 188115 - protein, 47 aa, Glycine max
  Clone ID: PAT_MRT3847_140882C.1.pep
GLFKACMFFRLMLRSCVFLVSGVCLKCVYGFLRTFKPCCLYCFTISC

SEQ ID NO: 188116 - protein, 75 aa, Glycine max
  unsure (1)..(75): unsure at all Xaa locations
  Clone ID: PAT_MRT3847_140883C.1.pep
MANRHSRTGQIVRRRSIDGARLTTYSSSWSQSNAPAPKDPILXVTEAALAAQSPNRANVREGAEREDHSTPVGLE

SEQ ID NO: 188117 - protein, 114 aa, Glycine max
  Clone ID: PAT_MRT3847_140884C.1.pep
PNISKHEVSKVAGVFRFPRVSCAAASADDADLDPNIAEHPPRPLLERLARELRHRLGLCLFNIDMIREYGTKDVFYVIDINYFPGYAKMPDYEHVFTDFLLSLVQSNCKKKLAT

SEQ ID NO: 188118 - protein, 98 aa, Glycine max
  Clone ID: PAT_MRT3847_140885C.1.pep
KRTLHLGHLSTMERTTTGNSVVKSLTKAPRYASLIATILRHGHANDLITPKKTTDNPSMHPCNTLRPQKKKRPTSFILFGSTLILRLDIEGIQTFFRT

SEQ ID NO: 188119 - protein, 31 aa, Glycine max
  Clone ID: PAT_MRT3847_140886C.1.pep
STSARRLQKGPSFLVYVRSRILFINVLLKQK

SEQ ID NO: 188120 - protein, 102 aa, Glycine max
  Clone ID: PAT_MRT3847_140887C.1.pep
GGAMLLADTYHTNAGNALRNIFAAPFRGRGPIQAVTFANTIGHIEPDMNSRFQLLSTTTNGDHVQGKDLSMVKENVTCAAVGLTSSYTPTPLLGSWLLKDKR

SEQ ID NO: 188121 - protein, 75 aa, Glycine max
  Clone ID: PAT_MRT3847_140888C.1.pep
MGKVQGFSLLSFGGCFDGCRDHTQGSGYGTRIWNLSDRPVELQIRVGSILKKIHTLKPGSSKRLKSKSIYKAYMP

SEQ ID NO: 188122 - protein, 155 aa, Glycine max
  unsure (1)..(155): unsure at all Xaa locations
  Clone ID: PAT_MRT3847_140889C.1.pep
GSRAVYQEIMPHAFALMTDGSGYQGAHKYLEPGRAYXRRELANKLLGRVVTLSLSMXGSSGIQRATXGVDLYQKIXMGQQLDGYVLRXVRDQNAYHVMQLCCECVPDDAGDCIVSTFLDQVGTLXLHPYGCRMIQIVLEHCEDPTTHTNAMDEIL

SEQ ID NO: 188123 - protein, 96 aa, Glycine max
  Clone ID: PAT_MRT3847_14088C.1.pep
VEVNTGKAHNDFVTNAQQFGFVTSQVACCGQGPYNGIGLCTALSNLCSNRDQYAFWDAFHPSEKANRLIVEEIMSGSKAYMNPMNLSTILALDSNT

SEQ ID NO: 188124 - protein, 45 aa, Glycine max
  Clone ID: PAT_MRT3847_140890C.1.pep
ECLVVILYIVIIMCSCMMFIIIKLFYLWKSIMQMQYMFHALWSCK

SEQ ID NO: 188125 - protein, 55 aa, Glycine max
  Clone ID: PAT_MRT3847_140891C.1.pep
PNNRAGDPLNNLWRGGKKWVYTPVRPLGYNPWGGGPRPKNFWKIPSFPFPKKNSK

SEQ ID NO: 188126 - protein, 75 aa, Glycine max
  Clone ID: PAT_MRT3847_140892C.1.pep
SLSDGAQRSSSSHSKVERPISSFCRLLSLSTRITDSPGTVYSQLSCPILLKDSHPPPRRVVADGTLTHRIVRNHR

SEQ ID NO: 188127 - protein, 80 aa, Glycine max
  Clone ID: PAT_MRT3847_140893C.1.pep
SPIAEFIKTLLCLNITMLTIIGYKRQSDTIIPGNTECDGVGILGIPRAFGGMIFILVYCTDGISGGHISPAVTFGVILGR

SEQ ID NO: 188128 - protein, 147 aa, Glycine max
  unsure (1)..(147): unsure at all Xaa locations
  Clone ID: PAT_MRT3847_140894C.1.pep
TTDNLVGRGGYSEVYKGDLSDGRTIAVKRLAKDNKDPNKEKEFLMELGVIGHVCHPNTATLVGCCIENGLYLIFNYSQNGNLATALHGKAGDPLDWPIRYKIAIGVARGLHYLHKCCKHRXIIHRDIKAFNVLLGPDYEPQDNDFGL

SEQ ID NO: 188129 - protein, 173 aa, Glycine max
  Clone ID: PAT_MRT3847_140895C.1.pep
GGGEYHTCALTDSGEVYTWGNDVCCADLLIEGRTRSQWIPQKLGGSLDGISISSVACGEWHTAIVSSCGRLFTYGDGTFGVLGHGDLRSYSSPKEVESLSGLRVRSAACGSWHTAAIVEVMFDRFRYNSASGKLFTWGDGDERRLGHVDNGSKLVPTRVTQLVDYDFVQVSCG

SEQ ID NO: 188130 - protein, 89 aa, Glycine max
  Clone ID: PAT_MRT3847_140896C.1.pep
LDLPIRLDISALPMVAIPIPGPVDVFFDQQVQCDLFYRLHRISRLPVKISVVIQGFPSSFILSCRKYASIQCSALLLGVITSIRPSLFA

SEQ ID NO: 188131 - protein, 89 aa, Glycine max
  unsure (1)..(89): unsure at all Xaa locations
  Clone ID: PAT_MRT3847_140897C.1.pep
INVYIYVNKYRDIHTHRHIKXKEKEKHTDTDIYACVDTHGGIEKSTKNDVEALGHEHMHILKXRLARAGLRSGTQKEKNDKISEKKKGT

SEQ ID NO: 188132 - protein, 153 aa, Glycine max
  Clone ID: PAT_MRT3847_140898C.1.pep
FHPEALGSGDASKPSGTYKNAIPSEDGSFVQQMQLNVAAVGIPEHSGYASQHVNASFVTGSSPDRRSIVSASVNEAPGSKPLPLLSSTQQQSATSSVGQCVTSEQPSLHCQASKELPPQSGSSGEFPLHTYQLPASAVSHFQGENPVHMPQIF

SEQ ID NO: 188133 - protein, 474 aa, Glycine max
  Clone ID: PAT_MRT3847_140899C.1.pep
MGAYCNGNVSLSPSYDVASAEDPRFCKHVHDNVHGNIYLDSLSLKFIDTEQFQRLRELKQLGFTNMVYPGAVHSRFEHSLGVYWLASQCVEKLKTYQGLELGIDRFDIQTVKLAGLLHDVGHGPFSHLFEREFLPQVISGSDWSHEQMSVDMVDYIVDEHHIDVYPQMIRRVKEMILASSEYAPSMSSSEKSFLYDIVANGRNGIDVDKFDYLLRDCRACGLGCNFEFQRLLETMRVLDDEICYRAKDYLTIHKMFATRADLYRTVYTHPKVKAIELMVVDALVHANSYLGISSNIHDPSEYWKLDDTIIKTIETTPNQELKEARELILRIRRRNLYQFCNEYPVPKDMLDNYKKVTAQDIVCSQKSGGVTLKEEDVAVCNVKIDLTRGKHNPLESIHFFKDYESDEKFTIPDDRVSHLLPTSYQDMIVKVYAKKPELVEAISEAFENFQLKTYGIKAQAHSTPQKKRRYNPFI

SEQ ID NO: 188134 - protein, 81 aa, Glycine max
  Clone ID: PAT_MRT3847_14089C.1.pep
HTRILADKVLSQNVPEPSPKLHEYLAPRQLAPLRPAHTSSPPTRCAARAPQPKSQENLLCRAIQNHHSDLLAHPSDVSLPL

SEQ ID NO: 188135 - protein, 69 aa, Glycine max
  Clone ID: PAT_MRT3847_1408C.1.pep
PNQTLPNTNHLCISQTTPHSSLCPLIRVSYNSIPPKSRDMGQENHHHKRSTGVGLPTSNARSRGGNALP

SEQ ID NO: 188136 - protein, 232 aa, Glycine max
  Clone ID: PAT_MRT3847_140900C.1.pep
MGAYCNGNVSLSPSYDVASAQDPRFCKHVHDNVHGNIYLDSLSLKFIDTEQFQRLRELKQLGFTNMVYPGAVHSRFEHSLGVYWLASQCVEKLKTYQGLELGIDRFDIQTVKLAGLLHDVGHGPFSHLFEREFLPQVISASELAHVHMSVESCIHDLFQGYESDEKFTIPDDRVSHLLPTSYQDMIVKVYAKKPELVEAISEAFENFQLKTYGIKTQAHSTPQKKRRYNSFI

SEQ ID NO: 188137 - protein, 42 aa, Glycine max
  Clone ID: PAT_MRT3847_140901C.1.pep
PMWLEMSPSHFLAQSKPIPRNDMECIIGYEKSRATFMKTLVP

SEQ ID NO: 188138 - protein, 61 aa, Glycine max
  Clone ID: PAT_MRT3847_140902C.1.pep
LTMDPTLITDSTFSPAYSLAESGPVMPHLPPNLHKHIFINHFTLTHLTLTRRKRKNCFYTT

SEQ ID NO: 188139 - protein, 64 aa, Glycine max
  Clone ID: PAT_MRT3847_140903C.1.pep
GETSVGGSLQTTKGKPVKASQLWPVPRGKKKSTRGRNRQTAFPGAWVDSLSQMARQVCHRKTGQ

SEQ ID NO: 188140 - protein, 131 aa, Glycine max
  Clone ID: PAT_MRT3847_140904C.1.pep
LSSPNPHIQIISAQGLSHSLNIMANSKLGFNFMVSAIFLSLMTFHGTFSVQGRPLKMEIKEQVTTHENIIDEIAKAAEYTATWHRHTLEFEDTKNPQYDGVTNDFQPTDPGHSPGAGHSSPHANIVSISKP

SEQ ID NO: 188141 - protein, 56 aa, Glycine max
  Clone ID: PAT_MRT3847_140905C.1.pep
FKTSSSKTKLFCQINQKPNHKIVQCLGLPNNAQLYLLVSLIRTKIIGLTHKNRTRG

SEQ ID NO: 188142 - protein, 220 aa, Glycine max
  Clone ID: PAT_MRT3847_140906C.1.pep
LFGLLAILLEYLEKMVPRIVDLRSDTVTKPSEAMRAAMASAEVDDDVLGRDPSCFRLETEMAKILGKEGALFVPSGTMANLISVLVHCDIRGSEVILGDNSHIHIYENGGIATLGGVHPTTVRNNEDGTMDIHLIEAAIRDPKGELVYPTTRLICLENTHGNSGGRCLSVEYTDRVGEVAKKHGLKLHIDGARIFNASVALGVPVDRLVQAADSVSGMSI

SEQ ID NO: 188143 - protein, 156 aa, Glycine max
  unsure (1)..(156): unsure at all Xaa locations
  Clone ID: PAT_MRT3847_140907C.1.pep
LSKLQHSGGWFKALFXHRXSHWMHMMKMVELVKPIWRDRLLIFTGQCVFFWAVLLFYLLCPEXHMAAVGHGXGAAVCSGGPHLNACEXGKVGGVAALASGIQDCRLPKGAPVKVVGPVFCGSQAHPRVVNHGAFDILHLGKXLKGLPAPCINSPVL

SEQ ID NO: 188144 - protein, 75 aa, Glycine max
  unsure (1)..(75): unsure at all Xaa locations
  Clone ID: PAT_MRT3847_140908C.1.pep
FASVFILSAYQQINEYXIYGGPSTKTLKPKFDAFTHXVHSQMGFPIPKINLKFLIAWAISLKGLGRVLFIFCNSF

SEQ ID NO: 188145 - protein, 134 aa, Glycine max
  Clone ID: PAT_MRT3847_140909C.1.pep
YYKYSLAFAYLRKGALFLATNIDSTLPNAKTLFPGAGSVGAPLVTAIGKQPLSLGKPSQAMMDAVEGKFHFDRSRTCMVGDRLNTDIQFGIEGKLGGTLAVLTGVSKKEDFLGQGDGTGVKPAYYADALGDLLG

SEQ ID NO: 188146 - protein, 160 aa, Glycine max
  Clone ID: PAT_MRT3847_14090C.1.pep
LDFWGARRVLVTGTEPLGCVPSELAQRGRNGQCVPELQQGATLFNPQLEKMLLRLNRKIGKDIFIAANTGKTHNDFVSNPQQFGFFTSQVACCGQGPYNGLGLCTALSNLCTNREQYAFWDAFHPSEKANRLIVEEIMSGFKAYMNPMNLSTILALDANT

SEQ ID NO: 188147 - protein, 76 aa, Glycine max
  Clone ID: PAT_MRT3847_140910C.1.pep
RTRGLYPLLTLLFFFLLSYFITERSSTSEEEPTTPTRLGCGDGNLSGWGKQRIILKILPIAIMRGGGVQLCSLSKF

SEQ ID NO: 188148 - protein, 67 aa, Glycine max
  unsure (1)..(67): unsure at all Xaa locations
  Clone ID: PAT_MRT3847_140911C.1.pep
KGNVISSFRCLLSDHLTSVLAYRCLVKEDEIYASSCLCXSGEPGQSSIIGQFSVAGSLHCLELDVSE

SEQ ID NO: 188149 - protein, 148 aa, Glycine max
  Clone ID: PAT_MRT3847_140912C.1.pep
GRSRVDPRVRKNTEGTIENDLCPFCQSKAESASHLFFLCHKVMPLWWEFSSWVKEPRVLHWRPMDNFIQHYSMSGLKDTNRRWKIGWIAATTSIWKLRNDIIFNNQPFVISKLVDNTIFLSWSWMRGWEKDFTVPFHQWSSAMTVAFK

SEQ ID NO: 188150 - protein, 91 aa, Glycine max
  Clone ID: PAT_MRT3847_140913C.1.pep
FRGEPAPADAGPARRATAGRDPAHSPLSRVFCAQASTMRFSYLVALAIHCSGKVDQDHTLSLHQARTNKHEAEYLGVVEDFLREEIGLNSL

SEQ ID NO: 188151 - protein, 74 aa, Glycine max
  Clone ID: PAT_MRT3847_140914C.1.pep
PSHDHEGATSLRPTPIFFHFLTAAWNLLLEPLRHTGTYTTRLGMEWDRKLHDGCYINTPDLVRSAIIVYRRWTD

SEQ ID NO: 188152 - protein, 48 aa, Glycine max
  Clone ID: PAT_MRT3847_140915C.1.pep
STWTILTRPLSASLATTYLWCQIWYMNGHSTQIHFGLFKTSDSLESFV

SEQ ID NO: 188153 - protein, 62 aa, Glycine max
  Clone ID: PAT_MRT3847_140916C.1.pep
GCEKTTEGVPINHPSPSLSRKALTPTLKPFLCTIINFTLSMFCNSSERTNKNQPPPNDNLLG

SEQ ID NO: 188154 - protein, 52 aa, Glycine max
  unsure (1)..(52): unsure at all Xaa locations
  Clone ID: PAT_MRT3847_140917C.1.pep
FWNSKGGGGGYHXKXWGRAVSSFXRXKXXNNGXCQIESSVVFATRRWFFLXT

SEQ ID NO: 188155 - protein, 83 aa, Glycine max
  unsure (1)..(83): unsure at all Xaa locations
  Clone ID: PAT_MRT3847_140918C.1.pep
TKGAPKPPSVYFSPPGTKKMDEKKVFNIVKHGFHWGGGNMFFNLDVKTPLNKKVLKTSFYGLFAREVXKFSWQVIKPFLWGKA

SEQ ID NO: 188156 - protein, 203 aa, Glycine max
  Clone ID: PAT_MRT3847_140919C.1.pep
MGSGDWFKTIISSRKSKEGRSKKLKTKIYTRKKSNGLANGMKSENLESDGVSVETIAATRIQTAFRAYKARKYLHRLRGFTKLKIQTQGSSAKKQAVTTITYLHSWSKIQAEIRARRICMVTEDRIRRKIIHSQLKLEAKIHDLEVTCKANRFSVMVFWTFSFQTDASLLITLSTTMIMCGFIGFSVLNMHLCHYFKFLCLSR

SEQ ID NO: 188157 - protein, 97 aa, Glycine max
  Clone ID: PAT_MRT3847_14091C.1.pep
IVHKSNPLGSTCKSLRSFTIIIFFLQNSFLFMFTHPIEFPNARFFFSDVRETASLDYLHLQVRVIKMIFLCSNSPIWLPLINSVTTNITRRTLGRNI

SEQ ID NO: 188158 - protein, 81 aa, Glycine max
  Clone ID: PAT_MRT3847_140920C.1.pep
STKTNRTTDSGFDALLRCVQRERERVVEDVLRGPLYLKKDLESQKVIVHTERESERNRCSRTRVLEHGCLPLYIEFHHSFL

SEQ ID NO: 188159 - protein, 117 aa, Glycine max
  unsure (1)..(117): unsure at all Xaa locations
  Clone ID: PAT_MRT3847_140921C.1.pep
DDLQIHLLFGVNIEPSSPLMHNGIVSHRGGISSSDAASIPFXTTSSYLNTTVPDSALNPGMTQTIGDSGFLHXSSKGGALNPNYXTFAMVYMSRSFGRSMDITKFISXAELRSELAR

SEQ ID NO: 188160 - protein, 81 aa, Glycine max
  unsure (1)..(81): unsure at all Xaa locations
  Clone ID: PAT_MRT3847_140922C.1.pep
YXXPXXXXNPXXXXXQGGXXTPPPPYGGLIFSVXKKKKSKWPPQTCVVLGKKFAPANSARIGKWYYTAAXAIFPLGFSHRF

SEQ ID NO: 188161 - protein, 154 aa, Glycine max
  Clone ID: PAT_MRT3847_140923C.1.pep
VGARKFGIISVATVGCCPAVSSLNGGKCVEPLNDFAVAFYLATQALLQKLSSELKGFKYSLGNSFEMTSTLLKSPSSFGLKYTQSACCGIGYLNGQGGCIKAQNANLCTNRNEFLFWDWFHPTEIASLLAAKPLFEGDKEFVTPVNLRQLAYSY

SEQ ID NO: 188162 - protein, 865 aa, Glycine max
  Clone ID: PAT_MRT3847_140924C.1.pep
DKSRSCLNLLDLVSGDTLNFPRTPRSLPRVMTDPVIMSNGDGKQSNDDDLSFFSSEHHRKIIIVSNSLPLNAKRDKISGVWCFSYDEDSIFWQLKDGLSPEADVVYVGSLKADVDANEQEKVSLQLLEEFNCVPTFIPSDLYKQFHDGFCKQQLWPLFHYMLPMYPGNRRFDRSQWQAYVSANKIFADKVMEVLNPEDDYVWVHDYHLMVLPTFLRKRCSRVRLGFFLHSPFPSSEVYKTLPVRGEILKALLNADLVGFHTFDYARHFLFCCRRMLGLEHESKRGYIGLEYFGRTIFIKILPPGIHMGRLQSTLDHPSSSNKVREIHQQYKGKKLIVGVDDMDLFKGIGLKFLAMEQLLQQYPEQQGELILIQILNPPSSSDKDVEDAKEEAYISAKRINERFGLEGYEPIIIIDRHVPFYEKAAYYALAECCIVNAVRDGLNLVPYKYTVCRQGSSKLDEALEIASDSPRVSALVVSEFIGCSPSLSGAIRVNPWDIDAVAEALNLAITMPDGEKQLRHEKHYRYVSSHDVAYWARSFEQDLVFSCKDHYNNRCWGFGFGLNFRILSLSPSFRRLSIDHIVPAYERSSCRAIFLDYDGTVVPQASIVKPPSPEVISVLNNICSDVRNTVFIVSGRGKTSLSEWFDQCENLGIAAEHGYFIRWGKHTSWQMSHADTDFAWKKIAEPVMRSYMEATDGSSVETKESALVWHYRDADPDFGSWQAMELLDHLENVLANEPVVVKKGQHIIEVKPQGITKGSVAQEVLSSLTKKGKSPDFVLCIGDDRSDEDMFESILAKPYSTTSSSAPQIFACTVGQKPSKARYYLDDTVDVMALLEGLGATSGPKSRYSTETPFEKREVCFENDV

SEQ ID NO: 188163 - protein, 169 aa, Glycine max
  unsure (1)..(169): unsure at all Xaa locations
  Clone ID: PAT_MRT3847_140925C.1.pep
MVARSCLNLLDLVSGDMLNFPQTPRSLPRVMTDPVIMSSGDGKQSNDDDSGVFSSEYRRKIIIVSNSLPLNAKRDKVSGKWCFSYDEDSIFWQLKDGLSPEADVVYVGSLKADVDANEQEKVSLQLLEEFNCVPTFISSDLYXIHDGFCKXQLWPLFXYMVAMYPGNRR

SEQ ID NO: 188164 - protein, 80 aa, Glycine max
  Clone ID: PAT_MRT3847_140926C.1.pep
NLSCLPPRPDGPCKFFFFDTNPPTIPGYWAYFQGGLGIKAAPTNDPGPWVSFTGWFGFKAAQAFGKGLEGKKGITVIHCK

SEQ ID NO: 188165 - protein, 71 aa, Glycine max
  Clone ID: PAT_MRT3847_140927C.1.pep
ELQPIEEFSTSLFNPTHFYCAQFKESGGSCSLISLIKRNPGGQSHDSNCHKYYDEIYPFNIPADYKWVDAH

SEQ ID NO: 188166 - protein, 90 aa, Glycine max
  unsure (1)..(90): unsure at all Xaa locations
  Clone ID: PAT_MRT3847_140928C.1.pep
MDLVSDRIGYIDKYEALSGSHKYADYRECYEQLKDQRTGKYTDMGNTYYELVTSFHELGWGESGRSAPRWKRXSLLESIYRREHFLASNL

SEQ ID NO: 188167 - protein, 119 aa, Glycine max
  Clone ID: PAT_MRT3847_140929C.1.pep
LCGDNKDEWVVALCVVAVWVTVSFLAIGRGPTTEVYSSEIFPLRVRAQGSSLAISVTRLMSGIVSMTFLSVSEAITFGGMFFVLCGVMVCATLFFYFFLPETKGKSLEEIEALFEDQAH

SEQ ID NO: 188168 - protein, 371 aa, Glycine max
  unsure (1)..(371): unsure at all Xaa locations
  Clone ID: PAT_MRT3847_14092C.1.pep
MAILSSFAPLTILSLVLLVVGIIVSGVEARPRAFFVFGDSLVDNGNNNYLATTARADAPPYGIDYPPSHRPTGRFSNGYNIPDLISQRLGAESTLPYLSPELRGDKLLVGANFASAGIGILNDTGVQFVNVIRMYRQLEYFKEYQNRVSAIIGASEAKNLVKQALVLITVGGNDFVNNYFLVPNSARSQQYPLPAYVKYLIXSEYQKLLQRLYDLGARRVLVTGTGPLGCVPSELAQRGRNAQCVPELQQAAALFNPQLEQMLLQLNRKIGSDVFIAANTGKAHNDFVTNPQQFGFVTSQVACCGQGPYNGLGLCTALSNLCSNREQYAFWDAFHPSEKANRLIVEEIMSGSKAYMNPMNLSTILALDANT

SEQ ID NO: 188169 - protein, 66 aa, Glycine max
  unsure (1)..(66): unsure at all Xaa locations
  Clone ID: PAT_MRT3847_140930C.1.pep
QWAQSERHTTDQHSGFQXKRXVCHDIMKPSPKNIKNSIKEESFANANLFCGKCKIAVNQKGGSFRL

SEQ ID NO: 188170 - protein, 56 aa, Glycine max
  Clone ID: PAT_MRT3847_140931C.1.pep
YHIYPNILTTFFWKHKSVYIIIDNYVFLTCLWLMIQENHALSTTLVSINTTPLLII

SEQ ID NO: 188171 - protein, 94 aa, Glycine max
  unsure (1)..(94): unsure at all Xaa locations
  Clone ID: PAT_MRT3847_140932C.1.pep
QKHGHIFKEMQKPDTPLYNIXAYLPVIKSFNFSTTLKATTSSATFPQCVFDHXNIISSNPLKAKSQATQLITNIHKKKDLKEXITPLSEFKDKL

SEQ ID NO: 188172 - protein, 78 aa, Glycine max
  Clone ID: PAT_MRT3847_140933C.1.pep
PSGSAVFMVHLGTVRVIASGFFHAWGLGTSFFFRKGHTLGGPFLCLVWTVCCSCGGFLSPSMSFSILCHTMIFIPQDR

SEQ ID NO: 188173 - protein, 33 aa, Glycine max
  Clone ID: PAT_MRT3847_140934C.1.pep
SHWFSYSILCLLSVLSPCTLEIARSKGPGPKWF

SEQ ID NO: 188174 - protein, 79 aa, Glycine max
  Clone ID: PAT_MRT3847_140935C.1.pep
DVKGIQEHLFTLCSFQKLNVCYPENWLELEEIKGFLPLIILRTKGKLALFHSLPCLSNLSLLVPFHSIIQTLLEVGLVL

SEQ ID NO: 188175 - protein, 637 aa, Glycine max
  unsure (1)..(637): unsure at all Xaa locations
  Clone ID: PAT_MRT3847_140936C.1.pep
ASQHSPRLLGSSESSFLINRRKFVIRVPPAACQVSYRTPNPSESPSRTHPGNPREPLLHSPKNHPAHLLVQPTTMPGLVSVADTPQRSPSPVPKKAASPSPSGSSKKKAPLLSDASLDNPDLGPFLLKLARDTIASGDGPAKALDFAIRASTSFERCAIQGEPSLDLAMSLHVLAAIYCSLGRFEEAVPVLERAILVPDVDRGPDHALASFSGYMQLGDTFSMLGQVDRSISCYDQGLQIQIQALGDTDPRVGETCRYLAEANVQAMQFDKAEELCKKTLEIHRAHSEPASLEEAADRRLMALICEAKGDYESALEHLVLASMAMIANGQDNEVASIDVSIGNIYMSLCRFDEAIFSYQKALTVFKSAKGENHPSVASVFVRLADLYHRTGKXRESKSYCENALRIYSKPVPGTTAEEIAGGLTEISAVFESVDEPEEALKLLNRAMKLLEDKPGQQSTIAGIEARMGVMYYMIGRYEDSRNSFESAVAKLRASGERKSAFFGVVLNQMGLACVQLFKIDEAAELFEEARGILEQECGPCHQDTLGVYSNLAATYDAMGRVGDAIEILEYVLKLREEKLGIANPDFEDEKRRLAELLKEAGKTRDRKAKSLENLIDPGSKRTKKEGAKRWPGLGFRI

SEQ ID NO: 188176 - protein, 42 aa, Glycine max
  Clone ID: PAT_MRT3847_140937C.1.pep
TMRSLWVQAIAFPWRYGISHLVARMVGLSWPPFCDVINVVVI

SEQ ID NO: 188177 - protein, 51 aa, Glycine max
  Clone ID: PAT_MRT3847_140938C.1.pep
SPHLGPFLNLFFSLTLSIGLSFSLLDRNLPGVSTAQLVCSLPLWLLWCCCC

SEQ ID NO: 188178 - protein, 194 aa, Glycine max
  unsure (1)..(194): unsure at all Xaa locations
  Clone ID: PAT_MRT3847_140939C.1.pep
PRVRTVDDDGRLQHIFWCDEXSQLNYEVFGDVVAFDATYRKNKYMFPFVIFLGVNHHNQTIVFATSLVSNETEQTYVWLLEQFKDVMKGKEPFSLITDGDLVIRNSIRRVFPRAHHRLCAWHLLWNANSHVCNPAXDELLEELLADYDVPKFEELWMHMLNQFELQENKWMKELYEKKKMWATSHIGGRFFLLE

SEQ ID NO: 188179 - protein, 479 aa, Glycine max
  Clone ID: PAT_MRT3847_14093C.1.pep
MQSDNGKLFIGGISWDTNEERLREYFSTYGEVVEAVIMKDRTTGRARGFGFVVFSDPAIAEIVIKEKHNIDGRMVEAKKAVPRDDQNILSRNSGSIHGSSGPGRTRKIFVGGLASTVTESDFKKYFDQFGTITDVVVMYDHNTQRPRGFGFITYDSEEAVDKVLLKTFHELNGKMVEVKRAVPKELSPGPSRTPLGGYNYGLTRVNSFLNGFTQGYTPSTVGGYGLRADDRFSPVAGGRSGFAPFGSGYGMSMNFEPGLNAGFGGNANFNSNLSYDRGINPYFIGSSNRFGSPVGYESGNGGNNSFFSSVTRNLWGNGGLSYGTSSANSNAYIGSGSGSAGGNTFGNTGVNWSSSAISGQQGGGNNMSQSSGNLGYGGGDNNYGLGTGGYGRSSGAIFAPTSSYSASNGGVDGAFADFYNNSSVYGDPTWRSSNSERDGSGPFGYGLGGAASDVSAKSSPGYVGGYTVNKRQPNRGIAT

SEQ ID NO: 188180 - protein, 53 aa, Glycine max
  Clone ID: PAT_MRT3847_140940C.1.pep
YLHFLSSSHRVTDSPPVVQTQIPPESQSDSIIARSDDVSRLYRRIRRIMLIGV

SEQ ID NO: 188181 - protein, 48 aa, Glycine max
  Clone ID: PAT_MRT3847_140941C.1.pep
YVAQVYHLPKCCWCTIRCAIYHTLLITRSMLLKGYNYSHQPLSVFQQE

SEQ ID NO: 188182 - protein, 58 aa, Glycine max
  unsure (1)..(58): unsure at all Xaa locations
  Clone ID: PAT_MRT3847_140942C.1.pep
LRFPWTSFNLAAVVSHYYVFSTLSLVKKGEQRKTKRGXKSVSVFVMDWNLKSTFLGXE

SEQ ID NO: 188183 - protein, 74 aa, Glycine max
  Clone ID: PAT_MRT3847_140943C.1.pep
TDPERKRVQLSVGKRKEAGPNYGKTGSLPRRGGPELIYGSLARKGFSGLGKPGPVEAANAKFYGEFWLHSILGT

SEQ ID NO: 188184 - protein, 123 aa, Glycine max
  unsure (1)..(123): unsure at all Xaa locations
  Clone ID: PAT_MRT3847_140944C.1.pep
GRVGGLTGWVGSEHEGSDPLVGGSQKYATPMMPLEEETLPKDAHNMVEEWTDCVDEEDSFEEGFLSAPLKGAKGXDNIQRTALATFEAVTTVLKRKNGKQGXRRFVIEDGEERTLIDETTDGE

SEQ ID NO: 188185 - protein, 125 aa, Glycine max
  unsure (1)..(125): unsure at all Xaa locations
  Clone ID: PAT_MRT3847_140945C.1.pep
RWLDLKVACVVAVMCLAEVAINATPMAHAAITCGQVARRHVLLSXSVFLRSCEKTVAXCCNGVNSLSSAAKTTDDRQRAYSXLKNLAYNIGQSLNADNAYSLPGKCDVYIPYKIRNFTNCTTINF

SEQ ID NO: 188186 - protein, 43 aa, Glycine max
  Clone ID: PAT_MRT3847_140946C.1.pep
TKTRLGSACCEVIMLLLNLLPHCPLVTYFVHQSIIKCSLHSPY

SEQ ID NO: 188187 - protein, 109 aa, Glycine max
  Clone ID: PAT_MRT3847_140947C.1.pep
QIVFVSYKLKNLLTSSFIQLDLGKLQIKNEFSWYGSQEEDPSAVHIDLLHAQILGINMSVGIDGRLGKPMIREGQGLDIFVRRSLRDVFRKVPTFSLEVKVTPIPNPNV

SEQ ID NO: 188188 - protein, 52 aa, Glycine max
  Clone ID: PAT_MRT3847_140948C.1.pep
SIHSVFGPVRTAAGWGCVRYSVTWCGTPVMPRDLVVLCWGFPCHFCCRPKEE

SEQ ID NO: 188189 - protein, 165 aa, Glycine max
  Clone ID: PAT_MRT3847_140949C.1.pep
LVPKEYVVFHATISSEGQYASQEYFIRHMDGCTLDTEGEKERAIKCIEAAIQRRVSEGVSLELCAKDIVGLLSEVTRILRENGLTVSRAGVSTVGEKGLNVFYVRDASGNPVDMKIIEALHKEIGQTVMVNVKRIPAAYAKAPVETRGWARTSFFFGNLLERFLT

SEQ ID NO: 188190 - protein, 61 aa, Glycine max
  Clone ID: PAT_MRT3847_14094C.1.pep
NDLCKICNVRCNIVAIRIMNGCMTLCGVDKHTQLKADPSQVESHLSPILATDKQKPNICLS

SEQ ID NO: 188191 - protein, 33 aa, Glycine max
  Clone ID: PAT_MRT3847_140950C.1.pep
VSVPLILHFIWDVIVCYKIMYHPLWFVRLRCEC

SEQ ID NO: 188192 - protein, 93 aa, Glycine max
  Clone ID: PAT_MRT3847_140951C.1.pep
MESYGSGHGSGHRPHGGGRKMEVVSGKSHGWSSTKSPDSTQASEMPWRFGDPEAKRKKRIAKYKVYGVEGRVKATLKKGLRWIKKKCSQIHGY

SEQ ID NO: 188193 - protein, 56 aa, Glycine max
  Clone ID: PAT_MRT3847_140952C.1.pep
KCMLMSNATYFCTMRPLLMTSEQLLAKCTHNANTSLLNSYNPFKFILHTTTRYVSI

SEQ ID NO: 188194 - protein, 97 aa, Glycine max
  Clone ID: PAT_MRT3847_140953C.1.pep
WRRRKPGEQVHVMYSLEELMPSVGTSVPSPSILSVLLCQSDSILQNIGKNYSDVPSSPYLREDFENPFDFCYESNIVSKIHLISISDDGKMWSWETE

SEQ ID NO: 188195 - protein, 103 aa, Glycine max
  Clone ID: PAT_MRT3847_140954C.1.pep
EKQKYSTRPTSIQILHFCRTMKEVIEMILKLVYFSHTQDLLITNFQTFRSFHFSQKVLFFDSASTAFSSPGGTIEAECKCESIKKLSHHVFNSVQFFKDIGTR

SEQ ID NO: 188196 - protein, 60 aa, Glycine max
  unsure (1)..(60): unsure at all Xaa locations
  Clone ID: PAT_MRT3847_140955C.1.pep
KGIFPFFPTLLCFLETIVYLFCVTPAGHPCDXCRHFSKISLQCCLGKNLMAEQFFFGFGF

SEQ ID NO: 188197 - protein, 238 aa, Glycine max
  Clone ID: PAT_MRT3847_140956C.1.pep
MEYTYSAGVEAETHTSSSTTPSRSKKRNNNTRRFSDEQIKSLETMFESESRLEPRKKLQLARELGLQPRQVAIWFQNKRARWKSKQLERDYGILQSNYNSLASRFEALKKENQTLLIQLQKLNHLMQKPMEPGQRCTQVEAANSMDSESENGGTMKCEAEGKPSPSMEISEHLLGVLSDDDTSIKVEDFGLEDEHGLLNFAKHVDGSLTSPEDWNAFESNDLLGQSTTDDYQWWDFWS

SEQ ID NO: 188198 - protein, 109 aa, Glycine max
  Clone ID: PAT_MRT3847_140957C.1.pep
MEYSQYTTYSAEGVEAETYTSSCTTPSRSKKRNNNNTRRFSDEQIKSLETMFESETRLEPRKKLQLARELGLQPRQVAIWFQNKRARWKSKQLERDYAILQSNYNTFAS

SEQ ID NO: 188199 - protein, 151 aa, Glycine max
  Clone ID: PAT_MRT3847_140958C.1.pep
NFRVGPRVRVRLSADLADSVAVNTTGTEPGCGAADTTASLRTRPLNLLSYSRTGWIGRLLWYLCRAKCMSFHHGSNRLKNRAYLETVIPLLKPLHDCNAAGFTGRPNVDWCESHTVETMRTNVIGTRTLADICRDHRLILMSYATGCILST

SEQ ID NO: 188200 - protein, 51 aa, Glycine max
  Clone ID: PAT_MRT3847_140959C.1.pep
FMSYIFIIKSAMCSLWRYSLIFLAEVPPMAKTVTSTPTYFTPSFSTITSIA

SEQ ID NO: 188201 - protein, 370 aa, Glycine max
  Clone ID: PAT_MRT3847_14095C.1.pep
MATLSSFAPLAILSLVLVISAIVFEAEARPRTFFVFGDSLVDNGNNNYLATTARADAPPYGIDYPPSHRPTGRFSNGYNIPDLISQRLGAEATLPYLSPELRGNKLLVGANFASAGIGILNDTGIQFINVIRMYRQLQYFKEYQNRVRAIIGASQTKSLVNQALVLITVGGNDFVNNYFLVPNSARSRQYPLPQYVKYLISEYQKLLQKLYDLGARRVLVTGTGPLGCVPSELAQRGRNGQCAAELQQAAELFNPQLEQMLLQLNRKIGKDTFIAANTGKMHNNFVTNPQQFGFITSQIACCGQGPYNGLGLCTPLSNLCPNRDQYAFWDAFHPSEKANRLIVEEIMSGSKIYMNPMNLSTILALDAITT

SEQ ID NO: 188202 - protein, 70 aa, Glycine max
  Clone ID: PAT_MRT3847_140960C.1.pep
DASSMYLVCGKNVLIDMRVLMAYVQAIRAARHYLDLEYRYLIGSSYSRSHRLDLGANNSMPIEISLKTAA

SEQ ID NO: 188203 - protein, 49 aa, Glycine max
  Clone ID: PAT_MRT3847_140961C.1.pep
AVDGIALSEDNLRGNSSRARDISYVCQNNHAIAYSGSPYIHIVPAYSWA

SEQ ID NO: 188204 - protein, 43 aa, Glycine max
  Clone ID: PAT_MRT3847_140962C.1.pep
ARLSQHVDCRNNECVDQQLPFPFIGYQAKHCFFCASCSSLYNH

SEQ ID NO: 188205 - protein, 73 aa, Glycine max
  Clone ID: PAT_MRT3847_140963C.1.pep
FGVVNMLGRGGWWMMEEERREVFFLGLERYMTLFNSWILFGFISRRDILSSLFVQLAFLFFSFFFPESLLICN

SEQ ID NO: 188206 - protein, 151 aa, Glycine max
  Clone ID: PAT_MRT3847_140964C.1.pep
FSKVMMAEMESAHWDLEAAVKFIHSNAVFTKPTHQTFAFESFVCITMFEGFNYPNFNVAEDKILHKQGAQSLYFDKFKKVKSLNPKQYLTHNPNSSFSKFLKSKYLQVVHAKMECSFFGNLNQRKVVNSGGYPESSFFVAFAEMAKRVWTL

SEQ ID NO: 188207 - protein, 78 aa, Glycine max
  Clone ID: PAT_MRT3847_140965C.1.pep
LVHLSSFLLELLIHRLVNPSRFVVQVPIVSELPGVAMSIAAIVEGSLSLPLVDLNFAGNEEGRSFGILSRKHRDRNRA

SEQ ID NO: 188208 - protein, 227 aa, Glycine max
  Clone ID: PAT_MRT3847_140966C.1.pep
MECLNSVEEVVEEIMRIHRSLPARPGIDEVEVARGLIGNVEKEDQARLQAIARQSKGVHVPQELFMVLQEMQRNFLYHQSKDQIREAVKLLDLDNVHSLFDELIQRASKCVASPSSKTSYSNANGSASSVSTSLSKNSVSVGGFDKPPLAPAATTSRKFHAEKERSELVTRDDSYVKKSKSSFYSNGYGIEPTIPSKSSILDSSLKPTTTAGQDGDKLSLIKLASLF

SEQ ID NO: 188209 - protein, 47 aa, Glycine max
  Clone ID: PAT_MRT3847_140967C.1.pep
VSRTDAHYILNSYVRPEVVHFIHDDHPVFVPQPLFEHRDHSLSKYAE

SEQ ID NO: 188210 - protein, 148 aa, Glycine max
  Clone ID: PAT_MRT3847_140968C.1.pep
RLTGRGLINHLIPNVEHLRGVGVPQGPIAHLVCNHLGVVCVEHTKFVEAVEKVVKFGFDPMKTMFVEAVKVVVGTSKEAWEKRVEVYERWGWSNEMCLCAFRRYPQCMLMSEDKVMRTMRFLVKDMGWPAEDIFRTPGVLSPNLEKTI

SEQ ID NO: 188211 - protein, 59 aa, Glycine max
  Clone ID: PAT_MRT3847_140969C.1.pep
YYPPPPLYCAAASLTVSLMHAPHQSPYNQAWGCQCWNGTRCCCRLMPNSALVLHPPRQR

SEQ ID NO: 188212 - protein, 172 aa, Glycine max
  Clone ID: PAT_MRT3847_14096C.1.pep
MESCATLPLSQLPYVYPSTLSSNKAYPFWPCKRRSSSQPTRLHCSKMFVPGFGEASPEAKAAQNLHNFFTFVAVKIVAAQLESYNHEAYEELMEFLSRHSLNDGDKFCASMFRESSRHKNLALRIMEVRSAYCKNDFEWDNMKRLAFKMVTESNTRLMTEYVLETSHVETEK

SEQ ID NO: 188213 - protein, 44 aa, Glycine max
  unsure (1)..(44): unsure at all Xaa locations
  Clone ID: PAT_MRT3847_140970C.1.pep
RXLIXSPPSCXPIXFIVALXLDRQXEPRKHPNALTLFCXLXXAG

SEQ ID NO: 188214 - protein, 78 aa, Glycine max
  Clone ID: PAT_MRT3847_140971C.1.pep
ARAGCVGGCPSGYLDLSQVRGCRCRLYRSQARVVVRSRRRAPCAGGTIQACGWHEPYSHRVSIGRKRRAEQFKVAVGV

SEQ ID NO: 188215 - protein, 108 aa, Glycine max
  unsure (1)..(108): unsure at all Xaa locations
  Clone ID: PAT_MRT3847_140972C.1.pep
GSLWGLFGATVVLVALSAVLGRITPVQQVIVAIYILPFWGLNYFINHHLLDVRYDLGGSMLIFTFAAFFGVTFSLCYTRPEDRKKDVHRVRILXYDSDLFSSPGTIML

SEQ ID NO: 188216 - protein, 58 aa, Glycine max
  Clone ID: PAT_MRT3847_140973C.1.pep
MATSLTLFKTIFVFLIIFTLLTPQATADCEAESRNSCNNKKKALPLKIIAIFTILASS

SEQ ID NO: 188217 - protein, 98 aa, Glycine max
  Clone ID: PAT_MRT3847_140974C.1.pep
TRPTNKYPLVTPSPDFDNALYNFVLFLRRLLLCVMLLFTVNFFFKNVLTQLLTTFLDLNERHFFGLRLSALINLKPTSSVTSYPPCCHYYPPPPPPPS

SEQ ID NO: 188218 - protein, 41 aa, Glycine max
  Clone ID: PAT_MRT3847_140975C.1.pep
FVVLNTVSSQGSVDECHIGPLTPVGRLALWDLYLKYAYGHA

SEQ ID NO: 188219 - protein, 60 aa, Glycine max
  Clone ID: PAT_MRT3847_140976C.1.pep
QIWRETLCSIMMHKRVMGGKRFLIQLVPHQRALIDMISIPSRYALLAEQWHQAPKIGHQQ

SEQ ID NO: 188220 - protein, 71 aa, Glycine max
  Clone ID: PAT_MRT3847_140977C.1.pep
FKSFSKLNAIGSGDFFYRFEYNSFTGAFNPDKVAMFIAVPWGWCVPWCVHIIVNYVSVPGPTLQYATQFII

SEQ ID NO: 188221 - protein, 100 aa, Glycine max
  Clone ID: PAT_MRT3847_140978C.1.pep
MAQSFSPAKRALAFSLHRRGYAVASDASPSVRGGLDSIGSRSAIEKGVTKNNSGPSGASSAWAPDPVTGYYRPINHTNEIDPVELRRMLLKHKVRSSSSS

SEQ ID NO: 188222 - protein, 110 aa, Glycine max
  Clone ID: PAT_MRT3847_140979C.1.pep
MVAEEAIIPDDKDTENLAKEKTEVSAEPPPALQDRGLNGDSKLLEENEKLREMMKKLLEAGNEQLSVISDLTVRVKDLEKKLARRRSKRVKTKQYRPAASKMSTHEMKSS

SEQ ID NO: 188223 - protein, 37 aa, Glycine max
  Clone ID: PAT_MRT3847_14097C.1.pep
SRFSAAEACLVLSPIYEPCSRCSFVTLFFSSSNSTRE

SEQ ID NO: 188224 - protein, 97 aa, Glycine max
  Clone ID: PAT_MRT3847_140980C.1.pep
MAHSFSPAKRALAFALQRRGYAAASDASPSMRGGLDSISVMEKGVTKNSSGPSGTSSAWAPDPITGYYRPINHTNEIDPVELRKMLLKHKVRSSPSS

SEQ ID NO: 188225 - protein, 72 aa, Glycine max
  Clone ID: PAT_MRT3847_140981C.1.pep
DKKLQLETNVGCNREYTYIDTRCVNTISAWNDKNITDHLITAWDDFPINYTIHCSKTADGEYPQHRPGTRMI

SEQ ID NO: 188226 - protein, 68 aa, Glycine max
  Clone ID: PAT_MRT3847_140982C.1.pep
DLCMVNHAQGCPHYGLVEGCFDPDCLIVRPPMHIMPLCHLHYTLPKSRKQCSPWIEDKISDNKICYSV

SEQ ID NO: 188227 - protein, 83 aa, Glycine max
  Clone ID: PAT_MRT3847_140983C.1.pep
CEKTTEGAILKFYHLKLNSKLILLCHIKKQSSTSKPHTLHTMSFAATIVFLAKFCSVGEFNFGTIFTQRAIENSLIRTIYLTK

SEQ ID NO: 188228 - protein, 377 aa, Glycine max
  Clone ID: PAT_MRT3847_140984C.1.pep
MSAAARLGRRVGTTAKEELRRNKGAWRDPLPAAASRAIAERIPLADLVVQVRDARIPLSSECEILRNYPPSLKQIVALNKMDLVGTSNVKAWMGYFRERNCISCGVNAHNKENIKQLLSLIQRRVSELKGADQCDNNYTATVMLVGIPNVGKSALVNALHQVGRISAAEKGKLKHATVSPEPGETKDIRSFKIGSHPNIYVLDTPAILSPKVPNVDILSKLILTGAIGDCLVRRKEVAQHFLAIHNSSEQYKKWAKLSMKDNDRLFLNGTTEQLTSSGLHMKHKNQIPTDHTQDCVVQDVRRTLFETISSFEGDVRCEDEMEALIARQFTALQEAFHVSIESEEDDAHDKVAGKLLNLFRTGRLGHYILDNLPGYIQ

SEQ ID NO: 188229 - protein, 47 aa, Glycine max
  unsure (1)..(47): unsure at all Xaa locations
  Clone ID: PAT_MRT3847_140985C.1.pep
MFXRAPKKSDNTRYYXILGVSKNASQDDLXKAYXXAAIKXHPDXGGD

SEQ ID NO: 188230 - protein, 197 aa, Glycine max
  Clone ID: PAT_MRT3847_140986C.1.pep
MGWSSATACASLSSSTPLPRLPPSRTGTPIPGSLSFSWLSSFPTLTLSASRSRSSGINPPNPSRSDDSFIRAAWTRRSRGEAAKKPNRKSWKQRTDMYMRPFLLNVFFSKRFIHAKVVHRGTSKVICVATTNAKDLRNSLPSLIDHNACRVVGNLIAQRSMEADVYAVAYEPRKDERIEGRLGIVLDTIKENGIIFA

SEQ ID NO: 188231 - protein, 74 aa, Glycine max
  Clone ID: PAT_MRT3847_140987C.1.pep
EHNGMFDAWSQPHLVAKALNCCCCCCCGTLQNPKSFNRKASTELHTVSIHISYQQRKLYQNIMIFKTNKEIFMS

SEQ ID NO: 188232 - protein, 71 aa, Glycine max
  Clone ID: PAT_MRT3847_140988C.1.pep
VEEVGDAEEAEEGEDEGAQPREEGEREEEHFRNQQHRVAYGKPIVGRVRLYALCYLRKIQSKWINFEYYII

SEQ ID NO: 188233 - protein, 68 aa, Glycine max
  Clone ID: PAT_MRT3847_140989C.1.pep
CLLRFYARSRMRGCGISRSVCPGDGLGHFLLRCSVLCRTARYFLMGLRGLVSFRLIDMATIFWCPGFS

SEQ ID NO: 188234 - protein, 35 aa, Glycine max
  Clone ID: PAT_MRT3847_14098C.1.pep
RSVSRSMWNIPEQLLIAGDRSWIIRLRSRGHWTEV

SEQ ID NO: 188235 - protein, 98 aa, Glycine max
  Clone ID: PAT_MRT3847_140990C.1.pep
SGEKTIYVFHKKGRVVEITLTASVKNWVGRVWLNQLIIPTTAQAWQRVPPGRNARVLGGSITSLPPNRLAAWALPDSTLFATGVKSHVYRCTYATVAM

SEQ ID NO: 188236 - protein, 96 aa, Glycine max
  Clone ID: PAT_MRT3847_140991C.1.pep
LHSPIIDKALSLHYYYYSRGITKMLSNTMNRNANHKSLDDTSLDSLNRIDCPLPNTLIACWLSNTDMDQNPSELIDHLVKRAFDASDDAALYSVVD

SEQ ID NO: 188237 - protein, 57 aa, Glycine max
  Clone ID: PAT_MRT3847_140992C.1.pep
MKEKEIWKMRLRGRQANSTKDNLNQHKCEVEKEIYSVDQKIKAVSREKDIMVSDSQD

SEQ ID NO: 188238 - protein, 77 aa, Glycine max
  unsure (1)..(77): unsure at all Xaa locations
  Clone ID: PAT_MRT3847_140993C.1.pep
PLHLLTSKRQLNFTAKAMQSEKPTYQVIQPNNGDTFIGSLXTPDTYRPLIAWHLSNLTAYMTALNSLLQSIDEGLAH

SEQ ID NO: 188239 - protein, 79 aa, Glycine max
  Clone ID: PAT_MRT3847_140994C.1.pep
AYASRNRPIAKNDKGGRTRGKGTGGYGDHRRFMWHYVVDLHPEEVSITEYDKLPSSTVAVLCATMLTWLSCPGSGNLQG

SEQ ID NO: 188240 - protein, 56 aa, Glycine max
  Clone ID: PAT_MRT3847_140995C.1.pep
LLKCLSELKHRAMHALLDSSLVSAKLALMYILLDTHLTTQTVCATYGMRMLKGNAA

SEQ ID NO: 188241 - protein, 45 aa, Glycine max
  unsure (1)..(45): unsure at all Xaa locations
  Clone ID: PAT_MRT3847_140996C.1.pep
LYLSPSIILXIKLKIKLFFLFYQLLLXFSLTXXFLFTQLHFXYSK

SEQ ID NO: 188242 - protein, 112 aa, Glycine max
  Clone ID: PAT_MRT3847_140997C.1.pep
SVRELSGQICQICGDEIEITVDGEPFVACHECAFPVCRPCYEYERREGIQACPQCNTRYKRIKGSPRVEGDEEEDDTDDLDNEFDYGDVDALGPQPMSESYVFWTPQYCARC

SEQ ID NO: 188243 - protein, 88 aa, Glycine max
  Clone ID: PAT_MRT3847_140998C.1.pep
AQLITCYGRAQDNWRNVYKCTTQWILNYRRALQCLTYRKSCYMSSYCLLARLLISMIYLHTVPQQAAFYHTSPQSLKFINRSCGTVAL

SEQ ID NO: 188244 - protein, 36 aa, Glycine max
  Clone ID: PAT_MRT3847_140999C.1.pep
VGYGRVINETGSLIQAGFMSGVFWESHGLIRYSGKG

SEQ ID NO: 188245 - protein, 129 aa, Glycine max
  Clone ID: PAT_MRT3847_14099C.1.pep
PRVRRRVGENTTQGVLSLFRAETQPHRWKNINGLKFLLFNLTHLLFSLSLWNSPIFGKRTNLNRPSLSFLISHGRCSTRPLHLFMMLFHTSQGIIMIVFIFIVLLPHVEYNVGPSYESLLLNKFKCHTH

SEQ ID NO: 188246 - protein, 106 aa, Glycine max
  Clone ID: PAT_MRT3847_1409C.1.pep
VSRVCVLRWWVVRHGCAEAGRRKRGRLRVLGLFRAGVEHAYWCFRTEVPACGGPLRDRYLFDSNLRMFSSWAVQGNVFLVVLETLYHSSHDQQAHKQAHKSAQRFQ

SEQ ID NO: 188247 - protein, 64 aa, Glycine max
  Clone ID: PAT_MRT3847_140C.1.pep
TFRIKFRRKTFLEYPANKRGGQNPVIQTKKAGSNPSTKNHKGLKTPGRILKKGGKEGDPWGAPF

SEQ ID NO: 188248 - protein, 162 aa, Glycine max
  Clone ID: PAT_MRT3847_141000C.1.pep
MRSHTFLRITSLLVFIGWLTVWILLPTKVYKNTWTPKLKTKLNSTYFREQGTNLLLFTFPVMLIGALSCIYLHLHEKGTEKLPSKSGGVVNRWLCFLRRPFLVMSPIGIVTSMEIIFALMFVALLIWSLSNYLHTSFGHLHMHKEGEKVWQAKFRSVSLRLG

SEQ ID NO: 188249 - protein, 41 aa, Glycine max
  Clone ID: PAT_MRT3847_141001C.1.pep
VGYLSQPLHMKNREPRINAPSDARVVIGGDELFRHYFFLEP

SEQ ID NO: 188250 - protein, 35 aa, Glycine max
  Clone ID: PAT_MRT3847_141002C.1.pep
LILLAVGPLTKGSRKVLTNQPGKEPFPRRFRSFKI

SEQ ID NO: 188251 - protein, 153 aa, Glycine max
  unsure (1)..(153): unsure at all Xaa locations
  Clone ID: PAT_MRT3847_141003C.1.pep
GVHIAVLGCTISHTLPYQVIFGLQKDRRPFAEYVGRMSXYLAYNINESQETDLMDGKSYLDIKYRSRWEXVCSTKVQCGAGEDLLIGXICGTDSHWSRIVXKSTDPEKPKKIDARLRQIIDPQYNGVQAQMETKLLKXCVDDAETPKGSMQDL

SEQ ID NO: 188252 - protein, 60 aa, Glycine max
  Clone ID: PAT_MRT3847_141004C.1.pep
TNIQNALLGTGFLHGLGLNHPYPSWNALFPCPKLSHTFIQRGLNLTYSMHYTNGYFPTQL

SEQ ID NO: 188253 - protein, 71 aa, Glycine max
  Clone ID: PAT_MRT3847_141005C.1.pep
TQFFFFIKLKHLPSLAPYNKNIFFPRKQGVKSNPTKVFIEATHFNIHFPNPNHPMAYFWVQLGAGASYLAR

SEQ ID NO: 188254 - protein, 376 aa, Glycine max
  unsure (1)..(376): unsure at all Xaa locations
  Clone ID: PAT_MRT3847_141006C.1.pep
KNNMAIALTDLGTKVKLEGDIDHGVAFYKKALYYNWHYADAMYNLGVAYGEMLKFDMAIVFYQLAFHFNPHCAEACKNLGVIYKDRDNLDKAVECYQLALGIKPNFSQSLNNLGVVYTVQGKMDAAASMIEKAIIANPTYAEAYNNLGVLYRDAGDIALAINAYEQCLKIDPDSRNAGQNRLLAMNYIDEGNDDKLFEAHRDWGRRFMRLYSQFTSWDNSKDPERPLVIGYVSPDYFTHSVSYFIEAPLLYHDYTNYKVVVYSAVVKADAKTXRFREKVLKKGGIWKDIYGXDEKRVANMVREDQVDILIELTGHTANNKLGMMACXPAPIQVTWIGYPNTTGLPXTIDYRITDSLAGNKCKQSMLKFDWCLLNCC

SEQ ID NO: 188255 - protein, 70 aa, Glycine max
  Clone ID: PAT_MRT3847_141007C.1.pep
NQIVSSTLEFATHFTIRYPIMNLLTRILHKCGSTSNNPTRCIHLIIMQPACFILILQLESLFIIGHETVG

SEQ ID NO: 188256 - protein, 36 aa, Glycine max
  Clone ID: PAT_MRT3847_141008C.1.pep
AGSFKRAGPFFLFFILYYLIFFFFFFRKGGGRVVEP

SEQ ID NO: 188257 - protein, 50 aa, Glycine max
  Clone ID: PAT_MRT3847_141009C.1.pep
FTLMNSATKILFNSSIPISTYSIHYHHCQTLISASSANLLRTNLALLLHT

SEQ ID NO: 188258 - protein, 63 aa, Glycine max
  unsure (1)..(63): unsure at all Xaa locations
  Clone ID: PAT_MRT3847_14100C.1.pep
SCENTTERSMQRKHGGXLQVATAKQGSLTLMRMASWKLMISLILNLHCQMLKILPSTTILKMG

SEQ ID NO: 188259 - protein, 78 aa, Glycine max
  Clone ID: PAT_MRT3847_141010C.1.pep
KHARVLIRIILCYVPVVHPQPFHPPLQPLLTHHAAVDLTTATPSCSLLPLATGPSAAMYICVCSVGQGPDRHVPHISF

SEQ ID NO: 188260 - protein, 98 aa, Glycine max
  unsure (1)..(98): unsure at all Xaa locations
  Clone ID: PAT_MRT3847_141011C.1.pep
TRPVEKTSVVYELTSKTPXLWPKQTSLQTHSFLSLFFNFDEQQQHPRPPQPVPYYSYPLVSRALVSQISIPIPFPLFLDTLTHTYVHIYVNTFVSYIQ

SEQ ID NO: 188261 - protein, 44 aa, Glycine max
  Clone ID: PAT_MRT3847_141012C.1.pep
TVTAYLLIMSTDLKLKYGHVMRMALEHELYNIKRGTNLLGPSLK

SEQ ID NO: 188262 - protein, 90 aa, Glycine max
  Clone ID: PAT_MRT3847_141013C.1.pep
RTITLKGALLSLLALDHVTTTVLLAPVKAISILRSIDRVPQLNNLAILEVPMIITRFIRLNPDKSTLLQHLLLRSSAIEFVSMTTLYAIR

SEQ ID NO: 188263 - protein, 73 aa, Glycine max
  unsure (1)..(73): unsure at all Xaa locations
  Clone ID: PAT_MRT3847_141014C.1.pep
XWPPXAPRTXCXAXRYGAIPXXEXXXXXXXXXXXXXXFVCGFIVQVIVVAETETKNKTLVCSLGKSDSLVNQS

SEQ ID NO: 188264 - protein, 304 aa, Glycine max
  unsure (1)..(304): unsure at all Xaa locations
  Clone ID: PAT_MRT3847_141015C.1.pep
GLVSVSSMEDIQLDISWDDVACPICLDFPHNSVLLHCSSYDKGCRAFVCDTNQLHSNCLDRFKNSCGMPSSPVSNATSTETTENSDDHEVSNGQCNLTCPLCRGEVSGWVIVDKARIHLDEKKRCCDEVRCTFMGSYLELQEHAQLEHPHARPSKIDPARQLDWENFQQSSEIIDVLSTIHSEIPRGGGXLGDYVIEYGDDDARDEFEDFPGDEGNWWTSCILYFDNFRRSRNRRRTRVSHTRRDNRRLSYDTSNSDEGSVVSMEYADYRIEEIDDEFVSTSGSSRGSSGYRRSHRRRSRFYDN

SEQ ID NO: 188265 - protein, 77 aa, Glycine max
  Clone ID: PAT_MRT3847_141016C.1.pep
LKVVQMWFPAFPRPRKLNSPEEQGPAIKSVTRCFSFSLPGVFENVSGSHGPKPLTIKLVTPFIYDACKLFKPKRIYL

SEQ ID NO: 188266 - protein, 49 aa, Glycine max
  Clone ID: PAT_MRT3847_141017C.1.pep
GEHGLKIKGLVIFFETRKEIVSCQDAFTNGCFHSKKNFIAGSSYSESIF

SEQ ID NO: 188267 - protein, 81 aa, Glycine max
  Clone ID: PAT_MRT3847_141018C.1.pep
GSFPITCDILIMILACLISSNDSDLIWDTHLFGVWSHLVFLPSNCLLSRVVHSRGVLLCLFCGDCLWYLQLSLKFNGFNSR

SEQ ID NO: 188268 - protein, 80 aa, Glycine max
  unsure (1)..(80): unsure at all Xaa locations
  Clone ID: PAT_MRT3847_141019C.1.pep
PLDHSNLHTQFHTLFTXLTNTGPRRTIKCPITHILTITHPTTIIPDPKLNINQQTYKITITHQPNTSKHASSKQHHHPKQ

SEQ ID NO: 188269 - protein, 88 aa, Glycine max
  Clone ID: PAT_MRT3847_14101C.1.pep
SLLNFHWLFFKHREYAAERFCPTAFSSSVESQICAYLSFVVRVNTICWRCSRRRSLSGVRIYTPDLRVAHGPPSWIVMIRREPCNISI

SEQ ID NO: 188270 - protein, 84 aa, Glycine max
  unsure (1)..(84): unsure at all Xaa locations
  Clone ID: PAT_MRT3847_141020C.1.pep
MAGFEAKKTESKRPPGKQSGGKNKQVKKDPALGLTHRKADNFAEWYSXVVVNTQMIEYYHISGCYIIRPWSMTICKLMQKFFDP

SEQ ID NO: 188271 - protein, 48 aa, Glycine max
  Clone ID: PAT_MRT3847_141021C.1.pep
HSVTFRDGAMPVGFSGYHLLENRAHPFHDHPPISCGVPVEWRRVDDLS

SEQ ID NO: 188272 - protein, 53 aa, Glycine max
  Clone ID: PAT_MRT3847_141022C.1.pep
HVFNNQQVVNTSLSYLNYTSFFYTKRMDPKLKDLGSLKICLLILVPVPGYLCQ

SEQ ID NO: 188273 - protein, 102 aa, Glycine max
  unsure (1)..(102): unsure at all Xaa locations
  Clone ID: PAT_MRT3847_141023C.1.pep
ASKRILEDLRNLQKYPPTSYIANPISNNIFHYQATIIDPANNPDTENIFLITMHFPPNYPFKPAEMAFMTKXCRPNVDINNSMYAYIVKNHYSATLTVSRIL

SEQ ID NO: 188274 - protein, 187 aa, Glycine max
  Clone ID: PAT_MRT3847_141024C.1.pep
MAAPLQFFFLFTLTLFSSSFSEQSHIELPSNNNNPNPNPLQKLSNLHFYYHDIRDNENPTIVQIVDTPKNVPNGFGSTFVMDDAMTEGPELSSKHVGRAQGLFGLASLQDLGMFMLTNFAFTEGAYAGSTLSMLGRNPISEQNRELPIVGGTGVFRFATGYAIANSVNSVSTPQHFVVEYNVTVWHG

SEQ ID NO: 188275 - protein, 134 aa, Glycine max
  Clone ID: PAT_MRT3847_141025C.1.pep
MGLSNFPSASEGVLPVLVINTVLSVAVLKNMFRSMLQVVLGGSAAANGSNIEHDESSSSSWERRVSITQYKSLCHSHDIGGTSMAMVECCVCLCRFEANQEVSELPCKHYFHRGCLDKWFDNKHTTCPLCRSID

SEQ ID NO: 188276 - protein, 51 aa, Glycine max
  Clone ID: PAT_MRT3847_141026C.1.pep
GIKKPALSYSLHGLALAYFFFSSIWGPKLAFNIGNSTQEKMGKSTLITCNL

SEQ ID NO: 188277 - protein, 51 aa, Glycine max
  Clone ID: PAT_MRT3847_141027C.1.pep
VHGAVPVSVHPNLDVSHYIEQLEQDYNTNYQKRPTILPNYFTPNSQRNFIP

SEQ ID NO: 188278 - protein, 133 aa, Glycine max
  Clone ID: PAT_MRT3847_141028C.1.pep
ESWLQQHDGGRRRPAEASRLQHAVKMQLVSTLRRCQVLWVEINHFISNLQYYIMFEVLEVSWSNFLAEMEVAKDLDDLLAAHEKYLHSIVEKSLLGELSQSLYKSLFVIFDLILRFRSRADRLYEGIHELQAR

SEQ ID NO: 188279 - protein, 155 aa, Glycine max
  Clone ID: PAT_MRT3847_141029C.1.pep
VTRTRNGAGSRSQLYYYQIQMAVLMIQAPFLLKGQRLTFRRTITMQMIVPTLTVSLLNAPRRWLVRVPQHQTVVLARLRRRLRYLKCKTRWTVNSLARLLQVQGALLDHSCLHYSILDIDVREKHGSHTQIGHAEADAAGLKVSPNANNMLSPIS

SEQ ID NO: 188280 - protein, 57 aa, Glycine max
  Clone ID: PAT_MRT3847_14102C.1.pep
ARICRLWSRGKVVGHVAVVLWGSASHVDQGGVEFQGSASFCVQIVKKLRCAIESSDA

SEQ ID NO: 188281 - protein, 62 aa, Glycine max
  Clone ID: PAT_MRT3847_141030C.1.pep
WEVELVAVEVSKFVILMILHDHEFDLLALWRQSVIYLECLWLVKRKTAGTGAWCENEPCPKC

SEQ ID NO: 188282 - protein, 101 aa, Glycine max
  Clone ID: PAT_MRT3847_141031C.1.pep
TQVLQYLRAQVSNNSKHFATAQSVTGTSPVYAMFQCVNYLSITDCATCLAAAATEIRNCSTGINSGARVVYDGCFLRYESIDFFQETTLAGNSMSCGNQTA

SEQ ID NO: 188283 - protein, 86 aa, Glycine max
  unsure (1)..(86): unsure at all Xaa locations
  Clone ID: PAT_MRT3847_141032C.1.pep
ATYRYTLNAALAELISSYIFMFYTSYSNIFYVKLTDSSTHIHYGLMYXYICHSFVLLNPVFDNSNIYCRLLNPIVNFSAFINNTII

SEQ ID NO: 188284 - protein, 288 aa, Glycine max
  Clone ID: PAT_MRT3847_141033C.1.pep
GFRRSIGGDGGRVGERSARAVAETLRGLAVPAQGTATLGGQIKDLVILSYEDRLVLFSRYLPQLVMESLGQEIDLNGNRVNQGISVYGNKGSTDQHAYIQQLREGVHNFFVTFIEVLRDRPPGHDWELEPGVTCGDYLFGVLQGTRSALYANNRESITVTVQEVTPRSVGALVALYERAVGIYASLVNINAYHQPGVEAGKKAAGEVLALQKRVLAVLNEASCKEPVEPLTLEEVADRCHAPEDIEMIYKIIAHMAANDRALIAEGNCGSPRSIKVFFGECNLDELYA

SEQ ID NO: 188285 - protein, 79 aa, Glycine max
  Clone ID: PAT_MRT3847_141034C.1.pep
TFIRRLLKYPQGVGEVSISYPLPLLFYIVALRIPIVKSSNKSSEVNQLCKKHFFLIRIVLKKQKAGYSLGWVKHLNFFL

SEQ ID NO: 188286 - protein, 180 aa, Glycine max
  unsure (1)..(180): unsure at all Xaa locations
  Clone ID: PAT_MRT3847_141035C.1.pep
GHDLLIEDLQRDLNASXQIEAVLQADLSVKVEIEDDLKRPLADIKHQXHDXEYELTNMRRLGSKMKKYEINVEDTLTKDVQTTVKNGHATSNGYSHRKHYHEGEILRSMEDLIALKELRAHYQRERRICKHLESHIFILKGEDIAGLDVMALEQLQYLDIEAITEIWHAKYANHNWQHHA

SEQ ID NO: 188287 - protein, 34 aa, Glycine max
  Clone ID: PAT_MRT3847_141036C.1.pep
LDPVYPHKLFQFNEIDSSFVITITQYDILTTFLI

SEQ ID NO: 188288 - protein, 57 aa, Glycine max
  Clone ID: PAT_MRT3847_141037C.1.pep
PRLLESIHSLHKRSTHSLTLSFIIHDNSSYHTALIPATHYSNICPIYFRFFDSLLPF

SEQ ID NO: 188289 - protein, 194 aa, Glycine max
  Clone ID: PAT_MRT3847_141038C.1.pep
LWGPLPSKIDRFWSLEVMNFSSNFIYGEISPSVSSLKNLKSLVLANNLFNGSVPDLGKLASLEELNLSGNKLGPEFPSLSKNLVRVILRNNSLRCRIPPQLIHVYKLELFDISSNVIFGNIPSFIFSLPSLKYLNLASNQLSGYLSLNVSCSSSLTFVDISHNLLVGTLPSCIGSNASNRTTLYYGNCLVNRSL

SEQ ID NO: 188290 - protein, 87 aa, Glycine max
  unsure (1)..(87): unsure at all Xaa locations
  Clone ID: PAT_MRT3847_141039C.1.pep
YQSIIIAINTMFEHPKEILIQHTIYRDTPTSFNXHYCSHTALTTARSKPNLSPYVXCLMPMMLLICFLXPSLDXIWHTYHYCTKCQN

SEQ ID NO: 188291 - protein, 100 aa, Glycine max
  unsure (1)..(100): unsure at all Xaa locations
  Clone ID: PAT_MRT3847_14103C.1.pep
YGGDLGCEGSKMTSNYLKRTVSYFIGFGNWADDTINFEAYPHKLAHFGQIQEKVVTKSHRRNLLQACQTXVRPAATLTAEGXSYLYAMVQDISVPTIPSD

SEQ ID NO: 188292 - protein, 36 aa, Glycine max
  Clone ID: PAT_MRT3847_141040C.1.pep
FRLSPCSDVAFHSRSPRRGIFLICSSISIIQWDISL

SEQ ID NO: 188293 - protein, 248 aa, Glycine max
  Clone ID: PAT_MRT3847_141041C.1.pep
MGGIAFGRLDDSFSLTSIKAYIAEFHSTLLFVFAGVGSAIAYGKLTSDAALDPAGLLAVAICHGFALFVAVSVGANISGGHVNPAVTFGLALGGHITILTGFFYWIAQLLGSIVACFLLNYVTGGLPTPIHSVASGVGAVEGVVTEIIITFGLVYTVYATAADPKKGSLGTIAPIAIGFIVGANILAAGPFSGGSMNPARSFGPAVVSGDFHDNWIYWVGPLIGGGLAGLIYGNVFIRSDHAPLSSEF

SEQ ID NO: 188294 - protein, 144 aa, Glycine max
  unsure (1)..(144): unsure at all Xaa locations
  Clone ID: PAT_MRT3847_141042C.1.pep
IAQLFGPIVACFLLNYVTGGLXLPIHSVALGVGAVKGVVXKIIITFGLVYTXVYATAADLKKGSLGTIAPIAIGFIVGANILAAGPFSGGSMNPARSFGPAVVSGDFHDNWIYWVGPLIGGGLAGLIYGNVFIRSDHAPLSSEF

SEQ ID NO: 188295 - protein, 247 aa, Glycine max
  Clone ID: PAT_MRT3847_141043C.1.pep
MAGIAFGSFNDSFSLASIKAYIAEFISTLLFVFAGVGSAIAYAKLTSDAALDPTGLVAVAICHGFALFVAVSVGANISGGHVNPAVTFGLALGGHITILTGLFYWIAQLLGSIVASLLLKYVTGYDTPIHSVAAGVGAVEGVVTEIIITFGLVYTVYAPAADPKKGSLGIIAPIAIGFIVGANILAAGPFSGGSMNPARSFGPAVVSGDFHDNWIYWVGPLIGGGLAGLIYGNVFIRSDHAPLSSEF

SEQ ID NO: 188296 - protein, 117 aa, Glycine max
  Clone ID: PAT_MRT3847_141044C.1.pep
MATRSKREAEGVGDGDGNKIVWNEAQQRFETQDKEAFVEYALKEKGKVMVMDLIHTFVPPSKRGLGLASHLCVAAFQHAQSHSLSIIPTCSYVSDTFLPRNPSWNSVVYTEGGKSNI

SEQ ID NO: 188297 - protein, 94 aa, Glycine max
  Clone ID: PAT_MRT3847_141045C.1.pep
MAEKKEMIPQQFDIDAKWDACIDLTVRRFVYSATAGAFGGLLFFRSPVTRWASIAFGAGVGIGSAYAECSRLFDGPPTNLPLPKVSETATQDSD

SEQ ID NO: 188298 - protein, 97 aa, Glycine max
  Clone ID: PAT_MRT3847_141046C.1.pep
MAEKKEMIPKQYDIDAKWDACIDLTVRRFVYSASAGAFGGLLFFRSPVTRWASIAFGAGVGIGSAYAECSRLFDGPPTNLPLPKVSETATQNVPDSE

SEQ ID NO: 188299 - protein, 66 aa, Glycine max
  Clone ID: PAT_MRT3847_141047C.1.pep
IKFQVVLPEGSKDPTVEIPFEVKQHLEIKYSYLDVVGRTVVVLEKRNAVPEHNTPFQVFPKPNVNK

SEQ ID NO: 188300 - protein, 82 aa, Glycine max
  Clone ID: PAT_MRT3847_141048C.1.pep
PLYSHSRNVILVNSYLFLLSTSFCYCRPALIIVVWYSCAVVCSVGFCVILQPRPGARADHYVGPWSLLVRLYGIHATCKSFR

SEQ ID NO: 188301 - protein, 49 aa, Glycine max
  unsure (1)..(49): unsure at all Xaa locations
  Clone ID: PAT_MRT3847_141049C.1.pep
VKVINLYRQALTIGKDRNXYLQPPTIKVINLCLTLKDYRYKSLTCTYML

SEQ ID NO: 188302 - protein, 61 aa, Glycine max
  Clone ID: PAT_MRT3847_14104C.1.pep
HASAHASAHASVRLREDDRREENAGGIIPKVMETIFKRVQTMKESSEFLIRVSFIEVNNNA

SEQ ID NO: 188303 - protein, 56 aa, Glycine max
  Clone ID: PAT_MRT3847_141050C.1.pep
LIQCKNRKSNYWVILIPFLNKLLYIRHDAGYAIFFLSVSFHISTTITYQKKISPRP

SEQ ID NO: 188304 - protein, 60 aa, Glycine max
  Clone ID: PAT_MRT3847_141051C.1.pep
EGTFWSRAVLWPVILEMILMCGCNLVSKKCMFQSRYLVCEQVSLIELNAMPDMYVYVKTL

SEQ ID NO: 188305 - protein, 112 aa, Glycine max
  Clone ID: PAT_MRT3847_141052C.1.pep
MEKNAEATMELAWEASMETGSLSFNEPWEEEELHHQESVLDKKLREETSMEEENEGERGVGHEIEGEKEGENLNFENERCDFSTWERNMPQEYAKGIFQEYAKGILAYSMRS

SEQ ID NO: 188306 - protein, 164 aa, Glycine max
  Clone ID: PAT_MRT3847_141053C.1.pep
EGALDPPFPRPGIQVGNAWWELYCLQHGVQPDGQMPRDMTAGGGDEALNTVFSEPGAGKHVPRTMVGDGDPTAVDEVGTGASRRLFHAEAVVGGRAGAGDYFGGGACAVGKGHCGGFGGGRVEGSGWRLGRGWRGRGGGRGRGGGGGRAGGAGGGVGGGGGAGG

SEQ ID NO: 188307 - protein, 105 aa, Glycine max
  Clone ID: PAT_MRT3847_141054C.1.pep
TARTTTWECNGYPVRAKGPSLDCLEQDGELVALEDQPSHVIHQQAHQIRSASRGTLLSSYPRMPDTTTVYSNHTPILTVARACPSRGARAEFCFSLKIDFHDVNR

SEQ ID NO: 188308 - protein, 68 aa, Glycine max
  Clone ID: PAT_MRT3847_141055C.1.pep
PRVRSLVRGTQDGNAAMRQWCLWLHGQIQRRGETLAWMAFVHHKRTLQRADTEVISYFAIFLIREHFG

SEQ ID NO: 188309 - protein, 80 aa, Glycine max
  Clone ID: PAT_MRT3847_141056C.1.pep
ELVLLNIAHTYKFILRQLPCMFPRATNAIMVPYMTHTLSNIANGSPFFTLVTSFSLFVGTYEQVYCQCSMAVKFNNPANR

SEQ ID NO: 188310 - protein, 105 aa, Glycine max
  unsure (1)..(105): unsure at all Xaa locations
  Clone ID: PAT_MRT3847_141057C.1.pep
MSRQTTSSAFTKSKTLDNKYMLGDEIGKGAYGRVYKGLDLKNGDFVAIKQVSWENIAQEDLNIIMQEIDLVKNLNHKNFVKYFGSSKTKSYLHIVLXEFVENGSL

SEQ ID NO: 188311 - protein, 136 aa, Glycine max
  unsure (1)..(136): unsure at all Xaa locations
  Clone ID: PAT_MRT3847_141058C.1.pep
VLGEGFSFLPSPPLPTPSINIILLKILRCQAAKVESAIAEGGXSRFSASSGGGGSRGAPQHYLKTAGNSEFLGKTPGQNAQKWIPARSTRRDDNCAANNSGDEKERRDAILGKVRGLLNELTAEKVGKLCLELLSG

SEQ ID NO: 188312 - protein, 77 aa, Glycine max
  Clone ID: PAT_MRT3847_141059C.1.pep
ACPTSYSYAYDDPTSIFTCSGTDYVVAFCASRKQQVCSYHSNKLHCSGSLGLKSLTGRWWIVMMITVFSVLSLWIGF

SEQ ID NO: 188313 - protein, 70 aa, Glycine max
  Clone ID: PAT_MRT3847_14105C.1.pep
LVVFLFAAGTPDIIRGALPWQAQYGLFEYALAVGTVALGFRKKLALLDNSGLNKYGCEPPHALFKAIITF

SEQ ID NO: 188314 - protein, 41 aa, Glycine max
  Clone ID: PAT_MRT3847_141060C.1.pep
NFLFFNGPNRGRDIRAQRPLFHNSYANHLWKKSELLAVNGD

SEQ ID NO: 188315 - protein, 112 aa, Glycine max
  Clone ID: PAT_MRT3847_141061C.1.pep
STLSTPSSLGYRCHTAFSSALVPLNVHDYQCLHSIGSIKPTVAFCDLCPRSPVGAFIHGIYEACSRPAFTLAYSLLYSCSVSSLAILLISKPRTHIPFPARRLEVVCLVAHG

SEQ ID NO: 188316 - protein, 159 aa, Glycine max
  Clone ID: PAT_MRT3847_141062C.1.pep
MPEVYTVKVEEGRLATDGKPSAGPVYRSIYAKDGLLEVPSDFKSPWDFFRDSVKRNPNNNMLGRRQKTESKLGSYTWLTYQDVYDAAMKMGSAIRSRGVNPGDRCGIYGSNCPEWIIAMEACNSCAVSYVPLYDTLGPNAGEFIINHAEVSIAFGQGKK

SEQ ID NO: 188317 - protein, 119 aa, Glycine max
  unsure (1)..(119): unsure at all Xaa locations
  Clone ID: PAT_MRT3847_141063C.1.pep
MPEVYTVKVEEGRLATDGKPSVGPVYRSIYAKDGLLEVPSDFKSPWDFFRDSVKRNPNNNMLGRRQKTESKLGSYTWXTYQDVYDAAMKMGSAIXSRXGVNPXRXCGIYGSNCPEWIIA

SEQ ID NO: 188318 - protein, 52 aa, Glycine max
  Clone ID: PAT_MRT3847_141064C.1.pep
VLRKLRRLRHLLLFPGIILLIIVIVLDRPHPVPRAFWTRRCSVFIVARRHPS

SEQ ID NO: 188319 - protein, 30 aa, Glycine max
  Clone ID: PAT_MRT3847_141065C.1.pep
TDIHALYFVSHEFNIKIRLFVALVSAFLSL

SEQ ID NO: 188320 - protein, 38 aa, Glycine max
  Clone ID: PAT_MRT3847_141066C.1.pep
VVHRDRGFIVEYFGRGSHVAHDVNEPQEQDLPEGNVCL

SEQ ID NO: 188321 - protein, 78 aa, Glycine max
  Clone ID: PAT_MRT3847_141067C.1.pep
MGEEEGCECRPLGFLLGLPFALLALILSLVGAVIWVLGSILSCLCPCCICCAGLANLAVSLVKLPVKVLRWFTRQIPC

SEQ ID NO: 188322 - protein, 47 aa, Glycine max
  Clone ID: PAT_MRT3847_141068C.1.pep
RCAHRSAKLHYPTNHRAILTTRYACNPLDISDRHHSISVRLALLRTL

SEQ ID NO: 188323 - protein, 78 aa, Glycine max
  Clone ID: PAT_MRT3847_141069C.1.pep
MGEEEGCECRPLGCLLGLPFALLALILSLVGAVIWALGSILSCLCPCCICCAGLANLAVSLVKLPIKVLRWFTRQIPC

SEQ ID NO: 188324 - protein, 48 aa, Glycine max
  unsure (1)..(48): unsure at all Xaa locations
  Clone ID: PAT_MRT3847_14106C.1.pep
KVEIKXFWGLSFVCLATPVFYXMPQLQSSKFKEKKKXEPFXGGTSNIT

SEQ ID NO: 188325 - protein, 117 aa, Glycine max
  unsure (1)..(117): unsure at all Xaa locations
  Clone ID: PAT_MRT3847_141070C.1.pep
SPNSYRLRPLSARDPFSPVIAPLYSCAIFAPLALPDDPEAFAELKVNDLXNGLFPMFSLLGFFVPAFVTVQGPFNILADLLADPVNNNAWAYASYFVPAYSASNSVIPFDSFYICVW

SEQ ID NO: 188326 - protein, 48 aa, Glycine max
  Clone ID: PAT_MRT3847_141071C.1.pep
KLTITFAICVWDHPNTGTDISPEYSTKKNGRRIKSSRVPSNEFLAIEV

SEQ ID NO: 188327 - protein, 131 aa, Glycine max
  unsure (1)..(131): unsure at all Xaa locations
  Clone ID: PAT_MRT3847_141072C.1.pep
SRRNIFHQLPRIRYCHASASPTHKYNNSSPLNRSNKKISNLIRSGRLSEARALFDSMKHRDTVTWDSMIXGYLPWREIARARQLFDEMPRRDVVSWNLIVSGYFSCRGSRFVEEGRRLFELMPQRDCVSWN

SEQ ID NO: 188328 - protein, 90 aa, Glycine max
  unsure (1)..(90): unsure at all Xaa locations
  Clone ID: PAT_MRT3847_141073C.1.pep
MWEXTSHSKLXKHFXXFXXSCPPXFFPRGXWGGXSXSFFLNYFFPQGGIPLHFLXXIRAWATHXLSSTXLCPRSRXPQXSLWNFXRSXXS

SEQ ID NO: 188329 - protein, 68 aa, Glycine max
  unsure (1)..(68): unsure at all Xaa locations
  Clone ID: PAT_MRT3847_141074C.1.pep
QNSLTSKPSTAFVMCVIIIIILFSPWFLQISSHGICLVLPYSSLIETXRKSRRTGGEKKSVPLLPXXD

SEQ ID NO: 188330 - protein, 62 aa, Glycine max
  Clone ID: PAT_MRT3847_141075C.1.pep
QRAKIADEMFGLALTSSWTARYKLARNTVHWLDSGFYPFKQVCAEFHCTFSELTPFNHRILR

SEQ ID NO: 188331 - protein, 53 aa, Glycine max
  Clone ID: PAT_MRT3847_141076C.1.pep
SENKIESTCEFVSNFYSYMAYGVYVFCYYLQAMINAKSEHVYLKVIIRGKKGR

SEQ ID NO: 188332 - protein, 42 aa, Glycine max
  Clone ID: PAT_MRT3847_141077C.1.pep
TCSNNFNLIFRHALYQFFCHVVKYFSYFSSKSIYRHSILYAI

SEQ ID NO: 188333 - protein, 50 aa, Glycine max
  Clone ID: PAT_MRT3847_141078C.1.pep
KRALSAFLRNLSSLSSGGIARSCPFPVIIINHLLKGSILFPNEAGIKGSL

SEQ ID NO: 188334 - protein, 61 aa, Glycine max
  Clone ID: PAT_MRT3847_141079C.1.pep
RMTKGCAGSCGPQGLQRLQRGTLQQGDHHFRNDPKLLRLQLLQGTGVDGNLLMYPTMSLRD

SEQ ID NO: 188335 - protein, 29 aa, Glycine max
  Clone ID: PAT_MRT3847_14107C.1.pep
LTRNSVMKMTVPENSDASNTHSSKVSNPS

SEQ ID NO: 188336 - protein, 141 aa, Glycine max
  Clone ID: PAT_MRT3847_141080C.1.pep
MADNTQSYWEGYKAFWSERFSFLSNYSRFINRDKPIPSWSSSDVEEFIASDPVHGPVLKSAREAVQFGLTGSALGALFTAGYAWKYSKSLHGAGLSFLAGGIFGWTFGHEIANHTLQLYRVDTLAAEAKFLDWWNKKTGGY

SEQ ID NO: 188337 - protein, 114 aa, Glycine max
  Clone ID: PAT_MRT3847_141081C.1.pep
KNLTPIKKKKKKKKGKKKKKKRDQKKKKKKKKGRPPTREPGNPEINPGPGPAGEPPSPKGSRKKAGRNQGQSGPRGEKVTRPQIHTTNNPEAKRGKPGGPKEGANPQKRRGAHR

SEQ ID NO: 188338 - protein, 90 aa, Glycine max
  Clone ID: PAT_MRT3847_141082C.1.pep
RQNFFTLQQPMKTNPTQSNSKISNWVSNLDMKDHPLAKLIASIKIIRKTNCYDPQERDRTKKSNKTIQKQHQCPLLSSSRSRTDAWVEPG

SEQ ID NO: 188339 - protein, 64 aa, Glycine max
  Clone ID: PAT_MRT3847_141083C.1.pep
GPSKRNQYLVPRKHSRRQYRFSFNRSQRWNVSLNSKHPEDAIGLHVVRISEKKFIEHVRGELVI

SEQ ID NO: 188340 - protein, 64 aa, Glycine max
  Clone ID: PAT_MRT3847_141084C.1.pep
VGLSASGLIRWLFLIVDVLYRHSLSMEYVKAKQALANSSNLMEERLPDLGAYPILLIVSALEPM

SEQ ID NO: 188341 - protein, 166 aa, Glycine max
  Clone ID: PAT_MRT3847_141085C.1.pep
MENASTSSLARTKSDQLLETVATTAEKSPPSAEGGGVLSRKSSWRMTASSPGGGGGRNTYIRKARSAQLKVEVDDVGSGVALSRAFSASLGLSFSFTGFTLPPDEIADSKPFSDDDIPEDIEAGTPKPKFQTEPTLAIYLRFTDVTYKVMMKGILPLRKTISLRGS

SEQ ID NO: 188342 - protein, 124 aa, Glycine max
  Clone ID: PAT_MRT3847_141086C.1.pep
MPENCIAPKSEHSNTTHPEEGPPEMTQTVLPIQTNKQSFPKLAMYPITLKFEELVYKVKIEQKGVCWGSTRSCKEKTILKGVTGMVCPGEIMAMLGPSGSGKTTLLTALGGRLSGKLSGKVTYN

SEQ ID NO: 188343 - protein, 173 aa, Glycine max
  Clone ID: PAT_MRT3847_141087C.1.pep
EFGTGFTWPDLQAKLNCELLNNLGNFIHRVLSFIAKPAGRGYDSVIPSIPDDVSGESHIQTKIFADKVVAYIDQYIEAMEKVKLKQGLKTAMSISSEGNAYLQEAEFWRLYKENRPLCSLVMKTAVGIVYLLACLLEPFIPSFTREVFKQLNLPAVTHVSLCQDKGDIDRVKR

SEQ ID NO: 188344 - protein, 56 aa, Glycine max
  Clone ID: PAT_MRT3847_141089C.1.pep
DLSLCLSSDLQSFLPCSFGAKDQIKECQMGRKGNWFSSVMKALSPDSKEKKEQKSS

SEQ ID NO: 188345 - protein, 43 aa, Glycine max
  unsure (1)..(43): unsure at all Xaa locations
  Clone ID: PAT_MRT3847_14108C.1.pep
MALSSSSSSTSIFALAVVTLXLIGSSSAQLSENFYDSKCAMVF

SEQ ID NO: 188346 - protein, 94 aa, Glycine max
  Clone ID: PAT_MRT3847_141091C.1.pep
KKKLQSHSQFFIQSGGASSYGLHEAKECKYPNQPLEFSRSNYPIPRVEKIVGNKNDHLQISEKKLHSFSFWPTAVHYWRVEKPLAQGHNFGSKY

SEQ ID NO: 188347 - protein, 84 aa, Glycine max
  Clone ID: PAT_MRT3847_141092C.1.pep
ERCALRLVYHINGVAKTLKMEFLNNLGLGDSYQVSLENVWPVINCNCRGSTPIKDSFLHHSMPKKKKKRAGRFKDPKFTYPAFQ

SEQ ID NO: 188348 - protein, 58 aa, Glycine max
  Clone ID: PAT_MRT3847_141093C.1.pep
SSQNVQGDQKEVLLYGSANIRHHLTDQNLVGVERGPSPFWRWPRRRREGGLRARSDEP

SEQ ID NO: 188349 - protein, 162 aa, Glycine max
  Clone ID: PAT_MRT3847_141094C.1.pep
MSTQLKRFNSMERRPRMLKDFLSENLNSCSSSGFKSLPRKPTNNNSMHSLIEMELKSSSPFQTLMNTIRSISLFTSKSPSVLSLPRSLSRKLSSSRRKTRTRRRRSHVCSSDVNITTVVKIKDIIRWKSFRDIVGGNLLFHHHPLDFMGGVHHTTCNSWSRG

SEQ ID NO: 188350 - protein, 320 aa, Glycine max
  unsure (1)..(320): unsure at all Xaa locations
  Clone ID: PAT_MRT3847_141095C.1.pep
MATSTTSSGGGGTGTQTFKPYRHLKTLKDHENAVSCVKFSNDGTLLASASLDKTLIIWSSATLTLCHRLVGHSEGISDLAWSSDSHYICSASDDHTLRIWDATGGDCVKILRGHDDVVFCVNFNPQSSYIVSGSFDETIKVWDVKTGKCVHTIKGHTMPVTSVHYNRDGTLIISASHDGSCKIWDTRTGNLLKTLIEDKAPAVSFAKFSPNGKFILAATLNDTLKLWNYGSGKFLKIYSGHVNRVYCITSTFSVTNGRYIVSGSEDXXVYIWDLQAKNMIQKLEGHTDTVISVTCHPTENKIASAGLAGDRTVRVWVQDS

SEQ ID NO: 188351 - protein, 209 aa, Glycine max
  unsure (1)..(209): unsure at all Xaa locations
  Clone ID: PAT_MRT3847_141096C.1.pep
MSLSLLRIYSSPHLLSSSLFFPTPPLSSFLPKLPNAPRTPHIVLCHRRDASSASKQRVPEDTEYEQPMRTSYDDDEEEEEEFLGSLVLPERWDVLGLGQAMVDFSGMVDDNFLKNLGLEKGTRKVVNHEERGRVLQAMDGCSYKAAAXGGSLSNTLVALARLASRSQKVPAINVXMTGSVGSDLLGGFYGEELRRANVQFLSAPXKDGT

SEQ ID NO: 188352 - protein, 202 aa, Glycine max
  Clone ID: PAT_MRT3847_141097C.1.pep
MATSATRSGGVTQTLGFKPYRHLKTLTDHENAVSCVKFSNDGTLLASASLDKTLIIWSSATLTLCHRLVGHSEGISDLAWSSDSHYICSASDDRTLRIWDATVGGGCIKILRGHDDAVFCVNFNPQSSYIVSGSFDETIKVWDVKTGKCVHTIKGHTMPVTSVHYNRDGNLIISASHDGSCKIWDTETGNLLKTLIVDKAPA

SEQ ID NO: 188353 - protein, 68 aa, Glycine max
  Clone ID: PAT_MRT3847_141098C.1.pep
EFIKMYNELLFKIFLSGIPCIITFHRQKKSGRTEEVYIEKVQMQSGWMVSLKEINFRTILCFLNDRGK

SEQ ID NO: 188354 - protein, 87 aa, Glycine max
  Clone ID: PAT_MRT3847_141099C.1.pep
KHGFFIYHLGYFCHLSSPSFPTCDRFHSKFEHCLATPLFGPPRPPLTGCFSFNTVVLVIYPLLNSKIIIFPLQAPHHGSFVVHDRSQ

SEQ ID NO: 188355 - protein, 99 aa, Glycine max
  unsure (1)..(99): unsure at all Xaa locations
  Clone ID: PAT_MRT3847_14109C.1.pep
PLYGLPKACAXGGGFPKPRVLSFPPKDFCFGEKKSFPFRGPPFFASVWKTKRGLGLGPQFGLVKGLTNLFPLGFGWGPFRKGGGFSPHGLIFGQSFVRG

SEQ ID NO: 188356 - protein, 190 aa, Glycine max
  Clone ID: PAT_MRT3847_1410C.1.pep
PRVRDSTESWRKALDAFQESYSIAVEADLPDVQLAALENMHYSNMIRFDDEDETRRLNLLIDKLKKLEEKEAEAKSMPEDFCSETDTEADECLSNSGSDDFCFPKTISRSKTLTTGEELKEDAPLMSLYQSLKGSSKKKAGHKESLANSTKQDEHSPSSLKNQTSDHQTVVGRKRVRVILSDDDDDEVEC

SEQ ID NO: 188357 - protein, 94 aa, Glycine max
  Clone ID: PAT_MRT3847_141100C.1.pep
LIPSTQPIKLYAFYAPQCCSQLICVQNTISCFIFLLTCHLPQCQYCFTCKLRRNSIITPRETLFLLEIKHAIVPGADLVAPVMGVSRRFRPTPQ

SEQ ID NO: 188358 - protein, 94 aa, Glycine max
  Clone ID: PAT_MRT3847_141101C.1.pep
LIPSTQPIKLYAFYAPQCCSQLICVQNTISCFIFLLTCHLPQCQYCFTCKLRRNSIITPRETLFLLEIKHAIVPVADLVAPVMGVSRRFRPTPQ

SEQ ID NO: 188359 - protein, 42 aa, Glycine max
  Clone ID: PAT_MRT3847_141102C.1.pep
FFFFFFLFFFFFFFFFFHPNILVAFIKISIYLSMMVDLLQGT

SEQ ID NO: 188360 - protein, 37 aa, Glycine max
  Clone ID: PAT_MRT3847_141103C.1.pep
GDQYGAFSHTSTRLHHVLSFWRVLRLDSPTCIKCSSR

SEQ ID NO: 188361 - protein, 36 aa, Glycine max
  Clone ID: PAT_MRT3847_141104C.1.pep
VMGTGLGSLCYPLARINAQAPTGTPSNWQCSTPSAP

SEQ ID NO: 188362 - protein, 171 aa, Glycine max
  unsure (1)..(171): unsure at all Xaa locations
  Clone ID: PAT_MRT3847_141105C.1.pep
MAVPTLKTGRSVSELVRIDAMRINGSGIAAATHSRGLHVHTLPELEDDYGALEPAFTGETMQLLHEKHHQTXVTNFSRALEQIQDARSRKDSCVINELQGAIEFSGRGDVSHCIIRKSLAPVREGGGEPPIGSLGWAIDTHHGSFEALAXKVNAEGAGLQGSGWVLLALDK

SEQ ID NO: 188363 - protein, 142 aa, Glycine max
  Clone ID: PAT_MRT3847_141106C.1.pep
LCEPHWQIIYLAGITAMGLFTIATMLSPTLSTSKYRTFRAMLFCSMGLFGNVPAIHACFVNWSNPRRNITLAYEIGMALSYLTGTFFYVTRIPERWKPGWFDLAGHSHQIFHALVVVGALAHYAATLQMLEWRDSFGCDTVP

SEQ ID NO: 188364 - protein, 116 aa, Glycine max
  Clone ID: PAT_MRT3847_141107C.1.pep
YLLLQFYILFISTYFISHGTSSSFLQVLRRCSYCGAFLLRLRSGLSFGAVAGAGAGAGTRCRSSWIRVELGRHDWSFRCDFIARHLQALKNNLMMDRFCVKIIDSFCTLRFIVAAL

SEQ ID NO: 188365 - protein, 106 aa, Glycine max
  Clone ID: PAT_MRT3847_141108C.1.pep
LILNFFQSVFLFFWHTMMHIVLTAPKTPTADAFYRGANQWSALISTFRKSKGIGPPEGPCPGPLRGQPRIFASVENAGNARVKEEISPGETEPKNFSSPDNNKRTL

SEQ ID NO: 188366 - protein, 468 aa, Glycine max
  unsure (1)..(468): unsure at all Xaa locations
  Clone ID: PAT_MRT3847_141109C.1.pep
MSMEYDIPDSEIQQNSRRRKKSTVWEHFTVKMDGPGCARAYCKRCQKSFAYLKDSKQSGTSHLKRHITLGICQKNQRIPCSKTDANPPKKRARAKPCFAAISFDQERCNSKIAKMIILHDYPLHIVEHQGFIDFVRALQPQFNPLSFNAIQGDCVSMYLREKQNLLNLIDGIPGRVNLTLDLWTSNQTSAYVFVRGHFVDGDWNLHHPILNVFMVPFPDSDGSLNQTIVNCLSDWHLKGRLFTLALDKFFSNETLMGKLRSLLSVNNPVILNGQLLSQNCYARMLSRLALDALSAMGETIDKVRESVKYVKSSKSNEGNFLNLRQQLQVPSTTNLLIDDQNKWDTIYHMLVAACELKEVFACFDASNPDFRTTLTMDDWKQVEKLCAYLKYLFDAANILTFQPYPTANVFFLXVSKLQVELTCAALSQDPFCSRLILPLQEKFAHFWRESXLSLAGAGALGSRFKMKN

SEQ ID NO: 188367 - protein, 39 aa, Glycine max
  Clone ID: PAT_MRT3847_14110C.1.pep
ISYRDIGDINTYYLNTWILTKGVVSKLTQFATPHLIDYL

SEQ ID NO: 188368 - protein, 45 aa, Glycine max
  Clone ID: PAT_MRT3847_141110C.1.pep
TNTYCYILTDRTTEHCFGAQKVLDVCIRKKDWTEVHCSVSKVLNS

SEQ ID NO: 188369 - protein, 84 aa, Glycine max
  Clone ID: PAT_MRT3847_141111C.1.pep
ERVLLSKANTEPPTIAPSCACPTVLTLWPWSRRNITTPRYLQSMAPGADHERCTQQPCNHDPHDDTIRCQNARGHHIHLSLSSE

SEQ ID NO: 188370 - protein, 88 aa, Glycine max
  Clone ID: PAT_MRT3847_141112C.1.pep
WAFSLFSFGMGSWLFLAGPIRSPTIYFFKPGRGMFFVGKKQSFWVIGANTCYRALIDMFFFSKNPPFFFKAIPGPIFMCRGVFPTFFF

SEQ ID NO: 188371 - protein, 74 aa, Glycine max
  Clone ID: PAT_MRT3847_141113C.1.pep
LLYPVHVDVHIMPKIFVAVKTEAPFPYDRVNLAFQASQRMLQPMAEGGEKYITMFKPAPITPTAPPRASPCNAN

SEQ ID NO: 188372 - protein, 112 aa, Glycine max
  Clone ID: PAT_MRT3847_141114C.1.pep
KCFELMDPLEKSFRANKVVKSLPIGLLGVHQNAKVRPTISPVVLMLGSAPISLPKPTHPAFFVGPMNPNNEEFSFKSSKNISITNVPKFPILPREKGLFLVLEEKGFIKLKS

SEQ ID NO: 188373 - protein, 69 aa, Glycine max
  Clone ID: PAT_MRT3847_141115C.1.pep
VSLQELRNSALLRSAVRVTHVNCDDSFDTAFHVDVLSVGSMDGTQSLLIFSGAPPGHWSQIRQLVTFHK

SEQ ID NO: 188374 - protein, 36 aa, Glycine max
  Clone ID: PAT_MRT3847_141116C.1.pep
GFQKGLKGDTKTFRFWKNAHPSIDGLQNAESEPGEE

SEQ ID NO: 188375 - protein, 64 aa, Glycine max
  unsure (1)..(64): unsure at all Xaa locations
  Clone ID: PAT_MRT3847_141117C.1.pep
PIPFATHPSSHPSXKKKILKPKPKQIYQRNFKKLVHPIXLTINQSKYNSINNTTNHPHYKKQQT

SEQ ID NO: 188376 - protein, 63 aa, Glycine max
  Clone ID: PAT_MRT3847_141118C.1.pep
KAIYKEMKSNGVSPDFITYACLLEVYTIAHCNEEALGVYKEMKGNGMDMTADLYNPLVAMGAD

SEQ ID NO: 188377 - protein, 63 aa, Glycine max
  Clone ID: PAT_MRT3847_141119C.1.pep
KVPLAVTINYVLDSKNDMYCKICNTSSVLWLHIQLHNMKIGRKSFHPAWPIIELFFFQCVPQI

SEQ ID NO: 188378 - protein, 114 aa, Glycine max
  unsure (1)..(114): unsure at all Xaa locations
  Clone ID: PAT_MRT3847_14111C.1.pep
MAARLIAAVSTGTHNASPCLGQCNGATANALREVVSKRSGNYTMGNDVWDGLGIVKYVGPFSAQTPSHLSREFPLDVGXDTAGLPAYPESFEMNMALDVIHGRWATLGALGSIT

SEQ ID NO: 188379 - protein, 198 aa, Glycine max
  Clone ID: PAT_MRT3847_141120C.1.pep
MPERKPVVGLSWQPQLPIPSSLKATDGSHTKPQTEASSTVRKSSSELVDGLFVPPNDPKKLNKLLRKQAKDTAGKNWFNMPAQTITPELQKDLKLLKLRAALDPKRHYKKGDSKSKTLPKYFQVGTVVDSPLDFFSGRLTKKERKATLADELLFDQNLAAYRKRKVREIEEQNRPAGNEKWKIKGSNSRKRAKERRIY

SEQ ID NO: 188380 - protein, 57 aa, Glycine max
  Clone ID: PAT_MRT3847_141121C.1.pep
ASRSKRSGRSDGASLPERRTTTRRRRRRRVHKLEKEGVTSIYRLQITKTQQHKPDAW

SEQ ID NO: 188381 - protein, 281 aa, Glycine max
  Clone ID: PAT_MRT3847_141122C.1.pep
PPRPVNGGLNFTRGHRDLLATAPCDSAWVWRNLLEFSSMEVIRVLTAAITVAVLAAALPADAGDDNRVFAPCSDTRVQRSDGFTFGIAFAPKDKFFYNNNNSVQLSPCDTRLSLSNANSQISVFRPKVDEISLLTVNSSSFVADSYGYMVAFAGHRYAARSPPAFVANGTYTVTSFTLVLEFKRGRLQNLYWKRDGCSKCSSNSKAVCLNNQDCALQTSTCKSHGGTVDCSIGIQLAFSGTDRHLAVLNSWYEVKNLRQYSLYGLYSNLRDSLTSQYDKFF

SEQ ID NO: 188382 - protein, 49 aa, Glycine max
  Clone ID: PAT_MRT3847_141123C.1.pep
LSQPLPHIVPDSRGTSSLHRAAAAGLRAEPVGAEALAPEVQPLSLGPLG

SEQ ID NO: 188383 - protein, 62 aa, Glycine max
  Clone ID: PAT_MRT3847_141124C.1.pep
VTIHSMNPTDNHPKCQNFSLTAANIKQTKNSKLLFSFLFFSLAGILEEITVRLPLQLIHLVK

SEQ ID NO: 188384 - protein, 93 aa, Glycine max
  Clone ID: PAT_MRT3847_141125C.1.pep
APLGTVVPKKTAPLLGLAPVKKENKLGFPRVLGAFKGYFPAQFSGSQKKWGGGVLGSQSPAKPRAKGRLFSKEAAPRMPLGGFFFFCCFGKAI

SEQ ID NO: 188385 - protein, 972 aa, Glycine max
  Clone ID: PAT_MRT3847_141126C.1.pep
AIELKCPICWSLLDSAVSLTCNHLFCNSCIFKSMKSASACPVCKIPFTRREVRPAPHMDNLVSIYINMEASSGVNTFVTQNAPVTNLSDGEKECEGDADSGKMKAGGTHEGRPQEKKTRKKKKSKKTVQASMESSGSEFAKPSFPAKKRVHVPQNLLSETPMKNLKIGDSLSEINKEKEGTEKVPVKESERPLQSEKDNPVLSPFFWLREEKDGEMLSQQTDEDQIIDGSTPNPPSFSDLKDSDDEVHSNVDLMDEVQNKSSVNLFDSEMFEWTQRPCSPELFSSPSKMQVMDTYEDDENQEELVASSLELEANLPRVDADNMEFENPKEGNRMADEVPPSVCFPQIRSSDDLNGIKKSTKRRKARDKNKQEQIGEPKNSFDEMYVEVTQEQALDNSSNLGKGSRRGKRVCFNTSPIPTPITACTVPNTLGVQSIGEMKKAKNIDILPCKQENEKHYAQEISGKSQMKISGKQNINQMNEFAGSDSSIFSLRTDNNGKDSNRRQCKSKYSRKTIYCSKELETTKRQKLSSACISKTKNNEEILPIESIHQGPDVRDLNDTSKEKHCPLMDQTVLRKCENLVKNYQCVFCLSSEESEASGPMVHYLDGRPVTSDYEGGSKVTHCHRNCTEWAPNVYFDGDYSINLDAEISRSRRIKCSFCGLKGAALGCYEKSCRRSFHVPCAKWTSQCRWDTQNFVMLCPLHASSMLPCEGSGSQKRSKKCTASEGKAHGPKHDTTSQSRAAYLSYKKIVLCCSALSVQEREVVSEFERVSKATVLKNWDSSVTHVIASTDENGACRRTLKVLLGILEGKWILNIEWIKACMKEMGPIDEECYEINVDIHGIRDGPRLGRLRVLNKQPKLFYGYKFYFMGDFIPSYKGYLQNLVVAAGGIILHRKPVSGDQESTSPDMHTYQTLIIYSLELPDKCKPSKKDTICSQRRHDAEVLASSTGSNVASNTWVLNSIAACKLQYLAQ

SEQ ID NO: 188386 - protein, 42 aa, Glycine max
  unsure (1)..(42): unsure at all Xaa locations
  Clone ID: PAT_MRT3847_141127C.1.pep
FVXKTCLHIWEXKSGIRAIXXKSQKGDKYXXVKLFMXFEFIN

SEQ ID NO: 188387 - protein, 108 aa, Glycine max
  unsure (1)..(108): unsure at all Xaa locations
  Clone ID: PAT_MRT3847_141128C.1.pep
YEIMHGLLSIGEPAILNGLYIFFFIKKLMLKVILQMEKSNVKLMLTLARWKLVELIQVVRGRRKPGRRRSLRRRFXPAWKAQVLTLQSLLFQQRXGYRCRXISFQKLQ

SEQ ID NO: 188388 - protein, 43 aa, Glycine max
  Clone ID: PAT_MRT3847_141129C.1.pep
KSACHNNLGSYARVMKTLQVIIKAIRRNHFDWAHSIACSSYSR

SEQ ID NO: 188389 - protein, 90 aa, Glycine max
  unsure (1)..(90): unsure at all Xaa locations
  Clone ID: PAT_MRT3847_14112C.1.pep
XKGSXXRNXXXXKXXXSXKAXVXKSXSXXXSTXSVGITILIQNPEKRRKVTNSRWIVPXFSFXPKIRKPKKPDHNNTPRPRSKTFYELTX

SEQ ID NO: 188390 - protein, 188 aa, Glycine max
  Clone ID: PAT_MRT3847_141130C.1.pep
MKFCKTYQQYMQGHGHNKLPSVGFKNLKKIIKSCRRAYTQPTCPDHCPVCDGTFFPSLLNEMSDIVGCFNQRAQQLLELHLASGFRKYFLMLKGKLHKNHTALIEEGKDLVIYALINSIAIRKILKKYDKIHYSKQGQLFKSKVQTMHKEILQSPWLCELIALHINLRETKSKPREASALFDGFISIH

SEQ ID NO: 188391 - protein, 145 aa, Glycine max
  Clone ID: PAT_MRT3847_141131C.1.pep
EALEFHITEKRAKVHLELGAAFYDWNFDQVGEDVKLLWTEEEEKKFEDAIRSNPPSPETYFWDHIFRAFPTKSRADLVSYYFNVFILERRGYQNRHTPDDINSDDDDDEAGPLRNVFGHQTPNSGYQAPNPRGSILLTPKKSQTK

SEQ ID NO: 188392 - protein, 75 aa, Glycine max
  Clone ID: PAT_MRT3847_141132C.1.pep
MQIFVKTLTGKTITLEVESFDTIDNVKAKIQDKEGIPPDQQRFIFAGKQLENGRTLADYNIQKESTLPLVFRLRG

SEQ ID NO: 188393 - protein, 90 aa, Glycine max
  unsure (1)..(90): unsure at all Xaa locations
  Clone ID: PAT_MRT3847_141133C.1.pep
XXQLXPXRAPXXXXPXTLTXLXSPIWPAQKXXXXSIXASAKNCXPXFXSPXXTTCILTPLXDNXVASLLSXKENYVPLQIPDLYCKISSQ

SEQ ID NO: 188394 - protein, 55 aa, Glycine max
  unsure (1)..(55): unsure at all Xaa locations
  Clone ID: PAT_MRT3847_141134C.1.pep
LNSRLIXTSILHEEXKXFLTXXQLNKLMGXNSXALDXXFAXXYNMISACSSPCLP

SEQ ID NO: 188395 - protein, 181 aa, Glycine max
  Clone ID: PAT_MRT3847_141135C.1.pep
WPVRFNILNAIARGLLYLHQDSRLRIIHRDLKASNILLDNNMNPKISDFGLARMCGSDQVERSTSIIVGTHGYMAPEYAIDGLFSTKSDVFSFGVLLLEIISGKKNRAFTYQDNDHNLIDHAWRLWKEGTPERLTDAHLANSCNISEVIRCIQISLLCLQHHTDDRPNMTSGVVMLTTEDA

SEQ ID NO: 188396 - protein, 127 aa, Glycine max
  Clone ID: PAT_MRT3847_141136C.1.pep
QLGTWYPVVLIAMYNVVDFIARYIPLVPWLKLESRKGLLIAVFSRFLLIPAFYFTAKYGDQGWMILLTSFLGLTNGYLTVCVLTVAPRGYKGPEQNALGNLLVLCLLSGIFAGAVLDWLWIIGKGTF

SEQ ID NO: 188397 - protein, 84 aa, Glycine max
  Clone ID: PAT_MRT3847_141137C.1.pep
NKPSGAHPNKKSPGVNQRGGLPLGGEKKNPQKKKTPRPGGWVPRTPKNRGKTPFLQIPNRIKKNGGLKKKEGLYFSPKGLWGKK

SEQ ID NO: 188398 - protein, 53 aa, Glycine max
  Clone ID: PAT_MRT3847_141138C.1.pep
IDAPGKNSNETSSETSKLGVDCSSEQAHGEVNVHVHDDEVLHGSATVLLAEVN

SEQ ID NO: 188399 - protein, 38 aa, Glycine max
  Clone ID: PAT_MRT3847_141139C.1.pep
ILLACFGFILILIYVNRCPCILNMSNYTCHITLHTCKV

SEQ ID NO: 188400 - protein, 38 aa, Glycine max
  Clone ID: PAT_MRT3847_14113C.1.pep
PSNKINVFRCIRACVRIIAPYSLGILAKLILKYVQYIR

SEQ ID NO: 188401 - protein, 42 aa, Glycine max
  Clone ID: PAT_MRT3847_141140C.1.pep
DVLLPFSCTMISKIMNSYSILFTGSLSGLLQLTLSGNCRLRD

SEQ ID NO: 188402 - protein, 45 aa, Glycine max
  Clone ID: PAT_MRT3847_141141C.1.pep
EILACSHIISAICYHHGHQYSKSLRSLLITLYKVCNILQDFMKPL

SEQ ID NO: 188403 - protein, 122 aa, Glycine max
  Clone ID: PAT_MRT3847_141142C.1.pep
VRHGFSRALVVQVRPPIFISVSLYESPLDSWARSPAVVFGPDLFFWSPPWRFSTGGCPPFAFVHVFLYPLIWLLAMEFPSCSELVLLLLGGCSGFLLRPRPSFFGPTLPLCLVICRLEYKLY

SEQ ID NO: 188404 - protein, 49 aa, Glycine max
  Clone ID: PAT_MRT3847_141143C.1.pep
INIIYSIMGKVATQKITCFLYKFQDPASRKKEGINRDPEASGNFFFKIG

SEQ ID NO: 188405 - protein, 55 aa, Glycine max
  Clone ID: PAT_MRT3847_141144C.1.pep
PITYITSMLTVTHSVSLSTKTSKYNTTTAMSSPRYRSICMYTTTHSLDETNTYAN

SEQ ID NO: 188406 - protein, 84 aa, Glycine max
  unsure (1)..(84): unsure at all Xaa locations
  Clone ID: PAT_MRT3847_141145C.1.pep
MAAKTWSCLGLFLSLNLVFFSLGAACGDTPCPGSNPKARPNPNPNPNPIPSGCWPXEALILGGCASELNLVSSTLGEPPITPCW

SEQ ID NO: 188407 - protein, 174 aa, Glycine max
  unsure (1)..(174): unsure at all Xaa locations
  Clone ID: PAT_MRT3847_141146C.1.pep
IHFEPVPCLSLNKAFQLSCLLGSLFRVEYEVEYCSTGQKNGNGCLDGKRTSLPIQKGGYVIYGVAHQHSCGTGSTLYGQDGRVICSSIPSYGKGKEAGNEADYIVGMSTCYPRPGSVKIIDGETLTLESNYSSSXEHTGVMGLFFLLEPEQLPDQHFRHTSRSSFFMNINSIFH

SEQ ID NO: 188408 - protein, 52 aa, Glycine max
  Clone ID: PAT_MRT3847_141147C.1.pep
PGGTYPKAAPIIYLKGNITLSHPSKPNTNARLSTKLITMSKDYHSIASSYHK

SEQ ID NO: 188409 - protein, 138 aa, Glycine max
  Clone ID: PAT_MRT3847_141148C.1.pep
FRVNVIVPQGCEVEVFKMAFLVSSTFTLPLRVRASPLNKNKQGVHQHQLYYPLDRFLSKATIPAAQKILGTCSSNKRILSMKGSCHRCLMSCTIFLHETYSYNLDVDYCTEIVISGYWVGPDADDGWGFVEAVINQMN

SEQ ID NO: 188410 - protein, 59 aa, Glycine max
  Clone ID: PAT_MRT3847_141149C.1.pep
LFNRFFSHFISIYHDLVPSLYFVSASANFLPQDFTFVAFVLFICFCGFVSIHALFGCDD

SEQ ID NO: 188411 - protein, 324 aa, Glycine max
  Clone ID: PAT_MRT3847_14114C.1.pep
MAASLRCRNSSSLLLTRFLNSASRRWLQTVAYEELRAHPDKPYTSTAVFIHGFLGSSRNWRSFSRNLLASLSNSSPSSNWRTVMLDMRNHGKSTERELNPPHNMENAAKDLVDLVKAEGWSWPEVVIGHSMGGKVALQFAESCSRGDYALFIPPEEQLWVLDSVPGEVNQENSNDEVRNVLATLQSLPSQFSSRKWLVGHLMGLGYPKALSDWIGTNLKKVGDHETWIFDIQNAKEMFDSYCEKSYWNLLENPPKGMEIVIVRAEKSDRWDEDAIDRIQKLASQGGSDSPGKASFFVLPNAGHWVHVDNPKGLLEIVASKIASL

SEQ ID NO: 188412 - protein, 69 aa, Glycine max
  Clone ID: PAT_MRT3847_141150C.1.pep
LNVGFLFGLIAYMITIYASYSCFYLGFLRHMNYEVVFLAATGVLRFYLIYLYFNLYVAWFGCGNPRPTS

SEQ ID NO: 188413 - protein, 66 aa, Glycine max
  Clone ID: PAT_MRT3847_141151C.1.pep
PGGGPCRDKYTLLGVTLVAITGTNRQTLDARYSTDHPYNLHHLTPVGAKSDLVRPSADDYADLHYG

SEQ ID NO: 188414 - protein, 78 aa, Glycine max
  Clone ID: PAT_MRT3847_141152C.1.pep
LRFNEYTGISSMEAFLWFSKYVLSMLLLRQIIVIISVYVRISAIQTSKANVAVQWIFHVISCVRWHDWNWYRPDTYAW

SEQ ID NO: 188415 - protein, 75 aa, Glycine max
  Clone ID: PAT_MRT3847_141153C.1.pep
TGKKTNKPSKVSFHFIEFEYVYQLRNVELHKTKVDIADIFLFNRQHIDTTQVFEKTESCSDTKHCDPTEENGDKA

SEQ ID NO: 188416 - protein, 120 aa, Glycine max
  unsure (1)..(120): unsure at all Xaa locations
  Clone ID: PAT_MRT3847_141154C.1.pep
VLRPLLGSLFKPSHSLCVRILLSNFNSLSLSLSLSLSVSITTYQAKKFSPASMVPHKSQGGVEQLANAGVLGGSAVKIAAAPAGGSGKQRLRWTSDLHDRFVDAITQLGGPDXWGISFQY

SEQ ID NO: 188417 - protein, 238 aa, Glycine max
  Clone ID: PAT_MRT3847_141155C.1.pep
MYHTKKFSPASMVPHKSQGGAEQLANAGVLGGSAVKTAAPSGGSGKQRLRWTSDLHDRFVDAITQLGGPDRATPKGVLRVMGVPGLTIYHVKSHLQKYRLAKYLPESPADDPKDEKRMSGDSISGADSSSGMPINDALRMQMEVQKRLHEQLEVQKQLQMRIEAQGKYLQKIIEEQQKLGSTLTTSETLPLSHDKQNHPQSEASGSSDALASTVSPLKKQRIDDGSKEGFTASQVRKE

SEQ ID NO: 188418 - protein, 86 aa, Glycine max
  unsure (1)..(86): unsure at all Xaa locations
  Clone ID: PAT_MRT3847_141156C.1.pep
AGLLFQLLCLAEKVVGCQSSLGDGCLSLPVCFTPTXTSXLSFTSSSIFFSSHQFHTHNNSFKSNSFPVLPSKKPLSFSCRGLPSFS

SEQ ID NO: 188419 - protein, 75 aa, Glycine max
  unsure (1)..(75): unsure at all Xaa locations
  Clone ID: PAT_MRT3847_141157C.1.pep
RDVLILEWHQLKMAKLLLSTCYPELDKRQLXHAFRWTLLVLNFFSETVXYLVFSSCQCSVISPFSSHFQPFCGXC

SEQ ID NO: 188420 - protein, 211 aa, Glycine max
  unsure (1)..(211): unsure at all Xaa locations
  Clone ID: PAT_MRT3847_141158C.1.pep
MGNALGGKKTTKVMKIDGETFKLKTPIKVCDVLKDHPGLVLLESEAVKHYGIRAKPLEAHKELMPKRLYFLVELPKEVTVAPRRVRSGINMSAKERXLESLVLGLPVGLQISPIMKPPSSQRKGXESGGGVRLKMRLPKAEVERLMRGCETEAEAAEKIMGLCMANNGGGVEARNGDGEVKGRVGESTKAREKRVSFMPINEGGSPIAVAS

SEQ ID NO: 188421 - protein, 207 aa, Glycine max
  Clone ID: PAT_MRT3847_141159C.1.pep
MGNALGGKKTTKVMKIDGETFKLKTPIKVCDVLKNHPGLVLLESEAVKHYGIRAKPLEAHKELMPKRFYFLVELPKEATVAPRRVRSGINMSAKDRLESLVLARRSASDLTIMKPACRVSPAENGGLRLKMRLPKAEVERLMRGCETEAEAAEKIMGLCMVNGGNGNGEVKHWKGVRARAGESTKAREKRVSFMPIIEGGSPIAVAS

SEQ ID NO: 188422 - protein, 95 aa, Glycine max
  unsure (1)..(95): unsure at all Xaa locations
  Clone ID: PAT_MRT3847_14115C.1.pep
MANHLLVKDSSLVVMCMVLGMPLADAALSCPXVQFIVAPCLGDXRGLGGGVFPLPCCNGVRTLNNXAKTTPDRQGACRCLKHYLQKSLSKIICKQ

SEQ ID NO: 188423 - protein, 46 aa, Glycine max
  Clone ID: PAT_MRT3847_141160C.1.pep
HIYDYLIRRWRRISISLRGFSHMRFAVFLLSMVNWGKVEGGSGRVR

SEQ ID NO: 188424 - protein, 59 aa, Glycine max
  Clone ID: PAT_MRT3847_141161C.1.pep
CVRFALFLDGVDGPHTDSVCHRHILPHRVLLLSHDVVCLLNTMLSHLLKSIYSTALTRD

SEQ ID NO: 188425 - protein, 51 aa, Glycine max
  unsure (1)..(51): unsure at all Xaa locations
  Clone ID: PAT_MRT3847_141162C.1.pep
KFPGGPSRPXGCQKTSEGAPDGVWVNVAKDGFFSLKPPDRYHASYMDIQMH

SEQ ID NO: 188426 - protein, 49 aa, Glycine max
  Clone ID: PAT_MRT3847_141163C.1.pep
NDVSYVIILGELGEKAGPVRLSGDIKILSQIVDLLSADWYSLRLENYRW

SEQ ID NO: 188427 - protein, 84 aa, Glycine max
  Clone ID: PAT_MRT3847_141164C.1.pep
SEMFKPLFDMGSPSKRHINHGQLNLCNARFFPLHAVKNRGQHFEFRSRHPKDTPSHARAYNLIFYYSAPPFFFFFFFFFFFFFF

SEQ ID NO: 188428 - protein, 80 aa, Glycine max
  Clone ID: PAT_MRT3847_141165C.1.pep
KRCPAWVFEGGCFFLLLGKDRFLVFGVPWGGCRPFSKPFFFFGNIFKGFFVSLWAHSTVGGWVFCLVIAGGGLVFIHKIG

SEQ ID NO: 188429 - protein, 64 aa, Glycine max
  Clone ID: PAT_MRT3847_141166C.1.pep
YFIRQEFYKLRVKLVALSDSERSERSVMFQRQVRRQSHKSTFVSARMAKGVSNTLTTRHYAAAI

SEQ ID NO: 188430 - protein, 43 aa, Glycine max
  Clone ID: PAT_MRT3847_141167C.1.pep
RVCYLKKRETIKYGGGDQKNKIKMQKKSNTTTKNIKGNKPKKT

SEQ ID NO: 188431 - protein, 113 aa, Glycine max
  Clone ID: PAT_MRT3847_141168C.1.pep
RWAQRPSIIALAAADSPRNQARMASMTKKSNTSIGGRTMVGRSKRDVVVRGSLHDIGSPRDRAQWCVCVGPWSEEEEEVGICLSLTLEKRVSEFSMVKMCYGVSLNLEPNCQL

SEQ ID NO: 188432 - protein, 39 aa, Glycine max
  Clone ID: PAT_MRT3847_141169C.1.pep
APYQERRPHLRGDFKASGGTTTEESLRHTKHDGTHRLLG

SEQ ID NO: 188433 - protein, 112 aa, Glycine max
  Clone ID: PAT_MRT3847_14116C.1.pep
RHIGCLNFLPIGYHFSRIPARNLKASYPGHTLKIRKCTGHTDIAPYTREVIITWPKSLLFLFGELTRQDHVPLIGHACYIQRNPFLTAQHKYKPFSTFPVIWVTVFCEAIPI

SEQ ID NO: 188434 - protein, 79 aa, Glycine max
  Clone ID: PAT_MRT3847_141170C.1.pep
TRRLRPLTPVHAVTQEIREPRESGAVTTFEVGPYQVPQLWTFFSTIHHNQQQSHRANVVTVLVLSDHPSHLHDPEGNAT

SEQ ID NO: 188435 - protein, 336 aa, Glycine max
  Clone ID: PAT_MRT3847_141171C.1.pep
MHSTKSSTSDNININIKSKDKEIHRCYHNYRKKRKRPCQDAVAPTTEDDNCCTKAAAASHGFISVIGRRRVMEDAVKVVTGLVAAEQHCGGYDFFAVYDGHGGTLVANACRDRLHLLLAEEVVRGTAADKGLDWCQVMCSCFMKMDKGVGEENDDGGGNTMGSTAAVVVVGKEEIVVAYCGDSRAVLCRGGVAVPLSRDHKPDRPDEKERIEAAGGMVINWNGNRVLGVLATSRSIGDHCMKPFVISQPETKVYARKESDEFVVVASDGLWDVVSNKFVCEVVRGCLHGKMRRNFKEDSIISYATEAAALLAKLAMARGSKDNISVIVIQLNTTTT

SEQ ID NO: 188436 - protein, 122 aa, Glycine max
  Clone ID: PAT_MRT3847_141172C.1.pep
LEVTGLDLDCGPFLAVHAQNAVEKGLLSEADVNGALVNTLTVQMRLGMFDGEPSAHAYGKLGPKDVCKPAHQELALEAARQGIVLLKNTGPVLPLSPQRHHTVAVIGPNSKATVTMIGNYAG

SEQ ID NO: 188437 - protein, 178 aa, Glycine max
  unsure (1)..(178): unsure at all Xaa locations
  Clone ID: PAT_MRT3847_141173C.1.pep
MIIRKXKLHXGGGVFDYSKWRDLKVGDVVRVEKDEFFPADLILLASNYDDAICYVETMNLDGETNLKLKQALEATSKLHEDSNFQNFRAVIKCEDPNANLYTFVGSMELEDQQYPLAPQQLLLRDSKLRNTDFVYGVVIFTGHDTKVMQNATDPPSKRSXIEKRMDKIIYCLFFDLFN

SEQ ID NO: 188438 - protein, 38 aa, Glycine max
  unsure (1)..(38): unsure at all Xaa locations
  Clone ID: PAT_MRT3847_141174C.1.pep
AXTXCRXFXXCSILXTAAGIAIQQQASPSPAGGQXIXS

SEQ ID NO: 188439 - protein, 83 aa, Glycine max
  unsure (1)..(83): unsure at all Xaa locations
  Clone ID: PAT_MRT3847_141175C.1.pep
VKSPRENKEGKLLDWVFSYDLINIKCKVNRSGFTKVACFIDYRPEEFSXXGRGKKQPPWRVFSLKELHSATNNFNYDNKLGER

SEQ ID NO: 188440 - protein, 146 aa, Glycine max
  unsure (1)..(146): unsure at all Xaa locations
  Clone ID: PAT_MRT3847_141176C.1.pep
LGAICGAGVVKGFEGKTKYGALNGGANFVAPGYTKDDGLGANIIDTFILIYTIFSTTNAKHSTRDSHIPILTPLPIKFTIFLIHLTTIPITKTNINPTHSLNTTIIFNKDLNXINTKSSXIKPFMHTALTTLYHRVIIKTIAFNFK

SEQ ID NO: 188441 - protein, 61 aa, Glycine max
  Clone ID: PAT_MRT3847_141177C.1.pep
LFTFLVSLFINFLFFFVLSKQMFPFSFYMFHQLIGQSKLSCAHNATLELSALAQLDQVTAC

SEQ ID NO: 188442 - protein, 147 aa, Glycine max
  Clone ID: PAT_MRT3847_141178C.1.pep
MASRIASRLLRRSNATLGLIRSYSHARNYSSQLSALIPIGSQSSKLTRRRYYLPNASPYQLWSRSFASDNGDQVEAVVPFMGESVTDGTLANFLKKPGDRVEADEPIAQIETDKVTIDVASPEAGVIEKFIASEGDTVTPGTKVAII

SEQ ID NO: 188443 - protein, 134 aa, Glycine max
  unsure (1)..(134): unsure at all Xaa locations
  Clone ID: PAT_MRT3847_141179C.1.pep
FCLKTLFSIIAPGHLSITNPSLLFYLLLLFSTVLSSPSSLHSLLSSTLTTIHNTFTVADLTSTLNEDNRTDLVYPLNINIHSLTLQHSHILESLSPNVRKRLEVLIHIHCQHDELQAKFFEKRTXLDAKYQKLY

SEQ ID NO: 188444 - protein, 74 aa, Glycine max
  Clone ID: PAT_MRT3847_14117C.1.pep
VFFIRVGGEGNNITFIPSSFSYFCFMIIFFIFSQTSSFHHHYIHCFLIFTYFLHIPHSFLFFLSIFLFLTLFSF

SEQ ID NO: 188445 - protein, 52 aa, Glycine max
  Clone ID: PAT_MRT3847_141180C.1.pep
LFHLIRYIIKDLVTRQTIPPISCPRNNDIRSLILFSFIKWNNHQLIQSVHLL

SEQ ID NO: 188446 - protein, 72 aa, Glycine max
  Clone ID: PAT_MRT3847_141181C.1.pep
LFSLLRVRHEDQGTHHTNLSPKNYHIRYYHRTIRLHTIHRTTHKNSHKKIIVYHHFQHHPTIDTLHLNAPQL

SEQ ID NO: 188447 - protein, 66 aa, Glycine max
  Clone ID: PAT_MRT3847_141182C.1.pep
EWYLSISYPNTTHSFDFTSVLIHSLHGHTTILDSRLLRVAFSLHIQQGPEFIRMTILLAGRYLSDR

SEQ ID NO: 188448 - protein, 324 aa, Glycine max
  Clone ID: PAT_MRT3847_141183C.1.pep
METPKFAFLSLLLLLTSATISSAQLSSGFYKNTCPNVEQLVRSAVAQKFQQTFVTAPATLRLFFHDCFVRGCDASILLANGRPEKDHPDQISLAGDGFDTVIKAKAAVDRDPKCRNKVSCADILALATRDVVNLAGGPFYNVELGRRDGRISTIASVQRHLPHPEFNLDQLNSMFNFNGLSQTDMIALSGAHTIGFSHCNKFSNRIYNFSPRNRIDPTLNLQYAFQLRQMCPLRVDPRIAINMDPVTPQKFDNQYFKNLQQGKGLFTSDQVLFTDARSKATVNLFASNEGAFQKAFVDAVTKLGRVGVKTGNQGEIRFDCTRPN

SEQ ID NO: 188449 - protein, 49 aa, Glycine max
  Clone ID: PAT_MRT3847_141184C.1.pep
WNCLKIKIVSSNKSNLFPNQMLLVPKKKPKLLFLIVIEYMKSLYNMHIF

SEQ ID NO: 188450 - protein, 79 aa, Glycine max
  Clone ID: PAT_MRT3847_141185C.1.pep
AVNPKQCHLSAPLSPSLHILLATPSSPLSVMPAPPMTLISSFFGYDSFGDCRFFPWKLPFTPSRTLARALQRGSSKVDS

SEQ ID NO: 188451 - protein, 75 aa, Glycine max
  unsure (1)..(75): unsure at all Xaa locations
  Clone ID: PAT_MRT3847_141186C.1.pep
TVGAFKVKRKGGKENPIFGRVPAQNFFAITKAPLQRGGAQKIFXFPESRGPGEFFPGLKLPPEIPVKVRGNVFSN

SEQ ID NO: 188452 - protein, 49 aa, Glycine max
  Clone ID: PAT_MRT3847_141187C.1.pep
TDIMSMVALSRCQFDQTRLSADLLARRHMLMVGNRSRRPTLGFIETNVT

SEQ ID NO: 188453 - protein, 105 aa, Glycine max
  unsure (1)..(105): unsure at all Xaa locations
  Clone ID: PAT_MRT3847_141188C.1.pep
ERAGCLLQECAEKANVHPPESIVDDQVYLPPGPSGDNSHELYWAGGGGWGSPEGGSVCENTLEARXLEVVFREKRPESRERVFGQSGREEFELDVLGPLGLYPEA

SEQ ID NO: 188454 - protein, 56 aa, Glycine max
  Clone ID: PAT_MRT3847_141189C.1.pep
NVREEKDQFEEANNQIVEHLKLKENELPKSISSCSVKANVIKSRINFIEDTWVLQR

SEQ ID NO: 188455 - protein, 76 aa, Glycine max
  Clone ID: PAT_MRT3847_14118C.1.pep
NGINPDGTLSRFVNISKPISRAIGLNPGIPCHLDPSGNPQLNEIYFCAHKYPSSFFECPIPPSRKSWPDMVEFPIF

SEQ ID NO: 188456 - protein, 114 aa, Glycine max
  Clone ID: PAT_MRT3847_141190C.1.pep
MDLGQYDVSEEREIGSGGLMKKLLTDCLGWDTLEFGDHVLVHYTGTLLDGTKFDSSRDRDLLLRLTLGHWHVTKGWDEGITTMKKCENAHFTVPTELAYGESGSHSTITTNATL

SEQ ID NO: 188457 - protein, 73 aa, Glycine max
  Clone ID: PAT_MRT3847_141191C.1.pep
LPIPPPQGNLYKKGGGKKLFLKIHQFLGYGKPGGAHSKIFNFKTQYCGPGKEIKILGPHSKNNQGKGFWTFFP

SEQ ID NO: 188458 - protein, 118 aa, Glycine max
  unsure (1)..(118): unsure at all Xaa locations
  Clone ID: PAT_MRT3847_141192C.1.pep
KKFCDKGWECMGWSIYGGHLTITDYTHTYQLENLFSMRNSPVAHSAGFCDYHSGIAAAALIXPQWFGTTGNTTMQMMEMAALLGHVSSSTSXGYRVTTAGPAHXGLRYYHEMTPMQSY

SEQ ID NO: 188459 - protein, 60 aa, Glycine max
  Clone ID: PAT_MRT3847_141193C.1.pep
NLQVIIKFPTLLSSRTYTSVFLCVRMRPRVFSQASSVLVSYAQLVLEIRFPDSQPSTDIP

SEQ ID NO: 188460 - protein, 90 aa, Glycine max
  Clone ID: PAT_MRT3847_141194C.1.pep
HASADAWGTEGEVFGRAPDSLWPAAWLENPAGSNLINEANAFNLAVSDSGSLWILFSGLTEACEVSIGFYFIFLTYSSVSRLGVHKVRNV

SEQ ID NO: 188461 - protein, 88 aa, Glycine max
  unsure (1)..(88): unsure at all Xaa locations
  Clone ID: PAT_MRT3847_141195C.1.pep
GVKFGEAVWFKAGAQIFSEGGLDYLGNPHLIHAQSILAICAVQVVLMALVECYRAAGRPLGEXLDPIYPGAAYDAVGLADDPDAFAEL

SEQ ID NO: 188462 - protein, 51 aa, Glycine max
  Clone ID: PAT_MRT3847_141196C.1.pep
GSARPNKVFFGLSKKLLVRGILLSGLRPNTIWLTQPRTDRTHDVCYIQLLC

SEQ ID NO: 188463 - protein, 93 aa, Glycine max
  Clone ID: PAT_MRT3847_141197C.1.pep
ARPNVLFRDPLNKTAVGQRRSELRRQHAAPLVEDPPPVTWIGINVRFCRVRGADYLVVSAAIAHFCHVDDPLANRSLQRQNCIYPATSIPLRN

SEQ ID NO: 188464 - protein, 34 aa, Glycine max
  Clone ID: PAT_MRT3847_141198C.1.pep
MLELVINKILQLSHITTHVLSIIFDDSQGTDHCH

SEQ ID NO: 188465 - protein, 147 aa, Glycine max
  Clone ID: PAT_MRT3847_141199C.1.pep
YISGMLRICLRMSPCYHELLGSGLFTGLACLPLLSYNPFRFGSHISTALCPNPPKMPQGLVSDAALSNHDWEEMDMVLSSAEDGAGSVADLYIVCCALTLLVKDCLPMGRTVYILEKRYIYLLGLSGHVDKAATWPVGMSRCCPTCS

SEQ ID NO: 188466 - protein, 81 aa, Glycine max
  Clone ID: PAT_MRT3847_14119C.1.pep
DNTIAMGSRMSKTDDNLLSMAHTFNKGDEGYKLLGHNYGKGDESIISMGHPFDKGHGYFISMGQSYDKGDVHFISLSTSDT

SEQ ID NO: 188467 - protein, 70 aa, Glycine max
  unsure (1)..(70): unsure at all Xaa locations
  Clone ID: PAT_MRT3847_1411C.1.pep
RQKGHKXIIIIRYLSVMCYYYVSALSDFHVFNFXNSILVFILVYVFHKFDVAGIHLDCRCPKVYXDLFDF

SEQ ID NO: 188468 - protein, 129 aa, Glycine max
  unsure (1)..(129): unsure at all Xaa locations
  Clone ID: PAT_MRT3847_141200C.1.pep
HPLYATSTIRQPTIYGEXHYDTAQVDKQTLQPHKELKDIIAILGLDELSKEDRLTVSRARRIERCLSQPMYQSKVLTAMPRKYASLSNTMRGNKVSLTLQIDRLPEQTIYQASNIDESTCIATNLEKDS

SEQ ID NO: 188469 - protein, 69 aa, Glycine max
  Clone ID: PAT_MRT3847_141201C.1.pep
LYPAPVSTPLVRTQPPHRLGGGRGPSHLSRRALSRILLRGKHRLLASTVEVDIARALPRPLRRCGSQNP

SEQ ID NO: 188470 - protein, 98 aa, Glycine max
  unsure (1)..(98): unsure at all Xaa locations
  Clone ID: PAT_MRT3847_141202C.1.pep
LMGAVDGYRLAGGPLGAVSGPFYFRVGFGPLCFVVDPFVFAVFNATELFCGGLVLFSVSGFFFSXXATVTGPLAYLADYLAAPFSPLVCAYACLFGPG

SEQ ID NO: 188471 - protein, 83 aa, Glycine max
  Clone ID: PAT_MRT3847_141203C.1.pep
QEHYFIGNASKLQRSKLKLQKIKQQHLMGVIYILGKTNNSCDSLEKERRISWLGRRVFLSQIFLKHVFWGPDGQGMKMKTPFF

SEQ ID NO: 188472 - protein, 87 aa, Glycine max
  unsure (1)..(87): unsure at all Xaa locations
  Clone ID: PAT_MRT3847_141204C.1.pep
LSLTFXXQFFXRNFKHFSLCSIFAAXSLNGVFLFVCFCTIATFSKADFSCPFAAGXLXSATXIPRCESCYFRXWLNLHQLVXSCPII

SEQ ID NO: 188473 - protein, 69 aa, Glycine max
  Clone ID: PAT_MRT3847_141205C.1.pep
AICERRPTIRRNGVCIWQNFGLLPSAINVFFKFINLVFKRHFHLRRRNRSKTIKRIFEYKNYVMIIFYD

SEQ ID NO: 188474 - protein, 52 aa, Glycine max
  Clone ID: PAT_MRT3847_141206C.1.pep
RCIQRVRMLRQWYECAYLVTPQNVDEYLLRKLSPQMCHRDSRSVMSPQSSFT

SEQ ID NO: 188475 - protein, 114 aa, Glycine max
  Clone ID: PAT_MRT3847_141207C.1.pep
YDDMKYASGKFDDSEFRNAFSRAFIGVREYDRGYSRSPSRDSRRSYSRSLSRSPCISRSRSHSRSRSHSYSDRSRSWSPKPKHSRRSISLSRSQSRSRSPNSSPRPHQSPSSSS

SEQ ID NO: 188476 - protein, 102 aa, Glycine max
  Clone ID: PAT_MRT3847_141208C.1.pep
SSPQTFWVGLSASWICLLRAPIPRWGSLLAPCPSSISFCLKGWPLPPSKENGISEKVVHLGSSHQNEGERERVSKADTRTATQGCVFGRLNDNVARRVTAQT

SEQ ID NO: 188477 - protein, 67 aa, Glycine max
  Clone ID: PAT_MRT3847_141209C.1.pep
PKLFRPQDPLVISIVGKVSFHETPPTGARRREAVFNSGDKPPSFKHSSGVKTRGHQKSSSKDPVGVG

SEQ ID NO: 188478 - protein, 69 aa, Glycine max
  Clone ID: PAT_MRT3847_14120C.1.pep
DIRTIEAQLKPVVGYKSLCAVFRTDLLIGWTVYWILAYFLTRARSFFLISGTCFHETSRKHSTGIQAEP

SEQ ID NO: 188479 - protein, 56 aa, Glycine max
  Clone ID: PAT_MRT3847_141210C.1.pep
PEYKQVYSLIFSKGGLSQKKSFFFSKSLNVLVESRSYRRPVVSDLVLESSVSARSQ

SEQ ID NO: 188480 - protein, 133 aa, Glycine max
  Clone ID: PAT_MRT3847_141211C.1.pep
RLREDDRREVHVFMMADRYHKQSDEIYKKLDAVVSQLKLVGYTPSTSGILVDLEEEEKKEVVLWHSEKLALCYGLIGERKESCIRIVKNLRICEDCHSFMKLVSKVHRIEIVMRDRTRFHHFNGGICSCRDYW

SEQ ID NO: 188481 - protein, 141 aa, Glycine max
  Clone ID: PAT_MRT3847_141212C.1.pep
VAVCGMVGSGKSSFLLCILGEIPKISGEVRVCGSSAYVSQSAWIQSGTIEENILFGSPMDKAKYKNVLHACSLKKDLELFSHGDLTIIGDRGINLSGGQKQRVQLARALYQDADIYLLDDPFGAVDAHTGSDFVREYILTA

SEQ ID NO: 188482 - protein, 138 aa, Glycine max
  unsure (1)..(138): unsure at all Xaa locations
  Clone ID: PAT_MRT3847_141213C.1.pep
GFHGGSTSVFVLKQGDQVIIGNVRDSRAVLCRRAPDNRLIPVQLTVDLTPDIPREAMRIFAVEKDPTVNRVWMPKRDCPGLAMARAFRNFCLKDYGVASVPDVSXRKLPKKDKCVVLASDGVSIFISGCQLRILDFDS

SEQ ID NO: 188483 - protein, 157 aa, Glycine max
  Clone ID: PAT_MRT3847_141214C.1.pep
KINPNLNRASPEPLSNPNNPVIHYPPEAAYSVNPVPVFYVSGPVRPGTVPVPMQTPYPYVQQPYHAVMPPQVPIGYHHLVPGSGQLYGAGVRHVTPLQPYSPSAAVVHDGLKQHGYHPVPNTGSVPVHPVTPMTGSVEPQRGGAEFVAGRGPSSLNN

SEQ ID NO: 188484 - protein, 39 aa, Glycine max
  Clone ID: PAT_MRT3847_141215C.1.pep
IHEVESWGENGYYKICRGRNVCGVDSMVSTVAAIYPSSH

SEQ ID NO: 188485 - protein, 80 aa, Glycine max
  Clone ID: PAT_MRT3847_141216C.1.pep
GSQEIQDCRITVCAEATLYSEHQSNASGAMSNRTPLQRSLSRPNDWKGCTRPILPKKSFHITNKNGNLDCLDSRELPNSF

SEQ ID NO: 188486 - protein, 167 aa, Glycine max
  Clone ID: PAT_MRT3847_141217C.1.pep
MAGPNMDQFEAFFRRADLDGDGRISGAEAVSFFQGSNLPKQVLAQVWAYADQAKTGFLGRAEFFNALRLVTVAQSKRDLTPDIVKAALYGPAAAKIPAPQINLAAVPQPRPNSMPGGAGSVGQMGVTAPNLAQSFPYRGQGLAGPGANPQYYPSQQHPGMRPPQSMP

SEQ ID NO: 188487 - protein, 137 aa, Glycine max
  Clone ID: PAT_MRT3847_141218C.1.pep
PTQSTSMDQFESFFRRADLDGDGRISGAEAVSFFQGSNLPKQVLAQVWAYADQAKTGFLGRAEFFNALRLVTVAQSKRDLTPDIVKAALYGPAAAKIPAPQINLAAVPQQRPNSMPGAGSVGQMGGYRTQFGSKFFL

SEQ ID NO: 188488 - protein, 119 aa, Glycine max
  unsure (1)..(119): unsure at all Xaa locations
  Clone ID: PAT_MRT3847_141219C.1.pep
RSPRVRHLKGSRRTFFKHRTPRKFKLTPPLCQHKSLATLSHFGTLTSRQKDQIHLYVETLLQWNXAVREVNEGMERHVEDSARTAAXLCNKLSLVDVGTGAGHSGIVLAITRPEWDVTL

SEQ ID NO: 188489 - protein, 160 aa, Glycine max
  unsure (1)..(160): unsure at all Xaa locations
  Clone ID: PAT_MRT3847_14121C.1.pep
MSFVDFYISEMVFFTLLFSHVNLIVKLNCCLIQSNHIVALKVLFKSIATIXVVHQLRREVEIQSHLRHPHILRLDGYFYDQSGXKGDLYKELQKCKYFSERRVTTYVASLARAFIYCHGKHVIHRDIKPENLLIGSQIQEIYRAYGYFLKKDYVIKEKHF

SEQ ID NO: 188490 - protein, 46 aa, Glycine max
  Clone ID: PAT_MRT3847_141220C.1.pep
IPYHVLHCNMLQCCEGRLGRGARSSQDGCPICFLSRAQRDYGLEFN

SEQ ID NO: 188491 - protein, 58 aa, Glycine max
  Clone ID: PAT_MRT3847_141221C.1.pep
LSLGQRELSGDTIMEILPKTLRGKSINLEVEPTDSIKNVKANIQDKERLPPDHFKVII

SEQ ID NO: 188492 - protein, 54 aa, Glycine max
  unsure (1)..(54): unsure at all Xaa locations
  Clone ID: PAT_MRT3847_141222C.1.pep
SKXXXKWPDPXXSYRXMAXXXLLXFFXFXXXXXFXFGCKELVNPTLCNYAWQFT

SEQ ID NO: 188493 - protein, 158 aa, Glycine max
  unsure (1)..(158): unsure at all Xaa locations
  Clone ID: PAT_MRT3847_141223C.1.pep
LEVPDLTEAFQAILVVVYWSIASTVASTGNLIGVSNYKLSEYTFRLSTAVNKLTMHLTKVKEQIANVRDYITIRNIFDRPKDIVDLLKALIYPQQKGAENPKIFEGTNLVTKGIEVFRQKHVLLFISGLDSIEDEISLLNSIYERLQEDPREAXGFKK

SEQ ID NO: 188494 - protein, 474 aa, Glycine max
  unsure (1)..(474): unsure at all Xaa locations
  Clone ID: PAT_MRT3847_141224C.1.pep
HASGLPPGPRGLPFIGNLYQFDSSTLCLKLYDLSKTYGPIFSLQLGSRPTLVISSPKLAKEVMNTHDLEFCGRPSLISSXKFSYNGLDMAFSPYRDYWRHTRKISIIHFLSLKRVLMFSSTRKYEVTQLVFGSREHASCSKVTNLHELLTCLTSAIVCRTALGRTYEGEGIETSMFHGLLKEAQDLISSTFYTDYIPFVGGVIDKLTGLMGRLENLFKVLDGFYQNVIDEHLDPERKKLTDEEDIIDALLQLKDDPSFSMDLTPAHIKPLMMNIILAGTDTSAAAVVWAMTALMKSPRVMKKAQEEIRNVFGEKDFIGEDDIQKLPYLKAVIKETMRMYPPLPLLIHRETIKKCSIEGYEIPEKTLVYVNAWAVHRDPETWKKPEEFYPERFLDSKIDFRGYDFEFIPFGTGRRICPGINMGIITVELVLANLLYSFDWEMPQGMERKDIDPDMLPGLVQHKKNPLCLVAKKRG

SEQ ID NO: 188495 - protein, 61 aa, Glycine max
  Clone ID: PAT_MRT3847_141225C.1.pep
FTARPKRVPGCNKPSLYAIVFYTSMDQQIIFNSWSGLKIYHTGQYYIVIIFYTTLITAKIF

SEQ ID NO: 188496 - protein, 74 aa, Glycine max
  Clone ID: PAT_MRT3847_141226C.1.pep
LKKDVPLTNFISIQCIRMKIPFPTEYVMKITTAAETRNCDGEKNRLGLNRIETELKPNRFFPELVQEKMRVPFF

SEQ ID NO: 188497 - protein, 44 aa, Glycine max
  Clone ID: PAT_MRT3847_141227C.1.pep
MQISTFYASSIYNHTHELILWGAIIRGGKQIHKLVQQLLNSYTQ

SEQ ID NO: 188498 - protein, 40 aa, Glycine max
  Clone ID: PAT_MRT3847_141228C.1.pep
TLISFQPKIKNLILYIFSMKKSAYHHHLFIPRGRNLAFYI

SEQ ID NO: 188499 - protein, 35 aa, Glycine max
  Clone ID: PAT_MRT3847_141229C.1.pep
KFYMHIPFFLSTPFYILVSPGHEMVFLKNIAQEKE

SEQ ID NO: 188500 - protein, 672 aa, Glycine max
  Clone ID: PAT_MRT3847_14122C.1.pep
MEESSLCCEQLPDGECIEVVQKDKEDDTLIELDCQNGFPEGRKEFVAPAVGMEFESYDDAYNYYICYAKEVGFRVRVKNSWFKRNSREKYGAVLCCSSQGFKRIKVVNHLRKETRTGCPAMIRMRLVESQRWRVLEVTLEHNHMLGAKILRSVKKMGNGTKRKPLPCSEAEGQTVKLYRALVIDAGGNGNSNCGAIEDRTFSESSNKLNLRKGDTQAIYNFLCRMQLTIPNFFYLMDFNDDGHLRNAFWVDARSRASCGYFGDVIYFDNTYLSNKFEIPLVTFVGINHHGQSVLLGCGLLASETTESYLWLLRTWLKCMSGCSPQTIITDRCKALQSAIVEVFPKSHHCFGLSLIMKKVPEKLGGLHNYDAIRKALIKAVYETLKVIEFEAAWGFMIQRFGVSDHEWLRSLYEDRVRWAPVYLKDIFFAGMSAARPGESINPFFDRYVHKQTPLKEFLDKYELAFHKKHKEESFSDIESRSSSPLLKTRCSFELQLSRMYTREMFMKFQLEVEEVYSCFGTTQLHVDGPIIIFLVKERVLIEGNRREIRDFEVLYSRTAGEVRCICSCFNFYGYLCRHALCVLNFNGVEEIPHKYILSRWKKDYKHPNHSSGGANDTDCTNDTDRIQWSNQLFRSALQVVEEGILSLDHYNVALQSLEESLSKVHDVERRQE

SEQ ID NO: 188501 - protein, 76 aa, Glycine max
  Clone ID: PAT_MRT3847_141230C.1.pep
RLILGFNLLHMHPLLLISRYYKKKHNEHTRMKNRGMLPVLCRISVQNLNIFNIINVYVWHSLIFSIRIIDHILKCQ

SEQ ID NO: 188502 - protein, 55 aa, Glycine max
  Clone ID: PAT_MRT3847_141231C.1.pep
CNFSTDFLYWKLCNWKQDYDSCSTANEGIFKQYYLQIMYNLYCHSALKDIIEDTK

SEQ ID NO: 188503 - protein, 75 aa, Glycine max
  Clone ID: PAT_MRT3847_141232C.1.pep
NSMLIRQGSDHYLAIDTLNIPSLDGYCVHRNRFLWVCYTLHLGHLPCQSSLDQNALSVPLIDSYSYLYPSLFIIK

SEQ ID NO: 188504 - protein, 91 aa, Glycine max
  Clone ID: PAT_MRT3847_141233C.1.pep
TPQLIVKRLRPTSKTSKRHIGLLRTQTPLLGKHSRTPTSGLLNHRRREKDLSQGRGNKRNQMLRYTDQTNSALGGNTRENPFNWRGPLPEP

SEQ ID NO: 188505 - protein, 330 aa, Glycine max
  Clone ID: PAT_MRT3847_141234C.1.pep
MAFWHRIRNPNLKTLCIQFQRCYVHRPHASTPKPFPVDIPHPNSVFHGRPTSVFNTVRFFAAPVQYQVKHNNVEDSSELRLNEKIKAPYVRLVADDGHHSILPRFEALEHAKTLKLDLVEVDKNAKPPVCKIMDFHKQMYRRQEREKERAKSRAEMTLRKDVKEVRFSEKTEAKDLKNKADMIKKLMEKGYRVKCKVSGKENQDLTVLFSPILALMEDVCIVESGPHMAKKDAFMIVRHIKYGLSKKGGKKLQNATNVTTQEGDMEISTANSSDSIEYESHAESGFETEEEVLSDGNKLSKSSLSVFSNNVNMTASPNNQTNAAPEASPV

SEQ ID NO: 188506 - protein, 102 aa, Glycine max
  Clone ID: PAT_MRT3847_141235C.1.pep
DIKREGEGELFVSLRSLPRTALIALWCSKRRRNIKDKAIRASYLISSHPFISITTQHTYEPGEAQVLLPPHFPFPFSIPLLYSLFSSFHLFLFSFSFLIAYM

SEQ ID NO: 188507 - protein, 87 aa, Glycine max
  Clone ID: PAT_MRT3847_141236C.1.pep
RHEAMKEEAATNEFVNPYYNPRAVGLKKELEGMQQEIKEWQAKFKQKNGRKPTLEEMRQDPSVGPLILSLDAQKNAIKASIQRFRFN

SEQ ID NO: 188508 - protein, 124 aa, Glycine max
  Clone ID: PAT_MRT3847_141237C.1.pep
KSITGSASFSTISLTRAQHVLSYALINALHQTCDSLSLHRPLCLYLATTPCTQESCVSVCSRETTKYAAIHPLIYSLSQPKSASPTVTLTPSLIVNSPSLIIPFLCKNFIIYTSKTIPVLHHLS

SEQ ID NO: 188509 - protein, 60 aa, Glycine max
  Clone ID: PAT_MRT3847_141238C.1.pep
LHQAKVTQSCIYVRRRRSISWKSINVSCMLNQIKTIFFHFLLSSIFALETYMPLELHYKV

SEQ ID NO: 188510 - protein, 68 aa, Glycine max
  Clone ID: PAT_MRT3847_141239C.1.pep
SYIKHFVKLLPCTTISHSNIYICRALHLADDSSLCYGRHAFCSLIRKLSFHWELPLAVKHSVHFEIDK

SEQ ID NO: 188511 - protein, 59 aa, Glycine max
  unsure (1)..(59): unsure at all Xaa locations
  Clone ID: PAT_MRT3847_14123C.1.pep
SXGLGXHTLQXLDLCLNSXLNTNFXLLTNHNDKQXXXXXXXYYXLXNLLVVTLVXXIDX

SEQ ID NO: 188512 - protein, 86 aa, Glycine max
  Clone ID: PAT_MRT3847_141240C.1.pep
IAASVWKLSSCDLCEIARNSVYQSGFSHALKSHWIGKEYYKSGPRGNDIQRTNVPHIRLEFRDTIWREEMQQVYLGKAIIPEVVDK

SEQ ID NO: 188513 - protein, 557 aa, Glycine max
  unsure (1)..(557): unsure at all Xaa locations
  Clone ID: PAT_MRT3847_141241C.1.pep
SIFYTLIEGKSDRXFDICDGVINVYNSIDQKEEFFPVTDATTFVNXDSHSILRVIAAGNIRTLCHHRLNLLEQKFNLHLMINADREFLAQKSAPHRDFYNVRKVDTHVHHSACMNQKHLLRFIKXSKLRKEPDEVVIFRDGTYLTLEEVFKSLDLSGYDLNVDLLDVHADKSTFHRFDKFNLKYNPCGQSRVREIFLXKQDNLIQGRFLGELTKQVFSDLAASKYQMAEYRISIYGRKQSEWDQLASWIVNNDLYSENVVWLIQLPRLYNVYKEMGIVTSFQNMLDNIFIPLFEVTVNPDSHPQLHVFLKQVVGLDLVDDESKPERRPTKHMPTPEQWTNVFNPAFSYYVYYCYANLYTLNKLRESKGMTTIKFRPHSGEAGDIDHLAATFLTAHNIAHGINLKKSPVLQYLYYLAQIGLAMSPLSNNSLFLDYHRNPFPMFFLRGLNVSLSTDDPLQIHLTKEPLVEEYSIAASVWKVSSCDLCEIARNSVYQSGFSHALGSHWIGKEYFKSGPRGNDIQRTNVPHIRLEFRDTIWREEMQQVYLGKAIIPEVVDK

SEQ ID NO: 188514 - protein, 89 aa, Glycine max
  unsure (1)..(89): unsure at all Xaa locations
  Clone ID: PAT_MRT3847_141242C.1.pep
XXXPFYAGXXNRDTDEVSXXKVXIPKGKIFIIXXRGEIAVXRRCFDTKSYTSLHSLVNGMFPPTNSSEQEDFNSWNYWKLPETSSATNI

SEQ ID NO: 188515 - protein, 327 aa, Glycine max
  unsure (1)..(327): unsure at all Xaa locations
  Clone ID: PAT_MRT3847_141243C.1.pep
MRPSFPDRLGLLTSWVAASVSQAVQNLIDEEFLGIVHLRTSTLHKKISSARHDFIKLAGSENKLEALLQVLAPSLASGFRVFAFGCSLEAGRAGVHLLALSLFAAVCSRGEVPPELRGVHLSXCESDGDDCPTLVCTDLAYGCEKTTEGHVVMFDFPLNSIDYLHRTGRTARMGAKGKVTSLVAKKDLDLASKIEDALRKNESLEAITKESVRRDIARTQNQSTEKGKSKRLVKVSKVMGKSGSRFGSGNNGSGMKSGKGSPVKSMKKGIQVSKSGKSSSANSLRKASTEKRQSSKMVSATKSTNSKLNVVGFRGKNSSSNNKESGL

SEQ ID NO: 188516 - protein, 96 aa, Glycine max
  Clone ID: PAT_MRT3847_141244C.1.pep
PGRHASPPSYVQRHRREVEEEKGHRLGTDTDTDTTWKKFRPQPFTLLSAAEVRVSFFFSFSQSSLRLRYLLLIFSFFVCPTQSTFNFSLRFVFDLL

SEQ ID NO: 188517 - protein, 57 aa, Glycine max
  unsure (1)..(57): unsure at all Xaa locations
  Clone ID: PAT_MRT3847_141245C.1.pep
AXXVESDGAWSITLDHCARTALGVHISAYDNQHXSKGVESEKIXPMEDAXXXAAIQG

SEQ ID NO: 188518 - protein, 59 aa, Glycine max
  Clone ID: PAT_MRT3847_141246C.1.pep
RNVVLKYLALIFFEEILAYLTWISGLILEKLFCGCIFMSLICIKLYSFYQPEYFYIDIF

SEQ ID NO: 188519 - protein, 49 aa, Glycine max
  Clone ID: PAT_MRT3847_141247C.1.pep
LIMQAIMRNEHSTRCMTVNQGYNSHTREEKPAQKGCNFVSSTAALSISK

SEQ ID NO: 188520 - protein, 123 aa, Glycine max
  Clone ID: PAT_MRT3847_141248C.1.pep
MIHHDHNHIISSTAPSNGIPTMQQEEDHGLGSYKKVVRYRECLKNHAAAMGGNATDGCGEFMPSGEEGTIEALNCSACHCHRNFHRKEVEGEPSCDYHHLNINRRRHILGPDKNLLPPEALGY

SEQ ID NO: 188521 - protein, 48 aa, Glycine max
  Clone ID: PAT_MRT3847_141249C.1.pep
WCPFYIDVEVLLILGVHRAESAIECSAGSSGWSSVWRALNLLSLVLHM

SEQ ID NO: 188522 - protein, 72 aa, Glycine max
  Clone ID: PAT_MRT3847_14124C.1.pep
LRTFGRSFFFVLLKTGAVAQPESIDRQVGYAVARPEANSIRSTTWTTFGNSPASRLRALQRMAQRPSLVPAV

SEQ ID NO: 188523 - protein, 154 aa, Glycine max
  Clone ID: PAT_MRT3847_141250C.1.pep
TYDPKWVNAQDLCAQKGSKLQGGVGPFGLLTLASQNLEEFTPVFFRIFKGPVKHVVLLCSDATSSSLKSNMYKPSFAGFVDVDLATNKKLSLRSLIDHSVVESFGEGGKTNILSRVYPQLAVANQGHLFVFNNGTEPISVENLKAWSMKPADIK

SEQ ID NO: 188524 - protein, 48 aa, Glycine max
  Clone ID: PAT_MRT3847_141251C.1.pep
NRIRNELSLIIFIIFSSKLEGWHACNQLILPLLISKVLHVGPFAPLRG

SEQ ID NO: 188525 - protein, 43 aa, Glycine max
  unsure (1)..(43): unsure at all Xaa locations
  Clone ID: PAT_MRT3847_141252C.1.pep
DANGXXXLXCXVTXEPXTXTRXRAASAIAXRKXGRALYLGFLG

SEQ ID NO: 188526 - protein, 70 aa, Glycine max
  unsure (1)..(70): unsure at all Xaa locations
  Clone ID: PAT_MRT3847_141253C.1.pep
MSSTGGDDGAKKSWPEVVGLSLEEAKRVKMCDKPDDDIXVLPVGTPVTMDFRPNRVRIFVDTVAEAPHIG

SEQ ID NO: 188527 - protein, 57 aa, Glycine max
  Clone ID: PAT_MRT3847_141254C.1.pep
YFKNFYILYTIFKQLLLLYINYPFQNLYFLTIQSTPIIYFILTYLNNFIPLNSNHTT

SEQ ID NO: 188528 - protein, 88 aa, Glycine max
  Clone ID: PAT_MRT3847_141255C.1.pep
NWDPPVILKPLGPPPNKFAAKFIVHLKPFPMKGNLPPPPFPNRASIPFSPLGKDFIEPVKNFLTPNLGFPKAPLLPFLLGKKTPFFCP

SEQ ID NO: 188529 - protein, 46 aa, Glycine max
  Clone ID: PAT_MRT3847_141256C.1.pep
FLSTPHKSAPGGYMSLPISRPSGVVICLSFYLHDYSQLTQKKRAAA

SEQ ID NO: 188530 - protein, 220 aa, Glycine max
  Clone ID: PAT_MRT3847_141257C.1.pep
MVAEMNVREFSISKNDRTSNSNSKFLTLPTILTLGRVAAVPLLVATFYMDGWRGTVVTTSILTAAAVTDWLDGYIARKMKMKSTFGAFLDPVADKLMVSATLVLLCTRPLEVAVFRQVPWLLIIPSITIIGREITMSVLGEWAASQGSKLLEVVAVNNLGKWKTASQMVALIILLATRDCSRGGPAILVGSGVVLLYISAGLALWSFVVYMREICKVLRR

SEQ ID NO: 188531 - protein, 521 aa, Glycine max
  Clone ID: PAT_MRT3847_141258C.1.pep
MDSNGSLRANTWARSSSLTSPASGLSSDPLSFPGFGLQHNQQKWDVPSNSDFGIRAEAPFKEFNQPSQTQSPLPCNSNNEIEIPGQENCHLSESSQTNTLQDWDPSVMLNNLSFLEEKIHQLQDLVHLIARQKGIGQPNELVTQEQQLVTTDLTSIIIQLISTAGSLLPSARHNLVNTSSLVGQIDQLRGTTIPPGTGASNGCIQPQNNGGKILSDQSMQTDLPNSGEMEQKYNMVEHDLKDEEDVEDGENLAPGSYEILQLEKEEILAPHTHFCTICGKGFKRDANLRMHMRGHGDEYKTPAALAKPHKESASPKPIKRYSCPYPGCKRNKDHKKFQPLKTILCVKNHYKRTHCDKSYTCSRCNTKKFSVMADLKTHEKHCGKDKWLCSCGTTFSRKDKLFGHIALFQGHAPAIPLDDTKGAGVAEAPIHDSKENNSKVQSMNFTFGSNPSNANEVPNAMDAKGDSDDPINYFSSLNFEANFGEFNEFTRPLFDDPEGSFSFVMPGSFKSGGESSSDNLL

SEQ ID NO: 188532 - protein, 49 aa, Glycine max
  Clone ID: PAT_MRT3847_141259C.1.pep
HLLGPSHLHLSLSFASKLSNTQFPIFFFCILTIACSDLPCTKDSFFITQ

SEQ ID NO: 188533 - protein, 100 aa, Glycine max
  unsure (1)..(100): unsure at all Xaa locations
  Clone ID: PAT_MRT3847_14125C.1.pep
CSAWESPWMMNTFLSSPKIDTEITMEDFGYFMSPGDRSYDAIGLMKQIREQTVSXYAGAQDILGNETPKGLSKDACRNDRGEDQEHIDAHNQHGDHCPLS

SEQ ID NO: 188534 - protein, 65 aa, Glycine max
  unsure (1)..(65): unsure at all Xaa locations
  Clone ID: PAT_MRT3847_141260C.1.pep
VLCKSSLQFSVSNLNNNLYDDSLSLLCCXKKKKKKKKKRKAGQIIKSNVPSSGMRLLCSCVALPK

SEQ ID NO: 188535 - protein, 140 aa, Glycine max
  unsure (1)..(140): unsure at all Xaa locations
  Clone ID: PAT_MRT3847_141261C.1.pep
PGTPPPTLQNTRGSRCYFYSSSSLIFFFWGGGFFLYLKSCSGNLGRRPSMRNRSGGXITQLELHRATTTEPWHGSGPVKAQFXEAEMGVPPENXGWKWGANCASGGALXREGGESVNLQAEMGLXNNDKNYMGGSKLQNY

SEQ ID NO: 188536 - protein, 138 aa, Glycine max
  Clone ID: PAT_MRT3847_141262C.1.pep
MLRWLFVGLVLSSHQQMAQMGRMEGDQKRGMEMGQMRGMEMGQMRGMEMGQMSGMEMGQMRGMERGQKPGMVMTQKSEMDMAQMRGMDGDDSQMRASWAASQKLLRAEEKEKGPKSQKNETEKPPQQKQPQEKPGAQQ

SEQ ID NO: 188537 - protein, 39 aa, Glycine max
  unsure (1)..(39): unsure at all Xaa locations
  Clone ID: PAT_MRT3847_141263C.1.pep
LXGXIXTSXCHSTNXLGSAXVEXXLXQXXLVHSQEXIKR

SEQ ID NO: 188538 - protein, 181 aa, Glycine max
  unsure (1)..(181): unsure at all Xaa locations
  Clone ID: PAT_MRT3847_141264C.1.pep
LEVIFQGYYSFSQKLKFIVRIPFAITAYVXFISGTAAMLLVIVWKPYTGFLSISAILRIIMVVEAVCAGCFMSLFIGYIHQYNSLNSHPDVLKSLYSPLQPSSSLEGLRYHDGRLSDQQMALLQYQRENLHFLSEEILRLQECLSKYERTDDRSTPLNDLAHLLDARDFWLRTLSTEMIKI

SEQ ID NO: 188539 - protein, 51 aa, Glycine max
  Clone ID: PAT_MRT3847_141265C.1.pep
FESMAKSHALKERVWHIRAYAASSHAIVGSPSRFLLRSASRIAALFPLEPN

SEQ ID NO: 188540 - protein, 112 aa, Glycine max
  Clone ID: PAT_MRT3847_141266C.1.pep
GGGSIFCLKTPSSKRKNPPPHVIIVKTTLYTKKKKRNFFFPLKNKGRTLVKGGPPLGRKNPPTKIRGRDNIGGGLYRGTPIFCTQKKPGGVGTPKITRPTMGGNTIVPKGGL

SEQ ID NO: 188541 - protein, 118 aa, Glycine max
  unsure (1)..(118): unsure at all Xaa locations
  Clone ID: PAT_MRT3847_141267C.1.pep
MRRGAKRKTKQDQEAKHDAPEDNMPKAQPRAKRAKTSKPQSEPEYFEDKRNLEDLWKETFPVGTEWDQLDSVYQYKWDFSNLENAFEENGVLYGKKVYLFGCTEPQLVMFKGESXVVC

SEQ ID NO: 188542 - protein, 340 aa, Glycine max
  Clone ID: PAT_MRT3847_141268C.1.pep
MRRGAKRKTKQDQEAKHVAAEDNKTEAQPRAKRAKTSKPQSEPEYFEDKRNLEDLWKETFPVGTEWDQLDTVYQYKWDFSNLENAFEEDGVLYGKKVYLFGCTEPQLVMFKGESKVVLIPVVVAVVSPFPPSDKIGINSVQREAEEIIPMKQMKMDWIPYIPLEDRDSQVDRLKSQIFILSCTQRRSALKHLKLDRLKKYEYCLPYFYQPFKEDELEQSTEVQIIYPAEPKPVFCEFDWELDELEEFTDKLIEEEELSEDQKDAFKEFVKGKVREAKKANREAREARKKAIEEMSEETKAAFESMRFYKFYPVQSPDAPDVSNVKSPFINRYYGKAHEVL

SEQ ID NO: 188543 - protein, 76 aa, Glycine max
  Clone ID: PAT_MRT3847_141269C.1.pep
NCPSKLEGHVSSRKGCMTQGKVTLLVVTNTISGSCLLVLLKVTNSSTVYTLLKQQVKEPHNDHISVSSCRGFSDIC

SEQ ID NO: 188544 - protein, 82 aa, Glycine max
  Clone ID: PAT_MRT3847_14126C.1.pep
HQMSVPGLSLMEFPLSSSSVQEPKVLSLFLVYRSSSGNLLQVPQETCINPNRAARNRLRLVISRGDLMPKRATVVMCRAPIM

SEQ ID NO: 188545 - protein, 86 aa, Glycine max
  Clone ID: PAT_MRT3847_141270C.1.pep
MQDCHTRLGLVPRTHDFVALTHHDAMPGHSGCQEGRKQLMLCPHSPSGSAPGREARQCLLVIIHFTQGGGTPRMGFGGPEGLSGGV

SEQ ID NO: 188546 - protein, 62 aa, Glycine max
  unsure (1)..(62): unsure at all Xaa locations
  Clone ID: PAT_MRT3847_141271C.1.pep
DRENFAYICKLSEXPAFQEMVESMKNXANLCIVLSGEERNLLSVGLTNMIGARRARWRILSS

SEQ ID NO: 188547 - protein, 66 aa, Glycine max
  Clone ID: PAT_MRT3847_141272C.1.pep
ESDGFWRRPGTNIPNTSLSGYQQPLALDQLPISPSRQAVTRCSCEDVKPKSPVGCSRCTLSRSEMA

SEQ ID NO: 188548 - protein, 46 aa, Glycine max
  unsure (1)..(46): unsure at all Xaa locations
  Clone ID: PAT_MRT3847_141273C.1.pep
CPAPCTHPLLQTQLYKYAYRHNSIASSLNRRVKXMLKIFIAPQIVR

SEQ ID NO: 188549 - protein, 66 aa, Glycine max
  Clone ID: PAT_MRT3847_141274C.1.pep
TAARRRQKGSCSFHILTNLAQFSALQTCIQQIPFSACLVKHLIACLTWLSASRQKLSVVASIHFKI

SEQ ID NO: 188550 - protein, 41 aa, Glycine max
  Clone ID: PAT_MRT3847_141275C.1.pep
ALYEFQSFVVRQLHSFRLISGWQFAGVVFKNSPVLTCGAYG

SEQ ID NO: 188551 - protein, 90 aa, Glycine max
  Clone ID: PAT_MRT3847_141276C.1.pep
RVEARVRALLLTFFVTFFPKTLPKTMVKKRRTEQRSTNKSRTKLGSKLDLYPNLAEPRADSTHTIGDTICDGTSDLTRVLGAVPRGQPIL

SEQ ID NO: 188552 - protein, 122 aa, Glycine max
  Clone ID: PAT_MRT3847_141277C.1.pep
MASQVCKAASRAARSLLSASRASHGRAVGAATAVSLSCKVPLFYGKNGSGSGSASSSSSSWISGALALPAAAYMFQDQEVRAAELERTFIAIKPDEVRRRLYIDDVARFGRKGYKRIATLYT

SEQ ID NO: 188553 - protein, 116 aa, Glycine max
  Clone ID: PAT_MRT3847_141278C.1.pep
ISEATDMAVLASVKQDRNGREKSSEILAFEAGISHSSVLQILHKHGFTIVKPSWKPGLTEAAKATRLRFCLDHQHWTLEDWKAVIFTDETSVILGHRRGSVRVWRTARDAHDPTCI

SEQ ID NO: 188554 - protein, 96 aa, Glycine max
  unsure (1)..(96): unsure at all Xaa locations
  Clone ID: PAT_MRT3847_141279C.1.pep
SASLLGVEGLDYMERMSLATSDGFPILRPRENGDIGKMRIVTGDGEETTMCSGTXVDEALNKQLXELEKSGATMDCMRCPKDEKXLSRGKIFDKSL

SEQ ID NO: 188555 - protein, 44 aa, Glycine max
  Clone ID: PAT_MRT3847_14127C.1.pep
RQFPTASHVETTCLTIKNNLVKFFKTSFQQMPSKNPNTVQWGSF

SEQ ID NO: 188556 - protein, 44 aa, Glycine max
  Clone ID: PAT_MRT3847_141280C.1.pep
PLSLSSSSSSTAVCPNRLSCCGCMMIDRLIGIYNAAVDHDQPFI

SEQ ID NO: 188557 - protein, 315 aa, Glycine max
  unsure (1)..(315): unsure at all Xaa locations
  Clone ID: PAT_MRT3847_141281C.1.pep
MAQRAEPILVTTDVFQMGNIKWKQFNIDTSNASSSPPKPLLIFTPTVPGSYPVILFCHGFSLRNSYYSELLGHIASHGFIIVAPQLCWSVRSMLEPGDEVKFAGKVVDWLAEEGLQPLLPENVEAKLDKLVLSGHTLGGKTVFAVALGYAKTDLKLSALXGIDPVAGPCKSCETFPPILTGMSQSFNLNIPIVVIGTGLGPEKANFFIPPCAPDGVNHKEFFNKCKPPCAHFVATEYGHMDMLDDVTPGLIGSILSNCICKAGKGPRDLMRRTVGGLVVAFLRAQLNGLWKDFNAVLANPNLAPTKLDDVVYVPA

SEQ ID NO: 188558 - protein, 73 aa, Glycine max
  Clone ID: PAT_MRT3847_141282C.1.pep
GKQSITRGHLEALSEYGIIAMHPKPQEILTFGKAKEIESFWQCIIHAVIWCIRLVRNDCIFMLQKLFWNKIVF

SEQ ID NO: 188559 - protein, 142 aa, Glycine max
  unsure (1)..(142): unsure at all Xaa locations
  Clone ID: PAT_MRT3847_141283C.1.pep
YGRTLLHGGAEYKSTGSGSVVLYAISADDSGLCYTDHSDQRIEVMILLVVYHIYGHDYRXVLAYIXITVTMWFMVGTWLVAPLLFNTSRLEWQLIAHDXTYSLTWMSLRVGTCVSSAKRYESWWANGLEPSRCSGKRVYLVI

SEQ ID NO: 188560 - protein, 37 aa, Glycine max
  Clone ID: PAT_MRT3847_141284C.1.pep
TIPQRFAFLCRCKDTLPGNMKMYRPLSFISTQQISPD

SEQ ID NO: 188561 - protein, 163 aa, Glycine max
  Clone ID: PAT_MRT3847_141285C.1.pep
TAARRRQKGEEKREKEGNSKSSSTMANSVAFSDEIPNMSMSTSFPFSPAFSSIFDMMPPPPPSSSHDPKAPNNFAGFMDLLAVPADYYAPSLFDWPQNTTATSAPPPLTAQINHPLPSPASSNVPDGSEVLNTPASPNYSSISSSSNEAAAAAAANKATGNDN

SEQ ID NO: 188562 - protein, 47 aa, Glycine max
  Clone ID: PAT_MRT3847_141286C.1.pep
LININNYTFVHEIKEYRKRNDLDKYPFFVKLNFKIKFELYFQSKEKT

SEQ ID NO: 188563 - protein, 73 aa, Glycine max
  Clone ID: PAT_MRT3847_141287C.1.pep
FIPFGSGKKTCPGAFLAWQVVPVNLAINIPCFPRKLVGGQGKVDMEKKSGIPLPRANPKNCVPVPRINPFPTI

SEQ ID NO: 188564 - protein, 68 aa, Glycine max
  unsure (1)..(68): unsure at all Xaa locations
  Clone ID: PAT_MRT3847_141288C.1.pep
CGVVGWFCFWGLVLAAVRAWLACLCCLRSPLVCCGGASSCFCLASPPFACALGVLVKXKRGRLRGSNR

SEQ ID NO: 188565 - protein, 96 aa, Glycine max
  Clone ID: PAT_MRT3847_141289C.1.pep
GKVKIGINGFGRIGRLVARVALQRDDVELVAVNDPFITTDYMTYMFKYDSVHGHWKRHYVTVNDEKTLLFRDNPFTIFGHRNSEDILLWSTGAKSY

SEQ ID NO: 188566 - protein, 38 aa, Glycine max
  Clone ID: PAT_MRT3847_14128C.1.pep
LAASRGAHLRRRRDVSQEVQAPSGQLTMNPLYNACYWI

SEQ ID NO: 188567 - protein, 605 aa, Glycine max
  Clone ID: PAT_MRT3847_141290C.1.pep
MITLTDFYHVMTAMVPLYVAMILAYGSVKWWKIFSPDQCSGINRFVALFAVPLLSFHFIASNNPYEMNLRFLAADTLQKIIILVLLAVWSNITKRGCLEWAITLFSLSTLPNTLVMGIPLLKGMYGDFSGSLMVQIVVLQCIIWYTLMLFLFEFRGARMLISEQFPDTAASIVSIHVDSDVMSLDGRQPLETEAEIKEDGKLHVTVRKSNASRSDIFSRRSQGLSSTTPRPSNLTNAEIYSLQSSRNPTPRGSSFNHTDFYSMMAAGGRNSNFGASDVYGLSASRGPTPRPSNYDEDGGKPKFHYHAAGGTGHYPAPNPGMFSPSNGSKSVAANANAKRPNGQAQLKPEDGNRDLHMFVWSSSASPVSDVFGAHEYGGGHDQKEVKLNVSPGKVENNHRDTQEDYLEKDEFSFGNREMDREMNQLEGEKVGDGKPKTMPPASVMTRLILIMVWRKLIRNPNTYSSLIGLTWSLVSFKWNVEMPAIIAKSISILSDAGLGMAMFSLGLFMALQPRVIACGNSTAAFAMAVRFLTGPAVMAAASIAVGLKGVLLHVAIVQAALPQGIVPFVFAKEYNVHPDILSTAVIFGMLIALPITLVYYILLGL

SEQ ID NO: 188568 - protein, 211 aa, Glycine max
  Clone ID: PAT_MRT3847_141291C.1.pep
MITLTDFYHVMTAMVPLYVAMILAYGSVKWWKIFSPDQCSGINRFVALFAVPLLSFHFIASNNPYEMNLRFLAADTLQKIIILVLLAVWSNITKRGCLEWAITLFSLSTLPNTLVMGIPLLKGMYGDFSGSLMVQIVVLQCIIWYTLMLFLFEFRGARMLISEQFPDTAASIVSIHVDSDVMSLDGRQPLETEAEIKEDGKLHVTVRKSNA

SEQ ID NO: 188569 - protein, 343 aa, Glycine max
  unsure (1)..(343): unsure at all Xaa locations
  Clone ID: PAT_MRT3847_141292C.1.pep
GTALAGYTGPNSRVRPTRPASRGPTPRPSNYDEDGGKPKFHYHAGGTGHYPAPNPGMFSPSNGSKSVAAANANANAKRPNGQAQLKPEDGNRDLHMFVWSSSASPVSDVFGAHEYGGHDQKEVKLNVSPGKVENHRDTQEDYLEKDEFSFGNRGMDREMNQLEGEKVGDGKPKTMPPASVMTRLILIMVWRKLIRNPNTYSSLIGLTWSLVSFKWNVEMPAIIAKSISILSDAGLGMAMFXSLGLFMALQPRIIACGNSTAAFSMAVRFLTGPAVMAAASIAVGLKGVLLHVAIVQAALPQGIVPFVFAKEYNVHPDILSTGVIFGMLIALPITLVYYILLGL

SEQ ID NO: 188570 - protein, 141 aa, Glycine max
  Clone ID: PAT_MRT3847_141293C.1.pep
MAPNPMKQSANSTTTTIANKEILVRETMRISANLASPPQPPPPSPIVGIICCEEMDGRRWKYLAESDGFGGFKKNSFLPVSLNSNHPRDPLHEVLSFVTSYVVPEGFPDSVTPSYVPYMTWRALKHFFGGAMGVFTTQTLL

SEQ ID NO: 188571 - protein, 169 aa, Glycine max
  unsure (1)..(169): unsure at all Xaa locations
  Clone ID: PAT_MRT3847_141294C.1.pep
GEIPSIKDRITIVXQLWDLTRDILVLVEPGTPHGSNIIAQMRSHILWMEERKYRKSSRKNNEVCKDLITEKAGAFVVAPCPHDGACPLVKSGKYCHFGQRLERTSSQRAYKRSKGDPLRGFEDEKFSYVVFRRGSRPSDPWPLDGMEFETLKEQHAKRNPEDLEIDYED

SEQ ID NO: 188572 - protein, 34 aa, Glycine max
  Clone ID: PAT_MRT3847_141295C.1.pep
HLSVAHVLQNIRTGFRDSTCVLHAVPVASMKGVK

SEQ ID NO: 188573 - protein, 52 aa, Glycine max
  Clone ID: PAT_MRT3847_141296C.1.pep
LHHKHIYMIGSSISQNKEIFSIFISTIILIIASYWSHKKILSIKCNGGLPKR

SEQ ID NO: 188574 - protein, 40 aa, Glycine max
  Clone ID: PAT_MRT3847_141297C.1.pep
SKFEACSKEESEVGMRCGFTRYGCLPIRPFTFTLLRTNTS

SEQ ID NO: 188575 - protein, 74 aa, Glycine max
  Clone ID: PAT_MRT3847_141298C.1.pep
FKDLLWLGKLTYSVADKLAAILLGVHIFYLSPQECHYSLPSDSVGICFPRSIPLLGLTPLIYSLSLRKLNYMSI

SEQ ID NO: 188576 - protein, 55 aa, Glycine max
  Clone ID: PAT_MRT3847_141299C.1.pep
RVVEFLAARSIAQTPRVKMVHSLSPEIDPALKPVHAPHILNKCPDALGSGMASRA

SEQ ID NO: 188577 - protein, 99 aa, Glycine max
  unsure (1)..(99): unsure at all Xaa locations
  Clone ID: PAT_MRT3847_14129C.1.pep
LQKNIGREPENVYYRRLTMNEPKIKDDVLDVLAGENLLTFLSTELRDENRIDXAVMDLTSDEHFVLIQRACLLLDSHLIQHGPSMRDDTLYVTTNDMHT

SEQ ID NO: 188578 - protein, 98 aa, Glycine max
  unsure (1)..(98): unsure at all Xaa locations
  Clone ID: PAT_MRT3847_1412C.1.pep
GEALVGLTLMVILSWYAYDEFFLGQRHACDFWTFDAWPLEAFLRFGYXLEVVENSVIVESISVALCDLYGAGLMPFSLLXPCSVEGLSFCGVPDRLSI

SEQ ID NO: 188579 - protein, 85 aa, Glycine max
  unsure (1)..(85): unsure at all Xaa locations
  Clone ID: PAT_MRT3847_141300C.1.pep
AEIEIGDGLPDIGGTAKXVGALKQARFEVRXKKDMTLGSTLSVDMPLDKRNFSXSSYRLTDVGQSVTFNKVKVLEYVGLAPKGSL

SEQ ID NO: 188580 - protein, 83 aa, Glycine max
  Clone ID: PAT_MRT3847_141301C.1.pep
ILRFLLFLSLKHFKKFTFLFLIIIIPTLPLIYFPYKIFILKILLLNSFIIFIKHLLTSLLQLILFLQINFQNNFNNFIFSSFI

SEQ ID NO: 188581 - protein, 152 aa, Glycine max
  unsure (1)..(152): unsure at all Xaa locations
  Clone ID: PAT_MRT3847_141302C.1.pep
MVVGEQTNGWPPIGAPLNVHRDEHWTNFDSSVNAVSFGFVATAILISMFLVMAIFERYLRPTSPPLSPSATTRRRSPSDVEAQIGFSGKLAHASPKMSVYASGVXVLMPGDEIPTFIAHPAPCYPERISWPSHQHNNTLPCSSSNTLPTTTI

SEQ ID NO: 188582 - protein, 386 aa, Glycine max
  unsure (1)..(386): unsure at all Xaa locations
  Clone ID: PAT_MRT3847_141303C.1.pep
MDAKDILGLPKNSFPSLEKKSRPPKESQRKPDGISREVYALTGGLASLMPAIEASQLKKKPLPLEKITWQWLPFTSSARKDNLHLYHWVRVINGVPPTGDYSFAKYNKSVDVIKYTDEEYDKYLSDPTWTKEETDQLFDLCERFDLRFIVIADRFPSSRTVEELKDRYYSVSRAILIARAPSSGDVVAHSIVKETYNVAQEMERKRALSMVLSRXATERAVPGETISPSNVQIPMAVPDNASTLATLRMLRLYLKIYALEQMVQAANASAGLRTIKRVEQTLQDLGVNLKPRVPTKAVCAEHLELRKEILTLXLNLQKQVQYKEAEGSSFRDGSYGETPGTPKDRTFVPDSTNFGVERVGKKDQKRKAPGAPSAHKRPRKLKASDL

SEQ ID NO: 188583 - protein, 169 aa, Glycine max
  Clone ID: PAT_MRT3847_141304C.1.pep
EGGTGILTSDEVLRAYAIARGFSTQGLGQPDESRAARYILKDYVKGKILFCHPPPTDPPLDPKHFNRELYDVNHLPAKRRHHPLANLPGNHSLAGPEATTDDMSLMDDELLDGGGVPVQGAKTQRMDKRFFGPGQGMGRVNQPFHYKYSEQGKELSGRKAKMMAALEKD

SEQ ID NO: 188584 - protein, 433 aa, Glycine max
  unsure (1)..(433): unsure at all Xaa locations
  Clone ID: PAT_MRT3847_141305C.1.pep
MDAKDILGLPKNSFPTLEKKSRPPKESQRKPDGISREVYALTGGLAPLMPATEASQLKKKPPPLEKITWQWLPFTSSARKDNLHLYHWVRVVNGVPPTGDYSFAKXNKSVDVIKYTDEEYDKYLTDPMWTKEETDQLFDLCERFDLRFIVIADRFPSSRTVEELKDRYYSVSRAILIARAPSSGDVVAHSIVKETYNFAQEMERKRALSMVLSQTRQQERRDEEVLVEAKXIAEKRLPPKVAGQSQFVASNAGAEAIERAVPGETVSPSNVQLPMVAPDNASTLASLRMLRVYLRTYALEQMVQAGNASAGLRTIKRVEQTLQDLGVNLKPMVPTKAVCAEHLELRKEILTPTRPQKQVQYKEAEGSSFRDGSYGETPGTPKHLHRGGDQDRTFIPDSMNFGVERVGKKDQKRKAPGAPSAHKRPRKLKASDL

SEQ ID NO: 188585 - protein, 62 aa, Glycine max
  Clone ID: PAT_MRT3847_141306C.1.pep
GAAINPAVTFGPPVVRWTRTHHWFFWAGPLIEGEIAALVFKVVFISPTHEQITTVDFKGGKM

SEQ ID NO: 188586 - protein, 129 aa, Glycine max
  Clone ID: PAT_MRT3847_141307C.1.pep
AANASAGLRTIKRVEQTLQDLGVNLKPRVPTKAVCAEHLELRKEILTWLNLQKQVQYKEAEGSSFRDGSYGETPGTPKHLHRVGDQDRTFVPDSTNFGVERVGKKDQKRKAPGAPSAHKRPRKLKASDL

SEQ ID NO: 188587 - protein, 114 aa, Glycine max
  Clone ID: PAT_MRT3847_141308C.1.pep
MGIFTAVDHSANPAPVEVYGWRIYLLAISAAFGSAMFGYDSAFIGGTLSLASFRRTFGLTPETQAALSSHIVSTFQGGCFFGALFIYPALVRFGRRPCLILAGILFTIGARIQN

SEQ ID NO: 188588 - protein, 64 aa, Glycine max
  unsure (1)..(64): unsure at all Xaa locations
  Clone ID: PAT_MRT3847_141309C.1.pep
XDIMTHXXXSSXXHXDFHAXSXVXSTXPLIVPXXLEPIHEQKSKACMFXXDLXFSHSLXXXTFG

SEQ ID NO: 188589 - protein, 92 aa, Glycine max
  unsure (1)..(92): unsure at all Xaa locations
  Clone ID: PAT_MRT3847_14130C.1.pep
MALDLQRGICYIPEWLARPSKYAXNIQDDPVIRDCIKHYIRRNIRISSGVEGIGQIKIQKSIDLIQVIIYMGFPKFLIEGKPQKIEELQTNM

SEQ ID NO: 188590 - protein, 44 aa, Glycine max
  unsure (1)..(44): unsure at all Xaa locations
  Clone ID: PAT_MRT3847_141310C.1.pep
RPRVRKRDVTYLLIXRRHKLKAPSLLRDTSQGQVIYMLLKAKIA

SEQ ID NO: 188591 - protein, 92 aa, Glycine max
  Clone ID: PAT_MRT3847_141311C.1.pep
PILEIRNRRQCAWLPPSIELLVLLAPYSMSLSDLQLQLTNFDEDEGVSEYTPNTRCGPKCALKRTHAFRAHQHRGCIFSFLRRARLTLSLGT

SEQ ID NO: 188592 - protein, 116 aa, Glycine max
  Clone ID: PAT_MRT3847_141312C.1.pep
YSRITHPTNQVGSGPLTHALLLLFLFHVCQLLSRLFTLVYLCYQVHQYAPLILPIVHFFFPSYPLFIILYFPLYFNAPQYGSFYRSITSSLPLLLLNPPPPPKEGGRHTVMTGNLP

SEQ ID NO: 188593 - protein, 59 aa, Glycine max
  Clone ID: PAT_MRT3847_141313C.1.pep
RHLNTLAVSWKSLLTFKDFLFVALRFPRRLSCSVSELGEGNRTCLIKKRHDHSLSTFIL

SEQ ID NO: 188594 - protein, 88 aa, Glycine max
  Clone ID: PAT_MRT3847_141314C.1.pep
VDFEIGLCLQIKELKSRLLQEENTAGSGVSVKEEEITTMPADSEEKTMEQSKSDPPSETSNINPSSESSEEDHLNYECFNINSDDCVV

SEQ ID NO: 188595 - protein, 67 aa, Glycine max
  Clone ID: PAT_MRT3847_141315C.1.pep
ELFAQCQSDASSSEIGCGLAFISCPLLSVYVGKLLSLNSRVCDLGTIILIIGFHKLFPRSVSSGVCA

SEQ ID NO: 188596 - protein, 532 aa, Glycine max
  Clone ID: PAT_MRT3847_141316C.1.pep
NDEESGVGGHGLKYEYSQLEKVNKSCPKHKPNDKGKRYPEAYSDDMRFDMSIRESNKRVAWGYSAPLAVDDEFYESGMYASSYSFSSFSTEVPDGTLNINDNNGSLFNMSYKISLSVISYSKIGDNTSVFNLSSERVKISAEGVYDAGAGTLCMVGCRDLLSNTNTEIPIAHSVDCEILLKFQFPSLDTYDGGYIKGSIESTRHESDPLYFKRLDISAVAYYREAARRNVWRMDVEVMMALISTTLSCVFVGLQLNKVKKEPNLLPFISLIMMSILTLGFMIPLVLNFEALLTQNPNNTMRVFRNNGWLEVNEISVRLITMVAFLLQFRLLYLTWSARKSGESKKGLWIAERNSAYVTSLLYAAGLLIAWLLKLKNGDNKDSVYVPMYQPSPWENIKSYGGLVLDGFLLPQIILNLFLNMRDNVLSFSFYFGTTFVRLLPHAYDLYRTHSDAALDSRSYYYADPSEDFYSTAWDIAIPLGGILFAMIIYLQQRFGSHYILPHRFKGSKVYEKVPEKVPVVTESEAEVDTTKI

SEQ ID NO: 188597 - protein, 79 aa, Glycine max
  unsure (1)..(79): unsure at all Xaa locations
  Clone ID: PAT_MRT3847_141317C.1.pep
VFPELLSRNGVKFGQAVWFKAGSHIFSDGELDHMGNASLVHAQSILAIWATQVILMSPVEGYRMAXGGPLGEVTGPFYP

SEQ ID NO: 188598 - protein, 33 aa, Glycine max
  Clone ID: PAT_MRT3847_141318C.1.pep
KDFDNSIFPARYRAHLLLSRDRACHYELTMRVI

SEQ ID NO: 188599 - protein, 65 aa, Glycine max
  unsure (1)..(65): unsure at all Xaa locations
  Clone ID: PAT_MRT3847_141319C.1.pep
PWEKMVESCKRLXIMNGTEAMGMAPRAKEICKSRKLKRSQIQCTMKYRTKEDAIKIYIYIYMKHF

SEQ ID NO: 188600 - protein, 46 aa, Glycine max
  Clone ID: PAT_MRT3847_14131C.1.pep
TVVGSPLRTGISYMDHSVEFESRSQSANMVPRRVTVRNVVPCKPSL

SEQ ID NO: 188601 - protein, 78 aa, Glycine max
  Clone ID: PAT_MRT3847_141320C.1.pep
MSPTSYSHLFLSMEVQTHSLSPTFHFHLLSQWTTDTNRPSLGPAIGVLKLHNVYRRYRTRREVVDSVVCRLGAMVASP

SEQ ID NO: 188602 - protein, 99 aa, Glycine max
  unsure (1)..(99): unsure at all Xaa locations
  Clone ID: PAT_MRT3847_141321C.1.pep
LHPPQSDQIRLKMLYTYTCHTYVYFWESNGHTPYDSSVFGPKLEDSVXSVREGLTHVLPRDHALPVFTXHXSDCPTCKSEETNMLELLXLNTDMGVLIH

SEQ ID NO: 188603 - protein, 60 aa, Glycine max
  Clone ID: PAT_MRT3847_141322C.1.pep
RAAIYLRKKGPEIKNPGLAVPISGFPLRGSFLGKKFWGMLGKRQPVAMGKDPRSLVNPRG

SEQ ID NO: 188604 - protein, 90 aa, Glycine max
  unsure (1)..(90): unsure at all Xaa locations
  Clone ID: PAT_MRT3847_141323C.1.pep
PTRPVVSTCAAVASILTGVLAGMLALGERLPSEPKARLALLLGXRKRSNVDKNFDLRRATSSRVRETSPSAVIQAATLNHLLSSSSKEKA

SEQ ID NO: 188605 - protein, 74 aa, Glycine max
  unsure (1)..(74): unsure at all Xaa locations
  Clone ID: PAT_MRT3847_141324C.1.pep
VPEADISAFRECLSLSWKNPYVLRLAFSAGIGGYLFGYDTXSYLDAQTILYIIDDFKEADRKTWLQEALMSMAL

SEQ ID NO: 188606 - protein, 42 aa, Glycine max
  Clone ID: PAT_MRT3847_141325C.1.pep
LLMRDPFFSKGVGIGPFKPIVRISNHKFVNNPKSACLGIPCY

SEQ ID NO: 188607 - protein, 222 aa, Glycine max
  Clone ID: PAT_MRT3847_141326C.1.pep
HASGSLEVQMTTGHVKAVIWDIFAAGTDTSASTLEWAMAEMMKNNDSWEKAQAVIRQAFKGKETIRETDLEELSYLKSVIKETLRLHPPSQLIPRECIKSTNIDGYEIPIKSKVMINTWAIGRDPQYWSDAERFIPERFDGSYIDFKGNSYEYIPFGAGRRMCPGMTFGLASIMLPFALLLYHFNWELPNEMKPEDMDMSENFGLTVTRKSELCLIPIVNDL

SEQ ID NO: 188608 - protein, 55 aa, Glycine max
  Clone ID: PAT_MRT3847_141327C.1.pep
GPRGPPTGPVFSGLGPKFALMYPQRAFVHWYVGKGMEKVKFFEAREDLAALGKIY

SEQ ID NO: 188609 - protein, 40 aa, Glycine max
  unsure (1)..(40): unsure at all Xaa locations
  Clone ID: PAT_MRT3847_141328C.1.pep
SKKHSYISEQNICELTLHVIHVHENYMKNMVEXLGYAHLV

SEQ ID NO: 188610 - protein, 34 aa, Glycine max
  Clone ID: PAT_MRT3847_141329C.1.pep
CFNPYLTDTRPLDDHDNAYKIMQFLTKKKKGKEK

SEQ ID NO: 188611 - protein, 75 aa, Glycine max
  Clone ID: PAT_MRT3847_14132C.1.pep
TCDFDGTATTTTEDPSYGSCIYAGSANARNGGRSSSSTALGLGPVSPVGAGLNLQVSTLQYSISFISVFFSLLLS

SEQ ID NO: 188612 - protein, 27 aa, Glycine max
  Clone ID: PAT_MRT3847_141330C.1.pep
KEHVRVGQTRGSSAIEHREFSLWWLRA

SEQ ID NO: 188613 - protein, 158 aa, Glycine max
  Clone ID: PAT_MRT3847_141331C.1.pep
CLSFVLDFFHSVYFFHDCFVQGCDGSLLLDGSPSERDQPANGGIRTEALQTIDDIRAIIHKECGRIVSCADITVLAARDSVFLTGGPDYAVPLGRRDGLSFSTSGTSDLPKPFNTTGVTLDAFAAKNFDVTDVVALSGAHTFGRAHCGTFFNRLSPLD

SEQ ID NO: 188614 - protein, 133 aa, Glycine max
  unsure (1)..(133): unsure at all Xaa locations
  Clone ID: PAT_MRT3847_141332C.1.pep
HVMTKRTIQGITVFCARITWSNYDWNQYHTQSYRYRLIEHXHTLLTNIMCYIPRDIALATASAHDLXSYGPYLGQSTSAGTYSAGLMMARTLLKTLEMDEESEGHDVATGEDYTMVPAQSERPYGADTNVCLI

SEQ ID NO: 188615 - protein, 345 aa, Glycine max
  Clone ID: PAT_MRT3847_141333C.1.pep
MARSSAYPLFLISSILFISHIYASQVEAKPPVVKGLSYSFYSKTCPKLESIVRKHLKKVFKDDNGQAPALLRIFFHDCFVQGCDGSLLLDGSPSERDQPANGGIRTEALQTIDDIRAIIHKECGRIVSCADITVLAARDSVFLTGGPDYAVPLGRRDGLSFSTSGTSDLPKPFNTTGVTLDAFAAKNFDVTDVVALSGAHTFGRAHCGTFFNRLSPLDPNMDKTLAKQLQSTCPDANSGNTANLDIRTPTVFDNKYYLDLMNRQGVFTSDQDLLNDKRTKGLVNAFALNQTLFFEKFVDATIKLSQLDVLTGNQGEIRGKCNVVNARKSLLTSVVEEVVQLVDQF

SEQ ID NO: 188616 - protein, 69 aa, Glycine max
  Clone ID: PAT_MRT3847_141334C.1.pep
GSKESSTREYEIVIACRHKLKCPSQSVGQSFVSHETDAESRQHSGCVGEDKQNWNWSTEHFSVALLELD

SEQ ID NO: 188617 - protein, 49 aa, Glycine max
  Clone ID: PAT_MRT3847_141335C.1.pep
RAHKYCLFAYIRMLFGLLSFFFFPSAAYRLLILLPGENCFKLITTHVIS

SEQ ID NO: 188618 - protein, 60 aa, Glycine max
  Clone ID: PAT_MRT3847_141336C.1.pep
SNGISSQLHIITTDMMLQMGTFFHHLSLEIHILYIIIMMATHTWDSFLMMMIIGCLTYWL

SEQ ID NO: 188619 - protein, 59 aa, Glycine max
  unsure (1)..(59): unsure at all Xaa locations
  Clone ID: PAT_MRT3847_141337C.1.pep
MRGGVLRMTMLYNHGPPLNRFKQRPLCRSQGMCKKTGDNGKKPGEPIXRHMSGTRFPNK

SEQ ID NO: 188620 - protein, 45 aa, Glycine max
  Clone ID: PAT_MRT3847_141338C.1.pep
AKNSSLKQAFASTIDGRAPVYKVRCPAQAWLQSAPVCLRLILPGQ

SEQ ID NO: 188621 - protein, 104 aa, Glycine max
  Clone ID: PAT_MRT3847_141339C.1.pep
MASLTMMASFAAVAVAAPSRRGTFAVVRSAKVDRCQEPATLAATEARPAADGRRAVMLAAAAAAVAAIGGAGAAMAGPKNGTPEAKKKYAAICVTMPTAKVCHN

SEQ ID NO: 188622 - protein, 81 aa, Glycine max
  Clone ID: PAT_MRT3847_14133C.1.pep
FSGRLFFLPLLASLLWLELDTLSAALASSTCSRLISTESGILFIGIELVSVVIYLTSKLLLFDLYTLFFGLNSWPRGPEDL

SEQ ID NO: 188623 - protein, 72 aa, Glycine max
  Clone ID: PAT_MRT3847_141340C.1.pep
LHQWVKLATATGIATLFPYPFVDLVLSYVNFLHDICLPSFTLSLTLHFDIWLLILSSVSSSLSPKIESFAFF

SEQ ID NO: 188624 - protein, 73 aa, Glycine max
  Clone ID: PAT_MRT3847_141341C.1.pep
SGSDQPFRPRVRPRVRTLALHKALMFFNGQRSGKLPKWWTKTAKSLAKNATFPFIRLITHFRKFPRWIILWND

SEQ ID NO: 188625 - protein, 59 aa, Glycine max
  Clone ID: PAT_MRT3847_141342C.1.pep
YNGLFYNIKMYLIGSLKVDLTKEMQYVCLLYLPFSNMAPPRTSCSFPIKPSVGSPRTRG

SEQ ID NO: 188626 - protein, 52 aa, Glycine max
  Clone ID: PAT_MRT3847_141343C.1.pep
LILIQIKHNYYTNLPQPLFDNSQFSPKKINLFKLHTPSFFFKIPTTPFITFL

SEQ ID NO: 188627 - protein, 419 aa, Glycine max
  Clone ID: PAT_MRT3847_141344C.1.pep
MEEEEEEDTSPPFWTESGGRRRLRRSYSLFLSSSAPLICLLVIALAFMLVIIPTLHSFTTQIFKPNSVKKSWDSLNFVLILFAILCGFLSRNNSNTNESFSDTPLEYDKPNPPLPRPWYEESDRTPYKSYNRLRSFSSHPDLRQESQWLAADERWRFYDDTHVNGYRGFDLEEHRQHRTEAGEEESVENIEVVAKEVPPPPAPAERRSGGNKNKRTSATKELLTSSKGKKKKQRQGNVESVKSIPSQPSSVFHNMFSSKESKLKKVNSRVPSHVSFSKTQPVRGDVVATSSRSNKREDFYASEENVVVTGNDSPLISIPPPPPPPPFKMPAWKFRVQGDFVRIDGISSWSSDLEDEIVESPSSEDGGAPEILLFYPSPDVDTKADTFIERFRAGLREEKKGIRTSNLRPSPKPEAGRTK

SEQ ID NO: 188628 - protein, 74 aa, Glycine max
  unsure (1)..(74): unsure at all Xaa locations
  Clone ID: PAT_MRT3847_141345C.1.pep
MLPNNTCTIVPDAGARHHTHVVSPQQCXSAVVQEIASPVFNGWSEVRGFDNPQGYKHFXLKSCHVILGDCDIRT

SEQ ID NO: 188629 - protein, 52 aa, Glycine max
  Clone ID: PAT_MRT3847_141346C.1.pep
KCHTLHPSLRQLKEVWKFSNRQSILDQRVMPNFQNCIKQSNKPKLTPIPGQG

SEQ ID NO: 188630 - protein, 90 aa, Glycine max
  unsure (1)..(90): unsure at all Xaa locations
  Clone ID: PAT_MRT3847_141347C.1.pep
GGPPFGAAPKERFGFRGPWPFNPFFFAPPSFPNFFIGXKKGFLXFPFSRVFFFAPVFPPLVFKFPPGENPFFFVSAGAPQNLSQLGFFYP

SEQ ID NO: 188631 - protein, 47 aa, Glycine max
  Clone ID: PAT_MRT3847_141348C.1.pep
HFKQHNTNNSLNTFLFLSQTNSNHLPVEAPLGTAALWKHPSLRITST

SEQ ID NO: 188632 - protein, 65 aa, Glycine max
  Clone ID: PAT_MRT3847_141349C.1.pep
AFLGLGKSFLAGPTFYGAEQLDPASWLLDPSKGRFAQFQGRLAPLQALLVFVRTLGALYFKSRAG

SEQ ID NO: 188633 - protein, 197 aa, Glycine max
  Clone ID: PAT_MRT3847_14134C.1.pep
FFFFFFFFFFFFFFFFFFFFFFFFFFFFFSGTRGPPRKFRHRPPRRTIFPHREPKKIGANPRKKAAPWEKRKPPHNSTQKKTRDHKKKSPGPQKRDQTNIKCPAPKARLTKGKTEAPKQKKKAPTPGERRVAYCAPQGDFFSPRETDKLSMPLTPGPLKNCKNANPTKICPKRGKKTLAKKEIKPARKKKKRNPPPP

SEQ ID NO: 188634 - protein, 67 aa, Glycine max
  unsure (1)..(67): unsure at all Xaa locations
  Clone ID: PAT_MRT3847_141350C.1.pep
PSFLLKYLCIVFSRRALCLQILXQILTELTTMMIILLLKFXLYLGINCKSSCWRSVLLRKEXTCTQV

SEQ ID NO: 188635 - protein, 64 aa, Glycine max
  unsure (1)..(64): unsure at all Xaa locations
  Clone ID: PAT_MRT3847_141351C.1.pep
WIGFLLPLPKEXPNLNPHYTHIXRFLXSSLNLFCFLFPSLTSSFSPXQKQLRFCXXLYXSPXVI

SEQ ID NO: 188636 - protein, 94 aa, Glycine max
  unsure (1)..(94): unsure at all Xaa locations
  Clone ID: PAT_MRT3847_141352C.1.pep
FGGGPPGPSGGQKAPKGGPLSGVYCFKTSAKGGSFGVGGPHGFTPGIFRGPPNFPFQNVVPDLGQEFGGDPSLTPVLXDNLGFGWGGGLTPFWT

SEQ ID NO: 188637 - protein, 386 aa, Glycine max
  Clone ID: PAT_MRT3847_141353C.1.pep
MRIKRVLRIELSTACFTGNNLSCGASYHQPCETDNADQGSSHKPKTGLIVGIVIGLVVILFLGGLMFFGCKGRHKGYRREVFVDVAEVAVKRLTDYESPGGDAAFQREVEMISVAVHRNLLRLIGFCTTPTERLLVYPFMQNLSVAYRLREIKPGEPVLDWPTRKQVALGTARGLEYLHEHCNPKIIHRDVKAANVLLDEDFEAVVGDFGLAKLVDVRKTNVTTQVRGTMGHIAPEYLSTGKSSERTDVFGYGIMLLELVTGQRAIDFSRLEEEDDVLLLDHVKKLEREKRLDAIVDHNLNKNYNIQEVEMMIKVALLCTQATPEDRPPMSEVVRMLEGEGLAERWEEWQHVEVNRRQEYERLQRRFDWGEDSVYNQDAIELSGGR

SEQ ID NO: 188638 - protein, 289 aa, Glycine max
  Clone ID: PAT_MRT3847_141354C.1.pep
MVEHADLKDGGGDAVSWQIGRCKTEILQHPLYEQLLSAHVACLRIATPVDQLPRIDAQLAQSQNVVAKYAVFGHNNIVADDKELDQFMSHYVLLLCSFKEQLQQHVRVHAMEAVMACWELEQSLQSLTGVSPGEGTGATMSDDENDQVDSDANLFDCSFDGADSMGFGPLVPTESERSLMERVRQELKHELKQGYKEKIVDIREEILRKRRAGKLPGDTTSVLKAWWQSHSKWPYPTEEDKARLVQETGLQLKQINNWFINQRKRNWHSNPSTSTALKSKRKRSNAGDN

SEQ ID NO: 188639 - protein, 26 aa, Glycine max
  Clone ID: PAT_MRT3847_141355C.1.pep
KRPPLFFFFFFFFFFFFFFFFFFFFF

SEQ ID NO: 188640 - protein, 115 aa, Glycine max
  unsure (1)..(115): unsure at all Xaa locations
  Clone ID: PAT_MRT3847_141356C.1.pep
IDEKKKEVVVEKTGGPAESYDDFTASLPENDCRYAIFDFDFVTSENCQKSKIFFIAXGLEENLLLRSPSVARIRPKMLYATSKDRFRRELQGIHYEIQATDPTEMDLEVLRERAN

SEQ ID NO: 188641 - protein, 92 aa, Glycine max
  unsure (1)..(92): unsure at all Xaa locations
  Clone ID: PAT_MRT3847_141357C.1.pep
QPPQVRXFLLKYFPPMCLFRLGXVCLNIFKKAWGPPWALPFVCRGINGVMGPPEPGSPLNCCSGHFLGSGGVXGVPSLARMVPRLPAFPKKG

SEQ ID NO: 188642 - protein, 148 aa, Glycine max
  Clone ID: PAT_MRT3847_141358C.1.pep
MAFRVGGAGGGNASSGMGVAEHSVNTFLELQRKKVHRYVIFKIDEKKKEVIVEKTGGPAESYDDFTASLPENDCRYAVFDFDFVTSENCQKSKIFFIAWSPSVARIRPKMLYATSKDRFRRELQGIHYEIQATDPTEMDLEVLRERAN

SEQ ID NO: 188643 - protein, 77 aa, Glycine max
  Clone ID: PAT_MRT3847_141359C.1.pep
GSFLGLGQSPKRKRQGFFTGNFGSPHVFSFFFPSFSTEKAPSIGCLRPPPSDKAKDKNIEALEFKIKTKITSNKTKR

SEQ ID NO: 188644 - protein, 39 aa, Glycine max
  Clone ID: PAT_MRT3847_14135C.1.pep
SLQLYLSTSTSSVLSVVIMIEGLVDYKLSSPMVRKCVAG

SEQ ID NO: 188645 - protein, 50 aa, Glycine max
  Clone ID: PAT_MRT3847_141360C.1.pep
LTISHMEFNSVARQKQAHLGGLLRRIGTGLLGKTALNHALWNALARPIHY

SEQ ID NO: 188646 - protein, 61 aa, Glycine max
  Clone ID: PAT_MRT3847_141361C.1.pep
DTHWVAPCLECHTLFHRTFVESSTVLTCFETDSTLFHNHQTLLLHVLGLPSSLHQLTLKFL

SEQ ID NO: 188647 - protein, 49 aa, Glycine max
  Clone ID: PAT_MRT3847_141362C.1.pep
MDPQAFIRLSIGSLGLRCTGIELSTAKSGIQTLSLPCVCEIRLRGFPVQ

SEQ ID NO: 188648 - protein, 56 aa, Glycine max
  Clone ID: PAT_MRT3847_141363C.1.pep
DLEIKNKLENYIFFIGFPYFIQQLLLRNDFTRYEYLSCVIKVVVNLIILYKINPTT

SEQ ID NO: 188649 - protein, 219 aa, Glycine max
  Clone ID: PAT_MRT3847_141364C.1.pep
MDPQAFIRLSIGSLGLRCTGIELSTTKSGIQTLSLPCVCEIRLRGFPVQTSSVPVISSTEVIPDTQNVAFSFYLEESDLKALLAPGCFYNTHACLEIAVFSGRKGSHCGVGNKRQQIGIFRMQVGPEWGEGKPVILFNGWIGIGKNKQDNGKPGAELHLKVKLDPDPRYVFQFEDITTLSPQIVQLQGSIKQPIFSCKFSKDRVYQIDSLSAYWLGSLV

SEQ ID NO: 188650 - protein, 151 aa, Glycine max
  unsure (1)..(151): unsure at all Xaa locations
  Clone ID: PAT_MRT3847_141365C.1.pep
SSDNTEFEDDRPPIIAIPPYDIFTIYKPIYQLVKHAQPVAADETDYKLSQLYAYDKSRTPAEFADIPYHRNDRALSMTRTYNRLHIHXPMRLPIQLTDXAHDKPEVTACVIGPXFSTYIHYDFLSVLSDTKQTPGILLKRTKRRHARNDEL

SEQ ID NO: 188651 - protein, 59 aa, Glycine max
  unsure (1)..(59): unsure at all Xaa locations
  Clone ID: PAT_MRT3847_141366C.1.pep
NVNRNFIHYYTSIVSPRIIHVERERSMIPPNSSTMCSILFTXXTLFXSXXLQNXIEQTF

SEQ ID NO: 188652 - protein, 59 aa, Glycine max
  Clone ID: PAT_MRT3847_141367C.1.pep
VNPIREITDDIIFFIYLKSVFKLMLLFFLFLFSFTYSERNRRSITNTLYLLLLPSSCIF

SEQ ID NO: 188653 - protein, 91 aa, Glycine max
  Clone ID: PAT_MRT3847_141368C.1.pep
LLTIFYFTITFKSNFSYLSPHHIFFIYLYYNTITKFTSYFSKLFFPYSSSYKLTPYLSLLSTISLYIYIYNIIFILHFLLIIILFTFLNPT

SEQ ID NO: 188654 - protein, 84 aa, Glycine max
  unsure (1)..(84): unsure at all Xaa locations
  Clone ID: PAT_MRT3847_141369C.1.pep
LXTPXLPSHXRLAXNNVSHHXXQXLQARXPPPXTKPIAKVXXTXTIVCSXXXTTXXTTCPRLKRLXAWASXIXSXLXVGXIRVT

SEQ ID NO: 188655 - protein, 97 aa, Glycine max
  Clone ID: PAT_MRT3847_14136C.1.pep
TSLARMYKNVRFHELRNDKIRFLVLIIGEALGTFGVCDTKTKHTLRILRVLWNVDKVEAQRMEEIFVHPAGRMTLINSIPSYHKSFDLLSKRISDFT

SEQ ID NO: 188656 - protein, 67 aa, Glycine max
  Clone ID: PAT_MRT3847_141370C.1.pep
SKGAFELSKLLGIEVTPSQFVCCMHLSLKQSQVMPFHIVALNSVDIPNVLPLPKPDCCAGFTGSFSI

SEQ ID NO: 188657 - protein, 73 aa, Glycine max
  Clone ID: PAT_MRT3847_141371C.1.pep
QQPHLSTLTLLPQKFNLLIFHSSPSIIPKFTSLLHLWVFFSKHEKVTGKRRKHYAFLWSFYLISLRFCGKYYG

SEQ ID NO: 188658 - protein, 180 aa, Glycine max
  unsure (1)..(180): unsure at all Xaa locations
  Clone ID: PAT_MRT3847_141372C.1.pep
MAETFLCTLESVNEGHPGKLCYQISNAGLDAXLEQDPDSRVGCETCTKTNLVMVFGEITTNANVDYXKIVRDTCRNMCFVLNEVGLDADNCKVLVNIEQYSPDIAQSAHGHITKIPDXIGAGYQSHMFGYATDETPQLMPLRHVLATKLSARLYECXKNGTFPWLRPDGKTXMTVEYYND

SEQ ID NO: 188659 - protein, 110 aa, Glycine max
  unsure (1)..(110): unsure at all Xaa locations
  Clone ID: PAT_MRT3847_141373C.1.pep
MVGGRFSAAIARKVVLSPTKGLFLLSAFPRDXRAKGCVKRFKACGGGAVHLFWKKRNLLXFGLWAKNPNFQVGLPYKGKVVFASFSPRRVFSFYNPVKGGKTNPPREGKP

SEQ ID NO: 188660 - protein, 220 aa, Glycine max
  unsure (1)..(220): unsure at all Xaa locations
  Clone ID: PAT_MRT3847_141374C.1.pep
EKGIGVYGGLFNVTTFTQSFNIFIFLISAVILVLTAFYPRKVFIKEQSSFYKLLTSKLTYNKNSISNKTAEQFRIIEYALIIVFILCGAVFLMSTADLISVFLSIELQSYGLYILSTLYRDSESATASGLTYFLLGGLSSCFILLGSALLYVNSGTTNLDNIYVICSISEIEDLNTLTYXYQPYYLHLSXIILSVXILIQVSAAPFHFDLRCYDEYYIVL

SEQ ID NO: 188661 - protein, 256 aa, Glycine max
  Clone ID: PAT_MRT3847_141375C.1.pep
MDNQRSPLLSWAYYFQGKSMEELRQSLIYTTLELEQTRDAVQEELKKRDEQLLNLKDLLSKTIRERDEAQEKCQRLLLEKLVFQQQQQQAAPVSGISSIEDEPRRGIDSNNGHSLSDCEESIVSSPVIDHLPQPQPQTQSMIELTPDKPLPEKGKLLQAVMKAGPLLQTLLLAGPLPQWRHPPPPLESFEIPPVTIPSPPPPPQPQPQLFHQDTFFNNTNGSSSTTTNCGRLSRKRVFCDGSDFITETKSQRLVLH

SEQ ID NO: 188662 - protein, 113 aa, Glycine max
  unsure (1)..(113): unsure at all Xaa locations
  Clone ID: PAT_MRT3847_141376C.1.pep
RPRVRPRVRDNLAILGDRREAKICPQKGSNFLDIGAFIWTGRAHGVALVYNYXHPFKYTEPTYXRFIGRNGFIGPGYAVEAILALGLTQGSIYFKSIRGIYEAWGNYKFLSLC

SEQ ID NO: 188663 - protein, 306 aa, Glycine max
  unsure (1)..(306): unsure at all Xaa locations
  Clone ID: PAT_MRT3847_141377C.1.pep
VEVMDMVQNVGGGKRSTYDPDELEEEQRERQRKNKINVEFQTFVNRVNDLWGQPQFNGLDLEFDQPLRELGFPGVPHKSSVFIVPTSACLVELIETPFLVVTLSEIEIVNLERVGLGQNNARADSAREDFKRDVLRIDSIPSTSLDGIKEWLDTTDIKYYESRLNLNWRQILKTITDDPQSFIEGGGWEFLNLEATDSESENSEESDKGYEPSDVEPESDSEDEASDSESLVESEDDDDDXDSEEDSEEEKGKTWEELEREASNADREKGNESDSEEDRKRRKAKSFGKSRGAGLSSSMTKRPKLR

SEQ ID NO: 188664 - protein, 315 aa, Glycine max
  Clone ID: PAT_MRT3847_141378C.1.pep
YGCEKTTEGVEVMDMVQNVGGGKRSTYDPDELEEEQRERQRKNKINVEFQTFVNRVNDLWGQPQFNGLDLEFDQPLRELGFPGVPHKSSVFIVPTSACLVELIETPFLVVTLSEIEIVNLERVGLGQKNFDMTVVFKDFKRDVLRIDSIPSTSLDGIKEWLDTTDIKYYESRLNLNWRQILKTITDDPQSFIEGGGWEFLNLEATDSESENSEESDKGYEPSDVEPESDSEDEASDSESLVESEDDDDDEDSEEDSEEEKGKTWEELEREASNADREKGNESDSEEDRKRRKAKSFGKSRGASLSSSMPKRSKLR

SEQ ID NO: 188665 - protein, 249 aa, Glycine max
  Clone ID: PAT_MRT3847_141379C.1.pep
MKFNIANPTTGCQKKLEIDDDLKLRAFWDKRISQEVLGDALGEEFKGYVFKITGGCDKQGFPMKQGVLTPGRVRLLLHRGTPCFRGYGRRNGERRRKSVRGCIVSPDLSVLNLVIVKKGESDLPGLTDVEKPRMRGPKRASKIRKLFNLSKEDDVRKYVNTYRRTFTTKAGKKVSKAPKIQRLVTPLTLQRKRARIADKKKRIAKAKSEAAEYQKLLASRLKEQRDRRSESLAKRRSKLSSAAKPTVTA

SEQ ID NO: 188666 - protein, 101 aa, Glycine max
  Clone ID: PAT_MRT3847_14137C.1.pep
FGLNPNWLKGKNGFKKGPAILPGKKKKFWPHFKKMIFYPPIFSNIFVVIQGQPPGLKKGFWGNRSPFSRIKGTPKFGPPKWVFHLFPQKKGNFFYLVKNFF

SEQ ID NO: 188667 - protein, 72 aa, Glycine max
  Clone ID: PAT_MRT3847_141380C.1.pep
MKFNIANPTTGCQKKLEIDDDLKLRAFWDKRISQEVLGDALGEEFKGYVFKITGGCDKQGFPMKQGVLTPGR

SEQ ID NO: 188668 - protein, 47 aa, Glycine max
  Clone ID: PAT_MRT3847_141381C.1.pep
ILVLRRAFLNDQAGLFQSYIGRCMIQIELYMEHTILHYYIWTDFFLQ

SEQ ID NO: 188669 - protein, 52 aa, Glycine max
  Clone ID: PAT_MRT3847_141382C.1.pep
LRSLSKISNMSIHFPDRNHSYHHQITLTSILCRSYPKAQPTGKKKQARALSV

SEQ ID NO: 188670 - protein, 192 aa, Glycine max
  unsure (1)..(192): unsure at all Xaa locations
  Clone ID: PAT_MRT3847_141383C.1.pep
YPRSLPPSLLPSPLDQPLLLYSYAIYCSRAFWDKRISQEVLGDALGEEFKGYVFKITGGCDKQGFPMKXGVLTPGRVRLLLHRGTPCFRGYGRRNGERIRKSVRGCIVNPYLSVLNLVIVKKGESDSASLTDXRSQRLRGPKRASKIRKLFNLSKEDDVRKYVNTYRRTFTTKAGKFPEVHKFSICVCMLGR

SEQ ID NO: 188671 - protein, 47 aa, Glycine max
  Clone ID: PAT_MRT3847_141384C.1.pep
KARLVTVFLRQTLRASGEDGTSLMALPPKDWKDRALGQADAIFNPQG

SEQ ID NO: 188672 - protein, 184 aa, Glycine max
  Clone ID: PAT_MRT3847_141385C.1.pep
MNRLLLVRHPLLALSKPPLSPFSQTYYYSYTPARINSELYKIKDPPGVSSVHTSSTFCTTNKDLSTENCVPCNTKDLQPMTEDAARTMLQQIAQWNLVNEDGVLKLRRSWKVKTFTKGLEFFRIIAGLAEAEGHHPDLHLVGWNNVTIEIWTHSVGGLTQNDFILAAKINELNLHDLLRRKTSN

SEQ ID NO: 188673 - protein, 84 aa, Glycine max
  Clone ID: PAT_MRT3847_141386C.1.pep
KPALLNLLWRRVLGLNVRPKLMVASPIKGRHYGTRSANNRMTSNKTLRNFNYLAISKKYNITYCLIFFLHMLFLNLICFFFFYE

SEQ ID NO: 188674 - protein, 48 aa, Glycine max
  Clone ID: PAT_MRT3847_141387C.1.pep
YWGLYSLVFNQSIFVCVSSNSQFVTDANTADECTCDHALRESLYGTCA

SEQ ID NO: 188675 - protein, 87 aa, Glycine max
  Clone ID: PAT_MRT3847_141388C.1.pep
QTQAQTKAICKKPFSMPKHNPEIHSNRGVCCARNPRPHNNPRFSNATGRGRTYHFAVGSANSTGTNLRGSGPRHAFGEKGRAQKKGI

SEQ ID NO: 188676 - protein, 99 aa, Glycine max
  Clone ID: PAT_MRT3847_141389C.1.pep
EKNFGEAFAEKETPLKAPDLIFGIDNGVPPFFSLSAQEHLLVAMGVAAMLVTYGQRKTCSFWGGGTLDYSPESVNLIFFNCQKKRESHNKLLCKKCALL

SEQ ID NO: 188677 - protein, 55 aa, Glycine max
  Clone ID: PAT_MRT3847_14138C.1.pep
MPALPHGNHQFGSSNGFWSKNRDDVGYNQLHKFWCELLPQARQELLRIDKQPFLS

SEQ ID NO: 188678 - protein, 44 aa, Glycine max
  Clone ID: PAT_MRT3847_141390C.1.pep
RYANHSSAWYYIAACQRLGLSTPCICMLSFICKSTALITIVSLI

SEQ ID NO: 188679 - protein, 121 aa, Glycine max
  Clone ID: PAT_MRT3847_141391C.1.pep
MGSLESGISLKKGSLFGSQFSRKEKNPFSHRFRSSFSRLLFKKLDYVQWICTVVVFLCLVVVFQMFLPGSVVQNSGEESLKDVRMRSDNFLQYGDIHKGLLDIGEDAVFLPKISEKSVVGV

SEQ ID NO: 188680 - protein, 87 aa, Glycine max
  Clone ID: PAT_MRT3847_141392C.1.pep
SYCADRMHHRLLCQNMAHPSKLLPLLKPPPQHQRQLVKLGTVAQPTSRWRLTSPPNKPQRKNYFTNPGPMLPVFSRFFILVQIPTIG

SEQ ID NO: 188681 - protein, 68 aa, Glycine max
  Clone ID: PAT_MRT3847_141393C.1.pep
ERVDVDDTSNLWSIHLHTRVLGAPEYCHANFTNYFTHRFWSNPIYAASVKRRDPCYSNTGVMVIDLWK

SEQ ID NO: 188682 - protein, 78 aa, Glycine max
  Clone ID: PAT_MRT3847_141394C.1.pep
PHKTGPLRMVRWPHLTEATDPWGRTSGCQYSFRNTFSRLFTTFNPLDPFILWSFTWPTSHVSFPSRGSRYTQGRRINY

SEQ ID NO: 188683 - protein, 128 aa, Glycine max
  Clone ID: PAT_MRT3847_141395C.1.pep
GRNRRDPPRRRTRTRPQRPGHGGGKRSSSRGHKTAGGEGGRSGPRGDSRGKTGARAETKAGKPRPNARRHTRQAGRAHRENRGASSQAGSQGRRGDRQRRARTRHGTHHRQSEERCGRPQTRTNREGK

SEQ ID NO: 188684 - protein, 69 aa, Glycine max
  Clone ID: PAT_MRT3847_141396C.1.pep
YMNVHIFLFLFEHQKTNIVVLDIIYNFLYFFILYFLHVHILKIYLKLKIDSFLLSHFNVHITFSKILSM

SEQ ID NO: 188685 - protein, 89 aa, Glycine max
  Clone ID: PAT_MRT3847_141397C.1.pep
EEHQQFVKDTCIGKGVSPEGKCMSEDCAVNHDPMSCHFENDLNTRRDSNLRTMEAMSINSNGPEYESKPLTLKDAMEFYDSRGLVMDGE

SEQ ID NO: 188686 - protein, 48 aa, Glycine max
  Clone ID: PAT_MRT3847_141398C.1.pep
IPKILVALTGSCTRTANNSTLSKNSIMSFPMKKRKRNVTSSFCSHQCR

SEQ ID NO: 188687 - protein, 65 aa, Glycine max
  Clone ID: PAT_MRT3847_141399C.1.pep
FIHAVGSAGLPIVKLTLSATRLMSVSSLILLVSLYPPCFWLVSCLVLCRISISLRQHLSLEFPKL

SEQ ID NO: 188688 - protein, 101 aa, Glycine max
  Clone ID: PAT_MRT3847_14139C.1.pep
RTRQAELNDSRCPLCNSPDEDATHLFFYYTKTLPLWWESQSWINSSGVYPHTSKDHFLQHDNRSAVGVRARRWKCWLITLTWTIWKHLNRIVLDNQSFDGS

SEQ ID NO: 188689 - protein, 37 aa, Glycine max
  Clone ID: PAT_MRT3847_1413C.1.pep
AKDRRAFRDWDGWIIELGADQRFVHWDWAWTSLDWAS

SEQ ID NO: 188690 - protein, 56 aa, Glycine max
  Clone ID: PAT_MRT3847_141400C.1.pep
PLSGSSPQDNHLGHSGSLLKRLHVIDDQLNLLMIGADDHLVGTLSLLEQLEPIRLE

SEQ ID NO: 188691 - protein, 63 aa, Glycine max
  Clone ID: PAT_MRT3847_141401C.1.pep
ELIGIFYSVVSAVLHNWCVFLLMPIMFLLTFPFNFSGWLIAISYSNLTGKHVGPLYSYFHKFV

SEQ ID NO: 188692 - protein, 209 aa, Glycine max
  unsure (1)..(209): unsure at all Xaa locations
  Clone ID: PAT_MRT3847_141402C.1.pep
MTADIVDGDRPNETPTVPDVGLGYAWLSDFPQAWAETGGMGLAVRQAPLIILLKATSTPVSIKQYPMSQEARLGIKPHIQRLLDQGILVPCQSPWNTPLLPVKKPGTNDYRPAQDLREVXXRGEHIHPTVPKPYKLLSGLPPSHQRDTVLDHNDAFLXLKTPTPTXQPLFAFESRHPDMGISRKLTWYQNSKGVQIHFPPSIDKGLKHR

SEQ ID NO: 188693 - protein, 109 aa, Glycine max
  Clone ID: PAT_MRT3847_141403C.1.pep
GSEEKQKTLSHVEEGITLFHLWGWKGITPASPVMIGKKIFLGGYKGSKKCFPGTGTICFAKGVMFNRICLGKLNYEHERCVYQGRNYPLGFKLPAFWWGMLKSYTLDSF

SEQ ID NO: 188694 - protein, 109 aa, Glycine max
  unsure (1)..(109): unsure at all Xaa locations
  Clone ID: PAT_MRT3847_141404C.1.pep
LAQLLHVIPAHGCSECSEVHVAQTGHHIRDCSGTNGRQRRSSHAWVKGSVNDILVPIESYHLFDPFGRRIKHDTRFEYDRIPAVVELCIQAGVDIPXYPSRRRTNPIPM

SEQ ID NO: 188695 - protein, 70 aa, Glycine max
  Clone ID: PAT_MRT3847_141405C.1.pep
AQNDDLFSVLILFLKIFLEKIWLNFQTNIFLHLFYVLFENRKQKTFNPSIIFNILKKNAYDILFLKLYIG

SEQ ID NO: 188696 - protein, 203 aa, Glycine max
  unsure (1)..(203): unsure at all Xaa locations
  Clone ID: PAT_MRT3847_141406C.1.pep
MNGNGGRRVQENESKVGLLKSLPQSEGKLVLFEADIYNPNDFDLAIEGCKFVFHVATPMIHEPGSQYKDTSEAAVAGTKSIFLSCVRAGTVKRLIYTASVVSASPLKEDGSGFKDAMDENCWTPLNDSLAYIYRDDPFLKGYTYSKTLSERHVLSYGNEENGGGMEVVTLTCGLVXGDTLLSSTPASGVVCIAQIMQNERAYI

SEQ ID NO: 188697 - protein, 343 aa, Glycine max
  Clone ID: PAT_MRT3847_141407C.1.pep
MVMGEEGCKVCVTGGSGYIGSWLIKKLLAKGYTVHATLRDLKNESKVGLLKSLPQSEGKLVLFEADIYNPNDFDLAIEGCKFVFHVATPMIHEPGSQYKDTSEAAVAGTKSIFLSCVRAGTVKRLIYTASVVSASPLKEDGSGFKDAMDENCWTPLNDSLAYIYRDDPFLKGYTYSKTLSERHVLSYGNEENGGGMEVVTLTCGLVGGDTLLSSTPASGVVCIAQIMQNERAYISLKFLKELLGKIPLVHVDDVCEAHIFCMESTSISGRFLCASSYISLEEMANHYALHYPEFNVKQEYEDGLKKDIKWASTKLCDKGFVYKYDAKMLLDDCIKCARRMGDI

SEQ ID NO: 188698 - protein, 84 aa, Glycine max
  Clone ID: PAT_MRT3847_141408C.1.pep
CSPSLSHSPLRIVSLVSNVCPHSVLLLRCIFQLVTVSAIFLACLGGMLLSVDLSCRATLGGNVNLRAYLLISAPCGKKKKKRPP

SEQ ID NO: 188699 - protein, 133 aa, Glycine max
  Clone ID: PAT_MRT3847_141409C.1.pep
KELVSGSLLHRFVDGDDEFRNSRFKLIPSVPKGSWIVRQSVGSTPCLLGKAVDCNYIRGPKYLEIDVDIGSSTVANGVLGLVIGVITTLVVDMAFLVQANTPDELPERLIGAVRISHLELKSAIIPKLESDPS

SEQ ID NO: 188700 - protein, 51 aa, Glycine max
  Clone ID: PAT_MRT3847_14140C.1.pep
QQQTIYARSSKLGGFRFPSSKWIITPPLNCSSCVTITDGTHILLKRWILSF

SEQ ID NO: 188701 - protein, 466 aa, Glycine max
  unsure (1)..(466): unsure at all Xaa locations
  Clone ID: PAT_MRT3847_141410C.1.pep
YGGGGLFEEVDGHTAVLYHRLQLDWFGMYVWTREGRFVRYWRRNDDGSYVVLFRSREHENCGPQPGCVRAHIESGGFNISPLKPRNGRPRTQVQHLMQIDLKGWGVGYLSSFQQYCVRQMLNSVAGLREWFAQSDERNAHPRIPVMVNMSSTAVSSKKNQKPNDFSVNPTSLDQMNATSRSSALIDEYSDDEEDFQIAEPEQEAYQIGLENDVRKTALEEEPAHEIDFSSFSGNLRRDDRDNARDCWKISDGNNFRVRSKHYCYDKTKKVPAGKHMLDLVAVDWFKDSKRMDHVARRHGCAAQVASEKGFFSIVINLQVPASTHYSMVFYFVTKELVSGSLLHRFVDGDDEFRNSRFKLIPSVPKGSWIVRQSVGSTPCLLGKAVDCNYIRGPKYLEIDVDIGSSTVANGVLGLVIGVITTLVVDMAFLVQANTPXELPERLIGAVRISHLELKSAIVPKLEPDPS

SEQ ID NO: 188702 - protein, 120 aa, Glycine max
  unsure (1)..(120): unsure at all Xaa locations
  Clone ID: PAT_MRT3847_141411C.1.pep
MVSRSYSNLLDLTSCGSPTFGREKKRLPRVATVAGVLSELDDETSNSVCSDTPSSVSQERMIIVGNQLPLKAHRKDNGTXEFTWDEDSLLLQLKDGLGDDVETIYIWCLKKEIEPGEQDD

SEQ ID NO: 188703 - protein, 57 aa, Glycine max
  Clone ID: PAT_MRT3847_141412C.1.pep
MVSRSYSNLLDLTSCGSPTFSREKKRLPRVATVAGVLSELDDETSNSVCSDTPSSVS

SEQ ID NO: 188704 - protein, 293 aa, Glycine max
  Clone ID: PAT_MRT3847_141413C.1.pep
EFGAESSVIATSSSKDEMHEGNRLKAAIQAALLRRPEIHKRKEAPDQTNEFPTSSTGLKREVTSQKQVLVSSTLKNGISAEESNMKQEIIENSTFETSKCPSANDLKQVKFCRTDFCSQLRKSDSVGPTSGKPVVRDLPNNAMEISSILSKMSVIPEYEYIWQGVFKVHRNGMPPDLYTGIQAHLSACASPKVHEVVKKFLPEVSLNEVSRLSIWPSQFHQGGAKEDNIALYFFAKDIESYERYYKGLLDHMIRNDLALRGTSDGVELLIFASNQLPEDSQRWNMLFFLWGIF

SEQ ID NO: 188705 - protein, 147 aa, Glycine max
  Clone ID: PAT_MRT3847_141414C.1.pep
RLQDDRRGEEAVNCLTQCALNNKLNAILDRLATLTPAPISTPLPMAASHLSANSKPHAPSFDLHRSGNHSDHYANSTSHSCFPSPFIDHNPIFFSLCLSRSRSCDDQRSVRDHGLSLHLCRDPSWTLRSRRRPSTSCSVCHRHQRSP

SEQ ID NO: 188706 - protein, 50 aa, Glycine max
  Clone ID: PAT_MRT3847_141415C.1.pep
LVTGTVEFAGNKISSIMQNTLFGPGALSVSNKKKKKLIATSFIIYFNSFF

SEQ ID NO: 188707 - protein, 80 aa, Glycine max
  Clone ID: PAT_MRT3847_141416C.1.pep
KKTGPLFYFPKGPGKNNFRGLGEFKGPPGWARKIKLKYPHTLGSNKRIGKSRGMGPNGIWGAPGNWNPNRAGGGKPGAGK

SEQ ID NO: 188708 - protein, 73 aa, Glycine max
  Clone ID: PAT_MRT3847_141417C.1.pep
IYWKNATNVKGSDVNMAASYTITKIMGCLTTIMSNIVITFITSNGRILQCMLVLPLVSKKNYDTLYYLPHLDD

SEQ ID NO: 188709 - protein, 321 aa, Glycine max
  Clone ID: PAT_MRT3847_141418C.1.pep
MARITDIQKTIEPNFLSIDCVDAANFSCFSDGSPCVMGIDEAGRGPVLGPMVYSCAIVKADGLAKLDSIGVNDSKALTSAKRREIFAKMQELIASVDPKQILTYSLRIVHPRTISAQMQRRVKQSLNEISHLCAISLIEKAIQNGICISEVFVDLVGNKEEVYQTFLNERFPTLKITVSKKADAIFRIVGAASIVAKVTRDDKLAEWVFDEIGFIAPERGLGSGYPSDPITKHFIRTMVDPIFGYPSLVRFSWKTVERVLERKAIKYTWDSSSSLLDTSKQFTLTELWTKAKVTKHCQTKKKYRRHSFFTERGLSNTTELS

SEQ ID NO: 188710 - protein, 99 aa, Glycine max
  unsure (1)..(99): unsure at all Xaa locations
  Clone ID: PAT_MRT3847_141419C.1.pep
PLTRGLPHPPTGFSFFGKPKKPLFQKGRFWLTSTFYLRPFGPISLQKMAYCKPIFNGWPPTHPHALGELNLLMEDANHHFILPPPTINTNFFSYFXRYL

SEQ ID NO: 188711 - protein, 114 aa, Glycine max
  Clone ID: PAT_MRT3847_14141C.1.pep
MDGSWSEGKRSMSYKEEDEYEEEEEEEVSEYGDDGKKKRVVSNKRGSKAGGSVPPSCQVDGCNADLSEAKPYHRRHKVCEYHAKAPAVVIGDQHQRFCQQCSKVHELSEYDDSR

SEQ ID NO: 188712 - protein, 597 aa, Glycine max
  Clone ID: PAT_MRT3847_141420C.1.pep
MKHKDGKPINQPNKNRAVTLAVTLIALCGFSFYLGGIFCSGKDGVVVNTIQKTLDSPKQSSGSLQIKPISFPECSIDYQDYTPCTDPKRWRKYGMYRLTLLERHCPPVFERKECLVPPPEGYKPPIRWPKSRDECWYRNVPYDWINKQKSNQHWLKKEGEKFLFPGGGTMFPNGVGEYVDLMQDLIPEMKDGTMRTAIDTGCGVASWGGDLLDRGILTLSLAPRDNHEAQVQFALERGIPAVLGVISTQRLPFPSNSFDMAHCSRCLIPWTEFGGIYLMEIHRILRPGGFWVLSGPPVNYERRWRGWNTTIEDQRSDYEKLQELLTSMCFKLYNKKDDIAVWQKAKDNNCYDKLARESYPPKCDDSIEPDSAWYTPLRACFVVPDPKYKKSGLTYMPKWPERLHATPERVTTVHGSSTSTFSHDNGKWKKRIQHYKKLLPELGTDKVRNVMDMTTVYGAFAAALINDPLWVMNVVSSYGPNTLPVVYDRGLIGTFHDWCEAFSTYPRTYDLLHLDGLFTAESHRCEMKYVLLEMDRILRPGGHAIIRESTYFVDAIATIAKGMRWVCRKENTEYGVDKEKILICQKKLWHSSNNGSR

SEQ ID NO: 188713 - protein, 49 aa, Glycine max
  unsure (1)..(49): unsure at all Xaa locations
  Clone ID: PAT_MRT3847_141421C.1.pep
VKNISPDIYLSKGSSLFTDRNIKEVQRLQHKSTILWIXTNRVWETLISH

SEQ ID NO: 188714 - protein, 321 aa, Glycine max
  unsure (1)..(321): unsure at all Xaa locations
  Clone ID: PAT_MRT3847_141422C.1.pep
KEGKDVDGGAFFPANPSTNSVPPKFNSQPNQSVPFSQNPVFFXTAKCQQQQKTQEDGIPADEVKILAKFKSRHNYIRVLEVSRKAEHPFRGSRLLLLDTPGNIHSISFLFKSLTNTYFDVFATLPPIVPPGPLALLGFGAGTAARLLLLHHPSALLHCWELDPAVIQVAREYFNLARLERDNQDRLFIYVGDALNATVPNGFSGIVVDLFSKGSLIPELQDPATWRMLRGRLRKGGRIMVNVGGSCVEAENRLRDGKVVMEETLGAMKEVFGKKVFVLSLGNRKDDSSLALTGDLPHLEEWKNRLPGPFKCYADMWTPYSQ

SEQ ID NO: 188715 - protein, 39 aa, Glycine max
  Clone ID: PAT_MRT3847_141423C.1.pep
SIMNDMASKSRWRWDESMIHPLDRYYRNTKKLLSVPMDK

SEQ ID NO: 188716 - protein, 38 aa, Glycine max
  Clone ID: PAT_MRT3847_141424C.1.pep
AYIIYGKKIIICILLRISIICVHVFEYFNCNLSTSYIN

SEQ ID NO: 188717 - protein, 98 aa, Glycine max
  Clone ID: PAT_MRT3847_141425C.1.pep
RKPSKCSTPKVLTTSPASPRLILSLFRRTSPSPGGTDNDGGSSALKNKTLFYASRFVFSWFLIYYILFLKPFNFCCYFYIHRCFKLDRVESPLGFLAP

SEQ ID NO: 188718 - protein, 47 aa, Glycine max
  Clone ID: PAT_MRT3847_141426C.1.pep
EESKFAHLQVQGSYFLRLMVNYLIVVPNMFLITRHLGLELLLMCESN

SEQ ID NO: 188719 - protein, 61 aa, Glycine max
  Clone ID: PAT_MRT3847_141427C.1.pep
VRPCSSKKGGITDTPGARYQAESTGQNTIVRSLTHYNKCLAKSHLLTTASLKSLNTTASDP

SEQ ID NO: 188720 - protein, 105 aa, Glycine max
  Clone ID: PAT_MRT3847_141428C.1.pep
PKGFFWAIVLEGGFPCPQKKGMGAHPPFDSPPGVGGPKIYFLICPKNSWPPFLPKGFCFPLCLKRERFIMSHFQWIRGVFVSPPIMPLGFSFSPPPGVFWVSPPS

SEQ ID NO: 188721 - protein, 82 aa, Glycine max
  unsure (1)..(82): unsure at all Xaa locations
  Clone ID: PAT_MRT3847_141429C.1.pep
ASWRILLELKDLRKYPPTSCCAGPEAADMFHWQATIMGPADAPYSGRVPLVTLHXPPEYTVEPPKVALRTKVLHTNNHNTGA

SEQ ID NO: 188722 - protein, 364 aa, Glycine max
  Clone ID: PAT_MRT3847_14142C.1.pep
MALFMKFFNSSSTSLMLRFILSLVLSFRAKAVVKLPPNITIPAVIAFGDSIVDPGNNNKVKTLVKCDFPPYGKDFEGGIPTGRFCNGKIPSDLLVEELGIKELLPAYLDPNLKPSDLVTGVCFASGASGYDPLTPKIASVISMSEQLDMFKEYIGKLKHIVGEDRTKFILANSFFLVVAGSDDIANTYFIARVRQLQYDIPAYTDLMLHSASNFVKELYGLGARRIGVLSAPPIGCVPSQRTLAGGFQRECAEEYNYAAKLFNSKLSRELDALKHNLPNSRIVYIDVYNPLMDIIVNYQRHGYKVVDRGCCGTGKLEVAVLCNPLGATCPDASQYVFWDSYHPTEGVYRQLIVQVLQKYLTRFY

SEQ ID NO: 188723 - protein, 51 aa, Glycine max
  unsure (1)..(51): unsure at all Xaa locations
  Clone ID: PAT_MRT3847_141430C.1.pep
EMDAELXEECQXQYLEKEARARELEEKRELTWKKLEAVAAQAVRDDMVLVK

SEQ ID NO: 188724 - protein, 125 aa, Glycine max
  Clone ID: PAT_MRT3847_141431C.1.pep
MPNLIIPDKHGQVDLMNGAEINSDRTAPVRYIMVGGRYGPLDCWCRHRGGRVDDGVLWHTDSMPYACGDSSIAHGQANYSLEDESQVVTSDSDTCVGAYYGYRGPEASRCFNTRLCLYMHKFSTE

SEQ ID NO: 188725 - protein, 55 aa, Glycine max
  Clone ID: PAT_MRT3847_141432C.1.pep
PIWSKTKWWVLLTRSLPLDLKGSANSNQCYMFSHKCKMHPYIQSRGTGLITLVFG

SEQ ID NO: 188726 - protein, 73 aa, Glycine max
  Clone ID: PAT_MRT3847_141433C.1.pep
KTKKMVLRCKKRPLKGNLRLKFQGGREKKSFFKKPTQKKGKNGGLFLKNRKGKGFFKWAKKKSAGKLENPFEM

SEQ ID NO: 188727 - protein, 75 aa, Glycine max
  Clone ID: PAT_MRT3847_141434C.1.pep
SKLAMSIIRIGVLVCSSLPLLSCFMELFVAVTASQTHFNTATSSEENELPKKKEDVSITANVASQKHFRQIQHIC

SEQ ID NO: 188728 - protein, 163 aa, Glycine max
  Clone ID: PAT_MRT3847_141435C.1.pep
MASSSASREGHYRGVRKRPWGRYAAEIRDPWKKTRVWLGTFDTPEEAALAYDGAARSLRGAKAKTNFPPAPPLCLDLNVPSSDHRWPHVPPRSLVLSEFLHTAVLRDIEPPQLPFPPAAAIVAHRSPHAGGVQVVESSPTASFLGLVRRGIPIDLNEPPPLWL

SEQ ID NO: 188729 - protein, 172 aa, Glycine max
  Clone ID: PAT_MRT3847_141436C.1.pep
MAPSSSASASREGHYRGVRKRPWGRYAAEIRDPWKKTRVWLGTFDTPEEAALAYDGAARSLRGAKAKTNFPPAPPLCLDLNVPSSDHRWPHHVPPRSLVLSDFLHTAVLRDIDPPQQPFPPAAAVAHRNPHGGAMPVGGGVQVMEGSPTASFLGFVRRGIPIDLNEPPPMWL

SEQ ID NO: 188730 - protein, 52 aa, Glycine max
  Clone ID: PAT_MRT3847_141437C.1.pep
TNFINGVGEDYSFIAYSPPEGTVPANITTTRLFGTMTETPHNLCHSYSNAIK

SEQ ID NO: 188731 - protein, 88 aa, Glycine max
  Clone ID: PAT_MRT3847_141438C.1.pep
PNIGEPGTFSYRIRGTGVADHGDLQHADDLTTPTTKLLVVVPKIPAVVLTSAYAPEVRVHEYVVVLAVSGGGGYRGDITPDITMSSAD

SEQ ID NO: 188732 - protein, 312 aa, Glycine max
  Clone ID: PAT_MRT3847_141439C.1.pep
MMGLDQDASSNSGLHLILGLALTATTTTTPSLPSISNKLDHVDHHHHLITLRPTTKSPYNSSEAEPSLTLGLSRESYLKVPKNIIGQNSNNKVSSCDDPLDHLSTQTNSPHHSAVSSFSSGRVKRERDLSCEEVVDATEIDQRDHSCEGIVRATDEDEDGTAARKKLRLSKEQSALLEESFKQHSTLNPKQKQALAKQLNLRPRQVEVWFQNRRARTKLKQTEVDCEFLKKCCETLTDENRRLQKELQELKALKLAQPLYMPMPAATLTMCPSCERLGGGINGGGGGSPKTPFSMAPKPHFFNPFANPSAAC

SEQ ID NO: 188733 - protein, 51 aa, Glycine max
  Clone ID: PAT_MRT3847_14143C.1.pep
SNCFNSPCKHCRKKNKLMHIHPATTTVIITPKVTANPIPYPPSITPYYNYP

SEQ ID NO: 188734 - protein, 55 aa, Glycine max
  Clone ID: PAT_MRT3847_141440C.1.pep
ERIGQESTGLSEVFISKELPQTKSWSSEQSPEKESCAICLEKCQDLGHFGARKAC

SEQ ID NO: 188735 - protein, 201 aa, Glycine max
  Clone ID: PAT_MRT3847_141441C.1.pep
EDGAATRKKLRLKRERDLSCEEVVDAKEIDQRDLSCEGIIRATEEEEDGAATRKKLRLTKEQSALLEESFKQHSTLNPKQKQALSKQLNLRPRQVEVWFQNRRARTKLKQTEVDCEFLKKCCETLTDENRRLQKELQELKALKLAQPLYMPMPAATLAMCPSCERLGGSAVNGAGGSPKTSFSMAPKPHFFNPFANPSAAC

SEQ ID NO: 188736 - protein, 65 aa, Glycine max
  Clone ID: PAT_MRT3847_141442C.1.pep
RLRGFSPVSLSLSLPPRVSRFHVKMDCESLSHSLCILYFLSRQLGLSCWPDSPGLGSGSPPRFSA

SEQ ID NO: 188737 - protein, 57 aa, Glycine max
  Clone ID: PAT_MRT3847_141443C.1.pep
SFYKLLGHMCLANNPSGLSQHPVESPLKFEKNYSKFDFWRGLISWPMQKNLLVHPKR

SEQ ID NO: 188738 - protein, 91 aa, Glycine max
  Clone ID: PAT_MRT3847_141444C.1.pep
PQSHRSQCTTRMGDAPLRLDHGRRSRNAQWQPTHVLPPPPTSFMADGTTPHTITNAPLCHHTHAAPFHPNVNFISFTLIITLARPTVQCLC

SEQ ID NO: 188739 - protein, 38 aa, Glycine max
  unsure (1)..(38): unsure at all Xaa locations
  Clone ID: PAT_MRT3847_141445C.1.pep
RTHFFMELIXKLNTHCLSHNMRYIXKKLRLSLPLGLDH

SEQ ID NO: 188740 - protein, 89 aa, Glycine max
  unsure (1)..(89): unsure at all Xaa locations
  Clone ID: PAT_MRT3847_141446C.1.pep
NILASGSSAENNQRNFLSCYNHNVVRXIRRQVQQLAYHGYAQNVXGLLKNSRXSYSGYAQPSQKEGCSKGREGPYHSFRRALYCIATSL

SEQ ID NO: 188741 - protein, 206 aa, Glycine max
  Clone ID: PAT_MRT3847_141447C.1.pep
MSWRSVRGSRKRKMDFELDLNRDPPLVREEEEEEEEGGPSRHQQHHHHQQEPQTPIVDVDAIDDDVVESSPRSFAQAKSNADERRRVRRRTTIVDLDSEDGTGGVPQNQTIINGDLYVNLANNSSSASENAKKTPEPPKEPEAPKEPFFNCPICMSPLVEEMSTRCGHIFCKNCIRAAISAQAKCPTCRKKVTKNSLIRVFLPATS

SEQ ID NO: 188742 - protein, 48 aa, Glycine max
  Clone ID: PAT_MRT3847_141448C.1.pep
TFILLPPMTLFASSQSSLGLTCSFRQAWVTSNLPTRQVPFVYTRPLKI

SEQ ID NO: 188743 - protein, 324 aa, Glycine max
  Clone ID: PAT_MRT3847_141449C.1.pep
MGRGEDREGVAVAGGFFWSYTDEPHATRRRQILSKYPQIKQLFGPDHSAFFKISGVVLLQLGTGALLHDAGWLKIFLVAYFFGSFLNHNLFLAIHELSHNLAFSTPVYNRWLGIFANLPIGVPMSVTFQKYHLEHHRFQGVDGIDMDVPSLTEVRLVKNIIAKTIWVFLQLFFYALRPLFLKPKPPGIWEFINFSVQIALDVSMVYFFGWKALAYLILSTFVGGGMHPMAGHFISEHYVFNPDQETYSYYGPLNYLTWHVGYHNEHHDFPRIPGNKLHKVKEIAPEFYDNLASYRSWSQIIYMYIMDRTVGPFSRMKRKSSKAE

SEQ ID NO: 188744 - protein, 83 aa, Glycine max
  Clone ID: PAT_MRT3847_14144C.1.pep
WPPSLSQSSIKQVQELSAVSASAAAGACTWLARRLRPQLHPFEGVRAPDSVNTARPSDRSLEPAIWNGKAGKVLIVRRRESCT

SEQ ID NO: 188745 - protein, 54 aa, Glycine max
  Clone ID: PAT_MRT3847_141450C.1.pep
LAFSSGGVVVVPVLRVFVWLVCGVCPCSRLVGGLFRFLPVVGLVALGLLCPLRV

SEQ ID NO: 188746 - protein, 70 aa, Glycine max
  Clone ID: PAT_MRT3847_141451C.1.pep
SQAFGKGVNDLNTSSSFPSSQALTLTGAEKVFLTARRLKHSALISDLLGPKQRIDFANLSLTEVNILTEL

SEQ ID NO: 188747 - protein, 58 aa, Glycine max
  unsure (1)..(58): unsure at all Xaa locations
  Clone ID: PAT_MRT3847_141453C.1.pep
DEDEELEEXDNDDYGDILCGVCGENYGTDEFWICCDICDKWFYGKCVKIILARVELIK

SEQ ID NO: 188748 - protein, 61 aa, Glycine max
  Clone ID: PAT_MRT3847_141454C.1.pep
IRRGKHIRYGMRSCHCYRKLVRNERKQGTVSLFDRHCSLTLSSIEQHSLVETPRSCRLHKH

SEQ ID NO: 188749 - protein, 72 aa, Glycine max
  Clone ID: PAT_MRT3847_141455C.1.pep
VIILYFQALLQVKEYLQKELPTEPADGELADATNMSITQVKKAIHVGQAARNKLIKHNLRLVLFVINKYFTD

SEQ ID NO: 188750 - protein, 84 aa, Glycine max
  Clone ID: PAT_MRT3847_141456C.1.pep
TFSFWLIRTPLVLWTGSSPYSDWLSFYTSVSCPGVKSVSPSAYLRHCVCVDLIPTWSRVPIPDFFCAYPLFRVRRARGRLSYQS

SEQ ID NO: 188751 - protein, 114 aa, Glycine max
  unsure (1)..(114): unsure at all Xaa locations
  Clone ID: PAT_MRT3847_141457C.1.pep
FQLEEKXSSLCPIYLLTTSVSGLGGVMDFTRYLCSPIFLVMEASSNLYLRRNYDLFPKQFSSERGKITQNETCLKTKEKNPCNINEYSQSERPEREINIEGCLVGSMLDEIIYH

SEQ ID NO: 188752 - protein, 57 aa, Glycine max
  Clone ID: PAT_MRT3847_141458C.1.pep
RGKTSPANFVGLYHYFYFLPMAAYPRRLSYLYSQTCQLIWEPLEGPTVQLTFCVFMI

SEQ ID NO: 188753 - protein, 59 aa, Glycine max
  Clone ID: PAT_MRT3847_141459C.1.pep
HWPYRAPPWGKGRSFRAWSRVRGLSHGGGHFSLCWPGGPWLSLSPRNWVGFTVIILFIV

SEQ ID NO: 188754 - protein, 72 aa, Glycine max
  Clone ID: PAT_MRT3847_14145C.1.pep
MEGKEQDVSLGANKFPVRQPIGTAAQCQDDGKDYQEPAPAPLVDPTEFQAWSVYRARIAELVATHLYLYITV

SEQ ID NO: 188755 - protein, 49 aa, Glycine max
  Clone ID: PAT_MRT3847_141460C.1.pep
GTLHLKQISLPMSADRRWSFFKQEPKRKQQKELGLSILAKPICHPYQPQ

SEQ ID NO: 188756 - protein, 46 aa, Glycine max
  Clone ID: PAT_MRT3847_141461C.1.pep
ILLPLSRVFLSQKILYYDLLELFYGIKSLVRSSMVAQSNAFLTPTS

SEQ ID NO: 188757 - protein, 79 aa, Glycine max
  Clone ID: PAT_MRT3847_141462C.1.pep
MMQGLQSDGPMIAVKQFFSKFKQGNREFVNEMGLIFGHEHPNLAKLYGCWGGGNQLILIFESLENNCLSRIFFGKLHDE

SEQ ID NO: 188758 - protein, 95 aa, Glycine max
  Clone ID: PAT_MRT3847_141463C.1.pep
SESILGVRENFIAFTLQVHTHYFQKLVMISEFFQRKAGSYFFLKTCWLFSRKIYFLSALFLCLFKLLSFVYFLLFLFFFSLNRSCGRGRTLPTYV

SEQ ID NO: 188759 - protein, 142 aa, Glycine max
  Clone ID: PAT_MRT3847_141464C.1.pep
MSLQVQPQTQPQPLMQQQQQPVQVYPTSVTYESPPHHSNGSFGSVFVVLAIIIVISAVACCLGRLCNRRGGHSHNQKHVKPQKKQQQQQNHHNFRPKEVDIEFGFDKRIAASKPNGHGAGAGSGPKPLPHHGDMRTFEMKLG

SEQ ID NO: 188760 - protein, 143 aa, Glycine max
  unsure (1)..(143): unsure at all Xaa locations
  Clone ID: PAT_MRT3847_141465C.1.pep
AHASAHLRGGRSILMVTFSNTIVHIEPNMYSRFEVLSTTTNGDCAHGKDLIMFXVNEACAVVGLTLSYTPSTLLKSGLEKDRRLNVEYFGRMNYXVAHNVNQAQEKDLLEGKRSFGIKCCSRWEKGCSTKTQFGSGKTFKYRY

SEQ ID NO: 188761 - protein, 88 aa, Glycine max
  Clone ID: PAT_MRT3847_141466C.1.pep
IHPYSTYPLPLLCFFLSHKHQQHSNQSIVFNALASPSFRVYVKSLFLSEVVQKVVSQIPIYTENDTTVCCVHCALCFSLSLSLSLTKS

SEQ ID NO: 188762 - protein, 90 aa, Glycine max
  Clone ID: PAT_MRT3847_141467C.1.pep
PPFSSFYMDFFPAVQHSFGPLGQIFLGRLVKVFQGLAVYVDKMLPLSVVKKQTPLAPDLPTSFIRVVAHFFMLVAGQFSPLEKWQLAPPI

SEQ ID NO: 188763 - protein, 80 aa, Glycine max
  unsure (1)..(80): unsure at all Xaa locations
  Clone ID: PAT_MRT3847_141468C.1.pep
GVWGCXFILFWGGFKLLLXCRGEGTSSSLHCHFSNPPFITLSVVGIFRTSTWGGGAFFFFHEINPXKVWEIQVHNIFVIW

SEQ ID NO: 188764 - protein, 160 aa, Glycine max
  Clone ID: PAT_MRT3847_141469C.1.pep
MASNTTMVDERAGAEIVYGAEECHRSSMELLEELGFPKGVMPLKDLVECGRVRETGFIWMKQKAPSQHFFEATKTLVSYAAEVTAYVEKFKMKKMNGIKSKQVFIWVPIAEMSIDGDNGKKILFKTPMGLGKSYPATAFMTIEEKEKNLQLQGKEEIKDI

SEQ ID NO: 188765 - protein, 40 aa, Glycine max
  Clone ID: PAT_MRT3847_14146C.1.pep
MVTSMLHCRCLIEYIHLCCSANRKVPLQCECPIIASLIKF

SEQ ID NO: 188766 - protein, 316 aa, Glycine max
  unsure (1)..(316): unsure at all Xaa locations
  Clone ID: PAT_MRT3847_141470C.1.pep
MIPTNSCSTFGNDLEPTSNWLEVIFSICIVLSGLLLFTLLXLGNIQVFLHAVMAKKRKMQLRCRDMEWWMRRRQLPSRLRQRVRHFERQRWAAMGGEDEMEMIKDLPEGLRRDIKRHLCLDLIRKVPLFHNMDDLILDNICDRVKPLVFSKDEKIIREGDPVPRMVFVVRGRIKRNQSLSKGMVASSILDPGGFLGDELLSWCLRRPFIDRLPASSATFVCLESAEAFGLDANNLRYITDHFRYKFANERLKRTARYYSSNWRTWAAVNIQFAWRRYRQRTKGPVIPVRDTNGGTERRLLQYAALFMSLRPHDHLE

SEQ ID NO: 188767 - protein, 99 aa, Glycine max
  Clone ID: PAT_MRT3847_141471C.1.pep
LEVCLESSEAFGLDANHLRYITDHFRYKFANERLKRTARYYSSNWRTWAAVNIQFAWRRYRQRTKGPVTPVRDTNGGTERRLLQYAAMFMSIRPHDHLE

SEQ ID NO: 188768 - protein, 108 aa, Glycine max
  Clone ID: PAT_MRT3847_141472C.1.pep
MVFAVSFSQSLLLCKPSSSSSSYQVKCCSRSQNKEATSHIQTKKRCLRCNTLYSDEDNSPLACSFHGHTNGDKGLFSFAPPHRGIDGDWSDKSGVIVYKWNEKNDRPN

SEQ ID NO: 188769 - protein, 88 aa, Glycine max
  Clone ID: PAT_MRT3847_141473C.1.pep
ARVRNFSGRTKKNPKYGTNLKIPISTHNKISQTIYQPSSLRHRIDLNSTRPSRFGIPALSFDALRLDQIRSNLTHCTTNKLLQVQEGN

SEQ ID NO: 188770 - protein, 78 aa, Glycine max
  Clone ID: PAT_MRT3847_141474C.1.pep
FSPCIQPRTPNFYQKNKWDSRLFRKLLKNSNNPFYKVTSEFLLEMLFKKPFPPLSKKLLFALEGPKKIVCPWGFFFSL

SEQ ID NO: 188771 - protein, 41 aa, Glycine max
  Clone ID: PAT_MRT3847_141475C.1.pep
SNYCQAGGTLFIIFTITLLNAGFIGIYNPRAGDYTLSSTHR

SEQ ID NO: 188772 - protein, 70 aa, Glycine max
  Clone ID: PAT_MRT3847_141476C.1.pep
PTKMLSSMLVSIVFSVTLGASFHVSVAHLCPKACVSFKPARSERPWGSVHRSEYKKGPQYRSPPSAARDK

SEQ ID NO: 188773 - protein, 101 aa, Glycine max
  Clone ID: PAT_MRT3847_141477C.1.pep
GKLAHLPYRYCLFESTHALVVPRADAWARSYADGPLEPGPNETVRGPHKCLNYLQPFYDPEGKVWKITVLRWSQTCRIIFFCMLIIFGEHCSISHTNWWLT

SEQ ID NO: 188774 - protein, 86 aa, Glycine max
  Clone ID: PAT_MRT3847_141478C.1.pep
ACKGAKSEPPSWGLVFPKKGRGPKKGFEKGSFEGGNQTSWGLGFLIGNPQQFTGFEIFLGIFQNFENGGKNFKPAFFVSQGNARFF

SEQ ID NO: 188775 - protein, 74 aa, Glycine max
  Clone ID: PAT_MRT3847_141479C.1.pep
YRGNRYRIHTNITTPPPLKTHLHSHHDLPSHKNKVKSVAVSKVKLALITIVSNRAARQAYEGFNTGHARDYRSN

SEQ ID NO: 188776 - protein, 338 aa, Glycine max
  Clone ID: PAT_MRT3847_14147C.1.pep
MERYEILKDIGSGNFAVAKLVRDNCTNELFAVKFIERGQKIDEHVQREIMNHRSLKHPNIIRFKEVLLTPTHLAIVMEYASGGELFERICNAGRFSEDEARFFFQQLISGVSYCHSMQICHRDLKLENTLLDGSTAPRVKICDFGYSKSSVLHSQPKSTVGTPAYIAPEVLTRKEYDGKIADVWSCGVTLYVMLVGAYPFEDPADPRNFKKTIGKILSVQYSVPDYVRVSMECRHLLSQIFVASPEKRITIPEIKNHPWFLRNLPMELTEGGSWQMNDVNNPSQNVEEVLSIIQEARKSLNVPKVGGLLTGGSMDLDDFDADEDLEDLQTSGEFVCPI

SEQ ID NO: 188777 - protein, 36 aa, Glycine max
  Clone ID: PAT_MRT3847_141480C.1.pep
QEEIRQIDLYKLQICKLIEEPQACEAIGDDGEVTLG

SEQ ID NO: 188778 - protein, 171 aa, Glycine max
  unsure (1)..(171): unsure at all Xaa locations
  Clone ID: PAT_MRT3847_141481C.1.pep
MLIVARIIMLAPYLEVVRVGAIEATPSTCKEFGQVVVASRDGQECGPHDAQLDLSQGTPRIYIIKLERCPXLKYSSITHHAIVTQCLGAIGGHVGHLGVXARDPLADSDGIKGDTGXKIVQPRSGHSYVPPAVDDVQVFKXSGSKLLKLNRRTWHAGPIFRLLNGLYNLNC

SEQ ID NO: 188779 - protein, 56 aa, Glycine max
  unsure (1)..(56): unsure at all Xaa locations
  Clone ID: PAT_MRT3847_141482C.1.pep
CISRXSGMLKVKASXXSIXEXXXRAEIDDPXLXQLLPXSXXTQXXYXQXXHXPLKA

SEQ ID NO: 188780 - protein, 96 aa, Glycine max
  Clone ID: PAT_MRT3847_141483C.1.pep
IICYKKERKRIEKALKGVEAWLNSISHTTRIIIGAISVSSSFFLILILMGISWSGNSRRRNNYLQNRPPPPSYYYPPESHPPPPLARTPPPQSQGY

SEQ ID NO: 188781 - protein, 35 aa, Glycine max
  Clone ID: PAT_MRT3847_141484C.1.pep
GFFSTISLSPTMPSPKRRKNILSISSIDTTQLVFY

SEQ ID NO: 188782 - protein, 92 aa, Glycine max
  Clone ID: PAT_MRT3847_141485C.1.pep
ATYSLRRVVLQRSVWHGYIPTFQPLHIHPCVRPLEDFACRLVLILQYMVSKMSTAIGSRPVGATMMTVVGSEVASLYLFITGYFSIQVYSKY

SEQ ID NO: 188783 - protein, 77 aa, Glycine max
  Clone ID: PAT_MRT3847_141486C.1.pep
LSKADKMLNDNTNYLTPTYQTSITGKSQNLKPFKKLLTEENMDTGCDTPIHVHTNSVGVTNPYLYPYQKLNDPILVW

SEQ ID NO: 188784 - protein, 55 aa, Glycine max
  Clone ID: PAT_MRT3847_141487C.1.pep
GIVTHSHIETETKNLAVDDNTMPSFRMRNLLSSVKKKTIENRNKTSQTAFPLQKN

SEQ ID NO: 188785 - protein, 44 aa, Glycine max
  Clone ID: PAT_MRT3847_141488C.1.pep
RQFLTRFEHMLKHVMYVIRTDLKICTVPFDTFLYTLHPRNGRVG

SEQ ID NO: 188786 - protein, 72 aa, Glycine max
  Clone ID: PAT_MRT3847_141489C.1.pep
GAKLKTGNYYINLHFVPKGQHKKYFDQSALSSPNTCDCKSSSQANKGAPSCLMQNGENLFVPNAWINENRQC

SEQ ID NO: 188787 - protein, 151 aa, Glycine max
  Clone ID: PAT_MRT3847_14148C.1.pep
TLEIRVSCLVAHFLTWCFNWTLCGLLQKILSVQYSVPDYVRVSMECRHLLSQIFVASPEKRIKIPEIKNHPWFLRNLPIEQMEGGSWQMNDVNNPSQSVEEVLSIIQEARKSLNVPKVGGLLIGGSMDLDDLDADEDLEDLQTSGEFVCPI

SEQ ID NO: 188788 - protein, 51 aa, Glycine max
  Clone ID: PAT_MRT3847_141490C.1.pep
KFSTYFKTLQLVFEINLDYTNNLYISAYILCIYSITSKFKSLQLFNKQTLG

SEQ ID NO: 188789 - protein, 72 aa, Glycine max
  unsure (1)..(72): unsure at all Xaa locations
  Clone ID: PAT_MRT3847_141491C.1.pep
FGSRLLRGLDHCHSRGVMLRDINGSNLPGDTYGNLERVDRGLTPLFQPSYWQTLSILVVTFEYRXPDLLLCS

SEQ ID NO: 188790 - protein, 92 aa, Glycine max
  Clone ID: PAT_MRT3847_141492C.1.pep
LRVRFLTHCGWNSSLEAACAGVPMMTWPVLGDQFFNEKLVAHILRVGVKVGVEVSVARSEEDKKALLANNEDDERAINGSMDESISCCKMRA

SEQ ID NO: 188791 - protein, 148 aa, Glycine max
  Clone ID: PAT_MRT3847_141493C.1.pep
MGNCLDLCKPSSGSCIAKKVKLVRVAKPDGKILEFSTPIHVKDILTSYPAYGVGVSKKVTEHLSPDHELKAGRLYYLLPSLHSPPNLKSLKTGGGIKRIKVIITKQQLQQLVTKQISVEDILSEVQTVGVKFSSNQKTKLDSIPEEDE

SEQ ID NO: 188792 - protein, 46 aa, Glycine max
  Clone ID: PAT_MRT3847_141494C.1.pep
RIKEHRYRSIQGDTYCIRRLDERYKAAGNGHQMSICKTHFMGEVTD

SEQ ID NO: 188793 - protein, 72 aa, Glycine max
  Clone ID: PAT_MRT3847_141495C.1.pep
SRPLTIPTNKSNCLAFVSALAENFIEPVLVRFLTNAYDLHDVKALRTRTQLLLEIVNNCTHGFFSSFSILFF

SEQ ID NO: 188794 - protein, 79 aa, Glycine max
  Clone ID: PAT_MRT3847_141496C.1.pep
GPPPFYLSFFKNDLAPQGNADASNKLSTAIKWLQKEMTTIPSFFYIAMPSCAKFSRSSSVNSVFLSPLPALSYGCAILR

SEQ ID NO: 188795 - protein, 74 aa, Glycine max
  unsure (1)..(74): unsure at all Xaa locations
  Clone ID: PAT_MRT3847_141497C.1.pep
SMLCSFLSQFCHLVLLLLLXCHLHHLHYHPHHLLYLLFIRQGVLDQWRGLVLVGHQNFACFSMLGKLNEGTMSM

SEQ ID NO: 188796 - protein, 65 aa, Glycine max
  Clone ID: PAT_MRT3847_141498C.1.pep
TKSLDSQNIETLDTCITVSCRVANNILESLTLDIFIITPMIPLVTNGSRICMRSDSNVGWIDTYY

SEQ ID NO: 188797 - protein, 95 aa, Glycine max
  Clone ID: PAT_MRT3847_141499C.1.pep
KHHTFKAPIYGDKTHVNGLCDFNHKGEHIEHIDATEVNVQAYLEIGSQCSSQCDYIVKSLVNMYPPTVGLILPSSILIMNILLAYEHMLVCAQCK

SEQ ID NO: 188798 - protein, 166 aa, Glycine max
  Clone ID: PAT_MRT3847_14149C.1.pep
EYRAQCPQGDNEPLYKDLPGSGGLVLTAVEVERERLKKEAEERAKLRDFMIDFEKKTTDFESTWFDKFEAHRSAVESLSERLLVLEDQVKHLNEVNANHKVSDPIECRVSDPIECKVSDHIESDPIECKVSDHIESDPIECKVSDSIECKVSDPIECVPTTEGETA

SEQ ID NO: 188799 - protein, 50 aa, Glycine max
  unsure (1)..(50): unsure at all Xaa locations
  Clone ID: PAT_MRT3847_1414C.1.pep
MCFKSSLDSHLLDFLWNKYWMNMLLXPLLGNRDYVTGQISDLGTLFVAVY

SEQ ID NO: 188800 - protein, 66 aa, Glycine max
  Clone ID: PAT_MRT3847_141500C.1.pep
LKGSNLGNKRNTRGFGPNSVNDRKSIHQSVIKGNKGSWLESVEGCEKEVGLGRSGQCKAVACMTHK

SEQ ID NO: 188801 - protein, 89 aa, Glycine max
  Clone ID: PAT_MRT3847_141501C.1.pep
NCPMEWGPPLIGFNPPFLPFGGPFGLKFKGGTSPPWESPIFGKSKKGVGGSLINSPWKGFGGVKPWPPHRRAALRYTIFWECKKNLSLT

SEQ ID NO: 188802 - protein, 55 aa, Glycine max
  Clone ID: PAT_MRT3847_141502C.1.pep
LRLSLTSAIPLHVPFPAYKSRLGRARANIIRIYKSLGTDLTRRSLRCPHHLGVRY

SEQ ID NO: 188803 - protein, 133 aa, Glycine max
  unsure (1)..(133): unsure at all Xaa locations
  Clone ID: PAT_MRT3847_141503C.1.pep
RSTRIRITYPCKRQPRCLTKSGNEPTSPNLTERAHRRAPIDGLSDELNAIARXDLDFAYTRGRARAGFAEMPPRLDHCLXKNAPAGIRTEDRCGRRYKGWESVCVSWRPEPGIAIKAYVCXCDGYGETRTFFF

SEQ ID NO: 188804 - protein, 69 aa, Glycine max
  Clone ID: PAT_MRT3847_141504C.1.pep
IVFQKMKNLGSRHQHLFKDVTIFRKDFSFMINCVNSSKLETQNVVHKIYSHVIETPPSKLETQHGVHIV

SEQ ID NO: 188805 - protein, 48 aa, Glycine max
  Clone ID: PAT_MRT3847_141505C.1.pep
VLVCYRYIDGILFKYKKWSFPPPIVLETSSEMRELVVENKIRWKWVRH

SEQ ID NO: 188806 - protein, 70 aa, Glycine max
  Clone ID: PAT_MRT3847_141506C.1.pep
NSFFFLVSGGSAMKKKCAVSPPSLKRVSIKRCIGRWVKKNHSGRTQVPVETSRFRESRRSSHFPYGTRSC

SEQ ID NO: 188807 - protein, 107 aa, Glycine max
  unsure (1)..(107): unsure at all Xaa locations
  Clone ID: PAT_MRT3847_141507C.1.pep
THSLSXSXLSXXXXXXXSXQPLXXVKPTXPXDLXMEXXRFXVEWXSXXPCVWKVRCRXGVGKTNNXERWQPRTLLXXXVTTRXRXSAHRRRATQGXGCXCXCYRAPK

SEQ ID NO: 188808 - protein, 77 aa, Glycine max
  unsure (1)..(77): unsure at all Xaa locations
  Clone ID: PAT_MRT3847_141508C.1.pep
FSAELLSXKLDTVTGXQYYPEWAPINCRVHRQPIHITVGNYVRKRDVSIGYDACTNPNGWGSLGGGQGGNYKPKCGF

SEQ ID NO: 188809 - protein, 201 aa, Glycine max
  unsure (1)..(201): unsure at all Xaa locations
  Clone ID: PAT_MRT3847_141509C.1.pep
MEIEQATTNEKGVTDYGDAEMISDNNKRGMYLVWEDLTVVVPNFGNGHTRRLLDGLSGFAEPNRIMAIMGPSGSGKSTLLDALAGRLSRNVIMSGNVLLNGKKRRLDYGVVAYVTQEDIVLGTLTVRETISYSANLRLESSMTKEEVNGIIEGTMLVMGLKTVGDRLIGNWHLRGISGGEKERLSIALEILTRPXLLFLDE

SEQ ID NO: 188810 - protein, 125 aa, Glycine max
  Clone ID: PAT_MRT3847_14150C.1.pep
GGGERERLKKEAEERAKLRDFMIDFERKTTDFESTWFDKFEAHRSAVESLSERLLVLEDQVKHLNEVNANHKVSDPIECRVSDPIECKVSDHIESDPIECKVSDSIECKVSDPIECVPTTEGETA

SEQ ID NO: 188811 - protein, 148 aa, Glycine max
  Clone ID: PAT_MRT3847_141510C.1.pep
MTGVADEAPVTLDTLKQLMAQFAKERDWDRFHSPRNLLLALVGEVGELSEIFQWKGEVPKGLPDWKEEEKVHLGEELSDVLLYLVRLSDICGVDLGKAALRKVQLNAIKYPAKVCKEEEVVVSISSNQEEEKNPSTNNNGTATESDAD

SEQ ID NO: 188812 - protein, 50 aa, Glycine max
  Clone ID: PAT_MRT3847_141511C.1.pep
LKIRLELRSRAYVLGKLVKPKYYKTIKCSITLDPKKLNAAISLKKSCTYD

SEQ ID NO: 188813 - protein, 74 aa, Glycine max
  Clone ID: PAT_MRT3847_141512C.1.pep
TSHLNMVIINHDEVNNLITYWKFSITTEKEKNRYIVLSTISLEFEYTRLKKIINRSNQQIAPTSRSVNTFSAVV

SEQ ID NO: 188814 - protein, 108 aa, Glycine max
  Clone ID: PAT_MRT3847_141513C.1.pep
VPHRHPQAFPRSHVHFATPQRTEACRNLRQAYPPKAYHSLPPSHDSPNPPVPQNEALPQVKYLSPERPLLINETLLLQGHPLRFRFMGCQHKEERITSFSLLDPSSRR

SEQ ID NO: 188815 - protein, 276 aa, Glycine max
  Clone ID: PAT_MRT3847_141514C.1.pep
MRHVSIPTKTALERDPTPESSDSDVFASFRFRGTAMKCNQRFKRVAKPRLPVQTTEPVRRSLRTKPNPSPQPDISPGKMKTLTLDFFQIDALDLAPRLLGKFLRRDDVVLRITEVEAYRPNDSACHGRFGVTSRTAPVFGPGGHAYVYLCYGLHMMLNVVADKEGAGAAVLIRSCSPVSGLDVIQQRRGLKTEKPILLTGPGKVGQALGLSTEWSNHPLYTPGGLELLDGPEPENILVGPRVGIQYASPEHINALWRFAIAGTPWISAPKNTLRPA

SEQ ID NO: 188816 - protein, 37 aa, Glycine max
  Clone ID: PAT_MRT3847_141515C.1.pep
GLGELFFLYISAYEFVTLAPFQRIWFKIIRTCLLQAL

SEQ ID NO: 188817 - protein, 157 aa, Glycine max
  Clone ID: PAT_MRT3847_141516C.1.pep
MILFTVLFIQILLLCNLRSFPSPSIPPPLPAAADTTTTTTTTVHHSSRTGDHCGSGKVFVYNLPDTFNQQIILNCDNLNPWSSRCDALSNDGFGRAATSLAGILPEDLLPAWHWTDQFVTEIIFHNRLMNHKCHVMEPESATAVYIPFYAGLGGGEE

SEQ ID NO: 188818 - protein, 68 aa, Glycine max
  Clone ID: PAT_MRT3847_141517C.1.pep
HEIFIILGSDSGSMGKIERNTTGERRLGCASSLQPYLLIPNIPWSLFTPQIKFNSNLYIRRKRHKMYI

SEQ ID NO: 188819 - protein, 86 aa, Glycine max
  Clone ID: PAT_MRT3847_141518C.1.pep
PQSHGWIRFPSFTSFFFFLNKEVGPPPSWAPRFPLCSKSHSTVSNSVSAVCCPINVGFFCKKDSPLFCLRACSLCGRELKGFAVAK

SEQ ID NO: 188820 - protein, 104 aa, Glycine max
  unsure (1)..(104): unsure at all Xaa locations
  Clone ID: PAT_MRT3847_141519C.1.pep
FGVVVPCPLCVWASPFFRVSSVAACPVLSCCLACRRLACSCRIRAPCWVCGFVLSCCGRSLGACLWGSPPAVVFPPWFVVRCHSCGAFFGGPCSRRIXXFXRVL

SEQ ID NO: 188821 - protein, 208 aa, Glycine max
  Clone ID: PAT_MRT3847_14151C.1.pep
MGEVDDGQVQELEEHRIELSLGQDNNVERVEMEKEQGGEEQMMDVSFEQSKEEEMPGMWLLDQKNCVGEPFLRPCHGGDVKGVEFEQLREDEGEDMQEHEEVEEVEEEEEEEEDGDEDEHEGGFHLSPKCIPMEGMSSGNGGLIQVMDAGQMPFGSGIDLRDNPVGDFLSSRDEPQMISGSSLFGNGHKRDNLGLDNHHSLNGSNKRL

SEQ ID NO: 188822 - protein, 48 aa, Glycine max
  Clone ID: PAT_MRT3847_141520C.1.pep
SLLIGLSPRSNLVPIQFIVKSTMGKIRSRNVNDQLALWVAMCSNSKCC

SEQ ID NO: 188823 - protein, 121 aa, Glycine max
  Clone ID: PAT_MRT3847_141521C.1.pep
IAMILCSIWICRNEKAWDDTEKPTTLSLTNTSQFFQEWLHACSTNAPTPNSILEGQLSNRQPPQPGTLKCNLDAALFNENNTFNSNTHALSDFQIIISNCTAKFQFLTNPRVSFAKRQVNL

SEQ ID NO: 188824 - protein, 160 aa, Glycine max
  unsure (1)..(160): unsure at all Xaa locations
  Clone ID: PAT_MRT3847_141522C.1.pep
QGCGRPPSTRPKVVILNGRRRPSPAHGVTQAPQVWERSLRGPDNFCSPGCKKEGTSQKFRIEENVKGGRWNGMAKPSVEGIISKLSPGNNTHSKTPSSPPATXVNYRTDKRSQGIPHRAPMVWRAKNRILMKDSAPQTKNKQKKKQKKTTKENTNKEGNH

SEQ ID NO: 188825 - protein, 121 aa, Glycine max
  unsure (1)..(121): unsure at all Xaa locations
  Clone ID: PAT_MRT3847_141523C.1.pep
GGTPAPVLGFNWVGAQCSFLGPTFLXGGSKGPWGGSFKNPVFGAPSSFIFKNISLRGFWLPKGLTPPNAEKARGILAPLFVFVPKGMFNTQGGWAPLGGFPPPLYKLLGKLGSPPKQVAKF

SEQ ID NO: 188826 - protein, 45 aa, Glycine max
  Clone ID: PAT_MRT3847_141524C.1.pep
VKLSQVVCCSSQFQNTLASEANLRTQNPHDPQRKSATLARFAHAS

SEQ ID NO: 188827 - protein, 84 aa, Glycine max
  Clone ID: PAT_MRT3847_141525C.1.pep
STSIKVHTLTQNYRGCQCNMVDIVQSSLTWHLLFAPMTFSILRMSHASPITTSSTWISTTFRCINIHLPSMLCLRFQIVRKFPC

SEQ ID NO: 188828 - protein, 74 aa, Glycine max
  Clone ID: PAT_MRT3847_141526C.1.pep
TSLRGLFKIECFSLYSVLIYIFTNNKTILYQLKQPSLKHCILINTPILDMYKLARVHVILARFNSIFSHKERTR

SEQ ID NO: 188829 - protein, 132 aa, Glycine max
  Clone ID: PAT_MRT3847_141527C.1.pep
NLLTDGKLYEGKHIPVSDIRARENHVFQIPFMAHAEILSSRASDFRTAMECLYRMPHATAMHVGALEIIIDRSTCPDCNIFGAMLKVDSYHTNPEIAVQTIFVELFRGGRPILVVTFPNAIAQIALDMNSRL

SEQ ID NO: 188830 - protein, 112 aa, Glycine max
  unsure (1)..(112): unsure at all Xaa locations
  Clone ID: PAT_MRT3847_141528C.1.pep
MAFSATSKAGRFPYSLGQXPTLPXNAEFLLQCMEEAGVDGALIVQPINHKFDHSYVTSVLNKYPTKFVGCCLANPADDGSGLVLKDGYRAVRFKPYLWPPGEKMTNKVGKEI

SEQ ID NO: 188831 - protein, 54 aa, Glycine max
  unsure (1)..(54): unsure at all Xaa locations
  Clone ID: PAT_MRT3847_141529C.1.pep
YVKNLTHFRSSSTKKVNRXKGVSQAQKMNVHPVKTETKPLNGPXWWFFAVRTSG

SEQ ID NO: 188832 - protein, 468 aa, Glycine max
  Clone ID: PAT_MRT3847_14152C.1.pep
MGEIDEGQVQELEEHRIELSLGQDNNVERVEVEKEQGGEEQMMDVGFEQSKEEDMPGMWLLDQKNCVGEPFLRPCHGGDVKGVEFEQVREDDGEDVQEQEEVEEEEEEEDGEEDEHEGGFHLSPKCIPMEGMSSGNGGLIQVMEAGQMPFGSGIDLRDNPVGDFLSSRDEPQMISGSSLFGNGHKRDNLGLDNHHSLNGSNKRLRGDSPWNSKPMDFEACIEQMEHWMGKARMMYATKDQACEESTMNQQLLINELQKRDNMIEHLHKAKLEETQKRQIEVYRFEKELYMMQSLVDGYRKALKETRKAFADYRASCPQGDDEPLYKDLPGSGGLVLTAVEVEREQLKKEAEERAKMRDFMIDFEKKTTDFESTWFGKFEAHMSTVESLSQRLLVLEDQVKHLNEVSATRKVSDPIESDPVEFKVSDPIESDPIESKVSDPIECNVSDPIECKVSDPIECAPTPEGETA

SEQ ID NO: 188833 - protein, 132 aa, Glycine max
  Clone ID: PAT_MRT3847_141530C.1.pep
MALRLTTVVSSVGHSGKPRFRFRIRSVAATVRNMAFSATSKVIDSHLHVWASPQEAGRFPYSLGQEPTLPGNAEFLLQCMEEAGVDGALIVQPINHKFDHSYVTSVLNKYPTKFVGCCLANPAYDGSGRRHC

SEQ ID NO: 188834 - protein, 46 aa, Glycine max
  Clone ID: PAT_MRT3847_141531C.1.pep
QPGLARPEGALTPVTTERWGRHRTQGLTRSKPGENIELLFCRYFQN

SEQ ID NO: 188835 - protein, 98 aa, Glycine max
  unsure (1)..(98): unsure at all Xaa locations
  Clone ID: PAT_MRT3847_141532C.1.pep
XXXXXXXXXXXXXPXQIXXXKXXYIIKKXXNXKXXXXXXXLXXKXNXLXXXXXXTXXXSLXXXNXQXXXNXXXQXEXSXXXNLXNXXLYEXIIFLXXI

SEQ ID NO: 188836 - protein, 40 aa, Glycine max
  Clone ID: PAT_MRT3847_141533C.1.pep
KTYWIHSWSAPWHRPSLEKPDHEKFSHRKPSSSLLTLPHM

SEQ ID NO: 188837 - protein, 64 aa, Glycine max
  Clone ID: PAT_MRT3847_141534C.1.pep
VMQQGSILCSLDASSAGTAPTRPRPYQIRRRCWASTVILQISGLLREHESIIVSAVSRLVGQSL

SEQ ID NO: 188838 - protein, 56 aa, Glycine max
  Clone ID: PAT_MRT3847_141535C.1.pep
LLHSYSIIIYILLVSGIVTPIEFPNRVLFIFFVFLLPKEIHSFDLVVTIIIQHYNM

SEQ ID NO: 188839 - protein, 66 aa, Glycine max
  Clone ID: PAT_MRT3847_141536C.1.pep
INNVRNSEVYLIQDTNILFPNQGSDMHLIIYLLSSLHGRGGAFSLVKLKLKDSFIVYFSALSQHTC

SEQ ID NO: 188840 - protein, 173 aa, Glycine max
  Clone ID: PAT_MRT3847_141537C.1.pep
DVPLDVRMEQHSKVLEDGVLDPETTIVAIFPSPMHSAGPTEVQWHAKARINAGANFYIVGRDPAGMGHPTEKRDLYDPDHGKKVLSMAPGLEKLNILPFRVAAYDTKVNKMAFFDPTRAKDFLFISGTKMRAFAKSGENPPEGFMCPSGWKVLVKYYESLQAEEPSQQPVLST

SEQ ID NO: 188841 - protein, 44 aa, Glycine max
  Clone ID: PAT_MRT3847_141538C.1.pep
GVSAIDTTRGAWVVTLRARFESPKLRLRWSFPFCFWERYLVYWL

SEQ ID NO: 188842 - protein, 67 aa, Glycine max
  Clone ID: PAT_MRT3847_141539C.1.pep
MWFMYVFDEEKKELGRQQAPGSCPYCQGKVEAMDVEIQWRLCFLPMCFKIKRKFFCTSCARRLELYY

SEQ ID NO: 188843 - protein, 165 aa, Glycine max
  unsure (1)..(165): unsure at all Xaa locations
  Clone ID: PAT_MRT3847_14153C.1.pep
QAGRAEGKGSERDGKGHSREVQSRNGAPKVGRPASSSAKGDRKSKTXEPKQKATQNSVSVNGLLGKLTEQPKPALPSVPKSNEMPTNSNAKEKDEFGLGGLDDHEPIDLSNLQLPGMDVLGVGDDQGQDLGSWLNIDDDGLQDHDDFMGGLEIPMDDLSDLNMMV

SEQ ID NO: 188844 - protein, 85 aa, Glycine max
  unsure (1)..(85): unsure at all Xaa locations
  Clone ID: PAT_MRT3847_141540C.1.pep
HSYCHSYFQHTWPPFPSSHQPPPXQTPPSATYPPPXPPPPAPXTQRPPPPPPNAVTXGPFQPPPPFPPPPQPPPGRPYFWTGGPT

SEQ ID NO: 188845 - protein, 67 aa, Glycine max
  Clone ID: PAT_MRT3847_141541C.1.pep
ELRVLTVIHLSVVVLVISLDPTLYLSKSSRVFGLEYPLSKSYPGINKPLTLDSSSLARSLSFHLRQF

SEQ ID NO: 188846 - protein, 60 aa, Glycine max
  Clone ID: PAT_MRT3847_141542C.1.pep
THSSDTVRWIEDYLNNYCQCLWNMSMSMFQVTGLRQGGREFTMSTFLIESSYSGIPTSVQ

SEQ ID NO: 188847 - protein, 126 aa, Glycine max
  Clone ID: PAT_MRT3847_141543C.1.pep
PRSPNFDILLWWKLNGVKYPTLQAIARDVLAIPVSTVASESAFSTSGYIVSPHRSRLHWTTLEALMCARSWLWSAENSGNFNSNVGNENAILLTEMESDDEGEPTEPLITDVTSVAISRLEDDDFY

SEQ ID NO: 188848 - protein, 134 aa, Glycine max
  Clone ID: PAT_MRT3847_141544C.1.pep
IHAAADGTAPPGFESAVEEHEFGDLQGMLFMFSVCHVIIYIQDRSHFGTRILRNFRVLQAAKHAMAPFVRSQTMPPLPSRSHPSPSSRPVSSANNSSPVRGGGNLGRNVSAISLMSGLGSYASLFPGQCIPVTL

SEQ ID NO: 188849 - protein, 46 aa, Glycine max
  Clone ID: PAT_MRT3847_141545C.1.pep
RRQKGTSRSHSHNEQMEKEKCVQIHVLPILMIYQVIAMMIKQLIGR

SEQ ID NO: 188850 - protein, 56 aa, Glycine max
  Clone ID: PAT_MRT3847_141546C.1.pep
RAMQARVPDRSLEISYLGGVLAPLEAMHSGSSSANLNVYVLLLSVKMQRMHLYRAI

SEQ ID NO: 188851 - protein, 62 aa, Glycine max
  Clone ID: PAT_MRT3847_141547C.1.pep
RIPAYGSFFFPVYCVLVSYVGSGVIFDKVSVNKVGLFLSSIKWLKKIEKMKKKPLKWNNMNR

SEQ ID NO: 188852 - protein, 82 aa, Glycine max
  Clone ID: PAT_MRT3847_141548C.1.pep
LVFHYPTSKTEMRSCYIYRVEIPYISLSIFTHLLKSLTMNTNILTKNISSILHMRYLITTLITMTAVLLDINQYNEHYYSPI

SEQ ID NO: 188853 - protein, 119 aa, Glycine max
  Clone ID: PAT_MRT3847_141549C.1.pep
MVRDVKNGRALLVAFLMFLLASEVLILEAEGAGECGKTPIGSAAASLSPCLGAVSNVRAKVPLACCARVGALLKTAPRCLCAVLLSPLAKQAKINPATAITIPKRCNIRNRPAGKKCGR

SEQ ID NO: 188854 - protein, 112 aa, Glycine max
  Clone ID: PAT_MRT3847_14154C.1.pep
DFASNVMICVSMKSQRPFCEEFVTDPDSDSKKGVRVSAAVRFSLQRAPSSPRERRITDLLYQLLTLQSLIPPLAQFFFQFLFSFSHLSLLKKWCVCVYSAALSLSISLLFCE

SEQ ID NO: 188855 - protein, 658 aa, Glycine max
  Clone ID: PAT_MRT3847_141550C.1.pep
SRYINPFVFLMDARHWKCNLCYRANEMPEDFAWDPQTKTFGDPSRRPELQETTIEYIAPSEYMLRPPQPPIYLFVFDVGSAAIDCGYLNTFAEQLSLDIDKLPGQERAFIGFIGFDSALHFFQFDENEREPRHIIEFDVEESFAPVFSGLFVELNVFKEIIKKFIYNIPSIFERSMSSSNCLGSALTVAKNLINEIGGRITVFTASMPNLGIGALKCLEFNTAKKIAFTPQIDFYKSLALECTGKQIAIDLFVVGCQNVDLRTLSDMSRFSSGTVYHFPEYHFLRDQVEVKRFQMILRRYFIRKLGLEAVLRIRCSRGLSLHTFYGNFFVRSTDLLALPNVSPDSAMGVQIKHDEVITASQVCFQAALLYTSTKGDRRIRVHTLCLPVLTQAAHVFSSLDINSSISLLSKMASDRALQGASLSDCREALINAIVDPTVCYQRSHGQVGSMLRMPPEGGLQYMPIYILGLLKNRAFSDSLQRVTIDERVATFLLFKNAPLEVLLLELCPALYAFHQILYCEPNQDGQVPFPDRLPPTYEHISQNGIYLLDIGTFVYVYVGSALNVCILRSLFGTDSFAKLDSDSTVIEIDTPQSKHLHAFLRHLQEQRGNMYAPAKIIKDDSPRREAFTRRLIQDRSDSSHSYNEFMQFLQREVSKASK

SEQ ID NO: 188856 - protein, 224 aa, Glycine max
  Clone ID: PAT_MRT3847_141551C.1.pep
MGSEEVKLLSFWVSPFGKRIEWALKLKGVEYEYIEEDIFNKSSLLLELNPVHKKVPVLVHAEKSIIAESFIILEYIDEKWKQYSLLPHHPYQRALARFWAATAEEMFRKVVWIALRSPTSGDEREKALKESREVMERIEEEIRGKKYFGGDNIGYLDIALGWISYWLPVLEEVGSMQIIDPLKFPATTAWMTNFLSNPVIKDNLPPRDKMLVYLKDLRSKYIVL

SEQ ID NO: 188857 - protein, 91 aa, Glycine max
  unsure (1)..(91): unsure at all Xaa locations
  Clone ID: PAT_MRT3847_141552C.1.pep
FLACEALEIGVLVRWKLRMEVATVIMVKGLGWIGGWVLKMEIMGGEXLGGSGVAESEEDRGLKDRAVSYGVAIGGEEVQDLKKEAVDNGVA

SEQ ID NO: 188858 - protein, 71 aa, Glycine max
  unsure (1)..(71): unsure at all Xaa locations
  Clone ID: PAT_MRT3847_141553C.1.pep
KNDEQDIPHPXEDVITTEFYKVTVSDHGENYHTRLNXPHRFDISSNSSSEDEXEDGEKRKNNKKEKKWLKD

SEQ ID NO: 188859 - protein, 158 aa, Glycine max
  Clone ID: PAT_MRT3847_141554C.1.pep
LIAEFKYFLLQKTMQLFVFNFYGTTFLVIYGMVIIMGTVLELGATPAPAPAPAPLLPPSEANAILNSGWWNLSQLDSHNICSWNDIDCNVAGSITGIRCPLGTPGIRLATLNLSVFKNLEWLEVSGCGLQGTIPPDIGNLPKLTHLRLSYNSLHGEIP

SEQ ID NO: 188860 - protein, 96 aa, Glycine max
  Clone ID: PAT_MRT3847_141555C.1.pep
GSFRMDFCSCLVFLEFRNHMVFKQKKMIVEQIMQQAHCLILLPVEDNQSVTRRNERWQKPLPSQIKANFDAAVRKGVATLAAATKFLPNTYIKRRV

SEQ ID NO: 188861 - protein, 48 aa, Glycine max
  Clone ID: PAT_MRT3847_141556C.1.pep
KNQGLNSRFNSCPGKKITQRVKSFAFKPPPIKTNGNKPGRNLTLVPFF

SEQ ID NO: 188862 - protein, 53 aa, Glycine max
  Clone ID: PAT_MRT3847_141557C.1.pep
ESQWPLGKIFFPFRWRSTDTSPSFPSGTRAILHSRFFCSILLSVPLVFLFSLC

SEQ ID NO: 188863 - protein, 72 aa, Glycine max
  unsure (1)..(72): unsure at all Xaa locations
  Clone ID: PAT_MRT3847_141558C.1.pep
FSLLLFLKXLSSKFQDYHFKDRFXFFXXKNXXGXGXLXCXLHFSAXXSXLXPXXKTIXTAPFLXGSSGFXCD

SEQ ID NO: 188864 - protein, 91 aa, Glycine max
  Clone ID: PAT_MRT3847_141559C.1.pep
LIYVIGIVNLFLFFYFIVYLINIFGSQGCDGSVLLDGGQDSEKFATPNLNYARGFEVIDTIKSSVERACSGVVSCADILAIAARDSIRLVL

SEQ ID NO: 188865 - protein, 60 aa, Glycine max
  Clone ID: PAT_MRT3847_14155C.1.pep
YYFCIAVIQRENILKTNLSSMYSKDPDPLPVCLVNPMKFLILLERYLFNRVKHFLSFNEG

SEQ ID NO: 188866 - protein, 63 aa, Glycine max
  unsure (1)..(63): unsure at all Xaa locations
  Clone ID: PAT_MRT3847_141560C.1.pep
MKVCLPKASNFCGNLSDTSSFKFRSSKGSIGKDLXFVLVMEVIMNRAYTLVWYTRFLFWLRSL

SEQ ID NO: 188867 - protein, 36 aa, Glycine max
  Clone ID: PAT_MRT3847_141561C.1.pep
IMSNAIANNAIFNETFAIIILNHVFAVSSKSHNNYV

SEQ ID NO: 188868 - protein, 83 aa, Glycine max
  unsure (1)..(83): unsure at all Xaa locations
  Clone ID: PAT_MRT3847_141562C.1.pep
LSKNSPQWSRQLSQPTLRREGNAGLVGAPSMGGKCMESPPTFIRGKCQKNRKRCGRRTLSVKGSGVVFTHXEGISTSRVRHXG

SEQ ID NO: 188869 - protein, 187 aa, Glycine max
  Clone ID: PAT_MRT3847_141563C.1.pep
LHLVIVLNRSHFYCCCCWPSSTERNHENPNETLHDPHHANSHNEIIPPGCPGAPPGPLPRPPTPDGGHRTPSHPPRATPPPPPRGGASSQGPPSRPTSPSGPHRTPCQPRRARRPARPQRGPPRAGPRELARRSAGYARCQNLTHHRRTAQPQCSPLCPNQRKLEPRIVKSTLRRYARTWTGGRRKV

SEQ ID NO: 188870 - protein, 103 aa, Glycine max
  unsure (1)..(103): unsure at all Xaa locations
  Clone ID: PAT_MRT3847_141564C.1.pep
PNSAPPPKRQLHRADLDDDGAKALAXVSKINSCSWGLGLNNYIIECTAFSSMGLALTDNHTIAXVHHNGNDVGAFWANAPLKLQHSNMSXMELPLHVKSIADE

SEQ ID NO: 188871 - protein, 103 aa, Glycine max
  unsure (1)..(103): unsure at all Xaa locations
  Clone ID: PAT_MRT3847_141565C.1.pep
RIDRESEEKVERVCAPQTDDIAKTASGEAXAQMILQMDDXLFPHTSHAAEDLLHNYGITVLELLVNALAKALGHTECNLIPLLTSMENYVTLXTETGIPIYTQ

SEQ ID NO: 188872 - protein, 88 aa, Glycine max
  Clone ID: PAT_MRT3847_141566C.1.pep
DYRRGGEGTGLNFWDTKGIQVEGFLFTKFPTVCGISQQQNHIFQKLGDSNDHQWGGISFWRTSFFDNVIIMPSNLLKDIKRNPFYQTE

SEQ ID NO: 188873 - protein, 200 aa, Glycine max
  Clone ID: PAT_MRT3847_141567C.1.pep
MLRIPHSPFAFGPPPVGQPSDIVPEVLWNTMNNIDALTLQFRQLNLNAEARDLAFHEENALVPYKQKNSLIHGDGVIVPFHIKKQHLRPKVNLDDETDRVWKLLLLDINSHGIDGTDEDKAKWWEEERNVFRGRADSFIARMHLVQGDRRFSRWKGSVVDSVLGVFLTQNVTDHLSRSAARPLAARFPLRSCCLPTSHIY

SEQ ID NO: 188874 - protein, 163 aa, Glycine max
  Clone ID: PAT_MRT3847_141568C.1.pep
MHPFGKVNGAGFEYMTPRRSNLANMGHVVITESELGPSPSEVAAAIARKPVIDEGENSTVGGWSLDAESVEGLQSKLERWRTDLPPVVDRGEVSSYPTTSTTKTSRHSRRHTDGGSTGSGLFSCFSNICGVECYVGCGGDPKGKKNRIRSRRTPSADDSSSLL

SEQ ID NO: 188875 - protein, 91 aa, Glycine max
  unsure (1)..(91): unsure at all Xaa locations
  Clone ID: PAT_MRT3847_141569C.1.pep
TRTARGHAGLSLASTVSGRNRSGDSLPASDRPPISSTLATSGTIFTAISCFWDLPXSGLWIAPYCQSSMSTQLRQNXSIDVDAAVNSLVNL

SEQ ID NO: 188876 - protein, 187 aa, Glycine max
  Clone ID: PAT_MRT3847_14156C.1.pep
MKATKELSQHVEENEVTVLVDEEEDEEYESEDEVVDDGEDDEDDDDDDDDDDDNEDEEDDDEDDAPDGGDDDDDEDEEEESDVQRGGEPDDDDNDDDDEDEDEEDEEEQGEEADLGTEYLIRPLVTAEEEEASSDFEPEENGEEEEEDVDDEDGEKSEAPPKRKRSDKDDSDDDDGGEDDDERPSKR

SEQ ID NO: 188877 - protein, 60 aa, Glycine max
  Clone ID: PAT_MRT3847_141570C.1.pep
QSSVRDGDANILLPKHLWGCLIKSKEGECLNEVGWVLDHGQAITSNGLLCGGGASHREHQ

SEQ ID NO: 188878 - protein, 484 aa, Glycine max
  unsure (1)..(484): unsure at all Xaa locations
  Clone ID: PAT_MRT3847_141571C.1.pep
PRVRFSTPVNDFRRYSRGAAGHEERFSLWNSDCGVHEHVFSTXGTNAAGGSGEFKNYSRNSNVPDLRFTTYSDSTGGRTQSFSSYSEDGNAGGQTFQSYGKNSAGAANDFAAYGTDSNVASSDFTNYGKGGAGPNDTFTNYGVNMNNPTETFQSYADGTVGGTQSFSNYRDQANVGADSFQSYAKNTLGSEADFKNYGNSFNPGSDTFKGYAKGAEDNKVGFTTYSANTNATFKDYAKHGVSFASYNVSSESKTVSSSVVKRWVEPGKFFRETMLKEGTLMPMPDIRDKMPKRSFLPRAILTKLPFSSAKVDELKRLFKVSENSSMEKMIMDSLGECERAPSVGETKRCVASVEDMIDFSTSVLGRNVAVWTTENVKGSNKNVMVGRVKGMNGGKVTKSVSCHQSLFPYLLYYCHSVPKVRVYEADLLDPESKAKINHGVAICHLDTTAWSPTHGAFLALGSGPGRIEVCHWIFENDLTWTIAD

SEQ ID NO: 188879 - protein, 209 aa, Glycine max
  Clone ID: PAT_MRT3847_141572C.1.pep
MGQKMIRLICLFSFWFAQPTNYSENIQEDKKIRDCIKNYIQKNIRIPSTPEDIGQIKIQKRIDLIQVIIYMGFPKFLIEGKSQKIEELQTNMQKKLNCVNRKLNIAIVKVANAYKHPNIIAEFIAGQLKNRVSFRKAMKKAIELTEQAGTKGVQVQIAGRIDGKEIARVEWIREGRVPLQTIRAKIDYCCYTVRTIYGVLGIKVWIFSK

SEQ ID NO: 188880 - protein, 90 aa, Glycine max
  Clone ID: PAT_MRT3847_141573C.1.pep
SSSLHCISKIAQPDKEKQRFAAQARHSAAGKALLEPAGRAASRCRRGHVRSHRPHLPRLSTDHMAVISMLTQRHVPPAPPFLTDTLPSGA

SEQ ID NO: 188881 - protein, 216 aa, Glycine max
  Clone ID: PAT_MRT3847_141574C.1.pep
MGQKINPLGFRLGTTQSHDSIWFAQPTNYSENIQEDKKIRDCIKNYIQKNIRISSGVEGIGQIKIQKRIDLIQVIIYMGFPKFLIEGKSQKIEELQTNMQKKLNCVNRKLNIAIVKVANAYKHPNIIAEFIAGQLKNRVSFRKAMKKAIELTEQAGTKGVQVQIAGRIDGKEIARVEWIREGRVPLQTIRAKIDYCCYTVRTIYGVLGIKVWIFSK

SEQ ID NO: 188882 - protein, 318 aa, Glycine max
  Clone ID: PAT_MRT3847_141575C.1.pep
MASRFWTQGGSDSEEEESDYDEEVDTTVGESGSQAVTSRYLQDNASDSDDSDGQKRIVRSAKDKRFEEMASTVDQMKNAMKINDWVSLQESFDKINKQLEKVMRVTESEKVPNLYIKALVMLEDFLAQALANKDAKKKMSSSNAKALNSMKQKLKKNNKQYEDLINKCRENPESEEEKEEEESDEEYDSDGEIIDPDQLQKPEAKSDSEASQYEDEKPDAGEGPWDQKLSKKDRLLDRQFMKNPSEITWDAVNKKFKEVVAARGRKGTGRFEQVEQLTFLTKVAKTPAQKLEILFSVVSAQFDAGPRMCPMYDAILFR

SEQ ID NO: 188883 - protein, 120 aa, Glycine max
  unsure (1)..(120): unsure at all Xaa locations
  Clone ID: PAT_MRT3847_141576C.1.pep
RSLFQFLPPKPPPFPPPLPPSVLLPLTHRRGGFIPSCLSDDAVSMRNFDHGFTVIAAILRRIEPLDNSAISKGMSPAARDSMKXTISTMLGLLPSDHFAVIVTVSKHPLHCLLFSSIVTG

SEQ ID NO: 188884 - protein, 41 aa, Glycine max
  unsure (1)..(41): unsure at all Xaa locations
  Clone ID: PAT_MRT3847_141577C.1.pep
XVXARPEKCEGEFXSMTPSYDRXSXGLXPNPKHFHXKGAST

SEQ ID NO: 188885 - protein, 91 aa, Glycine max
  unsure (1)..(91): unsure at all Xaa locations
  Clone ID: PAT_MRT3847_141578C.1.pep
AYVSLNPLEPPPLFFFFFFXFFFFFXXISFGGFXLGETFFSHXXEKNKNPSFSNTKIHTPPSNQSHPKTKAHSHPITTTPTHAWVSKPSPL

SEQ ID NO: 188886 - protein, 290 aa, Glycine max
  Clone ID: PAT_MRT3847_141579C.1.pep
HSVSIDVLSRITVHSCDSIFGDAETRLLMHIIGLLPWLCLQLSKDIVIGPASPLQHQYQKACSVAANVAIWCRAKSFDELATVFMIYSRGEIKSVDNFLACVSPLLCNEWFPKHSTLAFGHLLRLLEKGPVEYQRVILLMLKALLQHTPMDATQSPHIYAIVSQLVESTLCWEALSVLEALLQSCSSLTGSHPYEPGSLENGIGGTEEKLLAPQTSFKARSGPLQYGFGSGLGSVSTPGHVGSTESGMSPREVALQNTRLIIGRVLDRSALGKRKDQKKLVPFVANIGNP

SEQ ID NO: 188887 - protein, 102 aa, Glycine max
  Clone ID: PAT_MRT3847_14157C.1.pep
MASTKCGSRTMKSQPSRTCMCSPTNHPGSFRCSMHKKPPLAAAVPSKWESSPMAAKANSLKATLLQMIKPSSHDHHKRKTFQPKPTRFSLMNNGNAAVVAVN

SEQ ID NO: 188888 - protein, 151 aa, Glycine max
  unsure (1)..(151): unsure at all Xaa locations
  Clone ID: PAT_MRT3847_141580C.1.pep
MEAFVFVFVVLVLCGCAAGKECTNIPTQSHTLRYQLLTSKNGRLEEKAMSHFHLTPTDESEWADLLPRKLLTEQHQHDWAVMYKNIKNMGVFKSPEGFLKEVPLQDVRLHEDSIHGIAQQTNLEYLLMLDVDSLIXSFRKTAGLSTPGTPY

SEQ ID NO: 188889 - protein, 74 aa, Glycine max
  Clone ID: PAT_MRT3847_141581C.1.pep
CSLFHHLHLGGLAYVKCCFSYLRLGSAFFYLICGMYLGFSHPFCLLCFSWSLAMSIFGKVPSYFIRFYENLCLM

SEQ ID NO: 188890 - protein, 75 aa, Glycine max
  Clone ID: PAT_MRT3847_141582C.1.pep
PSQHHFFTYKNSCLRGDKSHQPKTEKIKPTQNILKANRPLSPYQPIFKKTQCYKTGWRFSYVRGMYAKSIIPPLL

SEQ ID NO: 188891 - protein, 46 aa, Glycine max
  Clone ID: PAT_MRT3847_141583C.1.pep
YSQLAPTIQHFICLRCGVINRNTHQLILQSKRRSHPFEVYRQRMSW

SEQ ID NO: 188892 - protein, 73 aa, Glycine max
  unsure (1)..(73): unsure at all Xaa locations
  Clone ID: PAT_MRT3847_141584C.1.pep
GLXAKVPFLDKNFIGVAMNMDPDYKMIKQEHCRIXKCVLKRPFDDEERPYLXRHGMQLMEQVSDVSGYGWMHG

SEQ ID NO: 188893 - protein, 68 aa, Glycine max
  Clone ID: PAT_MRT3847_141585C.1.pep
SAETKEAETSSLTKLLLGTPSILLLAACKSPSDETMETDSIAIKSYVSVIMNTLHHLIISFHHILDSL

SEQ ID NO: 188894 - protein, 85 aa, Glycine max
  Clone ID: PAT_MRT3847_141586C.1.pep
ILLLSQSEKLATDLDSITYTFIFKQPISHNTKHLLNSNRYYLYFFTDCKTIYTANATTDADDTPQSVPRALKLQIKLLLESPSSP

SEQ ID NO: 188895 - protein, 114 aa, Glycine max
  Clone ID: PAT_MRT3847_141587C.1.pep
LADARPDSRRRCFEYFHQPILSLYSSSSRSHWETLIIFKLFLILSIDRNTLLRTHPKDQTSFALEDSSTLLRRYCLDIHRIHALHIIVISIRSHDSGASCKSFLPTSNASPIRE

SEQ ID NO: 188896 - protein, 180 aa, Glycine max
  Clone ID: PAT_MRT3847_141588C.1.pep
MADKDEELAMPRDAKIVKSLMKSMGVEDYEPRVVHKFLDLWYRYIVDVLTDAQVYSEHADKSEIDCDDIKLAIQSKLNFSFSQPPPREVLLELAHNRNKIPLPKTIAGPVIPLPPDQDTLISPNYMFAIPNQRPAEPPIEETEDEEDTNTIPNPSQEEQIVMQQNSPQRVSFPLPKRQND

SEQ ID NO: 188897 - protein, 91 aa, Glycine max
  unsure (1)..(91): unsure at all Xaa locations
  Clone ID: PAT_MRT3847_141589C.1.pep
SYPIVAKKRKTLAYLFNFQDANPSVKTLTGKTITLEVESSDTIDNVKSKIQDKEGIPPDQGRLIFAGKQLEDGRTLAXYNIQKESTLHLVL

SEQ ID NO: 188898 - protein, 76 aa, Glycine max
  Clone ID: PAT_MRT3847_14158C.1.pep
ISNSVYLFSCNMVLSAPYICVCIPVQKIPLFPNFGMFDAKYLSLLIRSSCWRPTQAAVKSNFHLPMRSFELKNRLV

SEQ ID NO: 188899 - protein, 58 aa, Glycine max
  unsure (1)..(58): unsure at all Xaa locations
  Clone ID: PAT_MRT3847_141590C.1.pep
WKTTNRGPTHGXXVITQSLGPLQSTNCELQTTEHRLDFYVSYDIFLRITNWGSMISKP

SEQ ID NO: 188900 - protein, 166 aa, Glycine max
  unsure (1)..(166): unsure at all Xaa locations
  Clone ID: PAT_MRT3847_141591C.1.pep
MGKEKVHIXIVVIGHVNSGKSTTTGHLIYKLGGIDKRVIERFEKEAAEMNKRSFKYAWVLDKLKAKHKRRITINIALXKFKTTKYYYTVINTPKHXNFIKNIITKTSQANYTILIINSTTGNFEANISKNKQTREHTLLSFTLYIKQIICYYNKINTTTPKYSKTR

SEQ ID NO: 188901 - protein, 109 aa, Glycine max
  unsure (1)..(109): unsure at all Xaa locations
  Clone ID: PAT_MRT3847_141592C.1.pep
MRGGKVLSVTTICGQSGGRILMELYVDVTTMTVEIMRATSTXRWAAGRSXKPLHYKGSSLHRMIPRLMCQGGDLTDRNXTLGVLIYGSLFDDEILVLKHTCLCILLMVN

SEQ ID NO: 188902 - protein, 79 aa, Glycine max
  unsure (1)..(79): unsure at all Xaa locations
  Clone ID: PAT_MRT3847_141593C.1.pep
VNGKKPWSLSFSXFGRALHQSPLKAWSGKKENFKKAPEPLLVKAKGNSKAPLGTSKGNSKLFYGASKSPPVWGSKFWSI

SEQ ID NO: 188903 - protein, 56 aa, Glycine max
  Clone ID: PAT_MRT3847_141594C.1.pep
FNKTIFSQNIIWSLKHYALTIIKSPNFFFRKIIPSFILVHCPSNSHKAFHLVKILN

SEQ ID NO: 188904 - protein, 82 aa, Glycine max
  Clone ID: PAT_MRT3847_141595C.1.pep
FFLSFFLFFFFFLFFCLCVFIIFFLFSSKKPKTRFFLFEKGDCDWGETGNPFCGEKSFPPTIPIPRVTPRGFLITLALVVTF

SEQ ID NO: 188905 - protein, 69 aa, Glycine max
  Clone ID: PAT_MRT3847_141596C.1.pep
NSRVKINAFLKEKAVAGLTEVFGTDFMGVPEGVNAVGFKFSLSLKNFLLRIFVGGLVLVAILEAVIGVS

SEQ ID NO: 188906 - protein, 44 aa, Glycine max
  Clone ID: PAT_MRT3847_141597C.1.pep
AATGLEILGESHKGLFWFFASNLPPASRNIDPLVFTSFVLHGAI

SEQ ID NO: 188907 - protein, 82 aa, Glycine max
  unsure (1)..(82): unsure at all Xaa locations
  Clone ID: PAT_MRT3847_141598C.1.pep
IYQKHYNDHGCKVDDYGNVDKXIDKYGNPVHVAIKIYITTITVTDVYSDDINKLHNTIYAYVVDTELHHYNDGYYDDTIIHN

SEQ ID NO: 188908 - protein, 103 aa, Glycine max
  Clone ID: PAT_MRT3847_141599C.1.pep
YSNSNSLWCSYDRKFINEIFYSRVDGCSCHGGVSETLIPCHNCAPGNNYYSGKFNSINQTFIYLLLCWFNLRNSFPQKLRKKTQPDQKIILETPPHGLATVTD

SEQ ID NO: 188909 - protein, 76 aa, Glycine max
  Clone ID: PAT_MRT3847_14159C.1.pep
FCYDVTACETTGNPGEYGFVAHLNEGRHLKKRPTEFRVDKVLLPFGENKFYFTQVGPEKGLFPFEACEDGQVHFFP

SEQ ID NO: 188910 - protein, 70 aa, Glycine max
  Clone ID: PAT_MRT3847_1415C.1.pep
GGKKRILGVVKCPTPKKRGKKKKKIQLKNLGKKGVSHKGFYFLKRGQSPGIKKKIALQARVVPTVNFFFF

SEQ ID NO: 188911 - protein, 286 aa, Glycine max
  unsure (1)..(286): unsure at all Xaa locations
  Clone ID: PAT_MRT3847_141600C.1.pep
MASAPSRTLTDFFQPASKRLEPTLPASCKSDDANASTLSVDQKLRMEYNKLLAKSKRNLKLCVERVSKSKESGLGGVKLEELLVEETWLEALPGELQKPYALTLSKFVESEISXRRRVIFPPTHLIFNALNTPFHTKVXLISYHGPGQAMGLSFSVPENQSPHIYLNFTRLHPTHSSKMGCAGFLLLNAVLTVRKHQANSHAKKGWEQFTDVVXQISQKKEGVVFLLWGNSAREKSRLIDARKHHVLTAAHPSGLSANRGFFGCRHFSRTNQLLEQMGIDPIDWQL

SEQ ID NO: 188912 - protein, 154 aa, Glycine max
  unsure (1)..(154): unsure at all Xaa locations
  Clone ID: PAT_MRT3847_141601C.1.pep
MASAPSRTLTDFFQPASKRLKPTLPASCKSDDANASTLSVDQKLRMEYNKLLAKSKRNLKLCVERVSKSKESGLGGVKLEELLVEETWLEALPGELQKPYALTLSKFVESEISGGDGVIXPPTHLIXNALNSTPFHTVKAXILGQDPYHGPGQS

SEQ ID NO: 188913 - protein, 78 aa, Glycine max
  Clone ID: PAT_MRT3847_141602C.1.pep
HFDIPRSLVAAPYNRKHMQPILASKNLSISSYFLVSDFLWKRKSLCCAGHTLRESLSFPFLVYWLNTLLYDIRLWVII

SEQ ID NO: 188914 - protein, 88 aa, Glycine max
  Clone ID: PAT_MRT3847_141603C.1.pep
MQWPPPRLTGTGLFTGVTAALYPVSVVKTRLQVASKDTLERSAFSVVKGLLKTDGIPGLYKGFGTVIIGAISTRIIFLTALETTNVAF

SEQ ID NO: 188915 - protein, 56 aa, Glycine max
  Clone ID: PAT_MRT3847_141604C.1.pep
VHPGDSAMRAQSNGETYQHHDYHYKCVEPHKCAIAILQLLHKRCFLSLSIPKLWLP

SEQ ID NO: 188916 - protein, 100 aa, Glycine max
  Clone ID: PAT_MRT3847_141605C.1.pep
KKKRIPPLVAGPNLFLRVFPLSPPHIFFGVFTPGARGPVFFFKVVFWIKIYVFFFPFLKGKGCHNCFCYLFFGPPFRVLSLLFFPAAFSSFAVVYKRRHL

SEQ ID NO: 188917 - protein, 81 aa, Glycine max
  Clone ID: PAT_MRT3847_141606C.1.pep
LPSTNWYHQRIALYLTKRFCLLLRPTDFSNTLTRRDHAVVTHNATRGGACFISSKIATKSGEDKIRGGVEKVMWVPHLEIG

SEQ ID NO: 188918 - protein, 178 aa, Glycine max
  Clone ID: PAT_MRT3847_141607C.1.pep
TIILNHNLVYKTRTKPKNSKPFFNAGCERFIRDVRNTEVHIAVRDARVHEDDPLLGIIYLPLEKVFHSRSQINSTFPLAGGVSYGRARVSMVFRSVQCQLPKTLLGWDCGTLDIRPTIKGIDVPEDLKNMRLKVRNRTTRGKMNSRGNNEWSTKNNKPISLPVRMRYAAPLIVEFRQD

SEQ ID NO: 188919 - protein, 105 aa, Glycine max
  Clone ID: PAT_MRT3847_141608C.1.pep
NIWKITKAHMRLVMWKKGLMKNLKNMVKKSVKKRWKNILMKGMKRLGMWKKGLMKYEEEINEGGIECNDAFQSKEPLIIEDINDIFSLGVEGLKCWFATLELAYD

SEQ ID NO: 188920 - protein, 113 aa, Glycine max
  unsure (1)..(113): unsure at all Xaa locations
  Clone ID: PAT_MRT3847_141609C.1.pep
MKMKVLGFLVATILVARECHAYEKFPPPMNTGXWARNPEVKCPSXRLAVETQNNLCFXNIPEECVEATKEYIHGEQYRSDSKTVNQQAYFYARDLEVHPKDTFVFSIDGTVLS

SEQ ID NO: 188921 - protein, 52 aa, Glycine max
  Clone ID: PAT_MRT3847_14160C.1.pep
GTLSRTGSSAYYWVGDATPPVRNTKTTMLMLYTPSTTTFFVSPTATVTLLSS

SEQ ID NO: 188922 - protein, 98 aa, Glycine max
  Clone ID: PAT_MRT3847_141610C.1.pep
MKMKDLAFFHGTILVAWQCHAYDMFPVRMNTGYGARTPEEKCASRKLAEEAHNIFGFETIPEERVDATKEYIHGEQYRSDFNTVNQQAYLYDRELEVH

SEQ ID NO: 188923 - protein, 93 aa, Glycine max
  Clone ID: PAT_MRT3847_141611C.1.pep
ATVSLHMIRCLALHEAHRMLDMGFEPRMTNIVHQMDVPPPRATQTMLFGATFPGEIQRLASDFLSGYIFLAVGTVGSSTDLIVQRVECVQESD

SEQ ID NO: 188924 - protein, 141 aa, Glycine max
  unsure (1)..(141): unsure at all Xaa locations
  Clone ID: PAT_MRT3847_141612C.1.pep
MNMNVLVFFAATILGAWQCHAYDMVPLLMNTGYGARTPEVKCASWRLAVEAHNIFGFETITEECVEATKEYIHGEQYSSDCIADNQHAYFYARDLEIHTKDTFVFSIXATVLSNMGYYKKHGYGEEKINXTLYDEWVNKGN

SEQ ID NO: 188925 - protein, 171 aa, Glycine max
  Clone ID: PAT_MRT3847_141613C.1.pep
REAFSYATNTSNLSGHKPPSYNKLRTTLLTTERSHVENLMQPIRNSWNQKGVTIVSDGRSDPQRRPLINFMVVTESEPMFLKAVNCSGDIKDKDFIAQHMKDAIMKVGSSNVVQIVTDAVLCKTIGMIIENEFPTIYWTPYVVHTSNLALKNICAAKDSEKNNVLGSHTQI

SEQ ID NO: 188926 - protein, 180 aa, Glycine max
  unsure (1)..(180): unsure at all Xaa locations
  Clone ID: PAT_MRT3847_141614C.1.pep
KXKXLGGFXATXXGAGQGHAXXXGPLRRNTGYGARTPEVKCASWRLGGEAHNFFGFETIPEECVEATKEYMHGEQYRSDSKTGNQQAYFYARDLEVHPKDTFVFRIDGTVLCNIAYYRKHGYGVEKLDWTLGDEWVNKGNAPGLAETVRNYNKLGCFGXXMIVVGGEELWAYGAWGRVTV

SEQ ID NO: 188927 - protein, 232 aa, Glycine max
  unsure (1)..(232): unsure at all Xaa locations
  Clone ID: PAT_MRT3847_141615C.1.pep
MKMKGGGFFVATILVAWECHAYDMFPLRMNTGYGARTPEGKCASWRLAVEAHNIFGFESVPEECVXATKEYIHGEQYRSDSKTVNQQAYFYARDXFEVHPKGSIVGVSIDGXVLSNIPYYKKRGSGGGRENXTRPLYDEMGLTRGNAAGTCPRTLKNYNKXGVLLGFKIIFXWQGRTPGQTGAVTEANLKEGVATTHGEKLILKGPQXPSTPNXAVSYKTAAREKLIREGYN

SEQ ID NO: 188928 - protein, 57 aa, Glycine max
  Clone ID: PAT_MRT3847_141616C.1.pep
GRSLEAFDRSLTLLPLYPIFPKGGSIYGTRFTFHGYILHHQDNVIWKTPHTTFWGSS

SEQ ID NO: 188929 - protein, 51 aa, Glycine max
  Clone ID: PAT_MRT3847_141617C.1.pep
SFNEYYFNTRDSIEYNIGGTRRCQVCLSLTVTLMVSVHFQTNTTQHLKTLS

SEQ ID NO: 188930 - protein, 213 aa, Glycine max
  unsure (1)..(213): unsure at all Xaa locations
  Clone ID: PAT_MRT3847_141618C.1.pep
MKMKVLVFFDATILVAWQCHAYDMFPLRMNTGYGARTPDVKCASWTLAVEAHNIFVFETIPEECVEATKEYIHGEQYRSDSTTVNQQANFYARDLEVHPKDTFVFSIDGTVLSNISYYKKHGYGVEKFNLTLYDDMVNKDNVPALLETLKNYNTLMSLVLXIILLSRSTLDTLARTRAHLQNVCYHTCDILVLMDPXDPSIQNAVLTNTYDRD

SEQ ID NO: 188931 - protein, 119 aa, Glycine max
  unsure (1)..(119): unsure at all Xaa locations
  Clone ID: PAT_MRT3847_141619C.1.pep
MKMKGPGFLGATNLGTRQCHAYEKFPPRMNTGQGARTPEGKCPSWXRLAVEAHNIFGFENIPEECVEATKEYIHGEQYRSDSKTVNQQAYFYARDLEVDPKDTFVFSIDGTVLSNIPYY

SEQ ID NO: 188932 - protein, 52 aa, Glycine max
  Clone ID: PAT_MRT3847_14161C.1.pep
LKNVKIMVYLKRVNKKFDKYTKNKKERNYKKLKTSVLKNDTLNNISKNTKSQ

SEQ ID NO: 188933 - protein, 124 aa, Glycine max
  unsure (1)..(124): unsure at all Xaa locations
  Clone ID: PAT_MRT3847_141620C.1.pep
LCHAYXDMFPLRRNTGYGARTPEVRCACWRLDVEAHNIFSFETIPEECVEATKEYIHGEQFXSDSKTVDQQAXYLYGIDLEVHAKDTFVLSIDGTVLSNYPYYLKHGYGEEKFNXSTLFDEWVN

SEQ ID NO: 188934 - protein, 67 aa, Glycine max
  unsure (1)..(67): unsure at all Xaa locations
  Clone ID: PAT_MRT3847_141621C.1.pep
MEXKPGLSALXTGXASXXGKXLALXLXEKGVXITXXDFSEEXGXQXXILGEKXNSXFHXKLGXPSAX

SEQ ID NO: 188935 - protein, 207 aa, Glycine max
  unsure (1)..(207): unsure at all Xaa locations
  Clone ID: PAT_MRT3847_141622C.1.pep
MKMRVLVFLVATILVAXWYCHAYYMFPLRMNTGYGARTPEVKCACRRLAVEAHNIFGFETIPEECVEATKEYMHGXQYRSDSKTGNRHTYFYAKDLEVHPKDTXFEFSIDGTVLSNIPYYKKHGYGVEKFNSTLXDEWANKGNAPSLPETIKNYNQLASLGFKIILLSGRTLDKQAVTEANLMKAGYHTWETLILMYPHDPSTPKCR

SEQ ID NO: 188936 - protein, 83 aa, Glycine max
  Clone ID: PAT_MRT3847_141623C.1.pep
LEPNRLERLELDLCQEKDQIAKKVHTIIDKFAERGLRSLAVAYQEIPEKSKDSPGGPWTFCGLLPLFDPPRHDSAETIRRALN

SEQ ID NO: 188937 - protein, 44 aa, Glycine max
  Clone ID: PAT_MRT3847_141624C.1.pep
TSLLFQGSILHLRQRFYFIQIHNKHPFLPFPIHAPPLKNDSKTI

SEQ ID NO: 188938 - protein, 83 aa, Glycine max
  Clone ID: PAT_MRT3847_141625C.1.pep
AVPMSSRWSHFRHKDLGGIKGPIYLEYSRIARHGVHPIVILSVFLFIGPLADRLFPGLVWITIPTVVFMPVVRLNINVNSYYF

SEQ ID NO: 188939 - protein, 73 aa, Glycine max
  unsure (1)..(73): unsure at all Xaa locations
  Clone ID: PAT_MRT3847_141626C.1.pep
RKKKKGKKKVLFFLPPPHLGXLEKLLIGVVFPPHSILNRALFQKKKKKKKKKKKKKKKKKKKKKKKKKKGGPL

SEQ ID NO: 188940 - protein, 79 aa, Glycine max
  Clone ID: PAT_MRT3847_141627C.1.pep
VTEANLNKAGFPPWEQLILKGPHLTPPKALSTKPAKRENLLRQGSRTVGIIGAQWSDRLGDPRGESRPFKLPNPRDSIE

SEQ ID NO: 188941 - protein, 51 aa, Glycine max
  unsure (1)..(51): unsure at all Xaa locations
  Clone ID: PAT_MRT3847_141628C.1.pep
KQXRFKMQPXKSASASQYGXXPXPMXFSNDTEXXQHVNSIRXAXVGAAXKX

SEQ ID NO: 188942 - protein, 181 aa, Glycine max
  Clone ID: PAT_MRT3847_141629C.1.pep
NQVQTLLGLGARTFWIHNTGPIGCLPVAMPVHNAMNTTPGAGYLDQNGCINYQNDMAREFNKKLKNTVVKLRVQFPDASLIYVDMFSAKYELISNANKEGFVDPSGICCGYHQDGYHLYCGNKAIINGKEIFADTCDDPSKYISWDGVHYTEAANHWIANRILNGSFSDPPLSIAHSCRAQ

SEQ ID NO: 188943 - protein, 103 aa, Glycine max
  unsure (1)..(103): unsure at all Xaa locations
  Clone ID: PAT_MRT3847_14162C.1.pep
MAASQLLYREIDRVLNMDQEGHKFYDLMCNNVYDTYNASQNENFXAVLKTEIKKLXTYKYQIMTCINSTLMNNTIDSVSYEHVLGDARELIERAMQKFKICEK

SEQ ID NO: 188944 - protein, 164 aa, Glycine max
  Clone ID: PAT_MRT3847_141630C.1.pep
FNSGVIKANDKTQINVMLQPVESPETLESERSRHKFMIQTAFAPDDEQLPVDQFWKTVDPTLVMDSKLRVVFQRPFGFGDENNRDETNATGPFFNFNKTGEPKNEQPTQTPKSTEANSGDIQLALQREVELRMMYHDEKKNLEKEKYALIDKLEKLTHNAAAGG

SEQ ID NO: 188945 - protein, 38 aa, Glycine max
  unsure (1)..(38): unsure at all Xaa locations
  Clone ID: PAT_MRT3847_141631C.1.pep
KIHNTRHDIKXTHKFILFHPKIIPSIIXXXXXXXXXXL

SEQ ID NO: 188946 - protein, 78 aa, Glycine max
  Clone ID: PAT_MRT3847_141632C.1.pep
KKEMAAYFNCHIIPNILPCTLIRAYIWRHLWSSLHQTSATLSFSLKTLAVYRWIVSLFFIYGQNFRVFLRSSSSLFFT

SEQ ID NO: 188947 - protein, 69 aa, Glycine max
  Clone ID: PAT_MRT3847_141633C.1.pep
NPGSKFLNFVYVQALNRKFPTSSSGISSRDPPVKRVKTLPLMGYRSESDSFPFFKSVKGKGPKQSESPG

SEQ ID NO: 188948 - protein, 100 aa, Glycine max
  unsure (1)..(100): unsure at all Xaa locations
  Clone ID: PAT_MRT3847_141634C.1.pep
YYTTYVPTVILTNTMNNPASYTXLLEMKHVITHGRIESVLNYHTLMTDLTGLPKHNAXRLIKXTASAESLAMCNNILMGXRNLLLFSNNCHLQTIDISCY

SEQ ID NO: 188949 - protein, 62 aa, Glycine max
  Clone ID: PAT_MRT3847_141635C.1.pep
MDSALVIKVKYGDTLRRFSAHVDENNRLDLDMVGLRAKICSIFSFSADENLILRCAVEVGVL

SEQ ID NO: 188950 - protein, 108 aa, Glycine max
  Clone ID: PAT_MRT3847_141636C.1.pep
MRFNVKNAYWLSDRIRDKILQTEKNRINKDGELVISSTKTRTQKGNIEDALAKLQEIIDAASYVPPPPSEEQKKKIAKMAAIGEQKRLKSKKVLSDKKAFRRSKNSWD

SEQ ID NO: 188951 - protein, 192 aa, Glycine max
  Clone ID: PAT_MRT3847_141637C.1.pep
MSTGTTRMLVKEMLQLSSSTLHFSSAFRALSPPLPFSIQLRRSRRPAIRCASSDSDKVSSRLSQVQHLLQQAEHRALSADQGPPPKITLDHVTVSFARSGGPGGQNVNKVNTKVDMRFNVKNAYWLSDRVREKILQTEKNRINKDGELVISSTKTRTQKDNIEDALAKLQEKQCRGTSPPTTPTHWMDLNGG

SEQ ID NO: 188952 - protein, 57 aa, Glycine max
  Clone ID: PAT_MRT3847_141638C.1.pep
KYSLCYCFSEFLLMIPFLFSASPSLIVMLLLFPFFFLLFLDLMQPEKNEVITIFHIC

SEQ ID NO: 188953 - protein, 119 aa, Glycine max
  unsure (1)..(119): unsure at all Xaa locations
  Clone ID: PAT_MRT3847_141639C.1.pep
SLVIWEAQFGDFANAAQVIFDNFLSSGESKWLRQTGLVVLLPHGYDGQGPEHSSGRLERFLQMADDHPYVIPEMDPTLRKQIQECNWQIVNVTTPANFFHVLRRQIHREFLXPLIVMSP

SEQ ID NO: 188954 - protein, 88 aa, Glycine max
  Clone ID: PAT_MRT3847_14163C.1.pep
FCVFFFFFFFFEKKGPGPENFLIFLHKFSFKSPANQLLGLRLTGHWVELFLGESAQPNRSPDQNQNNRFQLTFICHLLNRRCSYKHNT

SEQ ID NO: 188955 - protein, 76 aa, Glycine max
  Clone ID: PAT_MRT3847_141640C.1.pep
KKTKFILLILFISFPRNRNVRTETHANTVTHSLTRPKAYIRTTTIGQAHTKHHQPQALRQTPHPTNPSCNRFYSEA

SEQ ID NO: 188956 - protein, 74 aa, Glycine max
  Clone ID: PAT_MRT3847_141641C.1.pep
DITCVGFDHTIMMGTYCNNLLCNFYHPNYSITNDVTKFCRVLTRGNSLCQNPVYFGLRKHRFDSELVSVGLEEV

SEQ ID NO: 188957 - protein, 474 aa, Glycine max
  unsure (1)..(474): unsure at all Xaa locations
  Clone ID: PAT_MRT3847_141642C.1.pep
VDQFSSLVFQTVLRVLAGDDEELLHVIPILLGCKDKNNAEDNFIGTRVVAELKNLLKESKFSHLMEVVLEVSPEALFNELFTKVFRNSLFELSSHQHGNFVVQALISYASNQDLMELIWEELGPNLEGLFKMGRSGVVASLVAASERLHINEHKCCQVLAEAVCPVDESPKWIVPRLLFLDSCFTSEDKSNWSWQSGSKMHVMGSLILQTVFHAXGECIQPYIISITSMEATHVLEAVVDARGSHVIEAFLCSGASGKQKRRLVTKLQGHFGEVALTSSGAFTIEKCFTASNLSLREAIVSEMLAVRSDLSKAKQGSYLLRKLDIDGYAANPDHWRSKQASKESTYKDFYTMFGSSDTKLTENDAFLADTSNNKSNKKTVKEMRKEIDQSLGSGAPFLSTQNFKKNPKKEKHKSKKNAQVSGDDVNSNRKKKRSNKEKVESGFDIAAKKTLKKRRRDDDLSEASLKKVKAPNAE

SEQ ID NO: 188958 - protein, 43 aa, Glycine max
  Clone ID: PAT_MRT3847_141643C.1.pep
VWTTLECILNYSFPWKILVPLSFNMFFIGKVFVENHERNSCLL

SEQ ID NO: 188959 - protein, 239 aa, Glycine max
  unsure (1)..(239): unsure at all Xaa locations
  Clone ID: PAT_MRT3847_141644C.1.pep
VLAVKKIDSSVLPNDMSDDFVELVSNISQLHHPNVTELVGYCSEHGQHLLVYEFHKNGSLHDFLHLPDEYSKPLIWNSRVKIALXIARALEYLHEVCXPSVVHKNIKSANILLDTDFNPHLSDSGLAAKFQXDQILNHIVGSGYDAPEVALSGQYTLKSDVYSFGVVMLELLSGRNPFDSSRPRSEQSLVGVGNTPLAMIXXXIXKWXEAAVKGXXPAKSLSRFADVIALCVQVLSDTF

SEQ ID NO: 188960 - protein, 55 aa, Glycine max
  Clone ID: PAT_MRT3847_141645C.1.pep
CNKLWIYHISSYFSLYDRPVLSIICLLSGLVLFVFIFICGSAFVGSGLKLFILNN

SEQ ID NO: 188961 - protein, 52 aa, Glycine max
  unsure (1)..(52): unsure at all Xaa locations
  Clone ID: PAT_MRT3847_141646C.1.pep
KLYIHSALYLPDSLNPYQFXXFKTLLPPKPSSQXTHMELHQYFXTTLHXINI

SEQ ID NO: 188962 - protein, 84 aa, Glycine max
  Clone ID: PAT_MRT3847_141647C.1.pep
VIAFFCWATPSYVICYHKRLVKITAGGAFPSHFSLAPSLWCNPFVELVQVFSRFIVRVHGFIWYRGVVFPIYLCAIKLVICTTT

SEQ ID NO: 188963 - protein, 107 aa, Glycine max
  unsure (1)..(107): unsure at all Xaa locations
  Clone ID: PAT_MRT3847_141648C.1.pep
TASSGQTSGYDLSFKILLIXDSGVGKSRLLFNSISNYAEHLSPTIGVDSKIKTLTTGGQTLKLTICDTAGHERIMTLHSSHYIKSQXIMLDYDVTRRETHYAHIKHV

SEQ ID NO: 188964 - protein, 116 aa, Glycine max
  Clone ID: PAT_MRT3847_141649C.1.pep
LIPRNLVPLLKLLLSLSLCLSLSLSGSLSLLPSVCSCLNAIFFWNFLPTLFRYAIVSVVSVMVYNLCLFRKIWSILNYPSANCVLKSEFAVLDFSWQGDMNFLVRSKNPGPGSKGP

SEQ ID NO: 188965 - protein, 53 aa, Glycine max
  unsure (1)..(53): unsure at all Xaa locations
  Clone ID: PAT_MRT3847_14164C.1.pep
DKPAHHSLFLFHNITLNQRWRXLHKGAAPKNPQXIKLKTYQRMLVLITLSHPK

SEQ ID NO: 188966 - protein, 77 aa, Glycine max
  Clone ID: PAT_MRT3847_141650C.1.pep
FLRGDKDKMSPNLQNVHNGPLQNQSFFPVPSIWGKLSRGQKTKVKLFPTQKSHRHLLLWGKCFSHGQQKKKKLPSSP

SEQ ID NO: 188967 - protein, 82 aa, Glycine max
  Clone ID: PAT_MRT3847_141651C.1.pep
HNSGREIQKERVEKMARLITVVWCAAAVLLCASDGASRVEAAANPIRMVSGVDAEVVQVIGACRRAGTSVRFLIMPPQSHLC

SEQ ID NO: 188968 - protein, 49 aa, Glycine max
  unsure (1)..(49): unsure at all Xaa locations
  Clone ID: PAT_MRT3847_141652C.1.pep
GXNDXISXXXXSXXXTLTSPXXXGXXPIPLPFIIDAPRXPHSLXKFPQF

SEQ ID NO: 188969 - protein, 84 aa, Glycine max
  Clone ID: PAT_MRT3847_141653C.1.pep
TGRRFRRRAHSTFGASPDPCPVPDTPACRPKARVENPRSYIYIYIYLTNIYICVCCLLLLLQHITQRSKIKRTNDREKKKNKKQ

SEQ ID NO: 188970 - protein, 69 aa, Glycine max
  Clone ID: PAT_MRT3847_141654C.1.pep
MASSSSYNSPCAACKFLRRKCMPGCIFAPYFPPEEPQKFANVHKIFGASNVTKLLNELLPHQREDAVNS

SEQ ID NO: 188971 - protein, 39 aa, Glycine max
  unsure (1)..(39): unsure at all Xaa locations
  Clone ID: PAT_MRT3847_141655C.1.pep
SRIYVIXYLSFLNSTMLLNNLGKLVVGDSARNPETAKPP

SEQ ID NO: 188972 - protein, 103 aa, Glycine max
  unsure (1)..(103): unsure at all Xaa locations
  Clone ID: PAT_MRT3847_141656C.1.pep
PRVRARTQLHGGRNLSLLFVSHAQVLESELNHVAFKIEYVENELTDEKRAPESALARSMELEELLQRMEFXDVDDDHDTDCEGHRTAADEKLDKCQETVLVVG

SEQ ID NO: 188973 - protein, 48 aa, Glycine max
  Clone ID: PAT_MRT3847_141657C.1.pep
PGPGVHVGSLNLHLQEGDSGVKLVALDFILKQGFPKFGIIKTPFFVGF

SEQ ID NO: 188974 - protein, 83 aa, Glycine max
  Clone ID: PAT_MRT3847_141658C.1.pep
KDSASLALWHNPLRIFIPQKKKNPPWEGFGWPNPGFMKTIGAGLLFSKSEKVVPLGGRFIRGFHHEKPEPPKYQTGFPHSCGP

SEQ ID NO: 188975 - protein, 58 aa, Glycine max
  Clone ID: PAT_MRT3847_141659C.1.pep
KNQNLLDNRTITLHRQLTNKIHQFPALHAITNSPSCLRITLFFSFFFRYFHITHSSLN

SEQ ID NO: 188976 - protein, 60 aa, Glycine max
  Clone ID: PAT_MRT3847_14165C.1.pep
YCAARAARAAARRDRRDFLKNISFFYSRKYSFNEITSLDIAFIFILDNFSSIICTVIKFF

SEQ ID NO: 188977 - protein, 184 aa, Glycine max
  Clone ID: PAT_MRT3847_141660C.1.pep
KKKKKKKKKKKKKKKKKKKKKKKKKKKKKIPKKKKGPNPENREGKKKTPPLKREGGTNHKKKREKETPKKKKEKSKIKKKKKKKRPQKKNREMATGKKARGGRLKKKRARGPPGKKKPKRAGKRKREKRGGGGGTLENAQKTEDRTRGKTGKGNTPLKRGEKPPTSDLKKEQRFTPKTKVWGNG

SEQ ID NO: 188978 - protein, 64 aa, Glycine max
  unsure (1)..(64): unsure at all Xaa locations
  Clone ID: PAT_MRT3847_141661C.1.pep
YIXAXEXXNXYESSXVEVQXRGVFHFLXKXKDEEDKPHPQXXVIAXEXXKXTXSDQXEHKHSLL

SEQ ID NO: 188979 - protein, 109 aa, Glycine max
  Clone ID: PAT_MRT3847_141662C.1.pep
CTCGPAPGSLRGGSGDQWDLEPQYPNVPEHPSGGLFILGLRNKTAPSPFTFECSSLPPRWFPFTSRGHGGGSGSTRILCSRCFSAILSKRSSTSELLPDISSSFLQFVQ

SEQ ID NO: 188980 - protein, 210 aa, Glycine max
  Clone ID: PAT_MRT3847_141663C.1.pep
MALLGSNIGNGALGIRMALLGSNITSEVGLRLLLCPLGSNVVIRTACCTVGVALPVYSTFKAIESKDQDAQHKCLLYWAAYGSFSLAEVFTDKLISWCPIYYHLKFAFLVWLQLPSTSGAKQIYANHLRPFLLRHQARVDQVLGFAYCEVIKLVSSYQAEIQFVRSMVVKITGSADQMLRGNAESDNRSPQHSSPEDPASDAETDQNHNH

SEQ ID NO: 188981 - protein, 461 aa, Glycine max
  Clone ID: PAT_MRT3847_141664C.1.pep
MCSLLWSSIALCVAFLLLELGVVHPSPSHHRITRLPGQPHVQFHQFSGYVTVDDKNQRALFFYFAEAEKDALSKPLVLWLNGGPGCSSLGVGAFSENGPFRPKGKGLVRNQFSWNREANMLYLETPIGVGFSYSTDTSSYEGVNDKITARDNLVFLQSWFIKFPEYRNRSLFIVGESYAGHYVPQLAELMLQFNKKEKLFNLKGIALGNPVLEFATDFNSRAEFFWSHGLISDTTYKMFTSVCNYSTYVREYYNGAVSPICSSVMSQVTTETSRFVDKYDVTLDVCLSSVFSQTKVLNPQQVTETIDVCVEDETVNYLNRKDVQSAMHAHLVGVQRWSACSNVLDYELRDLEIPTITVVGKLVKEGIPVLVYSGDQDSVIPLTGSRTLVHKLAKELGLNTTVPYRVWFEKQQVGGWTQVYGNILSFATIRGASHEAPFSQPERSLVLFKSFLEGGPLPQEF

SEQ ID NO: 188982 - protein, 64 aa, Glycine max
  Clone ID: PAT_MRT3847_141665C.1.pep
SEMLIYQYVFKHNFICCKYAYSIIVTQPYLTITIICDVSCLIESIKSFILMVKFFLNSCERTVP

SEQ ID NO: 188983 - protein, 47 aa, Glycine max
  Clone ID: PAT_MRT3847_141666C.1.pep
FVCAYFFLTWYTLSPRFCPNIIRFSFDKLRRNHVPVLYSREKPRKKL

SEQ ID NO: 188984 - protein, 141 aa, Glycine max
  Clone ID: PAT_MRT3847_141667C.1.pep
GSRSTTLMGIGYPNSFLVSFVRSFSIMFQGLWLMVMGFLLWTPGFQAKGCVTHLREYMVTCNDDDALHRAKSLVNILFSWLLILVTIFVMSFYLVLVTRYGIEKVEYASLVKEQHHLENALTIDVESQNHKHANNVADLST

SEQ ID NO: 188985 - protein, 296 aa, Glycine max
  unsure (1)..(296): unsure at all Xaa locations
  Clone ID: PAT_MRT3847_141668C.1.pep
MQVLCSHDCDFVTKFGLHAGEDSQEGNSVHNISVNGNMSMGVSPSLIAGANIKGFTTISVLPPPPPSYFLGYTLPSGHPCNTFTLPPPPADKKRTGPRPCPVCYLPVDEAIALMPKFPSPSPVLKNLAFIYEETLSRDGEFGGSDFGGYPTLRQRNESFDIRESMSVHCGFVRGTKPGRNTGFDMDEDDLLEMEQCHGVVVASAIFGNFDEINEPTNISDYSKETVCFLMFVDEETEKYLRISGRLGTRKKIGLWRIIVAHNLPYTDPRRXGKIPKLLLHRMVPNAHYSIWLDGKL

SEQ ID NO: 188986 - protein, 81 aa, Glycine max
  Clone ID: PAT_MRT3847_141669C.1.pep
NLLEHKRSGVEGKGISFEAKGKGIALPLKKRDFAYSKTEPKRKSGRGKKKKKPKFPLPGGARPISATQTLSFGKITGGGGE

SEQ ID NO: 188987 - protein, 100 aa, Glycine max
  unsure (1)..(100): unsure at all Xaa locations
  Clone ID: PAT_MRT3847_14166C.1.pep
TFLAELTLPESKMKRLFKFTFXKKPQTKIGKNGVPQAVVDKIHXKWKTSEIVKLKFESEAALYIKRKHXNFXKKTGGLVIWKFGNSVSLNKGVKYEGPSG

SEQ ID NO: 188988 - protein, 201 aa, Glycine max
  Clone ID: PAT_MRT3847_141670C.1.pep
MSGGSLGIRSGSYGSLEKQQQQLARDGVSLIQSARKPPKTLKEKDRFFHWIFKFTGRKKVGMLFLFTISAAVFIWVLYVGKGEDSQEGNSVHNTSVNGNMSIGDSPSLIARANIMGFTTISVLPPPPPSYFLGYTLPSGHPCNSFTLPPSPADKKRTGPRPCPVCYLPMDEAIALVPKFPSPSPVLKNLTFIYEETLIRDG

SEQ ID NO: 188989 - protein, 98 aa, Glycine max
  Clone ID: PAT_MRT3847_141671C.1.pep
MVAIEYMRGPVALALLPAKCRSWQIYSMNRSHSQGLLATLTPKKLEKEADKRGLATKETIDPIVAFSRPPPLPPFLGPLVALSLLETWWNRGTDEDGK

SEQ ID NO: 188990 - protein, 57 aa, Glycine max
  unsure (1)..(57): unsure at all Xaa locations
  Clone ID: PAT_MRT3847_141672C.1.pep
VTLTTIGFITLFSGHVSGAAHCSSLMGFRSKFRGKCFWLLSPFLMFNWILRQLLXNS

SEQ ID NO: 188991 - protein, 46 aa, Glycine max
  Clone ID: PAT_MRT3847_141673C.1.pep
STLTKLFIRLFAKKEMRILTVGLDASGKTTILYNLKLGEIATTIST

SEQ ID NO: 188992 - protein, 89 aa, Glycine max
  Clone ID: PAT_MRT3847_141674C.1.pep
LHRYYLIGYLIHPYIYNTDTITTHVCVVPNKYDCNLQSEFIFSGIQLNWNMEYHNNDRTGMHFFIFLKMKKILKSGSNFSIHFHFEIII

SEQ ID NO: 188993 - protein, 146 aa, Glycine max
  unsure (1)..(146): unsure at all Xaa locations
  Clone ID: PAT_MRT3847_141675C.1.pep
MWSPQNNIMDSPLLSQNHVLPNKHTWKMILCAIVAITIVGLVVRGNTSYGILSRAEKYNDGIATNQGDIVESEVGVVATDDSRCSTIGVSMLRQGGHAVDAAVAAALCIGVVFSASSGIGGGAFMXVRSSFTLQTEAFDMRRTAPL

SEQ ID NO: 188994 - protein, 48 aa, Glycine max
  Clone ID: PAT_MRT3847_141676C.1.pep
ACKPSQNSSKMAPKINSMAVLLKTPEWEKPGVNQLKPLGTQPPFPNWG

SEQ ID NO: 188995 - protein, 363 aa, Glycine max
  unsure (1)..(363): unsure at all Xaa locations
  Clone ID: PAT_MRT3847_141677C.1.pep
LSGYATNGEVESFVKLFEEMPVRNVYSWNGLIGGYVRNGLFKEALECFKRMLVLVEGEGKEGSDGVVVPNDYTVVAVLTACSRLGDLEMGKWVHVYAESIGYKGNLFVGNALIDMYAKCGVIEKALDVFDGLDVKDIITWNTIINGLAMHXHAADALSLFEGMKRAGERPDGVTFVGILSACTHMGLVRNGFLHFQSMVDDYLIVPQIEHYGCMVDLLGRAGLINQAVDIVRKMPMEPDVVIWAALLGACRXYKNVEMAELALQRLIELEPNNPGNFVMLSNIYKDLGRSQDVARLKVAMRDTGFRKVPGCSVIGCNDSVVEFYSLDERHPETDSIYRALQGLTILLRSHGYVPNLVDVAHAN

SEQ ID NO: 188996 - protein, 52 aa, Glycine max
  Clone ID: PAT_MRT3847_141678C.1.pep
IPQTISSRICFNFQSNPRQVNPAWLASVQQVSGRRKKYHFKWGNKIGNGLGE

SEQ ID NO: 188997 - protein, 305 aa, Glycine max
  Clone ID: PAT_MRT3847_141679C.1.pep
RPAGIPVRRSAAAATTSQQRLLPERLLPCPHQNCTPFVGYCDDDNKMALIYEYMANGSLKDFLLLSDGNSHCLSWERRIQIAIDAAEGLDYLHHGCKPPIIHRDVKSANILLSQDFEAKIADFGLSREFRKDNQDQQFQVIHKDATYEKSAVMGTTGYLDPEYYKLGRLNEKSDIYSFGIVLLELLTGRPAILKGNRVMHILEWIRPELERGDLSKIIDPRLQGKFDASSGWKALGIAMSCSTSTSIQRPTMSIVIAELKQCLKLESPSDTKTFVAPPRQVYDEVYSSSEAFSYDSESITSPFPR

SEQ ID NO: 188998 - protein, 65 aa, Glycine max
  Clone ID: PAT_MRT3847_14167C.1.pep
TPHKGGTVQTTRHYSLLTMTLEPTVNSLSYLTRPKRDTCSSSGHSSSAENPTRYETPHSTSNLTT

SEQ ID NO: 188999 - protein, 177 aa, Glycine max
  Clone ID: PAT_MRT3847_141680C.1.pep
GLTPLQRIGVGLVFSILAMVSAALIEIKRLRMARANGLAHKHNAVVPISVFWLVPQFFFVGSGGAFTYIGQLDFFLRECPKGMETMSTGLFLSTLSLGFFLSSLLVTLVHKATRHREPWLADNLNHGKLHYFYWLLALLSGVNLVAYLFCAKGYVYKDKRLAEAGIELEETDTASHA

SEQ ID NO: 189000 - protein, 197 aa, Glycine max
  Clone ID: PAT_MRT3847_141681C.1.pep
MARTITIAAMCLLLSLVSLCVTTNALMPYTRSTLWDMMLQSEDPFGILEQNPFNNIPNIRGGAETLALARADWKETPSAHVIVLDLPGMKKKDVKIEVEESRVLRISGERKGEEEEEEEEVEGEKWHRAERTNGKFMRQFRLPVNADLEKVTARLENGVLRITVGKFGEDKKRQPKVIDIAQRDSAAENVKPTKPQM

SEQ ID NO: 189001 - protein, 65 aa, Glycine max
  Clone ID: PAT_MRT3847_141682C.1.pep
PPEHIPAISWPRPKSSGVWSPPRWSPPIVNVVKVIKLKPNYVVVCRVRAQLPESLIRCLCPLRCL

SEQ ID NO: 189002 - protein, 62 aa, Glycine max
  unsure (1)..(62): unsure at all Xaa locations
  Clone ID: PAT_MRT3847_141683C.1.pep
HPCCDICMCARLMPQQCSCEDNRLNSCHSDCKISXCTRSHRVQSCCFDTNEFCFKPCESRDG

SEQ ID NO: 189003 - protein, 48 aa, Glycine max
  Clone ID: PAT_MRT3847_141684C.1.pep
ISRQGIWACLRWLQLLLLAAISLLEDLMVMQLTSTFGINHGHQVLTCT

SEQ ID NO: 189004 - protein, 174 aa, Glycine max
  Clone ID: PAT_MRT3847_141686C.1.pep
MAAALVGGAFLSAFLDVVFDRLASPDFVHLILGKKLSKKLLQKLETTLRVVGAVLHDAEKKQITNTNVKHWLNDLKDAVYEDDDLLDHVFTKAATQKKVRNFFSRFSDRKIVSKLEDIVVTLESHLKLKESLDLKESAVENLSWKAPSTSVEDGSHIYGRQKDKEAIIKFVVGG

SEQ ID NO: 189005 - protein, 121 aa, Glycine max
  unsure (1)..(121): unsure at all Xaa locations
  Clone ID: PAT_MRT3847_141687C.1.pep
WLXPLXXXFLXXVSFGSXXAVPXAXXPXXXXCXXXXLLSFLXXXXXGXXXXPPLLXWLRLXXSXLKQNFXCPPPXXXFPXPPXLXFLXPXAPXXXXPGXPWCCXCXXXXWXFLVVLPLXSV

SEQ ID NO: 189006 - protein, 140 aa, Glycine max
  Clone ID: PAT_MRT3847_141688C.1.pep
RKLFQDLPKISSGLSQLSLFDRDSRQSRMSLQQLGVIRSQRQVWRPIRGLPETSVAILRSWLFEHFLHPYPNDSEKLMLASQTGLTKNQVSNWFINARVRLWKPMIEEMYKEEFGEFSEDSNPAGNNYLTREDTTDCVED

SEQ ID NO: 189007 - protein, 96 aa, Glycine max
  Clone ID: PAT_MRT3847_141689C.1.pep
MCLANAPIFPPMADQLTDDQIAEFKEAFSLFDKDGDGCITTKELWTVMRALGQNPTEAELQDMINEGDADGNGTIDFPEVLNLMAGKMKDTVSDEE

SEQ ID NO: 189008 - protein, 68 aa, Glycine max
  Clone ID: PAT_MRT3847_14168C.1.pep
SFMIRSNGQYLSLIQQKPSHLMGLIIYILSRSIDRVSYMHKVLTPLSRSFLVDKERLSSNNASKCVAR

SEQ ID NO: 189009 - protein, 32 aa, Glycine max
  Clone ID: PAT_MRT3847_141690C.1.pep
TSTRCQSACSYRHLRKLFDAMRLISAHLATVT

SEQ ID NO: 189010 - protein, 59 aa, Glycine max
  Clone ID: PAT_MRT3847_141691C.1.pep
SPSRIAIDMTRKRREKSKPKEREGCFVCMYPTNELRLLRIEATSQIKRRERARESEDKV

SEQ ID NO: 189011 - protein, 669 aa, Glycine max
  unsure (1)..(669): unsure at all Xaa locations
  Clone ID: PAT_MRT3847_141692C.1.pep
SHEMNHLSLDTEDSLASLLLELAANNDVSGFKRLIECEPSSIDEVGLWYGRHKESKKMVNEQRTPLMVAATYGSIDVMTLILSLSEADVNRSSSQDKSTXLHCAASGGSDIVVDAAXLRLTRCRYRNTCNHNVQCSRSSSWILQWRINXGAENGSASLNLLLEAPGGDKCHXSSCAAAELKLVSAEPDEMKKKPVSVNINKKSMMKFSDGRWLQXPKNVRSTKINNPHGRFIFRFSVTKVXSRVRKPEGGVNRINAIVNFXKRAFTRGDMCEYAHGVFECWLHPAQYRTRLCKDGTNCARRVCFFAHTNEELRPLYVSTGSAVPSPRSSASSAMDFVAAISPSSMSVMSPSPFTPPMSPSSASIAWPQPNIPALHLPGSNFHSSRLRSSLNARDFSVDDFDLLLPDYDHHHHQQQQQQFLNELSCLSPHAMNCNTMNRSGRMKPLTPSNLDDLFSAESSSPRYADPALASAVFSPTHKSAVFNQFQHQQSMLAPLNTNFASKNFEHPLLQASLGMSPRNVEPISPMGSRISMLAQREKQQFRSLSFRELGSNSAAASADSWSKWGSPNVKLDWPVGAGEVGKLRRSSSFELGNNGEEPDLSWVQSLVKESPAEVKDKLATTVSYVAAAAAGSSSEGSNISTQMESVVDHAVLGAWLEQMQLDHLVAQQN

SEQ ID NO: 189012 - protein, 33 aa, Glycine max
  Clone ID: PAT_MRT3847_141693C.1.pep
LSCFVLTDHFPSDGIAETDRFENERLNGGVATS

SEQ ID NO: 189013 - protein, 122 aa, Glycine max
  Clone ID: PAT_MRT3847_141694C.1.pep
MGRTYVLMMVAALLLSSTMAQSPASSPALSPTHTPVATPPRRALSPSPSSVSPAASPATGNSPPAPPTSSPSESPLPSAATPNISPSTISTPPSEGPAANGAVFNRVSGSALLLIFAAAILI

SEQ ID NO: 189014 - protein, 48 aa, Glycine max
  Clone ID: PAT_MRT3847_141695C.1.pep
QKRFLGHITHVYCTLVNDPITIMLTFCYQDALVYAYPVPPVYSQCGPF

SEQ ID NO: 189015 - protein, 41 aa, Glycine max
  Clone ID: PAT_MRT3847_141696C.1.pep
EILRRLVREIMSLKAGVPLPYFYPCSTKRTSEIFLASIHLI

SEQ ID NO: 189016 - protein, 952 aa, Glycine max
  unsure (1)..(952): unsure at all Xaa locations
  Clone ID: PAT_MRT3847_141697C.1.pep
MSSIVKGIIIRSTADVCKNSMVLNRKPKRSEIVGRRSTRVQWQLHLRSKSNTWKRGSRRSYQPPIRGQAILTPATPPTTKKRVFTFGNVRSEGNNAMKSLVGGNGANLAEMTTICLTSPRRLTIASQVCQEYRQNGKKLPDGLWEEVLEGLQFVENEMGAILGNPLKPLLLSVRSGAAISMPGMMDTVLNLGLNDEVVAGLAAKSGERFAYDSYRRFLDMFGDVVMDIPHSLFEEKLEKLKHTKGVKLDTDLTTYDLKDLVEQYKNVYLDTRXVNFFSKSEKQLEIDVKASXKLIEVTRSVYIEIIMDITGLMVCAYNERXVEFXSMVSPSSAGFFCTRKNADQRFAAFLAPLTSGRGTXAVSAVYISKISLAIAIGCALTWQAFSITPNGPEVFLLDYACHNHRLITLLAEXMCRIWKHIGKGAFKIAVDMVHEGLVDIRSAIKMVEPLHLDQLLHPQFEDPSTYKDKVIAVGLRASPGAAVGQVVFSADDAEVLHAQGKGVILVRNHTRPXNVRGMHVNTGILTARGGLTSHAAVVARGWGKCCVSGCSDILVNDAEKVFVVGDKVIGEGEWISLSGSTSEVILGKQPLSAPALSDDLEIFMSWADEIRHLKVMANADTPEDAVTARQNGAQGIGLCRTEHMFFASDERIKAVRMMIMAVTPEQRKAALDLLLPYQRSDFEGIFRAMDGLPVTIRLLDPPLHEFLPEGDLEHIVSELTSETGMKEEEIFSRIEKLSEVNPMLGFRGCRLGISYPELTEMQARAIFQAAVSVSNHGITVLPEIMVPLIGTPQELRHQVNLIRNVADKVLSEMGSSLSYKVGTMIEVPRAALVADEIAKEAEFFSFGTNDLTQMTFGYSRDDVGKFLPIYLSGGILQHDPFEVLDQKGVGQLIKICTEKGRAARPNLKVGICGEHGGEPSSVAFFAEIGLDYVSCSPFRVPIARLAAAQVAV

SEQ ID NO: 189017 - protein, 144 aa, Glycine max
  Clone ID: PAT_MRT3847_141698C.1.pep
MASLLTTSAITYSPLNNGSKDFRKSGNSSKGRCCIKAMGIEKSLEELYNVKVERKVSPEKLAELGVSKWSVWKTGKSKLPWDWQVDQLVYIEEGEVRVVPEGSNRFMQFVAGDLVRYPKWFEADLWFNGPYQERYSFRAYGDDH

SEQ ID NO: 189018 - protein, 60 aa, Glycine max
  unsure (1)..(60): unsure at all Xaa locations
  Clone ID: PAT_MRT3847_141699C.1.pep
XYCIYVXDNLXXXXXXSSXSXRXXXVXXSCSMXPFVXVTXGXXCXXRSSRIPSLRTRXCD

SEQ ID NO: 189019 - protein, 46 aa, Glycine max
  Clone ID: PAT_MRT3847_14169C.1.pep
KSKNIVFRGRVDPLPVALVSVHKASVNPNVSFSATSPHGDVCSRPL

SEQ ID NO: 189020 - protein, 61 aa, Glycine max
  Clone ID: PAT_MRT3847_1416C.1.pep
LHIPAACLHLHALFDIAIYVCQYLRKRKKVMQWHSCVNSVFSYVAFSFFITHFLVFLFHAT

SEQ ID NO: 189021 - protein, 123 aa, Glycine max
  Clone ID: PAT_MRT3847_141700C.1.pep
KGFLLISFTILFLCFFSLRSFFQFFLITNNQRCVFRGCCTSITMRTHPLLTLLLFSRVMFDVSNASSVRKFQKLIASDPKDNQPNDPNHAGETNKATGGSPSTNVSGPISSPVPQPQPLPKVI

SEQ ID NO: 189022 - protein, 222 aa, Glycine max
  Clone ID: PAT_MRT3847_141701C.1.pep
KQQLTWFSNACKGIPQVSPAFLQNNVPTGPPTALPVAEDTELAMAISASLQSAMQERPPFSDTQPSFEASSSSSAVNTGNHGFLGTPNPNTSDSELVQEANPDGNTQHLQSHVNASALDLNPSAPPIANEILADGPIQYPSIDLSPVDMASPDAEKLPKGEKNAGGSGSSCVICLDAPAEGACIPCGHVAGCMSCLNEVKSKKWGCPVCRAKIDQVIKLYHV

SEQ ID NO: 189023 - protein, 386 aa, Glycine max
  Clone ID: PAT_MRT3847_141702C.1.pep
PGRHGGTPLHHAAKRDFDSIVNLLLLHGANPLVLNDDCLTALEVARAKGHSNVVRTIESHLCLFSGWLREFHGPGFLEVVAPQLVSKKVWVVVLPVGSRTLAKPYKLELAIYSRLQDAQPHTVIGLWNADLQEPKLHQSDPSVTVVNHTTKTRIKLGPASENDKQQLTWFSNACKGIPQASPAFLQNNVPTGPPTAPPDAEDTELAMAISASLQSAMQERPPFPDTQPSFDASSSSSAVNTDNHGFLGTPNPNTSDSELVQEANPDGNTQHLQSCVNPSALDLNPSAPPITNEIPGDGPIQYPSIDLSPVDMASPDAEKLLKEGQKSAGGSSSSCVICLDAPAEGACIPCGHVAGCMSCLNEVKSKKWGCPVCRAKIDQVIKLYHV

SEQ ID NO: 189024 - protein, 83 aa, Glycine max
  unsure (1)..(83): unsure at all Xaa locations
  Clone ID: PAT_MRT3847_141703C.1.pep
RTGCLYPDHSLGYDTLPSWTTXNTNINTMDIVLRNLIGIHTXPPQVNSPIMPLLTTLYDLMPTKLSWRNTLLRTLSTPCVLWS

SEQ ID NO: 189025 - protein, 40 aa, Glycine max
  Clone ID: PAT_MRT3847_141704C.1.pep
KKAKGFSFVKKYTQTSGLSKGSVIDSWGFKFGSLAPHQLE

SEQ ID NO: 189026 - protein, 60 aa, Glycine max
  Clone ID: PAT_MRT3847_141705C.1.pep
VIDGKQRSFNFQLQILYSLGSVLPPLALSVSTRLGHKVKLLVLFFFYPKSFLSTRTNMGQ

SEQ ID NO: 189027 - protein, 92 aa, Glycine max
  Clone ID: PAT_MRT3847_141706C.1.pep
LSAARPFFFFFTTKGSVFAPLTTRTNLSDLNQLQRGLIYFKKCCEVQVFYFTQNIDRKRTSDDMKDSPNSLQVVLPLNKPLSLTIESRHTVS

SEQ ID NO: 189028 - protein, 66 aa, Glycine max
  unsure (1)..(66): unsure at all Xaa locations
  Clone ID: PAT_MRT3847_141707C.1.pep
LYFSSSLLFLKFPFQIFSDCXLNYDYSSSKITHFSSSPQSYTALFCKLIISITLSYPKEPTFIFIT

SEQ ID NO: 189029 - protein, 57 aa, Glycine max
  Clone ID: PAT_MRT3847_141708C.1.pep
FWTPATKFIRTSTGNGPLFFGQNYLLNSSIYQGIWRGLGRGESPWETSPAFNGPFMG

SEQ ID NO: 189030 - protein, 108 aa, Glycine max
  unsure (1)..(108): unsure at all Xaa locations
  Clone ID: PAT_MRT3847_141709C.1.pep
MPSKLVFLLRVYGDDNSISXHEYVSLTLVAAKLNSFLAGHNITISDGIDKASAXLQFRIVSXFADLLKRDFKQMSNVLLGAPEDKASLWSQXLNMSLCNNLQMQQAYL

SEQ ID NO: 189031 - protein, 98 aa, Glycine max
  unsure (1)..(98): unsure at all Xaa locations
  Clone ID: PAT_MRT3847_14170C.1.pep
SPIARLELRFSVISFTNLWGVALAGESHVHASLPEXDHWEAVCSNAPILTALRELLKSLPVGVVIDELPMXIVDTQGPKTFYYKEDLYSGISLKEQFT

SEQ ID NO: 189032 - protein, 175 aa, Glycine max
  Clone ID: PAT_MRT3847_141710C.1.pep
GLTAVTVPRCQVEGCHLALLNAKDYHRRHKVCEMHSKAPKVVVLGMEQRFCQQCSRFHVVSEFDNSKRSCRRRLAGHNERRRKSSHDSVARNSSKGGCALSLLSSRSDSWLSPSDLSIRCSAALRELIAENRAAIMARQFVSDRDWHNHHHAVEDFKEIQPESNYFPQQMFPQTQ

SEQ ID NO: 189033 - protein, 48 aa, Glycine max
  unsure (1)..(48): unsure at all Xaa locations
  Clone ID: PAT_MRT3847_141711C.1.pep
NPCSIYIYSVSRXXLSMHTCILTIHNILPHDAKEHHSHAITRNPTVYM

SEQ ID NO: 189034 - protein, 79 aa, Glycine max
  Clone ID: PAT_MRT3847_141712C.1.pep
AYHTTISIEKILIGCFGYFPIHSYHKPQSLYINSIRTCRPREQSETEIQEQISIKYIQIKRKSHEVYHCNCPSVASRSR

SEQ ID NO: 189035 - protein, 149 aa, Glycine max
  Clone ID: PAT_MRT3847_141713C.1.pep
LKAKKNNGSKQICGKIILSSKEVVCNAESCHSADEKQISDNSELKKTNDEPPKGKSEEAENKMKESQNMSTGDKSPNEESDGNQLKDTDPPEGSSKPELSDKNTPQSLKAKSKIVKKSQAVKLKAKKNNGSPQFHGKKRIVTSKKVVGN

SEQ ID NO: 189036 - protein, 144 aa, Glycine max
  Clone ID: PAT_MRT3847_141714C.1.pep
VPVIIAFDLIQRSFSEIPLFNHLTTENYHVCRLRVVGGCLCLMVLGREAAEIWVMKEYKMQSSWTKSTVIPTFDFYPICAAEDGGIFGSNCEGLVKHDDNGELFDYHISAEGQRLYCANPAMYQESLLSLPCANRNETREDAQH

SEQ ID NO: 189037 - protein, 119 aa, Glycine max
  Clone ID: PAT_MRT3847_141715C.1.pep
HTGDAYNDTVTEQSIAGSYRSRVYSSAISSKTISRAGGSSNTLIDLGADIPCLETDGADHTYYILAQKGFWDQAYPFQTTESHKEHAFGCTSSCPDRPSLSYRAIRCQVPGPLLKKISR

SEQ ID NO: 189038 - protein, 54 aa, Glycine max
  Clone ID: PAT_MRT3847_141716C.1.pep
IRLFCISIFYTTNENNLTTCVQSLSPNLSLLSNDFNSPFHLPLKKKNKIIPFKT

SEQ ID NO: 189039 - protein, 89 aa, Glycine max
  Clone ID: PAT_MRT3847_141717C.1.pep
GGRLSVSGLGLLARSGSHARQQPAYHEGQRILDPEWLIGRERQLFSLCDSGGARRAKELAYDRVFGPKARDMRRILLKLCGLGPSVFWG

SEQ ID NO: 189040 - protein, 67 aa, Glycine max
  Clone ID: PAT_MRT3847_141718C.1.pep
LSNLQIRDPLYLNDCLFYYVMDKNCFIFRVLLLLLLLCNMVWVQLPAIIYCSFLRIFGLYFSSQYVS

SEQ ID NO: 189041 - protein, 70 aa, Glycine max
  Clone ID: PAT_MRT3847_141719C.1.pep
SHKELQEIKALSMVQPLDMPMHSATLTMCPSCDRNVDGITGDGDGSRKTPLAMAHKPRFFNPFANPSAAC

SEQ ID NO: 189042 - protein, 109 aa, Glycine max
  Clone ID: PAT_MRT3847_14171C.1.pep
SKLSLQTFLSNFPLKFPKSLFPNFSLIIVYLSKSLNLCPRGMHFISHHPQLSFTHILIQTTPLLPFQVLQVTFFILSICFFLVFIFSLLIISCCGVGRRRLCFYFYFRL

SEQ ID NO: 189043 - protein, 94 aa, Glycine max
  unsure (1)..(94): unsure at all Xaa locations
  Clone ID: PAT_MRT3847_141720C.1.pep
VKGNVFKNQRVFMESLXSPKLXKAREKTLSAPFXAQRAKNKARKERKIARREERLAPGPGEKVSAASSGPAGSAFQPGPAPKKSQKWSPYFDIG

SEQ ID NO: 189044 - protein, 263 aa, Glycine max
  Clone ID: PAT_MRT3847_141721C.1.pep
MEFQGLPEGCIASILSRTTPADVCRFSVVSKIFRSAAESDAVWKRFLPSDYHSIISQSPSPLNYPSKKELYLALSDRPIIIDQGKKSFQLEKKSGKKCYMLAARALSIIWGDTEQYWNWTTDTNSRFPEVAELRDVCWLEIRGVLNTLVLSPNTQYAAYLVFKMIDARGFHNRPVELSVNVFGGHGSTKIVCLDPNEELPHRRVEGLQRPNARSDGWLEIEMGEFFNTGLDDEVQMSVVETKGGNWKSGLFIEGIEVKPKEEN

SEQ ID NO: 189045 - protein, 72 aa, Glycine max
  Clone ID: PAT_MRT3847_141722C.1.pep
PIRLDAFWVPCGCTGKYYLAMSIGSLLTSIGFMFMFSGLAHLYGYNNSRNLFHGMSNTFQVFYWAWIQCLNL

SEQ ID NO: 189046 - protein, 78 aa, Glycine max
  Clone ID: PAT_MRT3847_141723C.1.pep
GSTEIVCLDPNEELPHRRVEGLQRPNARSDGWLEIEMGEFFNTGLDDEVQMSVVETKGGNWKSGLFIEGIEVKPKEEN

SEQ ID NO: 189047 - protein, 48 aa, Glycine max
  Clone ID: PAT_MRT3847_141724C.1.pep
SSKFFTIPTKPKLLIFKTTYIIILPNISIPFISHNNIIILINTNIFIT

SEQ ID NO: 189048 - protein, 134 aa, Glycine max
  Clone ID: PAT_MRT3847_141725C.1.pep
MEFQGLPEGCIASILSRTTPADVCRFSVVSKIFRSAAESDAVWKRFLPSDYHSIISQSPSPLNYPSKKELYLALSDRPIIIDQGKKSFQLEKKSGKKCYMLAARALSIIWGDTEQYWNWTTDTNSRSDPSVFLL

SEQ ID NO: 189049 - protein, 81 aa, Glycine max
  unsure (1)..(81): unsure at all Xaa locations
  Clone ID: PAT_MRT3847_141726C.1.pep
NEDKXTTREYEGKSSLIMKKQDRGHTEASKCSAIKSASRGHAHGGKPPGPSSITSQQQEKYQNLHLQHKKERKSLFKPPNR

SEQ ID NO: 189050 - protein, 261 aa, Glycine max
  unsure (1)..(261): unsure at all Xaa locations
  Clone ID: PAT_MRT3847_141727C.1.pep
MSPSFVFDPPSDEEIEHSEHEEEEESEEEPESGSGTGSESESEGEGEEEEGHEEARVPKKKKKKTQSPWDFAKYTESVAEEHARRSTTSVDEKISKALKQRSTPLVAELDHSSESEPDEQEDYRPEEEDEEEGNDGDSKSFFAPSDGTSFHADSFLQLNLSRPLLRACEALGYSKPTPIQAACIPLALSGRDICGSAITGSGKTAAFALPTLERLLFRPKRMRAIRVLILTPXRELAVPVHSMIEKLAQFTDIRGLPGCWG

SEQ ID NO: 189051 - protein, 100 aa, Glycine max
  Clone ID: PAT_MRT3847_141728C.1.pep
HLRTITPEFETLIDLSGIDILARHAADEISLGERETPNGTTDKKALEAFQRVGSRLTGVEGKVTARNSDPGLRNLTGPVQLPYTVLRRSSEEGSTFIGIS

SEQ ID NO: 189052 - protein, 115 aa, Glycine max
  Clone ID: PAT_MRT3847_141729C.1.pep
MAARVAARYGSRRLFSSGSGKILSEEEKAAENAYFKKAEQEKLEKLARKGPQPEAGSGGSVTDAKPSSSGHAGTTADRVSTDKYRNYAVVAGTVTILGALGWYLKGTAKKPEVQD

SEQ ID NO: 189053 - protein, 69 aa, Glycine max
  unsure (1)..(69): unsure at all Xaa locations
  Clone ID: PAT_MRT3847_14172C.1.pep
TPSSSCSRRIFFXSDXLISVSFSSLFFFFFFFFFFLTDQTVGLILSMKNVLKIRHNDQAINNATITRTL

SEQ ID NO: 189054 - protein, 137 aa, Glycine max
  unsure (1)..(137): unsure at all Xaa locations
  Clone ID: PAT_MRT3847_141730C.1.pep
MFNIKSFLWHGGSVWDAWFSCASHLVGPINSDIAXYSLSFTGYIIPSLAHMLTYRKASARQNAAEKPPFFMPSWTAMYVFNAFIVVWVFVVGFGLGGWASMTNFIRQIDTFGLFAKCYQCPPPAPKVVAAPPPHAHH

SEQ ID NO: 189055 - protein, 115 aa, Glycine max
  Clone ID: PAT_MRT3847_141731C.1.pep
MAARVAARYGSRRLFSSGSGKILSEEEKAAENAYFKKAEQEKLEKLARKGPQSEAVSGGSVTDAKPSSSGHTGTSVDRVSTDKYRNYAVVAGTVTMLGALGWYLKGTAKKPEVQD

SEQ ID NO: 189056 - protein, 139 aa, Glycine max
  unsure (1)..(139): unsure at all Xaa locations
  Clone ID: PAT_MRT3847_141732C.1.pep
GKKKKKKKKKGKKKKKKKKKKKKKKKKKKKGKKKEGKMERKERTKLTQPDGRNLLSQKSWTKKKRAPKKKTPPKKTAEKIKRGNQIKRGNQRTGGXNKTTKKKTPSQTKKGVDKKSWQAVPGSRHTHTREKKNPPGRGG

SEQ ID NO: 189057 - protein, 418 aa, Glycine max
  unsure (1)..(418): unsure at all Xaa locations
  Clone ID: PAT_MRT3847_141733C.1.pep
MGSSDMDKTPKEKESKTPPATSQEQSSTTAMPTTNPDWSNFQTYSPIPPQGFLASSPQAHPYMXGVQHYMPSYGTPPHPYVAMYPHGGIYAHPSIPPGSYPFXSPFAMASPNGIADASGNAPGRIEVGGKPPEVKEKLPIKRSKGSASGGNLNMWITGKNNEPGKIPGESANGIHSKSGESASDGTSEGSDENSQNDSQLKSRERQDSFEDEPSQNGSSVHAPQNGVHNRPQTVVNQTMSILPISTTSAPGAVPGPTTNLNIGMDYWGTPTSSTIPALHGKVPSTAVAGGMIAAGSRDGVQSQVWLQDERELKRQRRKQSNRESARRSRLRKQAECDELAQRAEALKEENATLRSEVSQIRSEYEQLRSENAALKERLGDIPGVATPGKEDLRSGQNDQHVSNDTQQSGQTEVVQGVH

SEQ ID NO: 189058 - protein, 173 aa, Glycine max
  unsure (1)..(173): unsure at all Xaa locations
  Clone ID: PAT_MRT3847_141734C.1.pep
MGSSDMDKTPKEESKTPPATSQEQSSTTGMPTTNPDWSNFQTYSPIPPHGFLASSPQAHPYMWGVQHIMPPYGTPPHPYVAMYPHGGIYAHPSIPPGSYPFSPFAMASPNGIADASGNAPGSIEVGGKPPEMKEKLPIKRSKGSVLXGNLSMWITGKNNEPGKTPGESANGIH

SEQ ID NO: 189059 - protein, 65 aa, Glycine max
  Clone ID: PAT_MRT3847_141735C.1.pep
SQPHAVPPRLGTKSPVLSLRTPDSTLNLERAGQHGAATNPTWLSQSLIPPPSCPHLGHKLTLPSC

SEQ ID NO: 189060 - protein, 112 aa, Glycine max
  Clone ID: PAT_MRT3847_141736C.1.pep
RGTHINTSSHKRPAMVGRSNSSHLSNNICLTWLVPSLRIACVCTTNVHQVKGSISRLSTITKVTRAPDSIRLHVASLTRQAICHYTTSCRAYCVSVLSSRQCSFLSHVNGFS

SEQ ID NO: 189061 - protein, 101 aa, Glycine max
  Clone ID: PAT_MRT3847_141737C.1.pep
VHVWNCFTVSWGKWVPRLCSFLLCSWLLPSFFLLKLPPKIWMRILMQSMSVVDTNEVDEKKDGYVSWRSGVPLRCAHPCCYWYHGRCLKYCCGPPPPKPHN

SEQ ID NO: 189062 - protein, 98 aa, Glycine max
  Clone ID: PAT_MRT3847_141738C.1.pep
VGVLFTEKKKTPAGDQKATRLCAGVGLFINGRGQVFFLNTNRAGDPHPIKVSWLTCEPRRAFHLCVRFVCRVVKEAHFSFTQETCFVLAYAYVSSPSI

SEQ ID NO: 189063 - protein, 68 aa, Glycine max
  unsure (1)..(68): unsure at all Xaa locations
  Clone ID: PAT_MRT3847_141739C.1.pep
RHVMTSQMAQSLLYSYVSEAIYQLLPDYVKCNLSFLFISPHQFRHFYNYXLTIPLHFIYTPQYSFSFH

SEQ ID NO: 189064 - protein, 80 aa, Glycine max
  Clone ID: PAT_MRT3847_14173C.1.pep
IMSSWLQNLTPIFLAKSQLLAASCEALQPLGFVADLEVDSTTFMSTYWSSRVANCFSPLPSSKIGEAARKMLDGPATQAL

SEQ ID NO: 189065 - protein, 53 aa, Glycine max
  Clone ID: PAT_MRT3847_141740C.1.pep
PPPNPSWRGLKNLWMRVSPPPTHLKVVSNVLNLCQKKKNNGNDIRLFFPTPPT

SEQ ID NO: 189066 - protein, 112 aa, Glycine max
  Clone ID: PAT_MRT3847_141741C.1.pep
AANEGGPTETVISGQTGWLRDVTKVQDWTEVMRIALEDGEGEERLKEMGKWGRDRVVAEFSKEKLAERLETEISGMMQKSVRPPLIPFAAVILAVGLMGALAAVSMVLALKQ

SEQ ID NO: 189067 - protein, 74 aa, Glycine max
  Clone ID: PAT_MRT3847_141742C.1.pep
RSLGFLLPFLFHYGHTFLRSWFCRNTINRGQWDASGGSLVFYKGGGGFLNVGGYHIFLLGGRLTRVAPFFFFFG

SEQ ID NO: 189068 - protein, 159 aa, Glycine max
  unsure (1)..(159): unsure at all Xaa locations
  Clone ID: PAT_MRT3847_141743C.1.pep
CLLPTLILLLIACASCVYDRRDLEGYFLRLPSETDNDNXYRGTRRAVLLAGYNGDWNYRHQADVRRAYQILTKGGLNEENIIGFMYDDIAFIGENTRPVFIINKPYGRDVNKGRTNDYTGEDDTGDNLLAGLLGDRSSLTAGNCKVVDMKTDDHIFVYY

SEQ ID NO: 189069 - protein, 92 aa, Glycine max
  Clone ID: PAT_MRT3847_141744C.1.pep
REPEEETTTVLVVLGPASLSNAVVLIINLRAAPPNIKNYVLRSSARVLDEFVVVVFVIIIFLVEVEVKLKLLFTGFKKSVKAKTSKKELHRH

SEQ ID NO: 189070 - protein, 64 aa, Glycine max
  unsure (1)..(64): unsure at all Xaa locations
  Clone ID: PAT_MRT3847_141745C.1.pep
AALKPDNRIESGGGFIETWHPNNKXLQCIGVDISXAPLSLIAIYRPCYINGPYDIYIQEGNGLY

SEQ ID NO: 189071 - protein, 47 aa, Glycine max
  Clone ID: PAT_MRT3847_141746C.1.pep
GVRRRYERLGYLAGDSTWSSSWWCAFCFHAKCFGLRNVAQSLFRAQT

SEQ ID NO: 189072 - protein, 75 aa, Glycine max
  unsure (1)..(75): unsure at all Xaa locations
  Clone ID: PAT_MRT3847_141747C.1.pep
XMKRTPILFPSLXFFFVPSXXIYLSATADDDHVYDTXGDKLQYXVNXXXXXIDXRIXXRSXXCXXRKRXXLLTXE

SEQ ID NO: 189073 - protein, 39 aa, Glycine max
  Clone ID: PAT_MRT3847_141748C.1.pep
PAPSTTSTDDAVSPSFVDGVLAAGCYLAFGSTNKIHDYA

SEQ ID NO: 189074 - protein, 233 aa, Glycine max
  Clone ID: PAT_MRT3847_141749C.1.pep
MHNNTHSTKIMPLSSYSTVVAIALLFSFTSSAHTQENFVQCLNNYPHNINATSISKVLYNQTNSSYSSILDFSIKNLRFSNVSSKPLVIVTPLVVSHIQATIICSQRHGMQIRTRSGGHDYEALSYVAKAPFVVIDLINLGEIKVEMENNTAWVPAGASIGELYYRISEKSTTLGFPAGVCPTVGTGGHFSGGGYGFLMHKFGLAADNVIDAHIVDVNGNLLDREAMGEDLFW

SEQ ID NO: 189075 - protein, 51 aa, Glycine max
  unsure (1)..(51): unsure at all Xaa locations
  Clone ID: PAT_MRT3847_14174C.1.pep
LYIPTQCSLTYTLTIANEHASVHINIAHVDHNGVYXTGHFSIFAPCGFIRA

SEQ ID NO: 189076 - protein, 41 aa, Glycine max
  Clone ID: PAT_MRT3847_141750C.1.pep
DGYLEINDRSKDVIISGGENLSSVEVEADIHNHPTFNNTCM

SEQ ID NO: 189077 - protein, 192 aa, Glycine max
  Clone ID: PAT_MRT3847_141751C.1.pep
LLPYRHSRFTVNSRYQTADFPGRIIYSDASLYDVKLEVKSSYRPQHVPLVSLVSKLNGKAFIGHPLAVEVLVEGHCDKMLSDIGCDLEVGDVYCAAKPNSVTRRIHSKNLTRFSPSKSSKMKKTGLLNKKIRKLSSLTGHKQLEEERKPVVDKLKGPVIACIPLKVVFSRINEAVSGQARSTYRALPTSSNP

SEQ ID NO: 189078 - protein, 55 aa, Glycine max
  Clone ID: PAT_MRT3847_141752C.1.pep
KRGMIALVSRIRYLLGTSYGSKLFPSCIIRTQAGLYTQSYYMYNGRNCADCFLTE

SEQ ID NO: 189079 - protein, 162 aa, Glycine max
  Clone ID: PAT_MRT3847_141753C.1.pep
MESRVEELEKCLALESVTDVQVVGISGMGGIGKTTLALALYEKIAYQYDVHCFVDDVNKIYQHYGSLGVQKQLLDQCLNDENLEICNVSRGTYLIGTRLRNKRGLIVLDDVNQVELLHMFTGSRETLLRECLSGGSRIIIISRDEHILRTHGVNMFQSQAIE

SEQ ID NO: 189080 - protein, 157 aa, Glycine max
  Clone ID: PAT_MRT3847_141754C.1.pep
ARARASSSSSPPYPTSAPTASTCTDRTALAASDDEDDDDLLEDGEASRSSQQHHRVALKPLDAPIADKELKKRDLKDLHAAHAAEQAAIEAVQDDHDAVTVGIASLPVGLDGGDDADADVTDVTVYKFSLCAQRLELATDATSNSSNCKRYGSDGPS

SEQ ID NO: 189081 - protein, 49 aa, Glycine max
  Clone ID: PAT_MRT3847_141755C.1.pep
QRKMDFFLLLILETREISRQSQITITPQVNKNGGYPLKQGFKRTQSGPK

SEQ ID NO: 189082 - protein, 41 aa, Glycine max
  Clone ID: PAT_MRT3847_141756C.1.pep
SLCLEYPILLFQKFEFSIQFHISIVCIEIFIISTQQDLYQI

SEQ ID NO: 189083 - protein, 55 aa, Glycine max
  Clone ID: PAT_MRT3847_141757C.1.pep
ARVRHPGTNPFMQLLVSKAIGWVPNWICGHCLSDQHRCSITPCISSTIRMRPYIN

SEQ ID NO: 189084 - protein, 83 aa, Glycine max
  unsure (1)..(83): unsure at all Xaa locations
  Clone ID: PAT_MRT3847_141758C.1.pep
LQRGLPKHLYSXSSSVDLYYLGLGFYWNLXHLLARMLLGYASMLLYRPKCGILTLQLGYGXIIGCHVYNMSGDAWNEGGIHAT

SEQ ID NO: 189085 - protein, 242 aa, Glycine max
  Clone ID: PAT_MRT3847_141759C.1.pep
LVPKTLYWHTPYFKTMSFKRIRDLPRSLGIQDFVEDRKNIIEAEISKVHKEITNIKYPTSDPSFINMEEDQLRAFIALVDAKIRTCDHSLKNMHQSEANFMQNMAWGSASSSHPTPMEPLNNNGRVDVTNSIDQVYEAMQLVDAPFSYIPDMVQKSFNCLQNISQSQPILDVEDEMVGFSNRVDVSLDTTNQIADLLDWFDGPIIGWSDLVDWTSQPDESQNEQQGGGDLDGFQTECYNLNF

SEQ ID NO: 189086 - protein, 165 aa, Glycine max
  Clone ID: PAT_MRT3847_14175C.1.pep
EPNPIHFTFPNFQYLPLVSSFLSSMSTPSSSSSSSSSIWVLSNIKLQFFARIRRFLQSKATRKRCDPSDRFDTAKSTVEHNNKVENLETVHVMEKHKEEEESVIMLQRTVKMLHFGSWEEKIVAAKEIEKLAKEDVKVSKLITELGVVPVLVSMVASPVASRRRV

SEQ ID NO: 189087 - protein, 52 aa, Glycine max
  Clone ID: PAT_MRT3847_141760C.1.pep
QTRKMHVCIETTPRVRERSIEAISSIGATTTTTTFISKNKKFEKIINSEPSS

SEQ ID NO: 189088 - protein, 121 aa, Glycine max
  Clone ID: PAT_MRT3847_141761C.1.pep
AFLDGAAPNGLFGLGMSNESVPSILAKEGLTSNSFSMCFGSDGLGRITFGDNSSLVQGKTPFNLTALHPTYNITVTQIIVGEKVDDLEFHAIFDSGTSFTYLNDPAYKQITNSFNSEIKLQ

SEQ ID NO: 189089 - protein, 534 aa, Glycine max
  Clone ID: PAT_MRT3847_141762C.1.pep
ERASYCNHYWEEQFRKIHVLEFSRDRKMMSVLYSRNQMHVLFSKGAPESIISRCTSILCNDDGSIVSLTADIRAELDSRFHSFAGKETLRCLALALKWMPSTQQSLSFDDEKDLTFIGLVGMLDPPRDEVRNAMLSCMTAGIRVIVRTGDNKSTAESLCRKIGAFDQLIDFAEHSYTASEFEELPALQQTIALQRMALFTRVEPSHKRMLVEALQHQNEVVAMTGDGVNDAPALKKADIGIAMGSGTAVAKSASDMVLADDNFASIVAAVAEGRAIYNNTKQFIRYMISSNIGEVVCIFVAAVLGIPDTLAPVQLLWVNLVTDGLPATAIGFNKQDSDVMRAKPRKVNEAVVTGWLFFRYLVIGAYVGLATVAGFIWWFVYSDSGPKLPYTELMNFDTCPTRETTYPCSIFDDRHPSTVSMTVLVVVEMFNALNNLSENQSLLVIPPWSNLWLVASIILTMLLHMLILYVHPLSVLFSVTPLSWTDWTVVLYLSLPVIVIDEVLKFFSRNPIGLRFRLWFRRSDLLPKKELRDK

SEQ ID NO: 189090 - protein, 105 aa, Glycine max
  Clone ID: PAT_MRT3847_141763C.1.pep
HINSFIASVPRAHRLHIRPRPASHGHTDHPNGAPWRQTPRPHPRFIYDLINCDTLYTHLRRRHNLDLRKLTRPQTAPPLRTETEPVAGLPHPGPGTDSYCHYLPK

SEQ ID NO: 189091 - protein, 81 aa, Glycine max
  Clone ID: PAT_MRT3847_141764C.1.pep
FMCLHGREKMIERELRMSLHILKEERNNNNQVSITNPPKFSPPSSYCRWRTDTLVISILLLTNNVCSLDYCCYAPYENICS

SEQ ID NO: 189092 - protein, 98 aa, Glycine max
  unsure (1)..(98): unsure at all Xaa locations
  Clone ID: PAT_MRT3847_141765C.1.pep
XNPXKSXTXAXQPTSDTYSPXSXXXLLCTLQTPPRRRXPXXFSTXFXXTIXYXTXSLKXIXQMXYDDXCVRVCYFFCCSGFPLCWGRIFVVSCCFGCV

SEQ ID NO: 189093 - protein, 112 aa, Glycine max
  unsure (1)..(112): unsure at all Xaa locations
  Clone ID: PAT_MRT3847_141766C.1.pep
PRTRQQHIISGRILFIQAVFISLPLTYLFTPNSKTIMVNMAQAHALFSPFNPRLLPSYSPILRRRIFSLPISPLTHRTVIAFENVGVSPDADSSTHSLPQXFNSLFFFISIH

SEQ ID NO: 189094 - protein, 45 aa, Glycine max
  unsure (1)..(45): unsure at all Xaa locations
  Clone ID: PAT_MRT3847_141767C.1.pep
KEGGNTSCAPPNSSAQDTFFIDTLKLGACVYLLXGLVTLFLGDPF

SEQ ID NO: 189095 - protein, 110 aa, Glycine max
  Clone ID: PAT_MRT3847_141768C.1.pep
ARSWGIVKAITLEALSFVGEVTIHFTGRMVGHSIFVSMPNLSIIFVNVGGIDGPWDPGLKKFEIQFLILFFNFIKIMVSCSHVKLVPVVCLMMFKCTLGLSQHFRVKSNI

SEQ ID NO: 189096 - protein, 47 aa, Glycine max
  unsure (1)..(47): unsure at all Xaa locations
  Clone ID: PAT_MRT3847_141769C.1.pep
XFSPHTMLRGNPXSPHGPFIHSTKFFNIPLLLNFHYARTLTLPFFHP

SEQ ID NO: 189097 - protein, 76 aa, Glycine max
  Clone ID: PAT_MRT3847_14176C.1.pep
GALTPSTSATNLASPVHEDDGLGFSHQKLSDLLQALEASMTFVWGRRLERGVESSQWPAVCLWLILGGTVESEERG

SEQ ID NO: 189098 - protein, 48 aa, Glycine max
  Clone ID: PAT_MRT3847_141770C.1.pep
ETIHNVENRYRRNRINILHLDKTIKKGSLGCGERAEVLNGIRHNTKCY

SEQ ID NO: 189099 - protein, 308 aa, Glycine max
  unsure (1)..(308): unsure at all Xaa locations
  Clone ID: PAT_MRT3847_141771C.1.pep
VDWKAHRVPPAGRPSPGVRAPGEPRVQIPVGGCRAGAAARAAGHVPKELDSTKRLIEELKLNLERAQTEERQARQDSELAKLRVEEMEQGIADESSVAAKAQLEVAKARYTAAVSDLIAVKEELAALHKEYASLVTDRDVAIKKAEEAVAASKEVEKSVEDLTVELIAAKESLETTHAAHLEAEEQRIGTVMARDQDSLNWEKELKQAEEELQRLNQQISSAKELKSKLETASALLIDLKAELTAYMESKLKQEGGPEESEKKTHTDIQEAVASARKXLEEVNLNIEKATAEVTILKVAATSLKSELE

SEQ ID NO: 189100 - protein, 142 aa, Glycine max
  unsure (1)..(142): unsure at all Xaa locations
  Clone ID: PAT_MRT3847_141772C.1.pep
PRNGRTTAVRQRVRQTKPKSVGGKGEPKTGAPLAPFRVPKPFPPVADDGGQFRKAFXGGGTNGGLMVSTWVNRNAVQGRLIRETNAQPYGENLLRAWAKELTRDFGGLVHFGPLDSAERDAFLANEATKKWPSSNQVLGEIA

SEQ ID NO: 189101 - protein, 49 aa, Glycine max
  Clone ID: PAT_MRT3847_141773C.1.pep
NRCACNYGSVKCQSLSIQHIHVGFKGYHYNLDTSKSRTTKPKGSFELAV

SEQ ID NO: 189102 - protein, 140 aa, Glycine max
  unsure (1)..(140): unsure at all Xaa locations
  Clone ID: PAT_MRT3847_141774C.1.pep
MCMPIRDHTCSFSNSNNGHSCQMHSSNPKKRKRPCDDDCYTKPAASHGFISVIGRRRAMEDAVKVVPGLVAAEQRCGSYDFFAVYDGHGGTLVANACRDRLHLLLAEEVRESAXGRGLDWCQVMCSCFMKMDKEIGVVRS

SEQ ID NO: 189103 - protein, 65 aa, Glycine max
  Clone ID: PAT_MRT3847_141775C.1.pep
IKQPSLSNKTYIITVANCSGTFTAQAHPINEGGVCLLILKLATRASTEIQFGHKCLGNKIHIPCV

SEQ ID NO: 189104 - protein, 103 aa, Glycine max
  Clone ID: PAT_MRT3847_141776C.1.pep
FIYWILWLQKKKKKKKKKKKKKKKKKKKKKKKKKKKKKKKKKKKKKKKKKKKKKGGPFKRIQLKKPGHAKKNFFKRGPKKKKKGRILKKPKREKPWRSPNKRP

SEQ ID NO: 189105 - protein, 38 aa, Glycine max
  Clone ID: PAT_MRT3847_141777C.1.pep
VRFKDVKTLSSLIGSNVILAGHSIFIRFHFLIRHISLC

SEQ ID NO: 189106 - protein, 78 aa, Glycine max
  Clone ID: PAT_MRT3847_141778C.1.pep
FSFFQLLQQVAKCDQIFFHLSSDGSGHPDCCDFAENIIQQQAHSTHAFIEAEQHTIYFHKSPIPTNFTSLRPMKGPHN

SEQ ID NO: 189107 - protein, 49 aa, Glycine max
  Clone ID: PAT_MRT3847_141779C.1.pep
KKKKKKKKKKKKKKKKKKKKKKGKKKKKKKKKKKKKKKKKKKKKKGRPF

SEQ ID NO: 189108 - protein, 170 aa, Glycine max
  unsure (1)..(170): unsure at all Xaa locations
  Clone ID: PAT_MRT3847_14177C.1.pep
PKSRFFPHLHHPLLPPHXFGIFLHFISPPPYLHLVNFPSHHSKHHHFPXLYTQXNYPQNPKCSSFSNSSIHSLISSSLFSTLADPFGTSSCSCSTSTXFSSTTASTTGFSSLFFTTTSAVSGSGYSXTSLRIPSSLSPAFSLFRGMFRFITPNIPQDSQIKKITKLEIKP

SEQ ID NO: 189109 - protein, 67 aa, Glycine max
  Clone ID: PAT_MRT3847_141780C.1.pep
PNPKVFFDMTINNQSTNHIIINLYTDITPHTTNNFHSLYTSKKIIKQSNKPLHYKISSLHHVIPIFI

SEQ ID NO: 189110 - protein, 66 aa, Glycine max
  unsure (1)..(66): unsure at all Xaa locations
  Clone ID: PAT_MRT3847_141781C.1.pep
RLQYPSMDGRTCKHRGQILRTQYPSXWLPGEAFSLSPTXSPAREGSGLMRWEGSSSRIPSLRTRAC

SEQ ID NO: 189111 - protein, 54 aa, Glycine max
  unsure (1)..(54): unsure at all Xaa locations
  Clone ID: PAT_MRT3847_141782C.1.pep
MVKEKIHIKKIDNASARHVTLLXRRRGLFKISEEPSFLCDADDALNIFFTTGKL

SEQ ID NO: 189112 - protein, 274 aa, Glycine max
  Clone ID: PAT_MRT3847_141783C.1.pep
MSFVFRGTRADIENGFPGFIPERRALRVHATRPSNSNSLTFLVTVLLLFMILNSHQMSPNFLLWLVLGVFLMATMLRMYATCQQLQAQAQAHAAAASGILGHTELRLHMPPSIALASRGRLQGLRLQLALLDREFDDLDYETLRALDSDNVSTAPSMTEEEINALPVHKYKVSGPQCGGSSMQQASSSTPAEKKQDNSNAVGSMKASDDDLTCSVCLEQVNVGDVLRSLPCLHQFHANCIDPWLRQQGTCPVCKFRAGSGWSDNGHNDIIADMV

SEQ ID NO: 189113 - protein, 93 aa, Glycine max
  Clone ID: PAT_MRT3847_141784C.1.pep
MSFVFRGTRADIENGFPGFIPERRALRVHATRPSNSNSLTFLVTVLLLFMILNSHQMSPNFLLWLVLGVFLMATMLRMYATCQQLQHRPKLMQ

SEQ ID NO: 189114 - protein, 149 aa, Glycine max
  Clone ID: PAT_MRT3847_141785C.1.pep
FNCALLVRKFDDLDYEPLRALDSDNVSTAPSMREEEINALPVHKYKVSGPQCGGSSMQQASSSAPAEKKQDNSNAVGSMKASDDDLSCSVCLEQVNVGDVLRSLPCLHQFHANCIDPWLRQQGTCPVCKFRAGSGWSDNGHNDIIADMV

SEQ ID NO: 189115 - protein, 83 aa, Glycine max
  Clone ID: PAT_MRT3847_141786C.1.pep
HHDLLIMNCRPHNHQVGTLEQIRNSLSLERVRETHRAKALIRTGHYGTNMSLRGLVGQRTDQRGQSGLEGREPRHGCWGYAQA

SEQ ID NO: 189116 - protein, 50 aa, Glycine max
  Clone ID: PAT_MRT3847_141787C.1.pep
FVSRSMASLLVTIALGFLIGVGLHGAGRSWACNWISAPCAGLVYRGQFDH

SEQ ID NO: 189117 - protein, 163 aa, Glycine max
  Clone ID: PAT_MRT3847_141788C.1.pep
STPGKTPPGGGKRGKKLKKRGKGREKRGERRRRTPPPPPLKRPQKGGAPPPKGQRQWGESPPTRALLLSPPGGKRDGCPDQKKGDTPGFTPPQGVKPRPRKENGGPQRKGKTPPNPGAKHGAPKAAPPQLYKTTKKRERGRPQGKISESFVCFLFFSFSLFLI

SEQ ID NO: 189118 - protein, 62 aa, Glycine max
  unsure (1)..(62): unsure at all Xaa locations
  Clone ID: PAT_MRT3847_141789C.1.pep
RSLDSGWGAKGFFPPVVPXNSPSPFLHPRLVGENHIGPAQGVNQPFHRSKNLKTLLLFLGWA

SEQ ID NO: 189119 - protein, 109 aa, Glycine max
  Clone ID: PAT_MRT3847_14178C.1.pep
KKDVDGVSPSQPDVDHDGEKGNFPKDDSFSLALFFDKGGDSLQGVITDNALKGPDFFPPIGSFEKFKEFFPFEPPFENFPGEFGKVSLSSRKDDFGGGFKYKFADLAPN

SEQ ID NO: 189120 - protein, 88 aa, Glycine max
  unsure (1)..(88): unsure at all Xaa locations
  Clone ID: PAT_MRT3847_141790C.1.pep
MDYKDSWGGPAEINATDSXTEDERRRNLPDADRAALAHPWEETHQSXLLGPGEQKKNNLRNLGCIMRSRKMLKWTLGTIVFDACLAGL

SEQ ID NO: 189121 - protein, 202 aa, Glycine max
  unsure (1)..(202): unsure at all Xaa locations
  Clone ID: PAT_MRT3847_141791C.1.pep
XGEGGVCFFSFLPLGPFYLFLPVHALLFAXLSMPWALVHQKKLKHFFCXXXXXFGGGGSLFFIHSRTILQKKRNGLARGVQKKNLRDRTRAGAIRGPGAGLPRGDLQNTGEWHPKRLALGGRGNPQGLSPNLVFRVQIFIGGQGPLPPEPGALVGAPGQPALGGKKRARGPLXKSPRWGPCGAKMAHSLGNGPGETRAPVPH

SEQ ID NO: 189122 - protein, 84 aa, Glycine max
  Clone ID: PAT_MRT3847_141792C.1.pep
WGEKGDDFSKVELFPDGCFSRRIGAFHWKPHFLFRKKPGEQLRGRKPHFFSLLKRSFLSVGLLGFPFPRGGRIAGFFFFFFLFS

SEQ ID NO: 189123 - protein, 36 aa, Glycine max
  Clone ID: PAT_MRT3847_141793C.1.pep
KSLEELHLLIFVQNLSLVIDYQIIVIDYTKLFCERM

SEQ ID NO: 189124 - protein, 55 aa, Glycine max
  unsure (1)..(55): unsure at all Xaa locations
  Clone ID: PAT_MRT3847_141794C.1.pep
CLVNSANDSXVYGXGHPLXPIYXYIFXXDSTNXXXHFLXYHXXFXRLXGRXXNTX

SEQ ID NO: 189125 - protein, 122 aa, Glycine max
  unsure (1)..(122): unsure at all Xaa locations
  Clone ID: PAT_MRT3847_141795C.1.pep
KGGKVQNESKRAMAKFVWNKKAAPPRTRNPPERERSGKFFTGKRAPQGFLLFLGESGKGSQRAFPQQKKVLLGGKFLGKKWKKFLFVXKKPFFAKTXKRKGGPQKNFKIFFKNKGGGAPRGG

SEQ ID NO: 189126 - protein, 92 aa, Glycine max
  Clone ID: PAT_MRT3847_141796C.1.pep
PSQEKWPSIQSKLEIVQAKRRTTGPITTGNNIRSAILQIPGPFGMSIIIISTNTISSNLKRVFPIHLDQGINPIEAHGDYGFLGPPEDQENV

SEQ ID NO: 189127 - protein, 270 aa, Glycine max
  Clone ID: PAT_MRT3847_141797C.1.pep
MMADPASFIASWLTPSYLFILVNLVIGTIAITSRFSSTPKNQQAHHPQPLSSFNTHHHQPNCTQPQLLPIPSLLQRVTSFNLSLHKHQPTPPETQHLHPEPQPQPEKPPELLRTPSLLERLRSFHNLSLHKHVQPEPEPEPEPEPEKPELVRSPSLLQRIQSINFSHLYRSDFSHRDDEDPDSGSDPGRGSGKAAEMRKSASVRGGLTDSEWEEVEKRRPQTARPVETTTSWREDEEVDAKADDFINRFKKQLRLQRIDSLLRYRGGNSS

SEQ ID NO: 189128 - protein, 79 aa, Glycine max
  unsure (1)..(79): unsure at all Xaa locations
  Clone ID: PAT_MRT3847_141798C.1.pep
VVFPKRAPKVKAGYSTLEKLANPPQVQGPFLPIVRKKPTFSLFKVPXKXXPFPSFLLFPFSFFPPPGGGGPPPPFVFVV

SEQ ID NO: 189129 - protein, 118 aa, Glycine max
  Clone ID: PAT_MRT3847_141799C.1.pep
GGQKKGNKSLWNNQIRQRAHVLLPKQGAPVFPKPRKTPVLIWIFPPPRPGEIQRGLPAPPAEGEKISLTALPQTPAPINRVNGFPLKQPTKGPVFFSFFPPLFFFYPPLFFFGGGLSS

SEQ ID NO: 189130 - protein, 83 aa, Glycine max
  Clone ID: PAT_MRT3847_14179C.1.pep
KNFDFNSPEVKQQFDQIGLSPEEVISKIMANPEVAMAFQNPRVQAAIMDCSQNPMNITKYQNDKEVMDVFNKISELFPGVGSP

SEQ ID NO: 189131 - protein, 199 aa, Glycine max
  Clone ID: PAT_MRT3847_1417C.1.pep
MEVEVKLCLADSNAHRHVTTLLSPFHVVTHRQQNLFFDGAASELSARRAVLRLRFYGDDERCVASLKARAVLVDGVSRVEEDEEDLDPRIGRACVAEPAKLGSVESRVLGRVKEEFGTEKGLVGLGGFGNLRSVYDWKGLKLEVDETKFDFGTLYEIECESSDPEGAKRLLEEFLKENEINYSYSTASKFAIFRSGKLP

SEQ ID NO: 189132 - protein, 64 aa, Glycine max
  Clone ID: PAT_MRT3847_141800C.1.pep
LFLFLEAFLIDFFTVFWLTPPKNNNMLLVYFYNGLNTKNPRETKCVLGFTPYHTFQNLIYPEQN

SEQ ID NO: 189133 - protein, 60 aa, Glycine max
  Clone ID: PAT_MRT3847_141801C.1.pep
KFLLESNTKTLQSYNNNKNNINDLNFLFHFINHIISIEFLNIYTDFTIYTHQFILYFSIS

SEQ ID NO: 189134 - protein, 63 aa, Glycine max
  Clone ID: PAT_MRT3847_141802C.1.pep
PSVQGVRKTTERTFQGDLKESGSGIYFKMPYPKIPSKAPFFLGTHILSCVKKYFRVKQKLYKI

SEQ ID NO: 189135 - protein, 60 aa, Glycine max
  unsure (1)..(60): unsure at all Xaa locations
  Clone ID: PAT_MRT3847_141803C.1.pep
ASGERGFRICSSEGPAVTFXLPIYNLYPESNGVAEGQGKFYNPEIQDPAFCMPSSVDKGE

SEQ ID NO: 189136 - protein, 160 aa, Glycine max
  Clone ID: PAT_MRT3847_141804C.1.pep
MEEAVDPARLVVEAVEEFLKSKVAKSGVTDKRWACGLVIQALMVSSESREHSRKILERAVAVVEMWKEHLDGESESGAAEVVMFLQMVVCFGLRSRFDDDYLRNFVMQFASRRDMAKLAAFLQFGDKIIDIIDELIKNGKEIEAVYFSSESGLTERFPPI

SEQ ID NO: 189137 - protein, 78 aa, Glycine max
  Clone ID: PAT_MRT3847_141805C.1.pep
LGLPLTFSALKPFYLSTYPLRQFFCLLFYTSYSCKNSKIFISFLSYHTSYASYLFTLLLLYLNNSYSIIIYCIVYLLL

SEQ ID NO: 189138 - protein, 71 aa, Glycine max
  Clone ID: PAT_MRT3847_141806C.1.pep
DVFIGILGNATIFCRERYNMLMYIDILETHFLLSSRALMLYLECKCVDEQITLYMYILVRNVLMDVCKYLI

SEQ ID NO: 189139 - protein, 123 aa, Glycine max
  unsure (1)..(123): unsure at all Xaa locations
  Clone ID: PAT_MRT3847_141807C.1.pep
AAPGARIENEPGLVPLISVETSLIDTGAGGACIIEGAPQYDPAYDDLVAFCNRMVXAGATSTCHMGVPRSRAYIPGVWCAFWTPVLPQYSLTNGGQSTTGALLDHIVEDHAVSACLRHQAGLP

SEQ ID NO: 189140 - protein, 223 aa, Glycine max
  Clone ID: PAT_MRT3847_141808C.1.pep
RPSDHRRVRKSWRTKVEEIVDSHMRKIIQTQDAWMERMLSVVEQREQEMASREEERKRKESMWFDQQVHELWAKEKAWVEARDAALIEVVRKHIGIGIGLEALPLVEEESPNKNKSQGSIDANEFPSEGVDPGRSSSSRWTEMEISNLMQLRTSFEQRFRENNNGYMENGVWDEIAAKMACLGFDRSASECKQIWEEISISLRRTVDECDDGAKEGLGIWDLS

SEQ ID NO: 189141 - protein, 98 aa, Glycine max
  unsure (1)..(98): unsure at all Xaa locations
  Clone ID: PAT_MRT3847_141809C.1.pep
FLCFVXLGFVXVVXLGCACLGXWXVCGXCVLVVVXVLCCASVRCSFLVLCFVFVFLAXGLLFFXFFFCLFVXFFVWXGXPXSWXWWVVALGALKXRPW

SEQ ID NO: 189142 - protein, 81 aa, Glycine max
  Clone ID: PAT_MRT3847_14180C.1.pep
FDFNSPEVKQHFDQIGLSPEEVISKIMANPEVAMAFQNPRVQAAIMDCSQNPMNITKYQNDKEVMDVFNKISELFPGVGSP

SEQ ID NO: 189143 - protein, 145 aa, Glycine max
  Clone ID: PAT_MRT3847_141810C.1.pep
MEERSGVLETSRSCKQLIGPEGSDKEFEGYIDSNLRVVETFLRLFPIGLCVTALVIMLKNSQENKYGSVSYTDLGAFRYLVHANGICAGYSLFSAIFVALPRLSSMHIAWTFFVLDQVLTYIILSAGAASAEVLYLAEKGNMATA

SEQ ID NO: 189144 - protein, 144 aa, Glycine max
  Clone ID: PAT_MRT3847_141811C.1.pep
GFPPPLSFLIKKKNPPIFNIFPQFWGQKTPFGGGPGTPKIFWAPRPFPQKRGGAPLFWVFFSPPFLVKPPKSFPRFFFFKKFFLPNKGPRFFYRLFFSPPGRVKILSFLASAGASVIAPFEVAPFFIIKRKKKFVKYMVQNKRV

SEQ ID NO: 189145 - protein, 152 aa, Glycine max
  Clone ID: PAT_MRT3847_141812C.1.pep
PTRPPTRPPTRPYGCEKTTEGETIQAKKATSLFFTSSNQIVSRTSKKKLNMSTTHFSLLAIFLLLSLDSLGTTMGGRLIPPSAPSTVTRPLVSSEVENYVKPQLNHKLKALQGREVKGCLPKGSRHNSAPSRFVNYKTLGSGGCSRIHSGKP

SEQ ID NO: 189146 - protein, 74 aa, Glycine max
  Clone ID: PAT_MRT3847_141813C.1.pep
GREDNTGGGISHFVARNCYEQYHDSASHSYHRCNTFSPMSFPCFECVHTPMSDSTWSTLTRCNVLLLTACLSST

SEQ ID NO: 189147 - protein, 422 aa, Glycine max
  Clone ID: PAT_MRT3847_141814C.1.pep
MQNHRLKQQQQQQQQALMQQALLQQQSLYHPGLLAPPQIEPYPSGNLPPGFDPSTCRSVYVGNIHTQVTEPLLQEVFSGTGPVEGCKLIRKDKSSYGFIHYFDRRSAALAILSLNGRHLFGQPIKVNWAYASGQREDTSGHYNIFVGDLSPEVTDATLFACFSVYPSCSDARVMWDQKTGRSRGFGFVSFRNQQDAQSSINDLTGKWLGSRQIRCNWATKGAGGNEEKQNSDAKSVVELTNGSSEDGKETSNSDAPENNPQYTTVYVGNLAPEVTQLDLHRHFHALGAGVMEEVRVQRDKGFGFVRYSTHAEAALAIQMGNAQSLLCGKPIKCSWGSKPTPPGTASNPLPPPAAASLPGLSATDLLAYERQLAISKMGGVHALMHPQGQHHLKQAAAIGASQAIYDGGFQNVAAAQQMMYYQ

SEQ ID NO: 189148 - protein, 67 aa, Glycine max
  Clone ID: PAT_MRT3847_141815C.1.pep
YRKGGRQITERAHATFTEPAPSIPFCFTIHIHYYYSLSPYGGDYNFLTDLNLEKEEKILIKFKTQRP

SEQ ID NO: 189149 - protein, 161 aa, Glycine max
  unsure (1)..(161): unsure at all Xaa locations
  Clone ID: PAT_MRT3847_141816C.1.pep
PGRNFRGDGRARENKAPAPDTSKTIKRERNNSDRRRFNISGKILFLLLDLLLQYPLPKGEREKKXXQGGRASRPNGKAEPGTGAAGXGGGHSPPARKKRGDGGXGRDNGNPDDDPARKRARQHRQAKHRSRKSEADPNDAPGRAKRGDGGGGRHGRHRAAQ

SEQ ID NO: 189150 - protein, 46 aa, Glycine max
  Clone ID: PAT_MRT3847_141817C.1.pep
LLLVESLLPSHFLHPQNSNLRLRITHINYVGQYVLIGVKTIRIHIY

SEQ ID NO: 189151 - protein, 71 aa, Glycine max
  Clone ID: PAT_MRT3847_141818C.1.pep
VRTTMANLSVLMITEPIADFHAINSVLKLLMTTADTSMTTRAHMEEEVTIDTNAHHNDRRNVTRPNTTSPL

SEQ ID NO: 189152 - protein, 50 aa, Glycine max
  unsure (1)..(50): unsure at all Xaa locations
  Clone ID: PAT_MRT3847_141819C.1.pep
NXSXTXXXTHXXMHXLXXMXGSSXXGLXXXHXXXXXRXEXXAXVSXXXNF

SEQ ID NO: 189153 - protein, 61 aa, Glycine max
  Clone ID: PAT_MRT3847_14181C.1.pep
DNSRGRMVALRVRAGIKSRGGGVHSRGAPFFFFFFKVNIIYSNLKKHNNTSSQTHVTLPIK

SEQ ID NO: 189154 - protein, 65 aa, Glycine max
  Clone ID: PAT_MRT3847_141820C.1.pep
LEWCRCYEHEYRHVDIMWSPSLEILHPNLSLEQHYRGASNPSVKILHASYMACVFNIYLDNSLVH

SEQ ID NO: 189155 - protein, 32 aa, Glycine max
  Clone ID: PAT_MRT3847_141821C.1.pep
IPVSTHSSYHSQTLYYLSLFSTYTIFKKSLIT

SEQ ID NO: 189156 - protein, 57 aa, Glycine max
  Clone ID: PAT_MRT3847_141822C.1.pep
FGWGRPKKVDVTSIGPTGGFFISESRNDSGGIEITLVLYKQEMESFMTHFAEGLESL

SEQ ID NO: 189157 - protein, 229 aa, Glycine max
  unsure (1)..(229): unsure at all Xaa locations
  Clone ID: PAT_MRT3847_141823C.1.pep
MNDEASALTLYSDMLQEVADSNAEPKLVQHHFKRSFSGFVAMLTEEEANRMARHDRVVAVFPNKKKQLHTTRSWDFIGFPLQANRAPAESDVIIAVFDSGIWPESESFNDKGFGPPPSKWKGTCQTSKNFTCNNKIIGAKIYKVDGXFSKDDPKSVRDIDGHGTHVASTAAGNPVSTASMLGLGQGTSRGGVTKARIAVYKVCWFDGCTDADILAAFDDAIADGVDIIT

SEQ ID NO: 189158 - protein, 747 aa, Glycine max
  Clone ID: PAT_MRT3847_141824C.1.pep
MQSYIVYTGNSMNDEASALTLYSSMLQEVADSISTLSHLLTAINGTDRLQCNCITPSSVGKPIFCLQSFVSNAEPKLVQHHFKRSFSGFVAMLTEEEADRMARHDRVVAVFPNKKKQLHTTRSWDFIGFPLQANRAPAESDVIIAVLDSGIWPESESFNDKGFGPPPSKWKGTCQTSKNFTCNNKIIGAKIYKVDGFFSKDDPKSVRDIDGHGTHVASTAAGNPVSTASMLGLGQGTSRGGVTKARIAVYKVCWFDGCTDADILAAFDDAIADGVDIITVSLGGFSDENYFRDGIAIGAFHAVRNGVLTVTSAGNSGPRPSSLSNFSPWSISVAASTIDRKFVTKVELGNKITYEGTSINTFDLKGELYPIIYGGDAPNKGEGIDGSSSRYCSSGSLDKKLVKGKIVLCESRSKALGPFDAGAVGALIQGQGFRDLPPSLPLPGSYLALQDGASVYDYINSTRTPIATIFKTDETKDTIAPVVASFSSRGPNIVTPEILKPDLVAPGVSILASWSPASPPSDIEGDNRTLNFNIISGTSMACPHVSGAAAYVKSFHPTWSPAAIRSALMTTAKQLSPKTHLLAEFAYGAGQIDPSKAVSPGLVYDAGEIDYVRFLCGQGYSTRTLQLITGDNSSCPETKNGSARDLNYASFALFVPPSNSNSVSGSFNRTVTNVGSPKSTYKATVTSPKGLKIEVNPSVLPFTSLNQKQTFVLTITGKLEGPIVSGSLVWDDGKYQVRSPIVVFNTA

SEQ ID NO: 189159 - protein, 63 aa, Glycine max
  Clone ID: PAT_MRT3847_141825C.1.pep
GLSGAISQPWFAASKLSFTADRTFKEVGSAAPLLYVELPKKRCKSLSAHLHEPKQGSARLAIL

SEQ ID NO: 189160 - protein, 82 aa, Glycine max
  Clone ID: PAT_MRT3847_141826C.1.pep
ASQEQSPSIKACASYTTRGISFILLDVKPLNDYTDINKLRESVISIHIDSVLLSASKLVPVGYRIHNLQLMHTIVYDLASVD

SEQ ID NO: 189161 - protein, 44 aa, Glycine max
  Clone ID: PAT_MRT3847_141827C.1.pep
RAFFTADDPEILMWVVYPKPGRIRGTNDITINMTVHDTSRKTNV

SEQ ID NO: 189162 - protein, 55 aa, Glycine max
  Clone ID: PAT_MRT3847_141828C.1.pep
SRDASELRTAANSGGIGVMSKNYDTRGRSPDSRSDRRDLPCLRFEARWRSRHGWE

SEQ ID NO: 189163 - protein, 60 aa, Glycine max
  Clone ID: PAT_MRT3847_141829C.1.pep
TIFAGVSINIEYINMLVVISVVIVTRVIVGVADRDSKDVESIEVIENMSNENEVCEVQES

SEQ ID NO: 189164 - protein, 144 aa, Glycine max
  Clone ID: PAT_MRT3847_14182C.1.pep
ELAETQKELAKLQLSLKESSSSSHSGSNEERGWPTTDPKKTDNASDANNQQLALALPHQIAPQPQPPAPQVQAQAHAPAPNVTHVHQQTPYYMPPTPLANAAVPQHPKNLFLPFDQQFRTPQHVAPQPTPSHVTPSSVQQFSHY

SEQ ID NO: 189165 - protein, 68 aa, Glycine max
  Clone ID: PAT_MRT3847_141830C.1.pep
LPSTTLAHGVSPWALYYHCCCSLLLNLAWHSCHALHSLGFNIHHRFYDPEKETLGVHDLPDQGTMTML

SEQ ID NO: 189166 - protein, 105 aa, Glycine max
  Clone ID: PAT_MRT3847_141831C.1.pep
NSAREKMKVLSKVYNEKMDTGTNLFAQYYKQWLKVGASEPPLPNVSLPSRPSYRSSRRSSDSFVSNSSINPNLYKTVFGSKLEQQPTGLGDQNGVLAITTGLEID

SEQ ID NO: 189167 - protein, 56 aa, Glycine max
  Clone ID: PAT_MRT3847_141832C.1.pep
NVMDDIVRNPTLRDVLNLSIATEVECSAQEAYYIYDSSKACLMVIHIIQEADEYHD

SEQ ID NO: 189168 - protein, 127 aa, Glycine max
  Clone ID: PAT_MRT3847_141833C.1.pep
NSHLYPRPTPCVFFTTLTDKHGGFLFINAGAINPYFLRTELGFGCYTKKAHGSLHGSKEKPYLLSGGHDRQEGNFHNLTYALLSPVARLPRSTIPIEYATSQRLTIPSKISYTVSKRELLLYHSTRG

SEQ ID NO: 189169 - protein, 91 aa, Glycine max
  Clone ID: PAT_MRT3847_141834C.1.pep
EESGKGTWKHAAFHVAPTIATPAAYAPLPFALASLGWPLGVTSLVSATLVTWYSSFLIASLGKWNGEKHLTYRHLAHNIFGFWGYWSIAFF

SEQ ID NO: 189170 - protein, 138 aa, Glycine max
  unsure (1)..(138): unsure at all Xaa locations
  Clone ID: PAT_MRT3847_141835C.1.pep
SRPADEEIERGVDCRHAYIHYSQLXVSISCHGIFVRLXKTCPAEWGLHVAAXGTTDGPGAFDFQQGDDKAXPFWKLVRDMLKTPSKEQTDCQRPKPILLDTGEMKKPYDWAVGYSHILNGMILYSLSSGQLSFICKIE

SEQ ID NO: 189171 - protein, 82 aa, Glycine max
  unsure (1)..(82): unsure at all Xaa locations
  Clone ID: PAT_MRT3847_141836C.1.pep
XRIXXQXARXGGHRKQECDNKTXQQVXXSXXLXSSSCSXSTKGXXNXSSRXSGTQXWAMSQLHDXDGKAKSTTPHSXILNQD

SEQ ID NO: 189172 - protein, 72 aa, Glycine max
  Clone ID: PAT_MRT3847_141837C.1.pep
GGKKQQKRLFPPGKKKNGPGAKIITGPPGGREKFFFRLRGKNFSPQRGQNAKPLLPGGVPFIKAPGLPSFIY

SEQ ID NO: 189173 - protein, 52 aa, Glycine max
  Clone ID: PAT_MRT3847_141838C.1.pep
ERNTIGWAAYTLTCRPKTYTMQTLSLKTRAELAQLFRSTTISWLISKLKFKY

SEQ ID NO: 189174 - protein, 149 aa, Glycine max
  unsure (1)..(149): unsure at all Xaa locations
  Clone ID: PAT_MRT3847_141839C.1.pep
LDSRLTHAXELIENDLILIGSTAIEDKLQEGVPACIETLQRAGIKIWVLTGDKIETAINIAYACNLINNEMKQFVISSETDEIREVEDRGDQVXIARFIKEEVKRELKKCLEEAQSSFQSLSGPKLALVIDGKCLMYALDPSLRVMLLN

SEQ ID NO: 189175 - protein, 116 aa, Glycine max
  unsure (1)..(116): unsure at all Xaa locations
  Clone ID: PAT_MRT3847_14183C.1.pep
CRVAITLGALLASLTLKDKGATLFASNSHIVNPLXNSAVGAELSQSFSGKENKLTFGTQHALDPLTLLKARVNNYGWASVLIQPDWTPKTQFSLVGEVETGAIKKRAKVGFSVALK

SEQ ID NO: 189176 - protein, 67 aa, Glycine max
  Clone ID: PAT_MRT3847_141840C.1.pep
RKLRVYIHTIISTHPQGNKPTIKAKHYSEVPKIKKTPRNLHPHQFNNSNLKPPRRPQFIHKEDSSHT

SEQ ID NO: 189177 - protein, 399 aa, Glycine max
  Clone ID: PAT_MRT3847_141841C.1.pep
RLLRTCSEQEKSIAGLQDGFSEELHKNHPMESVDKHIANHHMENVDKHIAKMRMEQMRLTGVELALRKELESCRFQADSLRHENIILLNRLKGDGKESVAATYRLDKELWARIYCLQNQGLTMLNESTYLCSKLLEFVKRKGSHLRQNVQLDREVIGNGLDGQFIVESETKIQGLKSGTEGLTRSLQLMSSLLKDKSNPLTSKFQSEIIDAGKLAPLNDQSSEDILRTELKAECLVTSLLREKLYSKELQVEQMEAELATAVRGNDILRSEVQNALDNLSSVTHKLKDHELQMLKKDESRNCLQNDLQESNRELTIMRGKLPKVTEERDYMWEQVKQYSEQNMLLNAEVNVLKKKIETLEENNLEKEGQISILQDSLAKRSYDDLLGSPAHDFFSTKLL

SEQ ID NO: 189178 - protein, 223 aa, Glycine max
  unsure (1)..(223): unsure at all Xaa locations
  Clone ID: PAT_MRT3847_141842C.1.pep
HASADAWAGRKIVVSTNIAETSLTIDGIVYVIDPGFAKQKVYNPRVRVESLLVSPISKASAHQRSGRAGRTQPGKCFRLYTEKXSFNNDLQPQTYPEILRSNLANTVLTLKKLGIDDLVHFDFMDPPAPETLMRALEVLNYLGALDDDGNLTKLGQIMSEFPLDPQMSKMLVVSPEFNCSNEILSVSAMLSDSCSFSVFSQSLEENGCGLASMHLLTFRGPPL

SEQ ID NO: 189179 - protein, 60 aa, Glycine max
  Clone ID: PAT_MRT3847_141843C.1.pep
SPTQLLKLELEHLHYSRGQKNRIIHPKLSNKQYPKLFILVFPHSFPSLCTKATYCNSPLI

SEQ ID NO: 189180 - protein, 49 aa, Glycine max
  Clone ID: PAT_MRT3847_141844C.1.pep
GEPLHVGLSSFKFLLCCQLITPVVQLIIFVQKPVSFLFKKPKSIKKKDS

SEQ ID NO: 189181 - protein, 291 aa, Glycine max
  Clone ID: PAT_MRT3847_141845C.1.pep
PTRSPTRPHCHEKRQKISGCDDVNVTVLSEPSDVAFSHSENDLNEDQEFDSLSAINSLIAECEDSKQKYLSVFSSKLSTSQQEFQNSYTQVCNAYHDSRTDQDTFWWLEALHHAEQNKDFSTELIRKIEEAISGTSNNSKSSRVTARSVSISLCNTIVKYCNFVIIHIRKFPSYRRSNIDQTMEKPKEEDIERVGKCRNCQPNCDGPPCILCELDELFQDYEARLFVLKNERGGIISSAEEAVDFHKKNFALNHFLSKLSQSNHRSTVSDIGHEESKKRNVGQRVVVSYFI

SEQ ID NO: 189182 - protein, 59 aa, Glycine max
  Clone ID: PAT_MRT3847_141846C.1.pep
ARASTVLILALKLNETFTSSQVTSHVLYNKAVTLCTCADYSSICVYVLFSTCQCSIWVD

SEQ ID NO: 189183 - protein, 61 aa, Glycine max
  Clone ID: PAT_MRT3847_141847C.1.pep
SSHFIPSAIISLPCFHSVNAIIGWTLHHVRAACKLHSNDPPALSPTRVIDAPYPTKMVLIF

SEQ ID NO: 189184 - protein, 79 aa, Glycine max
  Clone ID: PAT_MRT3847_141848C.1.pep
LIGREYVQMKLYIYRFNFFFKKGYLKVGFKLTSYTLTLCTRTTKSLNLFNICIKKSIIFRLKCTRPPTRPRTRGDIINK

SEQ ID NO: 189185 - protein, 544 aa, Glycine max
  unsure (1)..(544): unsure at all Xaa locations
  Clone ID: PAT_MRT3847_141849C.1.pep
PRVRRIAIARAILKDPRVLLLDEATSALDAESERVVQETLDKVMINRTTIIVAHRLNTIRNADTISVIHQGRVVENGTHAELIKDPDGAYSQLIRLQEINKQLDGTDDSGRVENSVDSERQSSQWFPFPQSLSLGSSGTGNSSHDSFRISNAMPTTLDLLKTSEEGPEVLPPVVSHSPPEVSFLHLVYLNKPEIPELVLGTLAAIVTGAILPLMGFLISNMINTFLEPADELRKGSKVWALMCIGLGVAGTIFHPIRXYFFAGAGSKVIKRIGLRWFKKIIHMEVGWFDKAGNSSGILGARLSLDVASIRTFGGDALGLMGQDGATVIIALVIAFEANWQLSLIILVLLPLLLVNGQVQMGSMQGFVTDAKKLYEEASQVANDAVGNIRTIAAFCAEEKVMNLYQKKCLGPIKTGIWQGIVSGTSFGLSLFLVFSVNSCSFYAGARLVENGKTSISDVFRVFFTLTMAAIAISQSGFMAPGASKAKSSVTSIFAILDQKSRIDPSDECGMTLXEVKGEIEFHHVTFQYPTXPNGLLFRDLSLTI

SEQ ID NO: 189186 - protein, 61 aa, Glycine max
  Clone ID: PAT_MRT3847_14184C.1.pep
CTIQHSYNVTQLEIIIKPQLTTFTLIFFVSLLLLQGQQIKYSLPQTTNKNDHISQKKRMAH

SEQ ID NO: 189187 - protein, 60 aa, Glycine max
  Clone ID: PAT_MRT3847_141850C.1.pep
QQQALILFSSSCTSQSNSFHCTIHPLIAIRNVLFTLSIQIQGFAFSPLTSFSFSFLFFPL

SEQ ID NO: 189188 - protein, 99 aa, Glycine max
  Clone ID: PAT_MRT3847_141851C.1.pep
VSCGFSVFLRVFLVLCLARVAVRSLPFLAVRSFRWLLWGFPLCFGVVCCGICLGFAFSLGRPLCPWCSFWGTLLLFPLAAPAFTVRALWKFRKQKWEKS

SEQ ID NO: 189189 - protein, 36 aa, Glycine max
  Clone ID: PAT_MRT3847_141852C.1.pep
GKKYWWMSLIWLIPPIVLALTASADLSIIPCQWLQW

SEQ ID NO: 189190 - protein, 165 aa, Glycine max
  unsure (1)..(165): unsure at all Xaa locations
  Clone ID: PAT_MRT3847_141853C.1.pep
MCLCFQPQMPCYMTKVFRDXSFARWAQASGTLSLTETTYDNADIQVGFDNFTNSRIEVYAGSLLFLHPDFIIKGVVLLNGNIGLVPSSEKRHSLSKEYGVFDLETVAMHQIGHLLGLDHSPKEDSIMYPYILSSHPDDSASHGGRLDVLLVTTFCLGFACVWMCF

SEQ ID NO: 189191 - protein, 66 aa, Glycine max
  Clone ID: PAT_MRT3847_141854C.1.pep
LLVSWYEARELSHSKSDLCQKYQLHNPGSSWCLGKKGKLGGRIRYIPHGEVISKEEFEMRIPHGET

SEQ ID NO: 189192 - protein, 303 aa, Glycine max
  Clone ID: PAT_MRT3847_141855C.1.pep
GANEFQTEIKMVSRFRHAHLVSLIGYCNDGGEMILVYDFMARGTLRDHLYGSELSWERRLNICLEAARGLHFLHAGVDKQSVIHRDVKSTNILLDKDWVAKVSDFGLSKVGPNASHVTTDVKGSFGYLDPEYYMSLWLTQKSDVYSFGVVLLEVLCGRSPIETKVDKHKQFLVTWFRNCYHDGNVDQTVDPALKGTIDPKCLKKFLEIALSCLNDQGKQRPMMSDVVEGLEYALNLQQRYKKNKGEIGLTKIEDHHGDFNDKFGKVLSMNASSSTSMATTTCSEEEQALVHGMFPELRNQRPR

SEQ ID NO: 189193 - protein, 191 aa, Glycine max
  Clone ID: PAT_MRT3847_141856C.1.pep
MESSRRAVESYWRWRLIDSATSDEDKVTPVYKLEEICQLLLSSHATIVKELSEFILKRLDHKNPIVKHKALRLIKYAVGKCGVEFRREMQRHSVAIRQLLHYKGPSDPLKGDALNKAVRDTAQEAISAIFSADDNKNPPPSAPPAASDLNRRIEGFGNTNFQAPSHDKKSFLSEVVDIGSATIKQGLSAFT

SEQ ID NO: 189194 - protein, 128 aa, Glycine max
  Clone ID: PAT_MRT3847_141857C.1.pep
KKSFFDTKVKKKKMLQEKTNNNINRQKYDPLHDMEQHATEIFDSVPRKRRNSELIPNDPYRDIELHCNEIFEPRQRKRSNSELIPNDPLRIIEIHAPEIFQDDKFHGGIGERDDPFKKIELYAEEIFH

SEQ ID NO: 189195 - protein, 48 aa, Glycine max
  Clone ID: PAT_MRT3847_141858C.1.pep
YDNRIDLARLASAQTLSWILIYRSCLAITGQGDKSENLHAGDVYVCDR

SEQ ID NO: 189196 - protein, 59 aa, Glycine max
  Clone ID: PAT_MRT3847_141859C.1.pep
VLLYWDDRYKKDDGLNTMGSNLAHMNNDNNLYLKSSCYDRDIYLLATKICSHIALIYSI

SEQ ID NO: 189197 - protein, 46 aa, Glycine max
  Clone ID: PAT_MRT3847_14185C.1.pep
STSSIIVKKICVANAPNAQILVKKLLVVLVKSHTISPTRSIKLVFL

SEQ ID NO: 189198 - protein, 117 aa, Glycine max
  unsure (1)..(117): unsure at all Xaa locations
  Clone ID: PAT_MRT3847_141860C.1.pep
YALGRYPGXXNFPXSTHASGREEETGKRRLNFYSGGRYNESTRLHFSLKNKAKPFVVERKLKNHEHSPLYLYPSYCHLSFIDTLVRSPPNCYPLGPSLDATALAIAFVLLPFVTRER

SEQ ID NO: 189199 - protein, 113 aa, Glycine max
  Clone ID: PAT_MRT3847_141861C.1.pep
FCFFFFFFFFFFFFFFFLNREKHRVFFLIRVWDCLIKFYTIVHTQLTKDDFLNCPGNNLFLFDPIFLLKNAFFLGPNLNTWLIKGQVFKVFFKFLKKSWRPTPLVFFRAEFRV

SEQ ID NO: 189200 - protein, 95 aa, Glycine max
  unsure (1)..(95): unsure at all Xaa locations
  Clone ID: PAT_MRT3847_141862C.1.pep
PPPFLGPPPPVIPPPSPPPPPRCLPRVTIFPSPPMVGGGTFPPPGPPCSLSPRGSVNXPPPPRHIFXXFRPPGPPPPRESHREGPPLRNRVQLQV

SEQ ID NO: 189201 - protein, 48 aa, Glycine max
  Clone ID: PAT_MRT3847_141863C.1.pep
YSYIPVHVTFQLCNLLLENFRFPLFLKYTEVVFIFRVGTDVLFRMAEN

SEQ ID NO: 189202 - protein, 81 aa, Glycine max
  unsure (1)..(81): unsure at all Xaa locations
  Clone ID: PAT_MRT3847_141864C.1.pep
VXKNFFLVFFFYFFLGRKRATPGFNREFLNRTWRGTIFPLWEKNKNLGNKWQKLFPGGKRKTLKIPKKKKTGRKKGKTPGA

SEQ ID NO: 189203 - protein, 135 aa, Glycine max
  unsure (1)..(135): unsure at all Xaa locations
  Clone ID: PAT_MRT3847_141865C.1.pep
MGGATFDLFLYEMGLIDIASIAAAPQGRPRAIHLAWANLIGQAGHPEKQIMEPAIKGTGNVGNAANEAGVEPEQATXSDPTLTPRTKWPADKIYGDEGGTDLEYCTQKGXNHAIAETLAEQAGRDIAKETGIDAV

SEQ ID NO: 189204 - protein, 79 aa, Glycine max
  unsure (1)..(79): unsure at all Xaa locations
  Clone ID: PAT_MRT3847_141866C.1.pep
NGXGIPGWTTPVRPFLIKDGGKGEGQGCLQLGLLNKPVQLVGLFGLGLYWVFWLGGHFWFTKKGFGPIKLCKWRFKVKT

SEQ ID NO: 189205 - protein, 58 aa, Glycine max
  Clone ID: PAT_MRT3847_141867C.1.pep
GARERMVLFSDRYFLPVFTLFLTEKREYELESRFFLFYYKKRKLCKNALQMIVCKFHH

SEQ ID NO: 189206 - protein, 293 aa, Glycine max
  unsure (1)..(293): unsure at all Xaa locations
  Clone ID: PAT_MRT3847_141868C.1.pep
MVVFSCVKTMVVLVLAFLISVPSMVASAVSLYQDVDVTWGDGRGKILNNGQLLTLSLDRASGSGFQSKNQYLYGKIDMQIKLVPGNSAGTVTAFYLRSEGSSWDEIDFEFLGNLSGDPYIVHTNVYTQGKGNREQQFYLWFDPTADFHTYSFLWNPTHVVFYVDGRPIREFKNLEGVGIEYPKKQPMRLYASLWNADDWATRGGLVKTDWSEAPFTASFRNFKANGCVWSXGVSSCNSTSSSEKAWLYSQQLDSTNQKKLKWVQKNYMIYDYCTDLKRFPQGLPLECTVRTKS

SEQ ID NO: 189207 - protein, 61 aa, Glycine max
  Clone ID: PAT_MRT3847_141869C.1.pep
TKYLASLRSYTLILQNKDLSLFLYHHPGCNYCALIPTSALLLKAFRSMLKPATTILGIYLT

SEQ ID NO: 189208 - protein, 79 aa, Glycine max
  unsure (1)..(79): unsure at all Xaa locations
  Clone ID: PAT_MRT3847_14186C.1.pep
VLFIYPEYSPTAVATSGLTMCRIWLTYRSSRWYELDYAASIRMFMQGDSTXQIAFGPGFTSSSAVWKALRTIIPARESS

SEQ ID NO: 189209 - protein, 90 aa, Glycine max
  Clone ID: PAT_MRT3847_141870C.1.pep
SSQTVPTPRLLALKILFMNSSLQPSILTIYLPLPLPLPRLNPLAARSALPIPLTHPPPLVPKYLQPAHPTALIPLARTPRPDPQADDLIL

SEQ ID NO: 189210 - protein, 145 aa, Glycine max
  unsure (1)..(145): unsure at all Xaa locations
  Clone ID: PAT_MRT3847_141871C.1.pep
HASGFFESLWRDGDMNRLNHDPSDDLNLIIVXHGLASRVFLMKWFKWTVEQFELLNNFENGEFRVIQLGSGGEYSLAVHHTDEELLEWGLSPDMVADQKRRASASKGDWNDPCSWYLDAFFDHLPDSDDDNVDKHDETDSLSECS

SEQ ID NO: 189211 - protein, 44 aa, Glycine max
  Clone ID: PAT_MRT3847_141872C.1.pep
FGPRDMSLPELIPSNPLLPGTTEVHQRRKCVTVLGNMNHETWPV

SEQ ID NO: 189212 - protein, 125 aa, Glycine max
  unsure (1)..(125): unsure at all Xaa locations
  Clone ID: PAT_MRT3847_141873C.1.pep
GWLKKCQCLYYIKKKKKKGPKAPAPPKIMDPPGLKNSKSNLFIPATSKGGPGTHSPQKEAEXPRSLARRLPPPDWEKPGGTPLNPLGTHSPFPQWRNNQKGPTQSPFPQVANPNGQRKMETVIIW

SEQ ID NO: 189213 - protein, 100 aa, Glycine max
  Clone ID: PAT_MRT3847_141874C.1.pep
PRVRPRVRAHACAHSFVRLREDDRRGILCCFSPASARVRKPKRGLFSFRDEGQGEFTFSLVWRSCPLPIVFLLSVEVCLGFYLSLAEEEEPYQESEDESP

SEQ ID NO: 189214 - protein, 88 aa, Glycine max
  Clone ID: PAT_MRT3847_141875C.1.pep
MERRGYGGPRGPYRGGGGGRGPRGCFTNGEVGEERRPRRAFEHHSGTGRGNEFKRDGSGRGNWGTQNDDIAVVTEEAVYETEKNSADE

SEQ ID NO: 189215 - protein, 44 aa, Glycine max
  Clone ID: PAT_MRT3847_141876C.1.pep
ILAVGIVVTSCVLLAAGCITMLTSFEKIQSHMILNFFLNLPLDH

SEQ ID NO: 189216 - protein, 31 aa, Glycine max
  Clone ID: PAT_MRT3847_141877C.1.pep
ANYLHCHVLFIVEPCYAQNAQSTPRRTLVHP

SEQ ID NO: 189217 - protein, 75 aa, Glycine max
  Clone ID: PAT_MRT3847_141878C.1.pep
MAELIGPRLYSCSNCRNHVSLHDDIISKAFHVNHLSLSVFLLFWVILETKLFPPMFYYSYILCANYVNFYPWLLM

SEQ ID NO: 189218 - protein, 37 aa, Glycine max
  Clone ID: PAT_MRT3847_141879C.1.pep
LAVEGIFGTECYLEYEFCDISCGWYIWYWGFASFVLP

SEQ ID NO: 189219 - protein, 52 aa, Glycine max
  Clone ID: PAT_MRT3847_14187C.1.pep
SRRLSYVFHCAAYNKNCVLLHLLCPHDIALHFPVVQVSIRVSVSFITPLLSK

SEQ ID NO: 189220 - protein, 67 aa, Glycine max
  Clone ID: PAT_MRT3847_141880C.1.pep
LLLGLCSSLRPCPGGVYGDRHFETLSFFRDVIPLGSCPWRLLSWNPGFRVPPPCAMLWCGWNKKKLA

SEQ ID NO: 189221 - protein, 108 aa, Glycine max
  Clone ID: PAT_MRT3847_141881C.1.pep
SPLESFLESGPALPSTHTPPVRGSESSFVNSCSTGKALRYLKLDKPCPLNFVPFTVVNVIFPLACSLCVPTNFFSSLTVTVSLLSLFTFLDSEFGSIYRESYVTKLVM

SEQ ID NO: 189222 - protein, 104 aa, Glycine max
  Clone ID: PAT_MRT3847_141882C.1.pep
SFFFFFFLFFFFFFIFFLEAITLCEVSYTKHHTLILGNCPKRPLLIKSPITENSIPPKRKKELDPGPFIFTALLSNGSLFCAPLTVPETISTPSGFFNDCVAQN

SEQ ID NO: 189223 - protein, 187 aa, Glycine max
  Clone ID: PAT_MRT3847_141883C.1.pep
HASVKMLPAPLVGFILLLGHFVFVSVGSNFHVLKKRGYDESESYSSEEEPTYKRHGYGGRFGGKRHRYPPAHGKGHRPSTYDGFPYGDSPLLPQVIAAPPMPFSPLQLPSISKAQSDLGALQVASPVLEGSPPKESPPLDASQPLNGATAIQSPAAAPETNIMNSLAASSPLATSQQLASLWVGGRK

SEQ ID NO: 189224 - protein, 74 aa, Glycine max
  Clone ID: PAT_MRT3847_141884C.1.pep
MGQPKVDNEDGADGVGDITMCNPPDNALAISLIMGLKNRLDEAARMNDVKAIVLTGQGGRNSGGGDITVKQKVH

SEQ ID NO: 189225 - protein, 66 aa, Glycine max
  Clone ID: PAT_MRT3847_141885C.1.pep
RIVDRPEPCRDADAQREGIKASVRSPILSLPQAIKERFLFIFQPLFSILVHCSPKCILLPWMSILA

SEQ ID NO: 189226 - protein, 91 aa, Glycine max
  unsure (1)..(91): unsure at all Xaa locations
  Clone ID: PAT_MRT3847_141886C.1.pep
KESTLHLLLSLRSGRQILVKTPTGRIITLEVXSAATIVNVKATIQAKQGIPPYQHRLTFVGXHIQNGRTFGGHNIQKESTLLLVLSHRQGF

SEQ ID NO: 189227 - protein, 89 aa, Glycine max
  unsure (1)..(89): unsure at all Xaa locations
  Clone ID: PAT_MRT3847_141887C.1.pep
FFKRRVTNVDPAPKIYSATIRSPKGVEITVKPTSLIFSKTLQKMSFKKFKVVVIVKXHLLQSKKIVSSGXLIWRSPRHIIKGHIVINNP

SEQ ID NO: 189228 - protein, 77 aa, Glycine max
  Clone ID: PAT_MRT3847_141888C.1.pep
LLHPTVKGPTRTGAHHVHSTSRLDAQSVRPTQRSPHPHFPTSRYVVREIVTAPPQRSRRGKSLSPALTAPRPEHPRV

SEQ ID NO: 189229 - protein, 148 aa, Glycine max
  unsure (1)..(148): unsure at all Xaa locations
  Clone ID: PAT_MRT3847_141889C.1.pep
VDCEDGGPLGAIIACTDDIGARCHDMVISNTDPSAHAKVSVISKACGRLIQIELSDCERYAPCDPCPMCFGAVHLSQAKRLVYGAPSXAAFEIGSHVFISDALLGTLFVPMPQLXIVRADGKLAFIPLGVFQSSNANLPPNHLFLNAS

SEQ ID NO: 189230 - protein, 52 aa, Glycine max
  Clone ID: PAT_MRT3847_141890C.1.pep
INCITQNKNKKLHHDRKLKANNYPSNCCGSKFKHDGSLHGGNAPSCDKFFKQ

SEQ ID NO: 189231 - protein, 48 aa, Glycine max
  unsure (1)..(48): unsure at all Xaa locations
  Clone ID: PAT_MRT3847_141891C.1.pep
GKIKSLEIEFVNSPXNPNPLFXNRLNHSMHSVQXGLTIEARGTRLFPN

SEQ ID NO: 189232 - protein, 137 aa, Glycine max
  Clone ID: PAT_MRT3847_141892C.1.pep
MNGGAEASLNHRRKHQTAPADGAKGVKVANGAMGKPSSSKHSCGASFMKWTVADAVHVVTHHWMPCLFALGLLFFMAVEYTLLMVPPSSPPFDLGFIATRSLHALLESSPNLNTLFAGLNTVFVGMQTSYILWTWLI

SEQ ID NO: 189233 - protein, 51 aa, Glycine max
  Clone ID: PAT_MRT3847_141893C.1.pep
FLYGITAQVILYRGITKTIPHRPDGPFQSWYLFQQPFLGNFFGHHRLLSLF

SEQ ID NO: 189234 - protein, 90 aa, Glycine max
  Clone ID: PAT_MRT3847_141894C.1.pep
MAGGGCGDRPSWTEVESPLPIITLSPRAGSMESLFNGGFSPGPMTLLSSFWGDGDDGKFFSHLLGGAMTSFEGGDVADALMDFPGLFLFF

SEQ ID NO: 189235 - protein, 168 aa, Glycine max
  unsure (1)..(168): unsure at all Xaa locations
  Clone ID: PAT_MRT3847_141895C.1.pep
KKKKKKKKKKKKKKKKKKKKKKKKKKKKKRGGPFKRTKFNSPFFASKNFFLRAPKLKSLARFLKPLNWKNPWFPQINPLAKKPPFPNWGKNKKAPTNTPFKKFATLNCKRKPPFYGPLNPGGGGVTPKGTLXFSNPLSPPFFPFFPFFFAQFPGFSPKNLKWGPPLRF

SEQ ID NO: 189236 - protein, 48 aa, Glycine max
  Clone ID: PAT_MRT3847_141896C.1.pep
ACLAHRANFFGAEHVGIPALTSNLYETSPPCLEACEVIGFLRSSIIDV

SEQ ID NO: 189237 - protein, 115 aa, Glycine max
  Clone ID: PAT_MRT3847_141897C.1.pep
TNPTVQLIYIARGSGKIEIVDFSGKSVLNTQVEAGHLLVVPQFFVLAEIAGEEGIESYSIVITTKPLFEELAGRRSIWNAFSPTLQQVSLNVDSDFQKFFISKIKESTNLIPPTV

SEQ ID NO: 189238 - protein, 116 aa, Glycine max
  unsure (1)..(116): unsure at all Xaa locations
  Clone ID: PAT_MRT3847_141899C.1.pep
MVYVKAQMRRGTSCGGSAKSVKNLPIPXDTSKYFVNLAVISAHYDSKTRSMREDPLPDPDPDDMMYXGDNQYINIELAVDIMELNIHALNAFHMGQDVHMQASPSHAELLYKNFKG

SEQ ID NO: 189239 - protein, 87 aa, Glycine max
  Clone ID: PAT_MRT3847_14189C.1.pep
STSQLISAIGLIWDSASRPLSVLLSKETVNQDDKGFQKEKILDSVDERQNDLVYASTDIKYYPVTEGGAQIVQGKLDFPKVMQKISV

SEQ ID NO: 189240 - protein, 199 aa, Glycine max
  Clone ID: PAT_MRT3847_1418C.1.pep
MEVEVKLRLADANAHRHVTTLLSPFHVITHRQQNLFFDGAASELSARRAVLRLRFYGDDERCVASLKARAVLVDGVSRVEEDEEDLDPSIGRECVAEPAKLGSVESRVLKRVQEEFGTEKGLVGLGGFGNLRSVYDWKGLKLEVDETSFDFGTLYEIECESSDPERAKRLLEEFLKENEINYSYSTASKFAIFRSGKLP

SEQ ID NO: 189241 - protein, 45 aa, Glycine max
  unsure (1)..(45): unsure at all Xaa locations
  Clone ID: PAT_MRT3847_141900C.1.pep
FRVXFKEHKXSFFGXLVFXVLXAXVDXLXKRNFLCVMGTLXAGSX

SEQ ID NO: 189242 - protein, 306 aa, Glycine max
  Clone ID: PAT_MRT3847_141901C.1.pep
MRSKTTQFTCTFKVALLSLAVFCLFILVFRSSIFSLSPQLTSQTNMSSSDTIVPVSPQETENAGTPSSSSCPNSPPLNPPCTKAPPSLANAIIHYATANVTPQQTLHEISVSARVLEKKSPCNFLVFGLGHDSLMWTSLNYGGRTVFLEEDKSWIDQIQEKVPSLESYHVMYDTQVHQAEELMKTGMKEDCQKVTDPRFSRCPLAHKGLPSEVYDIDWDVIMVDAPTGYFDEAPGRMSAIYTAGLIARNKERGQTDVFVHDVDRKVEDMFSKAFLCEGYFKEQEGRIRHFNIPSHRSRLWRPFCPE

SEQ ID NO: 189243 - protein, 62 aa, Glycine max
  Clone ID: PAT_MRT3847_141902C.1.pep
EGGGRARLGWPAVAFKDPLEQLSWLDGVPRTLTGFHNLISTNKFFRVLKFDRIAGVRKQKNP

SEQ ID NO: 189244 - protein, 117 aa, Glycine max
  Clone ID: PAT_MRT3847_141903C.1.pep
MYMPVATSAIQRGGLPTDSGDSVEALDQVPRWNDADQVLGFETSFSSSHFPDPLASPSRADSGDGSESVSKFPVDDEVNSKIYLWRGNPWNLEVDAVVNSTNEDGQLLNGAYTFYED

SEQ ID NO: 189245 - protein, 61 aa, Glycine max
  Clone ID: PAT_MRT3847_141904C.1.pep
RFFITRLKLTNDSTLLMCRDTTPCVKFRLVLEDITLQGLWRRAHGLFLNLGRSWMAAVEGA

SEQ ID NO: 189246 - protein, 55 aa, Glycine max
  Clone ID: PAT_MRT3847_141905C.1.pep
NVISADASADALLDKMVIYMVLYAILIAIIITIVIQIDSMNHRTICSTVFSLALI

SEQ ID NO: 189247 - protein, 91 aa, Glycine max
  Clone ID: PAT_MRT3847_141906C.1.pep
LIRATLMVLIFLSCGANLRTPSLSSLLLVLLLVRNLDLDLYYLRIYARIGGRSLECMRGSRRPLVLLMRMRRPSLKMRRRLKLVRRVVILL

SEQ ID NO: 189248 - protein, 78 aa, Glycine max
  Clone ID: PAT_MRT3847_141907C.1.pep
AYVAVGPSETVYFAVLAAHGASRIAEWITCALVLAQMPPALIRQPRHRGAKTTINPHTTRRPTLRCTLGDRTLDSSIE

SEQ ID NO: 189249 - protein, 567 aa, Glycine max
  Clone ID: PAT_MRT3847_141908C.1.pep
MATVPHPLSLASVGFANRTSSISRSTLKCCAQSPSPSLVDNAQKFLEASKKGNVIPLFRCIFSDHLTPVLAYRCLVKEDERDAPSFLFESVEPGQISSIGRYSVVGAQPCMEIVAKENVVTIMDHVEGRRSEEIVEDPLVIPRRIMEKWTPQLLDELPEAFCGGWVGYFSYDTMRYVEKKKLPFSNAPVDDRNLPDVHLGLYDSVIVFDHVEKKAYVIHWVRVDRYSSAEEAFKDGRNRLETLVSRVHDIITPRLATGSIKLYTRLFGPKLEMSNMRNEEYKRAVLKAKEHIRAGDIFQIVLSQRFEQRTFADPFEIYRALRIVNPSPYMTYLQARGSILVASSPEILTRVKKRKITNRPLAGTVRRGKTPKEDIMLEKQLLNDEKQCAEHVMLVDLGRNDVGKVSKPGSVQVEKLMNIERYSHVMHISSTVTGELLDHLTSWDALRAALPVGTVSGAPKVKAMQLIDELEVARRGPYSGGFGGISFNGDMDIALALRTIVFPTNARYDTMYSYKDKNKRREWVAHLQAGAGIVADSDPADEQRECENKAAALARAIDLAESSFVDK

SEQ ID NO: 189250 - protein, 136 aa, Glycine max
  Clone ID: PAT_MRT3847_141909C.1.pep
MMVTRRRTRVLVSGESAKNVRATYHLYNPEQIGWNLVTASAYCAAWDANKPLAWRKKYAWTAFCGPVGPRGRESCGKCLRVTNTGTGTEATVRIVDQCANGGLDLDVNVFRQLDTNGVGNQQGHLTLNYRFVNCAD

SEQ ID NO: 189251 - protein, 28 aa, Glycine max
  Clone ID: PAT_MRT3847_14190C.1.pep
PYKHVLLPSKLVESRRMVSFVLKLHSAH

SEQ ID NO: 189252 - protein, 52 aa, Glycine max
  unsure (1)..(52): unsure at all Xaa locations
  Clone ID: PAT_MRT3847_141910C.1.pep
CLXWRTMISGDSQXVRHFRXVLVXVTXRDREXTTXSSVIXTRXXXXILMXWY

SEQ ID NO: 189253 - protein, 63 aa, Glycine max
  Clone ID: PAT_MRT3847_141911C.1.pep
PPPKSFCKTPPYGLDRFTSVFPPPPRFCFRQEIWIWFWYMQNNYIPAALFFIFSSLIFMVQCV

SEQ ID NO: 189254 - protein, 44 aa, Glycine max
  Clone ID: PAT_MRT3847_141912C.1.pep
YGCEYDRRGQTTPSTFLTLGIHIDRVFMIHQTLGLGLGLDLWTC

SEQ ID NO: 189255 - protein, 78 aa, Glycine max
  Clone ID: PAT_MRT3847_141913C.1.pep
GFSSSVWVPQNFRNEREISTKNPNFWDFHFQGFIYLKIFLSGFCLFEIFTFRGFANLFEYTLKDCRTCPCGSWWRYWE

SEQ ID NO: 189256 - protein, 45 aa, Glycine max
  Clone ID: PAT_MRT3847_141914C.1.pep
DSLVVDMDGPAVPSGVELDSVEGALFVSVNDPVIGGSLQAQLKDS

SEQ ID NO: 189257 - protein, 156 aa, Glycine max
  Clone ID: PAT_MRT3847_141915C.1.pep
MAVLLPPTFSPLLLNTKTDFGSPPFPLLTLSSSSPTSSPLFVSYTKSGNGLASEDKKILLEKYGYDIDADEYFSQSSSKSKRRKEQPRRRGGKQVQDPPEDPKPPRVTHKLLQVLGGTARRVKLLSPKGMDVRPMMEVVKGAAFDILQAAGGCPAA

SEQ ID NO: 189258 - protein, 81 aa, Glycine max
  Clone ID: PAT_MRT3847_141916C.1.pep
MKSQKRVLGCCGLVDCAVCLENFKVGDVCRLLPNCSHSFHVQCIDSWILQTPVCPICRTWVHSPVVREQSVVSESLEIVTE

SEQ ID NO: 189259 - protein, 66 aa, Glycine max
  unsure (1)..(66): unsure at all Xaa locations
  Clone ID: PAT_MRT3847_141917C.1.pep
TPIHNTFHVVWTLLTFLLPNIFNSIHNFKDWFNAPFXHLLYLSLTDEQQQLIIPQLHHLSCAFFLH

SEQ ID NO: 189260 - protein, 85 aa, Glycine max
  unsure (1)..(85): unsure at all Xaa locations
  Clone ID: PAT_MRT3847_141918C.1.pep
STKDAAQFNASDMSLXTLKRGELFMNYSKVYRSTNVIDRLYEYQXKXICFLYFLPPRVDRVRTFIKYASVIFAQVGCYVLAHFSI

SEQ ID NO: 189261 - protein, 192 aa, Glycine max
  Clone ID: PAT_MRT3847_141919C.1.pep
MTSSKRPNAGPNGRGKRRRSSGGFSSLGVSPGSVVFRLLCHASRIGGVIGKGGSIISQIRQETGVKLRIEEAVPGCDERVITISGSEKETEEDNTEQGKEVNDNDDGGSEGKDREEKDDGDGNEDKREKDAVPVEDSKSEKGNSAIWKAISLVFERMVEGVEETTEGDEESNKPSSFFLRLLILTAQVGCVL

SEQ ID NO: 189262 - protein, 72 aa, Glycine max
  unsure (1)..(72): unsure at all Xaa locations
  Clone ID: PAT_MRT3847_14191C.1.pep
MXGKLEXLXXGXDXGXTXSXVGLXXXDRXEIXAXXXGXRXXPXYXGFXDXELXXGXAAKXQXAMNXINXVFY

SEQ ID NO: 189263 - protein, 104 aa, Glycine max
  unsure (1)..(104): unsure at all Xaa locations
  Clone ID: PAT_MRT3847_141920C.1.pep
ALHVLDYATTTFDDDTENEEEELVHEQNESFGGGRWFSAACGGSTRRSRGSALGLILYPRAKWVQEWNKGFLLVCAKGVVADPLFFXALSLNDSSLCVFGDRWV

SEQ ID NO: 189264 - protein, 85 aa, Glycine max
  Clone ID: PAT_MRT3847_141921C.1.pep
LSSEICFFPASSPNHSDKHQNAIAFQTIIPFSPYRFPYFNSSQYCYRLWFSFATPESCDAFALANERSWHSRNPSNSVSNRNSKP

SEQ ID NO: 189265 - protein, 126 aa, Glycine max
  Clone ID: PAT_MRT3847_141922C.1.pep
MYWVYGMLNNVLSHLCRLTVVFLAFDVFFIIFCIGMACIVFFALFCIIPIIALAYAMRIREGASEEDILSLPMYRFSQSNSLVMVDDNKKQLIKGRVDSCNGSHMSALSLHPDDSVSADCVLISPM

SEQ ID NO: 189266 - protein, 109 aa, Glycine max
  Clone ID: PAT_MRT3847_141923C.1.pep
LCCALSSFHCASFNSLLHKMGYVSQHLPPTFSPLHFSVFTFSIYTLLHHHVVFDITEFSLVFSCLALSLCPFVCLYFFQLFISLFSALQVWNETNLVLSPSLGFSFPSS

SEQ ID NO: 189267 - protein, 74 aa, Glycine max
  unsure (1)..(74): unsure at all Xaa locations
  Clone ID: PAT_MRT3847_141924C.1.pep
RTAARRRQKGDVSMGMWVEQFNISRPVEYVHSFKFCQFVCIVDYFTXYFQPSKQMTCMWDKLQQKVQPLFCIMK

SEQ ID NO: 189268 - protein, 104 aa, Glycine max
  unsure (1)..(104): unsure at all Xaa locations
  Clone ID: PAT_MRT3847_141925C.1.pep
APQVFVRGGVEGYLICGGPPGQVPEPFCPGGRFAPLGLAYDPKGFAELKVKGLRTGRLAMFYRIGFFVRALVTGKGPLENPAVSLADPVNNKAWGXAPNLVPGK

SEQ ID NO: 189269 - protein, 83 aa, Glycine max
  Clone ID: PAT_MRT3847_141926C.1.pep
MFYFNHVKYYFCFRALLFNVDNICLSQSLMWCSEIKERIKKSKDEKKAKKAEVPAKSQKAGGKGISKGAMPKGPKLGGGGGKR

SEQ ID NO: 189270 - protein, 278 aa, Glycine max
  Clone ID: PAT_MRT3847_141927C.1.pep
MSGAGFRASIPSSVRRTIQNIKEITGNHSEEDVYAMLKECSMDPNETTQKLLLQDTFHEVKRKKDRRKENLNNRESVEPRWRPGTLGRGARGGRGNFSPHNASHDAAGSKNSGTGKDNGTPQATEKVVPPLSASQGKISKEKSSGTSSVPINANGPTSVTSGTTSGTSPSPSSAGTGDRLGPSSCDINNLNSALPSDSSNKVATVASGSGSMLSSSNHPASGPASSSAAHFSSSDPVLVPSDDLWFPGAVGAVGAIRCEVGNLHPPGELRAVSSAETN

SEQ ID NO: 189271 - protein, 341 aa, Glycine max
  Clone ID: PAT_MRT3847_141928C.1.pep
MSPSSLCSLQTFPPISHALLNRHHKPAHDSTAGVRRRTPYVVCAEKGSRASTRSADDYHATLKALNSKGRFPRKSLGQHYMLNADINDQLAGAAGVEQGDVVLEIGPGTGSLTNVLLNSGAFVLAVEKDKHMAALVSERFSSTGKLKVLTEDIVKCHVRSHMSSLVGSINPESRKAKVVANIPFNISTDVIKLLLPMGDIFSEVVLLLQEETAVRLVVSSLRTPEYRPVNVFVNFYSDPEYKLKVPRSNFFPQPNVDAAVVSFKLKLPSEYPQVSSTKSFFSMVNSAFNEKRKMLRKSLQHICTSLEIEEALTSIGLLATSRPEELTLDDFVKLHNLIAKE

SEQ ID NO: 189272 - protein, 132 aa, Glycine max
  unsure (1)..(132): unsure at all Xaa locations
  Clone ID: PAT_MRT3847_141929C.1.pep
GXXXXXVXIXXCXFXSIXXXXLXXYXIXVXWXXVXXXXXXXLLXXWVXXXXXRXILFXVXGXXXXXXWGXXXFLGXXGXGXXXXXXGVXXXXXXKXXXXKXFFXXXGKGXFFXXXGFXXXGFWFLXXFXFGX

SEQ ID NO: 189273 - protein, 83 aa, Glycine max
  unsure (1)..(83): unsure at all Xaa locations
  Clone ID: PAT_MRT3847_14192C.1.pep
SREGRRAQSRRRRRIRQIGLGSTPEAVPTHRGGSSRLWYWVKLVLCFLCLGLLALVAFEWVAPLFIEXVIIPIIKWETNTFSS

SEQ ID NO: 189274 - protein, 85 aa, Glycine max
  Clone ID: PAT_MRT3847_141930C.1.pep
EEEGFEEGENESVGNHLMAFVFPPQNRTEPNRTKPKQSNKPSHFITMWFAETTTTTSSFSERNANCLPTQPSFWKRFALFRGSRN

SEQ ID NO: 189275 - protein, 65 aa, Glycine max
  Clone ID: PAT_MRT3847_141931C.1.pep
HEVVPRAAVLQFLLSKGLVKDVNWASAFLVSDKIFLQKFVVSFEKEADRLLKLYEEKMMFLDNTH

SEQ ID NO: 189276 - protein, 78 aa, Glycine max
  Clone ID: PAT_MRT3847_141932C.1.pep
AASYTVLICMGDFPTRTTMLDATCFARLCGTVHCMEVWPPAVKMKAAIVSYLPYLEHSYLCDEVEYLLMSVLIPSLAY

SEQ ID NO: 189277 - protein, 209 aa, Glycine max
  Clone ID: PAT_MRT3847_141933C.1.pep
TSSTTMGDSNRISVHRVLGEGLVADVVLWKNWRGAVAVLVSATTLWYLFERAGYNFLSFVANVVLLLVAILFFWAKAANLLNRPLPPLPDLEISEETIARVADALQIWLNRALSVAHDIAIERNLLLCLQVVGVLWVISYIGSLFNFLTLIYIGVLLSLSLPVLYDKYQDQVDGRLGVIHGIIQTQYKKVHSIVLSKIPKLSNKEKKVQ

SEQ ID NO: 189278 - protein, 144 aa, Glycine max
  Clone ID: PAT_MRT3847_141934C.1.pep
SIIKWPAPPSKTFKFLNFKTPPLSPGIINPETFIKSLIPKTGEGKDPFPMLLKSIQFFFTLCSEPFSFFYCLFNPINLGITLTLGFPVTISLKFKSLFYNITHKWIQYPNRFPIPPKALYLIIFSPRQESSTPWKRPPHFTKLF

SEQ ID NO: 189279 - protein, 101 aa, Glycine max
  Clone ID: PAT_MRT3847_141935C.1.pep
RYPIHVDYVGHPRVGGACGLVSEQARNARPFQPLRTLSGDWHSPCIASLRALCVLVTRRETVALAIPLAPTDLAVFPSFLATFAAFARPALDRCLPVGPLF

SEQ ID NO: 189280 - protein, 57 aa, Glycine max
  Clone ID: PAT_MRT3847_141936C.1.pep
NVAIHLPSFCELSFFPTNSYPRLFLNPKNQKECINQVGRWEGELWRRELKWRRSWFQ

SEQ ID NO: 189281 - protein, 71 aa, Glycine max
  Clone ID: PAT_MRT3847_141937C.1.pep
TRVRPLILIQPNSNAYHLLPLINWAIALPPNNYLLFYHHSNLFDHSIILTLNAYQSCFPLPYHPFHFYILL

SEQ ID NO: 189282 - protein, 59 aa, Glycine max
  Clone ID: PAT_MRT3847_141938C.1.pep
RPTSLGSRKKNRLPSNKKKTNYTYNIGVTPVTFKFNKLTFFGRTTHLPCVHYSYASATI

SEQ ID NO: 189283 - protein, 60 aa, Glycine max
  Clone ID: PAT_MRT3847_141939C.1.pep
HVGAYKLAILLKRRMAFYVRLIKEQYRTSLLGIFTHGMSKGTFFTLKQSNIVCIKTVNMK

SEQ ID NO: 189284 - protein, 47 aa, Glycine max
  Clone ID: PAT_MRT3847_14193C.1.pep
NLKFYFISWTHGRHQHGLMVGLWAVASCKLKFFYMERYVDIIYLTRE

SEQ ID NO: 189285 - protein, 56 aa, Glycine max
  Clone ID: PAT_MRT3847_141940C.1.pep
PLVWGPAPRQWLLLTKNRVFPFLFNKPKLFQIKMSTPLVSQDLPFPNQWLVFGGNQ

SEQ ID NO: 189286 - protein, 74 aa, Glycine max
  Clone ID: PAT_MRT3847_141942C.1.pep
RGRGSPKKTFLGFFPMPRPRAPPIKAGVEFDPGIVPPDYPPLPLFGPPGGYPHGGFFPVFKPGAPFGAPFFFYF

SEQ ID NO: 189287 - protein, 69 aa, Glycine max
  Clone ID: PAT_MRT3847_141943C.1.pep
DCTLNAFWPQARQPYFPEIIYYINSLDVDEDFALFEVFMDWNFSSLNCARIFSNFQPLLFERKGIEEGG

SEQ ID NO: 189288 - protein, 541 aa, Glycine max
  Clone ID: PAT_MRT3847_141944C.1.pep
MLSCRVCSMIPAPAFRIYYIPLITAFVALITFDFISAYMESFASFPCVMLNPPSAERNEGTCVRRERDGLLTRYMKEVHAPFLGLCGVKILVIAVFAAFTLASIALCTRIEPGLEQQIALPRDSYLQGYFSNISEYLRVGPPLYFVVKDYNYSLESKHTNQLCSISHCDSNSLLNEISRASLVPTSSYIAKPAASWLDDFLVWISPEAFSCCRKFTNDSYCPPDDQPPCCLPDEGPCGLGGVCKDCTTCFRHSDLVNDRPSTAQFREKLPWFLDALPSADCAKGGHGAYTNSVDLNGYEGGVIQASEFRTYHTPVNRQGDYVNAIRAARDFSARISSSLKMDIFPYSVFYIFFEQYLDIWKLALINISIALGAIFVVCLIITSSVWSSVIILLVLIMIILDLMGVMAILGIQLNAVSVVNLIMSIGIAVEFCVHIVHAFTVSLGDRSQRAKTALCTMGASVFSGITLTKLVGVLVLCFSTSQIFVVYYFQMYLALVLIGFLHGLVFLPVVLSLFGPPLRYTVIKEQLEDMPSASSEQPLIR

SEQ ID NO: 189289 - protein, 68 aa, Glycine max
  Clone ID: PAT_MRT3847_141945C.1.pep
LVLCFSTSQIFVVHYFQMYLALVLIGFLHGLVFLPVVLSLFGPPLRYTVIKEQLEDMPSASSEQPLIR

SEQ ID NO: 189290 - protein, 83 aa, Glycine max
  unsure (1)..(83): unsure at all Xaa locations
  Clone ID: PAT_MRT3847_141946C.1.pep
MCTVSPRLGSWASSGTKCIPEVDTIXPEEQLKSIGNVLEEEPKEGLQVPTIDLRAIDSEDEAVRVKCREKLKKAAEAWGVMHV

SEQ ID NO: 189291 - protein, 88 aa, Glycine max
  Clone ID: PAT_MRT3847_141947C.1.pep
GDYVNAIRAARDFSARISSSLKMDIFPYSVFYIFFEQYLDIWKLALINISIALGAIFVVCLIITSSVWSSVIILLVLIMIILDLMGVM

SEQ ID NO: 189292 - protein, 415 aa, Glycine max
  Clone ID: PAT_MRT3847_141948C.1.pep
ILCGLVSLALSRCTSYMFTIVDNLHKATGIPRSSFPIQGGLSVGLIALIYPEILYWGFENVDILLESRPFVKGLSTDLLLQLIAVKIVATSLCRASGLVGGYYAPSLFIGGATGMAYGKLISLAVAESNPTINLSVLEVASPQAYGLFLLQVGMAATLAGVCQVPLTAVLLLFELTQDYRIVLPLLGAVGLSSWISSVQTKRGDDGGAKKIELENSNSPLLPETSSRSSIESSAGNTFAEDVSYLSDLCQVESSLCVEDDNVETTYFVRRTFVSEAMKTRYVAVSMCTPLIEVIDLMLAEKQSCAVIVDTDDTLIGFLTLRDIQEYGKFAKARSTKHKELLVSEFCLLNGEICSVPWTATPDMELHYAQMIMKERRFNHVPVVRNIYERTYPVGIIDPESISLTCSALATRQSLS

SEQ ID NO: 189293 - protein, 55 aa, Glycine max
  Clone ID: PAT_MRT3847_141949C.1.pep
FKRCLQTLLISRAVKLRHVQATCSCNPEALLLRSKGHIMLSSSSIQYCPATDNHY

SEQ ID NO: 189294 - protein, 107 aa, Glycine max
  Clone ID: PAT_MRT3847_14194C.1.pep
FIEVAYPHCATCFGRCYPGGATLVMDAKNVYDGISRLLETSSSRELPKPVNNEESKSVAENGELPKMENGETPDAKESEAVIGKDVNEEGPTLQIDQEDTNLEKSVE

SEQ ID NO: 189295 - protein, 71 aa, Glycine max
  Clone ID: PAT_MRT3847_141950C.1.pep
MNIDEDIHSLQLDSAHPTQDVEAEPKAVQADPKVKPKVNPSVQHSEQVPENIPEHFNVVFNGQVNARNSTT

SEQ ID NO: 189296 - protein, 130 aa, Glycine max
  Clone ID: PAT_MRT3847_141951C.1.pep
MVRISVLNDALRSISNAEKRGFRQVRVHPSSKVIVKFLEVMLRHGYIGEFEVVDDHRGGKIVVNLIGRINKTGVISPRFDIQLSDLEKWINNLLPSRQFGYLILTTSYGIIDHEEARQKKTGGKILGYVY

SEQ ID NO: 189297 - protein, 38 aa, Glycine max
  Clone ID: PAT_MRT3847_141952C.1.pep
NREYIYLNSDKYIYIPRDAKLACFPVNSYMHVACLLFS

SEQ ID NO: 189298 - protein, 59 aa, Glycine max
  Clone ID: PAT_MRT3847_141953C.1.pep
QAPPPPYEPVKVEAPPVQPPADLLNLEDANSCAADSEAKTALALAIAPVAVEQQPSAVL

SEQ ID NO: 189299 - protein, 189 aa, Glycine max
  Clone ID: PAT_MRT3847_141954C.1.pep
MLVTWFLQRPHSIPFVLAFFLFLAWISLALQRASYSYAPPHSSHTDIRANLVRFDASEVAKDKRGWIFDPIALALASGISGGAVTCASLHVGEIRAGNKRANHRHHHCNETFLIWGAATKYRLENNDEDNGYAEVMLGRDEIVVAASPVHKAHALVNIDSIRSIFFIGCQDNVISYNASSTDFNVWKDL

SEQ ID NO: 189300 - protein, 118 aa, Glycine max
  Clone ID: PAT_MRT3847_141955C.1.pep
GGAPHYDPLPPVFFFTPVPLRLPIFPFWGSFKALGNSAQRRSRGGNCFPSIFPQNNEPRFLNLKPGGPFGWATPLLNRWEHFPLFKGERRSAPFFYRKGPPPGGGGFFFGPPGVFFFP

SEQ ID NO: 189301 - protein, 230 aa, Glycine max
  Clone ID: PAT_MRT3847_141956C.1.pep
MRVERERNSNTVMPAAAAAAGGRRIGYINAQTASLQQHQIRGSSVVTWFLQRPHSIPLVLAVFLFLAWLSLRLQRVAYAPPHSFQTDIRANLARFDSSEVAKDNRGWIFDPIALARASGISGGAVSCASLHVGEIRPGKIRANHRHHDSNETFLIWGAATKFRMENNDEDDGYAEVILGRDEIAVAASPVHKAHALVNIDSIRSIFFIGCQDNVVSYNASSTDFNVWKDL

SEQ ID NO: 189302 - protein, 97 aa, Glycine max
  Clone ID: PAT_MRT3847_141957C.1.pep
YRFFLLLNSSTVLVVLVWIGYSSKFIEYFMQNRKIKKYTKGLVFYFVAFLCGRIHLVSLEIIELYSEGHSSHIEWRVQRREISAPENGKLEGLEVLQ

SEQ ID NO: 189303 - protein, 116 aa, Glycine max
  unsure (1)..(116): unsure at all Xaa locations
  Clone ID: PAT_MRT3847_141958C.1.pep
MEAPPKGAAIRRGDRNKSGSKYINAGVQFHLCRVVSYXKKGRLCCRLGTGATIYLPAVLEYVVAEKQKLAGNAARDNQKNKINPLHMLLAERNDHELWKLLLGVTIDSGGMKPNIN

SEQ ID NO: 189304 - protein, 305 aa, Glycine max
  Clone ID: PAT_MRT3847_141959C.1.pep
MAEEEEESELSDKQKVEIAKWFLLNSPPGEIQYVAKDVKSILNNDDLYKEAASEAFPYYNKSHLISIPMPNRSGDVLVTSFGELEGNAFLEPRTAQVAIVDHAKQVCTEVRPATDEELSSPYIEEFRCNLDAETLKYVEETYPKGFCSVYCVSGKDVEGPGADFELAVVISAARHSPQNFCNGSWCSIWNIEFKDEQQTVEVKGKMQVGAHYFEEGNVQLDAKHECKDATLFQAPEDCALAITSIIRHHETEYLASLEASYLNLPDSTFKDLRRKLPVTRTLFPWHNTLQFSLTRDISKELGIGK

SEQ ID NO: 189305 - protein, 86 aa, Glycine max
  unsure (1)..(86): unsure at all Xaa locations
  Clone ID: PAT_MRT3847_14195C.1.pep
SDTRNLSNGEVSRPRNKIQVXTMNTVLMLHLLGCVVVFPHVKWYLPSRAVTSCTLDYFGSHKGGVGSNLEGAGNNSLLHVAACVWE

SEQ ID NO: 189306 - protein, 101 aa, Glycine max
  Clone ID: PAT_MRT3847_141960C.1.pep
QHLIKKPEIWQLCQEFEGFLVEIKLQVRQLPYILFGQTVHENVPLPVMSTSMDIMSMNKRTKNTITRERLNSVYCIEVNDERSNRSTACIMKRHSHTSLDL

SEQ ID NO: 189307 - protein, 131 aa, Glycine max
  Clone ID: PAT_MRT3847_141961C.1.pep
MAEEEEEEESELSDKQKVEIAKWFLLNSPPGEIQYVAKDVKSILNNDDLYKEAASEAFLFYNKSHLISLPMSNRSGDVLVTSFGELEGNAFLEPRTARVAIVDHCSMSQVCTWVRPATDEELSSPYIEEFR

SEQ ID NO: 189308 - protein, 49 aa, Glycine max
  unsure (1)..(49): unsure at all Xaa locations
  Clone ID: PAT_MRT3847_141962C.1.pep
FIGMGLFVDQTIKNISNKEEGIQTKHCYSKLMGIKKRQNTAVLVGVFXS

SEQ ID NO: 189309 - protein, 565 aa, Glycine max
  Clone ID: PAT_MRT3847_141963C.1.pep
MSERDIAWDFHLRKLSASGRDSNTANDPASDSSLLPSVKKLHEICKNEYSEDLVARVYPSINKIFQRAVASLSQSRTSNGLLLLEILQFYLDFGEVVLHDADPSLRTFFRLCLSREFADPVVAEATLEFLIINKKKLLTSFPNLLPQFFPLLLKLVAWNGERLEKLFLKAFPGLMSPGSFISLFPSLVDLPILVVALEKVEKSSGPLIGSSIASIQKNTAPKMLLALMDEAYTGSTIEDGGGDSESEDNSAIDVADPFFLELLKDENDGIAERPWSSPVMAAILQASVNSPYSDRLKAVLNMAPHLLDVYFSIALHTVNNSLICALIPLLMSRFATIFPDKIFSYEVRKRLLEFMLSTFQCSPNFIALLKKPIMDRLGEAYDSPEKTELALQLCWAIGEHGGGGGSHKDEARELFESLELLLYENLSSSRVGMTQEVSDEDTYRRSSQSRLLCFVVTAIAKLATYHRELLPRARVSLGKVARSRISDPRVWRRACDFLGLMKDPAICASILGPSRPAQGTTQKVGSINWSEGSTKMIAHIPFYILGEQEGPPFHDFSFSDIIPSI

SEQ ID NO: 189310 - protein, 60 aa, Glycine max
  Clone ID: PAT_MRT3847_141964C.1.pep
GPIDTRVTDFTPPLEESREGFLLKSTAVASIGWGLTTGYCLIYTFKKGPPLYRKRTFFTC

SEQ ID NO: 189311 - protein, 161 aa, Glycine max
  Clone ID: PAT_MRT3847_141965C.1.pep
IRLEGKDTESDVLTNFDKDLGIRFSSALNYIVRVGYILHLILVFPVIHFSLRQTVDALVFEGSPPLSESRKRSLGLTVVLLVLIYIGSTMIPSIWTAFKFTGATTAVSLGFIFPSLVALRLSHQGDLSYGEWILSWLMLVLAVTVSIVGVVGNIYSLESKS

SEQ ID NO: 189312 - protein, 87 aa, Glycine max
  unsure (1)..(87): unsure at all Xaa locations
  Clone ID: PAT_MRT3847_141966C.1.pep
LSDSPYPVCSPLLFLIPCFLIFSFFPHNTSPPPXPPLFPPLIFFLGGGDNVFLFWXILNPLKVWGPGXMDRMDFERKAMVWXLFDYE

SEQ ID NO: 189313 - protein, 354 aa, Glycine max
  Clone ID: PAT_MRT3847_141967C.1.pep
MRLFSFPHYKSFWRSSIAFAFFLTFLTLQTQSTPIPCNKDPYKELNLIPNKNGTVTRPNKPPESPPAPDPNLNTLVLSKDISINQSKGTWARVYLPRVALDHSSKLPLLVFYHGGGFIFLGAASTIFHNFCFNMANDVVAVIASIEYRLAPEHRLPAAYEDAVEALQWIKTNKDDWLTNYVDYSNVFLMGSSAGGNIAYNAGLRAATVDGTYNQIPKIKGLILVQPFFSGTQRTGSELRLENEPHLALCVNDALWELSLPVGVDRDHEYCNPTAGNGPKRLEMIKRRGWWVLVTGCGGDPLVDRQVQLVRLMQRKGVRVLGHFTPGDYHGVQDSDPLKARELYGVIKTFISALN

SEQ ID NO: 189314 - protein, 42 aa, Glycine max
  Clone ID: PAT_MRT3847_141968C.1.pep
FLDLIRSYRLQGCIMNESKFNIGDRIGEVCSRIKVYVSFEDA

SEQ ID NO: 189315 - protein, 53 aa, Glycine max
  Clone ID: PAT_MRT3847_141969C.1.pep
FNKKLFSTSNENLNIFANSVENFKSNALYYYEFPKKKCLTLTEKCISTPGFSN

SEQ ID NO: 189316 - protein, 249 aa, Glycine max
  unsure (1)..(249): unsure at all Xaa locations
  Clone ID: PAT_MRT3847_14196C.1.pep
LDNILLENLGNTRTLQAVFELEALVLTGHFSEKDHDPPRGLQLILGTKTTPHLVDTLVMDNLGYWQMKVSPGVWYLQLAPGRSSELYILKEDSEGNYDKKSSKLITINDFRGKVFHMEVVKKKGKEHEKLLLLDDNAQDNKKGSGLNCNFLKWASGFIGGNKXCKKAGKSPQEKGKGGRHGKTINIFAIAGGRLCERCVKIVMVRGVKNAGGGWGVVGGGGTAVGAAVEGLGGARGAWGVGGGCGAGGR

SEQ ID NO: 189317 - protein, 44 aa, Glycine max
  unsure (1)..(44): unsure at all Xaa locations
  Clone ID: PAT_MRT3847_141970C.1.pep
IXAQEGIVTFRGLHKLPLPPSSAALPCSQSQQVSRPARVFHYQP

SEQ ID NO: 189318 - protein, 40 aa, Glycine max
  unsure (1)..(40): unsure at all Xaa locations
  Clone ID: PAT_MRT3847_141971C.1.pep
CGESDNPSPSIITSTNDANDXDPTVGDSSNNLDVSEKYKH

SEQ ID NO: 189319 - protein, 47 aa, Glycine max
  Clone ID: PAT_MRT3847_141972C.1.pep
GSLPACYSLSLTLIRLWGEFPLIGICAIPKRARSMRSLSWSQLQEFP

SEQ ID NO: 189320 - protein, 34 aa, Glycine max
  Clone ID: PAT_MRT3847_141973C.1.pep
IKISLSFWLLKLGELSPSSFLIPLFYVVNIFTSL

SEQ ID NO: 189321 - protein, 258 aa, Glycine max
  Clone ID: PAT_MRT3847_141974C.1.pep
MGNGSDVAVKILMEQDFLAERFKEFLREVAIMKRLRHPNIVLFMGAVTQPPNLSIVTEYLSRLGSLYRLLHRSGAKEVLDERRRLGMAYDVAKGMNYLHKRNPPIVHRDLKSPNLLVDKKYTVKVCDFGLSRLKANTFLSSKSAAGTPEWMAPEVLRDEPSNEKSDVYSFGVILWELATLQQPWINLNPAQVVAAVGFKGKRLEIPHDVNPQVAALIDACWANEPWKRPSFASIMDSLRPLLKPPTPQPGCPSMPLLT

SEQ ID NO: 189322 - protein, 451 aa, Glycine max
  unsure (1)..(451): unsure at all Xaa locations
  Clone ID: PAT_MRT3847_141975C.1.pep
ARFFLEVDLIGKPGNLSEPDSLLNGPSSISFSSPLRFPRLKPAETTIDFRSLAKQYFSDCVSLELVFDNNSAEQFDGKCKDRNNPRPILTDSNRSSHLPLHPQDSHPSSREQGSETYQSCNPPQNIVDSTMTCREWMPLKHKCPGGTETQTXLLIPSKHAREFYLDMEDLDISWSDLVLKGKIGSGSFGTVHHAEWNGSDVAVKILMEQDFQAERFKEFLREVAIMKGLRHPNIVLLMGAVTKPPNLSIVTEYLSRGSLYRLLHRSGAKEILDERRRLSMAYDVAKGMNYLHKRNPPIVHRDLKSPNLLVDKKYTVKVCDFGLSRLKANTFLSSKSAAGTPEWMAPEVLRDEPSNEKSDVYSFGVILWEIATLQQPWSNLNPPQVVAAVGFKGKRLEIPRDLNPQLASIIESCWANEPWKRPSFSSIMDSLKVLLKPPMPQPGRPSMSLLT

SEQ ID NO: 189323 - protein, 247 aa, Glycine max
  Clone ID: PAT_MRT3847_141976C.1.pep
MKFNIASPTTGCQKKLEIDDDQKLRAFWDKRISQEVSGDALGEEFKGYVFKITGGCDKQGFPMKQGVLTPGRVRLLLHRGTPCFRGYGRRNGERRRKSVRGCIVSPDLSVLNLVIVKKGENDLPGLTDAEKPRMRGPKRASKIRKLFNLSKEDDVRKYVNTYRRTFTTKAGKKVSKAPKIQRLVTPLTLQRKRARIADKKKRIAKAKSEAAEYQKLLASRLKEQRDRRSESLAKRRSKLSSAAKAAV

SEQ ID NO: 189324 - protein, 248 aa, Glycine max
  Clone ID: PAT_MRT3847_141977C.1.pep
MKFNIANPTTGCQKKLEIDDDLKLRAFWDKRISQEVIGDALGEEFKGYVFKITGGCDKQGFPMKQGVLTPGRVRLLLHRGTPCFRGYGRRNGERRRKSVRGCIVSPDLSVLNLVIVKKGENDLPGLTDVEKPRMRGPKRASKIRKLFNLSKEDDVRKYVNTYRRTFTTKAGKKVSKAPKIQRLVTPLTLQRKRARIADKKKRIAKAKSEAAEYQKLLASRLKEQRDRRSESLAKRRSKLSSAAKAAAV

SEQ ID NO: 189325 - protein, 46 aa, Glycine max
  Clone ID: PAT_MRT3847_141978C.1.pep
SGHLAESLVFRLASYLWMVPVGAAHHISYCPQCDGGFSGEGVGIKI

SEQ ID NO: 189326 - protein, 88 aa, Glycine max
  unsure (1)..(88): unsure at all Xaa locations
  Clone ID: PAT_MRT3847_141979C.1.pep
CLFAFPGQSLSHSALSLLFAWVAFSPCVRPVVGGSLESLLCLWGLVVSSSVSCVVRWLVSGSCPSESXAWAVRVNGRRGSDPGGSGAA

SEQ ID NO: 189327 - protein, 104 aa, Glycine max
  Clone ID: PAT_MRT3847_14197C.1.pep
PPSSDFTFRIAARVTEHSVITVSLGRVPRLGFSRVGESLLSEIPSVESSYPSRGQQQERTVIKEHVLEFLLTMNHSEEADNPGPRSGSNLVDHIIDTHVDQIQD

SEQ ID NO: 189328 - protein, 282 aa, Glycine max
  Clone ID: PAT_MRT3847_141980C.1.pep
YNNGLPSNLTASRNPSLDYGFKGAEIAMASYCSELQYLANPVTSHVQSAEQHNQDVNSLGLISSRKTNEAIEILKLMSSTFLIALCQAIDLRHLEENLKNSVKNTVSQVSKRILTTGVNGELHPSRFCEKDLLKVVDREYIFSYIDDPCSATYPLMQKLRQVLVDHALVNAESEKDVNSSIFQKIAIFEEELKNLLPKEVESARVAYESGKAAIPNKIQECRSYPLYKFVREELGTGLLTGEKVRSPGEEFDKLFTAMCQGKIIDPLLECLGEWNGAPLPIS

SEQ ID NO: 189329 - protein, 116 aa, Glycine max
  Clone ID: PAT_MRT3847_141981C.1.pep
LDMIQGPPKTHNIPLGFPILMAEPGLFIYTHILNIMRRISGSHPFREKKLFFLRGASPKSTPIKPLPHFVLQIDHLFVLLHRAPAPYNRPFYAHRSSQRLNPPGSNDSLTAAGWAP

SEQ ID NO: 189330 - protein, 97 aa, Glycine max
  Clone ID: PAT_MRT3847_141982C.1.pep
IIPPNKFSPLPQTCFPNIKPLAKQLPIFLLKKISGRLFSLSEPYFFSPRLPFAPKNSKRGLFPFLKKNTRFFLPSPGPPLKKTPNFSGKKNPNIIRF

SEQ ID NO: 189331 - protein, 47 aa, Glycine max
  Clone ID: PAT_MRT3847_141983C.1.pep
LFNSALKNIHLTVIQHFLKHNPHCFSFSIVPHLSFYHVNTNLYYYSY

SEQ ID NO: 189332 - protein, 147 aa, Glycine max
  Clone ID: PAT_MRT3847_141984C.1.pep
PPYEPVPDNIKFFYDGKEVELSVAAEEVATFYAKMLEHDYTTKPVFDNNFFKDWRKVMTDHERSIITDLKKCNFKPMNKYFNEQSEIRKAMSKEEKKKIKEKNDEIHKEMGFCTIDGHQEKIGNFRIEPPGLFRGRGEHPKMGMLKK

SEQ ID NO: 189333 - protein, 81 aa, Glycine max
  Clone ID: PAT_MRT3847_141985C.1.pep
CSLCLSMSFTLYGGDTHPVESSARFTTGFFFLCSTWTNLPISVYQGSCSFRVREIKLQLRLGGKNLSRESHSLDKEHHQDS

SEQ ID NO: 189334 - protein, 222 aa, Glycine max
  Clone ID: PAT_MRT3847_141986C.1.pep
MDVKENLAKIEKEIDASIKKSAHSAQPHVIAVTKYVTIERAREAYKIGIRHFGENRLDGFKEKKESLPSDVKLHFIGSLQSRKVKDIINEVDYFHALDRLSLAKEINKRANHVIKCFLQVNVSGEESKHGIALEEVNQFINQIKEYENIQIIGLMTMAPLTDDLSYIRNLFKELRHKRNEIQQFNLAHAPCTELSMGMSNDYQMAVEEGATFVRIGTKLVGE

SEQ ID NO: 189335 - protein, 584 aa, Glycine max
  unsure (1)..(584): unsure at all Xaa locations
  Clone ID: PAT_MRT3847_141987C.1.pep
MDAGEALSDDPNRPNSAADAAPAPAGARYKLLSPAKLPISRSPCVTISPGLSPTSFLESPVLLSNMKVEPSPTTGSLSLLHQTAYGSMTSAASATFPVTTVCFNSTRNTXDDENSARGKPSFFEFKPHNRSNMVPADFDNHASEKSTQIDGQGKAQAFDSSPLVKNESASPSNELSLSSPVQMDCSGGSARVEGDLDELNPRSNITTGLQASQVDNRGSGLSVAADRVSDDGYNWRKYGQKHVKGSEFPRSYYKCTHPNCEVKKLFERSHDGQITEIIYKGTHDHPKPQPNRRYSAGTIMSVQEERSDKVSLTSRDGNGSYMCGQGSHLAEPDSQPELSPVATNDGDLDGLGVLSNRNNDEVDDDDPFSKRRKMDLGIADITPVVKPIREPRVVVQTLSEVDILDDGYRWRKYGQKVVRGNPNPRSYYKCTNTGCPVRKHVERASHDPKAVITTYEGKHNHDVPTARNSCHDMAGPASASGQTRIRPEESDTISLDLGMGISPAAENTPNSQGRMMLSEFGDSQTHTSNSNFNFVHTTTVPGYFGVLNNNSNPYGSRENPSDGPSLNHSAYPCPQNIGRILMGP

SEQ ID NO: 189336 - protein, 90 aa, Glycine max
  Clone ID: PAT_MRT3847_141988C.1.pep
YHYVSYSRNRDYQICQAYSTAGSCMITLFEPNLRSSQSKQFLHIIRRSSLYTTIFALDLPDRKSWHMRVALQNPNPQPLKGYFRSLWHIW

SEQ ID NO: 189337 - protein, 227 aa, Glycine max
  Clone ID: PAT_MRT3847_141989C.1.pep
MDAGEALSDDPNRPNSAADAAPAPAGARYKLLSPAKLPISRSPCVTISPGLSPTSFLESPVLLSNMKVEPSPTTGSLSLLHQTAYGSMTSAASATFPVTTVCFNSNTVDERKPSFFEFKPHSGSNMVPADFDNHASEKSTQIDSQGKAQAFDSSALVKNESASPSNELSLSSPVQMDCSGASARVEGDLDELNPRSNITTGLQASHVDNRGSGLTSAAWRVSDDGYN

SEQ ID NO: 189338 - protein, 263 aa, Glycine max
  Clone ID: PAT_MRT3847_14198C.1.pep
MIPEHYSDSSLFHSSLLTLFLIAPPTFLSLTFLQAPYGKHHRPGWGPNLPPPLAWLLMESPTLWLTLLLFPLGLHSHNPKAQALITPFLIHYFNRTMLYPFHLLLTPSKKTTPGFPLSVALMAFAFNVLNSYLQARTVSHYNNHYDDSGFFWFRFLCGLLVFLLGMGINVWADRVLLRLKSEGKGYVVPRGGLFELVACPNYFGEIVEWLGWAVMTWSWAGLGFFVYTFANLGPRARANRRWYLEKFGEDYPKERKAVIPYLY

SEQ ID NO: 189339 - protein, 79 aa, Glycine max
  Clone ID: PAT_MRT3847_141990C.1.pep
HNGKRGIFYKKVFTRCAFATKTHPLGTVDYSLKMILPLKTNFLKEHHVGQGSPLQNLGTKRNYFGGGPGPGGEGTNMFA

SEQ ID NO: 189340 - protein, 68 aa, Glycine max
  unsure (1)..(68): unsure at all Xaa locations
  Clone ID: PAT_MRT3847_141991C.1.pep
EIGMTFGWVYTFYSTAVDPNNGNVGIVAPIVIGSMXAANIFNGGAYLHXQLMNPAATFVPADVSWTWT

SEQ ID NO: 189341 - protein, 32 aa, Glycine max
  Clone ID: PAT_MRT3847_141992C.1.pep
GSSDDDGGRKEADKLTEATMGNPSRLIPLLLD

SEQ ID NO: 189342 - protein, 50 aa, Glycine max
  Clone ID: PAT_MRT3847_141993C.1.pep
SAQPLPDGSQHFKQLILGFHRRQTQILRSSYLRLSYLGVLSLATPIANIS

SEQ ID NO: 189343 - protein, 64 aa, Glycine max
  Clone ID: PAT_MRT3847_141994C.1.pep
TFGDFLKDAPFGGAGFNCPHLFGGPLRYVDRGGIIIVHRKRDGALCMFVCSIMAFKINYSHFFP

SEQ ID NO: 189344 - protein, 118 aa, Glycine max
  unsure (1)..(118): unsure at all Xaa locations
  Clone ID: PAT_MRT3847_141995C.1.pep
MEGLDGLIERLLEVRKNRGKQIQLVESEIRSLCSTAKDLFLRQPNLLELEAPINVCGDIHGQYPDLLRVLEYGGFPPDSNYLFLGDYVDRGKPDVETICLLLAYKIKYPXNFFLFRRN

SEQ ID NO: 189345 - protein, 79 aa, Glycine max
  unsure (1)..(79): unsure at all Xaa locations
  Clone ID: PAT_MRT3847_141996C.1.pep
XXSLKLQXRLXASVLXCGXGXVWXDXXEVXXISMXNSXXXIXXLVKDGFIIRXXTKIHXRSRARRXKEXKRXXRHXGYG

SEQ ID NO: 189346 - protein, 128 aa, Glycine max
  Clone ID: PAT_MRT3847_141997C.1.pep
ENGRRKRGTDRGKGDHTCLALWFVGGDYPMRTRGDKVKERSKESINFLLVLFFPLLYVFFFNFGCWGRACSRPQYVPPTASCTQEIDVIPGTFPCHPVPSPSSCSTGNRGHHLAGVPVLYTFLDFFFS

SEQ ID NO: 189347 - protein, 83 aa, Glycine max
  Clone ID: PAT_MRT3847_141998C.1.pep
VFVRSRPNPLQEFKGGEPCKSTGGLQFSKFLRGAQIFRFSNSWQVKFFPPVHGRFSIRGISFFLKPGKSFYARKIISPRIHTL

SEQ ID NO: 189348 - protein, 63 aa, Glycine max
  Clone ID: PAT_MRT3847_141999C.1.pep
EKTHLITRVTPSTIHNHLLGTCYSRITRVIWYSEEKTNKGVFIHLLCIVKIECLGGWVWKHHE

SEQ ID NO: 189349 - protein, 70 aa, Glycine max
  Clone ID: PAT_MRT3847_14199C.1.pep
SATPPFPNCPKGGGAQTGGGGGQQRKKYLPPPWGEGGRAPKLRKGPKRGCFPPKPGFKNLFSFRLFQWDF

SEQ ID NO: 189350 - protein, 64 aa, Glycine max
  unsure (1)..(64): unsure at all Xaa locations
  Clone ID: PAT_MRT3847_1419C.1.pep
GPIVMGLYGNTGPKTAXNFPALCTGEKGVETIANPLHYKRTTSPRIIPTFMAQGANPTRAQETG

SEQ ID NO: 189351 - protein, 177 aa, Glycine max
  Clone ID: PAT_MRT3847_141C.1.pep
MATLTLLSSLSLRSSSSSSSSSFTLSSSFSSPSSFAFFCSFPLRSATSSLKVQTIQKKKRVVKAVEEDTQQELNAADDSEQPSTSEAPPVVVPVSPSDTLTMFFQAEGTVSETAIPALTKALEETEGVTDLKVQLAEGLAILELKKQTTVPATGVASSFVKTIQGSGFKFPPLNFSF

SEQ ID NO: 189352 - protein, 194 aa, Glycine max
  Clone ID: PAT_MRT3847_142000C.1.pep
MTEEQSKKVAETESFPSNPAPEPVVVPKEDVAEEKSVIPQPSPSPADESKALVIVEKTSEVAEEKPIEGSVNRDAVLARVATEKRLSLIKAWEESEKSKADNKSHKKLSAISAWENSKKAAAEAELRKIEEQLEKKKAEYGEKLKNKIATIHREAEEKRAFIEAQKGEEFLKAEETAAKYRATGTAPTKLFGCF

SEQ ID NO: 189353 - protein, 337 aa, Glycine max
  Clone ID: PAT_MRT3847_142001C.1.pep
MNPSLTSSSTLSSSSSSWFSGIVRVGRSNSVKMSNNSAAAPSSDTAGPVVRKNQFRGVLFKYGPNPIQVAFKTGDFKRQVIFIGGLTDGFLATPYLEPLAIALDHENWSLVQFLMSSSYSGYGTSSLQQDAKELDQLINYLINKEDSEGVALLGHSTGCQDIVHYMRTNFACSRAVRAAIFQAPVSDREYQATLPHTASMIDLAAKMISEGRGLELMPREADPSAPITAYRYHSLCSYNGDDDMFSSDLSDDQLKMRLGHMSSTHCQVIFSMADEYVPDYVDKKALVERLCRAMGGAEKVEIEYGNHSLSNRVEEAVDAIIDFLKREGPKGWDDPWS

SEQ ID NO: 189354 - protein, 120 aa, Glycine max
  Clone ID: PAT_MRT3847_142002C.1.pep
MNPSLTSSSSTLSSSSSSWFSGIVRAGRSNSVKMSNNSAVAPSADTVGPVVRKNQFRGVLFKYGPNPIQVAFKTGDYKRQVIFIGGLTDGFLATSYLEPLAIALDHENWSLVQFLMSSSY

SEQ ID NO: 189355 - protein, 181 aa, Glycine max
  Clone ID: PAT_MRT3847_142003C.1.pep
MAGNIATTTKVEKRAYPSFEAFTIEEEEGSGGYGTVYRAQRTTDGKRVAIKCPHTNAHKNHVNNERSMLERFGGKNYIIRYEGSFKNGNSDCFVLEHVHHDRPEVLKKEIDIVQLQWYGYCMFRALYCLHKEGVVHRDIKPGNFLFSRKLSKGYLIDFNLAMDLKQKHNIGSKSKPSHDAA

SEQ ID NO: 189356 - protein, 579 aa, Glycine max
  Clone ID: PAT_MRT3847_142004C.1.pep
LILMALPICLTVIAIFTLCCVINCNNGVEAFHDIYPDLQSISARSVSKLQRTGYHFQPRKNWINDPNGPMYYNGIYHLFYQYNPKGAVWGNIVWGHAVSKDLINWKELEPALYPSKPFDKYGVWSGSATVLPGKGPVILYTGVIDKQSNEVQLYAIPENKSDPFLRKWVKPKAFNPIVVADHSMNASVFRDPTTAWWSKDGHWRMLIGGRRKDRGMAYLYRSKDFVKWIQAKHPIHSAASTGMWECPDFYPVSLKGKNGLDISVVGSSSIKHVLKNSLDLTRYEYYTIGTYFKNKDKYIPDNTSEDGWGGLRYDYGNFYASKSFFDPSKNRRILWAWANESDSKEDDVKKGWAGIQSIPRTVWLDYGGKQLVQWPVEELNSLRKKEVKISHQKLKKGQHVEVKGITAAQADVEVTFSFSSLDRAEPFDSRWVNAQDLCSQKGSKVQGGVGPFGLLTLASEKLEEFTPVFFRIFKAPNKHVILMCSDARSSSLKRELYKPSFAGFVNVDLAKNKKLSLKSLIDHSVVESFGAGGRTNILSRVYPTLAIKKKAHLFVFNNGTEHITVEYLKAWSMKSARRN

SEQ ID NO: 189357 - protein, 171 aa, Glycine max
  Clone ID: PAT_MRT3847_142005C.1.pep
MVALDHISGIRFLWFAVMGALDHISELFDCSSGSSKHKKRKQLQTVEVKVKMDCEGCERKVRKAVEGMKGVNQVDVERKANKVTVVGYVEASKVVARIAHRTGKKAELWPYVPYDVVAHPYAPGVYDKKAPSGYVRNTDDPHYSHLARASSTEVRYTTAFSDENPSACVVM

SEQ ID NO: 189358 - protein, 214 aa, Glycine max
  Clone ID: PAT_MRT3847_142006C.1.pep
MFYLSKIEHKLPLPPSRFVLPIREAIHMELEKLFLDKVIANLGLCISVYDIRSIDGGFIFPGDGAPTYTVVFNLIMFRPFEKEIITARLLSSDADGLRLTIGFFDDIYIPASRLPDPNHFVETEQKKRVFSGQESTTNSPSNKGVWYWDYNEQEYPIQDTDVIKFRVTNVSYPQIPVEQPKESKPFAPMLISGAMDDDGLGPVSWWFADEDEDE

SEQ ID NO: 189359 - protein, 128 aa, Glycine max
  Clone ID: PAT_MRT3847_142007C.1.pep
MFYLSKIEHKLPLPPSRFVLPIREAIHMELEKLFLDKVIANLGLCISVYDIRSIDGGFIFPGDGAPTYTVVFNLIMFRPFEKEIITARLLSSDADGLRLTIGFFDDIYIPASRLPDPNHFVETEQKKR

SEQ ID NO: 189360 - protein, 99 aa, Glycine max
  unsure (1)..(99): unsure at all Xaa locations
  Clone ID: PAT_MRT3847_142008C.1.pep
KEKGPKIYKTPQRKTPQGKPLKKIGAPQRKPQKGKLGPQFKPLLNPKKKKEPPKMWKGEGTPERNPGDXEPKRARFPPWGPQRKPPMGPQRPPKGGNPA

SEQ ID NO: 189361 - protein, 242 aa, Glycine max
  Clone ID: PAT_MRT3847_142009C.1.pep
HSFCLDMNQNQLQPLPLLSSFLGSSPEESLLQNQNENPNACHAQVEDVTVALHIGLPDHSSGSNSTNNHGFVNATTQVPNNYWIPTQEQILIGFSHFSCPVCHKTFNRYNNLQMHMWGHGSQYRRGPDSLKRTHPRPLLDLPCYCCARGCKNNIEHARAKPLKDFRTLQTHYKRKHGSKPFTCRKCGKPLAVKGDWRTHEKNCGKRWLCICGSDFKHKRSLKDHIKAFGFGHTPFSSFSDGM

SEQ ID NO: 189362 - protein, 108 aa, Glycine max
  Clone ID: PAT_MRT3847_14200C.1.pep
KAPPFCPFPGGNPPLSKDPLDFLFFFRPFFLGDFWGSLNFFLSLGLGSFKKTARAPFFGWGGAFPPGAGLPFPSIFLVFFKKKKKKKKKKKKKKKKKKKKKKKKKKKK

SEQ ID NO: 189363 - protein, 50 aa, Glycine max
  Clone ID: PAT_MRT3847_142010C.1.pep
AYYNLEESCTRFYHPEKEDGKLNKLCRDELCRCDEENCFIQKSDDKVTLE

SEQ ID NO: 189364 - protein, 139 aa, Glycine max
  Clone ID: PAT_MRT3847_142011C.1.pep
PSLFNTSSHLTVLSLKSNRLKGPFPPSILRVTTLTEIDMSSNQISGSLEDLSVLSSLEELDLRENRLESKLPAMPKGLISLYLSRNSFSGEIPKHYGQLNRLEKLDVSFNSLTRTAPSELFSLPNIRYLNLASNMLNGP

SEQ ID NO: 189365 - protein, 86 aa, Glycine max
  Clone ID: PAT_MRT3847_142012C.1.pep
FCCRSLAKAFTLVFLVRHLFPGLPNGTEDFPFPLLPVIILKASGIFFPMSIIFKIFGAIQSCIQPYKDAAEDAEDEIPHNVNPSPF

SEQ ID NO: 189366 - protein, 64 aa, Glycine max
  Clone ID: PAT_MRT3847_142013C.1.pep
IIFILLSMKCKEKFSIFIFLRRKFLRDDKCSLIYRICCLHLDENACCNVLIYLRAFPFFPQVDK

SEQ ID NO: 189367 - protein, 134 aa, Glycine max
  unsure (1)..(134): unsure at all Xaa locations
  Clone ID: PAT_MRT3847_142014C.1.pep
DGQVYHEPVPAPLVDPPELTFWLFYRAGIXAELAASCLVLYIPVLSVVGCGGAWSKRGSAGIHGIACSFCGVMCPLANCTVGFCGGRIDPWATSELLLAWKPWLPLAIIYLPMLRSGAIPGAGVGMGAEGTNKL

SEQ ID NO: 189368 - protein, 62 aa, Glycine max
  Clone ID: PAT_MRT3847_142015C.1.pep
GACSFDYILCDSRCRSLISLQGIEKKPPESRGIEKALVARHEAGHAVVGNAVANILAGQPPC

SEQ ID NO: 189369 - protein, 72 aa, Glycine max
  Clone ID: PAT_MRT3847_142016C.1.pep
MTRPYLLQGIEKKTAKLRGIEKALVARHEAGHAVVGNAVANILAGQPRVEVNHGKCSIFRHLNMSMPLQRCR

SEQ ID NO: 189370 - protein, 75 aa, Glycine max
  Clone ID: PAT_MRT3847_142017C.1.pep
HFQNCFCAGSAGLLKLLSLGVISHHLFCPKRHLVAVLRHTNQKLRFAIFCRSHRRLQSRASITRHEVEDDNPVAN

SEQ ID NO: 189371 - protein, 83 aa, Glycine max
  unsure (1)..(83): unsure at all Xaa locations
  Clone ID: PAT_MRT3847_142018C.1.pep
VVGDKGTQGERFQSFLSWKIPRATSLFGGFSFCATGVLXATPFKGGALVKGLNFLGHPKFRSKMPSVPSNFFKRVPAKPDSLL

SEQ ID NO: 189372 - protein, 64 aa, Glycine max
  unsure (1)..(64): unsure at all Xaa locations
  Clone ID: PAT_MRT3847_142019C.1.pep
MPTSWIACSAGTRGNRAGARLASXFTCLKSMAGFLTRKTNNDITYIASNWIRVQDHHRCIFIVP

SEQ ID NO: 189373 - protein, 124 aa, Glycine max
  Clone ID: PAT_MRT3847_14201C.1.pep
PFNQFSLFPLSGFWFSFPKIKESIASILLLRWFWILVDFWGLASPPAEERMQGGDCFLFWVYFVRSVGGSLVLRGALPASAFLSVESSILVQTVRFCFFVVLDVPLYVPVRSAHLSYSMYMNAR

SEQ ID NO: 189374 - protein, 177 aa, Glycine max
  Clone ID: PAT_MRT3847_142020C.1.pep
FNPRLKGDYSGRPVIEQNTCYRMQWGSALRCEGCVDVHSIYAASLPTSHPSFAPQMHLELLPQWKAPPLVHVNVELFIGILSAGNHFAERMAVRKSWMQHKLIKSSNVVSRFFVALHGRKDLNMEIKKEADYFGDIIIVPYMDHYDLVVLKTIAITVYGIRSVAVKFIMNCDDDTFV

SEQ ID NO: 189375 - protein, 182 aa, Glycine max
  Clone ID: PAT_MRT3847_142021C.1.pep
MASKIFYLLSLLLLAHLLQPHVFVKGDGSLIEKTCKNTKYYNLCFSSLKSNPSSANADPKGLAVIMVGIGMANATSTSLYLSSKMLGTANNNDSTFKRVLKECAEKYKYASDALQASAQDLVNEAYDYASMHIIAAYDYSNVCHNLFKLYSGLVYPSELAPREDGLKCLCDVALGIVENLNR

SEQ ID NO: 189376 - protein, 97 aa, Glycine max
  Clone ID: PAT_MRT3847_142022C.1.pep
PGFQIYSHKDEFAFRGSMMSRLQKRAPCPLQIKPTTTVIISSACNGAQNSVGAASTSSSTSSSLNSFFTSKDPIPLLSPLVVLESTSIREENTAKSH

SEQ ID NO: 189377 - protein, 62 aa, Glycine max
  Clone ID: PAT_MRT3847_142023C.1.pep
MTVYRHAPAEEVADRDRAQGVTKALPKRGQIKSKIVERAFHCITNGICQASSAGGLHFPRQK

SEQ ID NO: 189378 - protein, 59 aa, Glycine max
  Clone ID: PAT_MRT3847_142024C.1.pep
FLVGNGHHVPDKHIGSPIAFTCIICGFFLLKLVCWEGNIELVLITTVFVFQEACNQYYS

SEQ ID NO: 189379 - protein, 79 aa, Glycine max
  unsure (1)..(79): unsure at all Xaa locations
  Clone ID: PAT_MRT3847_142025C.1.pep
MEGKEQDVSLGANKFPERXPIXTAAQSQDDGKXYPGPAXPPXFXPRVXXSXXFYXXXIXXXGPXXVFXNFTVXTLXASP

SEQ ID NO: 189380 - protein, 42 aa, Glycine max
  Clone ID: PAT_MRT3847_142026C.1.pep
FGPQQKYHFIYLQFPFFSSIQRAITIFPPFACKVFVSNNIRV

SEQ ID NO: 189381 - protein, 61 aa, Glycine max
  Clone ID: PAT_MRT3847_142027C.1.pep
SQPCGCCSILSLLPYLFGWKATEGKKIIPQSYYSYPFFPQHGYRKLFRKIFPLMVKKQIFS

SEQ ID NO: 189382 - protein, 39 aa, Glycine max
  Clone ID: PAT_MRT3847_142028C.1.pep
IASCAPLVSCSIRIEFEVYVVLIYLGRHCHFGFFRIILT

SEQ ID NO: 189383 - protein, 126 aa, Glycine max
  Clone ID: PAT_MRT3847_142029C.1.pep
MDCEDGAKKELQGVVVGVRKSKGFPLGGSGTSLASMEFLSMPQVQEVVLSADMQCEKCQKRVTDIIAKMNVETESVVINVLEKKVTLTFRLPSIGKVTTRKITHINNRNSLPKVAIIKRLFRSSRA

SEQ ID NO: 189384 - protein, 44 aa, Glycine max
  Clone ID: PAT_MRT3847_14202C.1.pep
SFNVSPHCLLLLLCSWRGIIFICSSHSSPSIAIALFSPTILISL

SEQ ID NO: 189385 - protein, 125 aa, Glycine max
  Clone ID: PAT_MRT3847_142030C.1.pep
GCKSIKYTYKALYVSVAHLIKGMDCEDGAKKELQGVVVGVRKSKGFPLGGSGTSLASMEFLSMPQVQEVVLSADMQCEKCQKRVTDIIAKMNGAFDSQQEAREERERVREMHTSFIRGGPCWFPP

SEQ ID NO: 189386 - protein, 113 aa, Glycine max
  Clone ID: PAT_MRT3847_142031C.1.pep
MINPLSSSHMVNMEFISNAMILSFSILLLLPSASYSLYQKPENHIKTAIFVIGSFEMGPGSIATKTFENIKFPKGHVGIKSFDAELVDQEGNSIPSYETYLHHWFAIKYHQNI

SEQ ID NO: 189387 - protein, 54 aa, Glycine max
  Clone ID: PAT_MRT3847_142032C.1.pep
KRKQMLPQSPKTDKKPGKLQSHSWHGFITAIYKSSFLHFINQCNSFLVGHFLTW

SEQ ID NO: 189388 - protein, 149 aa, Glycine max
  Clone ID: PAT_MRT3847_142033C.1.pep
MAISGSETQSPSVKSVSQVEVECVKCDSCGFTEECTPAYITRVRQRYQGHWLCGLCVEAVKHEVVRSDSLITTEEALDRHISFCREFRSSAVTNNKTEHPIFAMGRVLRRSLDSPRPLRSNSSGALPSVDGVRAPHLLRSESCFSSISG

SEQ ID NO: 189389 - protein, 418 aa, Glycine max
  Clone ID: PAT_MRT3847_142034C.1.pep
HPFPRLSFFDIDDYSLDDFCGLVMAAGKSGSSRMLEPLKHPSKKSRRDRSLGKSSGRSSRDEAMEQQIWKKLPEDLFEPVIARLPIATFFCFRSVCQRWNSLLTSQSFSQHCAQVPQANPWFYTVTHEHANSGAMYDPSMKKWYHPTISTLPAELIVLPVASAGGLVCFLDIYRQNFYVCNPLTQSLKELPARSVRVGSRASVGMTVNGNSTSAGYKILLVGCDGEYEIYDSVTKSWSHPENMPADIKLPLSLNFRSQAVSIDSTLYFMHSDPEGIVLYDMATGVWTQYIIPAPLHLTDHMLAECDGRILLVGLLTKNAATCICIWELQKMTFLWKEVDRMPNVWCLDFYGKHVRMTCLGNKGLLMLSLRSRQMNRLVTYNIASREWVKVPACLVPHGRKRQWVAHGTAFYPCLTAMA

SEQ ID NO: 189390 - protein, 104 aa, Glycine max
  Clone ID: PAT_MRT3847_142035C.1.pep
PLELPPFGFGAFFFFFFFLLRISLFLLVKEQEIHVNKLVLCEKTRFKLGKKRENPEVFLGGGGGTGLKLKGKRPQAGGLVKKPLGGSLLMEGEREGEKGLFLVF

SEQ ID NO: 189391 - protein, 161 aa, Glycine max
  Clone ID: PAT_MRT3847_142036C.1.pep
MSEAAATTTSSSMMRNYPLISAIVAFAIAQFIKFFTAWFKEKRWDPKQLVGSGGMPSSHSATVTALAAAIGFHEGFGGPLFATALVLACIVMYDATGVRLQAGRQAELLNQIVYELPAEHPLAESRPLRELLGHTPPQVVAGGILGLITAGIGYLITMASS

SEQ ID NO: 189392 - protein, 60 aa, Glycine max
  Clone ID: PAT_MRT3847_142037C.1.pep
KVSLLGPLASLRVFGQFIRGYCFFCPPPPPPPPPPPPPPPPPPPPPPPPPPPPKKEDVIQ

SEQ ID NO: 189393 - protein, 52 aa, Glycine max
  Clone ID: PAT_MRT3847_142038C.1.pep
QKRNFSEILKTQIESLRTRQFSCSKKKYNSISKNVNTCSDDDGVRPREIHGT

SEQ ID NO: 189394 - protein, 87 aa, Glycine max
  Clone ID: PAT_MRT3847_142039C.1.pep
NKGAKHSLVCHSMLTLTYTQMVVPIQLRVYYPLQSTFPPPVSSPAPSPPRSWPKSFLSTLLSDPIVDIKRINASRSHFPHDAILCPM

SEQ ID NO: 189395 - protein, 49 aa, Glycine max
  unsure (1)..(49): unsure at all Xaa locations
  Clone ID: PAT_MRT3847_14203C.1.pep
ALATNMKMQLQRVIPRLELQGWKHQRLHLLWPYLIQRTQSLXASHLKPW

SEQ ID NO: 189396 - protein, 102 aa, Glycine max
  unsure (1)..(102): unsure at all Xaa locations
  Clone ID: PAT_MRT3847_142040C.1.pep
XXTRTXXXXXXXXXHXQXTXXXAXXELXQNAKVLEKXXCGSTXVXWERXNLWTRXTSKXSYIXAIXKXTFRMHXPLQVVTXKXTXXXXXNXXVMPXXAXFSX

SEQ ID NO: 189397 - protein, 391 aa, Glycine max
  unsure (1)..(391): unsure at all Xaa locations
  Clone ID: PAT_MRT3847_142041C.1.pep
MSVSHFAVLSSCCRPRFAPSLSRASALRSRIRCCTTLTSTSSETPTPTSVKKRVVSGVQPTGSIHLGNYFGAIKNWVALQNVYDTLFFIVDLHAITLPYDTQQLSKATRSTAAIYLACGVDPSKASVFVQSHVRAHVELMWLLSSTTPIGWLNKMIQFKEKSRKAGDEEVGVALLTYPVLMASDILLYQSDFVPDGEDQKQHLELACDEADNNLNXGRMWKFWGVGGGPSTILPESRVPPTASRSPPLTDDLSKMSKSAASDQSIINILDPKDLIANKIKRCKTDSFPGLEFDNSERPECNNLVSIYQLISGKTKEEVVQECQNMNFGTFKPLLTDALIDHLHPIQVRYEEIMSDSGYLDGVLAQGARNAADIADSTLNNIYQAMGFFKRQ

SEQ ID NO: 189398 - protein, 137 aa, Glycine max
  unsure (1)..(137): unsure at all Xaa locations
  Clone ID: PAT_MRT3847_142042C.1.pep
TRPGSRLKFYTTWCYSTQVFKAKYFLNYGFLDAHLSHNLSYTWHNIHAPKVLVKEGXRWRIGNGKSVNVWPQPWLHLKDLEHVTMPPSLGLEHWIVDTLIDQANHCWNSNLIKQVYNTQDVQHILSLVLMDINVNDK

SEQ ID NO: 189399 - protein, 47 aa, Glycine max
  Clone ID: PAT_MRT3847_142043C.1.pep
TRGTFPPDYKFLLSPFQLKHDIHNQLKLGKKKKFHCNSKEIPANNNL

SEQ ID NO: 189400 - protein, 68 aa, Glycine max
  Clone ID: PAT_MRT3847_142044C.1.pep
VRGIGCEPDTQKVMEYQILDGSVVGVAIVRVSHSQQHSHDIPISPTQRVRVSGKKKNYLSNRNERKKI

SEQ ID NO: 189401 - protein, 246 aa, Glycine max
  unsure (1)..(246): unsure at all Xaa locations
  Clone ID: PAT_MRT3847_142045C.1.pep
RAFPTKGTVTNPHVRVTCFCEFSLPWLSTSFRIPTPLTVPVTARRRAPLWTGGIEDGRPAARLPRWTRQEILVLIQGKSDAESRFRPGRGSGSALXEPKWALVSSYCKKHGVNREPVQCRKRWSNLAGDYKKIKEWESQVRDETESFWLMRNDLRRERKLPGYFDREVYNILDSPSSTAAAAAAAAAAETPVPVATVEEEVHLYDSNRRVGSEDGLFSDSEKDEVLLLATTKDVPAPVPISEKLCC

SEQ ID NO: 189402 - protein, 77 aa, Glycine max
  unsure (1)..(77): unsure at all Xaa locations
  Clone ID: PAT_MRT3847_142046C.1.pep
CPGLVSNINYFDVDXASGHIVIKSVDAELADEAGKSVPLHEYYLDNWAIVRNHQSQNVSQINETDHIVIVRSSGFCQ

SEQ ID NO: 189403 - protein, 52 aa, Glycine max
  Clone ID: PAT_MRT3847_142047C.1.pep
EPVVLLKKAPTVDAKNDEKAVNSCRRSDAQIETLKKYNAGTNKASSSITSLN

SEQ ID NO: 189404 - protein, 81 aa, Glycine max
  Clone ID: PAT_MRT3847_142048C.1.pep
CWTAARPLRRSGIDPRTHTSDKPQTQVAVPLRLRHHLLHTGFLVPFYLFQHPCIQPLTAKIFIHCLVSRARRITDCSTITD

SEQ ID NO: 189405 - protein, 225 aa, Glycine max
  Clone ID: PAT_MRT3847_142049C.1.pep
MCNENFEEKISGHASAVLELELMKERFAKLLLGEDMSGSGNGVPAALTVSNAITNLCATLFGQLWRLEPLAPEKKAMWRREMECLLSVSDYIVELKPTWQTFPDGSKLEVMTTRPRSDLYVNLPALRKLDNMLLEILDSFVNPEFRYVDQGVLATDADGSSSFRQALQRLEEKWWLPVPQVPPCGLREDSRKQLQHKRDSTKQILKAAMAINSITLADMEIPHTY

SEQ ID NO: 189406 - protein, 79 aa, Glycine max
  Clone ID: PAT_MRT3847_14204C.1.pep
TYIHFLFHFIFNPFSSYLFFSQSRHIYYLLSCLYLSLFLSFFHLNPLENGEMFISFQLLVARKLLFQGVLDLASMSSYV

SEQ ID NO: 189407 - protein, 49 aa, Glycine max
  Clone ID: PAT_MRT3847_142050C.1.pep
LTVSVPNTILFPTPLFFLQTRGGFKTPDQAHYFFLPLLIEPKISGLNQV

SEQ ID NO: 189408 - protein, 335 aa, Glycine max
  unsure (1)..(335): unsure at all Xaa locations
  Clone ID: PAT_MRT3847_142051C.1.pep
FYGKMGMPWSNVTALVEAMRSRGVAPDLYTYNTLISCCRRGSLYEEAVHLFQQMKLEGFTPDKVTYNALLDVFGKSRRPQEAMKVLQEMEPPGFSPTSVTYNSLISAYAKGGLLEEALDLKTQMVHKGIKPDVFTYTTLLSGFEKAGKDDFAIQVFLEMRAVGCKPNICTFNALIKMHGNRGKFAEMMKVFDDIKLCNCSPDIVTWNTLLAVFGQNGMDSQVSGIFKEMKRAGFVAERDTFNTLISAYSRCGSFDQAMAVYKSMLEAGVVPDLSTYNAVLAALARGGLWGQSEKVLAEMEDGRCKPNELSYXPLLHAYGHGKEIEKDECFWPRRF

SEQ ID NO: 189409 - protein, 72 aa, Glycine max
  unsure (1)..(72): unsure at all Xaa locations
  Clone ID: PAT_MRT3847_142052C.1.pep
HCLVQXRPQNQHAXHPRTFFEXPHKNQTXRKTPHRLVVXAVTHALLXXASPTKKSLRXEXXTPMNHRHGSGM

SEQ ID NO: 189410 - protein, 58 aa, Glycine max
  Clone ID: PAT_MRT3847_142053C.1.pep
YEFELCTRGSSRVDLQSVKNEILKTHRFNEKASLLKLRTNNPFRPKSMKNQSIYDKNI

SEQ ID NO: 189411 - protein, 172 aa, Glycine max
  Clone ID: PAT_MRT3847_142054C.1.pep
ILTYLNELLSKLRAMFSGDPGTTIKLAVLLFVLARCGSYITIWKMAKFGFFGVFTVPKICSSYSAQLTAFANFWIRRFRDAWDSCSHKKAVALGIFGLVWNLSSVVARIWSVFVLFVAFRYYQQHYLVREELVENEAGCDETWQEPAGVKVGMQRQQSTHKIFETQKVKKVF

SEQ ID NO: 189412 - protein, 366 aa, Glycine max
  Clone ID: PAT_MRT3847_142055C.1.pep
MDANGNWEEDDDEEFEFSRNYFLAKELASSSAKKSKHKLTDIDVVDEQELRDAASKIEPNHEYEITLLLDSYKTMYPEWIFALRCGFGLLMYGFGSKKALIEDFASTELTEYSVVVINGYLQTINLKQVVIALAEVLWDQMKAKQRVSHRDLPKSQQPSNSQSMDDLLTFLDQAEIEDGDFFVCVVIHNIDGPGLRDSETQRYLARLAACARIRVVASIDHVNAPLFWDKNMAHTQFNWCWYHVPTFAPYKVEGMFYPMILAHGSASQTVKTATIVLLSLTRNAQSVFKILAEHQLSHPDEGMPISDLYSVCRERFLVSSQITLNSHLTEFKDHELVKIKKHSDGQDCLHIPLTAEALQKVVLEIN

SEQ ID NO: 189413 - protein, 164 aa, Glycine max
  unsure (1)..(164): unsure at all Xaa locations
  Clone ID: PAT_MRT3847_142056C.1.pep
MGIKLNRPVTVEILFQVFIVLSLFRITTSVLQPANFVFGDSLVDVGNNNYIASLSKANYVPFGIDFGRPTGRFTNGRTIVDIIGQEMGIGFTPPYLAPTTVGPVILKGVNYASGAGGILNLTGKLXCDRINDAQLDNANTRQDIINIGVPTALNLFKRSIFSVA

SEQ ID NO: 189414 - protein, 80 aa, Glycine max
  Clone ID: PAT_MRT3847_142057C.1.pep
ILLSYVTIPNSSRCKPIQFQLLIIIFTQYSSPNLTHLLTPHFLLQAYFHFHSKTPFHHHLLLHHHHQTHHQPHLKTLPFS

SEQ ID NO: 189415 - protein, 87 aa, Glycine max
  unsure (1)..(87): unsure at all Xaa locations
  Clone ID: PAT_MRT3847_142058C.1.pep
HIXVEDCSPQAXXSXXCIGXXDAPRRSXPSSNSPARALPAXRSPXRKPERERSSEEEDAAPLFQERECASAPAWVAPGTRHGYCRRT

SEQ ID NO: 189416 - protein, 115 aa, Glycine max
  unsure (1)..(115): unsure at all Xaa locations
  Clone ID: PAT_MRT3847_142059C.1.pep
LGPLGGARXVSXVAVGLGCVGLVVGVVXSSVSVLLGVVFGAGGPAFLGVSVFLSGGVVSPVWGAPRVLALFRWPGWLVXWCVCLVXVXSLSGRRPRRVVDRRSLAFAAGSATYAT

SEQ ID NO: 189417 - protein, 92 aa, Glycine max
  Clone ID: PAT_MRT3847_14205C.1.pep
TKNPHLSFQTLKCLPLFRTPPYKPHDIMLLINPLLKTFQLKTNFMVIKFPSILIPHTKSLSLMLNPLTLSFKTLTPPTKKIFFTSGLKRTYL

SEQ ID NO: 189418 - protein, 320 aa, Glycine max
  Clone ID: PAT_MRT3847_142060C.1.pep
MEKVVCVTGGSGCIGSWLVHLLLDRGYTVHATVQNLNDEAETKHLQSLDGASTRLRLFQMDLLRHDTVLAAVRGCAGVFHLASPCIVDQVHDPQKELLDPAIKGTMNVLTAAKEAGVRRVVLTSSISAVTPSPNWPGDVAKTEECWTDVEYCKQKGLWYPLSKTLAEKAAWDFAKENDLDVVVVNPGTVMGPVIPPRLNASMVMLVRLLQGCAETYEDFFMGSVHFKDVALAHILVYENKSAAGRHLCVEAISHYGDFVAKVAELYPEYNVPKMQRDTQPGLLRTKDGAKKLMDLGLQFIPMEKIIKDAVEDLKSKGFLS

SEQ ID NO: 189419 - protein, 179 aa, Glycine max
  unsure (1)..(179): unsure at all Xaa locations
  Clone ID: PAT_MRT3847_142061C.1.pep
QQQQGDSDSVGGWREVVCVTGGSGCIGSWLVHLLLDRGYTVHATVQNLSYYHPTLFLSFIISLLLLQLSHNTTQPFXVKSLFLLLSLARDDEAETKHLQSLDGASTRLRLFQMDLLRHDTVLAAVRGCAGVFHLASPCIVDQVHDPQKELLDLAIKGTMNVLTAAKEAXVRRVVLTSCI

SEQ ID NO: 189420 - protein, 62 aa, Glycine max
  Clone ID: PAT_MRT3847_142062C.1.pep
PPNPLLSSPEQAFFLVAIHLTLLHFSRFLSISPLSTFSFGLHQLPYFHFQQAAKIRSPFFYF

SEQ ID NO: 189421 - protein, 148 aa, Glycine max
  Clone ID: PAT_MRT3847_142063C.1.pep
MTQNGRSSRYSFGSSNGNGDTPAQNGSAVINVDDYDSDSSNFAPSTPSTMSMAVPAELGGAVPLINRFQVDGFLKLMQKQIQSAGKHGFFSKRSVGPQVREKVTFEDMLSFQKDPIPTSLLKLNVDFVSRATKLFQIILKYMGIDPSD

SEQ ID NO: 189422 - protein, 77 aa, Glycine max
  Clone ID: PAT_MRT3847_142064C.1.pep
GETNPEPAQPIIHTNLPSKPSTSFPIILSKTLGFDEPPQTTDFHTLFLMHLYLNQHSCCFTDDTDLGFRIYNCDPLL

SEQ ID NO: 189423 - protein, 52 aa, Glycine max
  Clone ID: PAT_MRT3847_142065C.1.pep
DFSFNKPHIMPKVTILRRYNIHKWFECFKIKKQCSIKLSSFPVFQNQKIMQH

SEQ ID NO: 189424 - protein, 57 aa, Glycine max
  Clone ID: PAT_MRT3847_142066C.1.pep
LMLNASADMNRPNYDLIMNVYKESCTKSDDIIIEQVVLIYSSTITLVCICSGTYYMT

SEQ ID NO: 189425 - protein, 101 aa, Glycine max
  unsure (1)..(101): unsure at all Xaa locations
  Clone ID: PAT_MRT3847_142067C.1.pep
XLXXLXTXTEXEXXSTDXFXHKRSXXXLXXXLLXXSYLXCQXXXXXXXMAHLSRKNVPXXTXVSXXXPXXXXAEAXAXXXXXXXXYLXLEPNSELTYACXR

SEQ ID NO: 189426 - protein, 167 aa, Glycine max
  unsure (1)..(167): unsure at all Xaa locations
  Clone ID: PAT_MRT3847_142068C.1.pep
MADEAVVVPDPTQIDVKLFNRWSFDDIXVATSKHATYVPHTAGRYSVKRFRKAQCPIVERLTNSLMMHGRNNGKKLLAVRIIKHAMEIIHLLTDQNPIQVIVEAVVNSGPREDATRIGSAGVVRRQAVDISPLRRVNQAIYLLTTPAEPILVASSRGPLLTTASTIT

SEQ ID NO: 189427 - protein, 33 aa, Glycine max
  Clone ID: PAT_MRT3847_142069C.1.pep
NHNSKTMFVKTEIETAAGLKMLWQSNKPCYWVN

SEQ ID NO: 189428 - protein, 75 aa, Glycine max
  Clone ID: PAT_MRT3847_14206C.1.pep
SPWSSNIISRYHMPEELTKYIRLKQTREQQIQPKIIMKMVRIITKGLILGLPIPKIQLRAKPKISEQSSIPKPQK

SEQ ID NO: 189429 - protein, 93 aa, Glycine max
  unsure (1)..(93): unsure at all Xaa locations
  Clone ID: PAT_MRT3847_142070C.1.pep
REFLFHPLPCALVGMNGYFMSQSLXFLANRFLGALGFGKVFNFQNPFDWMELIFLQGKTNFFXKRVGEYQKAFFFNSFNGNGGTPVFKMDGGF

SEQ ID NO: 189430 - protein, 70 aa, Glycine max
  unsure (1)..(70): unsure at all Xaa locations
  Clone ID: PAT_MRT3847_142071C.1.pep
IAPMAMGIMVAGNIWXGGTISXSTITPAVTFGPTVESWTCIIHXIQWAGPLIGVAISGLANPFVWFTLNQ

SEQ ID NO: 189431 - protein, 84 aa, Glycine max
  Clone ID: PAT_MRT3847_142072C.1.pep
LTKTDIPCTFGHCFYYEISSWMKIALLNESLCLIYETASGQRTNMPLLDSIYPDDRRRIASDASYTLLRLLCTFPAHKRRGYHT

SEQ ID NO: 189432 - protein, 91 aa, Glycine max
  Clone ID: PAT_MRT3847_142073C.1.pep
MLMLPFYIFSSWKQVDSLGLLVPYLSRFPRLSVLDLSFCNLLQIPDAIGNLHSLVILNLGGNKFVILPNTIKQLSELPSLNLKHLMQLKIL

SEQ ID NO: 189433 - protein, 64 aa, Glycine max
  unsure (1)..(64): unsure at all Xaa locations
  Clone ID: PAT_MRT3847_142074C.1.pep
RGGQTAKGPKPPTPPHTSRPRHTRPPTQPXRSFFLETTLTLTATTKTTTATHTQIGKVPGRVVD

SEQ ID NO: 189434 - protein, 43 aa, Glycine max
  Clone ID: PAT_MRT3847_142075C.1.pep
HMKVVVVKSPNIIFNVLRLDKVILHVHKGPHMVSQEELALQLG

SEQ ID NO: 189435 - protein, 46 aa, Glycine max
  Clone ID: PAT_MRT3847_142076C.1.pep
TANFLYRKRTDRLDMMIQHRTWSPKHPKLRQYLHRRTRAVTDVAIK

SEQ ID NO: 189436 - protein, 109 aa, Glycine max
  Clone ID: PAT_MRT3847_142077C.1.pep
HLLMSVKRGNLRDYIYGVKRHQSQVCEEALEGCLQTCYYYKTRCPQKYGYALQGVLIQNLKSERVSPAHLGSLPKTLYHYQGKALSLVKHLSYTQEHLILVTEFGARRH

SEQ ID NO: 189437 - protein, 59 aa, Glycine max
  Clone ID: PAT_MRT3847_142078C.1.pep
AKETHHGFYLLSLYRSFILLLYASGRTNNHKAERRKTTQNLSPYGTTAPKSYTVRSNIL

SEQ ID NO: 189438 - protein, 172 aa, Glycine max
  Clone ID: PAT_MRT3847_142079C.1.pep
MSEPDTQAPPPPPFLLQRPPLLQSASPLFKQRSWSPDAFRDEAWLRRKGNWKNRRSKSVTDEDVDELKACIELGFGFDSSPEVELDQRLSDTLPALGLYYAVNKRYNDSLVTKTTPSSSSSSAASDCDSTPCPHGSPHSAIFTTGDNPQTVKTRLRQWAQVVACAVRQSSDV

SEQ ID NO: 189439 - protein, 86 aa, Glycine max
  unsure (1)..(86): unsure at all Xaa locations
  Clone ID: PAT_MRT3847_14207C.1.pep
GHINPAVTFWLFLGRTVSLVKASLYMIPQCAGAICGAGLVKWFHKSXYNKYRRGLNTVSESYNKCTALGAHIIGTXVLVHTVFSAT

SEQ ID NO: 189440 - protein, 167 aa, Glycine max
  Clone ID: PAT_MRT3847_142080C.1.pep
MSEPDIHAPPFLLQRPPLLQSASPLFKQRSWSPDAFRDEAWLRRKGNCKNRRSKSVTDEDVDELKACIELGFGFDSSPENELDQRLSDTLPALGLYYAVNKRYNNSLVTKTTPSSSSAASDCDSSPSPHGSPHSAIFTTGDNPQTVKTRLRQWAQVVACAVRQSSDV

SEQ ID NO: 189441 - protein, 64 aa, Glycine max
  Clone ID: PAT_MRT3847_142081C.1.pep
EGWGTLGGGAVGNHCLFSLRHPERKWWVFVTTPFRGCVFTPVKAVVYICLSQGCWFFPKKAFFF

SEQ ID NO: 189442 - protein, 52 aa, Glycine max
  Clone ID: PAT_MRT3847_142082C.1.pep
HASEDLKLVAGDASHNVEKELRSEFFNQPWVEDAVIRYLNRKTAGSDAHGRN

SEQ ID NO: 189443 - protein, 46 aa, Glycine max
  unsure (1)..(46): unsure at all Xaa locations
  Clone ID: PAT_MRT3847_142083C.1.pep
GSARTXTXRGKRRKPEQREHFLRFLMCTLHLLAATKLILFGLASEG

SEQ ID NO: 189444 - protein, 82 aa, Glycine max
  Clone ID: PAT_MRT3847_142084C.1.pep
EKYQAGGAGPLIIMAIIWVRPWGFLKTGTTLQARWKNGQTGFLTLTGKSHPLLNNSLKAQIQPRPPLIPVPGTTKKIIPKRL

SEQ ID NO: 189445 - protein, 366 aa, Glycine max
  Clone ID: PAT_MRT3847_142085C.1.pep
IPCPKVNDECNHGFLELRSILGQHFVSELVCKAKELVQAYKLQNVVKTADNFCSCLKLDRNTDVSYSNMRKAASREDLTDNYLYCPKAVDPQYKDLRHFQWHWEKGEPVIVSNVLECTSGLSWEPLVMWRALRHVTNTKHGQHLAEKTIDCLDWTEGEINIHQLFTGYTNGRSDWLAWPQILKLKDWPPSNLFEEQLPRHCAEFISSLPFKEYTDPHKGSLNLAVKLPNGSLKPDLGPKTYIAYGFPQELGRGDSVTKLHCDMSDAVNALTHIAEVKLDSDQLTVIEKLKQKHLEQEKRELLELIEVDKVKVNQGDLLFGGDASDGALWDIFWRQDVPKLQEYLKKNFREFRHVHCCRLKQGKLLK

SEQ ID NO: 189446 - protein, 76 aa, Glycine max
  Clone ID: PAT_MRT3847_142086C.1.pep
MASNATSKNACPPPMKATSNGAFQGDDPLDFALPLAILQICLVLVVSRGLAYLLKPLRQPRVIAEIIVSSFLFFEF

SEQ ID NO: 189447 - protein, 231 aa, Glycine max
  unsure (1)..(231): unsure at all Xaa locations
  Clone ID: PAT_MRT3847_142087C.1.pep
MPAAGMRRTTRVFGMKGAETARVLRSGRRLWPDSGEVKTKRSHDGDQWPMAPPSKAAKIDAPATPRKGKRCEEAAAAVVDRRFGKGLVYQRRRKGLLKKEGSRRNGEVLRCVISVVVSRCAGKSGRFLRLLASVVRYVTKVRVSPRKLSGFCMSEAIHGAFASQGMQFVKGPTVVNTGICQFFGVTGTVPAFSVDFSAVSPCFEYLQYXMFLKSMFKSFFLVHNPINVPSD

SEQ ID NO: 189448 - protein, 170 aa, Glycine max
  Clone ID: PAT_MRT3847_142088C.1.pep
GHMNNVSCVMFHAKQDIIVSNSEDKSIRVWDATKRTGIQTFRREHDRFWILATHPEMNLLAAGHDSGMIVFKLDRERPAFAVSGDSLFYTKDRFLRFFEFSTQRETQVLTIRRPGSSSLNQSPKTLSYSPTENAILLCSDVDGGSYELYCLSKDGTKDSFWRGDTQDPKK

SEQ ID NO: 189449 - protein, 63 aa, Glycine max
  Clone ID: PAT_MRT3847_142089C.1.pep
ATRAATAILASQLDPINPTLDMGPYIFRSRFGLKHFKRVSSDLLLKARVTDVGIPPRRGRRGP

SEQ ID NO: 189450 - protein, 41 aa, Glycine max
  Clone ID: PAT_MRT3847_14208C.1.pep
FPGTQRALFLVPKKWPERSPIFLGSYEDVEEIRAFSFVDEK

SEQ ID NO: 189451 - protein, 178 aa, Glycine max
  Clone ID: PAT_MRT3847_142090C.1.pep
TLLTVLFLIPSPRRIGSFFFLGAFAFFFHRSSANTCRLVVATIGTNPVTITLTAMFQHTPAFTFFVIVNAIASFYNMVVIGVEILGPQYDYKELRLGLIAILDVMTMALAATGDGAATFMAELGRNGNSHARWDKICDKFEAYCNRGGVALIASFVGLILLLVVTVMSITKMLKLNRI

SEQ ID NO: 189452 - protein, 64 aa, Glycine max
  Clone ID: PAT_MRT3847_142091C.1.pep
INPKFSFHTKRTLRQQQGGGKKTQLNIAILSKRDGGQQKHGAGPIHKRRAKIKTLAKSGIITFF

SEQ ID NO: 189453 - protein, 101 aa, Glycine max
  Clone ID: PAT_MRT3847_142092C.1.pep
AIAVREKVLHKIHQSPIFCASGSSSGCQIVVSHRRSYALKRYSVIGPSHGSECTSFHHLPIVDVVLGVSVGLIPIYVLYLRPGSFLCYGDILNITFLCFRN

SEQ ID NO: 189454 - protein, 66 aa, Glycine max
  Clone ID: PAT_MRT3847_142093C.1.pep
HNPDFRPELSVTRVHLGSIKGTGCQIIIDLIISIMACSIKCSPKPGYSPKGYEPHIFYTSESTQLI

SEQ ID NO: 189455 - protein, 50 aa, Glycine max
  Clone ID: PAT_MRT3847_142094C.1.pep
NNRICECCHFFSFSRLVVNYLITYFIINMNDSLLWWQMCFWYFKEVAKVT

SEQ ID NO: 189456 - protein, 128 aa, Glycine max
  unsure (1)..(128): unsure at all Xaa locations
  Clone ID: PAT_MRT3847_142095C.1.pep
LKYGYRFKDARCPRFLRVIFFFFFPXTHSSKDXEKKRRRPXPPXXPXXXPXXQGTPPQTFVLERPKKXXXXXXGGGGAGRKKNXKKKTQKKKKKXXXXXXXXXXPPPPXPPXPGGXGWGGXRFXSIYY

SEQ ID NO: 189457 - protein, 94 aa, Glycine max
  unsure (1)..(94): unsure at all Xaa locations
  Clone ID: PAT_MRT3847_142096C.1.pep
LPTTDERLVRTKTEVINPXLTQFTDYATPMTPLDEEXFSQVAQDMVEEWIDCDVDEDSYEEGFVRAALNGVEGXDYMGRVPLGAPEFFLLCAFT

SEQ ID NO: 189458 - protein, 104 aa, Glycine max
  unsure (1)..(104): unsure at all Xaa locations
  Clone ID: PAT_MRT3847_142097C.1.pep
RAHPSQCVGSLSTISPGAGFVSEQQLPLSXRVPVFCGPPAPPLGGLFFSSSLPRVSSPPLWRSPIGFFSSSPXGVVLGXSNRVGFLLLXXASGXLQRLXLLAVF

SEQ ID NO: 189459 - protein, 120 aa, Glycine max
  Clone ID: PAT_MRT3847_142098C.1.pep
KGCFLVLANQNPKPQKPPGGLGAMVEQVIKHYLPPKLAERGKNGIPSGEPGKLGRFFPSNKFFKPKPYLIKGVKTAFFGWQFLPAVWGGKIGKILFLQKPTRALKFFQNFKADAAKGPNL

SEQ ID NO: 189460 - protein, 61 aa, Glycine max
  Clone ID: PAT_MRT3847_142099C.1.pep
TPQYTLPADIAAAIGEEDVAKYTDAVKEFVCMTPPDSRKTTLVLRVKEKLKAEELEEDDLT

SEQ ID NO: 189461 - protein, 146 aa, Glycine max
  Clone ID: PAT_MRT3847_14209C.1.pep
MAMKKLRVVKVKGPCCPLPSPPAPRDTAVSPVHYARFLDFLKSHWAPPFTPDTLLHFLKSKLHHHPSFSHFDFHLFTWASSSLDSFRHTHLTFHWMARSLASTHRLPQLRTLLHLISSNPCPCSPSIFSCPQTQPIFSLSIHAFSK

SEQ ID NO: 189462 - protein, 81 aa, Glycine max
  unsure (1)..(81): unsure at all Xaa locations
  Clone ID: PAT_MRT3847_1420C.1.pep
VSYKPLLYCFTFCSSSFSAHRWLSDTLCVDEPDLHADGIXLSEFSGLRSSSGFLSSSRKSSEDLHSVIGFQTYAIGPSGRF

SEQ ID NO: 189463 - protein, 69 aa, Glycine max
  Clone ID: PAT_MRT3847_142100C.1.pep
IKCLFTLSKKKKKKKKKKKKKKKKKKKKKKKKKNKKKKNKNGKKQKKKGGKFLAFAHFNRMAGHAKFCR

SEQ ID NO: 189464 - protein, 114 aa, Glycine max
  unsure (1)..(114): unsure at all Xaa locations
  Clone ID: PAT_MRT3847_142101C.1.pep
FEPLIDLSLIDILSVHASDFIFLAYRVPPYXSSYKEALEPFPRFVTSLSGIXDXFHAWFSVPSLSTRPGPVQMPSPLLLRSSEEGLTFKGIPTVISLYLTRVCGFLLYVVLLPV

SEQ ID NO: 189465 - protein, 728 aa, Glycine max
  Clone ID: PAT_MRT3847_142102C.1.pep
LPPRGHPSCVSAEAFAGRAPVRSSKQEQIHNSIVSTLLALMDGLDSRGQVVLIGATNRIDAIDGALRRPGRFDREFNFPLPGCEARGEILDIHTRKWKHPPPNELKKELAASCVGYCGADLKALCTEAAIRAFRQKYPQVYTSDDKFVIDVDSVKVEKTHFIEAMSTITPAAHRGAIVYSRPLSLVVQPCLQRHLEKAMCSISDIFPPASITSELTKLSMLSYGSAIPLVYRPRLLLCGGEGTGLDHLGPAVLHELEKFPVHSLGLPSLLSDPSAKTPEEALVHIFGESRRTTPSILYLPQFDVWWETAHEQLRAVLLTLLEELPSDLPILLLGTSSVALSEVEEVPTSIFPHRSVYEVNMPCAKDRTLFFNLLIEAAMSILLEGINKKSQDTGCLPELPKAPKLASGPKVSELKAKVEAEQHALRRLRMCLRDVCNRILYDKRFNAFHYPVTDEDAPNYRSIIQNPMDMATILQHVDNGDYITSAAFLQDINLIVSNAKAYNGEDYNGARIVSRACELRDAVHGMLSQMDPALVAYCEKIASQGGPVQLSDELGDSTFPATPVVQLGQSTRMSARLRHVQPEVNMNQSYEVLKRTKKIAEVHAEDKSQEDSVPPKSSQEHQANDTNSERLENVSIEGDLHGTFTNNLADGNSPDDVTMLDGEFSGEVESVKQLFVKRSENYSIPQLERLYTRVMKGVFETKNKGVNGDLKSSVLKFLLNFVEDDANF

SEQ ID NO: 189466 - protein, 201 aa, Glycine max
  Clone ID: PAT_MRT3847_142103C.1.pep
TNESDTYRSLSLGDPNGDESLAFILELSHISPSQEQILATAPFVGAEQDTAASASHDIDMLSLPDSVPEDVFHTPPEESSLPSSSSDNHCVVNYAVVDVDDVNAGTDLVKDSELGFSDVHMEEVNGEDMGNLETLVGDVSIRVSESAEVSKSSDVAAESRGKKSKQGKNKSAVSGEQKKTVKEAGPGLRRVLPPSIARRRR

SEQ ID NO: 189467 - protein, 249 aa, Glycine max
  unsure (1)..(249): unsure at all Xaa locations
  Clone ID: PAT_MRT3847_142104C.1.pep
HASELVDSSTPLWEDYELRGFAXVAFSHVSLDFSCRWEHINNFESGTELRAQRMSEAAMRIANRSNNLQKWIICDELERKFYSARSDENHEKKETGNVESTDKWTSGDDPNQKTRKDNGEDGKCDTRDNPSSSSTNGKPSAVEEEEVILFRPLARYNSAPLYALFPPHEQMSSPKDKDDKVLPSDDCLRRTTSLPMAQNPFQIDPWGFQGDITNSRMNKSFQLLEPSMKESNAHTFFEGTISAGHPSLN

SEQ ID NO: 189468 - protein, 185 aa, Glycine max
  Clone ID: PAT_MRT3847_142105C.1.pep
KKPAKPQKKHNKQKDVERGAKLENTITQKKKKRHKQRDKKVKNPKKRQKPPTKGQQPPKTKLFKGQKSPKNQKKPNKQKTPNKKSKKGKHGKNRKKRPKKKRKKKRKYRPVTGLCETQTRENPPKTPAPKGPKQGMHPSTHKPPNLSQRIARAELFSLPPHSKKGQKGKSKTKWKNPRISQSPPV

SEQ ID NO: 189469 - protein, 437 aa, Glycine max
  Clone ID: PAT_MRT3847_142106C.1.pep
MEPPLQQKSPQPPPRTATILGKYQLTRFLGRGSFAKVYQGRSLVDGSAVAVKIIDKSKTVDAGMEPRIIREIDAMRRLHHHPNILKIHEVLATKTKIHLVVELAAGGELFAKISRRGKLPESTARRYFQQLVSALRFCHRNGVAHRDLKPQNLLLDGDGNLKVSDFGLSALPEQLKNGLLHTACGTPAYTAPEILRRSGGYDGSKADAWSCGLILFVFLAGHLPFDDTNIPAMCKKISRRDYQFPEWISKPARFVIHKLLDPNPETRISLESLFGNAWFKKSLNPETAEENALGLSYVKSSYNYEGSKKSSGVTAFDIISMSSGLDLTRLFETTSDLGSKREKRFSSSARVEVVEEKVKEVGGVLGFKIEVGKSNGAIALVKGKVALVFEVLEIVPHELLFVAVKVVEGALEFEEHHWGDWKDALQDLVLSWHNQES

SEQ ID NO: 189470 - protein, 71 aa, Glycine max
  Clone ID: PAT_MRT3847_142107C.1.pep
DFEKKKMSSITQVCRHSCSLSFFTTIHTHPFTVMATDHPFSSFHSLSILHFSSLSLNMTIKTVITKVNNLT

SEQ ID NO: 189471 - protein, 191 aa, Glycine max
  unsure (1)..(191): unsure at all Xaa locations
  Clone ID: PAT_MRT3847_142108C.1.pep
SYTLDLPCPLVDRGCHPLLRRRCLSVGPQKQIPPNSLPKNPFPSSLPDNAVIWDHYQCKSFDCLNKQNPNLGFQPSRDISRFNSYKTDLDLPIQQLFQIAAAAKSVLRLGLDVGGGTGSFAAAMRLRNVTXVVTTTMNVVAPNSEAVALRGLVPLHMPLQQRLPLFDGVLDLVRCGRAVNRWISVTAMEFL

SEQ ID NO: 189472 - protein, 66 aa, Glycine max
  Clone ID: PAT_MRT3847_142109C.1.pep
TTLFRNNNPKAPGCFLLLYSSRTNARNYGPQTKVDGDRTFTYYCVMSISKFVKATSRTPTQKEQLK

SEQ ID NO: 189473 - protein, 64 aa, Glycine max
  Clone ID: PAT_MRT3847_14210C.1.pep
LRNKWPRWPPYLNIWPKTHVTRPKIVATLGGPFANLGHKLGTVVKTQTTLTGPKKTVKNPPPPV

SEQ ID NO: 189474 - protein, 128 aa, Glycine max
  Clone ID: PAT_MRT3847_142110C.1.pep
MGLPFPAEPQKTAPSSSSSSSPSKPLKLPHRTCSTNISIPSTAKGGGNRLLKTQKLNFYVSPHRAVSAVRLMRIELGGAFADLLNEKGKGSGENEMGYVQRTLGFRTRELNHHDLRLVTDIVGGTIRW

SEQ ID NO: 189475 - protein, 130 aa, Glycine max
  unsure (1)..(130): unsure at all Xaa locations
  Clone ID: PAT_MRT3847_142111C.1.pep
MYVLCHKCFQHARKLYFYYRLNSNIRCITISQGCTTCFFLYSFTSCNCWDKYGKKVPIVPSHVHSINDSVSAEEAADDYEFVIRQLVKTRVVSVSEISDCPKFDLILLGLGPDGHIASXFPNHSALNERE

SEQ ID NO: 189476 - protein, 55 aa, Glycine max
  Clone ID: PAT_MRT3847_142112C.1.pep
TDITNIIFPCPTASILITSYPKGNKKRKKRKHFYQLRLKDIKHIFGFEQVNFSLG

SEQ ID NO: 189477 - protein, 65 aa, Glycine max
  Clone ID: PAT_MRT3847_142113C.1.pep
PPTPQVPVLIESPRYAQQYLSEGQVHSSAKSGNTLTEHRDQDKDQSRIANRSQRKNSESKERERL

SEQ ID NO: 189478 - protein, 139 aa, Glycine max
  Clone ID: PAT_MRT3847_142114C.1.pep
FGSSSGTRKPPRGKLPLPIIITTICVLLFIAVLYAERLSFLNSSSIFKSKTCPRKHNKSKSNDKKSEEVFANASWIDDRFDFDPEECNVANGKWVFNSSLKPLYSDTSCPYIDRQFSCVKNGRNDSDYLHWEWQPEDCT

SEQ ID NO: 189479 - protein, 57 aa, Glycine max
  Clone ID: PAT_MRT3847_142115C.1.pep
TSTLEVEAYPALDELTSQLSTLNLERVRQIKSRLVELSGRVQKVCNIHRPTPVTMHI

SEQ ID NO: 189480 - protein, 97 aa, Glycine max
  Clone ID: PAT_MRT3847_142116C.1.pep
KGDPFPCCKYLYRDSDLLEKEFCNHTQVGMFFSSNKAQIQADQDAAATFGVMGERNSLKLPRRAAFNIRRWLSFNCTIQIAAEGKGRRDPLGNWGYW

SEQ ID NO: 189481 - protein, 36 aa, Glycine max
  Clone ID: PAT_MRT3847_142117C.1.pep
ILSRQPHLDDEIYNKLVQRAKDVGYDVSKLHKTPQS

SEQ ID NO: 189482 - protein, 43 aa, Glycine max
  Clone ID: PAT_MRT3847_142118C.1.pep
WHRRAKLWVCVRMRASNGQPPAYASGACSNNDIVTTRIRTGHP

SEQ ID NO: 189483 - protein, 62 aa, Glycine max
  unsure (1)..(62): unsure at all Xaa locations
  Clone ID: PAT_MRT3847_142119C.1.pep
HGTRAPRTNRKKTSXVARRREPPTQGTTEYPGKPAEKGAKNDPEERRTQTAQASKQRQATPG

SEQ ID NO: 189484 - protein, 51 aa, Glycine max
  Clone ID: PAT_MRT3847_14211C.1.pep
MKFMKLGTKADTFYTEQATRTLISEIVVDLVIQINDITYLLHKLQFPLLPK

SEQ ID NO: 189485 - protein, 215 aa, Glycine max
  Clone ID: PAT_MRT3847_142120C.1.pep
VFVKAGSLLDVDSHILYSPLPCRVPLPGFESFRFCFSQYDEKDRNLLRNLCFHLGAKYGEKLTKKVTHLLCKFTNGPKYEAACKWGIQSVTSEWIFECVKQNGVVAIDQFLPKEVTAQDRDAGICTVSQFPTQAVQMISDMPSQLSSQSQTLRGTTNKNVSCGVDNHETSFKIPSNYSKKARACGGNLAYPIRSLQLQIQVFMLMTRIFPKTICL

SEQ ID NO: 189486 - protein, 92 aa, Glycine max
  unsure (1)..(92): unsure at all Xaa locations
  Clone ID: PAT_MRT3847_142121C.1.pep
MAKSKNNANKLSYISVPSQIINSISSSSLQSLLDSPKKSSRNTNSXSLSSSPTTNSIIFRKPRMWFLTLLSFGYLGMLKFGLTLYTPFSPYP

SEQ ID NO: 189487 - protein, 55 aa, Glycine max
  Clone ID: PAT_MRT3847_142122C.1.pep
LYLQSLLSPYIIPFHLYPTFKIFKFTYTLLLSIYFLIYILHIIPTSIKNTNQFIS

SEQ ID NO: 189488 - protein, 104 aa, Glycine max
  unsure (1)..(104): unsure at all Xaa locations
  Clone ID: PAT_MRT3847_142123C.1.pep
VNHKRHYLVKSDGSSNNIKIPGSVTETLIHYSSLNITPQQTVKEILVTATLFXNKFSCKNLVFKIGHDSLMYNTLNHGGRTIFLEXDNLWIQHTMRRNSMLGAY

SEQ ID NO: 189489 - protein, 76 aa, Glycine max
  Clone ID: PAT_MRT3847_142124C.1.pep
KKRFFKKKFFPRGKIFWETPQKSAPPKIFFCPPFFPRFTMGGGATAHTQQKVFLIPQKEKQTFFKKKKLKGGSGNH

SEQ ID NO: 189490 - protein, 61 aa, Glycine max
  Clone ID: PAT_MRT3847_142125C.1.pep
SPEDLTSVVCQKGSNDLHSWRIPVCRGNGSYKLHQSETNQLPPLFKLKFLYTLTNQQFIVV

SEQ ID NO: 189491 - protein, 44 aa, Glycine max
  Clone ID: PAT_MRT3847_142126C.1.pep
LVDKEEKMKGASSGGVWNTSSGKQSDKDSYVNVLESKGGDAMLS

SEQ ID NO: 189492 - protein, 42 aa, Glycine max
  Clone ID: PAT_MRT3847_142127C.1.pep
HTCTIQLNNWFFNNSKQHSSSNQAEEDSVAHSLMSILPYFLI

SEQ ID NO: 189493 - protein, 80 aa, Glycine max
  Clone ID: PAT_MRT3847_142128C.1.pep
MEQKQQSIDPFKGKTRLPSFAIPERYELNLIPDLSACTFSVTVQISLTINASTEFLVLNALELVIQNTHFTNSQGQVSSF

SEQ ID NO: 189494 - protein, 108 aa, Glycine max
  unsure (1)..(108): unsure at all Xaa locations
  Clone ID: PAT_MRT3847_142129C.1.pep
MKQMYTGHMHETEAGEESANLILMAIGLQVHSRYVRXKFPLTIREHWWCSQRVLPWNADXDITKTWKQGGTDXPLIDAXMIELWGTRWLRNNIRVTGTRHAERMMITP

SEQ ID NO: 189495 - protein, 88 aa, Glycine max
  unsure (1)..(88): unsure at all Xaa locations
  Clone ID: PAT_MRT3847_14212C.1.pep
XXPXXXXXVAXXXXXXXXXXXXXXXHSXLVXXXXXYXXXXXXXXXFLALXXGXXFXAVCFAGVVXXLXLXEXXXXXXXXXXXXKXXFF

SEQ ID NO: 189496 - protein, 47 aa, Glycine max
  Clone ID: PAT_MRT3847_142130C.1.pep
CFKSFNIIILSTCQKLIRMSIIYTYSYTSKSKLDETHDHPNLTISLF

SEQ ID NO: 189497 - protein, 58 aa, Glycine max
  Clone ID: PAT_MRT3847_142131C.1.pep
ILFHFFGSLVIVCLFVSLFVSCHVGNWKGGLVPSLEEFESRSKGSTSLRAIGLRRNPN

SEQ ID NO: 189498 - protein, 72 aa, Glycine max
  Clone ID: PAT_MRT3847_142132C.1.pep
NIGNTHVIAKKNTTIYDMLNQLFLLSILQHPLIDKQRVFFKTSQHTGLLGLRKTSSAVGLKETVQSFYKGGV

SEQ ID NO: 189499 - protein, 143 aa, Glycine max
  unsure (1)..(143): unsure at all Xaa locations
  Clone ID: PAT_MRT3847_142133C.1.pep
RSSSCSAIYLLILRHVGLKKKKKKKKKKKKKKKKKXKKKKKXXXXXXXGXXXXXLGPFKTPGFILPPGPSGPYQFSFFKFFFLVWLNHLPYVFPLRNCFPPPFPPPFPPRSLKGEPWGASFLGFFPLFFFPFLSPFPLGELFF

SEQ ID NO: 189500 - protein, 82 aa, Glycine max
  unsure (1)..(82): unsure at all Xaa locations
  Clone ID: PAT_MRT3847_142134C.1.pep
RRELLHKAHVEETYVIXWTNXKKHILELPSGGAAMLTEGSNLVKLARKDQSLAVSTMLRSKNKIKYHFLQVWPNGEGHWFAP

SEQ ID NO: 189501 - protein, 78 aa, Glycine max
  Clone ID: PAT_MRT3847_142135C.1.pep
STQCCGHCAHHYRPSPPLLPKPSGAPAATAPPFTTSLAPLAATSPSSSTAPARPYENTLTPPSPSLTSSHAWRPTSWP

SEQ ID NO: 189502 - protein, 81 aa, Glycine max
  Clone ID: PAT_MRT3847_142136C.1.pep
PRTIKKQQRVISSHPHEPAAVLIGPLNQSTNPFKEKPLKHLLHKTLQIPCTYRRGRKFKAQIMREALKAPHGACRQHGTAF

SEQ ID NO: 189503 - protein, 83 aa, Glycine max
  unsure (1)..(83): unsure at all Xaa locations
  Clone ID: PAT_MRT3847_142137C.1.pep
NAVSVALLTVPVTSTASFHHQXXPHYDQLMTIICQSNLTLQHQLRLIIHWFPHCHSHXVSQPVTVLLTVPLLVSWGKSCGSAC

SEQ ID NO: 189504 - protein, 45 aa, Glycine max
  Clone ID: PAT_MRT3847_142138C.1.pep
NQRDRCALSASVSITVRLLVKNHCAIHAPAVHHISGAFHERMPPY

SEQ ID NO: 189505 - protein, 45 aa, Glycine max
  unsure (1)..(45): unsure at all Xaa locations
  Clone ID: PAT_MRT3847_142139C.1.pep
FAINNSPMLLGKKTIIFKCVYECIYFQKPFFFIKFXQNVYYVTFM

SEQ ID NO: 189506 - protein, 56 aa, Glycine max
  Clone ID: PAT_MRT3847_14213C.1.pep
FGSIQIYDMDPSLFVCGCTSMFMCISACALIDSSFQAVGVAQPFRGAPLEYFHMDF

SEQ ID NO: 189507 - protein, 56 aa, Glycine max
  Clone ID: PAT_MRT3847_142140C.1.pep
SNYENHVSTSFICIVVTTKYLCCARLYVYELIISITIMSQPNWWASSIITRAQIPA

SEQ ID NO: 189508 - protein, 104 aa, Glycine max
  Clone ID: PAT_MRT3847_142141C.1.pep
FRKQFMEAALSLFGSGWVWLVLKREEKRLEIVKTSNAICPIVWDDIPIINLDLWEHAYYLDSRNDRAKYVDVFMNHLVSWDAAMDRLTRAEAFVNLGEPKIPVA

SEQ ID NO: 189509 - protein, 83 aa, Glycine max
  Clone ID: PAT_MRT3847_142142C.1.pep
ERKLLFLLSLLGFENYAISSFNLMLFFFPLLGFPPFPPHHFWMIMFAHVAFSNEKSYFFFSIHPRVILLFADDVLGQRFFLFH

SEQ ID NO: 189510 - protein, 246 aa, Glycine max
  Clone ID: PAT_MRT3847_142143C.1.pep
MTTLVQFSIKCSNLKHNFFHHGIYKRPTCSFSRIETKFGSFNGNSLKLRVGRESLCFLGGAVFKNGEEKGCKREKRAVLVKNNQGFGFNGGGGGGRDDGATARILGNLALAIGLTYLSMTGQLGWILDAIVSIWLIAVLIPIVGLGAFLLWAGRDIMQGTCPNCGNDFQVFKSSLNDDLQLCPFCGQPFSVVGNEFVKDSVKFSNQSTTFGQAFNNFTRSRNALLLAGEKDSGKAIDVEAEIKDVD

SEQ ID NO: 189511 - protein, 147 aa, Glycine max
  unsure (1)..(147): unsure at all Xaa locations
  Clone ID: PAT_MRT3847_142144C.1.pep
AKRDDLLYSDSVSSEMASVALTPAPVTDEMSSHRGLPSLSKNSSPFRLEARGSKTIKTDKPYEINGGVSETEGADASGKKGNAKDIYHSVHICGAIVDGYSPIYDTIDXSPTGDXVYTSGTTGSATYACTLLDTVAKECPLDYATTA

SEQ ID NO: 189512 - protein, 54 aa, Glycine max
  Clone ID: PAT_MRT3847_142145C.1.pep
TYMNLRWFDIYFLRVLQLRIHFLIHSFLPTLYYWSNFIKTMVFTVRICHIDLWE

SEQ ID NO: 189513 - protein, 47 aa, Glycine max
  Clone ID: PAT_MRT3847_142146C.1.pep
TAHHYISSMMAMHKFIVAFCSAGRTIFIDSDGIVCATHTTMDVWRLF

SEQ ID NO: 189514 - protein, 100 aa, Glycine max
  unsure (1)..(100): unsure at all Xaa locations
  Clone ID: PAT_MRT3847_142147C.1.pep
FVIPAGYPVVVNAPPDLKFFAFGIKAENNQRNFLSGLKANLISPIPSQVQELGFPGFAKDIXTLIKSPSGSPFVDAPPPQKKEGDKGKKGPLFSILRAFF

SEQ ID NO: 189515 - protein, 61 aa, Glycine max
  unsure (1)..(61): unsure at all Xaa locations
  Clone ID: PAT_MRT3847_142148C.1.pep
PHRLEGAHYLTTGELDSLSEHQLVDCDHLCYPEQYXTCDSCCNGGLMNNAFDYILSTGASH

SEQ ID NO: 189516 - protein, 65 aa, Glycine max
  Clone ID: PAT_MRT3847_142149C.1.pep
VQERVFTHCSKPFPQRFSIKKQPFFLYPFRTPFHCFLNPSPGGIMGSFNFVFPVFKKKGRLQVHQ

SEQ ID NO: 189517 - protein, 56 aa, Glycine max
  Clone ID: PAT_MRT3847_14214C.1.pep
QSFILIVSSNHNQIVGVASVCIEVSVDVQRVSTSARGIVVAPPWPPRRPRFVVWKS

SEQ ID NO: 189518 - protein, 65 aa, Glycine max
  Clone ID: PAT_MRT3847_142150C.1.pep
RNMFAYAQAALTAKLHATPIRGFPNDSLCISSGTRAIPTVGLLHNRKSLVAAAATVVEVTTGSKG

SEQ ID NO: 189519 - protein, 158 aa, Glycine max
  Clone ID: PAT_MRT3847_142151C.1.pep
KLERKQNSLPEDSHADGNVNDNSILNRLKSTYSRTTSTRKSALTSAEYTDNRNSKVHNSSMMSRLKSSYSRATSVKKPQIPTTVEENTTNTSNKQQVLPIRLSSHQITLLLSSIWAQSIYPLNTSENFEAIAHTYSLVLLVARSKNSSHEALTQSFQL

SEQ ID NO: 189520 - protein, 230 aa, Glycine max
  unsure (1)..(230): unsure at all Xaa locations
  Clone ID: PAT_MRT3847_142152C.1.pep
VNQSDLVREMNQSITLDLGKPTYITNKLAPMLGNGILRANGLSWAQQRKLVAAEFFMDKVKGMVGLMIESAQPLLLKWEQLIESQGSATAEVKVDVNLRGFSADVISRVCFGHSYSKGKEVFSKLRSIQKAMSKHGGFLFGLSSFRDKLKHFSSNKQNEIAGLEKEIESLIWELVEERKRECSETSSSEKDLMQLLLEAAMTDQSLGKDFSKRFIVDNCKNIYXAGHETT

SEQ ID NO: 189521 - protein, 118 aa, Glycine max
  Clone ID: PAT_MRT3847_142153C.1.pep
PVTPSPPSPSTPSPFPSPTTPVTPSPPSPFPSPTPPVTPSPPSPSTPSPFPSPTTPVTPSPPSPTTPSPFPSPTTPVTPSPPSPFPSPTPAVTPSPVPSPPSPTTVPPVHSPSPGYLP

SEQ ID NO: 189522 - protein, 161 aa, Glycine max
  Clone ID: PAT_MRT3847_142154C.1.pep
GLVSLLECMNCITEGSFNITAIHVISHSGEGLVSNVVYALLGVSAMSRVHKCATILQQLAAICTLTERTTWKAILCWQTLHGWLHSAVQALPAEYLSHGEAEAIVPLWSKALADAATDYLESKNSDGLKSDFGHMQGKGGRVLKRLVREFADAHRNIPNVT

SEQ ID NO: 189523 - protein, 144 aa, Glycine max
  unsure (1)..(144): unsure at all Xaa locations
  Clone ID: PAT_MRT3847_142155C.1.pep
MSMYGRDPWGGPLEIHATDSATDDERSRNLQELDRGALDETQQSWLLGAGEQKKNKKTYVDLGCIIVSRKLFIWTLGTLAVFAFLSAFITLIVKTDPRHHHKPPPPDNYTIALHKALLFFNAQKYGKLPLHNNVXWRGNLCLHD

SEQ ID NO: 189524 - protein, 619 aa, Glycine max
  Clone ID: PAT_MRT3847_142156C.1.pep
MSMYGRDPWGGPLEIHATDSATDDERSRNLQELDRGALDETQQSWLLGAGEQKKKKKRYVDLGCIIVSRKLFIWTLGTLAVCAFLAGFITLIVKTVPRHHHKPPPPDNYTIALHKALLFFNAQKSGKLPRHNNVSWRGNSGLQDGKGDGVPPVIKDLVGGYYDAGDAIKFNFPMSFSMTMLSWSVIEYSGKYQAAGELGHVKDIIKWGTDYLLKNFNSTADTITQLGMQVGSGDTSQGSTTPNDHYCWMRPEDIDYDRPTQTCTTCSDLAAEMAAALAAASIVFKDNRAYSQKLVHGATTLFKFSRDSRGRYSPNGREASVFYNSTSYWDEFVWGGAWMYFATGNSSYLKLATTPRLAKHAGAFWGGPDYGVLSWDNKLTGAQVLLSRLRLFLSPGYPYEEILSTFHNQTGIVMCSYLPMFTSFNRTRGGLIQLNHGRPQPLQYVVNAAFLAALYSDYLDAADTPGWYCGPNFFSTDVLRDFAKTQIDYILGKNPRKMSYIVGFGNHYPKHVHHRGASIPKNKVKYNCKGGWKWRDSSKPNPHTIVGAMVAGPDKHDHFHDVRTNYNYTEPTLAGNAGLVAALVALSGDKTTGIDKNTLFSAVPPMFPTPPPPPAPWKP

SEQ ID NO: 189525 - protein, 45 aa, Glycine max
  Clone ID: PAT_MRT3847_142157C.1.pep
LRGAYARILLAHIVTEGGSSEAHGYEPLIWGLECDQPDYGGKILQ

SEQ ID NO: 189526 - protein, 91 aa, Glycine max
  unsure (1)..(91): unsure at all Xaa locations
  Clone ID: PAT_MRT3847_142158C.1.pep
MTHFTGKYHDDLILRADYSVTPXESGILAADDTTGTVGSAVSEXGKETLNPDRXALKQLLFTDPGGLQYLSGVILFEEILYQSTAVGKPFV

SEQ ID NO: 189527 - protein, 80 aa, Glycine max
  unsure (1)..(80): unsure at all Xaa locations
  Clone ID: PAT_MRT3847_142159C.1.pep
SDPSEKEDQEKPLKIDARLXQIILACRADVNALLATNVEELXWTKLETASGSIKNLQIVTCKKALPKNTVGGTILRRDLL

SEQ ID NO: 189528 - protein, 68 aa, Glycine max
  unsure (1)..(68): unsure at all Xaa locations
  Clone ID: PAT_MRT3847_14215C.1.pep
SPLLASERSHRTTSKLKVNNDATSSHDDFVAATSSTLHPHEIPHNIRGKNXCXTHTSASPKYSISSTQ

SEQ ID NO: 189529 - protein, 55 aa, Glycine max
  Clone ID: PAT_MRT3847_142160C.1.pep
DWSQRKATWNEIEVSRVVTPSDGDRSHRHILQMTLTIMVTSSEHRSLTEITLCFA

SEQ ID NO: 189530 - protein, 71 aa, Glycine max
  Clone ID: PAT_MRT3847_142161C.1.pep
CRYHCPWKHNLLGCKSASRPLLQGFPSPLFQMTSVFPLKIYMRRQDLDDRQSFRRIIIRKVYFVSHHSISS

SEQ ID NO: 189531 - protein, 39 aa, Glycine max
  Clone ID: PAT_MRT3847_142162C.1.pep
ASCIEFLARRRSPDDDGLDIQSLTIAGALSGVLRTVVAS

SEQ ID NO: 189532 - protein, 70 aa, Glycine max
  Clone ID: PAT_MRT3847_142163C.1.pep
EVCPSFGSISLTVVDARGLGCSKIGVMLFHHVYWMPEQGSQGKCQIMWLCPSIFIIKPPPSWWRRWCIKS

SEQ ID NO: 189533 - protein, 96 aa, Glycine max
  unsure (1)..(96): unsure at all Xaa locations
  Clone ID: PAT_MRT3847_142164C.1.pep
ALQITYLLKLAEPYTLIVTWIGADPLIARIAMILTDAIVXDFVNLESPCPDCASDDTWIFETTLGTSNGGFTNTVXATSXGTALACDASTRWITIP

SEQ ID NO: 189534 - protein, 386 aa, Glycine max
  unsure (1)..(386): unsure at all Xaa locations
  Clone ID: PAT_MRT3847_142165C.1.pep
ILCTVQGNTTYKDDLYLRKRTGMRRXWLCCTCQVEESYPSNENEHLKSPRNYGDGNQKGSKVSAPVKPETQKAPPPIEAPALSLDELKEKTDNFGSKALIGEGSYGRVYYATLNNGKAVAVKKLDVSSEPESNNEFLTQVSMVSRLKNGNFVELHGYCVEGNLRVLAYEFATMGSLHDILHGRKGVQGAQPGPTLDWIQRVRIAVDAARGLEYLHEKVQPPIIHRDIRSSNVLIFEDYKAKIADFNLSNQAPDMAARLHSTRVLGTFGYHAPEYAMTGQLTQKSDVYSFGVVLLELLTGRKPVDHTMPRGQQSLVTWATPRLSEDKVKQCVDPKLKGEYPPKGVAKLAAVAALCVQYEAEFRPNMSIVVKALQPLLKSPAPAAPES

SEQ ID NO: 189535 - protein, 74 aa, Glycine max
  Clone ID: PAT_MRT3847_142166C.1.pep
PRGPKIHPVVPVQKGGPVLPPRGPVHPAGPLVGGKPPGSQGRGAPGPLKSPQKIGGFRQKERIPPPPREGGQNP

SEQ ID NO: 189536 - protein, 412 aa, Glycine max
  unsure (1)..(412): unsure at all Xaa locations
  Clone ID: PAT_MRT3847_142167C.1.pep
MDRRYRDYHHRPAHLAHASPPEYFVRLENTTYKDDLYLRKRTRMRRWLCCTCQVEESYPSNENEHLKSPRNYGDGNQKGSKVSAPVKPETQKAPPPIEAPALSLDELKEKTDNFGSKALIGEGSYGRVYYATLNNGKAVAVKKLDVSSEPESNNEFLTXQVSMVSRLKDDNFVXELHGYCVERNLRVLAYEFATMGSLHDILHGRKGVQGAQPGPTLDWIQRVRIAVDAARGLEYLHEKVQPPIIHRDIRSSNVLIFEDYKAKIADFNLSNQAPDMAARLHSTRVLGTFGYHAPEYAMTGQLTQKXSDVYSFGVVLLELLTGRKPVDHTMPRGQQSLVTWATPRLSEDKVKQCVDPKLKGEYPPKGVAKLGAVAALCVQYEAEFRPNMSIVVKALQPLLKSPAPAPAPVPES

SEQ ID NO: 189537 - protein, 74 aa, Glycine max
  Clone ID: PAT_MRT3847_142168C.1.pep
LRRFSKKIPILGRDWKAFFPKTNFVQIYLPKARLHKFLFSRVKLKGYGFYSKPQFSQTNCGKFFPIHHHDCSLL

SEQ ID NO: 189538 - protein, 86 aa, Glycine max
  Clone ID: PAT_MRT3847_142169C.1.pep
ILAEQGASAISMSHAVIVCKCGPSVRHGAIDARGYVHVDDRYPGDAKLVLDEVDEVLGLRERESRDLVADLGDVIRCPRTRRRTRG

SEQ ID NO: 189539 - protein, 191 aa, Glycine max
  Clone ID: PAT_MRT3847_14216C.1.pep
MAKNNKYASINFNHIYEKTNKNNPSPSSSSYSSVSYSAVSAPNKPHGRILVLTRPTPKPVTPPTPQPQPPPPSPIQHNHPRSEPGSDAISLRPLGRTGTGSPLSSVVPVVSSPDKDLPLLSPQPPKTNKFVPPHLRPGFVPREEAPPPGPELRPNGRPKSGGGQFRMRRGGPGGVSDSGLLGRGSRPSSSG

SEQ ID NO: 189540 - protein, 429 aa, Glycine max
  Clone ID: PAT_MRT3847_142170C.1.pep
MGRSPCCEKTGLKKGPWTPEEDQKLIAFIEKHGHGSWRALPAKARLRRCGKSCRLRWSNYLRPDIKRGKFSLQEEQTIIQLHALLGNRWSAIASHLPKRTDNEIKNYWNTHLKKRLDKMGIDLTTHKPKNESLAYSKDGSNLGHMAQWESARLEAEARLVRESKLQEQQNNLGPMSSPSSTQITRLVLNKITPLQQKQHSLPPCLDVLKAWQSSWSNNNNNINKYSSLNDKKKTMHVRSMYAMMLSNDDLESPTSTLCFPESVQMNNNNNNSNAMVSTDHLGLINENYLLPPTTLDEFIITKSLGTTSSEGAIETVNGGGSDSWRYFTKHNNEEEQVETDEKTIMYDTISCLQDDDGDIMVAVEALRGAGYYDDDNNSNNNNVTFTHLSSNVNNMVGFENDFDSNEDLAAVNLHVNFEENKDYWNGMLN

SEQ ID NO: 189541 - protein, 367 aa, Glycine max
  unsure (1)..(367): unsure at all Xaa locations
  Clone ID: PAT_MRT3847_142171C.1.pep
MAETTSASVSSPAGDSNWRENKLWKGTFAVAGIMLTLVTYGVLQEKIMRVPYGVNKDYFKYSLFLVFCNRITTSAVSAGALLASKKALDPVAPIYKYCLVSVSNILTTSCQYEALKYVSFPVQTLAKCAKMIPVMVWGTAIMQKRYRGTDYLLAFVVTLGCSVFILYPAGTDISPYGRGRENTVWGVLLMLGYLGCDGFTSTFQDKMFKGYNMEIHNQIFYTTLCSCILSLAGLIIQGHLLPAVEFVYIHKDCFXDIALLSTVATASQFFISYTIRTFGALTFATIMTTRQLVSILLSCVWFAHPLSWEQWIGAVIVFGAIYAKSFLRKAPEKTTSSVEHVQNGNSNNLGEPMMEANSFADLMWCYP

SEQ ID NO: 189542 - protein, 35 aa, Glycine max
  Clone ID: PAT_MRT3847_142172C.1.pep
NDWDKLINSIIGNSISKQFNSGWAVWYQKNASTNS

SEQ ID NO: 189543 - protein, 35 aa, Glycine max
  Clone ID: PAT_MRT3847_142173C.1.pep
IISTTLKDMNNYFLVAQENCFYFCDLEVDFATFIL

SEQ ID NO: 189544 - protein, 50 aa, Glycine max
  Clone ID: PAT_MRT3847_142174C.1.pep
CHVNEVYLEWLLDTWLRICKLHMYSYTSYCFMLLTLHNKKKGRTRKAFPK

SEQ ID NO: 189545 - protein, 48 aa, Glycine max
  unsure (1)..(48): unsure at all Xaa locations
  Clone ID: PAT_MRT3847_142175C.1.pep
DTTIIPFLVTIKPQNKFTKPNPYFRXFLPLTLSILVTVRQVKKKGKLH

SEQ ID NO: 189546 - protein, 86 aa, Glycine max
  unsure (1)..(86): unsure at all Xaa locations
  Clone ID: PAT_MRT3847_142176C.1.pep
STAXPIQRXRTLAASXXCARRLXDGPXIXCXPDXAXASXXXXXAAAPEHXPXTXXTVAXXXWKVTIXXPXLLHNIAPKTXXXREEK

SEQ ID NO: 189547 - protein, 125 aa, Glycine max
  Clone ID: PAT_MRT3847_142177C.1.pep
MAESGEHDHDFTSGESGAAATYPKQCSALRKNEFVMIKGRPCKVVEMSTSKTGKHGHAKVHLVALDIFTNKKLEDICPSTHNMEVPVVKRKEYQLLSTNEDGFISLMDLETCDTKDDLRLPEGEI

SEQ ID NO: 189548 - protein, 72 aa, Glycine max
  Clone ID: PAT_MRT3847_142178C.1.pep
TITLQCHEFCTKMQSRQGLCLNFEEIHHPSLCQFPKLIFFSFIGLKFTFFYSKICLNYSYYFEHIFLLVKIY

SEQ ID NO: 189549 - protein, 58 aa, Glycine max
  Clone ID: PAT_MRT3847_142179C.1.pep
GGICSGKLCPSKAKHHPVTRQPINKCEYLALIINTRWFCCELIKMATHLERIWPSIKG

SEQ ID NO: 189550 - protein, 99 aa, Glycine max
  Clone ID: PAT_MRT3847_14217C.1.pep
MMFFFFYPFFLFNNFILICFFCLLYQKFLTEKTKLKKGEKKIRVASPNQPKTEKNTGNYGKKTNKGGKGKKAFFSEPARGGKTRGALFPKQGLSHPEIP

SEQ ID NO: 189551 - protein, 102 aa, Glycine max
  unsure (1)..(102): unsure at all Xaa locations
  Clone ID: PAT_MRT3847_142180C.1.pep
KEKMXQVXLLEMSIIGMESCAIKHLFQSAVLAQWMNDVNIKHVIFRLKLKRFRLNFPSTSINHECCKYRKVCTDEGSELLEKLYSTLFCKLSYFLSAFVVNL

SEQ ID NO: 189552 - protein, 98 aa, Glycine max
  unsure (1)..(98): unsure at all Xaa locations
  Clone ID: PAT_MRT3847_142181C.1.pep
MLATDLCTLTAVTVSADERAGIVNAHKDKLQLLAGQHVHILETLSRKGTQRVEIVRDLQNQHDXVEARMXRMRAHGEAEYQMLYEPVYXKRYEMVNGG

SEQ ID NO: 189553 - protein, 95 aa, Glycine max
  unsure (1)..(95): unsure at all Xaa locations
  Clone ID: PAT_MRT3847_142182C.1.pep
KLPXALALCWFWXXXXXXXXRXXFLXXCFXXXVGVXXXXCLXFXXSLVKXXXWXXGLVXXMASIINXPXSGFLFXMVSVFXRVHVAXXXGLGVXX

SEQ ID NO: 189554 - protein, 55 aa, Glycine max
  Clone ID: PAT_MRT3847_142183C.1.pep
PGTGSGFPARPTRAFCSFMSTLSVTRHPPIPRKNAGDIIKDRAGWGDHQKAPIEG

SEQ ID NO: 189555 - protein, 156 aa, Glycine max
  Clone ID: PAT_MRT3847_142184C.1.pep
MHKETEDDYAYLSNLLQDFTIIPNIDKAWLFSSPGSQLQGMFVVSQPDLLTNKRRTSIMSCNILKQSDSSVKFLWAPFPIEMSGVSMIVPSPSGSKLLVIRNPENEAPCCFEIWSSSRMEKEFHIPQSLHGSVYNDGWFEGASGNLDETCIAYGAE

SEQ ID NO: 189556 - protein, 90 aa, Glycine max
  Clone ID: PAT_MRT3847_142185C.1.pep
KYKLIRRIHILSIIIELPLLLYDGWAIVIDHEFCERESVESKATSAHPRNVLIIHHDMRLHHALIIDAYPGSSSISSMQETEITLRSGIE

SEQ ID NO: 189557 - protein, 37 aa, Glycine max
  Clone ID: PAT_MRT3847_142186C.1.pep
LLATKIPTMQLECNLLSSLRQGRQPPLKTSRRLLHAL

SEQ ID NO: 189558 - protein, 307 aa, Glycine max
  unsure (1)..(307): unsure at all Xaa locations
  Clone ID: PAT_MRT3847_142187C.1.pep
PKLMSLELGRPRANIGHGDQKEVGGKLLXNVVPFMCSNGNSEXEISNLIRWRKTFGNVVLIMHCNGPVERTALEWSLLYGTIFSSVVILSEGSNVDLVVXEGHLDYAYRYLPKIFDQFSSAEGFLFVQDNTILNYWNLLQADKTKLWITNKVSESWSSILTNGEDSDWLSQQARMVQKVVSMMPAHFQVSYKETSDNDKNLLICSSELFYVPQRLISDFVELVNLVGDLEIHQKVAIPMFFVSLDSPQNFDPVLDRMIYKQNPPANSTTLYSAKVPAVHPLSVSSEQDFIKLIRIMAEGDPLLMELV

SEQ ID NO: 189559 - protein, 65 aa, Glycine max
  Clone ID: PAT_MRT3847_142188C.1.pep
IFCIKISIYIYVRTYFISFYFCIGVYRVHGISLSSRALYVCERYSDSLEYIILIYIYIYIYIYIV

SEQ ID NO: 189560 - protein, 62 aa, Glycine max
  Clone ID: PAT_MRT3847_142189C.1.pep
NLQLYKSISHTTDMGACSVHQKQHLYQLRFINISTLGNPKILNLHQLQISLFTGLPKTTNTS

SEQ ID NO: 189561 - protein, 195 aa, Glycine max
  Clone ID: PAT_MRT3847_14218C.1.pep
MAKNNKYASINFNHIYEKTNTTNPHNKNPSLSSSSASYSAVSAPNKPHGRILVLTRPTPKPITPSTPQPQQQQPPPPTPIQHNHPRSEPGSDAISLRPLGRTGTGSPLLSLPVVSSPDKDLPLLSPQPPKTDKFVPPHLRPGFVPREEAPPPGPELRPNGRPKSGGGPDRMRRVGPGGVSDAGVLGRGTRPSSSG

SEQ ID NO: 189562 - protein, 56 aa, Glycine max
  Clone ID: PAT_MRT3847_142190C.1.pep
PNTGPRPIPGFKTIKFKVGKGKKTPPYLFIELFIRICEIGTLKWPDACGRPGIPAR

SEQ ID NO: 189563 - protein, 79 aa, Glycine max
  Clone ID: PAT_MRT3847_142191C.1.pep
PPSKGPPFPLSALDSKGLFYPFFRAGPLKGFVAPPLVHLGARACKTPPIVLPPNFVMGGGPPFGRFPPFSLIPLFFGRQ

SEQ ID NO: 189564 - protein, 46 aa, Glycine max
  Clone ID: PAT_MRT3847_142192C.1.pep
GSKRCIMWPALCQLYKRSQMKFINLLPQHCSYTTPTFQPLKHLNRL

SEQ ID NO: 189565 - protein, 73 aa, Glycine max
  Clone ID: PAT_MRT3847_142193C.1.pep
VFFFFFFFFFFFFFFFFFFWGSLKTIFPSTKFEKKQKPWGYFIFLLIKTEISKGCKTFYYRVPSCLKLGPILP

SEQ ID NO: 189566 - protein, 98 aa, Glycine max
  unsure (1)..(98): unsure at all Xaa locations
  Clone ID: PAT_MRT3847_142194C.1.pep
SLMHMDLTVYLFSGPSPRYSDSLSMLSRRLISAPRLEWDHPEIGLXINRVSYMHLSCNQMSGPTPQSLGRMSVLATLKSDMDTLSGTMPVSLYSSAIE

SEQ ID NO: 189567 - protein, 98 aa, Glycine max
  Clone ID: PAT_MRT3847_142195C.1.pep
VSDKLNRKLYPTAVYLGALAVVIAGYGCHDCIMGGAMLVDDSIHANPLTAFLTLIRMPLKGGMTIKTLTFWYTIVHIEPDLSTTRLLGRPTFHADDGT

SEQ ID NO: 189568 - protein, 57 aa, Glycine max
  Clone ID: PAT_MRT3847_142196C.1.pep
MRNSVYFSKVRFYGKRCISFSLDDYRYYPRKQCHDWGEQDPFENIWIEPPKDFSACM

SEQ ID NO: 189569 - protein, 327 aa, Glycine max
  Clone ID: PAT_MRT3847_142197C.1.pep
MATEAEFEYEEASEAEIKYDEEYVQNSRGLKLFACRWLPANGSPKALIFLCHGYAMECSITMKSTGTRLAKAGFAVYGIDYEGHGKSEGVPGLVMNFDFVIDDCSQHFTRICEKAENKKKMRYLMGESMGGAVALLLHRKKPEYWDGAILVAPMCKIAEEMKPNTMVISVLSALSRVFPSWRIVPTPDIIDLAFKVPKVREEIRANRYCYKGNPRLRTAYELLRVSTEIEQSLHEVSLPFIVLHGEEDQVTDKAVSKQLYDEAASSDKTLKSYPEMWHGLLYGEPPQNLQIVFSDIIGWIDQKSRYGNTRLERELKEEHEHLFKSDL

SEQ ID NO: 189570 - protein, 203 aa, Glycine max
  Clone ID: PAT_MRT3847_142198C.1.pep
MASEAEIEYEEASEAEIKYDEEYVWNSRGLKLFACRWLPANGSPKALIFLCHGYAMECSITMKSTATRLAKAGYAVYGIDYEGHGKSEGVPGLVMNFDFVIDDCSEHFTTICEKAENKKKMRYLMGESMGGAVALLLHRKKPQYWDGAILVAPMCKISEEMRPNTVVVSVLSALSKVVPSGRIVPIPEIIDVAFKVPEVREGE

SEQ ID NO: 189571 - protein, 67 aa, Glycine max
  unsure (1)..(67): unsure at all Xaa locations
  Clone ID: PAT_MRT3847_142199C.1.pep
XVLGIXPTSTGAAKAAXLVLPQLKGRLNGIALRVPTPNVRGADLGASGEKKGLTGWDGNAALKKEIF

SEQ ID NO: 189572 - protein, 85 aa, Glycine max
  Clone ID: PAT_MRT3847_14219C.1.pep
TTLCFNCFAGAFLRGFRVLMQKLKQEKEHRHLFANLSQLGCLCYCAPFFVCFLIDGSIDWNHGFISSADTFTWPMILFLCLPFVF

SEQ ID NO: 189573 - protein, 92 aa, Glycine max
  Clone ID: PAT_MRT3847_1421C.1.pep
IGLLGQIYGEGPSEIVNQVLIALSCALMGCHKNVFTRYCFSTAALCEGESGLKNVQVLVNAPCNVFKVFKNLIVCGCMNQAGLYSIYRQWKD

SEQ ID NO: 189574 - protein, 176 aa, Glycine max
  unsure (1)..(176): unsure at all Xaa locations
  Clone ID: PAT_MRT3847_142200C.1.pep
AFGSPKALIFLCHGYAMECSITMKSTGTRLAKAGFAVYGIDYEGHGKSEGVPGLVMNFDFVIDDCSHXLTRICEKAENKKKMRYLMGESMGGAVALLLHRKKPEYWDGAILVEPMCKIAEEMKPNTMVISVLSALSRVFPSWRIVPTPDIIDLAFKVPKVREEVFEQILIPQTNNS

SEQ ID NO: 189575 - protein, 63 aa, Glycine max
  Clone ID: PAT_MRT3847_142201C.1.pep
RAGIVCIGVVLQSMHSSERVPCNIVLRKWAVVFSSFVEITTIIFPTSLSSQSLPLPLILPFFL

SEQ ID NO: 189576 - protein, 66 aa, Glycine max
  Clone ID: PAT_MRT3847_142202C.1.pep
MATKEISILKDRTSKNSGQVVSHRGRRIHTQSQMRFDRISLRIRRSCGCCCRCCCIGSVKLVIRSG

SEQ ID NO: 189577 - protein, 73 aa, Glycine max
  unsure (1)..(73): unsure at all Xaa locations
  Clone ID: PAT_MRT3847_142203C.1.pep
MLVYQDLLTGDELLCDSLRYKEIENGMLWXMRGSDVVKGAHDVXIGAHPSAECGXEDDGVEDAAVKVVDIVDT

SEQ ID NO: 189578 - protein, 44 aa, Glycine max
  Clone ID: PAT_MRT3847_142204C.1.pep
SNILFSSKLAGLNSLCFLFLAIIKQVSFDHVLYVCLFYSYYDTL

SEQ ID NO: 189579 - protein, 46 aa, Glycine max
  Clone ID: PAT_MRT3847_142205C.1.pep
EKIGLVKGFFVKIVILGGQAWREFVVRFYVGKEKKYKRVYQLPGGV

SEQ ID NO: 189580 - protein, 62 aa, Glycine max
  Clone ID: PAT_MRT3847_142206C.1.pep
IQKFKTSIPRRPNGSKPWLPFGSTCLPSIQRLWLQPCNGSWTAFAVWKKGGGPSSKNNETSL

SEQ ID NO: 189581 - protein, 47 aa, Glycine max
  Clone ID: PAT_MRT3847_142207C.1.pep
FSFHSPLISTIDARKKSCKLKDPNFLRRYHIIKPTPHSRCRGKLGKQ

SEQ ID NO: 189582 - protein, 153 aa, Glycine max
  Clone ID: PAT_MRT3847_142208C.1.pep
MDSLSLLLSPYPLSIKTPKFPTFKPFSHFSNHSKPHSPKSQLPSFSALQTPSLNSLQTPLAKPFFSFTMLNLFTPLPCLADVASDDAGKINLESVLVSIDNFFNRYPFFVAGCTFIWLVVIPLAEEYLKKCKFVSAIDAFRKLRDDPNAQLLD

SEQ ID NO: 189583 - protein, 88 aa, Glycine max
  unsure (1)..(88): unsure at all Xaa locations
  Clone ID: PAT_MRT3847_142209C.1.pep
GSSFFVTLTKLRVISSTLVVLYNMCQHTMWSGDHPNAXSTFLPVPAXTLSPNRAXFLQILALWLWRFWGQHGCYFNSGGRWRCANCDL

SEQ ID NO: 189584 - protein, 60 aa, Glycine max
  Clone ID: PAT_MRT3847_14220C.1.pep
WGLLLLVCLAKVSSEVNITKEQDEEFSFPVDPVKCYLFFSLAKILVKIFLKFCDFLMCLM

SEQ ID NO: 189585 - protein, 44 aa, Glycine max
  unsure (1)..(44): unsure at all Xaa locations
  Clone ID: PAT_MRT3847_142210C.1.pep
RPPTRXXXYKMDDSHDELYISRTLLNFYDSWELTSPLRLLFWSR

SEQ ID NO: 189586 - protein, 88 aa, Glycine max
  Clone ID: PAT_MRT3847_142211C.1.pep
VLVRIPGSTHASAHACDFVCNSCNIISTLFADLLIIFNNIISSFKSNFDYYYLNKFYSIKSTLSQEISKHKFVSFFSKLSLLILLVQT

SEQ ID NO: 189587 - protein, 159 aa, Glycine max
  unsure (1)..(159): unsure at all Xaa locations
  Clone ID: PAT_MRT3847_142212C.1.pep
TDKADVYSYGVLXLEIVSGRRNXXXREXXGSXXQTAWKLXRSNTLTEAVDPSLGDDFPPSEASRVLQIGLLCTQASASXRPSMSQVVYMLSNTNLDVPTPNQPPFLNTGMLDSDSSIKSYSTNSFISNALKKIGVSYSYSESSRNSDGPSRSEESIIQV

SEQ ID NO: 189588 - protein, 52 aa, Glycine max
  Clone ID: PAT_MRT3847_142213C.1.pep
LLNSETTSKSVTITNPSQYTHSSPTLRQPPPIPWSLLIHTYKLKSEIPKIFL

SEQ ID NO: 189589 - protein, 72 aa, Glycine max
  unsure (1)..(72): unsure at all Xaa locations
  Clone ID: PAT_MRT3847_142214C.1.pep
MAESRRSTGTVKWFNSQKGFXFITAQDGTDNLFVHFTSIRSNSYRSLSKGQSIKFLLNYSNNSHTITINITS

SEQ ID NO: 189590 - protein, 47 aa, Glycine max
  Clone ID: PAT_MRT3847_142215C.1.pep
LKVNPIEERVLAPHREIRKVFFVVGVWLNPFQVIMLKGMKLLWIGKY

SEQ ID NO: 189591 - protein, 73 aa, Glycine max
  Clone ID: PAT_MRT3847_142216C.1.pep
AILRGRRHAVAPHRVPSRARQKTTRRAISPAQSSSLRGLSVPAPGQLGLSLSTYHYQSVVDVSNSRDSCLLLS

SEQ ID NO: 189592 - protein, 71 aa, Glycine max
  Clone ID: PAT_MRT3847_142217C.1.pep
MGLSNFPISASEGVLPVLVINTVFSVALLKSMFRSMLQVVFGGSAASSSSNIEHDDEISSSSSSRERRVSI

SEQ ID NO: 189593 - protein, 78 aa, Glycine max
  Clone ID: PAT_MRT3847_142218C.1.pep
VINMKTISFFYFPFQCSEPVCGPKSRLSFPIVPAVCILDLQVNHLQLTHQINSLLSCIVVNFQAVNRNLCISPVVHYY

SEQ ID NO: 189594 - protein, 111 aa, Glycine max
  Clone ID: PAT_MRT3847_142219C.1.pep
MANDAALRTSLLWLAAVILVVGIYTHSFKKMMATYVLGVLGIAALLLPDWDYFNRDFSRWPYPVTAEERANSSIHAQGSGFLRFANSPLRVIAYSVVYGYAMYKWWEYVST

SEQ ID NO: 189595 - protein, 87 aa, Glycine max
  Clone ID: PAT_MRT3847_14221C.1.pep
KKVHLMQDIASEFAIKWDSKAFELRMSKCSVFAQDRNNFKSNHTSDHDIPLQGKDATPKGVKFERSHDHPNDRHKFQNGKEAVVSKG

SEQ ID NO: 189596 - protein, 89 aa, Glycine max
  Clone ID: PAT_MRT3847_142220C.1.pep
DNRTNLCSLIFKLDTLSHTHIHTIVYFRNGYREQQLPTNTAKCKCNASKLINQDTAGFIYFKTMPFMLISENQKRLLCHNSETDTTRSK

SEQ ID NO: 189597 - protein, 56 aa, Glycine max
  Clone ID: PAT_MRT3847_142221C.1.pep
RRIGGKRVKKKITWRGEKKNPPIALKRKFHLKGGEEGFTSQIGERGFQRDKGGKGP

SEQ ID NO: 189598 - protein, 103 aa, Glycine max
  Clone ID: PAT_MRT3847_142222C.1.pep
KIFLILNITITGRHISLYWVANIYSYLQIHKLIILPTNTQNLNLLKGQPPSRYLHHPKFNSAHAPAFLPYFPIFTHIKTLLTNYHSYYLTEIDTLSHLHTTYS

SEQ ID NO: 189599 - protein, 56 aa, Glycine max
  Clone ID: PAT_MRT3847_142223C.1.pep
SVQTAGSVPGPFKAYMSFRHRFGSCVFLVTAVCVKCVYGLMCTLKKGSFNCFTIFC

SEQ ID NO: 189600 - protein, 68 aa, Glycine max
  Clone ID: PAT_MRT3847_142224C.1.pep
LTTLDGRNLTVSTNSVISPIYEEVIKGEGMPIPKEPSKKGNLRIKFNIKFPSRLTSEQKTGIKRLLTS

SEQ ID NO: 189601 - protein, 60 aa, Glycine max
  Clone ID: PAT_MRT3847_142225C.1.pep
YNLSYTYTTGYNSNLCYLCHYEDIYTQTKYNTKLYLAIYMSSRISIQHSLSTKISDDQII

SEQ ID NO: 189602 - protein, 601 aa, Glycine max
  Clone ID: PAT_MRT3847_142226C.1.pep
PCPPYLEAVCRNILKMCGGLPLAIVAIGGALATKGRANIEEWQMVCRSLGSEIEGNDKLEDMKKVLSLSFNELPYYLKSCLLYLSIFPEFHAIEHMRLIRLWIAEGFVNGEEGKTLEEVADSYLKELLDRSLLQVVAKTSDGRMKTCRMHDLLREIVNFKSKDQNFATIAKDQDITWPDKVRRLSIINTLNNVQQNRTAFQLRSLLMFALSDNSLENFSIRALCSTGYKLLRVLDLQDAPLEVFPAEIVSLYLLKYLSLKNTKVKSIPGSIKKLQQLETLDLKHTHVTVLPVEIVELQRLRHLLVYRYEIESYANLHSRHGFKVAAPIGLMQSLQKLCFIEADQALMIELGKLTRLRRLGIRKMRKQDGAALCSSIEKMINLRSLSITAIEEDEIIDIHNIFRPPQYLHQLYLSGRLDNFPHWISSLKNLVRVFLKWSRLEEDPLVHLQDLPNLRHLEFLQVYVGETLHFKAKGFPSLKVLGLDDLDGLKSMTVEEGAMPGLKKLIIQRCDSLKQVPLGIEHLTKLKSIELFDMPEEFITALRPNGGEDYWRVQQVPAVYISYWRDRGWDVYSLETLGERESDSSGGTAIRSLEICTLWKV

SEQ ID NO: 189603 - protein, 59 aa, Glycine max
  Clone ID: PAT_MRT3847_142227C.1.pep
PRTEKPDLFLDRNDQNRKKISLPKGFPLSTTKLMLSFQSIQKRMPPLLSTPLLPPSLTD

SEQ ID NO: 189604 - protein, 211 aa, Glycine max
  Clone ID: PAT_MRT3847_142228C.1.pep
MCLWNSMPRFPCPESTSLQIHREFRKPLIVMSPKNLLRSKACRSNLSEFDDVQGHPGFDKQGTRFKRLIKDQNNHSDVEEGIRRLVLCPGKVYYELDEQRTKEDAKDVAICRVEQLCPFPYDLVQRELKRYPNAEVVWCQEEPMNMGGYTYILPRLISSMKAVGRGGYEDVKYVGRAPSAATATGFLKVHLNEQAELVQKAIQREPINFPY

SEQ ID NO: 189605 - protein, 77 aa, Glycine max
  Clone ID: PAT_MRT3847_142229C.1.pep
NDKIPRNKVCPCGSQKKYKGCCGSAVGKQSAKFVVHQAADSKKGKKERKQGKKGISAKAEVPSEYDLVTPDMGALCI

SEQ ID NO: 189606 - protein, 28 aa, Glycine max
  Clone ID: PAT_MRT3847_14222C.1.pep
IRQNIGKGALITKISSIYTNINPSNFYP

SEQ ID NO: 189607 - protein, 49 aa, Glycine max
  Clone ID: PAT_MRT3847_142230C.1.pep
MAFCTNVGNVLRHADAHSTHTPVASMLTYISRHSSCKLFSAGLLYGLMT

SEQ ID NO: 189608 - protein, 65 aa, Glycine max
  Clone ID: PAT_MRT3847_142231C.1.pep
QKLKNIKNVELHMATCLLPYLPLLKNISIRPKESKATSCTGKIERNIFCKSSISKVAIMISLVRD

SEQ ID NO: 189609 - protein, 50 aa, Glycine max
  Clone ID: PAT_MRT3847_142232C.1.pep
SYFSKMKRVPRRSIAKKNNFFFLNLKKSQKMGAYIFVKSDDQFRGNYDIA

SEQ ID NO: 189610 - protein, 64 aa, Glycine max
  Clone ID: PAT_MRT3847_142233C.1.pep
FIEKACIFIHTYRCSITFLSPRVLFPIWRYIQVFSLNKRGLLYPAVSNVALFNISGQSSSSNID

SEQ ID NO: 189611 - protein, 77 aa, Glycine max
  Clone ID: PAT_MRT3847_142234C.1.pep
GAKKRNPVKVTPDWGNLKLKIGKQSLKGSQRRSGFLIKNHPFKILKMGYGVGKFTPCKVGKMEIPEKQKKPRPLGKL

SEQ ID NO: 189612 - protein, 39 aa, Glycine max
  Clone ID: PAT_MRT3847_142235C.1.pep
STHDHKSEKLVFLRWLVHKSSAYYLWLSLFYCCFPLKCL

SEQ ID NO: 189613 - protein, 42 aa, Glycine max
  unsure (1)..(42): unsure at all Xaa locations
  Clone ID: PAT_MRT3847_142236C.1.pep
NNLKXSCDSLLHSNLASIMSFCCIHNMLRIYVETSAWXKFSF

SEQ ID NO: 189614 - protein, 57 aa, Glycine max
  Clone ID: PAT_MRT3847_142237C.1.pep
FCNLAITCHHQLGFKKTCSFTVVYLCKVLRVCFTTYIFKCPPISCIRNLQNWVLDLP

SEQ ID NO: 189615 - protein, 85 aa, Glycine max
  Clone ID: PAT_MRT3847_142238C.1.pep
FSSAPPCSPGIHTQMIHDTQSNGAISVTSDSSTVMCISHTDVHSRRPASPYSTHKQHHHSLHVLLIPFFISRYTWHQSSIVAHVT

SEQ ID NO: 189616 - protein, 68 aa, Glycine max
  Clone ID: PAT_MRT3847_142239C.1.pep
LGFMPTSFFFGHRACISKGFFLRPGREGSRAPPLFVCHKTRSIKCENLGFKGVGKVHIIFFRKKQKGP

SEQ ID NO: 189617 - protein, 85 aa, Glycine max
  Clone ID: PAT_MRT3847_14223C.1.pep
PPSFSFLCPPSSRGSPQAPLVLRISFCLPPLFLPPPIGPGLLPQLLPVRPYMRKACSPSPQNFPPPKKKIFILFRPLLQINFPPP

SEQ ID NO: 189618 - protein, 66 aa, Glycine max
  Clone ID: PAT_MRT3847_142240C.1.pep
SGFTNFDDKNGAEVFNDEYEDSNIIYPSSWLQNLPEWSNKKLESSDKKDDYASESTILTRNPTARR

SEQ ID NO: 189619 - protein, 87 aa, Glycine max
  Clone ID: PAT_MRT3847_142241C.1.pep
PFRSIFSHAISGNMPENPLQTLFHNIEQVSSFVQHHLSNFIGLHHHPSSGPLLSISSSTKGPLSKTATSVQLADTAVKFKYEFYLGE

SEQ ID NO: 189620 - protein, 123 aa, Glycine max
  Clone ID: PAT_MRT3847_142242C.1.pep
SDTVQPDSTSTPPTPCIPTVIVVVFTRSVVRCKLQVTTGPRLNPQLAQLVPVNVQLTTTSNTSTSTLGGVTTRTSTRTSTNQPLTTITSLSVPSYFRFIFFTRLLKTACFRLFLFYLLTLLTY

SEQ ID NO: 189621 - protein, 73 aa, Glycine max
  unsure (1)..(73): unsure at all Xaa locations
  Clone ID: PAT_MRT3847_142243C.1.pep
AYAIFVANLPMNATXAQLERAYKKFGPIKQDGIQVRSYMQQHSCFGSVQXESSSSMQSAIEASPAVTLNGRIL

SEQ ID NO: 189622 - protein, 69 aa, Glycine max
  Clone ID: PAT_MRT3847_142244C.1.pep
TLKILGHYLLKGCEVEINGLRESLKRKKGVYMRVITSVKGYAHSVVPRVQLFPLHNPHVVCCPTSSMLQ

SEQ ID NO: 189623 - protein, 93 aa, Glycine max
  Clone ID: PAT_MRT3847_142245C.1.pep
MAAAATAKPLLSLWFMLLLPSFLRIAVAYRPGDIVPMSCMGQYHSSRTVWQDLIGRHCPIFAGNREGWMPIPKPTGYTGADAIKIWFQVGGEK

SEQ ID NO: 189624 - protein, 59 aa, Glycine max
  Clone ID: PAT_MRT3847_142246C.1.pep
FSLVTLSSLVICIIFPKLSFKLLGLIIFLFLINHILPNRLMCVSLVLQSLQEREFILSF

SEQ ID NO: 189625 - protein, 107 aa, Glycine max
  Clone ID: PAT_MRT3847_142247C.1.pep
VPNGGPQGFPPHPPMFPVSNVGGSRASKNVCLDPHLEDNVFDDKFRGRQRPKVRKNKWLEIGMGEFFHSGLEEGEIYINVRETSYLWKPGFLLEGIEVGPKHVCSLQ

SEQ ID NO: 189626 - protein, 85 aa, Glycine max
  Clone ID: PAT_MRT3847_142248C.1.pep
MDISNPAALVNAELLHFYVGRRVRIVVQVVRSDGGVVIGKSTDEKQLVVKGSPPPAAPLTTFVEVYGLVNSDKSIGAEIWTNFGD

SEQ ID NO: 189627 - protein, 99 aa, Glycine max
  unsure (1)..(99): unsure at all Xaa locations
  Clone ID: PAT_MRT3847_142249C.1.pep
VNAELLHFYVGRMVRIVVQVVRSDGGVVIXKSTDEKQLVCKRSRPPVAPLTTFDEVYGLVNSDKSIGAEIWTNFGDAIDMDSYNKLCQLANGEFKHLFL

SEQ ID NO: 189628 - protein, 57 aa, Glycine max
  Clone ID: PAT_MRT3847_14224C.1.pep
PALLLLEVNIFSAYVFFYNFNIFGLYHWHNLMANNISETIVFNPTVCLCVFDVPDLI

SEQ ID NO: 189629 - protein, 56 aa, Glycine max
  Clone ID: PAT_MRT3847_142250C.1.pep
YVGRIEKQHSRGLTVPQWVHVFLTNSYRTEHCDACKWTTSKPHSCDKSFPTKRSGP

SEQ ID NO: 189630 - protein, 53 aa, Glycine max
  Clone ID: PAT_MRT3847_142251C.1.pep
LSLTFFLCTTRKLSLSKSGEVLQHRDLQSPSLTQREILCVRPVFSLWIPFLFY

SEQ ID NO: 189631 - protein, 172 aa, Glycine max
  Clone ID: PAT_MRT3847_142252C.1.pep
PLPLGPQGQAGSPGRPGGSGQPGQPGQNGVVYKTVPGPKGQPGQPGAPGQPGAPGRPGKPGDQGQPGAPGHPGQPGQPGAPGQPGHPGAAGAPGKDASYCACPPRSGGGYGVSGGGGGGAKVEHAPLPAEQAPVPEQPAESVGVAPAPAEVASNAAGGQGEAEAAKGYRKKM

SEQ ID NO: 189632 - protein, 98 aa, Glycine max
  Clone ID: PAT_MRT3847_142253C.1.pep
EFGTRADSEDDYGFFSVCPSSIAISDDNEDDAESCSCDTTTSTCGLPKDGEDDQGFAEFCGNEVTALEDEAEIRIDQVIVNESEDRLFWETCMAVGYP

SEQ ID NO: 189633 - protein, 34 aa, Glycine max
  Clone ID: PAT_MRT3847_142254C.1.pep
MGGNVSLRVKNAIIYLGSYSVIDNGEPSDMIITP

SEQ ID NO: 189634 - protein, 80 aa, Glycine max
  unsure (1)..(80): unsure at all Xaa locations
  Clone ID: PAT_MRT3847_142255C.1.pep
MSXIXHKIXETLHVGLHXKDXXKGXXHGEHKCEHKVXXHGXHKGEHXGXQHHGEHKEXLVDKIXDKIXGDXHDKGEXXKX

SEQ ID NO: 189635 - protein, 271 aa, Glycine max
  Clone ID: PAT_MRT3847_142256C.1.pep
MDPPLITDSTFSPAYSLAEIWPGMPHFPPPFPHPSSADHSTLTDLTATPRKTKDCSSSSSSASTAAADEDDCSKVLSSTTTATANLSNNDSGSNKQMKLGGSSVENDGFKAEAEASSAGGNKSSEQSNKPCEAPKQDYIHVRARRGQATDSHSLAERARREKISERMKILQDLVPGCNKVIGKALVLDEIINYIQSLQRQVEFLSMKLEAVNSRMNMNPTIDGFPSKDVGTQPFDIAGMVFGSQAARGYAQGSSPPGWLHMQIGGGFERTT

SEQ ID NO: 189636 - protein, 103 aa, Glycine max
  Clone ID: PAT_MRT3847_142257C.1.pep
RGGFSEPLFLFLGGFWGTFFENLGPRLPVLVPFFFGPSFFFSSVGFLSKRCLVPSPVPFSRLLGPPRPGFFSPRRPPPGGWGFKFFSFFLEGLFRGLFPCPCL

SEQ ID NO: 189637 - protein, 143 aa, Glycine max
  Clone ID: PAT_MRT3847_142258C.1.pep
KKMVENMKRSSFEVLGMCCATEEALVERILKPLRGVKDVSVIVPTRTVTVVHDVLLISESQIADALNAARLEASLRLQGETDNEKKWPDLTTMVCGLLLALSFLKYAYQPLGWLALGSVVIGFPNVLLMAIASIKALTLISTF

SEQ ID NO: 189638 - protein, 160 aa, Glycine max
  Clone ID: PAT_MRT3847_142259C.1.pep
MMSSIRFLWILVVCLTASCALSQPQKLSAYDVLMEYGFPVGLLPKGAIGYSLNRDSGEFAVYFEGACSFDIESYALKYKSTITGVISKGRLYNLKGVTVKILLLWLNIVEVSRQGNDIYFSVGIASADFGVENFLESPQCGCGFDCKTLPLNGDVYVSSI

SEQ ID NO: 189639 - protein, 177 aa, Glycine max
  unsure (1)..(177): unsure at all Xaa locations
  Clone ID: PAT_MRT3847_14225C.1.pep
GSRGIGLGCALSLTTFTRALEYWYGGKLVFDGYITSKQLFQTCLILANTGRVIADASSLTSDVAKGADAIGLVFSILNRNTKIDSDEMTAYMPQKLIGHIEFQDVYFAYPSRPNVMIFQEFSIKIDAGISTAVVGQSGSGKSTIMGLIERFYDPLXGIVMIDGRDIRSYHLRSLRNY

SEQ ID NO: 189640 - protein, 66 aa, Glycine max
  Clone ID: PAT_MRT3847_142260C.1.pep
WIYWAASFFMKIGEPPLTRQGSVLFMREVSVNDALARRELGYTAHKSVDEGMREMEEDYAKGVRLF

SEQ ID NO: 189641 - protein, 159 aa, Glycine max
  Clone ID: PAT_MRT3847_142261C.1.pep
MSSIRFLWILMVSLTASCALSQPQKLSAYDVLMEYGFPVGLLPKGAIGYSLNRDSGEFAVYFQGACSFDIESYTLKYKSTITGVISKGRLYNLKGVTVKILLLWLNIVEVSRQGNDIYFSVGIASADFGVENFLESPQCGCGFDCKTLPLNGDVSVSSI

SEQ ID NO: 189642 - protein, 65 aa, Glycine max
  Clone ID: PAT_MRT3847_142262C.1.pep
KYIPPGNESKILFPEDQTNKLWIICWNIVANKDVCGKRSKICVLGNQNSFSMRCVISCPSWGNLF

SEQ ID NO: 189643 - protein, 55 aa, Glycine max
  Clone ID: PAT_MRT3847_142263C.1.pep
ANSAIGSKTSCTSKVYGSVFETLEDSHYPTKKVALTRKYSERNRKDKDLKPRPTS

SEQ ID NO: 189644 - protein, 84 aa, Glycine max
  Clone ID: PAT_MRT3847_142264C.1.pep
NELLSSTMFRFCGKSMRLACKFYDPLLLRYFGSNSDMLLLTYFNIVTLPNGKIKVGFKINRYIYPLFYTNYLFLKEDKKKDLFR

SEQ ID NO: 189645 - protein, 369 aa, Glycine max
  Clone ID: PAT_MRT3847_142265C.1.pep
MSATASATLLGMPGPWAYDYHEPSDPYTTKIGGLPDWPPPINTDLLRCAECTGQLCLVAQVYAPLSHHRTLFVLGCVSPNCGTAWRVLRLQNVADVDTSQQKHAASVAEVPIATVSDDDDDDDAIDMDFEQLGKALFEAGTLASNTKRKKPRKKCQNKLPSSSPHPKTTTTIVQNDVPVVPCFYIYAQEEQSLGDISSVCSSYSSLSIKGNGSDVEDPDPSQAEETWEKEQYEYDKALNADRTYLKFKKRLDAYPEQCFRYSYGGRPILAAADKINPGSCSLCGRPMQFEMQLMPPLLYFLQEALGDQRKMVEKWDWMTLIVYTCSESCCEGIEQAKSNNKGWIIAEEAVVAQCEEPLAVQLGVEEAIA

SEQ ID NO: 189646 - protein, 57 aa, Glycine max
  Clone ID: PAT_MRT3847_142266C.1.pep
QVPVLRKRASRVQKRFLSHIECMSMLASFALPCDGIALEFALESICVSWLRLRFLCH

SEQ ID NO: 189647 - protein, 37 aa, Glycine max
  Clone ID: PAT_MRT3847_142267C.1.pep
VKRREHRSCATDAAASSPSGRHSQDLRIGSRDQLVKA

SEQ ID NO: 189648 - protein, 96 aa, Glycine max
  Clone ID: PAT_MRT3847_142268C.1.pep
PNIALINYTIIKTNTFNKFIKKLRTLVRRSVLCMLFNLMHILFSSSETLIQTPQSNHVHEFLTQFTLIMGPVCLFMSVACLLLALASLYSKINYLI

SEQ ID NO: 189649 - protein, 83 aa, Glycine max
  Clone ID: PAT_MRT3847_142269C.1.pep
VPRRSYLIVVEVRCKIQISKVGMEKPSILYFFVLFFFFYARKERVRIEVHLMLICIYFVFISPFPKKKWVLPVTVHFTTSQFV

SEQ ID NO: 189650 - protein, 44 aa, Glycine max
  Clone ID: PAT_MRT3847_14226C.1.pep
DRQRSCKLDYSGHAYRLSLCIFCETRIMLSLLVKRATCYTPLLS

SEQ ID NO: 189651 - protein, 118 aa, Glycine max
  Clone ID: PAT_MRT3847_142270C.1.pep
SKTRDVKILQPTIATRVSRFSGANSLYELDKATQEVTNAIVEAQSQALGGPLNGVSIGKDLPVINISRSVGLPELRRMRRTFIKLTGQTSLSGPPPPSDADSAKRMFIDYLNRELGTS

SEQ ID NO: 189652 - protein, 77 aa, Glycine max
  Clone ID: PAT_MRT3847_142271C.1.pep
PAGRMAGHPRGLFRTGHGADQKPYQKHAAVPRPGKCPSLATIHTGRRITSCGTDSEKSLTLKPLKTPPSNKTIAGKT

SEQ ID NO: 189653 - protein, 43 aa, Glycine max
  unsure (1)..(43): unsure at all Xaa locations
  Clone ID: PAT_MRT3847_142272C.1.pep
LGWELXIRNSLSPDNATVQFLCISQYNQMSCRSNMGDNVGESS

SEQ ID NO: 189654 - protein, 83 aa, Glycine max
  Clone ID: PAT_MRT3847_142273C.1.pep
GSFSKGVEQFRQALEISPRCVPAQYGLALGLLGLAKDCINLGAYQWGASLLEEASEVARASAYFLRNISCIWKLHADIQLAYA

SEQ ID NO: 189655 - protein, 62 aa, Glycine max
  Clone ID: PAT_MRT3847_142274C.1.pep
SYILVLTVSSKLYNELYFLNSIQFIINLYVQVNGTLTICGVLVQWSSFFCLGYALSNRSKCL

SEQ ID NO: 189656 - protein, 64 aa, Glycine max
  Clone ID: PAT_MRT3847_142275C.1.pep
GPLCFIPFWLWGTPVICVHQTSLGDFRSVGALQRAQVLPTSSACSWVREASFSLFFDLANVPLV

SEQ ID NO: 189657 - protein, 57 aa, Glycine max
  Clone ID: PAT_MRT3847_142276C.1.pep
IGSQCSFMCCKVSLSCPLRGMVCICVRIQHKARAYPLRNNMACVSKIPYKKMCGRVV

SEQ ID NO: 189658 - protein, 69 aa, Glycine max
  Clone ID: PAT_MRT3847_142277C.1.pep
IVAVLLCGLSLSAILVRGSGPIAIVSAIGYLYPRLLCSETRCPFGVLSLSCSAGGFWMLELLWWWRWVV

SEQ ID NO: 189659 - protein, 109 aa, Glycine max
  unsure (1)..(109): unsure at all Xaa locations
  Clone ID: PAT_MRT3847_142278C.1.pep
XXKTXXTXXAXYXPGXGXXTTXTXPSXXAITXXXXPXXXXFSXDXXXRXGXXLSXRXXXXXXXTXXXXXXQXXEXXXXXLXXHPLXXTXXXXXXHFXPXCELTXACXRX

SEQ ID NO: 189660 - protein, 62 aa, Glycine max
  Clone ID: PAT_MRT3847_142279C.1.pep
VSHVLTAVRNHRTYLARADASALNGDAMIRTNMCCLCDLANHDRRRIVRTPLQPPHGCCSCS

SEQ ID NO: 189661 - protein, 45 aa, Glycine max
  Clone ID: PAT_MRT3847_14227C.1.pep
SLVRDSTRHDSRLLPRLWTSTGTLFVSRFFYDTRERRTLGIAETG

SEQ ID NO: 189662 - protein, 206 aa, Glycine max
  Clone ID: PAT_MRT3847_142280C.1.pep
FADIQIRRQLISSAKLLMDWTRGQNIVFSSAAPTVNELRGPCDVANLLSLFGLSKERANAAISKNCRILLANSLRKKRFYKETIRVEVLSSDAASHSKEDRYQELLKWDPISSGEGDILLDDMQKSSLVSCKASKPAKAIDFASVVKSLPSHGFEIKDILPANNAFPVCGDNKINFPPVPEKLSQSTHVPNSLTEKPSILVRPEHD

SEQ ID NO: 189663 - protein, 88 aa, Glycine max
  Clone ID: PAT_MRT3847_142281C.1.pep
SAPHPPTPLQGGQDLLLKGRNSNGVPSPSLIRKEKIMEEKQQQVALLDFPPCHYFQLAPVAFLKCFGLDFTYESPSTRRHRKKKESSL

SEQ ID NO: 189664 - protein, 50 aa, Glycine max
  Clone ID: PAT_MRT3847_142282C.1.pep
AGSEDLYIHLIMLGLCFRVKISEDFVSEFHHVDEGEHLVLGYLLKSDCSD

SEQ ID NO: 189665 - protein, 88 aa, Glycine max
  Clone ID: PAT_MRT3847_142283C.1.pep
AEYIQRKGQASLRLLKITCWRTITTLKARSSRDMRIYHSSGSILCHSNRWLTSLCQRVPSRGECSTHCLLLEKEWGCFLKNSLLGKLS

SEQ ID NO: 189666 - protein, 313 aa, Glycine max
  Clone ID: PAT_MRT3847_142284C.1.pep
FKVPFTYALPTAFISLRNFKLIHSYMVSLRNSTATIFRSDEDNDDSQTPFIVSFSSRGPNPLTPNTLKPDLAAPGVNILAAWSPVYTISEFKGDKRAVQYNIESGTSMACPHVSAAAAYVKSFHPNWSPAMIKSALMTTATPMSPTLNPDAEFAYGAGLINPLKAANPGLVYDISEADYVKFLCGEGYTDEMLRVLTKDHSRCSKHAKKEAVYDLNLPSLALYVNVSSFSRIFHRTVTNVGLATSSYKAKVVSPSLIDIQVKPNVLSFTSIGQKKSFSVIIEGNVNPDILSASLVWDDGTFQVRSPIVVYGDT

SEQ ID NO: 189667 - protein, 81 aa, Glycine max
  Clone ID: PAT_MRT3847_142285C.1.pep
VRLFPSYNYPLFDRFNFGARCRYLIVEGRFLTSLVQRIQRRIRLVMGRVKAWTELLQGDDDKDGAPTYKCSVYGMKMEPYE

SEQ ID NO: 189668 - protein, 36 aa, Glycine max
  unsure (1)..(36): unsure at all Xaa locations
  Clone ID: PAT_MRT3847_142286C.1.pep
IDAQVIEDLIGLTETXLILENIDRINNTCTYLTFIP

SEQ ID NO: 189669 - protein, 108 aa, Glycine max
  Clone ID: PAT_MRT3847_142287C.1.pep
ADHQYKHDECCWLMWPPHISSIIPASIIPRWFNNQHVGKDSFINIKDASHIMQHDNNCIGVACKGNGSSKTERKFMEYIHLHFGVVLVTDESDHMLLFYLNQFHFIKI

SEQ ID NO: 189670 - protein, 74 aa, Glycine max
  Clone ID: PAT_MRT3847_142288C.1.pep
TDLTTLTGVVNLLCDSGRTIVATVDCDGHYFLAPLLFCLCHAATFIKLLNEHLVHPHSYALNTKAPRLDKDYDL

SEQ ID NO: 189671 - protein, 66 aa, Glycine max
  Clone ID: PAT_MRT3847_142289C.1.pep
WCYQPPPWHWHGSPNPSHIFQVRCPFLYISNHVFVEIRSGTGSIYSLLVEPKIGAVAGYRLIFPPV

SEQ ID NO: 189672 - protein, 99 aa, Glycine max
  unsure (1)..(99): unsure at all Xaa locations
  Clone ID: PAT_MRT3847_14228C.1.pep
TYADLMLKQAEVDYLTHCAYEFRLGMSANDGKVILFARVRTTANKSGSDLFTLCNYVCVSDINEGLIVGMETLDASVNLKDRXWATEAANDLTFDRETD

SEQ ID NO: 189673 - protein, 179 aa, Glycine max
  Clone ID: PAT_MRT3847_142290C.1.pep
MTMGNKRAVICGVTYGKRKFKLEGTINDVNNMKNLLLDNFKFPIGCIRVLTEEQKDPNLIPTKKNILDSLNWLVKDCQSEDSLVFYFSGHGLQQPEDRKGDEIDGLDETICPVDFLREGMITDNEINSIIVQPLKQGVTLHAIIDACHSGTTLDLLYLCKKEKGSWKWKDNKPPHSKKL

SEQ ID NO: 189674 - protein, 87 aa, Glycine max
  Clone ID: PAT_MRT3847_142291C.1.pep
KFFLDHLSLPSGLAWEFLPAFLLRKDLVKVIWPSKILKGPPGLQSWFGKGFLCFSLKTWHWNLPPLQDISSLLFPETAFSFKGFAAA

SEQ ID NO: 189675 - protein, 114 aa, Glycine max
  Clone ID: PAT_MRT3847_142292C.1.pep
IAKKQKDPILIPTKKNILDSLNWLVKDCQSEDSLVFYFSGHGLQQPEDRKGDEIDGLDETICPVDFLREGMITDNEINSIIVQPLKQGVTLHAIIDACHSGTTLDLLYLCKKEK

SEQ ID NO: 189676 - protein, 78 aa, Glycine max
  Clone ID: PAT_MRT3847_142293C.1.pep
LFSNTLDWKKRFNVAVGTAKGLAYLHEECLEWILHCDVNPHTILLDSDFQPKVSDFGSSKLLTPDERGTSPFSRTRGT

SEQ ID NO: 189677 - protein, 95 aa, Glycine max
  Clone ID: PAT_MRT3847_142294C.1.pep
REDDRRGERTFLIREILILLNRLVSNPSYSATVLRGLMTTRDMAGLTIDVASRLSRKEKKTEQQDSMVKHIRETEIVDLARLFKKRVFAYLGDDL

SEQ ID NO: 189678 - protein, 1097 aa, Glycine max
  unsure (1)..(1097): unsure at all Xaa locations
  Clone ID: PAT_MRT3847_142295C.1.pep
MECLKSPFLFSTSLLPPPSHQPYSITPNIKNKKNKKPRVPIFIRCTIQRDPWSPTSGDPTRPKPRSRNPKKPLSDDNARRIIKGKAAYQSILRRNQGPQAQTPRWIKRTPEQMVRYLQDDRNGQLYGRHVLAAVKKVRSLSQRVDGDYDMRMVMASFVGKLSFKEMCVVLKEQKGWRQVRDFFAWMKLQRLILCIDSLVPQQLSYRPSVIVYTIVLRLYGQVGKLKLAEEIFLEMLDVGCEPDEVACGTMLCSYARWGRHKAMLSFYSAIKERGIILSVAVFNFMMSSLQKKSLHREVVHVWKDMLGKGVIPNNFTYTVAISSFVKEGLHEDAFKTFDEMRNYGVVPEELTYSLLINLNAKSGNRDEVQRLYEDMRFRGIIPSNYTCASLLSLYYKYEDYPRALSLFSEMVRNKISTDEVIYGLLIRIYGKLGLYEDAHKTFEETKNRGQLTSEKTYLAMAQVHLTSGNVDKALEVIELMKSSNLWFSRFAYIVLLQCYVMKEDVASAEGTFLALSKTGPPDAGSCNDMLSLYMGLNLTNKAKEFIVQIRENETNFDKELYRTVMKVYCKEGMLPEAEQLTNQMVKTEYFKNDKFFMTFYWILCEHKGDMESDDELVAIEPIDKFNATALGLMLSLYLANGNFNKTKILLKLLLGYAAGGSKIVSQLIINLSKEGEISKAELLNHQLTKLGCRMDEATVASLISHYGKQQMLKQAEDIFAEYINSPTSSKVLYNSMINAYAKCGKQEKAYLLYKQATGEGRDLGAVGISIAVNSLTNGGMALEXKHQEAENIVQRSLEENLELDTVAYNTFIKAMLEAGKLHFASSIFEHMISSGVAPSIETFNTMISVYGQDQKLDRAVEMFNQASSCSVPLDEKTYMNLIGYYGKAGLMLEASQLFSKMQEGGIKPGKVSYNIMINVYANAGVLHETEKLFHTMQRQGYLPDSFTYLSLVQAYTRSLNYSKAEETIHAMQSKGIPPSCVHFNILLHAFIKAGLIHEAKRVYEDLSTFGLVPDLVCHRTMLNGYLKCGYVEEGINFFESICESTKSDRFIMSAAVHFYKSAGKGRQAKEILNLMNNMGIPFLKKLEVGSGERVKTP

SEQ ID NO: 189679 - protein, 241 aa, Glycine max
  Clone ID: PAT_MRT3847_142296C.1.pep
DNIDIYGENVVSDSNKLYSEEVKKDNIISPKMKNVAVKWNSCSEKEHQLYISEAELQMHQAKTPLWGKTGIYFHSVGKEAILMMDEEAASGGEFEIDKIPTRVIQARSKDLVPIFDYIQTSKFQQIRTPAVGNVLYEQLLRQSSFENGRISTRGFLSSPDCIPNSEFKSMIEGSEWGDSLLSAKTKAFVNKNNTLKPNTWPEIANNRRENLNMNAHQIFVNSDRKGLKLENHCKEKGDEFD

SEQ ID NO: 189680 - protein, 58 aa, Glycine max
  Clone ID: PAT_MRT3847_142297C.1.pep
ALVKCVGVFEALINMINEPVGSGSTKACLSTIFNLVNNKRGVTTCQKKKKKKKQKTKI

SEQ ID NO: 189681 - protein, 85 aa, Glycine max
  Clone ID: PAT_MRT3847_142298C.1.pep
KFHSSRKFPVNRRKFPLYCSRSLRRSCEDIITLVHLSTNGSLRIPAAKYSNDRVSKVSFVGFLKIIVSETPSKQRFIFLHTNQCI

SEQ ID NO: 189682 - protein, 103 aa, Glycine max
  Clone ID: PAT_MRT3847_142299C.1.pep
LEKKSKKISQHLEKFYLLVICYYYFTFSFSLRFIIVMASQAVSFKSFAVALLVALFFAAAASAQDLPPAAAPGPDAGAAGAVSSSVAMIGASVLLSMLAIFKH

SEQ ID NO: 189683 - protein, 64 aa, Glycine max
  Clone ID: PAT_MRT3847_14229C.1.pep
NCKYYIKIRLNCNCGLPLIPYPRFCFFYFPPHYFSPQQSAFRKSTILVKSSILHTFIPFLLHFN

SEQ ID NO: 189684 - protein, 84 aa, Glycine max
  unsure (1)..(84): unsure at all Xaa locations
  Clone ID: PAT_MRT3847_1422C.1.pep
SGTRXKSSYMSSGCRQEGHNTDYLDHVLRESTCATIFATWFKXDKTVKIWAIEMGVCQGXLCSLPSYLRSRCKQPFSXVLGLPS

SEQ ID NO: 189685 - protein, 44 aa, Glycine max
  Clone ID: PAT_MRT3847_142300C.1.pep
FYTIIVSSFKPQFTCLCSLPSKFLIFKQRMLFWHHILSCLMELN

SEQ ID NO: 189686 - protein, 51 aa, Glycine max
  Clone ID: PAT_MRT3847_142301C.1.pep
TLRNLDVQRILPYVQPSTPLSAALKETSSKESSDHQHNANHSLQPSSMCEL

SEQ ID NO: 189687 - protein, 163 aa, Glycine max
  unsure (1)..(163): unsure at all Xaa locations
  Clone ID: PAT_MRT3847_142302C.1.pep
HIDGALLLADTYHXTNPDNADRSIPAALFRCGGPHSGWGIAESIVQIEPDMNSGMQILSTTTNGDIXQGKDLALVKVNVACAAVGXTSRYTPTALMESGXHKDSGLIVEYLDDAYVAHNVNQPQEKDSLEGNVPFDIKSRSRXKKGSSTKAQIWIEDKTFKYD

SEQ ID NO: 189688 - protein, 350 aa, Glycine max
  unsure (1)..(350): unsure at all Xaa locations
  Clone ID: PAT_MRT3847_142303C.1.pep
IPIVVSGVPPSFVSAPGRRILAVQSXYLETHCCRWRPHMAGVLSSSQKYLWTGGESMLVATWDRIERGEGEIAILSLLRSLDKQAKAKGGAVFQVNGNHETMNVEGDFRYVDSGGFDECNDFLEYINGSEDNECXTFTAWVDVSERWKEDRTMSKSYWGPWNLLERQKGVIARSILFRPGGLLARELARHAVVLMLNDWVFRHERLLPHHVAYGLKRMNKEVSEWMRGLDEDDNIHKKPFFSSRGYDNVVWNRLYSSDTLDLVDYQDKQVCSILDETLQAVGAKAMVVGHTPQTIGVNCKYNCSIWRVDVGMSSGVLNSRPEVLEIIDDKARVIRCKRDRHSELQAAAYT

SEQ ID NO: 189689 - protein, 149 aa, Glycine max
  Clone ID: PAT_MRT3847_142304C.1.pep
IPPLFGESWWAFRSRSGISGWPLGAVGFLWVVWPPMRRFQKPFLVWVHFYGWFVSRFLCSQIRLWDSLFLDPLFSRPPLSKCEFKRFEDFFIEFFMVPFIFKPVFFLPIIVQGFFGFPVLFLVLEVPPPFLALVYSFYWVCLGRAPEVH

SEQ ID NO: 189690 - protein, 136 aa, Glycine max
  unsure (1)..(136): unsure at all Xaa locations
  Clone ID: PAT_MRT3847_142305C.1.pep
EIFQLLPHDTQVNLLSATMATDVLEVTNKFMRDPVRILVKRDELTLEGIKQFYIAVDKEEWKLDTLCDLYETVTITQAVIFLXNTRRKVDWLTDKLHAREFTVSAMHGDMEPGQREVIMREFRSGLSRVLITTDLF

SEQ ID NO: 189691 - protein, 158 aa, Glycine max
  unsure (1)..(158): unsure at all Xaa locations
  Clone ID: PAT_MRT3847_142306C.1.pep
FSSGNLDHHNAAFLQADLLEVVDXINDAIVSMDSFVSAYEPAAVFFSCPVEMSYGNEELLSLLARLHDSLIPSLQKGFRMIFADKQDGTVSNILVSLKMLKIRLVKFGWQLLHLCYLSDEVFKDSIPLLAATKMFPANVEDPVIRADILVQTFREINS

SEQ ID NO: 189692 - protein, 134 aa, Glycine max
  Clone ID: PAT_MRT3847_142307C.1.pep
ISHFISSLRPPRFPRNGIPCTASPEIRRPSDRFYGSSPSTSRPEDLNLFLELLPLTLRRELYLHTEIGGLIEVVMDLGRKPLARFPSGDWVISEQPIAQEDLRHAISKVGEFSDDTRSGIDRALHRISAIRNRK

SEQ ID NO: 189693 - protein, 75 aa, Glycine max
  unsure (1)..(75): unsure at all Xaa locations
  Clone ID: PAT_MRT3847_142308C.1.pep
VKTGMSGNAALQKSEWALLAQVDLTYSCSTEHFEACXWTKSEPHSWEXIFPIEVCGTNNEIEMWSSEWANQTSWH

SEQ ID NO: 189694 - protein, 99 aa, Glycine max
  unsure (1)..(99): unsure at all Xaa locations
  Clone ID: PAT_MRT3847_142309C.1.pep
GPHTCYNGQXTMGDTEREXIVTKAVTGISCLYDLSHGNNNTLQTDSFRGVCXFMGNSFSXLVWTXXGPXXXNXXXXIPXXXXSXXXVXGNXNGXRXEEX

SEQ ID NO: 189695 - protein, 44 aa, Glycine max
  Clone ID: PAT_MRT3847_14230C.1.pep
KMVCSQGCCMICILDQKGLFSAIVICHRICCSEPVVCAQARFRY

SEQ ID NO: 189696 - protein, 68 aa, Glycine max
  unsure (1)..(68): unsure at all Xaa locations
  Clone ID: PAT_MRT3847_142310C.1.pep
HCFKFSKGTALVSGLSELEEGYQKQGESSGGXCXGLRLFLLRRHSRLRRSGRSHRRRCVASRKSDVVF

SEQ ID NO: 189697 - protein, 35 aa, Glycine max
  Clone ID: PAT_MRT3847_142311C.1.pep
SLFTFLNLWLWWLISLPHVDSHIVIVGQCEPIIVR

SEQ ID NO: 189698 - protein, 100 aa, Glycine max
  unsure (1)..(100): unsure at all Xaa locations
  Clone ID: PAT_MRT3847_142312C.1.pep
LHCIFHIPPQGKYYLVDSGYPTXYGFLGPYKKTRYHLPQFRIGPRIRGRVEVFNYYHSSLRSTIERAFGLCKARWKILGNMPPFALKTQKPNHCCLHGYT

SEQ ID NO: 189699 - protein, 186 aa, Glycine max
  Clone ID: PAT_MRT3847_142313C.1.pep
HSKAQTIVTQYLSFTPKPSPHTHEFSILNIYSLCLLFREELARKGSMDIQNQSEDHVLREYYLNNKQFLKRTWQFVLSVSVFSVFVWYSSGLSIHPQSFNAYFSTCLFYSMITHTLERKYMFLICNGILAFVAKTSLRTSNSSDSADSFDHLQNLSETKTTAVSDMVVVPLGSFESPENVPLMVEE

SEQ ID NO: 189700 - protein, 208 aa, Glycine max
  Clone ID: PAT_MRT3847_142314C.1.pep
MGASESTLSSGKTPDDKITTITERSEASDPILERLKYLKITPPILTSPPTEGTLTDILVRKPSSSSVSATVNPKVILELFSIYHDWQEKKAQEISIRQEEIENKIEVADALAIKLLQRYNHSTSTMKTASQHLSGVHSLQVEIGELIGRLSKDISNCDALCKRIATEGPESLVSSIKPFAVTTANQETYSSSSSLRIVSKTNPPSAEE

SEQ ID NO: 189701 - protein, 146 aa, Glycine max
  unsure (1)..(146): unsure at all Xaa locations
  Clone ID: PAT_MRT3847_142315C.1.pep
MEAQKKTQTQTKLTRTQSSLLRCSSPTTTTRSSVHSLSSVNEDFFPEEEKSSSDTSSKRKKKNNKPIRLRPGSIRFSLAGPVLGFFTACTFFSYFLYLGSRAAAATSENVLXGAVFLAATLYFLNRNKSLIQRTFSVLKHAWDGNL

SEQ ID NO: 189702 - protein, 52 aa, Glycine max
  Clone ID: PAT_MRT3847_142316C.1.pep
MHAHASLRIGIGSTARLNRVCIISHYSSLAFKSDPSTWYYNILGQNRGLHTY

SEQ ID NO: 189703 - protein, 72 aa, Glycine max
  unsure (1)..(72): unsure at all Xaa locations
  Clone ID: PAT_MRT3847_142317C.1.pep
MTVSIAKFDALALCLFLHLAFNTKPLLTPEPKLVDDKHRNPYQPRVRYYVXLHWADDRGLTLGQTKNNTCPH

SEQ ID NO: 189704 - protein, 79 aa, Glycine max
  Clone ID: PAT_MRT3847_142318C.1.pep
FMCLHGREKTIEGEHEKNPVELSRRYCRSLSVNVTDLDKNTTDLRTRRTSQTGSPLGHFPAITGLSRIATYDQDYGPTA

SEQ ID NO: 189705 - protein, 78 aa, Glycine max
  Clone ID: PAT_MRT3847_142319C.1.pep
LLFLIIHVTLLLITASFVTSHIISCCPGYYNIAHGKQRSSTSLKFFTLTPWLQFHPFSIFTFVFSFSHKTALLLNLSK

SEQ ID NO: 189706 - protein, 46 aa, Glycine max
  Clone ID: PAT_MRT3847_14231C.1.pep
CVMPLISLSIRLCRCMTDVRHFGQEDRIHWNIKEGHHQKRRRNVYL

SEQ ID NO: 189707 - protein, 280 aa, Glycine max
  Clone ID: PAT_MRT3847_142320C.1.pep
MASFSVPCPKCPTTSSSSSLPLGLNSQKVSFQSGLILKPSLSFGSLSAESAASRIQCLNRKQFSVLKATKVENSNSAPVTVNGPTVASSKENQVHNGKLSDTTIPDEASIIAFMSQVSDLVKLVDSRDIVELQLKQSDCELMIRKKEALQPPPIIAPAPPPMHYATFPSPSSPLPAEAAPASSAPPKAAPALPSPGKASTSSHPPLKCPMAGTFYRSPAPGEPAFVKVGDKVKKGQVICIIEAMKLMNEIEADQSGTIAEVLAEDGKPVSVDMPLFVIVP

SEQ ID NO: 189708 - protein, 80 aa, Glycine max
  unsure (1)..(80): unsure at all Xaa locations
  Clone ID: PAT_MRT3847_142321C.1.pep
FVXRLTNFFLVXGMFLXXKLLAVRVFKPALAIIHSLPALXXXQVIVGAVLLXGPRXXAPRXGSAGVVRRQAGAFSPLRRV

SEQ ID NO: 189709 - protein, 71 aa, Glycine max
  Clone ID: PAT_MRT3847_142322C.1.pep
FPCFLLSGVRPAFSSFPAGPLALVSPSFLAARASPSWPSSCLGRFPPCLFSFACRCSRRLVIANRGRGSSR

SEQ ID NO: 189710 - protein, 210 aa, Glycine max
  Clone ID: PAT_MRT3847_142323C.1.pep
MDPEQTFIRVQERFSQMLTPKVRVALEYLYLFIAITLFCILVVMHANYVQQPGCSSELSGVVTSEAQLIQIKITSAGLWSHNDSESNRIDPPETKIVKDKMEISDVSGDKLTFLASKLWGNWIGSGARRGKLVLKFWKTQTEFLEHQAETSTSNQNTRSVGEDAVIKIDKEDPPKSFTLSAKETLKAAIIHFCKKVVLGAFSFHLEGHTM

SEQ ID NO: 189711 - protein, 196 aa, Glycine max
  Clone ID: PAT_MRT3847_142324C.1.pep
MDPEQTFIRVQERFSQMLTPKVRVALEYLYLFIAITLFCILVVMHANYVQQPGCSSELSGVVTSEAQLIQIKITSAGLWSHNDSESNRIDPPETEIVKDKMEISDVSGDKLPFLASKLWWNWIGSGARRGKLVFKFWKTDTEFLEHQAETSTSNQNTRPVGEDAVIKIDKEDPPKSFTLSAKETLKAAIIHFGKKW

SEQ ID NO: 189712 - protein, 70 aa, Glycine max
  Clone ID: PAT_MRT3847_142325C.1.pep
RGLQSRPLMVHLNPSVGLGKYKPKGPACIICAQALMAQAKSGVGGCGLKNVGWRPRRVLALWGIRLEDHS

SEQ ID NO: 189713 - protein, 317 aa, Glycine max
  unsure (1)..(317): unsure at all Xaa locations
  Clone ID: PAT_MRT3847_142326C.1.pep
MATDARAKFQNPEFRPDFHADLTVSTHDGLHFWQFMIAGSIAGCVEHMAMFPVDTVKTRMQAIGSCPVKSVTVRHALKSILQSEGPSALYRGIGAMGLGAGPAHAVYFSVYETCKKKFSEGSPSNAAAHAAFPVCATVASDAVPTPMDMVTPWLQLGRGARVXRGFRAIIGYHSTKLFISPPFRAIHSTPLNPTTRTTPSHYPTRRPDERLSMQATARATAGAVAAPVTKLLDVLHPXLPSKRHCDCDRLRTGSIGEVNKRLVTKDXSEGGFAGGFFHAPSVALRLSIYEVRKSFVQAFNQLKISGTVTETKQFEYT

SEQ ID NO: 189714 - protein, 101 aa, Glycine max
  unsure (1)..(101): unsure at all Xaa locations
  Clone ID: PAT_MRT3847_142327C.1.pep
WRRLKLKSNKQKVXRLLSLIFCIPLFLGVNMSKLVRTSLISREIIQCDRFLPLKQMLSILKEHINWLSHPNLQLLPRVFRPSNVEKLNFSSPFLTKQNAMK

SEQ ID NO: 189715 - protein, 75 aa, Glycine max
  unsure (1)..(75): unsure at all Xaa locations
  Clone ID: PAT_MRT3847_142328C.1.pep
SIHQNILIPYTKKXTRPLTNLHTNXTHKYFHNIQNTLYISKTKPIMLHHLIHHYLSLNTLYYPTYLIPNPLYYPI

SEQ ID NO: 189716 - protein, 113 aa, Glycine max
  Clone ID: PAT_MRT3847_142329C.1.pep
HPPAPTPPTPPTVPTPAQPHPHHGPHSAPPPWPPPQPTHPVVISLPSSCPHPSSLSLFSPPPTAVFPVTSAPPAFTPQRPRLLFRSSPRNIQNKKKEKQIPLLQSRTRGRTRG

SEQ ID NO: 189717 - protein, 69 aa, Glycine max
  Clone ID: PAT_MRT3847_14232C.1.pep
RVANFPRFPVFSFHNTGPLFRFWFRLLKGFPFPARVFWVCSSRRFALFFIFFFLFYPCFVCFLFFFFFK

SEQ ID NO: 189718 - protein, 120 aa, Glycine max
  Clone ID: PAT_MRT3847_142330C.1.pep
MLVGAPVLAANEGAPTETVISGQTGWVPDVTKVQYWTEVMRNALEHGQGEARLKEMGKSGRYRVVAEFSKKKLVERLYTNISGMIQKSVRPPLIPLPSVNLTVGLMGALQAVSMVLALNQ

SEQ ID NO: 189719 - protein, 105 aa, Glycine max
  Clone ID: PAT_MRT3847_142331C.1.pep
GHVFSVKHPYIKGPPKMYEDGVFVTLNLGFLVNAPIWVYEDVSSHGRYLCFNPIINPPDDPVQFAPKLTPGAFSPLQQSDDSGKSFFAQRITPKKLTKLMGAFEA

SEQ ID NO: 189720 - protein, 154 aa, Glycine max
  unsure (1)..(154): unsure at all Xaa locations
  Clone ID: PAT_MRT3847_142332C.1.pep
RLLGTIPQSISQHTVWNQMATVRTPYDFDSSXELCQHSIDLLGGGILVDXTGDWITLIHNSPISNLLRDAAWKKCCVIVKIVMSGNAAVXRSDWASLVHVCLTNSNSTEHFDACKWAKSGPHSCELIFPIEVCAPNNGSEMSRSDWANQTSWHL

SEQ ID NO: 189721 - protein, 38 aa, Glycine max
  Clone ID: PAT_MRT3847_142334C.1.pep
IHAKIVYTLIRPDGTRKAYVRLSPDYHALYAVNKIGII

SEQ ID NO: 189722 - protein, 37 aa, Glycine max
  Clone ID: PAT_MRT3847_142335C.1.pep
SISSDSKLIASIGYSFHTSSILYTKSIYLLIIPDGRY

SEQ ID NO: 189723 - protein, 48 aa, Glycine max
  Clone ID: PAT_MRT3847_142336C.1.pep
ETHRFIEIGASITKVSMTLGIREKVTYAPRPQKEGHETTPLRRQDGPH

SEQ ID NO: 189724 - protein, 178 aa, Glycine max
  Clone ID: PAT_MRT3847_142337C.1.pep
MMRLSSYFVVAIALLFSFTPSSSANTHENFVQCLYNYPHNNNVTSISNVVYTQANSSYSSILDFSIQNLRFSNASSKPLVIVTPLTVSHIQATIICSQRYGMQIRTRSGGHDYEGLSYVAKDPFVVLDLINLRKIEVDAENSTAWVLAGATIGELYYSISQKSKTLGFPASVCPPVGT

SEQ ID NO: 189725 - protein, 43 aa, Glycine max
  Clone ID: PAT_MRT3847_142338C.1.pep
NLKLPFTATITIIILLTLWRKQSRETMIAVTTLLTCACNLSSH

SEQ ID NO: 189726 - protein, 209 aa, Glycine max
  unsure (1)..(209): unsure at all Xaa locations
  Clone ID: PAT_MRT3847_142339C.1.pep
PTFSNDNSLKNFSPPRNKSSFLPPPPLFFFFPRTLLGGGQITFPQPLXXPASPPNRPSPLXTXPDGPXWPPLHPPXMPLFPPPLSPXPFPPPLXXFRTPSPXXPXFSPPPXXLPPFPPPXXXPPXPLPPPSPPXFPPPPPSPPXXPPPXXPPPPPPFXPFFPXPCXPPPPXXPSPPRCPPFLPRPYPPPPXSPFPPTPPFPPRLXPSPL

SEQ ID NO: 189727 - protein, 76 aa, Glycine max
  unsure (1)..(76): unsure at all Xaa locations
  Clone ID: PAT_MRT3847_14233C.1.pep
MAETFLFTSXSVNYVHPDXLLDQISDAVLDACLVHVSYMYVSCESFTIIYFVFVFFVFFTSFLLFLIILMYFYLIY

SEQ ID NO: 189728 - protein, 43 aa, Glycine max
  Clone ID: PAT_MRT3847_142340C.1.pep
HSQSEFPHFSLYTLGVCYIMAKEFLNANEIISTYSGDLSTLWD

SEQ ID NO: 189729 - protein, 108 aa, Glycine max
  unsure (1)..(108): unsure at all Xaa locations
  Clone ID: PAT_MRT3847_142341C.1.pep
LSGSALVTARRPPYGKRVPTAPPTPMGGAQPVPPSVLRSNSGMLGAQGGPMPAQLGLPXSIXPRTQFNNMHILGHMPNVTSILHQSLPQGAPNPGLSVLETASEEQLI

SEQ ID NO: 189730 - protein, 42 aa, Glycine max
  unsure (1)..(42): unsure at all Xaa locations
  Clone ID: PAT_MRT3847_142342C.1.pep
XSILHLPXQLXXSNLNPPKQXPSNPDRRTSDAXRXTSDLRTI

SEQ ID NO: 189731 - protein, 76 aa, Glycine max
  Clone ID: PAT_MRT3847_142343C.1.pep
FFFFFFFFFFFCTLFFSFFFFLGRTGGPTGEPRAGPGGEPGNPGPSPGDPGVPLRRAESKLGGNPVKFSPGEKRDA

SEQ ID NO: 189732 - protein, 474 aa, Glycine max
  Clone ID: PAT_MRT3847_142344C.1.pep
MPEETTSIDYVMEAASGPHFSGLRLDGRVPSSATAASSSPDSTLTLDSLPNQPFVIGVSGGTASGKTTVCDMIIQQLHDHRVVLVNQDSFYRGLNPEELERVHEYNFDHPDAFDTEQLLECTMKLISGQGVHVPIYDFKKHQRSSDSFRQVNASDVIILEGILVFHDQRVRDLMNMKIFVDTDADVRLARRIRRDTMERGRDINSVLEQYAKFVKPAFDDFVLPSKKYADVIIPRGGDNHVAIDLIVQHIRTKLGQHDLCKIYPNAYVIQSTFQIRGMHTLIRDRDISKHDFVFYSDRLIRLVVEHGLGHLPFTEKQVVTPTGSVYTGVDFCKKLCGVSIVRSGESMENALRACCKGIKIGKILIHRDGDNGKQLIYEKLPKDISERHVLLLDPVLATGNSANQAIELLIQKGVPESHIIFLNLISAPEGIHCVCKRFPSLKIVTSEIDIEINEEYRVIPGLGEFGDRYFGTDD

SEQ ID NO: 189733 - protein, 100 aa, Glycine max
  Clone ID: PAT_MRT3847_142345C.1.pep
LPSLVSGFGSGSTLCLSKPFSKCPLLLGILPPCRQQLGPRPCLIITERLIPYHSFGGVAVTTSIASRALSLRLSYSFSPRLGFSCLFGLVVCLEPLISFL

SEQ ID NO: 189734 - protein, 234 aa, Glycine max
  unsure (1)..(234): unsure at all Xaa locations
  Clone ID: PAT_MRT3847_142346C.1.pep
LERVHEYNFDHPDAFDTEQLLECTMKLISGQGVHVPIYDFKKHQRSSDSFRQVXTKQCRFVTTYWDFFLVDVVLLVQVNASDVIILEGILVFHDQRVRDLMNMKIFVDTDADVRLARRIRRDTMERGRDINSVLEQYAKFVKPAFDDFVLPSKKYADVIIPRGGDNHVAIDLIVQHIRTKLGQHDLCKIYPNAYVIQSTFQVSLNLVCQFYYFILFSTFYDLKFGEDPVAHPYN

SEQ ID NO: 189735 - protein, 45 aa, Glycine max
  Clone ID: PAT_MRT3847_142347C.1.pep
RGILPGQLGALHIKSYFIVLYQGKVTLVITTTNLDLVKRNYKEPS

SEQ ID NO: 189736 - protein, 87 aa, Glycine max
  Clone ID: PAT_MRT3847_142348C.1.pep
TTRFTMNRNKRGHVTAGHGRIGKHQMHPGGRCNAGGMLHRRMLFNKFRPGLFGKVRMRCFRKLLSRFYSPVLIIYKLWFLVSQEVMD

SEQ ID NO: 189737 - protein, 79 aa, Glycine max
  Clone ID: PAT_MRT3847_142349C.1.pep
NSFFLSDKCNYCRIQPVDVIDVAAALTSLLKDDGTSMGKIYELGGPEIFTVHELADVMFDTIREWPRYVKVPFPIAKVC

SEQ ID NO: 189738 - protein, 95 aa, Glycine max
  unsure (1)..(95): unsure at all Xaa locations
  Clone ID: PAT_MRT3847_14234C.1.pep
FVMXMGFGEGDXKRVLRMKNEYVEGVIDYVGEEKIKKLXKREEDIWRRNEIKEKKGYGMRXLKKXVDLERLKELVCIEFEREFVGEGIRRNENEI

SEQ ID NO: 189739 - protein, 65 aa, Glycine max
  Clone ID: PAT_MRT3847_142350C.1.pep
FNHHCSGPKRRRESLRAARTTVSYFSKFRLQSLCLPRPQLIRSGSRTCSKALRRHWDTYAQGAHS

SEQ ID NO: 189740 - protein, 42 aa, Glycine max
  Clone ID: PAT_MRT3847_142351C.1.pep
SLRSFFQGEHRYCLCNMSPSECCPKNDIGGHLDIHQRYYSRL

SEQ ID NO: 189741 - protein, 123 aa, Glycine max
  Clone ID: PAT_MRT3847_142352C.1.pep
VLNACNSDSESILVEMINSKSKLLNEIKGKGLQGIFPSAVTPTAKTGHTSLLDWVTRRNLQVPWLIIMMKLKLNFLSLLGRFPGVKNFRYQKIQNKNFRLPSFRMRVYNIVLLVLLLLMVVQV

SEQ ID NO: 189742 - protein, 61 aa, Glycine max
  Clone ID: PAT_MRT3847_142353C.1.pep
LNVLGGIKVFMDKQVGTVGQRREQILCQIKGVRHLHHSNYEKENVDSTTIFMRRERMTTGI

SEQ ID NO: 189743 - protein, 299 aa, Glycine max
  Clone ID: PAT_MRT3847_142354C.1.pep
MDRTRESRRSSMTTSTNGFPKRRHRTIALRDSSEEGAVELREGTSKRGRNRDRDRDSANRSKRRIGSHSQSTEESGGNEQDDDVLDVGGSKIRSLNNTTTSVASDQIHRRSFTSAKPPAVKITEEMIGVSVPRKARSASAKRSYERWISASSGGEELNFRQRSNSPGGQSVEPTSPSSSNGSLSGRMKEIEPVSKTSKSSSSDIEIEIAELLYGLKTSKNHESSIKLEASVSPSDDAEKKKMEDNNNSSTLFSNNSTEELSRIQIEQPADVDYHVGPSIEAPKENIGGALADGRTGSPT

SEQ ID NO: 189744 - protein, 43 aa, Glycine max
  Clone ID: PAT_MRT3847_142355C.1.pep
ALYTTNALTLLNIDIQDQLFFFLVLSSTSSYSLVSNYEQNLLI

SEQ ID NO: 189745 - protein, 65 aa, Glycine max
  unsure (1)..(65): unsure at all Xaa locations
  Clone ID: PAT_MRT3847_142356C.1.pep
MSXFKGKXHXELIANAAYIGXPGKGIXXADESXGXXXXRXXTXSXEXXXSNRRALXEXXFTAPGS

SEQ ID NO: 189746 - protein, 146 aa, Glycine max
  unsure (1)..(146): unsure at all Xaa locations
  Clone ID: PAT_MRT3847_142357C.1.pep
EPTGALFQGGPPPRAPVGPAPPSKGASPPKFVGTPPPPKKDRRPEESPAFKKRGQAGGAVSGSSPPLSAVCPRGFSFPRAFPFPPPPGFPSPPATVGAPQSRAPPAAPPFPPYXLPPPALLALPFLRQAPPPPPKNSLNKPPPFNN

SEQ ID NO: 189747 - protein, 62 aa, Glycine max
  Clone ID: PAT_MRT3847_142359C.1.pep
DQGTNTDSYNHFSPQFSPQKNLRILEVSTRLKGNQKESYHGQQTSIVYFSHFCRLLQPSRAD

SEQ ID NO: 189748 - protein, 138 aa, Glycine max
  Clone ID: PAT_MRT3847_14235C.1.pep
RYGWSVISRKMWARGNKEMYVPNFRKAFEHFCIHAGGKSVVDAIEESLKLHKKDGEASRMALYRFGNTSSSSVWYELCYLEAKGRVKKGDRVWQIAFGSGFKCNSAVWKCLSDIDPNVRNAWSDRIHLYPVEIPVFDC

SEQ ID NO: 189749 - protein, 68 aa, Glycine max
  Clone ID: PAT_MRT3847_142360C.1.pep
LSSYNIPLVADVHFAPSVALRVAECFDKIRVNSGNFADRRAQFETLEYTEEDYQKELEHIEKVKSSIC

SEQ ID NO: 189750 - protein, 66 aa, Glycine max
  Clone ID: PAT_MRT3847_142361C.1.pep
TQDYASSRWCLDELVTILECREKYGQIIIPVFYYVKPTDVRHQMGSYENAFAEHEKEYKTKVDNWR

SEQ ID NO: 189751 - protein, 61 aa, Glycine max
  Clone ID: PAT_MRT3847_142362C.1.pep
KTKRRNFAANSFLSCIAKRFFFLFKRVHLNVAHINRRHRAMLANSGKEGEVTHRCKACWYA

SEQ ID NO: 189752 - protein, 38 aa, Glycine max
  Clone ID: PAT_MRT3847_142363C.1.pep
LTEGLHTRNCILFKYSRNTSISHFYASVILATCIKTPL

SEQ ID NO: 189753 - protein, 38 aa, Glycine max
  Clone ID: PAT_MRT3847_142364C.1.pep
LIKKLIIHLSKICAVCITVASGVFIPHPQCNGYGLTAN

SEQ ID NO: 189754 - protein, 63 aa, Glycine max
  unsure (1)..(63): unsure at all Xaa locations
  Clone ID: PAT_MRT3847_142365C.1.pep
DFHQPQTPTCKLPSXIISAHEPNIFTRVENQNQNPKHYRAHKSVVMYMKHCGTIILNGYNNKI

SEQ ID NO: 189755 - protein, 52 aa, Glycine max
  Clone ID: PAT_MRT3847_142366C.1.pep
LWLNLLLGMQHLLKTLTGKTMTLDVESNVTTKYDKAKMNDKERVSATHQERI

SEQ ID NO: 189756 - protein, 98 aa, Glycine max
  unsure (1)..(98): unsure at all Xaa locations
  Clone ID: PAT_MRT3847_142367C.1.pep
DFGWQSKGEDHFRSWFPFFSYLLXGNFVLFRYCLVQRPFCTFLFLPMFDREFSFFFFAFSPSYDWEFSFFFAFSHSLIGNFLLLLWFLLRARFIVSWD

SEQ ID NO: 189757 - protein, 22 aa, Glycine max
  Clone ID: PAT_MRT3847_142368C.1.pep
RIERNKLETFSFLVSKLTSPLL

SEQ ID NO: 189758 - protein, 587 aa, Glycine max
  Clone ID: PAT_MRT3847_142369C.1.pep
MADPNSNPNHSNAHVNRSRHYTTHVTFRLLCHASRVGAIIGKSGVLIKSLQEATGAKIRIVDAPPDSPDRVILVSAPSVTEDGELSTAQEALLKVFDRVLDVAAGTEVGDLVVSCRLLAETSQVGAVIGKAGKVVEKIRMDTGCKIRVLNEGLPAGTAPSDEIDEIEGQLTSVKKALIAVSHRLQDCPPPDRTKMTGSRHYEVVQSETFSVPLESLTNLHIDHHLQRSSTLSTLSNRSNGNASGAHKLSAEVNRVSALDPKAYQQEVTFRIICSNDRVGAVIGKGGSIVRALQNESGAIISVGPSLVECEDRLVTITASENPESTYSPAQKAVVLVFSKSVEAGVEKGLDLGSKKEPYVTARLVVPSNQVGCLLGKGGAIVSEMRKATGANIRVIGNDQVPMCVSDNDQLVQISGVFSNVQAAIHNATGRLRDHLFVSTQNSGGARSLSSVLAGGQPTLAISHSLNRHSLPGLQAPQTVAGINSRGTNGVSRGLISRKGGLELISGSKTAIVTNTTVQIVVPDDVIGSVYGENGSNLARLRQISGAKVIVHEPRPGTSDRTIIISGTPDETRAAQSLLQAFILAGSS

SEQ ID NO: 189759 - protein, 39 aa, Glycine max
  Clone ID: PAT_MRT3847_14236C.1.pep
KVPSCCSSIVVNWTADHRIVASHVGLTSVLAMCLSVIPV

SEQ ID NO: 189760 - protein, 56 aa, Glycine max
  Clone ID: PAT_MRT3847_142370C.1.pep
DPPLGSHQKDEGLLNTAAYYTRGGDSCHGLPLHIILLRKSQNKAAPNLTFHWEIPK

SEQ ID NO: 189761 - protein, 56 aa, Glycine max
  Clone ID: PAT_MRT3847_142371C.1.pep
KHVLCAILKVREADSLCTHSLGQFVSKLQNFLRDFGAQIFSCRPIPLDGFNPPQKF

SEQ ID NO: 189762 - protein, 213 aa, Glycine max
  unsure (1)..(213): unsure at all Xaa locations
  Clone ID: PAT_MRT3847_142372C.1.pep
PRVRGRVGRHVSHLFGLFPGHTISVENTPDLCKAVEVSLIKRGDDGPGWSTTWKAXLWAHLHNSEHAYRMIKHLIVLVEPDHGFGLEGGLFSNLFTAHPPFQIDANFGFSAAIAEMLVQSTTKDLYLLPALPRDKWANGCVKGLKARGGVTVNICWKEGDLLEFGLWTENQNSKVRLHYRGNVVLASLSPGRVYSYDNQLKCAKTYSLSEVNP

SEQ ID NO: 189763 - protein, 485 aa, Glycine max
  Clone ID: PAT_MRT3847_142373C.1.pep
MLVWEETIPTSARVKSFQTDEDPSFVELLFQYGRYLLISCSRPGTQVANLQGIWNKDVEPAWDGAPHLNINLQMNYWPSLACNLHECQEPLFDFNSSLSVIGKKTAKVNYEANGWVAHQVSDIWGKTSPDRGEAVWALWPMGGAWLCTHLWEHYTYTMDKDFLKNKAYPLLEGCTSFLLDWLIEGRGGLLETNPSTSPEHMFTAPDGKTASVSYSSTMDISIIKEVFSMIISAAEVLGRHNDTIIKRVTKYQSKLPPTKVARDGSIMEWAEDFVDPDVHHRHVSHLFGLFPGHTISVEKTPDLCKAVEVSLIKRGDDGPGWSTTWKASLWAHLHNSEHAYRMIKHLIVLVEPDHERDFEGGLYSNLFTAHPPFQIDANFGFSGAIAEMLVQSTTKDLYLLPALPRDKWANGCVKGLKARGGVTVNICWKEGDLLEFGLWTENQNSQLRLHYRGNVVLTSLSPGRVYSYNNLLKCVKAYSLNEVNP

SEQ ID NO: 189764 - protein, 194 aa, Glycine max
  unsure (1)..(194): unsure at all Xaa locations
  Clone ID: PAT_MRT3847_142374C.1.pep
FPGHTISVENTPDLCKAVEVSLIKRGDDGPGWSTTWKASLWAHLHNSEHAYRMIKHLIVLVEPDHGFGLEGGLFSNLFTAHPPFQIDANFGNRNLASAIAEMLVQSTTKDLYLLPALPRDKWANGCVKGLKARGGVTVNICWKEGDLLEFGLWTENQNSKVRLHYRGNVVLASLSPGRVYSYDNQXEVCEDILP

SEQ ID NO: 189765 - protein, 45 aa, Glycine max
  Clone ID: PAT_MRT3847_142375C.1.pep
GTLLRVTKIGALTCLSKWLILDHWKCVFYRHKRVCSPPEKRQNGV

SEQ ID NO: 189766 - protein, 54 aa, Glycine max
  Clone ID: PAT_MRT3847_142376C.1.pep
YMILGEVLFSLCVLCCCCCYGMLFTKQEPLLVSRFWVLLFLFVYHSASFLFFSS

SEQ ID NO: 189767 - protein, 57 aa, Glycine max
  Clone ID: PAT_MRT3847_142377C.1.pep
GWGRTKYRCNYWCTTNTAQATTRRFFHWYNSKNCFEVFLHTAITTFRSLIIILIPFY

SEQ ID NO: 189768 - protein, 62 aa, Glycine max
  Clone ID: PAT_MRT3847_142378C.1.pep
YSCLDELHAGSTLERTAERTEIASDGLTHKGKEGYLSDLGREDDYALRIINARAEHLQRKNG

SEQ ID NO: 189769 - protein, 131 aa, Glycine max
  unsure (1)..(131): unsure at all Xaa locations
  Clone ID: PAT_MRT3847_142379C.1.pep
GKARVKTIQSTRAHARNLGIALLNSQYSIEYDETVGCKAGHHILTEGSVIYLGKPYLVDDRSVLCLSDTIGILRAADDGYIIARGHLCDVTNTVXRDDRFDPSGVYQNTKTKGALNIIELRNGRKNLVALV

SEQ ID NO: 189770 - protein, 97 aa, Glycine max
  Clone ID: PAT_MRT3847_14237C.1.pep
RKLFFFGERRFCPPTFRFGVLNQSRFLPRGFFPPENFVWGPFPRVPAFFLAGFSPGLNFFGAVVPIKEKELFFFLRKIFFFHFGFDFTPPPFFLWWF

SEQ ID NO: 189771 - protein, 77 aa, Glycine max
  Clone ID: PAT_MRT3847_142380C.1.pep
QIKFFFFFKNPFFLKFFILTPHPAEIFFSITYYNMAPKLEFFNTVTQTFHFNFVEIWIKIGSFKKKNVAFNPLTRLG

SEQ ID NO: 189772 - protein, 49 aa, Glycine max
  Clone ID: PAT_MRT3847_142381C.1.pep
MTPKTPEPTGIIAQSLMNRNHTRSWAARLWWHLVRTVYYLRELEPNMPT

SEQ ID NO: 189773 - protein, 89 aa, Glycine max
  Clone ID: PAT_MRT3847_142382C.1.pep
LHEGRAFFFFFFLGADESSRDGNYFLSSPLMQSTSKKCKSNKQSPPLSPSFALTTSYAPYARSLYTLGRYLNSAQTNAIPGPLSMGGRI

SEQ ID NO: 189774 - protein, 131 aa, Glycine max
  unsure (1)..(131): unsure at all Xaa locations
  Clone ID: PAT_MRT3847_142383C.1.pep
ARKLTKAQKKIAYDAKLCKLLDNYTQILVVXAADNVRSNQLQNIRHGLRGDSVILMGKDTMMKRTYKIHAPEHXGNTPILNLXPLLQGNVGLIFTKGDVKEVKEVVSKYKVRSYHRVFVLPKIRLLVLTKN

SEQ ID NO: 189775 - protein, 38 aa, Glycine max
  unsure (1)..(38): unsure at all Xaa locations
  Clone ID: PAT_MRT3847_142384C.1.pep
CLRPGFNPIHIRKSWTAARDXVRIPFRGKGGVHVIVYS

SEQ ID NO: 189776 - protein, 100 aa, Glycine max
  unsure (1)..(100): unsure at all Xaa locations
  Clone ID: PAT_MRT3847_142385C.1.pep
YFNAETAVSNILGAPIKGGRPIXLGTLPSTIEQSEPNMNTRLQLWSTPSSGDSFQRKELLMVKANASXAAVGLTESXTSTSLMEYFLPKHKGLIVVYYGR

SEQ ID NO: 189777 - protein, 83 aa, Glycine max
  Clone ID: PAT_MRT3847_142386C.1.pep
LDAIGVEHQQKVFRYMAIHDCCHYKIHADTQYGEFSISTMRKPSVSHSEDLLQRLKKMPTDMTRTRASQSIARYRNGNPGVIC

SEQ ID NO: 189778 - protein, 72 aa, Glycine max
  unsure (1)..(72): unsure at all Xaa locations
  Clone ID: PAT_MRT3847_142387C.1.pep
XRLSLGGIRLLLLDYLKQLHYTKVDLYVGILEGYINTPRGCIRHLILLKIYRKIQNYRQHEFSKSSSCRPKH

SEQ ID NO: 189779 - protein, 62 aa, Glycine max
  Clone ID: PAT_MRT3847_142388C.1.pep
LYVLSQILLFISSFCSRAPPASIYSLSLPQRRTKASDPVLYAISSTLANLDKVILSASTNSH

SEQ ID NO: 189780 - protein, 71 aa, Glycine max
  Clone ID: PAT_MRT3847_142389C.1.pep
RKFCDVEILSVGPDKEEPTKEDNNPEAKIDPNDEYAELLKVDEANYYQTIHVQYPYYYSSTAEDNTTGCVI

SEQ ID NO: 189781 - protein, 60 aa, Glycine max
  Clone ID: PAT_MRT3847_14238C.1.pep
MSQLYHQIPTAFHPFADANAHDSFAASKEYVHIPVQQRNRIKSLTTFQVLKNEFIYNKIL

SEQ ID NO: 189782 - protein, 115 aa, Glycine max
  Clone ID: PAT_MRT3847_142390C.1.pep
KGGPPRIWFRAWQGFFVNGPPFFFPSQKFLLGWAQGPFSLGFLPNFLLKGFPGPKGPRGPPNGFLGAPFFLPLFRPPTWGFVFFFLKNYFGFPFGFRVPWGPFLGAPGGPFGFPA

SEQ ID NO: 189783 - protein, 56 aa, Glycine max
  Clone ID: PAT_MRT3847_142391C.1.pep
DSFNEKILDLFLMFLECQYLLVWKLALILSVVNGELFLLIKGFFKISVEPNLFLAY

SEQ ID NO: 189784 - protein, 99 aa, Glycine max
  Clone ID: PAT_MRT3847_142392C.1.pep
AFPQLYNRYPNLHVYSYGPLPCLDLVVANACSEFVTSIIFGNEFSSRLSTVRLRAAAITSLSQDPKADSAMIFKLAHRFLDVSKYQRNKSKAEDEPEYH

SEQ ID NO: 189785 - protein, 48 aa, Glycine max
  Clone ID: PAT_MRT3847_142393C.1.pep
CFFFFFFFFFFFFFFFFFFFFFFVFFWERATRTPFFCTFLFGSKKKKS

SEQ ID NO: 189786 - protein, 92 aa, Glycine max
  Clone ID: PAT_MRT3847_142394C.1.pep
FFQGVSFLAPRRFGNLPTVTPLVPGGSAQAKIHLCREVLALDPHNIRVLSGGIYGGPPPPLMRKPLKWGFPPWSSHPLTGPIVFSLFLGQTI

SEQ ID NO: 189787 - protein, 94 aa, Glycine max
  Clone ID: PAT_MRT3847_142395C.1.pep
LFFCFFFFLGFFYFVRGLNVNFLVGSFSKKGFKKNQKPQWDPPPLKKTRGGPPPPRGGPNPGGTKQGPPKGPPSIQKKRGGGVPPPGGPKQKMG

SEQ ID NO: 189788 - protein, 106 aa, Glycine max
  Clone ID: PAT_MRT3847_142396C.1.pep
RAVAKPITVCAHVASLTVSIKRNTSRILPLCTACNHILTRVRTYSCTFRAPTYFLPLCVLLRYVLYNDYYFPPPRVLRAFHPPPPVPTFTFHPHLAAHVFFFLVLT

SEQ ID NO: 189789 - protein, 63 aa, Glycine max
  Clone ID: PAT_MRT3847_142397C.1.pep
LYKNPPSHTPAQSTKPTMNQPHQTAWSFFFSPERKKPKPKPKTSFPTPPRVEQYTELYAREPC

SEQ ID NO: 189790 - protein, 108 aa, Glycine max
  unsure (1)..(108): unsure at all Xaa locations
  Clone ID: PAT_MRT3847_142398C.1.pep
GDRGREVVSVRKIALALSAGRIGETVDSIIYVQIRQVLTQAVRLGMIVTTALILCMALMCVSGTGSYGVGDLSRSIXPIFKLRDMMVLHMSKDPIMPLEIVEHNVHRR

SEQ ID NO: 189791 - protein, 111 aa, Glycine max
  unsure (1)..(111): unsure at all Xaa locations
  Clone ID: PAT_MRT3847_142399C.1.pep
FLXXLPPGLCSYREERXPHFLXGQNHREPMVRPIFKSPKILLLNGVPSPLNVKSKRVVQDAWAKFMVTKLPVVGALGLFPIKNPNVIPVVKKGVIVKKGNHKKFITARGGF

SEQ ID NO: 189792 - protein, 100 aa, Glycine max
  Clone ID: PAT_MRT3847_14239C.1.pep
FQPKTSNQTLIFTQPKSATTKAGRRHAAYKTIQKYPNPASGTIEPTETAGIAFLPSNIYRKLIAPPWQVNFSPHASDLIKARPKPPSGCKSGSDPIRSGP

SEQ ID NO: 189793 - protein, 104 aa, Glycine max
  unsure (1)..(104): unsure at all Xaa locations
  Clone ID: PAT_MRT3847_1423C.1.pep
KKFETLSYLPNLDDAQLANEVXYLLRKGWIHSLEYEXEHGFVYRDHTRXPQYYNGHYCTMWNLPMFGSTDASQVLNELQKAKTAYPNGFIRVMGYHNLPQVQSM

SEQ ID NO: 189794 - protein, 215 aa, Glycine max
  Clone ID: PAT_MRT3847_142400C.1.pep
MFITININLERCPRNGTCQGVFGQKFSASMNNESFVHPVGKGYSMLEASFYNVSGVYTTDFPDKPPIIFDFTNPKIALDTKYLFTPPKSTKVKKLKFNSTVEVVFQNTQIMNAQSHPMHLHGFSFHVLAQDFGNFNYTKDKYKFNLVNPIFRNTIAVPAGGWAVIRFKANNPGMWFVHCHVDDHQLWGLDMVFEVENGPTPSTSLPPPPADLPKC

SEQ ID NO: 189795 - protein, 367 aa, Glycine max
  unsure (1)..(367): unsure at all Xaa locations
  Clone ID: PAT_MRT3847_142401C.1.pep
METSKFLEGQNPAKHAALKVHAYALRFLDANRSQGISSQAEAPTTPEKIFDSSTVDMSWDEHLNEENLFYEVPPTAMETYRKAIESHFLQFEKTGSSIHEEIEMSVYDTAAEFGSQENAYDEEEGETDTYYMPSVYEGNKSSKSAQKKHKNLKAYTPRCGDAGADLPYVHYATGNQPSMLFGKRPASVNVGSIPTKRMRTATRHRVVSPFTVNMGTVQAQANKADASSGDTNSFHDDQSTLHXGPLIQKSTEVESVADYEKQLSYECVETFVKPNKKKNGATYDQGWQLDSVVLNEQKDQSKKRADSHHFESNGSLCGQPNAKKPKIIRQSLDNTFDNIAPMTNSIPSPAASQMSNMSNPNNLLRSL

SEQ ID NO: 189796 - protein, 483 aa, Glycine max
  Clone ID: PAT_MRT3847_142402C.1.pep
MQPQSGGKFRPRLNTGERPIANKYREGKMKRTLWWHAHSGVLRATVHGAFIIHPRSGLFPFPKPHKQVPIILGDWYDGNIVDIYQQVLLLGDVRPSAAYTINGLPGDLYNCSRNQMFKLKVKPGKTYLLRMINAAFNNNLFVKIANHSFTVVAMDASYIEPYVTDIITIAPGQTADVLFKADQPRGSYYMAASPYVVGQPEALFDTTTTRGIVAYEGYKTSSKNYSKPIVPLLPHFNDTPIAHKFFSNITSLMGAPHWVPVPLEVDEHMFITININLERCPKNGTCQGVFGQKFSASMNNESFVHPVGKGYSMLEASFYNVSGVYTTDFPDKPPIIFDFTDPKIALDTKYLFTPPKSTKVKKLKFNSTVEVVFQNTQIMNAQSHPMHLHGFSFHVLAQDFGNFDYTKDKHKFNLVNPIFRNTIAVPAGGWAVIRFQANNPGMWFVHCHVDDHQLWGLDMVFEVENGPTPSTSLPPPPADLPKC

SEQ ID NO: 189797 - protein, 44 aa, Glycine max
  Clone ID: PAT_MRT3847_142403C.1.pep
HTQTYTQISSPIASTNPTTPNTSLIKTSITFSSNLSTPILKNLL

SEQ ID NO: 189798 - protein, 57 aa, Glycine max
  unsure (1)..(57): unsure at all Xaa locations
  Clone ID: PAT_MRT3847_142404C.1.pep
KKFHFKRIFFXXFFYCKIDVLKVYICIIEYLFHNKKIILYNNFSGIIFLEKKNSIIE

SEQ ID NO: 189799 - protein, 52 aa, Glycine max
  Clone ID: PAT_MRT3847_142405C.1.pep
RLREDDRRGYPKSASISLVGYSDSNYAGCKVHRKSSSGTCHLLGSALVSWHS

SEQ ID NO: 189800 - protein, 97 aa, Glycine max
  Clone ID: PAT_MRT3847_142406C.1.pep
FIKNTAREHMGTTMDSSKFSSFSYCSSRRIAATINVPKIKVTKVSTPRPPNKNLVAELNYLNNYISATGTTHAKENPYCSNLSAKSSTAPRTRTPNS

SEQ ID NO: 189801 - protein, 91 aa, Glycine max
  Clone ID: PAT_MRT3847_142407C.1.pep
CKGFSSCSSWFSVRRHPPIQKTPHMYCMMPYIPAEAIDAATYFMAESAILSIGLAAILDIEELMAILDTDAVTQAIEEVTLIVGNDTVWIA

SEQ ID NO: 189802 - protein, 46 aa, Glycine max
  unsure (1)..(46): unsure at all Xaa locations
  Clone ID: PAT_MRT3847_142408C.1.pep
CSPRGSSXAFLSLPIQWARHPLSLCSFCAVVYVVFDPMERVRAPCA

SEQ ID NO: 189803 - protein, 58 aa, Glycine max
  Clone ID: PAT_MRT3847_142409C.1.pep
NQSTFYYSLSQTQSLNRETLITFFPPFWNHSSATVPIHYHSQGCPSSSTSSSGLQRHF

SEQ ID NO: 189804 - protein, 39 aa, Glycine max
  Clone ID: PAT_MRT3847_14240C.1.pep
IFGIYFLKTGHPCVQTTNGSTFCPSLKNADIGWFFISRK

SEQ ID NO: 189805 - protein, 56 aa, Glycine max
  Clone ID: PAT_MRT3847_142410C.1.pep
LHTAEFAFHKFFLVLFQHRSSENVTQMNSSFNFVFLVSYNHIYTHTKRLSSCSSIN

SEQ ID NO: 189806 - protein, 506 aa, Glycine max
  Clone ID: PAT_MRT3847_142411C.1.pep
MGKGHIKFFIYNMEYSVETLERDLKNTRKYYGSGKTKEAPWRESQLKGLHNFLVEKEEEIVTALKHDLGKHYVEAFRDELGTLMKTLNLATKSLKNWMAGKEAKLPRIALLSSAEIVPEPLGLVLIISSWNFPFGLSLEPLIGAVAAGNSVVLKPSELSPTCSSLLATFLPTYLDNNAIKVIQGGPEVGKLLLQQRWDKIFFTGSARVGRIVMSAAAVHLTPVTLELGGKCPALIDSLSSSWDKEVAVKRILVAKFGSCAGQACIAIDYVLVEKSFSSTLVTLMKEWIKKMFGENPKASNSIARIVNKNHFMRLQNLLTEPRVKESVVYGGSMDENDLFIEPTILLDPPLDSAVMAEEIFGPVLPIITLEKIEDSVEFISSRPKALAIYAFTKNQTLQRRMVSETSSGSLVFNDAILQYVADTLPFGGVGECGFGKYHGKFSFDAFSHHKAVARRSYLTDFWFRFPPWTLDKLQLLEVSYNLDYLGILLVLLGLKKSKRSLFQACN

SEQ ID NO: 189807 - protein, 96 aa, Glycine max
  Clone ID: PAT_MRT3847_142412C.1.pep
TPRKLGIRLELPIITLEKIEDSVEFISSRPKALAIYAFTKNQTLQRRMVSETSSGSLVFNDAILQYVADTLPFGGVGECGFVSRIFDSTSITITLY

SEQ ID NO: 189808 - protein, 105 aa, Glycine max
  Clone ID: PAT_MRT3847_142413C.1.pep
MHIGFDSFQFHILLLLNPLFAQEKSYFIIIINMSRFNNQQESPVSYPPALYVSAPPPMGYPSKGDPTAVGYPQQRVPEETTSRGDGFWKGCCAALCCCWVLDCCF

SEQ ID NO: 189809 - protein, 63 aa, Glycine max
  Clone ID: PAT_MRT3847_142414C.1.pep
FLQSHKELGCLLYRNNVSRLCKRYSHLRAVFKAMQRWQSPWWAHTTLTLLIFLLLYLQSLTLA

SEQ ID NO: 189810 - protein, 114 aa, Glycine max
  Clone ID: PAT_MRT3847_142415C.1.pep
KNQTLQRRLVSETSSGSLVFNDAILQYVADTLPFGGVGECGFGKYHGKFSFDAFSHHKAVARRSYLTDFWFRFPPWTLNKLQLLEVSYNLDYLGILLVLLGLKKSKRSLFQACN

SEQ ID NO: 189811 - protein, 62 aa, Glycine max
  unsure (1)..(62): unsure at all Xaa locations
  Clone ID: PAT_MRT3847_142416C.1.pep
MDQDTTGCQATREGPILCINDXDVWEAAATLSMXRNSHTNMMLRQEQAKLADISMGNIVNGS

SEQ ID NO: 189812 - protein, 57 aa, Glycine max
  Clone ID: PAT_MRT3847_142417C.1.pep
IVVYVNKLITWLWIGLVKSQSRTLTLKFEHFKLIRKWSKYISFFYLSRRKREMKRNK

SEQ ID NO: 189813 - protein, 66 aa, Glycine max
  Clone ID: PAT_MRT3847_142418C.1.pep
THDAKAISYSFHLLVKSWNDIRKGTQEYLNLSGFAYYGLWTHRNWISLNAYQVNQTEVVELIKVRS

SEQ ID NO: 189814 - protein, 177 aa, Glycine max
  unsure (1)..(177): unsure at all Xaa locations
  Clone ID: PAT_MRT3847_142419C.1.pep
SCIFGPIFVESAIQCPWGVGLHQLPYPSCVREVRSFLGHAGXYRRFIKDFSKVALPLSNLLQKNVEFDFDDRCKEAFDCLKRAVTTTPIIQAPDWTASFELMCDASNYALGVVLAQKIDKLPRVIYYASKTLDASQANYTTTEKELLVIIFYLEKFHSYLLGTXVIVYTDHAALIIK

SEQ ID NO: 189815 - protein, 41 aa, Glycine max
  Clone ID: PAT_MRT3847_14241C.1.pep
MLCGKKRTKRGVVNVFFQICEAKWRALIPVKLNYYYLIRLV

SEQ ID NO: 189816 - protein, 431 aa, Glycine max
  Clone ID: PAT_MRT3847_142420C.1.pep
SKIREVMTSHMRESGKQLVTDPERLKDPVEYVQRLLDEKDKYDKIINLAFVNDKSFQNALNSSFEYFINLNPRSPEFISLFVDDKLRKGLKGVSEDDVEVTLDKVMMLFRYLQEKDVFEKYYKQHLAKRLLSGKTVSDDAERSLIVKLKTECGYQFTSKLEGMFTDMKTSQDTMQGFYGCHPELSDGPTLTVQVLTTGSWPTQSSVTCNLPAEMSALCEKFRSFYLGTHTGRRLSWQTNMGTADLKATFGKGQKHELNVSTYQMCVLMLFNNADRLSYKEIEQATEIPASDLKRCLQSLALVKGRNVLRKEPMGKDIGDDDAFYVNDKFSSKLYKVKIGTVVAQKESEPEKQETRQRVEEDRKPQIEAAIVRILKSRKQLDHNNLIAEVTKQLQSRFLANPTEVKKRIESLIERDFLERDDSDRRLYRYLA

SEQ ID NO: 189817 - protein, 85 aa, Glycine max
  unsure (1)..(85): unsure at all Xaa locations
  Clone ID: PAT_MRT3847_142421C.1.pep
XXQVSXPSSSPTLHXIXXXXXPIFXPXSTKAXVXSXNXHXHAXQIXGIMXSLSHKPFXXFGVNSYXLLESKRVLXLXLSTXVDVY

SEQ ID NO: 189818 - protein, 68 aa, Glycine max
  Clone ID: PAT_MRT3847_142422C.1.pep
TVHRRLIKNPSLSTYDRSPRLALTETRNTVLSYEMLLHLIIVTIMNPVGVPYGHHPCACVYSFELGGS

SEQ ID NO: 189819 - protein, 70 aa, Glycine max
  Clone ID: PAT_MRT3847_142423C.1.pep
WGYCYCCCILACCLRACCWLLMLLLQPVILLFPHRSFFSEAFSCECRFGWKFGFIGFQPVAPQGSAQAKE

SEQ ID NO: 189820 - protein, 239 aa, Glycine max
  Clone ID: PAT_MRT3847_142424C.1.pep
SNSFHQVGKGLTDFSYFGPPLLNLHNGTAFGITVRKSNVTASLAQIVTGLGMPPSSSITDNRSSTFGQLVYQFSRGSKLSILGLHHMPLSSKKLGRFGALTIPLLVSKQDEDEVSEAVPEVLPLIGTKTRVPAGSIALMAESELDDFTKIGGWVEMDKLNPKYLQLGVTISDVSEDSFGWGTSLSGRMIGNSANEAHFQAESYLKFNMGNNFCLKPGLVLGIDGKSKTAALVLRSNWSL

SEQ ID NO: 189821 - protein, 79 aa, Glycine max
  Clone ID: PAT_MRT3847_142425C.1.pep
DWRTFYFYFYIPSIFFFLEKMNIYLWTEWICFFLSLNSCLNGGATLLFSSVFMKPVHCNFAFEKKGKLYIHIYKSIYIY

SEQ ID NO: 189822 - protein, 138 aa, Glycine max
  Clone ID: PAT_MRT3847_142426C.1.pep
MNGRTLLRTVIPKPQQHHHHCRGFSTYDIGTCISTLQSCAHNANLSKGKELHTHLLKNAFFKSPIAITNLINMYSKCSLINHSLRVFNFPTHHNKNIFAYNALIAGFLANAFPQRALALDNQMRHLGIALDKFTFPCV

SEQ ID NO: 189823 - protein, 160 aa, Glycine max
  unsure (1)..(160): unsure at all Xaa locations
  Clone ID: PAT_MRT3847_142427C.1.pep
THDRRDHHGRIGQKIEGTMVGTPKNVPDFDAISYAIKCSGKDTATALVSKGLDTXWDAFDDATDSVSDIIGLKIIMDTMTDGNTEGKGESKAYYEKHLETLPTTLATQEAWDVNFDWNANWETTXAFYITFYMTDDLTLESVLLNDIPNDGTINGTCNSW

SEQ ID NO: 189824 - protein, 92 aa, Glycine max
  unsure (1)..(92): unsure at all Xaa locations
  Clone ID: PAT_MRT3847_142428C.1.pep
QEGVAHVGEFXSGAYASLPTKTNLVETPKEWQLDXPFCKIPWVPTXTVESLVGTDHEGYDPXFLGGIQKHATPMMPLDEEILYKVAQDMAEE

SEQ ID NO: 189825 - protein, 84 aa, Glycine max
  unsure (1)..(84): unsure at all Xaa locations
  Clone ID: PAT_MRT3847_142429C.1.pep
LSAMGFSLRGVQRRVDVPKGCVAVYVGENQKKRFVIPISYLNQPSFIELLNXKQEFGFDHPMGGLTIPCREDVFLGVTSRLHRR

SEQ ID NO: 189826 - protein, 120 aa, Glycine max
  Clone ID: PAT_MRT3847_14242C.1.pep
GGGPFFFRHTKRGGGFSFFKNFWAWGAHQRRDFFFLSSPNEKKEFFFLSIGSKTTPPPRLNEFFGKPPLASFQKDLFYTFRRRKQSQPSLVLEQKTLSFVLFGALMKAQTQPKEHQMCRN

SEQ ID NO: 189827 - protein, 60 aa, Glycine max
  Clone ID: PAT_MRT3847_142430C.1.pep
PFSSRSKLSTFLNQTQMPSHPFDRFWFLLTPSCSALLLEKMHGCDQLLTIMDDGARAIAL

SEQ ID NO: 189828 - protein, 197 aa, Glycine max
  Clone ID: PAT_MRT3847_142431C.1.pep
MAKVYPQIIPTSPDQTQCLTSKRETYTLWLKSLVFHSNGCTVYDSNGDIVYRVDNYDRKGRREVNLMDLRGKVLCTIKKRLLALGCWEGHRCMSSDFGTQEQPWFQVKRCNQMIKGKVACQISVGCQKYSLVRISGKTEAFKIVNMDGQIVAEAKQKHSPSGVVLSNDVLTLDLAAGTDHSLIIALVTVYGLICGIM

SEQ ID NO: 189829 - protein, 159 aa, Glycine max
  Clone ID: PAT_MRT3847_142432C.1.pep
MTTMVAQRIIIVTFFTLLLLQHLTFATATALCQFSFLDGNTLYNYTLSSPIRNFPHGILSEDGFYKVAVNDTTLWFQLCDGMIFNHDPPICADCWDCGGPKHCGMKCNALVANNVGDDRGVRVSLGGGTANGGVVRGRVVGWGEGSSLVGVWQLVVETE

SEQ ID NO: 189830 - protein, 228 aa, Glycine max
  Clone ID: PAT_MRT3847_142433C.1.pep
MIFNHDPPICADCWDCGGPKRCGMECNALVANNVGGYHVCTAIGRGQKIDVDIIDKKNPHTGVIVKMSNSGPKYNCSLAVSVLCNLNGVQGPRTLERLGACDYVILLASYHSLSLSSKNTNNDLEKVENKEQYEGDMNLKPKTTIIYCCNFLKQVTELKHPSGCAIIINVHGGGWGWFGTLLIIVLCLFAAYLLAGIVYRFFFLGIRGIDVCSLLSFCYLLVLYSVSW

SEQ ID NO: 189831 - protein, 63 aa, Glycine max
  Clone ID: PAT_MRT3847_142434C.1.pep
PIPGAGSMSKRCVSLMILRGRLLLAIIGLDCKARNRLLSLRESTTDNSLHEPPDPTRDRAELR

SEQ ID NO: 189832 - protein, 69 aa, Glycine max
  Clone ID: PAT_MRT3847_142435C.1.pep
CFFFFFFFFCFFFPRGSIPFKKKKRQRNSQDKTPLGMQRCYLVEGLNGPQLRAILGSLTAPSFLTRQTV

SEQ ID NO: 189833 - protein, 103 aa, Glycine max
  Clone ID: PAT_MRT3847_142436C.1.pep
PILKESMTAGHSESAVLVARSHNLLRWSYTSIVPSAPPELCCITQITRSERKHAYMAVGVADSGVDLALGGDTYVNCEDRMDTLSDDIESCARATVPHICSYH

SEQ ID NO: 189834 - protein, 70 aa, Glycine max
  unsure (1)..(70): unsure at all Xaa locations
  Clone ID: PAT_MRT3847_142437C.1.pep
SSEKECLRIXHRPSLYXKRKXKMNVLLLXFWFVEXTNQGRNKXQYRSDQXDXGKEKRRDXFYXVVGEGFF

SEQ ID NO: 189835 - protein, 77 aa, Glycine max
  Clone ID: PAT_MRT3847_142438C.1.pep
TLNMSGIALSRLAQERKAWRKDHPFGFVAVPTKNPDGTMNLMNWECAIPGKKGTPWEGGLFKLRMLFKDDYPSSPPK

SEQ ID NO: 189836 - protein, 107 aa, Glycine max
  unsure (1)..(107): unsure at all Xaa locations
  Clone ID: PAT_MRT3847_142439C.1.pep
DXXYVSSEXGSRFCLXREPEYKGLGXKLVXALNXYSLXTLSMDXXQDLXCLXXEQRXKXXXAEXMELDXXXXFXXQLKEXSXSXXPPSXPPPPPPXPXSSXNPSSSS

SEQ ID NO: 189837 - protein, 67 aa, Glycine max
  Clone ID: PAT_MRT3847_14243C.1.pep
SSLKLSREFMKRVPKELEFNEASKEPNSLYQEVRFAFRVHQFAGGFDSETIQAFQELKKIVSASTKL

SEQ ID NO: 189838 - protein, 71 aa, Glycine max
  Clone ID: PAT_MRT3847_142440C.1.pep
RMGFACLLKFKAPIACNTQTASGRAWSVWFRRMLLVSLCVSNGHVIALHLICVSPLIWHLFRPRICSCCAW

SEQ ID NO: 189839 - protein, 81 aa, Glycine max
  Clone ID: PAT_MRT3847_142441C.1.pep
LFHALIDGVIDRTFEEAFAEHDGKLDGENGLDLWLRLAFRLTNLTIHLLNDITTAFTSTVSNSEVDDPGGEPRRPRQFQCS

SEQ ID NO: 189840 - protein, 134 aa, Glycine max
  Clone ID: PAT_MRT3847_142442C.1.pep
MAQTQTQRPCSSVLDSLGEEIVRIVAPVSICMFLVVILVSILNTDSSLFVASMSMVTIAYNETTSDSTWDKFLGALLNSLAFVVLVTFATFVLVLLFYFRCTRFLKLYMAFSTFIVLVFLGGEVSIFLIQKFST

SEQ ID NO: 189841 - protein, 66 aa, Glycine max
  Clone ID: PAT_MRT3847_142443C.1.pep
KPHFIHSLWFFKLVHKSGTYRQLKLVITLIIRSLWCNIVFMKTYCKTGRIHSNNLFESNGCKHPCF

SEQ ID NO: 189842 - protein, 60 aa, Glycine max
  Clone ID: PAT_MRT3847_142444C.1.pep
WFAKRQTEDGGPFYREQKQWSLGLKNPTERSDGGEVDPLKGKKTTHWAEHTLLKHNWFAL

SEQ ID NO: 189843 - protein, 50 aa, Glycine max
  Clone ID: PAT_MRT3847_142445C.1.pep
TQFDNWKCWWKISMWYQKKKYKFDQFYSFHIHLFIHSNMMLFGLLFASMF

SEQ ID NO: 189844 - protein, 137 aa, Glycine max
  unsure (1)..(137): unsure at all Xaa locations
  Clone ID: PAT_MRT3847_142446C.1.pep
KKKLSVEILSNQLLKTKSLVDPFPGFNPRHVYYKEGRALLLYQRNLSLRFKRVAKPKTGKLLLGKFKVGQAKTVRGVLFSSXPTPPGIEGEGYFCFYFREPSKGNFFFFCFGPASPVQVKIDFMLFPIRFDLIQSGG

SEQ ID NO: 189845 - protein, 63 aa, Glycine max
  unsure (1)..(63): unsure at all Xaa locations
  Clone ID: PAT_MRT3847_142447C.1.pep
DVQQVSLVINYDLPTQPENYLHRIGRSGRFGRKGVAINFVTLDDARMLSDIQKFYNVTXDQQH

SEQ ID NO: 189846 - protein, 44 aa, Glycine max
  Clone ID: PAT_MRT3847_142448C.1.pep
TFFFYFPTLTFKRAKILGPFIPNPTLLGPFWEFFPLVKLKLKLK

SEQ ID NO: 189847 - protein, 68 aa, Glycine max
  Clone ID: PAT_MRT3847_142449C.1.pep
RRAYTSEKTTERHASQPWGLRFQDAVTPIMRGIIYLHHDFLILLIESGRYGSWLLLRALCNSRIKMNP

SEQ ID NO: 189848 - protein, 87 aa, Glycine max
  unsure (1)..(87): unsure at all Xaa locations
  Clone ID: PAT_MRT3847_14244C.1.pep
XRXXXEEXXKXXLDIFERWHXLXRSPXRFRTXXPSRWRXLWXXSLRRSITVXXXYXAYRWXPXXXCXQQXSXEWVAXXXXIGXLXEC

SEQ ID NO: 189849 - protein, 50 aa, Glycine max
  Clone ID: PAT_MRT3847_142450C.1.pep
WCARYHVWLLKFTIKIIFALYVYILFFNCCCYYYDLNYSHYLNLKYACIK

SEQ ID NO: 189850 - protein, 75 aa, Glycine max
  Clone ID: PAT_MRT3847_142451C.1.pep
MRLRHPNRPVDLSKLEMAALWRYWRHFNLVDAVPNPSKEQLVDVVQRHFMSQQMDELQVIVGFVQAAKRLKTVCK

SEQ ID NO: 189851 - protein, 53 aa, Glycine max
  Clone ID: PAT_MRT3847_142452C.1.pep
HASALICFTTSLCNFVCVLQLCLSLDFAFMFCVFAFLSSAYKLFVEIPLVVYK

SEQ ID NO: 189852 - protein, 108 aa, Glycine max
  Clone ID: PAT_MRT3847_142453C.1.pep
QRRTCCKHQPQRRLSMPQPRKQLLLGNWLHRPRLSPRLPIHRLNQLVQSRGLQQKGTVRRLLRPHPTVSDKKSNLGSTESSVVKRPHRLVRGGILLGPRLQAGRLRYW

SEQ ID NO: 189853 - protein, 254 aa, Glycine max
  unsure (1)..(254): unsure at all Xaa locations
  Clone ID: PAT_MRT3847_142454C.1.pep
MAKTYAAGLLSAIAAATAAASLNQNNAYADGILPPNPSEIEPSPAPPPPKVRNDHPRTTSAGFDPEALERGVKALREISKSPHGKKVFEVIKKQEETKQTELSAKVAEFRQMKAQHETERQRIIYDEQKKLXQHQAQTKSQMAKYEDELARKRMQAENEYHRARNQELVKLQEESSIRQEQARRATEEQIQAQRRQTEREKAEIERETIRVRAMAEAEGRAHEAXLAEDVTGECWFDRANAEREKWVAAINTTF

SEQ ID NO: 189854 - protein, 48 aa, Glycine max
  Clone ID: PAT_MRT3847_142455C.1.pep
FFEGRICWSDFSVFYLLYILEGEVAKNKVPVFKFFQGHLMKIIFFFWG

SEQ ID NO: 189855 - protein, 114 aa, Glycine max
  unsure (1)..(114): unsure at all Xaa locations
  Clone ID: PAT_MRT3847_142456C.1.pep
GGVNTVINGSSKGTALGVVFIGTFVLVYSVFSXTGPKRYDRDSHVYVLAPCLIGFTVFMVHLVSLPVTGTGIFXAGSFGPAVFFGFVIAWGVQWIYWVGPFVEDTVFSIYQQYL

SEQ ID NO: 189856 - protein, 87 aa, Glycine max
  Clone ID: PAT_MRT3847_142457C.1.pep
AIRPSSCGLVESISGSQRSAISGLGVLVLSVGSSSTVSGCSTTRQVVAENISSVLANQCAKFVGLGALRNSDAVLITEFLELGLAPG

SEQ ID NO: 189857 - protein, 132 aa, Glycine max
  Clone ID: PAT_MRT3847_142458C.1.pep
MAVNCTSSIRIPIQKYGSFLKYPNKKLMSKRSYVPMKKASVLRITASIKNKVYEDHSQGIICYQDEFGEIVCEGYDEGPCFQRIPETTNRPRDAQITKNLLLRQSWIQIVKGENSNDGLQKDLNCNGFNSFC

SEQ ID NO: 189858 - protein, 99 aa, Glycine max
  Clone ID: PAT_MRT3847_142459C.1.pep
MAVNCTSSIRIPIQKYGSFLKYPNKKLMSKRSYVPMKKASVLRITASIKNKVYEDHSQGIICYQDEFGEIVCEGYDEGPCFQRIPETTNRPRYPILYCI

SEQ ID NO: 189859 - protein, 108 aa, Glycine max
  Clone ID: PAT_MRT3847_14245C.1.pep
VCRLERSVNSAEKTRESASKRYRSFHIPWEWMLDTGLIGQMKLSSLKLAREFMKRVTKELESNEVSKEDNLLVQGVRFAFRVHQVGRLHICTTSDIHKRNINLNLFMS

SEQ ID NO: 189860 - protein, 87 aa, Glycine max
  Clone ID: PAT_MRT3847_142460C.1.pep
ASQFWGKGSNMGVCRHFLFVVIKTICQHMCGKKLGICVSNFENLLHLISSLFCSTTWAFVNRKTGSIPNFPFKKKKKKKKKKAAALE

SEQ ID NO: 189861 - protein, 92 aa, Glycine max
  unsure (1)..(92): unsure at all Xaa locations
  Clone ID: PAT_MRT3847_142461C.1.pep
FEGDRHRVVAPAGSPITKFYCTPGEIQXMSXSVRLYHRGAXXXXQPXFXLFXXXXXXXXXXXXXXXXXXXXXFXXXXXXXXXXXXXPPFFFF

SEQ ID NO: 189862 - protein, 69 aa, Glycine max
  Clone ID: PAT_MRT3847_142462C.1.pep
APPFFPLGPKKYGGRVIKGFFPFPRLDAPFFVFFNGGLFYLPPLYCCLPGSLVFDGIYMGFFLAPNKSK

SEQ ID NO: 189863 - protein, 86 aa, Glycine max
  unsure (1)..(86): unsure at all Xaa locations
  Clone ID: PAT_MRT3847_142463C.1.pep
KKKNLEIRRSGYVKLKTKKGAIYNKGLQRRDNLSQSEKPICNVIKRILDPIIKESLTKVVIQLLIQKFXXYDLQNQHPCQSPSHSS

SEQ ID NO: 189864 - protein, 109 aa, Glycine max
  unsure (1)..(109): unsure at all Xaa locations
  Clone ID: PAT_MRT3847_142464C.1.pep
QATVCWLSNVGTGFWFVCTSGVPFFITPPLHFEALVEDHVYQFSNFXFCASEPGALCAPIGCVFDGDGAKLMAVKGAFDAFYVRLHKVSLFGVDTFPPFSIFCVGLCLM

SEQ ID NO: 189865 - protein, 79 aa, Glycine max
  Clone ID: PAT_MRT3847_142465C.1.pep
MVEPKWLHSKDRKLLQKDDLKRKAHIVVAKDDSGKFKTITAALKQVPDNSDKRTVIYVKKGVYDENVRVEKDNGNVMIW

SEQ ID NO: 189866 - protein, 83 aa, Glycine max
  Clone ID: PAT_MRT3847_142466C.1.pep
GSQRGQLALVGSDRKLNPGRQESHCVERESHQLSAMGLTASTARAASTNAHTAEVMVNLSSLESRASRTQCTRAHNPTQSVCI

SEQ ID NO: 189867 - protein, 64 aa, Glycine max
  unsure (1)..(64): unsure at all Xaa locations
  Clone ID: PAT_MRT3847_142467C.1.pep
MEGKTESHVTSAEAIVEGGVQKTRKDASSICREEXGKREADNVTNGKHEEHLQGILEGGERSCQ

SEQ ID NO: 189868 - protein, 49 aa, Glycine max
  Clone ID: PAT_MRT3847_142468C.1.pep
KRTKKMDHAQKVCRLVKILLTFKLYIKHRDLKNGDTLLSSSRSRLEPAR

SEQ ID NO: 189869 - protein, 72 aa, Glycine max
  Clone ID: PAT_MRT3847_142469C.1.pep
SCPRQSSSSETPSLLWAGSGFSLRIVLSRIRLLRMARPRPVLLFLAQRPAFGAFRLVVHVAQLSLLRVSFRQ

SEQ ID NO: 189870 - protein, 43 aa, Glycine max
  Clone ID: PAT_MRT3847_14246C.1.pep
TQKPRLYNSCQCFIPVSPNLFPWGMFSWLLIITGKKTKLTFHP

SEQ ID NO: 189871 - protein, 128 aa, Glycine max
  Clone ID: PAT_MRT3847_142470C.1.pep
LLQLWFCNLSKFNSFVVSGNPKTWVPYMNNKDCSQGFCSLYCPQWCYVIYPPPPPPFEFPSDDSSPNFSPLVIAVIGVLASAFLLVSYYTIISKYCVHRESSKAKSTKKTLNWKKMITTLHTTSPWMP

SEQ ID NO: 189872 - protein, 69 aa, Glycine max
  unsure (1)..(69): unsure at all Xaa locations
  Clone ID: PAT_MRT3847_142471C.1.pep
MIFFLKRQGARAGPSPTIGPPSPPPSCPSLEPVNRQKTFPILLLEFTKNGSHHSMXYFSFRGKEPKYHA

SEQ ID NO: 189873 - protein, 34 aa, Glycine max
  Clone ID: PAT_MRT3847_142472C.1.pep
SNECSPLVTCRMSPLQPLKSQERDVPKSRQITCF

SEQ ID NO: 189874 - protein, 43 aa, Glycine max
  Clone ID: PAT_MRT3847_142473C.1.pep
KGPGFPTENYTLSCPKKPPKVHVVGQGKTEKIGKPFLLPTFRL

SEQ ID NO: 189875 - protein, 106 aa, Glycine max
  Clone ID: PAT_MRT3847_142474C.1.pep
RLSIGGVCAPSLLPLAGLSDVHAVGITGGFIYLLIWLWHYDLVGGIVAGQRGIVTHDYGAFTVSACTFLVAGDYSGALNPVHFVCDALVLICCRWGDCFTGCCKSL

SEQ ID NO: 189876 - protein, 65 aa, Glycine max
  Clone ID: PAT_MRT3847_142475C.1.pep
ICLKPFFNPWVKKNTKVWGPLKVPNTLIGDIGNSMGQLIGAFQTFGCLHHFKIFCGPVPTKKKIK

SEQ ID NO: 189877 - protein, 276 aa, Glycine max
  Clone ID: PAT_MRT3847_142476C.1.pep
MASTGEKAMDVEDAENEVSVSSAILNSIASRQNEVLSPEDLAWVESCLVKDSDISDTDWIPLKNALLDIISSQPQSFSTEGEDVKIPPYIISSEYANTATTSDEKLNLQSSTSDEKLIILQSSTSDEKLILQSSTSDGKHLSEPSSTYNVNSLLMAVETSTDEIPDDEKTGTLPSINPFLPTYKEHLKEENETIDSGLNLDSSSYEMEHLAENIFKIWDFDIQSEEGELVKQLDKALSENSFQTVPPSFDDSLKLKDSSLDDLIAGIADLSLNKNV

SEQ ID NO: 189878 - protein, 109 aa, Glycine max
  unsure (1)..(109): unsure at all Xaa locations
  Clone ID: PAT_MRT3847_142477C.1.pep
THAPGRATEPPPXXRXGPXTQXGHLDNPTXRSRXGRPKHLAKEXEQXQKEXPRRKQXKKXPEGRKENTFREICSCYWKNKNEKKRFYLNLFFFTINVNSHTHRLVELNS

SEQ ID NO: 189879 - protein, 74 aa, Glycine max
  Clone ID: PAT_MRT3847_142478C.1.pep
EMRKSCGFLYVLLLLVCASLVVVHTEGRVCDSQNHRFHGLWNRDHICALGCGIEGYSRCMSKCIHRRCLSNRIC

SEQ ID NO: 189880 - protein, 55 aa, Glycine max
  Clone ID: PAT_MRT3847_142479C.1.pep
RLHLYRWLGTSSAVCDTLHMHPVKFLLIISKNIMPYYHQRRKVGYFLYIWQSPPL

SEQ ID NO: 189881 - protein, 206 aa, Glycine max
  Clone ID: PAT_MRT3847_14247C.1.pep
TAARRRQKGVEWALKLKGVKYEYIEEDVYNMSSLVMELNPVHKKVPILVHAQKPIAESFTILEYIDETWKQYPLLPQDPYQRALARFWANFGEQKLMRAARKAMTTSRDERAKALKETRELMERIEEEIKGKKYFGGDNIGFLDIALGWISYWLPVVEEVGSMHIIDPLKFPAITSWMTNFLSHRVIKDNLPPRDKMLVYYRNFVN

SEQ ID NO: 189882 - protein, 140 aa, Glycine max
  unsure (1)..(140): unsure at all Xaa locations
  Clone ID: PAT_MRT3847_142480C.1.pep
VIGRTGXAVTIRVAGVLKDWILIALSTVIXPESTITGLNIVGYAIALCGVVMYNYIKVKDVRASQLPVESIPDRITKDWKFEKKSSDIYVPDNIGDNEGSSGGNGTASDMKIDEETPLISSSRLSHIGRTQLTNQYATGK

SEQ ID NO: 189883 - protein, 62 aa, Glycine max
  Clone ID: PAT_MRT3847_142481C.1.pep
KKAHEFKFGNPIRKLLIRNPRYVKLEPQKGPALFLYFFICKILFIFIVDFFFYFYFYFFLFF

SEQ ID NO: 189884 - protein, 159 aa, Glycine max
  Clone ID: PAT_MRT3847_142482C.1.pep
QCKYFYIVIQLQPIMDTAGQERFRSLIPSYIRDSSVAVIVYDVASRQTFLNTAKWIEEVRTERGSDVIIVLVGNKTDLVEKRQVSIEEGEAKARELNVMFIETSAKAGFNIKALFRKIAAALPGMETLSSAKQEDMVDVNLKSTTGSAQSQPQPSGCAC

SEQ ID NO: 189885 - protein, 207 aa, Glycine max
  Clone ID: PAT_MRT3847_142483C.1.pep
MASVSALAKYKLVFLGDQSVGKTSIITRFMYDKFDNTYQATIGIDFLSKTMYLEDRTVRLQLWDTAGQERFRSLIPSYIRDSSVAVIVYDVASRQTFLNTAKWIEEVRTERGSDVIIVLVGNKTDLVEKRQVSIEEGEAKARELNVMFIETSAKAGFNIKALFRKIAAALPGMETLSSAKQEDMVDVNLKSTNGSAQSQPQSSGCAC

SEQ ID NO: 189886 - protein, 206 aa, Glycine max
  Clone ID: PAT_MRT3847_142484C.1.pep
MAPVSALAKYKLVFLGDQSVGKTSIITRFMYDKFDNTYQATIGIDFLSKTMYLEDRTVRLQLWDTAGQERFRSLIPSYIRDSSVAVIVYDVASRQTFLNTSKWIEEVRSERGSDVIVVLVGNKTDLVDKRQVSTEEGEAKSRELNVMFIEASAKAGFNIKALFRKIAAALPGMETLSTTKQEDMVDVNLRSSGSHDSQPQSGGCSC

SEQ ID NO: 189887 - protein, 73 aa, Glycine max
  Clone ID: PAT_MRT3847_142485C.1.pep
QSPCIYRPWLTSIDKRKLIESYREKVQLNHWMAKSKTNDVLLCMKVQGSITTKGNTYLEWHSNYKMSCVGMMN

SEQ ID NO: 189888 - protein, 147 aa, Glycine max
  unsure (1)..(147): unsure at all Xaa locations
  Clone ID: PAT_MRT3847_142486C.1.pep
MRLVLSQLHETRRAKGRDIYTILSLSVGVGIMCICRYRESHIPREGEDGTWTGIVWPGAELWLDRHRLLTHPWKRDPVDPEPLRLYLXHRYKETLGNSRRVXLCTAEPGTEPSVMALNSELWLMANDYTTEKLIVHMIHDAALDTML

SEQ ID NO: 189889 - protein, 100 aa, Glycine max
  unsure (1)..(100): unsure at all Xaa locations
  Clone ID: PAT_MRT3847_142487C.1.pep
VXTXYXXLGIXXXVWXXIXLSSXXWKXMVTGPRSLXXXPXXXLXIFCSTIIXMINKFTIXTYTSTXXEITSTGVXKGXYIWPMSALXXXXRTSXLXSXWX

SEQ ID NO: 189890 - protein, 100 aa, Glycine max
  Clone ID: PAT_MRT3847_142488C.1.pep
SLELLSMHLQHMCQFTLWLTAVLRRPIFLRPSPSSVSRSTFSQCTPLVHHVCSPLFGYVPASSHGICVKSLPIMLRDYVSLTAAMSGSCSQHVFTFSHRM

SEQ ID NO: 189891 - protein, 38 aa, Glycine max
  Clone ID: PAT_MRT3847_142489C.1.pep
SISLAKKYYHYIRIITLIHVNHHWAYLLTIVLYSECPE

SEQ ID NO: 189892 - protein, 109 aa, Glycine max
  Clone ID: PAT_MRT3847_14248C.1.pep
KLFDGDYNRSSTPVDRYSLVRPNKPCDCVSDAESKNSSGWAYSVNKTKVDNSVAHHIKFKKDKIRESLKVLENLIPGAKGKEPLLVIDGTIEYLKILMSQTGALGVKYH

SEQ ID NO: 189893 - protein, 128 aa, Glycine max
  unsure (1)..(128): unsure at all Xaa locations
  Clone ID: PAT_MRT3847_142491C.1.pep
TLKESYAVTSTAQRLYKQWDSMIXSHDYWGDATAQLSPELREIDLPXVRLMLKIVDEELVDSFYGAPLIVETXWNESCGHRSEWRGIAPPYYYMSNLLIDVELRLRGSTANWTMDVNHHAIRCDEHHG

SEQ ID NO: 189894 - protein, 34 aa, Glycine max
  Clone ID: PAT_MRT3847_142492C.1.pep
SGFDSLNSAQRPLPFCDPISLAWHNTNYVVQSTM

SEQ ID NO: 189895 - protein, 170 aa, Glycine max
  unsure (1)..(170): unsure at all Xaa locations
  Clone ID: PAT_MRT3847_142493C.1.pep
NSARAGPSGPPVTTVPNQNSELVLTPNVPDIMVTPPEDDHLRHVIDTMALYVLDGGCAFEQAIMERGRGNPLFNFLFVLGSKEHTYYVWRLYSFAQGDTLQRWRTEPFIMITGSGRWIPPPLPMSKSPEHEKEPGPTHARXRSTRIEPERTLTDAQSDEXEDMLRALTLE

SEQ ID NO: 189896 - protein, 855 aa, Glycine max
  Clone ID: PAT_MRT3847_142494C.1.pep
MGSKAKKKGSPEDILETLGDFTSKENWDNFFTLRGDSFEWYAEWPHLRDPLLSLLKTIPLPLPLQLLVPGCGNSRLSEHLYDAGHTAITNIDFSKVVIGDMLRRNVRDRPLMRWRVMDMTVMQFEDESFGAVIDKGGLDALMEPELGPKLGNQYLSERINIANSQYPDLLFSKFRLGWKMSVDAIPLKSSGKPSLQTFMVVVEKELSTLVHQITSLLHNSSLHSNSKQVLLSSVYVLPPPPPPPQLCKVSGLHEALQNENQIREKYSSGSDILYSVEDLQEELTKLSQGRRLQLTLGGQGYSTFSYRAVILDAEEQADPFTYHCGVFIVPKTRAREWLFYSEEGQWMVVRSSKAARLIMVYLDASHSDTSMEEIQKDLSPLVTQLAPAENGNGAKIPSVSCTSCIFFFSQILEYNAYSFMMASEGIKERNIIHKVTSSLTGSIIVEDVIYENVDSEVSCIFPSGELMFRRLVFERAANLVQSEALLKDEQLPTKLVSETGKKKNNASSKSRKSGSWRDSVGASSQLTVYHGYVASSYHTGIISGFMLISSHMENVASSGKMASLGAGLLPMFLHGCIPFLEIETVELDPMIVDIARDYFSFVEDKHVKVHIADGIQFVREIDSSGAAQIHGKSNDPSYTDTALNASSAVSHADVEVTKVDIIIVDVDSSDPSSGLTCPAPDFLDESFLETVKDRLSEDGLFVVNLVSRSQAIKDMALSKMKKVFSHLFCLQLDEDVNEVHFALKSESCIEDSCFSEASLKLDKLLEFKHPEIGQNIINATKKIRRLNAFTLYFIWLFASTFKGYGLMDNIPWNNSLLILSRRNFFSLRFVWLELNNFYWKLFRILGSVMLFSLSY

SEQ ID NO: 189897 - protein, 56 aa, Glycine max
  unsure (1)..(56): unsure at all Xaa locations
  Clone ID: PAT_MRT3847_142495C.1.pep
EWGQVRWLTPVIPALWEAEAGGSPEVGSSRPAWLMWKNLVSTKNEKIXNQVWWHAP

SEQ ID NO: 189898 - protein, 759 aa, Glycine max
  unsure (1)..(759): unsure at all Xaa locations
  Clone ID: PAT_MRT3847_142496C.1.pep
MGSKAKKKGSPEDILETLGDFTSKENWDNFFTLRGDSFEWYAEWPHLRDPLLSLLKTIPLPLPLQLLVPGCGNSRLSEHLYDAGHTAITNIDFSKVVIGDMLRRNVRDRPLMRWRVMDMTVMQFEDESFGAVIDKGGLDALMEPELGPKLGNQYLSEVKRVLKPGGKFVCLTLAESHVLNLLFSKFRLGWKMSVDAIPLKSSGKPSLQTFMVVVEKELSTLVHQITSLLHNSSLHSNSKQVSGLHEALQNENQIREKYSSGSDILYSVEDLQEELTKLSQGRRLQLTLGGQGYSTFSYRAVILDAEEQADPFTYHCGVFIVPKTRAREWLFYSEEGQWMVVRSSKAARLIMVYLDASHSDTSMEEIQKDLSPLVTQLAPAENENGAKIPFMMASEGIKERNIIHKVTSSLTGSIIVEDVIYENVDSEVSCIFPSRELVFRRLVFERAANLVQSEALLKDEQSPTKLVSETGRKKNNASSKSRKSGSWRDSXEQAVQLTVYHGYVASSYHTGIISGFMLISSHMENVASSGKMVKAVIIGLGAGLLSMFLHGCIPFLEIETVELDPMIVDIARDYFSFVEDKRLKVHVADGIQFVREIDSSGAPQIHGKSNDPSNTESALNASSTVSHAGVKVTKVDIIIVDVDSSDPSSGLTCPAPDFLDESFLETVKDKLSEDGLFVVNLVSRSXAIKDMVLFKMKNSFFHLFCLQLDEDVNEVHFALKSESCIEDSCFSEASLKLYKLLEFLSPVLRIAVFLTILLN

SEQ ID NO: 189899 - protein, 100 aa, Glycine max
  Clone ID: PAT_MRT3847_142497C.1.pep
KTTSCQTAARRMDPFNLRPIVGPWMPAKDIFLFFLAFSLFFFFFFFFFFFLHGQKIFDILNVYQGYQDIRLKYLVYIVGHIFSFFTNKNREIFLRPSWAV

SEQ ID NO: 189900 - protein, 42 aa, Glycine max
  Clone ID: PAT_MRT3847_142498C.1.pep
RTKILFWCEAIKIFRLMERGKEGPKKIHGFEFLYGKGYGVSY

SEQ ID NO: 189901 - protein, 44 aa, Glycine max
  Clone ID: PAT_MRT3847_142499C.1.pep
GVITHANIVFGSKPPIFDEVFAKAFQVGKKGMDSLQKQFWFSNS

SEQ ID NO: 189902 - protein, 94 aa, Glycine max
  unsure (1)..(94): unsure at all Xaa locations
  Clone ID: PAT_MRT3847_14249C.1.pep
SSSLARVLHFLLDRKXGKEKVXXSIVVIGHVXXGKXXTXGXLXYXLGRHLXXRVMXRFXKEAAXXXKRXFKXAWVLDKLKAEXRXRXIXSXIAL

SEQ ID NO: 189903 - protein, 113 aa, Glycine max
  unsure (1)..(113): unsure at all Xaa locations
  Clone ID: PAT_MRT3847_1424C.1.pep
TKIPKIYLIIIKKKRPLVWGLFYKTPENIPNKQPQKGNIWDQVIYSNIRKGPIKKSYYRGEPLETTNGLRKHPNNAFKNQHRNHQRLRELCSKEHLLRGKXHNSIWAEAGPPA

SEQ ID NO: 189904 - protein, 446 aa, Glycine max
  Clone ID: PAT_MRT3847_142500C.1.pep
MSRHQGGNAEDMADEFEMEDVEDDMDDESIDRERGGVESDIDDYDHSSGKGVDTTAAQARRGQDIQGIPWDSLNITRERYRQTRLEQYKNYENIPGSGDKSGKDCKNTKKGYSFYDFRKNSRSVKSSILHFQLRNLVWATSKHDVYLISQFSIMHWSSLTCKSSEVLNVSGHVAPSERHPESLLEGFTHTQVSTLAVKEKLLVVGGFQGELIFKHLDRPGVSFCTRTTYDDNAITNAIEIYDCPSGAVHFTAANNDSGVRDFDMEKFQLSKHFCFPWPVNHTSLSPNGKLLLIVGDNPECMLVDSQNGKTIVPLSGHFDYSFASSWHPDGVTFATGNQDKTCQIWDLRNLSKSVAVLQSNLGAIRSIKYTSDGRYMAVAEPADFVHVYDVKSGYENEQEIDFFGEISGISFSPDTESLFIGVWDRTYGSLLEYGRRRYYAYLDSLT

SEQ ID NO: 189905 - protein, 63 aa, Glycine max
  Clone ID: PAT_MRT3847_142501C.1.pep
RSTSISFLHFLFSLNSQSTEGVGTIHTDDTFFCFFRLLLLYPVPPQLDPNSTIDSILMRFPAC

SEQ ID NO: 189906 - protein, 72 aa, Glycine max
  Clone ID: PAT_MRT3847_142502C.1.pep
MTSGTRLPTWKERENNKKRERRRRAIAAKIFAGLRMYGNFKLPKHCDNNEVLKALCNEAGWTVEPDGTTYRK

SEQ ID NO: 189907 - protein, 89 aa, Glycine max
  Clone ID: PAT_MRT3847_142503C.1.pep
DGALAKGEKVEFFHDEFRCPIYVKDLVTIILTLTSQWISGTGLLVPKLMYWLDVCYAVKNFLMMLIFSDTLFKLAKFNNKIFAEILSIL

SEQ ID NO: 189908 - protein, 167 aa, Glycine max
  Clone ID: PAT_MRT3847_142504C.1.pep
EIEKWLEEENFQERNRRKGVIIRGWAPQVEILSHPSTGGFLSHCGWNSTLEAVSAGIPMITWPMSAEQFINEKLIVQVLKIGVRIGVEAPVDPMETQKALVKKECVKKAVDQLMEQGGDGEQRRNRAREIKEMAQKAVEDGGSSASNCELFIQDIGAVEDGGSSASK

SEQ ID NO: 189909 - protein, 290 aa, Glycine max
  unsure (1)..(290): unsure at all Xaa locations
  Clone ID: PAT_MRT3847_142505C.1.pep
VGTIFYGVGSSXSPEFARRARGAFISGFMTFMSIGGFPSFIEEMKVFYKERLNGYYGVGVYILSNFLSSFPFVAVMSIATGTITYYMVRFRTEFSHYVYICLDLIGCIAVVESSMMIIASLVPNFLMGLIIGAGYIGVMMMTAGYFRQIPDLPKIFWRYPISYINYGAWGLQGAFKNDMIGMEFDPLEPGGTKLKGEIILKTMLGIRVEISKWWDLAAVMIILVLLRVLFFVILKFKERAAPFLYSIYARQTLQRIKKRPSFRKGPSFPSKPHQSLHPLSSQEGLNSPIH

SEQ ID NO: 189910 - protein, 90 aa, Glycine max
  Clone ID: PAT_MRT3847_142506C.1.pep
FLSRIASKGVLRVFAPILVQGSFRIAAKSQCMDIVVSFSMYKVMLLMCPARYPRFCRRWGSVLSSTVSISFFLGGVVGQDMAFLKARVYE

SEQ ID NO: 189911 - protein, 70 aa, Glycine max
  unsure (1)..(70): unsure at all Xaa locations
  Clone ID: PAT_MRT3847_142507C.1.pep
LLWRDAWALSSHSPWCTAARGVGSSGASSIPIALDCYQPTLSPLFLFKLPYFQCAVDLFTAXCLLNRSRD

SEQ ID NO: 189912 - protein, 182 aa, Glycine max
  unsure (1)..(182): unsure at all Xaa locations
  Clone ID: PAT_MRT3847_142508C.1.pep
TFDHDTFCYHHGYHNYYHHHCHYRHYHCRHYQYNLHHCHHHHHHYSCHCHYHYHYHYHHYKCYQIHHQCCCNYHLXHYQHHYQHHNHYQQYHFCHRHHIHHHILTTFCHHYHRHCYNHHHXIPHLSLPPLIPPSPPPPTLPPSTPPPHCHYHHHLHCHHHQCHLYHHCRYHRHLYHHCRSPS

SEQ ID NO: 189913 - protein, 65 aa, Glycine max
  unsure (1)..(65): unsure at all Xaa locations
  Clone ID: PAT_MRT3847_142509C.1.pep
DGLLEKAVVAFLFERKYIVFSKSFDAWICGLDGFYNVDFMEMWMKRLFFRXCVVTSKKVKKLQRL

SEQ ID NO: 189914 - protein, 69 aa, Glycine max
  unsure (1)..(69): unsure at all Xaa locations
  Clone ID: PAT_MRT3847_14250C.1.pep
MNLPIGVQVKLSMRHALVFVLIVAMWNLQRADGIRLVIDIDECFSHDVKYXGDTVHVSFIGINADFTWH

SEQ ID NO: 189915 - protein, 91 aa, Glycine max
  Clone ID: PAT_MRT3847_142510C.1.pep
PHLLKFNTLATPYKYPTEACQCCKDSHPISVHTQFLWHKSKNWKVNSLHSIPRFPSQANVNNYFLPHSLEYVFSCKRVQIFFLDPLLFLPL

SEQ ID NO: 189916 - protein, 85 aa, Glycine max
  Clone ID: PAT_MRT3847_142511C.1.pep
GFPWCTKSLEKGTFRNAPKARTFLYVALVILNAQGRFLCACSPKRVLFVNLEFMAQFPKFNENGLKTPSLKKVSQRTTTQDFSKN

SEQ ID NO: 189917 - protein, 99 aa, Glycine max
  unsure (1)..(99): unsure at all Xaa locations
  Clone ID: PAT_MRT3847_142512C.1.pep
QEIREKVKQXMKTACIHGQEIIPLYMAKIVEDFAPKEHDRMITKAFDQXYYNAEDADLGVGSDIDDIGXPDFGKEDGFLGHLKGSDACGSNGGILTARP

SEQ ID NO: 189918 - protein, 73 aa, Glycine max
  Clone ID: PAT_MRT3847_142513C.1.pep
QKPQNLKPPGHILLKNVLKIPRVIRPRSLAKAPNGPLKKIFRPTVLVGSPPYGKDPKAFPPEISQGDVEAPPH

SEQ ID NO: 189919 - protein, 74 aa, Glycine max
  Clone ID: PAT_MRT3847_142515C.1.pep
PSNKSHFPVNNMESLIKGTWDWSQIYDSEILTMGLKGPMPTPIEKKGAVIKNWCMMLGNLALVEAIHGSTLDIG

SEQ ID NO: 189920 - protein, 170 aa, Glycine max
  Clone ID: PAT_MRT3847_142516C.1.pep
GSGKAKLEKMHEQVDKIADNILREHQEKRERALREGKVDLEEEDLVDVLLRIQQSDNLEIKISTTNIKAVILDVFTAGTDTSASTLEWAMAEMMRNPRVREKAQAEVRQAFRELKIIHETDVGKLTYLKLVIKETLRLHAPSPLLVPRECSELTIIDGYENPVITKVMIN

SEQ ID NO: 189921 - protein, 73 aa, Glycine max
  Clone ID: PAT_MRT3847_142517C.1.pep
IYLQLTSFKIYKLVLLLSRLYHLLQRFTPLSALPSPRALISVGIRNNHGSSLHFKSYSFTSSITIQPELPIQM

SEQ ID NO: 189922 - protein, 177 aa, Glycine max
  Clone ID: PAT_MRT3847_142518C.1.pep
KDLGSELKREEIEQLILHLLLARFLKEEFQHTPYATNAYIAVGSLAKQILQGKKSVKLEIYTEQRTKDGVRSAKQCLGSSGLELKLDELRKELSSAHGGILPHSVLSTEQIIQLASQKPNSLEQLEKLIGKLRTEKYGNRILKQIEKYYDFEPTDKQEIDARAAKRLKSKKNLVIIE

SEQ ID NO: 189923 - protein, 64 aa, Glycine max
  Clone ID: PAT_MRT3847_142519C.1.pep
KKSKSDIFFTIFEWLSQKTTMKSQDYCIKCLEYLCMVKSYKSILKSNIVQNHKPNVIKYIIDAF

SEQ ID NO: 189924 - protein, 100 aa, Glycine max
  unsure (1)..(100): unsure at all Xaa locations
  Clone ID: PAT_MRT3847_14251C.1.pep
HIYVKTFSGITITLQVHSYDTIYNVKAKRNDKEGIHADHHRLIFRGQTLEDXLTLADYDIHNESTVHLLLRLHGGVHIFVKNLTGQTIKLXVQSSDTMDN

SEQ ID NO: 189925 - protein, 57 aa, Glycine max
  Clone ID: PAT_MRT3847_142520C.1.pep
PPPHRGLGLVMPILGKPPPAPLNAPGAFYGGWTTLYAPKSPLGGFTGLGLSPPPLGL

SEQ ID NO: 189926 - protein, 83 aa, Glycine max
  unsure (1)..(83): unsure at all Xaa locations
  Clone ID: PAT_MRT3847_142521C.1.pep
NDSSGEVLACRLDTMTVQYYPEWGPIDCLVHRQPIHITAGDXFRKQDVSIEYDACTIPDDCGALVVAKVGDHRQIVGVHVAGS

SEQ ID NO: 189927 - protein, 49 aa, Glycine max
  Clone ID: PAT_MRT3847_142522C.1.pep
MCLQFFPLPLVHFQLPLALSVLWSISYNMPPLPQFSLLHHMILSGAICF

SEQ ID NO: 189928 - protein, 61 aa, Glycine max
  Clone ID: PAT_MRT3847_142523C.1.pep
RWYTPKFSSGALVSFVVYFTSIESGNHMHMIIYTCPQPSSCAFAGPPPPPSRRHSYTCSTA

SEQ ID NO: 189929 - protein, 98 aa, Glycine max
  Clone ID: PAT_MRT3847_142524C.1.pep
PRVPRQGWIQKGPPAQGVRPEDDHTYVQVLDYGTGTVSSARFNTQTCPNNNGSPILRIFFSFFYLLLFLKKFPFVFIFPFKNLYKIVKEKKTPVFSFF

SEQ ID NO: 189930 - protein, 116 aa, Glycine max
  Clone ID: PAT_MRT3847_142525C.1.pep
LKDNTSVTSRIVHNQTSSAQHADALIQAFIGWRADDNATIALLGHRSVHHMQEISEAYDDIYHEDLITCLESDISSDFDRAMYRWMLHSADCDTVMVNVEITSGSTDYHVIAEIAC

SEQ ID NO: 189931 - protein, 78 aa, Glycine max
  unsure (1)..(78): unsure at all Xaa locations
  Clone ID: PAT_MRT3847_142526C.1.pep
LLLFAAVATAAMAVAASDTNNILIHQVVPHVGETKEEDNLLNPDHHFASFXANFPKTYPTKEEHNHRLDVFKSNLPKP

SEQ ID NO: 189932 - protein, 124 aa, Glycine max
  unsure (1)..(124): unsure at all Xaa locations
  Clone ID: PAT_MRT3847_142527C.1.pep
ADVLSSGSSGFEFPVFVCVRHLSRPWERNPNYRAYDLLIDYRPRRQRGDRKYILIXDSAMTFRETALRRIGAHRIPRIDSNTVTHEHAXDAELGLDDIRAEQAFSTSNDMDATPIYWSQLLMDS

SEQ ID NO: 189933 - protein, 76 aa, Glycine max
  Clone ID: PAT_MRT3847_142528C.1.pep
SSLDHRGRFPLMAEKTVCDDIADDRVGARLSPFAIYCVCVGSYPHALGINKAQSLSQLGILYCHVIEPSTVSMFER

SEQ ID NO: 189934 - protein, 85 aa, Glycine max
  unsure (1)..(85): unsure at all Xaa locations
  Clone ID: PAT_MRT3847_142529C.1.pep
APLISPIEFLARRIRSPVRRNFNPSWISITEFVRPRSPPGEVFLVYRPAXWLETPRRSQVKSNLGFPSLFITNAQIKIIICFCDF

SEQ ID NO: 189935 - protein, 44 aa, Glycine max
  Clone ID: PAT_MRT3847_14252C.1.pep
KTQVIRHDLNPIWKSVFVNIQQVGSKDSPLAVECYNFNSNGKHD

SEQ ID NO: 189936 - protein, 148 aa, Glycine max
  unsure (1)..(148): unsure at all Xaa locations
  Clone ID: PAT_MRT3847_142530C.1.pep
AITDGHVNDTHAMLNMSAKXLFPQLCLSGITEAFNALSQLDFYYTEFPNTMSSIGCSLFGLXMAVGYLLSSLVFSVVQKGTTTRGKDRWVSDNXNKDRFDNYYWLLATLSAANELNYLACSRIYGPTADQKSKVTEENGSNDEELSLI

SEQ ID NO: 189937 - protein, 63 aa, Glycine max
  Clone ID: PAT_MRT3847_142531C.1.pep
SMGHTWAKPNVSASTCNYMLMYTIDNPEIFNPRVSRNLFVKFQSITDRPLSVSATQYKKQQSL

SEQ ID NO: 189938 - protein, 42 aa, Glycine max
  unsure (1)..(42): unsure at all Xaa locations
  Clone ID: PAT_MRT3847_142532C.1.pep
IVXPMAXKXIXKELKDLXKXXXTSCXAGXVXEDMFHWQAXIM

SEQ ID NO: 189939 - protein, 91 aa, Glycine max
  unsure (1)..(91): unsure at all Xaa locations
  Clone ID: PAT_MRT3847_142533C.1.pep
PSTDXKAMQRQTXQEGASSXSLXNNFHXXAPWPXXFYPFXFHAPLEPTFSVFPXXAXXSFXAXTLCFVXVPLARFXYEGXPSFGXXKSXRR

SEQ ID NO: 189940 - protein, 52 aa, Glycine max
  Clone ID: PAT_MRT3847_142534C.1.pep
ALGRECFLFTKSVDLSPYFSIRKQCKRYYASSVQQSPLLNWDTGRSFSILNA

SEQ ID NO: 189941 - protein, 86 aa, Glycine max
  unsure (1)..(86): unsure at all Xaa locations
  Clone ID: PAT_MRT3847_142535C.1.pep
LAFFFLAMPFWAFVVADCLVPNVAKKKKLTKFGVRFYHAFRAVFIPGRRTTSLCLPDPSRPICPAFFWLSAPLXSGTCALVEIRRR

SEQ ID NO: 189942 - protein, 44 aa, Glycine max
  Clone ID: PAT_MRT3847_142536C.1.pep
GSSLFSFLFLKIFFKIPPACIKMLTKNFPPKKRNARHLVTHNYK

SEQ ID NO: 189943 - protein, 81 aa, Glycine max
  Clone ID: PAT_MRT3847_142537C.1.pep
PQKILKWGGMGPLGTKFLKEISLGQGPLFLKAKKFFPYKGGSPQNIEKKKPPFKFFFTKKRSSKTLKKGYAFNSPKRFKNP

SEQ ID NO: 189944 - protein, 315 aa, Glycine max
  Clone ID: PAT_MRT3847_142538C.1.pep
MSTQGQVIDEAVLDDIIRRLTEVRLARPGKQVQLSESEIKQLCVASRDIFINQPNLLELEAPIKICGDIHGQYSDLLRLFEYGGLPPTANYLFLGDYVDRGKQSLETICLLLAYKIKYPENFFLLRGNHECASINRIYGFYDECKRRFNVRLWKAFTDCFNFLPVAALIDDKILCMHGGLSPELTNLDEIRNLPRPTAIPDTGLLCDLLWSDPGRDVKGWGMNDRGVSYTFGPDKVAEFLTKHDLDLICRAHQVVEDGYEFFADRQLVTIFSAPNYCGEFDNAGAMMSVDENLMCSFQILKPAEKKSKFVMSNKM

SEQ ID NO: 189945 - protein, 83 aa, Glycine max
  Clone ID: PAT_MRT3847_142539C.1.pep
ELQSKLIIRIVKSQIKRCENNKVVVLVLHQQKVHIVLVQHILLVVHGSGLETFSLFRFPRCPLYSICLLFYALQEITTTLFKS

SEQ ID NO: 189946 - protein, 231 aa, Glycine max
  Clone ID: PAT_MRT3847_14253C.1.pep
PLLGGLLSVWYSDFFQAQTHLVAPFDQYLHRFPAYLQQLSMESNGKTITSDGSSAKYTTGPILFGEPCTNAQHSFFQLVHQGTKLIPTDFILAAKSHNPVSDNLHQKMLASNYFAQAEALMVGKTDDQVRAEGTPEELVPHKRFLGNRPTTSILVGGAIGPAELGALIVYYEHLTFTEGAIWDINSFDQWGVELGKVLAKKILKELDEAGNGEGPHASTGGLIGAFKKYGN

SEQ ID NO: 189947 - protein, 736 aa, Glycine max
  Clone ID: PAT_MRT3847_142540C.1.pep
MAVAGGAAPLGSSVISLVNRLQDIFSRVGSHSAIDLPQVAVVGSQSSGKSSVLEALVGRDFLPRGNDICTRRPLVLQLVQTKPPSQEEFGEFLHLPGRKFHDFSQIRAEIQAETDREAGGNKGVSDKQIRLKIFSPNVLDITLVDLPGITKVPVGDQPSDIEARIRTMIMSYIKTPTCVILAVTPANSDLANSDALQMAGIADPDGNRTIGVITKLDIMDRGTDARNLLLGKVIPLRLGYVGVVNRSQEDILMNRSIKDALVAEEKFFRTHPIYSGLADSCRPPQLAKKLNKILAQHIKSVLPGLRARISASLVTIAKEHASYGEITESKAGQGALLLNILSKYCDAFSSMVEGKNEEMSTSELSGGARIHYIFQSIFVKSLEEVDPCEDLTDDDIRTAIQNATGPKSALFVPEVPFEVLVRRQISRLLDPSLQCARFIYDELMKISHHCMVTELQRFPFLRKRMDEVIGNFLREGLEPSETMITHVIEMEMDYINTSHPNFIGGSKAIEAAVQQTRSSRVGLPVSRVKDALESDKGPATERSGKSRSILARHANGVVADQGVRATSDVEKVVTSGNTGGSSWGISSIFGGGDNRVSVKEMTASKPHTTEPMHNVQSFSTIHLREPPSVLRPLESNSETEAVEITVTKLLLKSYYDIVRKNVEDLVPKAIMHFLVNNTKRELHNVFIDKQTREDLFEEMLQEPEEVAKKRKNCRELLRAYQQAFKVSAYNTLISIV

SEQ ID NO: 189948 - protein, 46 aa, Glycine max
  unsure (1)..(46): unsure at all Xaa locations
  Clone ID: PAT_MRT3847_142541C.1.pep
IVHAWNADDWATQGGRVKTDWSHAPLIATYXNSDINTRECDVLAVV

SEQ ID NO: 189949 - protein, 39 aa, Glycine max
  Clone ID: PAT_MRT3847_142542C.1.pep
ARRPPTGRHEFYVTTQYSGLAQTSISDGLSKTPQREELK

SEQ ID NO: 189950 - protein, 166 aa, Glycine max
  unsure (1)..(166): unsure at all Xaa locations
  Clone ID: PAT_MRT3847_142543C.1.pep
AFAENGQKLLSGGGDGQVYPWDLRTMTCLHKGVDEGCINGTALCTSXSGTHFAAGSDSGIVNIYNREEFLGGKRKPIRTIENLTTKVDFMRFNHDSQILAICSGMKKSSLKLIHIPSYSVFSNWPPSNTNLHYPRCIDFSPGGGFMAVGNASGKVLLYKLHHYQHA

SEQ ID NO: 189951 - protein, 70 aa, Glycine max
  Clone ID: PAT_MRT3847_142544C.1.pep
TVITFIIKGITGPIRNKLWRKDITGFSLLFWRTCSTKIHTQVNNLSRYQWIHGGNIIHGRLKVRGGIITW

SEQ ID NO: 189952 - protein, 112 aa, Glycine max
  unsure (1)..(112): unsure at all Xaa locations
  Clone ID: PAT_MRT3847_142545C.1.pep
GTSHAAYLSCGHAYAKAQFVSGKTFKCDLIGAGAHSLEDISVKEDQEKPKQIDARLRQRPHILQCNEAEANNETNLFNIEIAXVLGPRGNMVDLNIVEPYTVLPKNTVGGTI

SEQ ID NO: 189953 - protein, 148 aa, Glycine max
  Clone ID: PAT_MRT3847_142546C.1.pep
QVWPQGSLEEQVQSLVKNWEMEMFHKVDLQDFRSIDPKKYTFSLNGRKPMTLEEMMKLGGGYIPMLQTSIPEKMRPYNPYEETADSSHKAFTTTFPRGFALEILHVYSGPPVIVYKFRHWGYMEGPFKRHAPTGEKIQFYGMAIFTLD

SEQ ID NO: 189954 - protein, 61 aa, Glycine max
  Clone ID: PAT_MRT3847_142547C.1.pep
KLSVARLKLVPYALPGTHRRFLFLMAFNLSSSTFIDRALVLYFRTSQGTSSSWCWDRAKSS

SEQ ID NO: 189955 - protein, 193 aa, Glycine max
  Clone ID: PAT_MRT3847_142548C.1.pep
QVWPQGSLEEQVQSLVKNWEIYLFHKVDLQDFRSIDPKKYTFSLNGRRKPMTLEEMMKLGGGYIPMLQTSIPEKMRPYNPYEETADSSHKAFTTTFPRGFALEILHVYSGPPVIVYKFRHWGYMEGPFKRHAPTGEKIQFYGMAIFTLDENSKVVKVEFFYDPAELLGGFLKGPEDGSVENAIASCPILRNTG

SEQ ID NO: 189956 - protein, 63 aa, Glycine max
  Clone ID: PAT_MRT3847_142549C.1.pep
SIWDLESFQILRIYLGSLIAVRVILGASPAASSYTSNVNIRPTRNVLWSSRTVASDLASADAW

SEQ ID NO: 189957 - protein, 51 aa, Glycine max
  unsure (1)..(51): unsure at all Xaa locations
  Clone ID: PAT_MRT3847_142550C.1.pep
PVFLQNSVWKNPGVTXLNLLVTHPPFPTWRTTEKDRTNRPSHYLANLTGHW

SEQ ID NO: 189958 - protein, 260 aa, Glycine max
  Clone ID: PAT_MRT3847_142551C.1.pep
MGMGSLACIPQVLCTCADRMYAGILLNTRLACPLSSILSSPFSESAAQFCAASVVIALEDLHKNGVLYRGVSPDVLMLEQTGHIQLVDFRFGKQLSGERTFTICGMADSLAPEIVLGKGHGFPADWWALGVLIYYMLRGEMPFGSWRENELDTVAKIAKRKLHLPETFSPEAVDLISKLLEVEESTRLGSQGPDSVKSHPWFNCIEWEGIRHHTFPVPQEIISRITQYLEVHSEDCSTGYLGSPLQEVKELNVPEWLEDW

SEQ ID NO: 189959 - protein, 46 aa, Glycine max
  Clone ID: PAT_MRT3847_142552C.1.pep
ASCSCYVRTVVKDRTALFIEDASITCSMHIPRLYTIRAYVTAQVPD

SEQ ID NO: 189960 - protein, 241 aa, Glycine max
  unsure (1)..(241): unsure at all Xaa locations
  Clone ID: PAT_MRT3847_142553C.1.pep
GFGSATQLKYFQCFGELALMYNKPLQASVRAVTKGTSXWSLKREDFRGILMSEFSNLSSLKLLRSVDLLSRLSILQLSQISDSLSEVSFSNGQTIIDKNEVLALYIIQKGRVKITLDSDLLSCPNAYSLKPDIQSEDDVQSGKELSIEKPEGSYFGEWALLGENIGSLSAVAVGDVVCALLTKEKFESVIGSLQKISQEDHKSRDYSRNYEFSSLDKVQLSDLEWRKTLYSTDCSEIGLAN

SEQ ID NO: 189961 - protein, 71 aa, Glycine max
  Clone ID: PAT_MRT3847_142554C.1.pep
GGRTGPFSVRQNRHSIRDLFPPIQINRQNSGLVSLNLGLKFKLLGQVQNGPVAIPWIGVFPPTLILCMHAR

SEQ ID NO: 189962 - protein, 79 aa, Glycine max
  Clone ID: PAT_MRT3847_142555C.1.pep
RVRKKKKKKKKKKKKKKKKKKKKKKKKKKKKKKKKKKKKKKKKKKKGGALFKGPNFTTPGLQGKSFFLGPPKLNSRAGV

SEQ ID NO: 189963 - protein, 115 aa, Glycine max
  unsure (1)..(115): unsure at all Xaa locations
  Clone ID: PAT_MRT3847_142556C.1.pep
HEIELWMSHRMLPEDLKQRIRRFEHYKWHENSGVDXEALIRNLTKDLIRDTKRHLCLALVRKVPMFGLMDQQLMRAMCDRLKTVLYDXHSCIACEGNPLDETGCIMSGKGYSATT

SEQ ID NO: 189964 - protein, 57 aa, Glycine max
  Clone ID: PAT_MRT3847_142557C.1.pep
TCCFYKSFTDPSMVPCPRITPWTVKIIITLSTVLLGMERARQPDVADHGRPHHEQQP

SEQ ID NO: 189965 - protein, 56 aa, Glycine max
  unsure (1)..(56): unsure at all Xaa locations
  Clone ID: PAT_MRT3847_142558C.1.pep
ACAAASSLRIYLSPHQQSNEHAFRFFFLIGREFGCVKVKTEFYXESNFEDDEKKLE

SEQ ID NO: 189966 - protein, 51 aa, Glycine max
  Clone ID: PAT_MRT3847_142559C.1.pep
RATQLHESSRLPHPYTSVLTREKNTLVFPIDVDPGDVRITGNSFYLGSVYK

SEQ ID NO: 189967 - protein, 69 aa, Glycine max
  Clone ID: PAT_MRT3847_14255C.1.pep
NTSHKETPSSSPRNDNSVASLYSHIIIFVVLLCLLRGKTNHVQSCPPNSVSLFVPGMVPSSYYLLASII

SEQ ID NO: 189968 - protein, 45 aa, Glycine max
  Clone ID: PAT_MRT3847_142560C.1.pep
TLLPVLGLLSPSIMTYVPNKHCSLWQGPFIDAGLGDLYQLERLLA

SEQ ID NO: 189969 - protein, 42 aa, Glycine max
  Clone ID: PAT_MRT3847_142561C.1.pep
TFFIIIINQPLRFLFFNIYHFFSLTISSFQYYIISKCYTYFS

SEQ ID NO: 189970 - protein, 87 aa, Glycine max
  Clone ID: PAT_MRT3847_142562C.1.pep
AAILVPFISTIRRMTLRSHQISSYVHHIIHKPQNNIDQIIAFISTQTKSIAHQEATNFSIADSFRHGNKVTLTSAVSASDIMILHES

SEQ ID NO: 189971 - protein, 76 aa, Glycine max
  Clone ID: PAT_MRT3847_142563C.1.pep
MESAAFNPSLGPVQAALVAFIAGGGGDYDRIVGAALVEMDSAVIKQEHTAKLLIHSISPNCQFDTFLYHNNNNNKY

SEQ ID NO: 189972 - protein, 58 aa, Glycine max
  Clone ID: PAT_MRT3847_142564C.1.pep
MHLNIVKNSRLSFMGRRNKKWSILKPLQIRSTNVYHHGAIGRPNLIFFIIIREHCVVF

SEQ ID NO: 189973 - protein, 117 aa, Glycine max
  Clone ID: PAT_MRT3847_142565C.1.pep
RLIPLLQEDNKAAKPPRKGFNWFDDKPRVGPDPEWKNYIGRVGSIFGVSVDPKLAKFQERDFLGLIFFPVGNEAGRFLDEGIAVKAPNLVILVIMGMGFPPYGGGIISWPCFFGSRS

SEQ ID NO: 189974 - protein, 129 aa, Glycine max
  unsure (1)..(129): unsure at all Xaa locations
  Clone ID: PAT_MRT3847_142566C.1.pep
SGHNLKRKQLMFXGNSLNLRQWKSVVWLLPSVITAGNRKCXPNAPFSILRPYDSNATEEFLWAPLLAXSNSNDPVYYTLYERINFPDSVLIHASLWEKTDLLVVNTYLWRTHGPIKLLWTHEQNGAGEK

SEQ ID NO: 189975 - protein, 124 aa, Glycine max
  Clone ID: PAT_MRT3847_142567C.1.pep
MSRGSATAAKGKKKGATFTIDCAKPVEDKIMDIASLEKFLQERIKVGGKAGALGDSITVVREKTKIIVTSDSNFSKRYLKYLTKKYLKKHNVRDWLRVIASNKDRSIYELRYFNIAENEGEEED

SEQ ID NO: 189976 - protein, 124 aa, Glycine max; identical to SEQ ID NO: 158167
  Clone ID: PAT_MRT3847_142568C.1.pep

SEQ ID NO: 189977 - protein, 72 aa, Glycine max
  Clone ID: PAT_MRT3847_142569C.1.pep
FLLVFPIELISRNLRSLSKTAVAVVKPVHSPFSDLAFTLMLRSIFSRHSIFWLRFTGFWIDHIPQETIVTSK

SEQ ID NO: 189978 - protein, 37 aa, Glycine max
  Clone ID: PAT_MRT3847_14256C.1.pep
VMINVVNRSGQLLVAKIAKNKVCPNGSCLPRQKNLFC

SEQ ID NO: 189979 - protein, 163 aa, Glycine max
  Clone ID: PAT_MRT3847_142570C.1.pep
QGSTWIMGRYQGLIIPSHYLISRNLRSLSKTAVAVVKPVHSPFSDLAFTLMLHNSINNVISLYNHFHLEFLVHIPLIQASPISLNKQVKSTTKNIKDTHLRSIFSRHSIFWLRFTGFWIDHIPQETIVTSKRKLVKIFIDSSTLRLHMCHILLCNSIHQKNIQ

SEQ ID NO: 189980 - protein, 82 aa, Glycine max
  Clone ID: PAT_MRT3847_142571C.1.pep
DIVIGEVGSHDRRWIPHSGRSGGKYHHYCKTMPSFARVHGPSIHTYISIPRKLINTASMRLYHGFNHDIFVNKEIKYRKIAT

SEQ ID NO: 189981 - protein, 45 aa, Glycine max
  Clone ID: PAT_MRT3847_142572C.1.pep
MKKKKKKKKKKKKKKKKKKKKKKKKKKKKKKKKKKKKKKMEKNSK

SEQ ID NO: 189982 - protein, 408 aa, Glycine max
  Clone ID: PAT_MRT3847_142573C.1.pep
MSELVLECILEMLLYFITCISFFLFLKPILSLKSLPSWASEVRLISPLFYKDLSVKSISKLFRKRLWLGFLGQIPTRMSLVNKSSKVEIIEDSQDMSVLDLPELVLECILEKLPPPSLCQMAGVCRSLRESCVSDHLWERHMKQKWGRVIGQAAYREWKWHAASKGNVGTLRHGKQRSLLRLVSLSWPFSWMRTKVDANNSIKQQSYLPPDSLMTWYLALETGNFWFPAQVYNRENGHVGFMLSCYDAELSYDPHTDTFQARYPPHGRRAVAVEHGIPWERLRAPPVDTPPHDLHISDCLYDLHPGDHVEIQWRRNKEFPYGWWYGVVGHLELCDGNENYCRCHSSDTVVLEFNQYTPDSRWRKTTISRKDHREEGNEADGFYGGIRKIKSETEISIWKSIWPSEVLD

SEQ ID NO: 189983 - protein, 210 aa, Glycine max
  Clone ID: PAT_MRT3847_142574C.1.pep
NICVLLRTATPLEDIFKSLFCLPCLLCLRCMRDTCIPEEKMLRDPRRLYAPGRLYHIVERKPFRMGRFPPVVRTAVPVDGRFEHIVLSCNATSDHAIIWIEKEAQRALDLMLEKDQPMEPPAKQKMERQETLTRHNDEYKAALQRAKTLDVPHAYTPPSEYGTFDDEGEENSTRSQGESSNKSSVDESWDALIERHFDKDEHGHTVLKKE

SEQ ID NO: 189984 - protein, 235 aa, Glycine max
  Clone ID: PAT_MRT3847_142575C.1.pep
MAVFASSSSLQTHLHSSLLAPSFEGAHDHNSWWVRARSQKRIGQRLHTQDIARGLRIKVQSAATKPAKSPAEEDWKVKREFLLQKRVRSVEVKEALRLQKENSFVLLDVRPEAEFKEAHPPGAINVQIYRLIKEWTAWDIARRAAFLFFGIFSGTEENPEFIQSVEAKLDKNAKIIVACSAGGTMKPSQNLPEGQQSRSLIAAYLLVLDGYTNVFHLEGGLYSWFKEDLPSVSEE

SEQ ID NO: 189985 - protein, 100 aa, Glycine max
  unsure (1)..(100): unsure at all Xaa locations
  Clone ID: PAT_MRT3847_142576C.1.pep
MTPLRVAGGLTQSSSNSGIFYQGDGQSQNVVNSHLSSSFVNSSSTVSGASRSNLXPVSGDMNNAVLNSVANSAPSVGASSLVTDANSALSGGPHLQRSAS

SEQ ID NO: 189986 - protein, 83 aa, Glycine max
  Clone ID: PAT_MRT3847_142577C.1.pep
LLMLWNGRCDAMCIYRTNMFCHILGKMHKMVWIAALDIILVGLIDYLYDNADVILRYMPNDVILFKVYFELPHTTLLIDGIAP

SEQ ID NO: 189987 - protein, 57 aa, Glycine max
  Clone ID: PAT_MRT3847_142578C.1.pep
EAQSFTRGPPSALLNKRPPFQRFQAQEPPKTKGRIHSGILPTIAEDSHFWRKNVNAC

SEQ ID NO: 189988 - protein, 44 aa, Glycine max
  Clone ID: PAT_MRT3847_142579C.1.pep
ELLLVFKKNHTPIKLYLLIKPNHFSPSSFRFRSSLPRTGRHPYL

SEQ ID NO: 189989 - protein, 41 aa, Glycine max
  Clone ID: PAT_MRT3847_14257C.1.pep
HAHDFVFSSDLQKKQTQGGPFCKKQPYLRTLGTPLIVTSVP

SEQ ID NO: 189990 - protein, 84 aa, Glycine max
  Clone ID: PAT_MRT3847_142580C.1.pep
KNGGGTPPIMRGHNKNPHPQQRGPKNPPHKIGGGPPSGTENRCNKLQSTPRPGETPIKGHYQEGGGYLLPGRNAFAPKGERDNL

SEQ ID NO: 189991 - protein, 114 aa, Glycine max
  Clone ID: PAT_MRT3847_142581C.1.pep
TRGHVSRPDRLMSGADVTGSPAAERSRIMFRLVLCVIASLADVVSPGGLTRPSGWSPIVLLDGRACCIPWPILLHVLYSWRSQDHWRPPVLYLLLVLSNHRLVLIALCFSATSL

SEQ ID NO: 189992 - protein, 58 aa, Glycine max
  unsure (1)..(58): unsure at all Xaa locations
  Clone ID: PAT_MRT3847_142582C.1.pep
LPVSHDGPCSIIYSTEGSYIHPIEMNDHFPTIDPKKANVLLLPFSIAXMAPYVYIRNS

SEQ ID NO: 189993 - protein, 42 aa, Glycine max
  Clone ID: PAT_MRT3847_142583C.1.pep
GELKSGKVGFSKECPYSRAAPTMIRGMDLAILLSQLGDSVPH

SEQ ID NO: 189994 - protein, 90 aa, Glycine max
  unsure (1)..(90): unsure at all Xaa locations
  Clone ID: PAT_MRT3847_142584C.1.pep
HLRIRDKHNPSHNKCLRSCNSEIDSYRNQACHARCNLLKVEEEEDCXQGQLPRPRPQHPKRERQAHGENDEDECEHPRAFPFPRARPPHQ

SEQ ID NO: 189995 - protein, 94 aa, Glycine max
  Clone ID: PAT_MRT3847_142585C.1.pep
ATFPGETAPGLPCLSPRAGPAKRQTKRGRKKTFPKTKSTSSTQPYNKRYGKGKEKITGTMKLSPKKKQTQSLKKTKGTRTGGKKKCPGKKSYKR

SEQ ID NO: 189996 - protein, 63 aa, Glycine max
  unsure (1)..(63): unsure at all Xaa locations
  Clone ID: PAT_MRT3847_142586C.1.pep
FRINVCGMEWLLIXKRPYRIKTPLTGFWDGWLSFTSGQRDRGPDNPQPKKVVGEMWRTKLHLS

SEQ ID NO: 189997 - protein, 64 aa, Glycine max
  Clone ID: PAT_MRT3847_142587C.1.pep
GARSEKIWPSHYKGPRVSAPRLKINYGPPPFFDGEKKKAVQSCVPKEQKELLEKPAESVGAPAG

SEQ ID NO: 189998 - protein, 101 aa, Glycine max
  Clone ID: PAT_MRT3847_142588C.1.pep
GRAKDFGGGVARVLFFMDPPVEKEKILGARGGIPFFFGGAAGVFKSPPGKRYWDFLPRGGGFFMFLGGVFYYDPSIFFFWGSPLSPQFGRYMGGGLLTPFL

SEQ ID NO: 189999 - protein, 63 aa, Glycine max
  Clone ID: PAT_MRT3847_142589C.1.pep
VIGFLSFSCLGVGLEVSCLLKLRCTSSPSIPKILVGCRATWLISIHLPPGTRCHFLLHGASGS

SEQ ID NO: 190000 - protein, 85 aa, Glycine max
  Clone ID: PAT_MRT3847_14258C.1.pep
RCTSSSATLTGKRITLDVGSSEIIDTVKARIQDTDGIRPVHQRHTCAGKQHEDGRTHADYSMHMESTRQLVLRLSGGMQIFGKTL

SEQ ID NO: 190001 - protein, 104 aa, Glycine max
  unsure (1)..(104): unsure at all Xaa locations
  Clone ID: PAT_MRT3847_142590C.1.pep
NNSSAKKKPSSSSGAPVSMPVNIPDWSKILGNEYRRRNSFDDDDNDDNTXXXYYERSGRVPPHEFLARNRVASFSVHEGVGRTLKGRDLSTLRNAIWAKTGFQD

SEQ ID NO: 190002 - protein, 138 aa, Glycine max
  unsure (1)..(138): unsure at all Xaa locations
  Clone ID: PAT_MRT3847_142591C.1.pep
IRLGVLSLVLEQAESLRTGGTSLTLFKNGWMVLDAIGAANDLRTQFLEIQGXLIWMVVKSVDGRELRAFNFKQEDQSQEVRAVERRVLLETLASQLPRDSVQYSSQLQRIEASPNGDTLLELVDGSKLLARIVIECDG

SEQ ID NO: 190003 - protein, 426 aa, Glycine max
  Clone ID: PAT_MRT3847_142592C.1.pep
PTSSFALLKSHTHTKTLFTRRSFKAIKAQSQTDGRAKTVSLVGAKNASLPTAHSLQELGVRSLVLEQAQSLRTGGTSLTLFKNGWRVLDAIGVANDLRTQFLEIQGMVVKSVDGRELRAFNFKQEDPSQEVRAVERRVLLETLASQLPRDTIQYSSQLQRIEATPNGDTLLELVDGSKLLAKIVIGCDGIRSPIAKWMGFPEPKYVGHCAFRGLASYSDGQPFGPRVNYIYGRGLRAGFVPVSPTKVYWFICFNSPSAGPKITDSLELKKQAKELVKNWPSELLNIVDSTPDDTVIKTPLVDRWLWPAISPSASAGRVVVVGDAWHPMTPNLGQGACCALEDSVVLAKKLARAINSEDPSVEEAFRSYGAERWPRVFPLTIRANLVGSALQWENPVVCSVRNNIVIPKLVSLGPLLEHTNFTCEGL

SEQ ID NO: 190004 - protein, 152 aa, Glycine max
  Clone ID: PAT_MRT3847_142593C.1.pep
MATTTTTSPFVFLKCHTSPPCHTETLFTRTSYKAIKPQSQTDDVREEQVVVVGAGIADLATALSLHRLLGVLSLVLEQAESLRTGGTSLTLFKNGWMVLDAIGAANDLRTQFLEIQGMVVKSVDGRELRAFNFKQEIKGTGVLIKYESMVYD

SEQ ID NO: 190005 - protein, 43 aa, Glycine max
  Clone ID: PAT_MRT3847_142594C.1.pep
GKIPTFFFPLNNTHVHIQFDKANKQRIELAKSSDISFNVQSLR

SEQ ID NO: 190006 - protein, 342 aa, Glycine max
  Clone ID: PAT_MRT3847_142595C.1.pep
ENPKALGRLRSACEKAKRILSSSSQTTIELDSLCGGVDLHANFSRALFEELNKDLFMKCMETVEKCLKEARIAKSQVHEFVLVGGSTRIPKVQQLLKDMFSVNGNKELCKSINPDEAVAYGAAVQAAILSGEGDKKVEELLLLDVMPLSLGIETDAGEMSVLIPKNTMIPTKRESVFSTFSDNQTSVLIKVFEGEQAKTEDNFLLGKFELSGFTPSPRGVPQINVGFDVDVDGIVEVTARDRSTGLKKKITISNKHGRLSPEEMRRMVRDAVRYKAEDEEVRNKVRIKNLLENYAFEMRDRVKNLEKVVEETIEWLDRNQLAETDEFEYKRQELEEKVLKFM

SEQ ID NO: 190007 - protein, 130 aa, Glycine max
  unsure (1)..(130): unsure at all Xaa locations
  Clone ID: PAT_MRT3847_142596C.1.pep
AKWMGFPEPKYVGLASYPDAQYFGPRVNYIYGXGPTITDSLELKKQAKELVKNWPSELLNMVDSTPDDTVIKTPLVDRWLWPAISPASAGRVVVVGDAWHPMTPNLGQGACCALEDSVVLAKKLARAINV

SEQ ID NO: 190008 - protein, 101 aa, Glycine max
  Clone ID: PAT_MRT3847_142597C.1.pep
RSTGLKKKIPISNKHGRLSPEEMRRMVRDAEKYKAEDEEVSNKVRAKNLLENYAFEMRDRVKNLEKVVEETIEWLDRNQLAETDEFEYKKQELEEKFRKFR

SEQ ID NO: 190009 - protein, 54 aa, Glycine max
  Clone ID: PAT_MRT3847_142598C.1.pep
NQDYHRNKIEEQDQYWSTGLQDYCSINNHSEQEYVNLSLLFFITTFERIRIIKE

SEQ ID NO: 190010 - protein, 72 aa, Glycine max
  Clone ID: PAT_MRT3847_142599C.1.pep
LAIARNAYNGPSSYYAVPSPTLSQSFGIPIGSRSNGGDRCAHYLYITDLTLQETKTIALSILMQVMEENVTP

SEQ ID NO: 190011 - protein, 205 aa, Glycine max
  Clone ID: PAT_MRT3847_14259C.1.pep
SGPCGSGSGPVPARSAGLCGKICILLDLESSSCAGIVNLVPERLLLQPSEDKHSSKQKPLSILQEQELSSLSSFSGRIQTSQAIKVEQELSELQIIAAPAKPKEGSGSVEAKGPVESLQSKKAQDSGENGGFNIECRCLDQGDSLGLIMITNRTRYLINWLENSMMKLKHPNAVVVPGDLTLIAGVKFDRGLSDAYCSPIEQGTL

SEQ ID NO: 190012 - protein, 147 aa, Glycine max
  Clone ID: PAT_MRT3847_1425C.1.pep
GTSGNGKARLFCKKDRDKAEERGREPRTDKKTTARARTRKGNATVKSEKRRKEKEPANETNQKAHTEHRNPDTTKKPNEAEKAKKELEQQEQLDPKQADEEREKGNEPIKQQKQPEADKHHTKAIPTKPKDPRAQSSKATSPHKTGG

SEQ ID NO: 190013 - protein, 204 aa, Glycine max
  unsure (1)..(204): unsure at all Xaa locations
  Clone ID: PAT_MRT3847_142600C.1.pep
MAGSEPVSAEGESMAVDAAPRKPRILLAASGSVAAVKFANLCHCFSEWADVRAVSSSGSLHFIDRASMPKDVILYTDEDEWSSWKKLGDSVLHIELRKWADIMVIAPLSANTLGKIAGGLCDNLLTCIVRAWDYSKPFFVAPAMNTFMWNNPFTERHLISIDELGISLIPPVTKFIACGDYGNGAMAEPSXLYSTVRLFYESKA

SEQ ID NO: 190014 - protein, 62 aa, Glycine max
  Clone ID: PAT_MRT3847_142601C.1.pep
MKRVFTGIAREKYNRPHCSMATQRKPVIAKSNALHVNRPNINTRNCQIICFVRTELCFLSNS

SEQ ID NO: 190015 - protein, 142 aa, Glycine max
  unsure (1)..(142): unsure at all Xaa locations
  Clone ID: PAT_MRT3847_142602C.1.pep
MASLLSTTATTLQHNHTICFSPVKPTTPNTIPFSTNRCFKNNSAKCNAFFDKFPKDLLETTFHLDQFPVFQSVIVKFQNVTEDLSDVQRWGLGILTGLTWAYFTARPGVXVGPIDAFLLAPIQVVLEDFSGRRNLKRIFFLE

SEQ ID NO: 190016 - protein, 44 aa, Glycine max
  Clone ID: PAT_MRT3847_142603C.1.pep
HTPTQSSLNFYHSNTSLSETSFFIKHSLTTPPPQSHILTYTKLL

SEQ ID NO: 190017 - protein, 72 aa, Glycine max
  Clone ID: PAT_MRT3847_142604C.1.pep
LSVRVLGHTPQGDGFFHSLRWAMADEDYEDIDMGFVLSLSLSLTHTEIRVFPNSICLLKILNSHSRRGHYFN

SEQ ID NO: 190018 - protein, 52 aa, Glycine max
  Clone ID: PAT_MRT3847_142605C.1.pep
EEKGLWIGVQVGSFAQCVLLSTITSCINWEQQTIKARKRLFGSEFSADDRLI

SEQ ID NO: 190019 - protein, 63 aa, Glycine max
  Clone ID: PAT_MRT3847_142606C.1.pep
NVHDSWIYSRMVMKFEFSLLRSSIMSNYKCYVNLPMCLTSTWYPSNESCIYVTVSCNSSLVKL

SEQ ID NO: 190020 - protein, 165 aa, Glycine max
  Clone ID: PAT_MRT3847_142607C.1.pep
MVKEKTTFGKNNSVVAIFGLLLRRKNHAIVLSAGAVPVLVNTLASSGNANLVTDSLAVLVALAESVEGAYALLRAEALPLVAKILQSATSRSGKEYCASILLALCVNVGAEVTGVLAKEASVMPSLYSLLTDGTPHAAKKARALINVILEFSDKRFSGTVGSSVS

SEQ ID NO: 190021 - protein, 55 aa, Glycine max
  Clone ID: PAT_MRT3847_142608C.1.pep
AELMKLFPEIGKSLYDPHVLDEDTILHWFRKRTNSKGRRTFVNALEPYGKWLEDA

SEQ ID NO: 190022 - protein, 49 aa, Glycine max
  Clone ID: PAT_MRT3847_142609C.1.pep
YSLRYILIVEFLENLFIVCKVQDHINYTLTNYILIYFLSLINLNTFSVE

SEQ ID NO: 190023 - protein, 124 aa, Glycine max
  Clone ID: PAT_MRT3847_14260C.1.pep
PTRPPTRPSVSTLLGSVCPPETLINCILLHDALKKMRTKPIMRCCTPRPMILNYHHHNAYRELNLKIENQEEDIVRSSHKHVHNHHTETHERDNVVEDEHDAVMGDVYEEKAAYNDERDYSTMY

SEQ ID NO: 190024 - protein, 68 aa, Glycine max
  Clone ID: PAT_MRT3847_142610C.1.pep
KLPLIGNLHQLFGSTLPHHVLRNLATKYGPLMHLKLGEVSNIIVSSPEMAKEIMKTHDIIFSNRPQIL

SEQ ID NO: 190025 - protein, 64 aa, Glycine max
  Clone ID: PAT_MRT3847_142611C.1.pep
HGCTLPSMNISPVFNRITNTRAIHHHHAAWFHALFHHVQNLCERVHESKLHDVDDISPVFNRIT

SEQ ID NO: 190026 - protein, 49 aa, Glycine max
  unsure (1)..(49): unsure at all Xaa locations
  Clone ID: PAT_MRT3847_142612C.1.pep
PHNIIGFQTTSKKSFFSSNQYIHCEQYLSYSKTFHSQAXYFYAKHLKDH

SEQ ID NO: 190027 - protein, 72 aa, Glycine max
  Clone ID: PAT_MRT3847_142613C.1.pep
QRIQNLSLLDYKNFSISCYFYVCDYLRERKLTLCAGHRLRESLYFPLLDDLLNTLLLDIGLRVRMKLILHIS

SEQ ID NO: 190028 - protein, 196 aa, Glycine max
  unsure (1)..(196): unsure at all Xaa locations
  Clone ID: PAT_MRT3847_142614C.1.pep
MDNLQKCQANYTALTPLTFLMRAAACYANRTSVIHEGTRFTWAQTYERCRRLAFSLRALNIARNDVVSVLAPNIPAMYEMHFAVPMAGAVLNTINTRLDAKNIATILRHSEAKVFFVDYEYVSKAKEALRLLMDDNNNNNLKKGFIVIDDINTPTRIRLGELEYEQMVHHGNPNYFPEGIQNEWTPIALXYTSGTT

SEQ ID NO: 190029 - protein, 55 aa, Glycine max
  Clone ID: PAT_MRT3847_142615C.1.pep
GLKMAGYFSFLSCSSLRGVLFECLMKLSSKGWDPYEKHSDAQVRSRHKENNEFSK

SEQ ID NO: 190030 - protein, 305 aa, Glycine max
  unsure (1)..(305): unsure at all Xaa locations
  Clone ID: PAT_MRT3847_142616C.1.pep
VEFKEDMMKTFEMTDLGLMSYFLGIEVSQRNEGIFISQKKYTEGLLKKFKMYGCKPIATPLITNEKLQKNDGAPEADASKYRSLIGSLLYLTATRPDIMYATSLLSRFMQSPSQIHFGAGKRILRYLQGTKEFGIWYTTETNSXLLSYTDSDWAGSTDDMKSTSGYAFSLGSGMFSWASKKQATIAQSTAEVEYVAAAEATSQAIWLRRILEDMGEKQDKPTKINCDNKSAIAMTKNPVHHNRTKHIAIKYHFIREAEATKEIKLNYCRTKDQIADIFRKALPRPRFEELRAMLGVTEICIKEEC

SEQ ID NO: 190031 - protein, 123 aa, Glycine max
  Clone ID: PAT_MRT3847_142617C.1.pep
SLTPSGPQTLSLLMVPTNSAFSEIPSTAPQNQVDEDFYLHLNLPPELDLPLPATTQIYHQPPNSYLIPRWDLGPDSGAFTRIEFPPIGYDVSQEDLDTFETILAQCTAFMERAQPPLPRRPSQ

SEQ ID NO: 190032 - protein, 49 aa, Glycine max
  Clone ID: PAT_MRT3847_142618C.1.pep
KLDLPLGNGKGLKNLGKTIRAWNLLLNKTWSFVLNPSSGLVHHWHLFQL

SEQ ID NO: 190033 - protein, 56 aa, Glycine max
  Clone ID: PAT_MRT3847_142619C.1.pep
SKKNLTLMCQEPRQRLCRNKPARESKSIWSGIKFKINGIGFPLFKKGRALILQIRK

SEQ ID NO: 190034 - protein, 136 aa, Glycine max
  Clone ID: PAT_MRT3847_14261C.1.pep
KPIDDNNSTVGDNAPAEKNPKGGKKLPKDGGARRQRNNKNRNPTIVKTYKIYIYNVLNHAHPDIGISSKDMGIMNSFINDIFEKLAQESSRLVRYNKKPTITSREIQTAVKLVLNGELSNHVDSDATNARYQLTSS

SEQ ID NO: 190035 - protein, 71 aa, Glycine max
  Clone ID: PAT_MRT3847_142620C.1.pep
AALWNFLLLPLLLNHTSTPRRPRKIRCTRRKMYQSLLMWQPKSTFDKFNKYVKGILNSSFGGSIVMFCDNI

SEQ ID NO: 190036 - protein, 166 aa, Glycine max
  unsure (1)..(166): unsure at all Xaa locations
  Clone ID: PAT_MRT3847_142621C.1.pep
MEELEQWKEQLSHFANLALDRLREVPPNQLYAAAAIAIFTTLLLLSIRLFKRAKSNTIVLTGLSGSGKTVLFYQLRDGSTHQGTVTSMEPNEGTFILHNEKTRKGKIKPVHVVDVPGHSRLRPKLDEYLPQAAGVVFVVDALXFXPNCRAASEYLYDLLTKGSVVR

SEQ ID NO: 190037 - protein, 113 aa, Glycine max
  unsure (1)..(113): unsure at all Xaa locations
  Clone ID: PAT_MRT3847_142622C.1.pep
KTKVFFFLEKKIPTGGPGSFNGQSLVLNSFAGGNSLEEKAFQFQFSTQVQKLVAGVQGQIPISHSGSFIWAKCLIKVGPKEFCNFFFLEAESIKNHTVLFGLKKKKKXKTLYK

SEQ ID NO: 190038 - protein, 259 aa, Glycine max
  Clone ID: PAT_MRT3847_142623C.1.pep
MEELEQWKEQLSHFANLALDRLLEVPPNQLYAAAAIVIFTTLLLLSIRLFKRAKSNTVVLAGLSGSGKTVIFYQLRDGSTHQGTVTSMEPNEGTFILHNEKTRKGKIKPVHVVDVPGHSRLRPKLDEYLPQAAGIVFVVDALDFLPNCRAASEYLYDLLTKGSVVRKKIPVLILCNKTDKVTAHTKEFIRKQMEKEIDKLRASRSAISAADIANEFTLGVPGEPFFFTQCSNKVTTADASGLTGEISQLEEFIREHVKQ

SEQ ID NO: 190039 - protein, 295 aa, Glycine max
  unsure (1)..(295): unsure at all Xaa locations
  Clone ID: PAT_MRT3847_142624C.1.pep
MRETSVELFCICLHILVCDCCSLVHLGSYAGRVTPQSVVYSFGTLLLDRLSGKHIPPSLALDLIRGKNFLMLMDSALEGHFSKDDGTELVRLASRWLQYDARERPNXKSLVASLLSLLLVTEVPAFVRMRLPHHPASASWRLSWSPLAPACVPLVLAAFRLVLEITGYKDDEGIANELSFQLWTSQMQETLNLKKHGDTAFRAKDFVTAIDCYTQFIDGGTMVSPTVYARRCLSLLMNDMAQEALGDAMQAQVVSPEWPTALYLHAACLFSLGMENDAQETLKDGTNMEGRKNKN

SEQ ID NO: 190040 - protein, 27 aa, Glycine max
  Clone ID: PAT_MRT3847_142625C.1.pep
MRKGCVCPEKIRTRLDNIEGIYKSDLV

SEQ ID NO: 190041 - protein, 265 aa, Glycine max
  unsure (1)..(265): unsure at all Xaa locations
  Clone ID: PAT_MRT3847_142626C.1.pep
MAHPPFDPYYLYQQQDERSNINTLFVSGLPDDVKAREIHNLFRRRPGFDSCQLKYTGRANQVVAFATFFNHQSAMAALHALNGVKFDPQTGSVLHIELARSNSRRKRKPGGEAYVVIDKRSTGEPDLQGSSSDDGDSDPDEPSDSXTTKSDIAIMTSDETAVGSDNAVSVEQHGKGSAGGLCSTLFIANLGPNCTEDELKQAFSVYTGFNMVKMRSRGGMPVAFVDFEETDQAAKVVEELQGSLLPSSDRGGMHIEYARSKMRKR

SEQ ID NO: 190042 - protein, 78 aa, Glycine max
  unsure (1)..(78): unsure at all Xaa locations
  Clone ID: PAT_MRT3847_142627C.1.pep
THYGGYVTVDKEASRALYYYFGEAQRSRATLPRSSLARGSPGCSSXGYGAMRELGPLXVNCDGWTLHRNILGWDRVAD

SEQ ID NO: 190043 - protein, 53 aa, Glycine max
  Clone ID: PAT_MRT3847_142628C.1.pep
AGNVLAYYHHSRRRRSQCVQLPFWGNDYRNWLGLGFSDSEPYEAKLACSKQKG

SEQ ID NO: 190044 - protein, 89 aa, Glycine max
  Clone ID: PAT_MRT3847_142629C.1.pep
ANWLYRTGGSKVSSNIMNCLSVQCSPIPTVFSLPPSLYLSHSDICFLNDGFIPQQAQPIWDHSINSSKLRALNLNRTETLLFPVSILAY

SEQ ID NO: 190045 - protein, 48 aa, Glycine max
  Clone ID: PAT_MRT3847_14262C.1.pep
KMKEEILVAMVLSIMLLPIMGSCCPLLTTVTIHCARFDHFPQSLGILR

SEQ ID NO: 190046 - protein, 283 aa, Glycine max
  Clone ID: PAT_MRT3847_142630C.1.pep
MSGGEKEAMAEVKEWLVKTFEGAGKSVPEFEYTPRSVKHLNHLMTLSKAKDEAARLVARDFRLKSSEYRSQAARIREILENLGLAQESLPSNVVTSAQVLANVANLLNIRDTEMSSFLVAMGDISLRKTEVEEKRAEVNKESKLLLDYTRKAIARLTYLKRTLAQLEDEVAPCEAQKESWETNLQVMAAKERQYNQQCDNYKRMLDRSGYNPEVSHGILVEMAEHRKELEKKTKPILDTLRSYQDLPPDKALAALAIEDKKRQYADAEKYLEDVLQSALASSE

SEQ ID NO: 190047 - protein, 79 aa, Glycine max
  unsure (1)..(79): unsure at all Xaa locations
  Clone ID: PAT_MRT3847_142631C.1.pep
IVFFYQQLFFSHHCXTPQVLAILSQTTLNSPLKIHGCVLRFYSPLQMWTRVYRTQKQELWATTAPNASSLAKCSYYSDP

SEQ ID NO: 190048 - protein, 69 aa, Glycine max
  Clone ID: PAT_MRT3847_142632C.1.pep
ELTLCIGSIINGMPPKISGARNEISIFFFPWSFEKSKDYYKKSKGRIEEKKKRLLQYLLVNFIIGVGRY

SEQ ID NO: 190049 - protein, 63 aa, Glycine max
  Clone ID: PAT_MRT3847_142633C.1.pep
GSSTRPCRCQNTIERTNSCHVNVIIGFPFTFSVAFSYSPLHSFPYWAKYSSSVTTGLTMGALK

SEQ ID NO: 190050 - protein, 27 aa, Glycine max
  Clone ID: PAT_MRT3847_142634C.1.pep
MSLKEYYGSMWRCCKIKVRDCFFRGWY

SEQ ID NO: 190051 - protein, 72 aa, Glycine max
  Clone ID: PAT_MRT3847_142635C.1.pep
SANDIAINGCANVFASFPRPRCLRTLTLVMEILAPVALPYFFVHCPCEQCHPGGTFLAMVYNVLSICFRMRE

SEQ ID NO: 190052 - protein, 24 aa, Glycine max
  Clone ID: PAT_MRT3847_142636C.1.pep
LYELTTENAHILASNASTLWLLDH

SEQ ID NO: 190053 - protein, 75 aa, Glycine max
  Clone ID: PAT_MRT3847_142637C.1.pep
LLTSSMFIRRENSVPRRRTAAEDEPSGNIRPCGEEYILHAPGLDLEPEIKSHPGSDRKDDQVIGQCRKRAKQCHG

SEQ ID NO: 190054 - protein, 149 aa, Glycine max
  unsure (1)..(149): unsure at all Xaa locations
  Clone ID: PAT_MRT3847_142638C.1.pep
KGVSKRGSGLVQKVLKGVSKFPKGLAPPLRRRGLFPFYKGRWEISKNFWKKAPVFLHTSRFPAQIWGAPPFFWGPLLFFPGQFFFVFFPPLFGFSRPLLKWGNLGFPGGKLWGGPPXXKGNPXXXXKKKKKKKKKKKKKKKKKKKKXLK

SEQ ID NO: 190055 - protein, 99 aa, Glycine max
  unsure (1)..(99): unsure at all Xaa locations
  Clone ID: PAT_MRT3847_142639C.1.pep
MEVIRNRGISAGVLAKRAHDSEKHVAHERLKDQIPAVDKKDSTKGNXVHKXLNHRQSVGGDLKLHTDGKXNEGKHISXSTISAGENHVVQNPLMSHEEI

SEQ ID NO: 190056 - protein, 52 aa, Glycine max
  unsure (1)..(52): unsure at all Xaa locations
  Clone ID: PAT_MRT3847_14263C.1.pep
KIXLVVSKXXQIXXQKXNQXXCXVLNNKXXMXXMXYGLRXXINTHKXKFHXX

SEQ ID NO: 190057 - protein, 59 aa, Glycine max
  Clone ID: PAT_MRT3847_142640C.1.pep
PLSSTHPTYSSSLHSSTSPSLKIAAYPTFSTSSYQNTIPTPYTTPHYTPNTNIHKHSTP

SEQ ID NO: 190058 - protein, 134 aa, Glycine max
  unsure (1)..(134): unsure at all Xaa locations
  Clone ID: PAT_MRT3847_142641C.1.pep
MRADGHYLVRHGCPIRGGSWRRSSVYPASFATWRSKWEPHTSKLFFVPSLLVERLSSSPHFEWAMAEMMRNPRVMEKAQAXVRPASRELNVLLETDVRKRTYLKLALRETLKLXHPPSSLLAPRECSELSVLLD

SEQ ID NO: 190059 - protein, 60 aa, Glycine max
  Clone ID: PAT_MRT3847_142642C.1.pep
LKRVTPFGLKPTFKHCATRILTYNLTNSPQRFLVKMRPWHLNFFWIETGANSTQSIFFIP

SEQ ID NO: 190060 - protein, 396 aa, Glycine max
  unsure (1)..(396): unsure at all Xaa locations
  Clone ID: PAT_MRT3847_142643C.1.pep
MPDGQRFRDKKEAAEPEAAPKRDQRTVFAYQMPLKATERDAYEFFSKAGKVRDVGLIMDRNSRPAKGVVNAIVMSVAGDPLHLCLTNALMKLLANMLLWTGNHGQPVMVKPSEAEKNLVQSNASGGAAGVAGPYGAVDRKLYVGNLHFNMTESQLREXFEPFGPVEVVQLPLDLETGHCKGFGFVQFXHLEHAKAXSEFKWKIGDCWQDXKVSCVTDHVASQDATAKSADLDDDEGGLTLNAHSRALLMQRLAGADPASIGLPVVNGSVPAQQAISLPIGAPVLPTLVMPNPVVEPVGNPSECLLLKNMFDPSTETEPDFDIDIKEDVEEECSKYGRVKHIFVDKKSSGFVYLRFDTVEAASGAQRAMHMRWFARRLISAVFMQPELYEAKFKGEV

SEQ ID NO: 190061 - protein, 47 aa, Glycine max
  Clone ID: PAT_MRT3847_142644C.1.pep
DKRVCFAAVVSVHQFSSDGSVVVVVVVLSHVIVVVVMVAIAVGRHGD

SEQ ID NO: 190062 - protein, 51 aa, Glycine max
  Clone ID: PAT_MRT3847_142645C.1.pep
LRSLEARVDFYFISSGSGRHKRRTLVFEADCSHCSLLASRNIVAESNGFCG

SEQ ID NO: 190063 - protein, 56 aa, Glycine max
  Clone ID: PAT_MRT3847_142646C.1.pep
ILNSPPPGRRFQFLTEFKRIIPFVRKLSLPMIKRILNFVFKKKKKKKKKKKKKKKA

SEQ ID NO: 190064 - protein, 167 aa, Glycine max
  Clone ID: PAT_MRT3847_142647C.1.pep
KKKKNFFFLTQILKTEKKGGAPQTKPNQKGPRTHQKRTGIKGGEPPNPAPEILPGLPPPPNLLKPPPPPPRGQFSLTKAPYLKTLNQDRGGAPRAQFLRQFSPHREKTPKGHPPPGSPPIPFGRTHSPPNFSPRNFLRPKRGPPFQPPPPQKGRGGPHPGKGPPKGP

SEQ ID NO: 190065 - protein, 84 aa, Glycine max
  Clone ID: PAT_MRT3847_142648C.1.pep
KIIPYISSYNCSSMSLEIHFKSVSWKYYFLMPILVGTFFYRNIRAIISLSSINKVIGYHRCIRSQKFTFILPINFHHPNSMGKP

SEQ ID NO: 190066 - protein, 97 aa, Glycine max
  Clone ID: PAT_MRT3847_142649C.1.pep
HIRGSQNHVGPAGADENPKWGKKEIVSKCTKNAEPCKVAVSSQPLWSFEVKRFPFSQPYLVWCLPSHLQPSNCYSSQNTSSNFSFSWACLCSERARN

SEQ ID NO: 190067 - protein, 86 aa, Glycine max
  Clone ID: PAT_MRT3847_14264C.1.pep
AKKRKCIANSLDDVDRTLYTSGCTGANCLLQVYTHFMDHQKLFFNGGERHGLEKNYKGIFRPQGRGSRGGTSDGLNYIQNGVDYWG

SEQ ID NO: 190068 - protein, 437 aa, Glycine max
  Clone ID: PAT_MRT3847_142650C.1.pep
HASAHTRTVQSSLSNSPRVRVDFLSPFSRDSQSHTLLTPSTDSTQQRAVIKCGSGKMSQSIFHQTVLCQTQTVAEHQSKVSSLEVSANKGKKNLFLAPTNFRGSRLCVRKRKLTMGRHHHRHVDAVPRAVLTTNLASELSGKFNLDGNIELQIAVSSSEPGAARQVDFKVSYNSESLLLHWGVVRDQPGKWVLPSRHPDGTKNYKSRALRTPFVKSDSGSFLKIEIDDPAAQAIEFLILDEAKNKWFKNNGENFHIKLPVKSKLSQEVSVPEDLVQIQAYLRWERKGKQMYTPEQEKEEYEAARNELFEEVARGTSVQDLRAKLTKKTKAAEVKEPSVSETKTIPDELVQIQAFIRWEKAGKPNYSQEQQLMEFEEARKELLAELEKGASLDEIRKKITKGEIQTKVAKQLKTKKYFRAERIQKKKKKKKKKSGRRG

SEQ ID NO: 190069 - protein, 454 aa, Glycine max
  unsure (1)..(454): unsure at all Xaa locations
  Clone ID: PAT_MRT3847_142651C.1.pep
MMVFPTWRQVSYSYALLTNEIPVMTRIAQXNVSPHPNVIDLYDVDEDYIXVHLELDLCSDVELFDRIVAQDRYSETEAAGVVRQIASGLEAIHKANIVHRDLKPENCLFLDVRRDSPLKIMDFGLSSVEEFTDPIVGLFGSIDYVSPEALSQGKITTKSDMWSLGVILYILLSGYPPFIAQNNRQKQQMIMNGNFSFYEKTWKGITNSAKQLISDLLTVDPSRRPSAQDLLSHPWVVGDKAKDDAMDPEIVSRLQSFNARRKLRAAAIASVWSTAIFLRTKKLKSLVGTHDLTEEEIENLRMSFKKICVSGDNATLSEFEEVLKAMNLSSLIPLAPRIFDLFDNNRDGTVDMREILCGFSSFKNSKGDDALRLCFQMYDTDRSGCITKEEVASMLRALPEDCLPADITEPGKLDEIFDLMDANSDGKVTFDEFKAAMQRDSSLQDVVLSSLRPQ

SEQ ID NO: 190070 - protein, 112 aa, Glycine max
  Clone ID: PAT_MRT3847_142652C.1.pep
ENLRMSFKKICVSGDNATLSEFEEVLKAMNMPSLIPLAPRIFDLFDDNRDGTVDMREILCGFSSFKNSKGDDALRLCFQMYDTDRSGCITKEEVASMLRVILCPFFFRIKYN

SEQ ID NO: 190071 - protein, 55 aa, Glycine max
  Clone ID: PAT_MRT3847_142653C.1.pep
NEADNVQCRYLVCVQFSIDVWPFKCGASSSEIFHRRTPPVAVIPTLTKVPLCSVW

SEQ ID NO: 190072 - protein, 46 aa, Glycine max
  Clone ID: PAT_MRT3847_142654C.1.pep
MFQWMFPFVQLGKFVSSPKALGGGSTCSNFLWGPVKHKALATSRFF

SEQ ID NO: 190073 - protein, 86 aa, Glycine max
  Clone ID: PAT_MRT3847_142655C.1.pep
GPLKSLMGNANRLFAPWEVHCPPKKKINRGQTGQAQNFGQFVLLLERVLVTPSRDQLNPGLSKSSKRSAGTNKNPWFSLKGVNWVG

SEQ ID NO: 190074 - protein, 83 aa, Glycine max
  Clone ID: PAT_MRT3847_142656C.1.pep
PKCVVCHMSWSESMPLCPPGSASVASPRRLASSSSTKRAVVTYAPILCSGTRTFCRCLCVKRPKAWYLHPLKDQTDCVGRRIL

SEQ ID NO: 190075 - protein, 63 aa, Glycine max
  unsure (1)..(63): unsure at all Xaa locations
  Clone ID: PAT_MRT3847_142657C.1.pep
XXXPXXXSIXXXPXVRVSXGFISTSFELLVVXQLVXQGXXXXXESWSSAQRXSFGVHCFSCXC

SEQ ID NO: 190076 - protein, 152 aa, Glycine max
  unsure (1)..(152): unsure at all Xaa locations
  Clone ID: PAT_MRT3847_142658C.1.pep
MGTDGSELVETLPNPRSFKVHRTMCAELRKLVDRILRIIPQIEAARPCGMQALCLLNKAIDKARQLLLYCSESSKLYLAITGDSILSKFQKARXSLAKSLVQILNMAPAMMAAQIFXLIGDLECVTFVFDSAEERAGEGCETNVQKDSSTLD

SEQ ID NO: 190077 - protein, 185 aa, Glycine max
  Clone ID: PAT_MRT3847_142659C.1.pep
MASKLLLITVFVFDLIAFGLAVAAEQRRSTASVVTDNEKNYNYCVYNSDIATGYGVGAFLFLLVSQVLIMVASRCFCCGKPLNPGGSRACAVVLFIICWVFFIIAEVCLLAGSVENAYHTKYRTIFGENPPSCETVRKGVFAAGAAFIFFTAIISEFYYINYSRARESFQPYAGGETGVGMGTYK

SEQ ID NO: 190078 - protein, 77 aa, Glycine max
  unsure (1)..(77): unsure at all Xaa locations
  Clone ID: PAT_MRT3847_14265C.1.pep
MGELYALDFXGVIXDXCGESSLSALKAAKVXXXGLFDGVDSTTXNWIXDQMHTVXXVXETGXEXLLLVILXXXHNPP

SEQ ID NO: 190079 - protein, 51 aa, Glycine max
  Clone ID: PAT_MRT3847_142660C.1.pep
NEPQNIVEQESQGGSLGKISRSAYQRPVIRMSIMSCLSPCIPSGVVIILHP

SEQ ID NO: 190080 - protein, 56 aa, Glycine max
  Clone ID: PAT_MRT3847_142661C.1.pep
VPRPDTLASCGITCPELPANGGRKALIRVLIRASILLLVNPLSQSPFSNLYDLALV

SEQ ID NO: 190081 - protein, 69 aa, Glycine max
  unsure (1)..(69): unsure at all Xaa locations
  Clone ID: PAT_MRT3847_142662C.1.pep
QASDEFYLRHRDGGWSWSSDAGPLQVFHRXGQKPPEIVHMFIENIKDESLRMLIXAVIMPYTLLCPSSA

SEQ ID NO: 190082 - protein, 183 aa, Glycine max
  Clone ID: PAT_MRT3847_142663C.1.pep
PNAKPKQPAFCLKWPWNDANPSSSPSPCNFEGPLLLKSLQNVGLIAFNFASSFSSRKKKTSPAAASESEAEAEAFASALASGKEATLLEFYSPKCRLCNSLLKFVSEVETRNSNWLNIVMADAENPNWLPELLNYDVSYVPCFVLLDNNGKALAKTGVPNSRLHVIAGLSHLLKMKRPQQNNG

SEQ ID NO: 190083 - protein, 31 aa, Glycine max
  Clone ID: PAT_MRT3847_142664C.1.pep
VERPPEDPRSTMRDGRRYCDNVELDIIATER

SEQ ID NO: 190084 - protein, 100 aa, Glycine max
  unsure (1)..(100): unsure at all Xaa locations
  Clone ID: PAT_MRT3847_142665C.1.pep
ALSYGNACGSSRNYEALPHTRWLQXERQENVCLNWSQEEXITAWSTHVRPVTSVMADGRTYLHAMAHDSSVSXTIPGDYVIGCKXAAINSTRAYGLKAGV

SEQ ID NO: 190085 - protein, 67 aa, Glycine max
  Clone ID: PAT_MRT3847_142666C.1.pep
ISCFYKTHILCLSYFNKPLFPYQHYYNTLPKSHPQLIFYSTQYISLPILFTIHQQLLLSTPPKTTSY

SEQ ID NO: 190086 - protein, 194 aa, Glycine max
  Clone ID: PAT_MRT3847_142667C.1.pep
PILCCGISMCERPVRRIPHEFIPRIIKPRRVTASELWPNLLRDPIIHNFIPTHITTPTSASLFASKPHSFDSLTRECPCTLQNDMSSSIRFVKQTRTASDSHCRNWNQVHPEFNMGYRVQVQQECRLPGRTNNKREIQWHNNSENRLAGKRKMYDLDDNLECSSWPLLTETLDEEDSDETSDSSSDSETYSGPS

SEQ ID NO: 190087 - protein, 37 aa, Glycine max
  Clone ID: PAT_MRT3847_142668C.1.pep
SLFASKRSTYLQLMGPFSRSVFRGVGRQYLVAFCSSL

SEQ ID NO: 190088 - protein, 61 aa, Glycine max
  Clone ID: PAT_MRT3847_142669C.1.pep
FYLASLRQTDSIRFASVLCFSDVLLLHLSLLSLRSHYTHMREQFVVQWSCGVFLTVLHLFC

SEQ ID NO: 190089 - protein, 148 aa, Glycine max
  Clone ID: PAT_MRT3847_14266C.1.pep
IVERFSGRLPGYVGYGNDRFSFSHVEDVVEGHIAAMKKGEAGNRYLLTGENASFKHVFDMAAAITHTKKPLFSIPLWLIQLYGCLSVFFSRITGMLPLISPPTVHVLRHRWEYSCDKAKRELDYRPRSLKDGLAEVLLWLKNLGLIRY

SEQ ID NO: 190090 - protein, 234 aa, Glycine max
  Clone ID: PAT_MRT3847_142670C.1.pep
MASLLMIPCQHLLLKKLQRHCHRKAASNSIRSEKTSSFSFRSNANVPFHELPGASFDQYMDDKHRVLRAVFSDDKGTTKQLNEEEWRIKMPPIQCLFLSVNPTADVRLTFRSNGEDYPPEIPHHVPKVLELHFIRWELQGLNSFYKDPYQISIDVRGSLYPERKGKHSWLKNQMVMTITFCASPAIAFIPENVLQDAIELIFKTVWDEMKHEFHGRLLEDYNRFKRNKSKKNSV

SEQ ID NO: 190091 - protein, 53 aa, Glycine max
  Clone ID: PAT_MRT3847_142671C.1.pep
NDRKHLCYTRANAVYMQIKKPLRSFSMCRKMETYFLLNLQASCKIWITQQTWI

SEQ ID NO: 190092 - protein, 91 aa, Glycine max
  Clone ID: PAT_MRT3847_142672C.1.pep
FQIPLEIVWKSFSLVFFVEWGDRSMLATIALGAAQSLWGVASGAIAGHLLATTIAILGGAFLANYISEKLVGYLGGGLFLIFAVATFFGVF

SEQ ID NO: 190093 - protein, 223 aa, Glycine max
  Clone ID: PAT_MRT3847_142673C.1.pep
MEIERLRRNAEALVEKTMKGNDASHDAAHVWRVRDLALSLAKEEGLSSNPHSMEIVELAALLHDIADYKYLRDPSEEKIVENFLDEEGVQEDNKFKILKIIKGMGFKEEVSGSGNSEGFPEFGVVQDADRLDAIGAIGIARCFTFGGSRKRLLHDPAILPRSDLSRQQYMNKEEQTTINHFHEKLLKLKDMMKTKAGKRRAERRHKFMEEFVKEFYDEWNGLS

SEQ ID NO: 190094 - protein, 155 aa, Glycine max
  Clone ID: PAT_MRT3847_142674C.1.pep
FSFFFFFFLVCFFFFFLFFLFFFILFVGAPRRRGGVLWWGQRASGKSTNCGQHRAGSDFFPRTPYLGGKQTPPEQGFFFPKNLSAKLKPRFFFGVRAPRGLPAQNWGPLSDPDPVGVAPPVGGEKMGGEVRKGVLKGNRKTWGGAPPRRDHEFGG

SEQ ID NO: 190095 - protein, 53 aa, Glycine max
  Clone ID: PAT_MRT3847_142675C.1.pep
IQNMHEICKEALIIFHQYLTISLNDDGNFKMKEEKFYPRRKKQVQIFPLLVCP

SEQ ID NO: 190096 - protein, 92 aa, Glycine max
  Clone ID: PAT_MRT3847_142676C.1.pep
SISLNGSSCSLSSFLVRASRMRMALEKQTMQLAWSRRRALGIPGPLQHRIHLSQPRMLLPHLMMSPHRHRMTKDKALFIYFLLFRYSFKFQF

SEQ ID NO: 190097 - protein, 143 aa, Glycine max
  unsure (1)..(143): unsure at all Xaa locations
  Clone ID: PAT_MRT3847_142677C.1.pep
EAEEYDETREKLQMIRVKFLRLAHRLGQTPHNVVVAQVLYRLGLAEQLRGRNGGRVGAFSFDRASAMAEQLEAAGQEPLDFSCTIMVLGKTGVGKSATINSIFDEVKFNTSAFHMGTKKVQDVVGTVQGIKVRVIDTPXLLPS

SEQ ID NO: 190098 - protein, 48 aa, Glycine max
  Clone ID: PAT_MRT3847_142678C.1.pep
VRNGAIQTESTLRICLQQLRVFRGFCDTDSNNDDYTRLQLMILEQNSD

SEQ ID NO: 190099 - protein, 140 aa, Glycine max
  Clone ID: PAT_MRT3847_142679C.1.pep
PVELSVHATLSAQRATHRIAVSISSRLFFVCSLQAPQSPPLRPLNPSHCHCLYHCLQLKCEQQTWGNKSGLLFSTVASWSHIANSVLGLRCTLSWNNKREGKGMVGDDSHSWHPQIPRWSVQRGRPELVSLSYAVGPASS

SEQ ID NO: 190100 - protein, 223 aa, Glycine max
  Clone ID: PAT_MRT3847_14267C.1.pep
MWKPQKFKYIYLYATVYVFTLTLPSAIAVYWAFGDQLLDHSNAFSLLPRSGWRDTGVILMLIHQFITFGFACTPLYFVWEKVIGMHDTKSIFLRAIARLPVVIPIWFLAIIFPFFGPINSAVGALLVSFTVYIIPASAHMLTYRSASARQNAAEKLPFFIPNWTVMYVVNAFVVVWVLVVGFGFGGWASMTNFIKQVDTFGLFAKCYQCPPKGPPSSNHTLHN

SEQ ID NO: 190101 - protein, 66 aa, Glycine max
  unsure (1)..(66): unsure at all Xaa locations
  Clone ID: PAT_MRT3847_142680C.1.pep
IYIYILYYKNXSSPPXASSFFGIFLTIFRRIXHKNVLYLCSGKSKCTKIIRNNYKGEHKAIKLKLA

SEQ ID NO: 190102 - protein, 316 aa, Glycine max
  Clone ID: PAT_MRT3847_142681C.1.pep
MGISLNSQATTESVYNAALALGIANQLTNILRDVEEDANGGRVYLPQDELAQAGLSDEDIFAGYEYDINDLHQEAQARWLKPAEVMYILQNHEKFQFTQEVPQQPTSGSLFLFNKRILRYFRRDGHNWHKKSGGRTVGEAHERLKGKLSSGAGAQLSPSSSVYTQSPSPYSTQNPGSTSILGDSYEPNQSFSSPGSTKVTSEIFVLNNKMGHMDWADTESGTSSELEVTQALRRLEVQLSLNEDNFEDIVSFGSKHETVHDSNPKHDQRVISNQEQSAAFSRPDDQGLFYDGCNGRQDISVFYLFNCACSILHLHS

SEQ ID NO: 190103 - protein, 450 aa, Glycine max
  unsure (1)..(450): unsure at all Xaa locations
  Clone ID: PAT_MRT3847_142682C.1.pep
NGFHLIKPKADDDSWSHIIEALLVGSGTSTGTVDWLLEELLKDKLQQWLSCRSQEKGRKFMKRQXLFKKEQGIIHMVAGLVTELNXSFEWALNRVCAILSPTCGLNXADFRDNFNGWTALGXTARFGREKMVASLIXSGASAGXDPNAQDPTGKTAASEKEXTELIAASSGPGRVSLLLYRQILDEIEXFVTSLTLEESELSKSSAYLQADRTVNSVSKENLTASEDQASLKDTLAAIRNVTQAAARIQSAFRSHSFRKRRAREVAASAGGIGTISEISAMSKLAFRNSREYNSAALLXSIQKKYRGWKGRKDFLALRKKVVKIQAHVRGYQVRKHYKVIWAVGILDKVVLRWRRKGAGLRGFRQEMDINENEDEDILKVFRKQKVDVEIEEAVSRVLSMVDSPDAREQYHRMLEKYRQAKAELAGTSDEASLSTSVGDDLFMDDFYPFP

SEQ ID NO: 190104 - protein, 140 aa, Glycine max
  unsure (1)..(140): unsure at all Xaa locations
  Clone ID: PAT_MRT3847_142683C.1.pep
MTPGYEYDINDLHQEAQARWLKPAEVMYILQNHEKFQFTQEPPQQPTSGSLFLFNKRVLRFFRKDGHNWRKIRDGRTVGEAHERLKVGNVEALNCYYAHGEQNPTFQRRSFGMLDPAYDHIXSGHYRNTSEGKAQFWSWG

SEQ ID NO: 190105 - protein, 1020 aa, Glycine max
  Clone ID: PAT_MRT3847_142684C.1.pep
MSPAYLILLLSEGYEYDINDLHQEAQARWLKPAEVMYILQNHEKFQFTQEVPQQPTSGSLFLFNKRILRYFRRDGHNWHKKSGGRTVGEAHERLKVLNVEALNCYYARGEQNPAFQRRSYWMLDPAYEHIVLVHYRNTSEGKLSSGAGAQLSPSSSVYTQSPSPYSTQNPGSTSILGDSYEPNQSFSSPGSTKVTSEIFVLNNKMGHMDWADTESGTSSELEVTQALRRLEVQLSLNEDNFEDIVSFGSKHETVHDSNPKHDQRVISNQEQSAAFSRPDDQGLFYDGCNGRQVFLSSSLWKHQMGREEDHGYPDANEKALWTEQLESHKSSSAVKLPQKNVYMPAENENSVSSARRVPVSNQENSHWLNFNCNNSENCMIYFHLVNLTTFLVYFGVSSTSDSPPMLAAVFSQPQGVDEVKFPAYSSMLETQVINSDYYETLFDQSQIGAPPDANSSLTVAQKQKFTIKTISPEWGYATETTKVIVVGSFLCHPSDSAWACMFGDVEVPIEIIQDGVISCEAPSHLPGKVTLCITSGNWESCSEVREFEYHDKTNSCTRCTQSETEATRSPEELLLLVRLGQMLLSASTIKNDNIESGIPLIKPKADDDSWSHIIDALLVGSGTSSGTVDWLLEELLKDKFQQWLSFRSREKDEETGCSLSKKEQGIIHMVAGLGFEWALNPILTCGVNINFRDINGWTALHWAARFGREKMVASLIASGASAGAVTDPNAQDPTGKTAASIAASSGHKGLAGYLSEIAVTSHLSSLTLEESESSKSSAYLQADRTVNSVSKENLTANEDQASLKDTLAAIRNVTQAAARIQSAFRSHSFRKRRAREATASTGGIGTISEISAMSKLAFRNSHEYNSAALSIQKKYRGWKGRRDFLALRQKVVKIQAHVRGYQVRKHYKVIWAVGILDKVVLRWRRKGAGLRGFRQEMDINENEDEDILKVFRKQKLDVEIEEAVSRVLSMVDSPDAREQYHRMLEKYRQAKAELAGTSDEASLSTSVGDDLFMDDFYPFP

SEQ ID NO: 190106 - protein, 62 aa, Glycine max
  Clone ID: PAT_MRT3847_142685C.1.pep
VGAASTPFMAIPSLFYGLNFIFFPFLFFFFSNFSRRFFFLLSTLKQPFKPLFLTLKSKPFDH

SEQ ID NO: 190107 - protein, 62 aa, Glycine max
  Clone ID: PAT_MRT3847_142686C.1.pep
GGGAMSIVVARWILSPVWENPSQSNFPFKLGRRCLGGLPRRYKLRTQLFCRVEYNKTERKRE

SEQ ID NO: 190108 - protein, 165 aa, Glycine max
  unsure (1)..(165): unsure at all Xaa locations
  Clone ID: PAT_MRT3847_142687C.1.pep
NAVPIYLLSFFKIPQRVVHRLVALQRNFLWGGDHDHKKIPWVKWEVVCLPKTKGGLGIKDISKFNIALLGKWIWALASDQQQLWARIINSKYGGWSDXSIIVSKGGYSYWWRDLRKFYHQSDHSIFHQYMSWKVGCGDKINFWTDKWLGEDYTLEQKYNQLFLIN

SEQ ID NO: 190109 - protein, 152 aa, Glycine max
  Clone ID: PAT_MRT3847_142688C.1.pep
YSISVKCTWSFAVFIFGRAQSVGTLYDSCFDSTCINVALENNIFSPSTSSAHVIYHSVLPPWLLPTPPYFFPFFQPKLLETKSRTMDIWSELDLHKRKFLISKHTVIDLLGSPCVHACMMCCSICNYTGGMELYHQVMNYNRNSKCHLLIHI

SEQ ID NO: 190110 - protein, 43 aa, Glycine max
  Clone ID: PAT_MRT3847_142689C.1.pep
SINYRMGTCADKAYCRNVLYAHCEGCIYSSINIIGINLEVIPN

SEQ ID NO: 190111 - protein, 74 aa, Glycine max
  unsure (1)..(74): unsure at all Xaa locations
  Clone ID: PAT_MRT3847_14268C.1.pep
PXXXXXXXXLPXXMTVXLVXXXCXDDLRXXXXXLGXXPXXAXXAXXXXXXXFXGXXLPPXRSXXXXXXXXXLIX

SEQ ID NO: 190112 - protein, 171 aa, Glycine max
  Clone ID: PAT_MRT3847_142690C.1.pep
MDQQFYEEVQEPVSPPGQYFNSSVICSYVFGFLEMAVPIDDSQTIPLLKDVFLPINPRFSSIMVRDQDGRMKWKRVQVKPEEHVKVPKFPECNSPELYDQYFGDYVTRILTERTPQNKPLWEIHIINYPTSNAAGTLIFKLHHALGDGYSLMGALLSCLQRSDDPLFHKDS

SEQ ID NO: 190113 - protein, 36 aa, Glycine max
  Clone ID: PAT_MRT3847_142691C.1.pep
WISCSLREFIPNSSLLKRVQFSLPLDKSKLDTVNWI

SEQ ID NO: 190114 - protein, 69 aa, Glycine max
  Clone ID: PAT_MRT3847_142692C.1.pep
TILLQITDEGGGIPRSGLSRIFTYLYSTAENPPDLDVHNEGVTMAGYGYGIPISRLYARYFGGDLQIIS

SEQ ID NO: 190115 - protein, 103 aa, Glycine max
  Clone ID: PAT_MRT3847_142693C.1.pep
AASNIALGRTLLLCTAVADFASVLRTELHFSLFPRFLYTVNLFSSLIYDFHCSLGLAALLCVSILFFVLFSWIVLTALLDYVLYLSIWIISLVMIMYFQFKFV

SEQ ID NO: 190116 - protein, 50 aa, Glycine max
  Clone ID: PAT_MRT3847_142694C.1.pep
IDRNSYPNTDFAMTITESSNYNHSLQLQSARPRATVSFIVRLPVVSSYRS

SEQ ID NO: 190117 - protein, 44 aa, Glycine max
  unsure (1)..(44): unsure at all Xaa locations
  Clone ID: PAT_MRT3847_142695C.1.pep
AXPGAQWXCXXDXXPSEHMXNLHXLXFXXIEPNXXLTXXCXLXX

SEQ ID NO: 190118 - protein, 165 aa, Glycine max
  Clone ID: PAT_MRT3847_142696C.1.pep
DKSLITISKYNIVYMHDIIQEMGWEIVRQESIEDPGSRSRLWDADDIYEVLKNNKGTESIRSIRADLSVIRELKLSPDTFTKMSKLQFLHFPHQGCVDHFPHRLQSFSVELRYFVWRHFPLKSLPENFSAKNLVLLDLSYSRVENFGMDTEFEDLKEVKSLFLKT

SEQ ID NO: 190119 - protein, 84 aa, Glycine max
  Clone ID: PAT_MRT3847_142697C.1.pep
VKNFVGLSVSDGYIATGSETNEVFIYHKAFPMPALSFKFYSSDPLFGNEEDDSTQFITSVCWRGQSSTLLAANSTGNVKILEMT

SEQ ID NO: 190120 - protein, 48 aa, Glycine max
  unsure (1)..(48): unsure at all Xaa locations
  Clone ID: PAT_MRT3847_142698C.1.pep
QAELETXTTPMPGFLKLQCPSQYXSTXAKIYAERYARVEVVVLXCKTA

SEQ ID NO: 190121 - protein, 113 aa, Glycine max
  Clone ID: PAT_MRT3847_142699C.1.pep
TRNGRGSGKNSAEPTTERAPTPEQHRQKGGPGRKARNLHRQTRKHQNGIHTDNATENREDKGHGTTLTTGNGTDPGSEHKPMTSGLHRPDDTPIKDPGARKGAQNRHNPQDLA

SEQ ID NO: 190122 - protein, 531 aa, Glycine max
  Clone ID: PAT_MRT3847_14269C.1.pep
GSRARIKPSARFRHSLSPLLSPTFKPYSSSASALVPELDIQPDTPQNPNLSPEETTLADKFHAAIKEHHRRNPTPNPNAPPPTPNLTIPDLSLAFSAISAAHPISPSVAHRVIEKCGGVRHGIPFLQSLAFFNWSSSLDGFPASPEPYNEMLDLAGKLRQFDLAWHVIDLMKSRGVEITVHTFSALVRRYVRAGLAAEAVHAFNRMEDYGCTPDMVAFSIVISSLCKKRRANEAQSFFDSLKHRFEPDVVVYTSLVHGWCRAGDISKAEEVFSDMKMAGIKPNVYTYSIVIDSLCRCGQITRAHDVFSEMIDAGCDPNAGLLLEPIRVQVKAGRTEKVLKVYNQMKRLGCPADTISYNFIIESHCRDENLEEAAKILNLMVKKGVAPNASTFNFIFGCIAKLHDVNGAHRMYARMKELNCQPNTLTYNILMRMFAESRSTDMVLKMKKEMDESQVEPNVNTYRILISMFCDMKHWNNAYKLMMEMVEEKCLRPNLSVYETVLELLRKAGQLKKHEELVDKMVARGFVTRPL

SEQ ID NO: 190123 - protein, 122 aa, Glycine max
  Clone ID: PAT_MRT3847_1426C.1.pep
CRTAHSSSSKVFFFCALAPRARLNASRVTPVFCWGTPSSVRFSLPGLPGREGTGEPTTESLPVSSSEALPKLFLTAGRSPPENEFMREPAGVTTGVTSGVGRESTRSTGCSMIRLKVLISGS

SEQ ID NO: 190124 - protein, 37 aa, Glycine max
  Clone ID: PAT_MRT3847_142700C.1.pep
PLPNVTAYHNRFYLSIFYSNSFFSVNCALATFSYKLA

SEQ ID NO: 190125 - protein, 84 aa, Glycine max
  Clone ID: PAT_MRT3847_142701C.1.pep
LRFNNCKIPQVRVVCFGPRWTRESIDMPGFRFNPIKLSGQATRRRAGIYWPWKRVGPGCPPRGLSSTNYPFNPQPQKKSQNLVV

SEQ ID NO: 190126 - protein, 56 aa, Glycine max
  Clone ID: PAT_MRT3847_142702C.1.pep
VCATLINYHPLLHIDLLPLLSLLYTAKPRRRQHTRLLYLYALCSASPCARSQWLDL

SEQ ID NO: 190127 - protein, 95 aa, Glycine max
  unsure (1)..(95): unsure at all Xaa locations
  Clone ID: PAT_MRT3847_142703C.1.pep
DTEVETGELCAIFKKKKEHAKADRSAPAIDFIDEIDAIASKREKLQREMEKHIVTQLKTXMDQTKRQCKPTEEEXSSGDEHNTGYALEIGATNRP

SEQ ID NO: 190128 - protein, 102 aa, Glycine max
  Clone ID: PAT_MRT3847_142704C.1.pep
LFCAVLGFLVLFCCGPRGFVPSWVSLWFCASIVSLLGFSSMAVFPFVFCFLPWSLLSLGPLSPDSSLRGWLSWWHFVYSCVAGALGCFLVLFFPLNVLGGGV

SEQ ID NO: 190129 - protein, 31 aa, Glycine max
  Clone ID: PAT_MRT3847_142705C.1.pep
TYKELEIICLPTGYHLSMDSFIEHCLKQFKH

SEQ ID NO: 190130 - protein, 83 aa, Glycine max
  Clone ID: PAT_MRT3847_142706C.1.pep
EPQKIGAFYSYRASSNHKGKAFGNNSHLYATGSIICPNFRGIFIYKTIKGGVFEEQKDNSKTCFGGGKREKSFSPWHTFGSRF

SEQ ID NO: 190131 - protein, 70 aa, Glycine max
  Clone ID: PAT_MRT3847_142707C.1.pep
AYVYLGSCGDYFPMNSYSLLLSFLLYAVVAMRREIRGAGASAPTSFSVRCSLMLCEDSEDDILLYSMLYF

SEQ ID NO: 190132 - protein, 73 aa, Glycine max
  Clone ID: PAT_MRT3847_142708C.1.pep
QEAKFRIAYSLFIWGLVYLARSNREKKKKERELAVINRGISQNHTIYRVWGCRCTCRSLFITGSFSFKNDWFY

SEQ ID NO: 190133 - protein, 136 aa, Glycine max
  Clone ID: PAT_MRT3847_142709C.1.pep
LLPSLFDHIQEDYKEQIHREVLGHSICHDTAQLSPFSLRLVIKTKSVEFMPFFLSLFVFLCGTSWFIFGLLGRDPFVAVPNGVGSALGTMQLILYFIYRDNKGVPRKQAPTEEESMEMGDAKPQQGKQSNANGIQG

SEQ ID NO: 190134 - protein, 59 aa, Glycine max
  Clone ID: PAT_MRT3847_14270C.1.pep
FTTLTFDRYNTRANLHTLFQRTFPVSYKYSSNLAPTSLDSCNLLLFFFFSSFLILHTFT

SEQ ID NO: 190135 - protein, 250 aa, Glycine max
  unsure (1)..(250): unsure at all Xaa locations
  Clone ID: PAT_MRT3847_142710C.1.pep
MDVAHFLFGIFGNASALFLFLAPVITFKRIIKNRSTEKFSGIPYVMTLLNCLLSAWYGLPFVSPHNILVSTVNGTGSFIEIIYVLIFIVLAPRKEKAKILGLSTFVLLLFSAVVXVFLVALHGNYRNLLSRFAGSILAIIINGSSLSVTRNYVTTXKTKSVEFMPFFLSLFVFLCGTSWFIFGLLGRDPFVAVPNGVGSALGTMQLILYFIYRDNKGVTRKQAPTEEESMEIGDVKPQQGKQSNANGIQG

SEQ ID NO: 190136 - protein, 219 aa, Glycine max
  Clone ID: PAT_MRT3847_142711C.1.pep
MDVAHFLFGIFGNASALFLFLAPVITFKRIIKNRSTEKFSGIPYVMTLLNCLLSAWYGLPFVSPHNILVSTVNGTGSLIEIIYVLIFIVLAPRKEKAKILGLFTFVLSVFSAVVFVSLFALRGNSRKLFCGFAAAIFSIIMYGSPLSIMRLVIKTKSVEFMPFFLSLFVFLCGTSWFIFGLLGRDPFVAVPNGVGSALGTTQLILYFLYRDHKGVTGKQ

SEQ ID NO: 190137 - protein, 169 aa, Glycine max
  unsure (1)..(169): unsure at all Xaa locations
  Clone ID: PAT_MRT3847_142713C.1.pep
MAAKPFNIIFLLLPLLSLVVVGHETVKSEQYPLVVSTWPFIEAVRAAWRAVDAGSSAVDSVVEGCSACEELRCDGTVGPGGSPDENGETTIDALIMDGWMXVTMEVGAVAAMRYVKDGIKAARVVMQHTEHTLLVGEKASEFAISVGLPXGPTNLSSPGSMEKWAKWKD

SEQ ID NO: 190138 - protein, 59 aa, Glycine max
  Clone ID: PAT_MRT3847_142714C.1.pep
NKHTLICIAFISKMSFFHSQPQLGGPQLGLEYIHSLTFSVQWTAATAFQNSFVYPPTHL

SEQ ID NO: 190139 - protein, 100 aa, Glycine max
  Clone ID: PAT_MRT3847_142715C.1.pep
FSTFFPPPSSTLLVDFVRTTFVFVVRVLPFSILLVSLSLLSSVADLFSHILPLLQRVFFFPSGLRLLPSRGRFAVSWLPDPLPSPPGLMVALPSPAWPYK

SEQ ID NO: 190140 - protein, 51 aa, Glycine max
  unsure (1)..(51): unsure at all Xaa locations
  Clone ID: PAT_MRT3847_142716C.1.pep
KICLSGLFVIQFYSVLPLFSITLDVFFFTSVVFFTLVAFPXWGSSPAKKNT

SEQ ID NO: 190141 - protein, 64 aa, Glycine max
  Clone ID: PAT_MRT3847_142717C.1.pep
PYPTRGAFAVLKLAWPCYNKKNFLSWLLLPKNVKKGRGDNKAAPKCFMPLIPRGDVGKTMVVTT

SEQ ID NO: 190142 - protein, 56 aa, Glycine max
  Clone ID: PAT_MRT3847_142718C.1.pep
KITRMSSFYQRTVSQKNLSFVTTRKKMIIYISERLFLANLPILSYQKLSINRNFLV

SEQ ID NO: 190143 - protein, 65 aa, Glycine max
  Clone ID: PAT_MRT3847_142719C.1.pep
GSAHNTHVYQSGINHSTQRKLNVLYEILYIPQVTNIITLPTTRVQKEKYRVPYLPETNPACALLL

SEQ ID NO: 190144 - protein, 927 aa, Glycine max
  Clone ID: PAT_MRT3847_14271C.1.pep
TCAPPNGPLAPTPINLPIAAVAKPATYTPLGAHGPFPPAAATANANALAGWMANASASSSVQAAVVTASTIPVPQNQVPILKRPITPPANPGMVDYQNADHDQLMKRLRPGHSVEEVSYPLARQASWSLDDLPRTVTMTLHQGSSVTSMDFHPSHHTLLLVGWHNGEITLWELSLREKLVSKPFKIWDVSACSLPFQAAAVKDAPISVSRVTWSPDGSFVGIAFTKHLIHLYAYTGSNELTQRIEVDAHVGGVNDLSFAHPNKQMCIVTCGDDKLIKVWDLNGRKLFSFEGHEAPVYSICPHHKENIQFIFSTAIDGKIKAWLYDNMGSRVDYDAPGHWCTTMLYSADGSRLFSCGTSKDGESFLVEWNESEGAIKRTYNGFRKKSTGVVQFDTTQNRFLAAGEDGQVKFWDMDNINLLISSDADGGLQSLPRLRFNKEGNILAVTTVDNGFKILANASGLRSLRTIETPAFEALRSPIESTPIKVSGSSTVNVSPVNCKVERSSPVRPSPILNGVDPMGRSAEKPRTVEDVIDRAKPWQLSEILDPVQCRSVTMPESTDSSSKVVRLLYTNSAVGILALGSNGIQKLWKWARSEQNPTGKATANVVPLHWQPNNGLLMTNDISGVNLEEAVPCIALSKNDSYVMSACGGKVSLFNMMTFKVMTTFMPPPPASTFLAFHPQDNNIIAIGMEDSTIHIYNVRVDEVKSKLKGHQKRITGLAFSTNLNILVSSGADAHLCVWSIDTWEKRKSIPIQLPAGKSPVGDTRVQFHSDQLRLLVVHETQLAIYDASKMERIRQWVPQDVLSAPISYAAYSCNSQLIYATFCDANIGVFDADSLRLRCRIAPSICLSPAALSGSQGVYPLVVAAHPLEPNQFAVGLTDGSVKVIEPNESEGKWGTSPPMDNGILNGRAGSSSTTSNHTADQAQR

SEQ ID NO: 190145 - protein, 137 aa, Glycine max
  unsure (1)..(137): unsure at all Xaa locations
  Clone ID: PAT_MRT3847_142720C.1.pep
GASASSPRSPNPTRRRRLQTSSRFLRCVISPLPCPSPTXIRRQLSGDLVPIGSYNPAESLLGTSPAASSLSSSIVGVGDKEFSEDSSAAGWYRRGDSGFTGVGFDLPVVKPPGNSAAVNAKNVAGEKREESGKEVHP

SEQ ID NO: 190146 - protein, 86 aa, Glycine max
  Clone ID: PAT_MRT3847_142721C.1.pep
HASAQANSTPYATAMLVAAIEIIIDSFASADCDIPDTMLLDGTFYTHPAHAFHCIIGAPSKGRRDILVVPFPNTMVQVEPDITYMG

SEQ ID NO: 190147 - protein, 46 aa, Glycine max
  Clone ID: PAT_MRT3847_142722C.1.pep
MLASPTCLAIPNDMFVGSICPIWMTTCPFVFWLYNGHQRNIIPPIK

SEQ ID NO: 190148 - protein, 64 aa, Glycine max
  Clone ID: PAT_MRT3847_142723C.1.pep
LARLLEGFPTQDPGFVCDNCGDARFVPCPNCNGSRKVFEHEEGGLRRCPDCNENGLIRCPGCCP

SEQ ID NO: 190149 - protein, 59 aa, Glycine max
  Clone ID: PAT_MRT3847_142724C.1.pep
KKIYCPAPGGENPKSGPSFPTPSPPQRGLSSFKTPPREFFFCGNFIKKKPPQGGPPFGV

SEQ ID NO: 190150 - protein, 103 aa, Glycine max
  Clone ID: PAT_MRT3847_142725C.1.pep
LHVDHVLEQKKTSLSIIDLYPHYKSDDPLTFLSPRDKADDPLHLRAGLAGDVDSTDPRDGEAGCLKSAVSLNFDAIYLCSVLSLKSELPLTLYPFLGLAQTEL

SEQ ID NO: 190151 - protein, 78 aa, Glycine max
  unsure (1)..(78): unsure at all Xaa locations
  Clone ID: PAT_MRT3847_142726C.1.pep
FXFXFFFFFFFFFLKEEIHRYLLPFPAFSIATNFNSGPSFGLGFLGPGSNDFKDQKFLVLGFKIHPNICGTKVPWFNQ

SEQ ID NO: 190152 - protein, 224 aa, Glycine max
  Clone ID: PAT_MRT3847_142727C.1.pep
MLGFSYGEIFLLLGATAALIGPKDLPIICRTAGRLAGRAIGYVQLARGQFDTVMQQSQARQVHKELQDTMAQLDAIRHEIRSISIINPGPLTRRLVDDPDQTSISNESRKPEESGQENSSIPTVMKDSTSMSSNSCHMQNQATIYSRLVNSPAIKNELSASSTEVEKIEDKLQLTVLPISAENAGLLPIRGADVKGSDIVLEAIVEAEVAHNAKEFFSQPQNQI

SEQ ID NO: 190153 - protein, 157 aa, Glycine max
  Clone ID: PAT_MRT3847_142728C.1.pep
GPNVVTICTSESNRAKRESPTNGFLVLSKIEADFSTGKYEISELVKLIAENKMVENHVMEKLVEADEGKEDFIVYGVNLTFVNLEEVNIYDGMNLNGQKPIMANCTFRGVSDKGVVLVLPAPEDDEDGGNGRIVTVSLPREELYQLKDKLGGEWGIH

SEQ ID NO: 190154 - protein, 102 aa, Glycine max
  Clone ID: PAT_MRT3847_142729C.1.pep
QTEKKKKFPYKPQGKAKKSPFSLGNPKKIQFFLPPFSLKKKLGGFKLNHPAPPRTPPQEAIGVHTKPTSGPGSCCFKIPGRGPTKKGAPQKSNSGTLCLFPP

SEQ ID NO: 190155 - protein, 60 aa, Glycine max
  Clone ID: PAT_MRT3847_14272C.1.pep
NLKLFSWCHPSEAYLRSSGSPTLIYAFQLNGMFSCIDLSGSFEKEASMEVHRQNLCYYTL

SEQ ID NO: 190156 - protein, 62 aa, Glycine max
  Clone ID: PAT_MRT3847_142730C.1.pep
FLDFLPVQFHSCHPHLGLLQHLQWLLQQLLFHSHKCYLLWLRFQLALVLVLVVHLSFCGVAL

SEQ ID NO: 190157 - protein, 36 aa, Glycine max
  Clone ID: PAT_MRT3847_142731C.1.pep
MLGASHNGWSHHKRFFFCTVSLSADYLEPGFGLKNS

SEQ ID NO: 190158 - protein, 62 aa, Glycine max
  Clone ID: PAT_MRT3847_142732C.1.pep
GCILSFRPSELHSLRCFTSLSSKHCYHFVVVEHGARQGMRCSHGTFGTCIDLMKMSKSWSEE

SEQ ID NO: 190159 - protein, 54 aa, Glycine max
  Clone ID: PAT_MRT3847_142733C.1.pep
QLRNVLLSYNLNYLSLSINSEFSRVPQHAEKGKWGACLFYYRHANTTMFFVTIS

SEQ ID NO: 190160 - protein, 114 aa, Glycine max
  Clone ID: PAT_MRT3847_142734C.1.pep
MGIKCIHVFDRLYSFFTCSKKSTMPSGRRIFHRDVEKEEFQYASTQCLSSYYSVFVVRLAIMAMLAILIGLLTFLTWHFTKIYTTKSLNSLAYDLRYELLQRPILRMWNILNST

SEQ ID NO: 190161 - protein, 143 aa, Glycine max
  Clone ID: PAT_MRT3847_142735C.1.pep
MQAIFFMMLQVVCAEEEIMCIEREREALLQFKAALVDPYGMLSSWTTSDCCQWQGIRCTNLTAHVLMLDLHGEFPSRGLYMRGEIHKSLMELQQLNYLNLSSNDFQGRGIPEFLGSLTNLRYLDLSHSDFEGKIPTQFGSLSH

SEQ ID NO: 190162 - protein, 75 aa, Glycine max
  Clone ID: PAT_MRT3847_142736C.1.pep
MAETKPDTPLMPPSSRNLPDFKKSVKLKYVKLGYHYLITHGMYLFLSPLVVLIGGQLLSFFLGDLHVIWENLQYN

SEQ ID NO: 190163 - protein, 80 aa, Glycine max
  Clone ID: PAT_MRT3847_142737C.1.pep
CLLKYPHCALNHIPYLILKSLIHIKILVGLSGKAEKCTFKGIQNITLIYICKFRGQPVHLKPFVHVSPYMITTRNIVLEK

SEQ ID NO: 190164 - protein, 489 aa, Glycine max
  unsure (1)..(489): unsure at all Xaa locations
  Clone ID: PAT_MRT3847_142738C.1.pep
MENARISQWLILLVCALLLLISEASYVPITIVQNAVAKGAVCLDGSPPAYHFDRGFGSGINNWLVAFEGGGWCNNVTTCLARKTNRLGSSKQMAKLIAFSGILNNREMFNPDFYNWNRIKVRYCDGSSFTGDVEAVNPVTKLHFRGGRIFNAVMEDSLAKGMKNARNAIIRLETRLGSSKKMDTSLSFSGFFSNSKKFNPDFYDWNRIKVRYCDGSSFTGDVEAVDPKTNLHFRGARVFAVVVEDLLAKGMKNAQNAIISGCSAGGLASILNCDRFKSLLPATTKVKCLADAGFFINVKDVSGAQRIEEFYSQVVQTHGSAKNLPTSCTSRLSPRLCFFPQXLVSRITTPIFFVNAAYDSWQIKNILAPGVADPEGHWHSCKLDINNCSPDQLDLMQGFRTEFLRAITVLGNSSSKGMFIDSCYAHCQTEMQETWLRSDSPELKKTTIAKAVADWFYERRPFHQIDCPYPCNPTCHNRVFDPQDDHPGV

SEQ ID NO: 190165 - protein, 50 aa, Glycine max
  unsure (1)..(50): unsure at all Xaa locations
  Clone ID: PAT_MRT3847_142739C.1.pep
XLEKXGQTWXAXXPXXANYXXXLLFCCTSVRXTLHIXIXVAYIPKXNRPK

SEQ ID NO: 190166 - protein, 151 aa, Glycine max
  Clone ID: PAT_MRT3847_14273C.1.pep
LVVHETQLAIYDASKMERIRQWVPQDVLSAPISYAAYSCNSQLIYATFCDANIGVFDADSLRLRCRIAPSICLSPAALSGSQGVYPLVVAAHPLEPNQFAVGLTDGSVKVIEPNESEGKWGTCPPTDNGILNGRTGSSSTTSNHTADQAQR

SEQ ID NO: 190167 - protein, 57 aa, Glycine max
  Clone ID: PAT_MRT3847_142740C.1.pep
MLYDIFANLRTCWYKKKKKKKKKKKKKKKKKKKKKKKKKKKKKKKKKKNWGAPPPPK

SEQ ID NO: 190168 - protein, 51 aa, Glycine max
  Clone ID: PAT_MRT3847_142741C.1.pep
VSQHFFKESYPQVPFVRKGILIEEIVGPEPILNSTENDSENLVLVPRVKKV

SEQ ID NO: 190169 - protein, 34 aa, Glycine max
  Clone ID: PAT_MRT3847_142742C.1.pep
ALCYELIAVDGNTVIWKKPAVEMCLPNQNECYPV

SEQ ID NO: 190170 - protein, 118 aa, Glycine max
  Clone ID: PAT_MRT3847_142743C.1.pep
RVNITRFSSPDQEQKFFIFVLSNALSKVAIEAGDSDERFGTKSLKLNDLQTLYTLGQCTRDLTSDDCKGCLGDVIGPGIPWSRLGSVGGRVMYPSCNLRFELVQFYKDGDQAATPSSS

SEQ ID NO: 190171 - protein, 73 aa, Glycine max
  Clone ID: PAT_MRT3847_142744C.1.pep
LLTTQYPIPADFHRMRIFLSEVHGSYIKPSFGLISGHAPRNKAGCVVSAMCRLSLTAENVDTVLDDARPGLMA

SEQ ID NO: 190172 - protein, 98 aa, Glycine max
  unsure (1)..(98): unsure at all Xaa locations
  Clone ID: PAT_MRT3847_142745C.1.pep
SMMKDNIGNDLTNIRLHCNINEHSSYMHNVYXETEYSYLINQSYEWYFKGNSLTRIIYVTGFAIYCYSSTECRACKPYNPFLGETYXAYYPDKRPFFF

SEQ ID NO: 190173 - protein, 64 aa, Glycine max
  Clone ID: PAT_MRT3847_142746C.1.pep
RGKHRSLRTPCAIIVSVTFCFPLAAVPQYGFLTSVPLQRVLAAVPLCSYLAAIPLCCVLPCCTL

SEQ ID NO: 190174 - protein, 37 aa, Glycine max
  Clone ID: PAT_MRT3847_142747C.1.pep
IVCYNREQYDILNIHPNEIKSGCCQNLGNSKHVCHVS

SEQ ID NO: 190175 - protein, 114 aa, Glycine max
  Clone ID: PAT_MRT3847_142748C.1.pep
LVDSRCLDKAAIETESDHTNWPNLWRLCTVTQVEELKSIIHLLPVWATMIAFATVYSQMSTMFVLQGNKMDQHIGQHFTIPSASLSLFDTLSVIFWALLSSSRSPRAESARVLD

SEQ ID NO: 190176 - protein, 46 aa, Glycine max
  Clone ID: PAT_MRT3847_142749C.1.pep
NIGPHYNFCMNGYPGVRNFFLIPHFVCQKGNPKYENPLPFIFKGPI

SEQ ID NO: 190177 - protein, 59 aa, Glycine max
  Clone ID: PAT_MRT3847_14274C.1.pep
SMFHLLGALFNFPVVWSDMHPLTINLKSQCAPTNYCLFKNVIFLLSLFSPYFPSCKKIK

SEQ ID NO: 190178 - protein, 114 aa, Glycine max
  unsure (1)..(114): unsure at all Xaa locations
  Clone ID: PAT_MRT3847_142750C.1.pep
TTSATSYSNRTSGPPLTRAKARFGSNGLGKXGRWEPKLALQRHNVELVAVNNPFITTDYMTYMFKYDSVHGHWKHHDVTVKDENTLLVGDTPVTICGHKPPENIPGGSTGPDII

SEQ ID NO: 190179 - protein, 72 aa, Glycine max
  unsure (1)..(72): unsure at all Xaa locations
  Clone ID: PAT_MRT3847_142751C.1.pep
FGGGKSPGFGLIFEPGENPPRFGPQNGFFREGLFPRGEKSRRPIXGGKNRAKKICGVKKPRASEFAQAGEKK

SEQ ID NO: 190180 - protein, 47 aa, Glycine max
  Clone ID: PAT_MRT3847_142752C.1.pep
ERFSNRGFIFPYNPPNLKGAPAQIKGKTFNLKGELKKGEGPKKWGRH

SEQ ID NO: 190181 - protein, 131 aa, Glycine max
  unsure (1)..(131): unsure at all Xaa locations
  Clone ID: PAT_MRT3847_142753C.1.pep
MKMRFFLVACLAVFCILGVCQGGNLRKKFYKKTCPQAEEIVRTKIQEHVSARPDLPAKLIRMHFHDCFVRGCDGSVLLDSTATNTAEKDSIPNLSLAGFDVIDDIKEALEAKCPGTVSCADILALAAXDTV

SEQ ID NO: 190182 - protein, 115 aa, Glycine max
  Clone ID: PAT_MRT3847_142754C.1.pep
TRVKYRGVRKRPWGKFGAEIRDPTKPTGRQWLGTFDTAEEAARAYDRAAIALRGALAILNFPHEFHSHLPFILSNSSTKGNGSSFDKEVIELEYLDDKVLEELLELEEKRRSNED

SEQ ID NO: 190183 - protein, 157 aa, Glycine max
  unsure (1)..(157): unsure at all Xaa locations
  Clone ID: PAT_MRT3847_142755C.1.pep
XVXGVSCCVGLVGVVLXFXLXXXGVXSFXIRKGXVXPFGFWVFXFGXXFPXXXTPFFFPPXXXKRSYXXLLRXLGXFPGXXXXXFGPFXRXKXXFRXXIFXPXPGLXXPFFXXXXVFXXPXGPXGFXXXXLVFXXXFFKXXXXXFXFFFXXXGFXXF

SEQ ID NO: 190184 - protein, 200 aa, Glycine max
  Clone ID: PAT_MRT3847_142756C.1.pep
KLYAQRRDDTGAAQAMIQAIINHGSISQNLEHLWAACFLLFGFGHDPVVVEVKVSELLYLVKRVVLPLAIHTFITYSRCTAALELLRLCTNALEAADQAFVTPVDKWLDKSLCWRSIQTNAQLNPCLWQELALCRATVLETRAKLMLRGAQFDIGDDLIRKAVFIRTSICGEDHPDTISARETLSKLTRLHANVQIPSST

SEQ ID NO: 190185 - protein, 57 aa, Glycine max
  Clone ID: PAT_MRT3847_142757C.1.pep
PVVRWMSLYMLWRLVMEIAERLEPHPNLRIVTPGTETHEVMKQCLRIAKGVTKDRIV

SEQ ID NO: 190186 - protein, 38 aa, Glycine max
  unsure (1)..(38): unsure at all Xaa locations
  Clone ID: PAT_MRT3847_142758C.1.pep
VKQLXXFHKIFXVLIXATSNAXEEMPXXFXXMXXCDMX

SEQ ID NO: 190187 - protein, 97 aa, Glycine max
  Clone ID: PAT_MRT3847_142759C.1.pep
MAALGGIRDVAGTQTSLEVDGLARFAVEEPHKNQIPLLEFEKVVSPKHQVVFGTLSPPPLEAKNGGQKKVYEPKVWEKAWFNFKEGQKFKLVGEAPP

SEQ ID NO: 190188 - protein, 112 aa, Glycine max
  Clone ID: PAT_MRT3847_14275C.1.pep
EPTPAPSTQGPPHKQPPRTNAPTTKQTAPPNPKEGQNLATLSLPTRAPGTQQVDAHTHSWKRNARIVTSDADGTTTKPCAPGQSTPLVGEDRTQPGVARLRRAIKENGYKPL

SEQ ID NO: 190189 - protein, 62 aa, Glycine max
  Clone ID: PAT_MRT3847_142760C.1.pep
KEIDNTRRQSGQPWQKNIVTLQEISFKTMSFFYSSSLISYILLSFLVLGTWDEPNYTNLHHD

SEQ ID NO: 190190 - protein, 48 aa, Glycine max
  Clone ID: PAT_MRT3847_142761C.1.pep
LHLSMVSSSKLLREHLEEGSLNTSSRLANPYNAKMTRLENALEPIRLD

SEQ ID NO: 190191 - protein, 127 aa, Glycine max
  Clone ID: PAT_MRT3847_142762C.1.pep
MVMMIAGCKEMGNWKKKCRELLRPREVLYLLTITILSLLLPLSFLLLATLSGAQYYLQALTYYSSQPFPYLFHLALNINPCILYFLVSIVSVGTLIQGLMGKITLLSELPSKSSRISTARILLCAFQ

SEQ ID NO: 190192 - protein, 350 aa, Glycine max
  unsure (1)..(350): unsure at all Xaa locations
  Clone ID: PAT_MRT3847_142763C.1.pep
MRNKVEDSTKKSKHCHSKSVQMGEGKGRICVTGGTGFLGSWIIKRLLEHGYAVNTTIRSDPGRKRDVSFLTNLPGASEKLKIFXSADLSDPESFGPAVEGCVGIFHTATPIDFAVNEPEEVVTKRAIDGALGIMKAGLKAKTVXKRVVYTSRDSTVSFSSLEEKDVVDESVWSDVDLLRSVKPFXWSYAVSKVLSEKTVLEFGEHNGXEFATLMLLFVVGRFVCPKLPDSVERALLMVFRKKXEICVIHYHMVHVDDVARAHIFLLEHPNPKGRYNCSPFIVPIEEIAEIISAKYPEYQIPALEEVKEIKGAKLPHLTSQKLVDAGFEFKYSVEDIFTDAIECCKEKGYL

SEQ ID NO: 190193 - protein, 87 aa, Glycine max
  unsure (1)..(87): unsure at all Xaa locations
  Clone ID: PAT_MRT3847_142764C.1.pep
MADHRNGSTQPPNGKTSAAGSAYSIDLNAFQSRLKAFYEHWDDHKTDLWGSSDAIAIACPPPSEDLRYLXSTALNLWLLGFEFPETL

SEQ ID NO: 190194 - protein, 117 aa, Glycine max
  unsure (1)..(117): unsure at all Xaa locations
  Clone ID: PAT_MRT3847_142765C.1.pep
WYLTNEAGKTMARVLNTSLELSTSASDIADGESNIYRGLILSSFSINNNRKLLWEGAGFPTWGSAGQRKVLQAVDTNXNAVVAHDGSGQVRTFYEALNLVPKKNKRPFVIYVKADVY

SEQ ID NO: 190195 - protein, 97 aa, Glycine max
  Clone ID: PAT_MRT3847_142766C.1.pep
VIRQENGGELSLNIYHHLQSGVCGTHRMQCLAAFKVLVMTRIIWTSKVMPRRRSTGIKITMLDGVGKALGGTVGTVLYSSPVQLWEGSTVVTGFETY

SEQ ID NO: 190196 - protein, 58 aa, Glycine max
  Clone ID: PAT_MRT3847_142767C.1.pep
MQEHVVSRCSQEECLTARASQVRPATTLLAEGSTYLYAMVHDGSASTIPGDFVIGCKL

SEQ ID NO: 190197 - protein, 50 aa, Glycine max
  Clone ID: PAT_MRT3847_142768C.1.pep
KMDVRLYKNKRIEMKRQYLHLFHTSVLNTYIILILMDTSLICICEALKHF

SEQ ID NO: 190198 - protein, 70 aa, Glycine max
  Clone ID: PAT_MRT3847_142769C.1.pep
GRTGFLWERANLILGILHSSNMGNHRTFKDHQHRRRYSFQSSYNTKDKSKNSYEAAKVKKKIIKMEKTST

SEQ ID NO: 190199 - protein, 37 aa, Glycine max
  Clone ID: PAT_MRT3847_14276C.1.pep
IHEYQRYLNTSDWLAVNWFRISLNTVYKGTRTHAAPR

SEQ ID NO: 190200 - protein, 52 aa, Glycine max
  Clone ID: PAT_MRT3847_142770C.1.pep
TRSSPIITSAEDICLIRVSILRTMYTGAHKNGFERVPATSKSKAHKRTGIAG

SEQ ID NO: 190201 - protein, 280 aa, Glycine max
  unsure (1)..(280): unsure at all Xaa locations
  Clone ID: PAT_MRT3847_142771C.1.pep
GSSKHSTLTCCAIRNSDLKLSQTQRLVHHFNPKTPIEEAVTPPTSWYTHPSFFHLELDRVFYRGWQVVGSTEQIKDPRDYFTGRLGDVEYVVCRDDSGIVRAFHNVCRHHASLLAYGSGKKSCFVCPYHILKDRFLQGWTYGFNGALLKATRISGMRNFNVNDFGLFNLKVANAEFHCTSLFPIGNEFSYRGTDSSSCVGGMALVXKEVLSHNVSKEWLGNSSEILSTNGVDSSLSYVCRREYTIECNWKVFCDNYLDGGYHVPYAHKGLASGLKLDSYS

SEQ ID NO: 190202 - protein, 138 aa, Glycine max
  Clone ID: PAT_MRT3847_142772C.1.pep
KRCVGSIEDMIDFSTSVLGRNVAVWTTENVNGSNKNVMVGRVKGMNGGKVTQSVSCHQSLFPYMLYYCHSVPKVRVYQADLLDPESKAKINHGVAICHLDTTAWSPTHGAFMALGSGPGRIEVCHWIFENDLTWTIAD

SEQ ID NO: 190203 - protein, 35 aa, Glycine max
  Clone ID: PAT_MRT3847_142773C.1.pep
LLQHSTQKLIMRMETKNFMTPLRISLCFILLFHTT

SEQ ID NO: 190204 - protein, 181 aa, Glycine max
  Clone ID: PAT_MRT3847_142774C.1.pep
MTLGLINANPVVHAKKERIARSDDPHADDAVDPLDIYDILFFFSFSLLPLPTQLTVEILDLALTNFVRDIRDPEHPYSLEQLSVLSEESISVDDKLGRILITFTPTVQHCSMATVIGLCLRVKLKHYFPPHYKVDIKVSPGSHANEESVNKQLNDKERVAAALENPNLRQLVDECLYSNEL

SEQ ID NO: 190205 - protein, 78 aa, Glycine max
  Clone ID: PAT_MRT3847_142775C.1.pep
HPDLLLTPPVSRSAVYLLTMCMVDTMVIELDVDVDPTVREAGAVEHAGAKDTIGNGGKCVCLIGIQKSSKRRRRNRGS

SEQ ID NO: 190206 - protein, 60 aa, Glycine max
  unsure (1)..(60): unsure at all Xaa locations
  Clone ID: PAT_MRT3847_142776C.1.pep
SXGVGRXSWXSLSRIWKKFRFLSVGFDGFXVWXVGSEWNQAXXHXMAXPSKSMLWXTPFL

SEQ ID NO: 190207 - protein, 59 aa, Glycine max
  Clone ID: PAT_MRT3847_142777C.1.pep
EDRSISIMASIGTEEKRRLHNWINSVLCTETCLSYTLHLYLRYPVSSSSRSRLEPIRSS

SEQ ID NO: 190208 - protein, 94 aa, Glycine max
  unsure (1)..(94): unsure at all Xaa locations
  Clone ID: PAT_MRT3847_142778C.1.pep
AGPTKLKSLQKKRGVQESKHPPIWVQDTGVKATRPLEKLLGHTTRPIRPGRKNPPNKSRGKRQKKPLGCQFSSPFTTETPXIGSSRPPPXRKGR

SEQ ID NO: 190209 - protein, 123 aa, Glycine max
  unsure (1)..(123): unsure at all Xaa locations
  Clone ID: PAT_MRT3847_142779C.1.pep
EDHSXXSKPLXTTRXXPMXXXMATPLMPPGEVXXFXPLSSINISMFQGDXLHPSFXFSDYASPEPVNQKGQSLRPFFDECLKTRDSWSVLKDERSIPTHLPISILRSSSNFSAPSFLSPHGEI

SEQ ID NO: 190210 - protein, 28 aa, Glycine max
  unsure (1)..(28): unsure at all Xaa locations
  Clone ID: PAT_MRT3847_14277C.1.pep
LRERARCHSSTFRNHVLVGXXXKWGGEE

SEQ ID NO: 190211 - protein, 57 aa, Glycine max
  Clone ID: PAT_MRT3847_142780C.1.pep
ILVLGKEWGLLCELSTIPFGFLFFQFFLYNIYKCNSISYFNSLAWIKSSPLETPFVL

SEQ ID NO: 190212 - protein, 90 aa, Glycine max
  Clone ID: PAT_MRT3847_142781C.1.pep
PGPYWVPIRHYAIKLVYYLRYIFYIRANALRKLYRVFGLCTCTTSCTLTSSVPTFRNLFAICNPGFVWYFYSGFRFVSPLNLQLTLYLRP

SEQ ID NO: 190213 - protein, 199 aa, Glycine max
  unsure (1)..(199): unsure at all Xaa locations
  Clone ID: PAT_MRT3847_142782C.1.pep
ARGLTVWSVSGCRLMSTIRQIGXKLYAIEVGSSERILSFSFGKCCLSRGVSGTTYIRQVIYGEDRLLIVQSEETDELKMLHLKLPVSYISQNWPVQHVAASQDGMYLAVAGLHGLILYDIRLKRWRVFGDVTQEQKIQCKGLLWLGKIVVVCNYVDSSNTYELLFYPRYHLDQSSLLCRKPLLAKPMVMDVYQDYMLLT

SEQ ID NO: 190214 - protein, 238 aa, Glycine max
  Clone ID: PAT_MRT3847_142783C.1.pep
VKAESLWREGYRLHDSMLPLFISPSLAQRILRTGKSINFLRVCCEDHGWADAATEVVADHGATARRGGFGYGETDTLEFLVDEASKRIDKHLLDVIFKRYKFKEHCLAIKQYLLLGQGDFVQYLMDIVGPELSEPANTISSFKLSGLLETAIRASNAQYDDPEILDRLRVKMMPHESGDRGWDVFSLEYDARVPLDTVFTESVMARYLRIFNFLWKLRRVEHALTGAWKTMKPNCITS

SEQ ID NO: 190215 - protein, 147 aa, Glycine max
  Clone ID: PAT_MRT3847_142784C.1.pep
SPRVTPLIFVCSSLNLRPYRNVVTTVMPFPSFIHGLLYAGLKPNISPHVPADIIRTTPLTQFCLRVNHKHSHPRRCRAIYRIPCVSKPLSLSPPGNSNNRGVTVGLLALSHFIRPYLFWLGLWPARPLPSPPPKEGGRHTVMTGNLP

SEQ ID NO: 190216 - protein, 66 aa, Glycine max
  Clone ID: PAT_MRT3847_142785C.1.pep
FEILNLISFFRTGDHCSKLSYRKYYILVGYGSYVNVHDLILYSNQYCTTIFTTNEPRLSLRPTIST

SEQ ID NO: 190217 - protein, 106 aa, Glycine max
  Clone ID: PAT_MRT3847_142786C.1.pep
KGKNPVHWIFFPNRKGKNKRGKKIFLWEIPPGPFSGERDGTPKNFSHTPTNFTPNPPIFGRGLFYISPFYEKISPKKPFSHLRDQTKFQINHPPKKIQINQGPGGP

SEQ ID NO: 190218 - protein, 99 aa, Glycine max
  Clone ID: PAT_MRT3847_142787C.1.pep
TLAFWLPFLWRSCTPSPTSHNGNDPAWTIGQGLIYNQCLVWHLPLDLLGGCIHRTSSHSTDAADGTSGPFHSYSHRFNQTAQAESICYQHNHPISTQCL

SEQ ID NO: 190219 - protein, 238 aa, Glycine max
  Clone ID: PAT_MRT3847_142788C.1.pep
LPDGLMRATDVMIAGKVAVICGYGDVGKGCAAAMKTAGARVIVTEIDPICALQALMEGLQVLTLEDVVSEADIFVTTTGNKDIIMVDHMRKMKNNAIVCNIGHFDNEIDMLGLETYPGVKRITIKPQTDRWVFPETKAGIIVLAEGRLMNLGCATGHPSFVMSCSFTNQVIAQLELWNEKASGKYEKKVYVLPKHLDEKVALLHLGKLGARLTKLSKDQSDYVSIPIEGPYKPPHYRY

SEQ ID NO: 190220 - protein, 67 aa, Glycine max
  Clone ID: PAT_MRT3847_142789C.1.pep
MGSLVAETAMKKPMWLYPKVLGFNPSERWGHSACFSGGLMYVFGGCCGGLHFGDVLWLDLEKMDWSK

SEQ ID NO: 190221 - protein, 128 aa, Glycine max
  Clone ID: PAT_MRT3847_14278C.1.pep
RSMLISSISALVIGTFDHQFNMKDGFKASLDGFNHTMLHQSHISNNAKTLIEQGGMMSITQIFVTIFCGYAFAGIVEKAAGVASIVIIMVGVLMKDMFEKMNVSKSVLSRTLEDSSTMVLPLIPWGTS

SEQ ID NO: 190222 - protein, 65 aa, Glycine max
  Clone ID: PAT_MRT3847_142790C.1.pep
FPGIHVFWKTPLSPTFFFGGGMPPSKKPPWLSWGGGAMIFAGPRTLHPPWNMCVQPPGPPLLFQG

SEQ ID NO: 190223 - protein, 69 aa, Glycine max
  Clone ID: PAT_MRT3847_142791C.1.pep
TFDVQPTRSSNYPNTLPIPSFEPHRPVPLPIMPHGTGLVDGASLRSLSSFRAFRDRAVSVRGTWVGVYR

SEQ ID NO: 190224 - protein, 35 aa, Glycine max
  Clone ID: PAT_MRT3847_142792C.1.pep
AYNFSLFSRLSYKCADNCHTLLLQLPYTMPLMPGN

SEQ ID NO: 190225 - protein, 67 aa, Glycine max
  Clone ID: PAT_MRT3847_142793C.1.pep
FLEEGVCVIYILEYTESDARIQGALCDTRVIIIIIIILPFYTETVCGFFQLFHALYKDFLIMGRKIY

SEQ ID NO: 190226 - protein, 55 aa, Glycine max
  unsure (1)..(55): unsure at all Xaa locations
  Clone ID: PAT_MRT3847_142794C.1.pep
NNSHSSFTFRRXKKNXSQRLXQFXMAXTLKLXRRRNXXRVSSSXDRXRQLSPXEX

SEQ ID NO: 190227 - protein, 389 aa, Glycine max
  Clone ID: PAT_MRT3847_142795C.1.pep
MDPLSALREFTMRGEVEKIVRVNAEFRFGEEYTFPCWVETAYRSTKGNRYTLETLVHYIQNHHLKHTEYIQNTFAVGIPSVTLPDRKPLLQYLQGTLSSSDSIEYRPHDDPSSFPAPKSTPNPPSLPPEDLNLDFISMIRSAEKPLKDRQSLLECKNRDFYSVLVSATKREEERQRMESHQRKDGLVAKSRLMGSDDRGLGFSDDMGGYDPTPKPKMHLKGTKIGEGVPIILVPSAFQTLITIYNVKEFLEDGVYIPTDVKVKQMKGARPDCVTVQKKLSRDRVVTAYEVRDKPSTLKPDDWDRVVAVFVLGKEWQFKDWPFKDHVEIFNKIIGFFMRFEDDSLESCKTVKQWNVKIISISKNKRHQDRAAALDVWERLEDFVRARSHS

SEQ ID NO: 190228 - protein, 129 aa, Glycine max
  Clone ID: PAT_MRT3847_142796C.1.pep
DYIFFFLCILFIQGSGGFFWKRPKYFKIARTKQTAPKSTAGKAPIKHLTTNAARKSAPTTADVNNPHRYRPETVALHEIMKYQNSTELLIKKLSFHKLNPEIAQDFKTDLRLQSHAVLALQEAYEAYLF

SEQ ID NO: 190229 - protein, 62 aa, Glycine max
  Clone ID: PAT_MRT3847_142797C.1.pep
HRVHVLGLGIILGVHMHFESSAGLLTVKLGVFMWENSMDGLMCLCLRLIRSLWRACGVHCRD

SEQ ID NO: 190230 - protein, 74 aa, Glycine max
  Clone ID: PAT_MRT3847_142798C.1.pep
NRGFTCHCNPTTVNFDMMIINELVDRKMISPTYHADPHFQSLHPSRRSIDQSIYESSQPQVTRITMADNESGTK

SEQ ID NO: 190231 - protein, 100 aa, Glycine max
  Clone ID: PAT_MRT3847_142799C.1.pep
NRLSDGLGWEQGTMGTGCEDQSKNIPFTQVCTCFRADRIWTPGFDAREVTISSGDWIQIYKGPTCSQLSTCSLASLQGLLPNPRLQLKRTLSGMGFLLYL

SEQ ID NO: 190232 - protein, 79 aa, Glycine max
  Clone ID: PAT_MRT3847_14279C.1.pep
KKMGPPKKGIQALGPKIFGENVKGKVFSVMSPKHEGKTSPPFGVKPPPIFFCAPPGGDPVIFVWGNSQGFSREKPLPFF

SEQ ID NO: 190233 - protein, 150 aa, Glycine max
  Clone ID: PAT_MRT3847_1427C.1.pep
LDLNEISYVSEVLSELNRPIVYSLSPGTSVTPAMAKDVSGLVNMYRITGDDWDLWEDVKAHFDVTRDFSTANMIGGKGLKGNSWPDLDMLPFGWLTDPGSNEGPHRFSKLNLEEKRTQMTLWSMAKSPLMYGGDVRKNDPSTYDVITNPT

SEQ ID NO: 190234 - protein, 69 aa, Glycine max
  unsure (1)..(69): unsure at all Xaa locations
  Clone ID: PAT_MRT3847_142800C.1.pep
TLARTIRYIMLWGGVSTDYTAREFVKQSAXPGEWVINTKEEVTPYELTCLSKAYHFSESPARLPMIQHF

SEQ ID NO: 190235 - protein, 244 aa, Glycine max
  unsure (1)..(244): unsure at all Xaa locations
  Clone ID: PAT_MRT3847_142801C.1.pep
MAGLDLSTASPFVQSLHRPDFNQQHDSGEDAKQSAEDGPHHQGDVVGRRPRGRPAGSKNKPKPPVIITRESANTLRAHILEVANGCDVFESVASYARRRQRGICILSGSGTVTNVSLRQPASAGAVVTLHGRFEILSLTGSFLPPPAPPGATSLSIYLAGGQGQVVGGSVVGEFXAAGPVIVMAASFTNVAYEXRLPLEEEENRLRYLGVAGNNSNPFPDPSSGLPFFNLPMNVQLPCGCLGRE

SEQ ID NO: 190236 - protein, 88 aa, Glycine max
  Clone ID: PAT_MRT3847_142802C.1.pep
WQQTESEVSEPQHDVLHIHIFSCGYQKSTTGHISKPIMKTKKRDDGYRTELHIHGDLMNPLCLTGYPKSLPNLVIQRLKYVLRGLTVS

SEQ ID NO: 190237 - protein, 80 aa, Glycine max
  Clone ID: PAT_MRT3847_142803C.1.pep
QNATSLLRQKSVNSSQKIRGTPRSTYFPKKAVASSADLISVKQATCFSKVTTHLFRGPLYSDILSPISQKLIVGIPNIIL

SEQ ID NO: 190238 - protein, 487 aa, Glycine max
  unsure (1)..(487): unsure at all Xaa locations
  Clone ID: PAT_MRT3847_142804C.1.pep
MDRPAAIFSDTVNLNGTVTQLSLLADGRLWWPEGGQRNLSIEKEVLGFTGDGPDIRLKTIVETEDGCCGGASRAKLVRNDVVFRPSSEETHRLWCQKLGEFIDSLGRPKRLFVFVNPFGGTKSAVIVFRDQVKPLLEDAQVQLTVQETKHQLHAKQVVQSLDFSKYDGIVCVSGDGILVEXVVNGLLQRQDWDTAIKMPLGVVPAGTGNGMAKSLLDSVGDPCTVPNAVLAIIRGRKRKLDVATITQGETRFFSVLMLAWGLVADIDIESEKYRWMGSARIDFYALTRILHLRHYIGCLYFVPAPGFEAYGDPTSYPGSSNNKGSNSELIDEEPLKLQRLGYQGPEIDLENQSWRVLNGPFISVWLHNVAWGAENTKAAPDAKFSDGYLDLIITKNCPKLPLLSLMSDLNNGGHVKSPYVMYLKVKVLVLEPGPRLGDQEKEGIIDADGEVLARGKGSYQCEQKALMAYDKLQITVDQGLATIFSPI

SEQ ID NO: 190239 - protein, 57 aa, Glycine max
  Clone ID: PAT_MRT3847_142805C.1.pep
FKFTFVLSKKSFTFCKIYFVLLYNLAYLKNHILEDIILFRNIIHIDMFCWYLIIAKN

SEQ ID NO: 190240 - protein, 51 aa, Glycine max
  Clone ID: PAT_MRT3847_142806C.1.pep
HFSTGGPSGRVNFMLLFQSILLGKVVKFNTNNQVLLFSLLDIISLYDKFEF

SEQ ID NO: 190241 - protein, 71 aa, Glycine max
  Clone ID: PAT_MRT3847_142807C.1.pep
SMISLILLFSHGRHWLIRAVESQTSVKCAIFFIYVQRIAIVTDSHTLLGLAHKLVRMKYGTGTYIDFDDYH

SEQ ID NO: 190242 - protein, 169 aa, Glycine max
  Clone ID: PAT_MRT3847_142808C.1.pep
MTLRFESVVWALNPKLSHHRFSIPNLRRNPHSLFAPPPPPRIRTSFLAFEEGGGGEIEPEKNENNNDNRTGAEESWKQALDTFREQASKIRDASQEAYELYSEKAIAVLKDATEELRVAAKEIGDEGKQYLTVVAENSPEVKEVVESFTSSSRDPREISQLRDFFVRVP

SEQ ID NO: 190243 - protein, 242 aa, Glycine max
  Clone ID: PAT_MRT3847_142809C.1.pep
SSEFGSKKNRAGVAKFVDNTTLFLVPPSDFLTKVLKVTGPERLYGVVLKFPLVPSSTSMQQPMHLPSPSTQYMQRIPPSQAEYGSILVKEEQVLPMDYNRLLHEDSKHLPKPLHPATNVPPSAHSVPSDYAPTYTASASQAVTWTPELIASLTSLLPATTQSSTTGGPMAVAGPSIVKPSFPSVAPNDGNQSHLWKQAQQIPDPSSHPPQQFGSIHNVQYQPYPPASSTDHPAQVVSGSSCF

SEQ ID NO: 190244 - protein, 55 aa, Glycine max
  Clone ID: PAT_MRT3847_14280C.1.pep
CCRKILVAFVYIYCLLVCFYVWVFPVSCRNVGVFSSAIWLVACERTISSVVYLHF

SEQ ID NO: 190245 - protein, 155 aa, Glycine max
  unsure (1)..(155): unsure at all Xaa locations
  Clone ID: PAT_MRT3847_142810C.1.pep
SGYIGKGDDIIRAGSEDDTWFNDTLSTXFAELGXNNNFEERTKKREELWLMSHKARCGDGIYIPKLEPERSASILERDRSKELMHRTEEICASMNEAWGYTELLQEIRKYYMRLVDKDEXKELAVAGKAPYIAETAQRKLYTGVNAHASELQRYL

SEQ ID NO: 190246 - protein, 55 aa, Glycine max
  Clone ID: PAT_MRT3847_142811C.1.pep
LPAKGGAPPNPFLKMFQASPPLGGCCLTYFVPTHHWWRVLVVHILNGKNAPQTIG

SEQ ID NO: 190247 - protein, 92 aa, Glycine max
  Clone ID: PAT_MRT3847_142812C.1.pep
TSYPNTPKFNPLTLFLPHLNPLNPSLPYPICLLTNPPLPNFLPNQYPPSFPIFQQPNIPNLNFLPPYIPPFFPLTFSFSYPPILSLSIVLFP

SEQ ID NO: 190248 - protein, 53 aa, Glycine max
  Clone ID: PAT_MRT3847_142813C.1.pep
MYTLREKIHKDKDAEPTEFEEAVGQALFDLENTNQELKSDLKDLYINSAVQVD

SEQ ID NO: 190249 - protein, 75 aa, Glycine max
  unsure (1)..(75): unsure at all Xaa locations
  Clone ID: PAT_MRT3847_142814C.1.pep
MSDFSLKENDYRAKLXRSRAERYEEMVEFIEKVAKTVXGEELAVEERNIIYVAYKSLMDAMRALWGIIYYIKVIE

SEQ ID NO: 190250 - protein, 118 aa, Glycine max
  unsure (1)..(118): unsure at all Xaa locations
  Clone ID: PAT_MRT3847_142815C.1.pep
MVKAHTQEHVYKHPWERVTCASWRKFADQENKRILSHILDVDTLNHSLDPSSGKLYTTRAITIHCPGPWFVRKIVGQDICHCVESTVVDARSRSMQLTSXNISLQKFIEVEEKIRYDP

SEQ ID NO: 190251 - protein, 78 aa, Glycine max
  Clone ID: PAT_MRT3847_142816C.1.pep
IHKIMIAGVVWVYGVLEEELSIVFSVPHSSTHHNTTPPPFIFCLFKTSFFSIHSQFFTILILLYLIFLSFSSISEFFC

SEQ ID NO: 190252 - protein, 32 aa, Glycine max
  Clone ID: PAT_MRT3847_142817C.1.pep
RYITCGCKMQKMGASLWMLGGHESAHCWLSIS

SEQ ID NO: 190253 - protein, 92 aa, Glycine max
  Clone ID: PAT_MRT3847_142818C.1.pep
PPPSLTFFFFFFVRRSFSPEKFFSPTPNFSTFGFSPGISSPFLADGFFFPKETLFFSPTLPKGLGFGAPLLEIPKKRPFFFCFPNPGRVFSF

SEQ ID NO: 190254 - protein, 157 aa, Glycine max
  unsure (1)..(157): unsure at all Xaa locations
  Clone ID: PAT_MRT3847_142819C.1.pep
ALKYXEELQKKKHSDVVAFLLRGRCWELRQLNVIHRASRPSRLDKARRLGYKAKQGYVIYRVRVRRGGRKRPAPKGATYGKPTNQGINQLKYQRSLKATAEERVGRRCANLRVLNXYWINQDSTYKYYEVILVDPQHKAIRIDPRINWIXNPVQKHR

SEQ ID NO: 190255 - protein, 162 aa, Glycine max
  Clone ID: PAT_MRT3847_14281C.1.pep
LLAPGGEFAFVAFGEAVNQGIMSSQLSSLLFLVVGISMALTPWLAERGQLLASRFELHDVRSLLPVESETDDLQNHIIICGFGRVGQIIAQLLSEQLIPFVALDVRSDRVTIGRSLDLPVYFGDAGSREVLHKVGAERASAAAVTLDSPGANYRTVWALSKH

SEQ ID NO: 190256 - protein, 54 aa, Glycine max
  Clone ID: PAT_MRT3847_142820C.1.pep
PSCSKNSRAHISQQKFKLMKNLHIGFLIALTNLKCFFWKYTWIYNYKLLSQFKM

SEQ ID NO: 190257 - protein, 64 aa, Glycine max
  Clone ID: PAT_MRT3847_142821C.1.pep
GTTAIVSAQGEKLKKAIGAAVYIKGSSKTHQNVKAVFYSANKVVLQPPKSQKKGKKKAPPCVFL

SEQ ID NO: 190258 - protein, 53 aa, Glycine max
  Clone ID: PAT_MRT3847_142822C.1.pep
PSGDGQHLRRFHRRWAVAKPAPACVRSCMGFRRLGLVRCLRQRSSRIPSGRTR

SEQ ID NO: 190259 - protein, 88 aa, Glycine max
  Clone ID: PAT_MRT3847_142823C.1.pep
KGFGGGWVKPDKPPSKTKGFKRAFEGGGIPTIYQGGASTEVPGGALFFYFGGGGQKAPPPKILKKKKAKPLHNFLKTLRAKKKLPLTL

SEQ ID NO: 190260 - protein, 59 aa, Glycine max
  Clone ID: PAT_MRT3847_142824C.1.pep
KIHRRLGSGLLKPGLAWPISTPSAHSHSSTIISFTSGNLKPQSHDAVSSRRSASMGSTS

SEQ ID NO: 190261 - protein, 95 aa, Glycine max
  unsure (1)..(95): unsure at all Xaa locations
  Clone ID: PAT_MRT3847_142825C.1.pep
RGVVVSPPPVGVFVLPSRSPVLLGLVFRGFGWCSLRSSPFXWSGXRRLCLAPGGSSRAXGXLSLALASLXVLARLPLGLXXGVGVCGLGAVFPGP

SEQ ID NO: 190262 - protein, 135 aa, Glycine max
  unsure (1)..(135): unsure at all Xaa locations
  Clone ID: PAT_MRT3847_142826C.1.pep
MAPDTTALSYWLNWRFFLCALFILLTMGLASFLIWKYEEFNKSRNERRERQRETAGSLYEYEAWNTCLKGIHSAWLLAYRIISFLGAFFFADCQMWLLMXGGIFYFYTQWTFTXVTIYFXAWVLCLHNGGVAINT

SEQ ID NO: 190263 - protein, 57 aa, Glycine max
  Clone ID: PAT_MRT3847_142827C.1.pep
NDNNTYGLTHQSSLLHSPLLTCPICIFLKALRIKRMRCLLYTPKKAYGHVGTMMNVP

SEQ ID NO: 190264 - protein, 333 aa, Glycine max
  Clone ID: PAT_MRT3847_142828C.1.pep
MAPDTTALSYWLNWRFFLCALFILLTMGLASFLIWKYEEFNKSRNERRERQRETAGSLYEYEAWNTCLKGIHPAWLLAYRIISFLLLFSLLTANVVADGGGIFYFYTQWTFTLVTIYFGLGSCVSIYGCRYKHNKIDSTTVNRADLDTEEGTYVAPTLDGTPELPNLYKNSNANQEPFTRNTAGVWGYIFQITFQTCAGAVVLTDVVFWLVLYPTYLNTKDFHLHFMDVCLHSLNAIFLLGDASLNCMRFPVFRFAYFILWTAIFVIFQWIIHACVSLWWPYPFLDLSSPYAPLWYFGVGVMHIPCYGFFALIMKLKHLWLSKLFPGSCQFIR

SEQ ID NO: 190265 - protein, 107 aa, Glycine max
  Clone ID: PAT_MRT3847_142829C.1.pep
RSVVSRQEQSQETERKNLSIALEKLHHPHIHMIMRFFTPVVVNDEDVHVLVRYSYNVTEMMLRMENKHIVHTMDQNIDNDVGRATNMYHDYLRTMTENSDTLSGLFH

SEQ ID NO: 190266 - protein, 99 aa, Glycine max
  Clone ID: PAT_MRT3847_14282C.1.pep
VLIRLSYGIAGRHPGAGRIFTGFSHASKGCDQVSRGWLVMWTLRRPPPFTNLKSLLLRKKLQGIPYWGMPGRPWKGTKKIWLQNNLGPLWIRVINSVEV

SEQ ID NO: 190267 - protein, 52 aa, Glycine max
  Clone ID: PAT_MRT3847_142830C.1.pep
KTAPIKFRRTYQKNEPTFKMFFSPYNTYPHSIISYKRLPTKMNTPLFNNIQF

SEQ ID NO: 190268 - protein, 114 aa, Glycine max
  unsure (1)..(114): unsure at all Xaa locations
  Clone ID: PAT_MRT3847_142831C.1.pep
ANWKYKKYNLPHYRTRHWYTELTYIVPSLFTAEIKYKRKQSNIQRPGIFYDRRYRCWTKHQKNTVLTEEEKMDAMINRSIXLELLRRELQELGKHGANEWRKDQNTSRDKLRSF

SEQ ID NO: 190269 - protein, 50 aa, Glycine max
  Clone ID: PAT_MRT3847_142832C.1.pep
GFLSNLLFTILLYSPFVFFRFYLLLPSPISIRSLARSSILNSRGFVLFWV

SEQ ID NO: 190270 - protein, 83 aa, Glycine max
  unsure (1)..(83): unsure at all Xaa locations
  Clone ID: PAT_MRT3847_142833C.1.pep
XCXRXTPASPGSXXXXKXSTTSSTXRPIRWLLDHAESAIXKATGTFXIXTXSSXEXEAAYNKKWXRXXNKKWNAPQEFERSRF

SEQ ID NO: 190271 - protein, 49 aa, Glycine max
  Clone ID: PAT_MRT3847_142834C.1.pep
QIFLFHRGFENTERGIDSWNHNLIEAIINLGDVEATKKVSFCDIEGPDV

SEQ ID NO: 190272 - protein, 59 aa, Glycine max
  Clone ID: PAT_MRT3847_142835C.1.pep
CELNLFFVLFLICLKLLVNRCLLLVQKKNGVHSGLIDLEEVLINLYIANLFRPYVFAIG

SEQ ID NO: 190273 - protein, 75 aa, Glycine max
  unsure (1)..(75): unsure at all Xaa locations
  Clone ID: PAT_MRT3847_142836C.1.pep
DLISRTYSFGKFGRQERKDKGRXMVLQAMKNSIFFYKKLYYYLLLLQRAEKLFLGLTINSSEKSYEYLFFFKRPR

SEQ ID NO: 190274 - protein, 66 aa, Glycine max
  Clone ID: PAT_MRT3847_142837C.1.pep
QSSQGLKSCATMSDDEREEKELDLSSAEVVTKYKISVEIVNSVFLFCVGLLCAELLHFGLIHNAYS

SEQ ID NO: 190275 - protein, 48 aa, Glycine max
  Clone ID: PAT_MRT3847_142838C.1.pep
VRWKMRCVSYNRVVHVRLCSLHCGSTGPSIPIDCLCVGGYVVKDVTSH

SEQ ID NO: 190276 - protein, 136 aa, Glycine max
  unsure (1)..(136): unsure at all Xaa locations
  Clone ID: PAT_MRT3847_142839C.1.pep
GSRIKPSISMFLTSCNIKSTGHKMGISXKGSDQILERYLYLHNVPNNEDFDPDTRLKNHALHKYDSVPAIQLTFASGTHTRVLYLDKTTVTTSMNIDPDXKRSRSDTGXILKCTPRRASXDEQHSYLPQPILYSQK

SEQ ID NO: 190277 - protein, 41 aa, Glycine max
  unsure (1)..(41): unsure at all Xaa locations
  Clone ID: PAT_MRT3847_14283C.1.pep
NTDGLSEDPETFAXKTLNSDXIHCRRAMLGALGCCKPESAV

SEQ ID NO: 190278 - protein, 47 aa, Glycine max
  unsure (1)..(47): unsure at all Xaa locations
  Clone ID: PAT_MRT3847_142840C.1.pep
LKQAVLLVFSHKQDFXNTRNLSKKIHSLGFISSVXRPWYIPSPCATF

SEQ ID NO: 190279 - protein, 51 aa, Glycine max
  Clone ID: PAT_MRT3847_142841C.1.pep
DYNKHNHCIYWLCKLVDCISKVNMGEEKTSMFIGGYDGLGGMMVEGSYVHP

SEQ ID NO: 190280 - protein, 91 aa, Glycine max
  Clone ID: PAT_MRT3847_142842C.1.pep
IIRDNPEITYGGLLEKLHQEIGNIHQSKFSNSILKRIFHRKIDQDPHLSSSEKFDIATRIFKLCACKFVKTILSFVNWLVRSGQNIIGYSS

SEQ ID NO: 190281 - protein, 197 aa, Glycine max
  Clone ID: PAT_MRT3847_142843C.1.pep
MMLQASFLRLISFFFLIALPLGRSSTTLNVPKDIINQTCQKCANQSIILSYNLCSTSLPAVPVSHSANLEGLALVAMELALENVTSTLAIIEKLLDGTSLDNSALGCLADCLELYSDAAWTILNSVGVFLSGNYDVTRIWMSSVMEAASTCQQGFTERGEASPLTQENYNLFQLCGIALCIIHLATPGVPYSQLFHR

SEQ ID NO: 190282 - protein, 102 aa, Glycine max
  Clone ID: PAT_MRT3847_142844C.1.pep
GPPKIQGIGGGFIPGVLEANFFYEVFQISSDEAIETAKLFAFKKGLFVGIFSGAAPGVAFPIAKSPENSGKLIVPVFPSFGERYLSPGLFESVKPQAESISF

SEQ ID NO: 190283 - protein, 176 aa, Glycine max
  unsure (1)..(176): unsure at all Xaa locations
  Clone ID: PAT_MRT3847_142845C.1.pep
CTHQIDIHRKNQERLERLQRWFLWGRNSDQQKIAWVXWETVCLPKEKGGLGVRGLAKFSSALLGKWQWNLFHHQGELWAKVLDSKYGSWRSLDESRRNSRDSICWRDLRSVMYVRRGVXFKSGIKWKIGCGSKVKFWEDGWLAGGIPLNEKYPHLYSTTAYLNNNSILSSSWGLHQ

SEQ ID NO: 190284 - protein, 73 aa, Glycine max
  Clone ID: PAT_MRT3847_142846C.1.pep
WTDRRWQEWGNETEGPGYIFCDKKIIRYKRRIAHWMYIATVVLCQIKKMESGLRQLMTRVFIVHIKRVGNVDI

SEQ ID NO: 190285 - protein, 34 aa, Glycine max
  Clone ID: PAT_MRT3847_142847C.1.pep
GLAGMRRFTASLQRTASLKRESDTYRRSLTTMLG

SEQ ID NO: 190286 - protein, 119 aa, Glycine max
  Clone ID: PAT_MRT3847_142848C.1.pep
CLSMVTQKVDAVVSVALYGNPLRKAFQCGAKLMGFLKGKNEGGTVGRGLSWWSWTTGGKCKPCESRGMSLRRRIYMGRGKSSIFLHAYVRNWIVGDCEGQEGEIMQKKLLQKEQLTLQH

SEQ ID NO: 190287 - protein, 79 aa, Glycine max
  Clone ID: PAT_MRT3847_142849C.1.pep
MNESSFYPFINEWKPLVCVVGVPNHMTYADFCQFCGSFIQHMLEMRIVWYATGIYAYSCSQITIAITSAILMSSSFFMF

SEQ ID NO: 190288 - protein, 49 aa, Glycine max
  Clone ID: PAT_MRT3847_14284C.1.pep
CCLSLYRSSSVIVRIRRNNNLPKPCFFTYMGRTTYNLPTYPYSNTSLPM

SEQ ID NO: 190289 - protein, 654 aa, Glycine max
  unsure (1)..(654): unsure at all Xaa locations
  Clone ID: PAT_MRT3847_142850C.1.pep
MAASSSSPSKEPQLKDEEDREQEEQHQQPQPVKECVHKTKTEQHLGRQNQFVLQNDNGPCPLLAIGPQVARNNWKTFIFINICISXRSDAKSKDKCIVMXDVNFTSRVSLLLATGIDVNIKFRRIADFEFTRECAIFDLLDIPLYHGWIVDPQDYDTVNAIGSKSYNALMGELVSLETLIMNVHHENNPEDCVDFVAATXTATLGVPSPSLSKARSFDDSSHSISDHMQRKGDLEEEXELLRVLKMSEAESDPVVGHINGGEISISSTSTLGEAANSSLKTDAINDLHQSTYTGPEESFDLNDVIEKNSLDALVQNESEVIPSPEKHSVSLFECRADFSGGDGKVHDQSTPTTIDHEVVGESHGPDATGLSFSSPGHTNSDSSSVRYHQTDVSGALTSSVQGSEPIYEGEECVLDTRTGNFEDREPVYEGEVVLAEQSDKSTLAAPDLRAKDELTPEQGELIKSFLRNNASQLTFYGLFCLQDGLKERELCVFFRNNHFSTMFKFEGELYLLATDQGYINQPDLVWEKLNEVNGDTLFMTSNFKEFKVENHESSTWDENNALTSTADYLASIDSATHASLDINSDLQLAIALQQQEFEQQPPRQNNSQQQSSISGSSRLVTGPQVARNTGRHSSSSTSASPKSDTKSKDKCIVM

SEQ ID NO: 190290 - protein, 142 aa, Glycine max
  Clone ID: PAT_MRT3847_142851C.1.pep
FPPSKFFPPPQGKIFPLFKGVKGPKPRGALAKGLAGIPPKKSFGVLDLGPPPKDFLVGKRGFFPRKVFGGLAPFNPFPLGPKFPSVLDPGPFLWFGKGVNFLPRGGFPFSNPGPLWGEGAPFKGFFRPPWRERKGKGEWVFF

SEQ ID NO: 190291 - protein, 198 aa, Glycine max
  Clone ID: PAT_MRT3847_142852C.1.pep
CYFSNSICRGSLTSSLARAVAPSGHVYTFDFHEQRAASARADFERTGLSSLVTVQVRDIQGEGFPDDLTGMADSVFLDLPQPWLAIPAAAKVLRHDGTLCSFSPCIEQVQRTCETLRTRFTDTRTFEVLLRTYEVREEKMQSLCGDSNGSVPSKRKQCSGGSYVLGSSPSTSSVMARPCGEARGHTGYLTFARVKSLS

SEQ ID NO: 190292 - protein, 97 aa, Glycine max
  Clone ID: PAT_MRT3847_142853C.1.pep
KPGKGKQKFFYGGTQKKIKGGGKKNGGKGKNLGAPNKRARGKKPLKEGGGKPKKPPPSPLAKRGPPLMGKGTPPGGGKKTRGGGGVPTRGPPPWAGP

SEQ ID NO: 190293 - protein, 142 aa, Glycine max
  Clone ID: PAT_MRT3847_142854C.1.pep
LRSMEGEERRKRKIENEEENEEQKMEKFFALIKRTKDVRDRFYKEKLTDTKKIDGEKAAAGGTSTIWNPKFQPEDFIDSGEMAKRNNINIVSGHGHDHASPSEKELMIEKKQDLQEATPAAAQDNEEKDKASEHFLDLKLSL

SEQ ID NO: 190294 - protein, 184 aa, Glycine max
  Clone ID: PAT_MRT3847_142855C.1.pep
MATLFSPLSLHSARPSSSSFSSSSSSSSSSPFFAFCSFPLRSRISSLKAQTILLQKMKRVVKAVEEETQQELTAVDESEQPSTSEAPPVVVPVSPSDTLTMFFQAEGTVSETAIPALTKALEETDGVTDLKFQLAEGLAILELKKQTTVQATGVASGLLETIQGSGFKLQTLNLSFEDEEVAVA

SEQ ID NO: 190295 - protein, 74 aa, Glycine max
  Clone ID: PAT_MRT3847_142856C.1.pep
GLCDVDSRLGTRGGEEIKAHPWFKGIQGDMLYESEAAYKPTVTGDLDTQKFEKFPEVDGPPSVIASDGPWRKML

SEQ ID NO: 190296 - protein, 132 aa, Glycine max
  unsure (1)..(132): unsure at all Xaa locations
  Clone ID: PAT_MRT3847_142857C.1.pep
RTCQNEGSEQARFRGXKRNPPIVWGSWKRRAGTALKQRRLRLLPQEHVDPQEARIQCTYTASTPSDEDDLLLQPEQNEMKWLKTPNRNWHYNTLLTIKEEYIQHGETLTITPMTQMIKKLRVRLTIMNTSPQ

SEQ ID NO: 190297 - protein, 77 aa, Glycine max
  Clone ID: PAT_MRT3847_142858C.1.pep
TAHPIKLSCSNNPRGVYARAAHLLTIVPDTIIVVVDDAFENLLPTNTERHRLPILENKQNVNRRDQRTSILISLQRS

SEQ ID NO: 190298 - protein, 473 aa, Glycine max
  Clone ID: PAT_MRT3847_142859C.1.pep
ETAEMNPTNGIEVEKIPANHAKEKLVIEDDGKFNQEEAKGIEEATKTLLLNTATESLTEEEVQEILPTPAIVQRDTKQIMQQQTLHNDESEAIDKEKSCIPENELDRKFIDVEESDQPETKANAGIVKEEQADNQSQVSSMQSVITNYITAEGHLASESSTKLSFMNEQKTVDASVENLEIKDASEITAEEATDAKQLTDEEIQKSETESVYEDKALQTLPSTASVRIEVEKSIQEIHTETELAVTDTKEGQISENESEAKKEVSEYMLKKAFDLHKVACQTGAENELKAEFLSEERSQETIVTKHPNLEGESIEINPTSETEEHEQVPASHTGEKLEINDDGNFIQEEEKEMEKETERQLLKTATESVPEDEVQTTLPTSTIVKGETVEGIVQEQTLEEEKSAAIDNNSGRPENKLEGMANAAEPIVHPAAMPLLCTDLDDLAPRPSPPSRLEKVLTIHLKSQGWGASVHST

SEQ ID NO: 190299 - protein, 52 aa, Glycine max
  unsure (1)..(52): unsure at all Xaa locations
  Clone ID: PAT_MRT3847_14285C.1.pep
MLYINXRVDPSVSAFQEYPLSYSNSLVIITNSKTNRLYVDTDICLHFFTSHS

SEQ ID NO: 190300 - protein, 146 aa, Glycine max
  Clone ID: PAT_MRT3847_142860C.1.pep
RMVEKSCQRKHLIFYEATDAPEDKAISTLPEIVEESIQEVIQKEAESEVIDTKEEQRPGNDFVKNMEVLEGFDLHKAHSNTTLENEMKAEVQSEAKSREIIIEHQNLLETAEISPRNDTKEPEKEHKVTTGISESVSADTTQQTDT

SEQ ID NO: 190301 - protein, 160 aa, Glycine max
  Clone ID: PAT_MRT3847_142861C.1.pep
MGATTFTHDYSSPVAPSRMFKALITDSRTLLPKLLPQIIKEVNLIQGDGEAGSIEQVNFAEAFPFKYVKHRIDEVDKDNFVCKYTMIEGDPLEDKLESIAYEVKFEATSDGGCLCKMTTKYNVIGGFEVKEEEIKEGRESSLGVCKVVEAYLLENPQVYA

SEQ ID NO: 190302 - protein, 144 aa, Glycine max
  Clone ID: PAT_MRT3847_142862C.1.pep
LTHASVKVQGDIFCFLVNFVCSMLKPQKLPFLPQTHFLISAPLWYLSLLILFLYVSLECFSQLQYGQMLYWVMFAGPYLHTHLSYNYTNEIVNAITDTRLSMLLLICTSMSFIENYRSPTATTSYFMWPKNYSLHAIIIHPHIS

SEQ ID NO: 190303 - protein, 79 aa, Glycine max
  unsure (1)..(79): unsure at all Xaa locations
  Clone ID: PAT_MRT3847_142863C.1.pep
KFCAFSCTQHTSGXNXPNSNXHIEILLGINLCSSQLRSKTLPNKIAFDDTACVDYNTKILLMKVSSRIMVNNNCALSLS

SEQ ID NO: 190304 - protein, 42 aa, Glycine max
  Clone ID: PAT_MRT3847_142864C.1.pep
FLRFERDYFNSIIYILILKIFFLVLIRTKISKNHKIIKIFKK

SEQ ID NO: 190305 - protein, 66 aa, Glycine max
  Clone ID: PAT_MRT3847_142865C.1.pep
KFAHHRSLSLFQTHKAKEKHRNQSSYSIYIYTELSKLKHASLPRLHSSSQLLQLSKIFAILSPIPN

SEQ ID NO: 190306 - protein, 122 aa, Glycine max
  unsure (1)..(122): unsure at all Xaa locations
  Clone ID: PAT_MRT3847_142866C.1.pep
HPLLFLAQFEPKTIRQAIDDPQWFAAMKQEYEALFNDKAWDLVPLPKDRKVVGCKWVFRIKENVCGTVSXFKARLVAKGFHQXAGCDFNETFYPMIKHVTIKLIITLALTNKCDLFQLDVNN

SEQ ID NO: 190307 - protein, 86 aa, Glycine max
  Clone ID: PAT_MRT3847_142867C.1.pep
PPLVNRATIVPMGCEKHLHSEINKVHSAQTIAILIGSYLLPFLYRVFARKMSGLFNRSSKASFRGTNTAGSTETQRWFHKLWKDMR

SEQ ID NO: 190308 - protein, 64 aa, Glycine max
  Clone ID: PAT_MRT3847_142868C.1.pep
WPRVRSAPPHGTPRGLLSQSSRATAFTISHCVPPYASSLRRWSGPFAGTAGSPSSVITRSFSVS

SEQ ID NO: 190309 - protein, 65 aa, Glycine max
  unsure (1)..(65): unsure at all Xaa locations
  Clone ID: PAT_MRT3847_142869C.1.pep
SFTRSEILINRDHRLPHLKPETKAILLDFKNXVISSYFFVYYFLRERKILSVLATDFVNYFLFHS

SEQ ID NO: 190310 - protein, 90 aa, Glycine max
  Clone ID: PAT_MRT3847_14286C.1.pep
GKCRGLRTARKLRSHRRDQKWHDKQYKTAHLGTALKANPFGGASHAKGIVLEKVGVEAKQPNSAIRKCVRVQLIKNGKKITAFVPNDGCL

SEQ ID NO: 190311 - protein, 90 aa, Glycine max
  unsure (1)..(90): unsure at all Xaa locations
  Clone ID: PAT_MRT3847_142870C.1.pep
FFGENVCVTGAGGFIAAWLVEHVLVKGYTVRGSARSSNDPENGHXRELVGGNVRLTLXKSDLFDNACIKASLHGCHSGFHTAVSVIDNLE

SEQ ID NO: 190312 - protein, 59 aa, Glycine max
  Clone ID: PAT_MRT3847_142871C.1.pep
ESWSLGRHFIFSYAVHDCIRKDSVSVEGLHFILIDLLSSRCVLLWRYCFSWQIVWVLMQ

SEQ ID NO: 190313 - protein, 85 aa, Glycine max
  Clone ID: PAT_MRT3847_142872C.1.pep
DAPAPESRESRSAAAGHATGFGSWDYLVGNSPRWAQRGQASGRLPASTYTVRGLNVATCKRASEPRCGSPRHSSSSERETAESHT

SEQ ID NO: 190314 - protein, 126 aa, Glycine max
  Clone ID: PAT_MRT3847_142873C.1.pep
RKSWSWLLETQEINNTMSLNCLTCSQLLQRTDSYGELFVEKEYTKICKQVNRSWSSNMSSSTTKCELPKGGAVAKVKADHRRNYSTGDVPYPSGSAGPKLVRSSGMRRNWSFEDVAETQDQGVSCH

SEQ ID NO: 190315 - protein, 320 aa, Glycine max
  Clone ID: PAT_MRT3847_142874C.1.pep
MLSLRLLRLFSVRSTCSNQAPILQESYKILFQGCKETGFRSLSPGSVKMSSGGKQGGFVSYQNVFVMRHGERLDNFEPSWVMTAARPWDPPLAEAGRKRAFETGRRLRESVGLPIGRVFVSPFLRCLQTAGELVASFSDEGRGGTVAGDGVAVKPFEVKVSVEYGLCEMMNSKAIRPNVAPKDGNMGFDVAVCEAMLPAEIVDKNVERMCKELPQWEESVLQAGARYQQLIKDLADKYPTENLLLVTHGEGVKVAVSSFKKDAEVNEVDYCGYVELRRPIFKKDHTFIAGEFDLLTTSGQTGVSYFLPRPLGSDTNQTLP

SEQ ID NO: 190316 - protein, 176 aa, Glycine max
  Clone ID: PAT_MRT3847_142875C.1.pep
MANWVQKKITDPLLSIIRRGAEPNHLAFSAALGVTLGLFPICGVTVFLCGMAIALLGSFCHAPTVMLANFIATPIELSLVVPFLRFGEVISGGSHFPLTSDALKKVLTGQASREVLLSVAHALLGWLVASPFILGTLYIVLLPCFKILVHKFSSVPLSPKKPLNPHSEVKLKVRDV

SEQ ID NO: 190317 - protein, 165 aa, Glycine max
  Clone ID: PAT_MRT3847_142876C.1.pep
EVKVPSKAAFFVWRLIRDRLPTKTNLHRRHVEIHDLTCPFCKNKEEDAAHLFFTCSKIMPLWWASLSWTNTTAPFPENPHMHFLQQVLRNGKDTSYQKWQCWWTSLTWSIWQHRNKIVFEEERFNASKILKDAIFPCWTWFKNLVKGFDMPFNHWSINMKEAFTG

SEQ ID NO: 190318 - protein, 83 aa, Glycine max
  Clone ID: PAT_MRT3847_142877C.1.pep
HSKLKCYVLYFCAISCYRTDSALRFSLFFLSYGVSFTYFLLVLIHSTLSSLILFPILSKQVHILFCVYAAVAPPKKLKKTKPP

SEQ ID NO: 190319 - protein, 124 aa, Glycine max
  Clone ID: PAT_MRT3847_142878C.1.pep
MASKGNVASTYVALLMCLYLLSFTMVSSQISTPPPMPSQNGTCPINVLRLGVCANVLNLVNVTLGSPPTLPCCTLIQGLADVDVGVCLCTALRANLLGINLNLPISLTLLLNTCRGNIPNIQCS

SEQ ID NO: 190320 - protein, 42 aa, Glycine max
  Clone ID: PAT_MRT3847_142879C.1.pep
NKCYKGIMFFPLNILSNNMKHWNCTLKECRDFRPTSGVNEEK

SEQ ID NO: 190321 - protein, 40 aa, Glycine max
  Clone ID: PAT_MRT3847_14287C.1.pep
SFHAYYHCLSVESTLDPRIVNSSLDTKGETNADAKFNATY

SEQ ID NO: 190322 - protein, 60 aa, Glycine max
  Clone ID: PAT_MRT3847_142880C.1.pep
TITSTIDISHVYVLVIQGSRQFHFQVYTHPVVGLVNLVARKLRLVNYNSPHPRIRPLVAK

SEQ ID NO: 190323 - protein, 49 aa, Glycine max
  unsure (1)..(49): unsure at all Xaa locations
  Clone ID: PAT_MRT3847_142881C.1.pep
WQFKCQIHFEKKLKKNSLQLPSARGPLFGGFXGKKKGPXXPXXXKXXGM

SEQ ID NO: 190324 - protein, 66 aa, Glycine max
  Clone ID: PAT_MRT3847_142882C.1.pep
DFFVEYEVQRIDDSNLCSCIDHVSSIVIGKSKTSVHIAQYSSSLGFSLSSLHFKCMLKVDHALCGD

SEQ ID NO: 190325 - protein, 204 aa, Glycine max
  Clone ID: PAT_MRT3847_142883C.1.pep
FLAVTNGSLGLLHLCLAIWVLENIRKSYTLFPLNGWVLELFHGFRWFLVGLSVSLQLKQLSRSSLWLFSLLTVFVSTILCVSSMSYAISSRELSFKAALHVLSFTGAVLLLLCTYKVYKCEDTDRDIDEGLYDPLNDHFNEVDPDNYLTPFANAGFLSRMSFWWLNPLMKRGQEKTLQDEDIPKLRESDRAGSCYLSFVEQLSS

SEQ ID NO: 190326 - protein, 146 aa, Glycine max
  unsure (1)..(146): unsure at all Xaa locations
  Clone ID: PAT_MRT3847_142884C.1.pep
LLVDCRKHSAGQFYIAVRGGGIXADLSGDGFTLILNSPIRYSLKVAARKNGCXMVIIVTTGNAAIKKRDWPSLIQVFXTDSNSSQHLAACEETKSIPQSWELIFPIQECGANNSFAMWSSERANQPAWHLNPLIDNXKQSTIFDTV

SEQ ID NO: 190327 - protein, 62 aa, Glycine max
  Clone ID: PAT_MRT3847_142885C.1.pep
VIGQRPPHLFRTDVRMQTPFAYKNERRHLWPKIPLLRQTTYQEHGLLSWETPARSPELFDWA

SEQ ID NO: 190328 - protein, 95 aa, Glycine max
  Clone ID: PAT_MRT3847_142886C.1.pep
TTHPVSSKPSCRNVLRIINQALRSSIHLKRGLLFHINTSSCTVMGIAHFPCIAFPVQRDVNPLMQISLLVVKDGCKVTFVQTELNLKRAETWGAD

SEQ ID NO: 190329 - protein, 56 aa, Glycine max
  Clone ID: PAT_MRT3847_142887C.1.pep
LMHKFTSTYGGTSFISLLIFFSYKYSGKSLFKQTLNLDFTLKHIFGTLPSKIQTHP

SEQ ID NO: 190330 - protein, 258 aa, Glycine max
  Clone ID: PAT_MRT3847_142888C.1.pep
MATRVPFVLCAATTSPNHCLKYCVVAPSLPLPVSSSSLSRHFLSLSFSSSFSSSLGLLPLSKKEGVKRVGRRFGVVAMAESKSTVLVTGAGGRTGQIVYKKLRERPNQYVARGLVRTDESKQNIGAADDVIVGDIRDAESIVPAIQGIDALIILTSAVPQIKPGFDPTKGQRPEFYFDDGAYPEQVDWIGQKNQIDAAKAAGVKHIVLVGSMGGTDLNHPLNSLGNGNILVWKRKAEQYLADSGIPYTIIRYINSCPY

SEQ ID NO: 190331 - protein, 39 aa, Glycine max
  Clone ID: PAT_MRT3847_142889C.1.pep
KTFGTFSPQLNCLNSSFTSLNSYIKYFLSSWNCCILEYV

SEQ ID NO: 190332 - protein, 67 aa, Glycine max
  Clone ID: PAT_MRT3847_14288C.1.pep
LLVHNQRLGYSCNTEPSNLLCTHKVRLSIQDWFIHSHWLLKIISLEMKGKIMITNAMRDPNNPITKV

SEQ ID NO: 190333 - protein, 73 aa, Glycine max
  unsure (1)..(73): unsure at all Xaa locations
  Clone ID: PAT_MRT3847_142890C.1.pep
LEACRELLVGKDDELLQTETRTISRSDVAEVCIQALNFEEAKFKAFDLASKPEGAGSATKDFKALFXQITTRF

SEQ ID NO: 190334 - protein, 123 aa, Glycine max
  unsure (1)..(123): unsure at all Xaa locations
  Clone ID: PAT_MRT3847_142891C.1.pep
FNVDVYSFGVLLVELVTGRRPSXLLFELKERITAXWAMKRFIEGDAISVLDPRLDQIAANTLALEKILELALQCLAPRRQSRPTMKRCAEILWSIRKDIREQLSASNFRSFSTSSQRSTSLKE

SEQ ID NO: 190335 - protein, 270 aa, Glycine max
  Clone ID: PAT_MRT3847_142892C.1.pep
KERAKRVGRRFSVVAMAESEKSTVLVTGAGGRTGQIVYKKLKERPNQYVARGLVRTDESKQNIGAADDVFVGDIRHAESIVPAIQGIDALIILTSAVPQIKPGFDPTKGQRPEFYFDDGAYPEQVDWIGQKNQIDAAKAAGVKHIVLVGSMGGTDLNHPLNSLGNGNILVWKRKAEQYLADSGIPYTIIRAGGLQDKDGGLRELLVGKDDELLQTETRTITRSDVAEVCIQALNYEEAKFKAFDLASKPEGAGSATKDLKALFSQITTRF

SEQ ID NO: 190336 - protein, 59 aa, Glycine max
  Clone ID: PAT_MRT3847_142893C.1.pep
PLTNIIYSFIINIQNADTTTKPFPTMWDWLPYLNRMVTTPSISMLFSERPKNVDIYIYR

SEQ ID NO: 190337 - protein, 71 aa, Glycine max
  Clone ID: PAT_MRT3847_142894C.1.pep
TQFNTMLCCKGIALRPLRDYETLRNFSTLVACMLTPDLWIIKQAGKVTTAYQDARSERCGYRRLGLTTNYS

SEQ ID NO: 190338 - protein, 51 aa, Glycine max
  Clone ID: PAT_MRT3847_142895C.1.pep
MWFASNSIPIESYINYMTVPKKRASISKKRIGISLWKNKGYFTTVIAFSQA

SEQ ID NO: 190339 - protein, 216 aa, Glycine max
  Clone ID: PAT_MRT3847_142896C.1.pep
YCCEKTTEGDLKLVLSLSLLLHILHSLSIIFHPFSLFCKENNLIKSICTKMASQVCETLAFINGDDGLKINGALLMSLMEEPSPSDESDDDRLDSLIRSFEAEISGSKMGDHHDSSSIGSEILMSNNIIEECASQSWNNNMGEIDGVECWANSSSSEFGVEWVDMDFVQSSPFEERSWSVDPCGDEYAIANNLKGYDGFALGEHGCNSLWQDMACN

SEQ ID NO: 190340 - protein, 323 aa, Glycine max
  Clone ID: PAT_MRT3847_142897C.1.pep
VFRNFDASINSDLTKSDLKQRSLKWPVSGMDPQKGTAVGNIELINGNGSVKLMRCVKRHRRWSVAKIKAVHWTRYLLRYTAIEIFFSDSLAPVFLNFASQKDAKDIGNLIVTTRNEYSFPKGSGKDKSGSISFVDRRVAQEMAETARESWRRRDITNFEYLMILNTLAGRSYNDLTQYPVFPWVLADHSSEVLDFNKSSTFRDLSKPVGALDTKRFEVFEDRYRNFCDPDIPSFYYGSHYSSMGIVLYYLLRLEPFTSLHRNLQGGKFDHADRLFQGIEGTYRNCLTNTSDVKELIPEFFYMPEFLVNPNSYYLGIKQDGQPN

SEQ ID NO: 190341 - protein, 173 aa, Glycine max
  Clone ID: PAT_MRT3847_142898C.1.pep
SICTKMASQVCETLTFINGDDGLKINGALLMSSLMEEPSPSDESDDDRLDSLIRSFEAEISGSKMGDHHDSSPIGSEILMSNNIMEECATQSWNNNMGEIDGMECWAHSSSSEFGVEWVDMDFVPSSPFEDRSWNLDPCGDEYAMANNFKGYDGFALGEHGYYNSLWQDMACN

SEQ ID NO: 190342 - protein, 69 aa, Glycine max
  unsure (1)..(69): unsure at all Xaa locations
  Clone ID: PAT_MRT3847_142899C.1.pep
LRLKFSGXQFGSYXMKVINSISMAFFKASVKASGCTLTMYPSMTLVIYSSVITNGLVXCGRXCXGHCYV

SEQ ID NO: 190343 - protein, 36 aa, Glycine max
  unsure (1)..(36): unsure at all Xaa locations
  Clone ID: PAT_MRT3847_14289C.1.pep
IAXSRALLGTSSITRSNSVFIHQQPPARPPQSRPHA

SEQ ID NO: 190344 - protein, 95 aa, Glycine max
  Clone ID: PAT_MRT3847_1428C.1.pep
STSVIHAANVNSGGIRSWIATGRTGEIYLAFFNLSEQKTEIYAKTSYLAKVLPDKSITSCKGKEVWSGTDVITTQGTISMNMEIHGCALFLLNCN

SEQ ID NO: 190345 - protein, 237 aa, Glycine max
  Clone ID: PAT_MRT3847_142900C.1.pep
MATVSPLAKYKLVFLGDQSVGKTSIITRFMYDKFDINYQATIGIDFLSKTMYLEDRTVRLQLWDTAGQERFRSLIPSYIRDSSVAVVVYDVANRQSFLNTNKWIEEVRTERGSDVIIVLVGNKTDLVEKRASPGAAVKLCLGDLLVMGSNPETASLHMQGQVSIEEGDAKSRESGIMFIETSAKAGFNIKPLFRKIAAALPGMETLSSTKQEDMVDVNLKPTVNSSQAEQQGGGCSC

SEQ ID NO: 190346 - protein, 144 aa, Glycine max
  Clone ID: PAT_MRT3847_142901C.1.pep
NCNWCTFPLPLHFLLLPQSLRDSGSDLINKNGDCVPLAKYKLVFLGDQSVGKTSIITRFMYDKFDTNYQISSKFQATIGIDFLSKTMYLEDRTVRLQLWDTAGQERFRSLIPSYIRDSSVAVIVYDVASECSGFSFFLNVSFII

SEQ ID NO: 190347 - protein, 102 aa, Glycine max
  Clone ID: PAT_MRT3847_142902C.1.pep
MKNVTVKWNPCSEKEHQFYISEAELQMHQAKTQLWGKTGIYFHSVGKEATLMMDEEAALEGEFEIEKIPTRVIQARSKDLVPIFDYIQTSKFQQIRSALMTN

SEQ ID NO: 190348 - protein, 373 aa, Glycine max
  Clone ID: PAT_MRT3847_142903C.1.pep
MDTVLLQWCIYQPSLVGICFLLMVEKKKISIKANWELQQCHSGVESFYGPPTGFTGPFIAPPGGIPGVQGPPHMVVYNHFAPVGQFGQVGLSFMGTTYIPSGKQPDWKHIPTSSAVGAGEGDMNSMNMASSLRNPANMPSPIQHLAPGSPLMPMASPVAMFDVSPFQPSTEMSVQARWPHVPNSQLPLSMPLQQQEGIQTSQFSHVPSVDQPLNAKRFTGSRASTSSEGDRNFPRATDVNVNQLPDELGLGDTSNSTPTKTSAQSVVNKTPSVIPITDTLKVDVLNGNSHSSNNQNASSSFKNQPSQFDHSSGHGNYQRGGVSQRNNSGGEWSHRRVYQGRNQSLGSDKNFSSTKVKQIYVAKQTISGASTVS

SEQ ID NO: 190349 - protein, 68 aa, Glycine max
  Clone ID: PAT_MRT3847_142904C.1.pep
PNQLTVFKRRFLSVETINQEKTFQDPLKKKPEVFGYFPMFKLKNTARIFLYFENPPKNLKSRGRESSF

SEQ ID NO: 190350 - protein, 67 aa, Glycine max
  Clone ID: PAT_MRT3847_142905C.1.pep
PSVHKAVGELVSCWSRCSMWSPPVPFLGCALYRHWPNNPVRGCHGGYTPLPFQNTPLVHARCRRMRT

SEQ ID NO: 190351 - protein, 67 aa, Glycine max
  Clone ID: PAT_MRT3847_142906C.1.pep
RETLTSSAHLDAMRYIIKALLDLLPSEQQPWIQHCTLHSFHVKSTINLTQKALYRQEMLIGIKPTFF

SEQ ID NO: 190352 - protein, 280 aa, Glycine max
  unsure (1)..(280): unsure at all Xaa locations
  Clone ID: PAT_MRT3847_142907C.1.pep
MSATSKEGENLSTNDRANRHPSTPSSHTKKCPLNANFVKMVVEELRVQRGIALPLVAMNLAWFAKLAITTAFLGHLGELNLAGGALGFSFANVSGFAVLNGLSGAMEPICGQAHGAKNVRLLHKTLLMTTLLLLLVTLPLSFLWLNVDKILILFGQQQEISIVAKTYVSYLIPDLFIKALLCPLKAYLSSQCMTLPTMFSSAVALAFHIPVNILLSKTMGLRGVAIAVWIXTDLIVMVMLAIYVAALERRSEGLLWKEGGXVLXQNMMDWIRLIKLSGSC

SEQ ID NO: 190353 - protein, 95 aa, Glycine max
  unsure (1)..(95): unsure at all Xaa locations
  Clone ID: PAT_MRT3847_142908C.1.pep
LADRDSLMTYCKQMYNVLQEAPEDTASLWSQLHYXVSWDNXLQMQEAYLVNLEDVXRELYSDSPEEARQLRERALSXLERLRQPDEPTIAQIGRA

SEQ ID NO: 190354 - protein, 108 aa, Glycine max
  unsure (1)..(108): unsure at all Xaa locations
  Clone ID: PAT_MRT3847_142909C.1.pep
XLVXXTYPXXXGPXNHXGLXEAAXXVXXAXNXXPERFXNVNXIXHVPXLFTSXMXXPXXEXXXRXIEENXXXFLSXXFXLVLXXXXFXXMXXXVXPELXLXFSXXXSK

SEQ ID NO: 190355 - protein, 77 aa, Glycine max
  unsure (1)..(77): unsure at all Xaa locations
  Clone ID: PAT_MRT3847_14290C.1.pep
ADPVNLVEVLPELYLRSSHEARRLRTRALSRIEWLPRADVPTISQIEELHSMQMTVHAPDSHDDIEXLLSIELLRLQ

SEQ ID NO: 190356 - protein, 37 aa, Glycine max
  Clone ID: PAT_MRT3847_142910C.1.pep
LDHSLDFLHSFDRVFHQTSNDTLSYPCIYNYVNQFPG

SEQ ID NO: 190357 - protein, 136 aa, Glycine max
  Clone ID: PAT_MRT3847_142911C.1.pep
GKTALIHEILTQGPTPGLGGSPPEGGKTPPPVFQPPPKKFPVIWEPVFFFLGAPARGPGAGSFQEGAGAFKKIFGTWSGDPFFFFLGGPPPPGVFFGGPGKGTLDLKGFSGGGGGGFNRWAKLPDLFNNCQKGVWP

SEQ ID NO: 190358 - protein, 131 aa, Glycine max
  unsure (1)..(131): unsure at all Xaa locations
  Clone ID: PAT_MRT3847_142912C.1.pep
SSVLPRARACSSSLELLLAAQILSLQRLVNYENSPADKTPTAKSPVXYKPPVEKPSAYKPNKXENPPIYKPSAKKLPEFKPPDEKPPXFTPPPVKPPLFKPPAEKLPVHKPPDEKPSIHKASVEKPPEYKP

SEQ ID NO: 190359 - protein, 72 aa, Glycine max
  unsure (1)..(72): unsure at all Xaa locations
  Clone ID: PAT_MRT3847_142913C.1.pep
SKEGGVQAWARPCAHSITSISKPRLTFNTRGGAILEFCSASLHLKCQSPTNXNVICTIVTNLRHIVLTCRLP

SEQ ID NO: 190360 - protein, 130 aa, Glycine max
  Clone ID: PAT_MRT3847_142914C.1.pep
SCWLLPRFVEPNNRSWRRRLDDRRSLRSARHSDLNPCPLNTTSLRSRTSSDDATRCRYILQAIRYLHRTGFFFPSPAGTLSNLPSTNTTFTPLTEPSSGELVDCKAIASIYAASKHVYVFFQIKFFLAIS

SEQ ID NO: 190361 - protein, 101 aa, Glycine max
  Clone ID: PAT_MRT3847_142915C.1.pep
KANVLSFERGPIWISWGQGSLAHNGRLLDLVDTSIHSLDKEQALLCITIALLCLQRSPGKRPSIKEVVGMLSGEAEPPHLPFEFSPSPPSNFPFKTRKKAR

SEQ ID NO: 190362 - protein, 63 aa, Glycine max
  Clone ID: PAT_MRT3847_142916C.1.pep
LNDSDLRRELPGPPSPADTQGRLPLCQDHGQAISNREDTPCKGEHTHNYRVITADTHSFTDCK

SEQ ID NO: 190363 - protein, 83 aa, Glycine max
  Clone ID: PAT_MRT3847_142917C.1.pep
MVSQENTNWLFDYCLIDDIPVPDATFGVNSCAFTWPPNALNASSNVSVEIDGSLWDSDSLKESGSNKRVRSESCAASRSKACR

SEQ ID NO: 190364 - protein, 56 aa, Glycine max
  Clone ID: PAT_MRT3847_142918C.1.pep
SKIYSSGYNILLCYTLTIVPLVLPRYTPRQWLNSSFNLQFRGRMTSLLSSPKHLNV

SEQ ID NO: 190365 - protein, 106 aa, Glycine max
  Clone ID: PAT_MRT3847_142919C.1.pep
FAWEILWSPATLVKSRGTKLVSYLYFPFISNKRQVKRGNCHTLILSGDLCLMTCDLSLVLVRCLASIIRQFVKFQDMPKNQKNIDAQSVSFRDTPEIKWKHRCIIK

SEQ ID NO: 190366 - protein, 74 aa, Glycine max
  unsure (1)..(74): unsure at all Xaa locations
  Clone ID: PAT_MRT3847_14291C.1.pep
PAELDGGDSDRAEPCRTKSTICEYKADAGAFKTYSELAGTIFINGYIVIKGRPCXVGEVSSFKTVKLGRALCHF

SEQ ID NO: 190367 - protein, 69 aa, Glycine max
  Clone ID: PAT_MRT3847_142920C.1.pep
RSKNDEERMKNVEERSKPSRNSLRKHYGNVSEAPRLGFSSRKQFFQANSKEREVPKGLNPFSLHFSPYL

SEQ ID NO: 190368 - protein, 88 aa, Glycine max
  Clone ID: PAT_MRT3847_142921C.1.pep
LCNPQGSVTLRKENKFRYKIHKFPYLYEKRITKKSRGGVYLVKMGVQIAPRPTWALQNIPPEGCCFCRKQPGSPGRAGRQPPPLFCYK

SEQ ID NO: 190369 - protein, 155 aa, Glycine max
  Clone ID: PAT_MRT3847_142922C.1.pep
MGNCLVLQENVVKIVKTDGKVLEYKTPIKVEEVLIQFSGHAVSESLTVLRHLEPHTKLLRGQLYYLVPLPPSPKTNKKVRFAEPEVQDVHKSNVVRIKVVISKQQLQNMLQNGGFSVSKMLSLVHEEKGTEDLSQKSEDVSQGWKPALESIPEVK

SEQ ID NO: 190370 - protein, 49 aa, Glycine max
  Clone ID: PAT_MRT3847_142923C.1.pep
SFFQLLMNKSTINIICTCAWIINHAYDKISTADYNGLYQIIYYREFKSY

SEQ ID NO: 190371 - protein, 80 aa, Glycine max
  Clone ID: PAT_MRT3847_142924C.1.pep
VKTSYRISIKRFFQKQNSTVLLYKRIFSNFLSYQSDYSLVIDYLLSVIDYQLSYPNFVRGPLLDDVRPFFGPREVLGTHH

SEQ ID NO: 190372 - protein, 175 aa, Glycine max
  Clone ID: PAT_MRT3847_142925C.1.pep
LQPSNTGFPLLSATHTVKVGGPGGLTYQPDQLQNVPVGDVVVFEFLSQNHTVTQSPFDTPCDAIEGGMDSGFQANLNNTVVPAPQVAMQVMTDKPLWFYCKQGNHCGAGMVFSINPTAEKTQAQFQALAIAQKGNGKQTPITGGEPLPPPEAGAPAAPPLAATPAAPPVGSPAPD

SEQ ID NO: 190373 - protein, 105 aa, Glycine max
  Clone ID: PAT_MRT3847_142926C.1.pep
GPFFTQTRGCLECSVKNVKNRQQLFTFYTVQQMHTRSFTNPQFLKIGLTHKNKSPVESSTVATCPSRASEGEAHGCAFQRRKDARSRHQRLFVENVGKTEGNRSK

SEQ ID NO: 190374 - protein, 82 aa, Glycine max
  Clone ID: PAT_MRT3847_142927C.1.pep
KQRKDCPCVFRTCKRNLQDSGTLKRVAWGLDVGTRVWPNQYKSEFALSLPLNSFIYYCFIFIFRLFYLNQYLRSSLLREFVT

SEQ ID NO: 190375 - protein, 54 aa, Glycine max
  unsure (1)..(54): unsure at all Xaa locations
  Clone ID: PAT_MRT3847_142928C.1.pep
SFQISGNXSPLAMTLLCSFPEKQFSSDHHPHDISKHLLKPARVGPVRPRVWTAP

SEQ ID NO: 190376 - protein, 1265 aa, Glycine max
  Clone ID: PAT_MRT3847_142929C.1.pep
MDLKKSNRPWGFQLWLRVSVGPTGRPDCARKTPSGPEEGQQGLELPALNTGRNTTAALGWPVAGNRHTATTSRVHLSSSAKRLERCLRHMADQQATKSKAKENTETFSSLTSYPELRRSEFLIGGYVGAKASLLSTAPLSVTMTQELVARGDTLRLSAPRHSVTPSVIDEQRPMWSSAPFPEMSAFSDGDFSSLTSYPELRHVTCTHVSSRGGGPDDTRRYLTVIRTLLSSRGGGPDEKQRPEAAGPMTSRDQVWSFCTLVSSRGGGPDDTRRYLTVIRTLLSSRGGGPDDKQRPKTKFGHSAPLYHPEAVGPMIRGDTLRLSAPFCHPEAAGPMTSRDQVWSFCTLVSSRGGGPDDTRRYLTVIRTLLSSRGGGPDDKQRPSLVILHPSETKFGHSAPLYHPEAAGPMTSRDKIWSFYTLVSSRGGGPDDTRRYLTVIRTLLSSRGGGPDDKQRQNLVILHPSETKFGHSAPLYHPEAAGPMIRGDTLRLSAPFCHPEAAGPMTSRDQVWSFCTLVSSRGGGPDDTRRYLTVIRTLLSSRGGGPDDTRKYPSGGSNWAASSSTFLKNGFRGFRGFRNTSVKFPKTLGEGGAVSKCSAPLALLSLSNLLGKIVSVKKIKSKYFRNASVSDSVEILHRSSSFFTVLHPFFVRSSFFNGYFSKAKRADDFPFSDLELKEAVWNYRGDKCPGPDGLNFNFIKKIWDIMRPEFRRFVDEFYAHGSFPRGSNASFVALIPKLNHPQSFNDYRPISLISCMYKVIAKLLSNRLRSVMDGLIDERQSAFIKGRHILHGIVILNEVVEEARRSKKPVMIFKVDFEKAYDSVSWSFLDYMLFRLGFCPKWRSWISACLHSASICVLINGIPSKEFTPIRGLRQGDPLAPLLFNIVGEGITGMMRQAVHKNLFRTFLVGKNREPINILQYADDTVFFLEAVWDNIHAIKAILRGFELASGLKINFAKSQFGVIGDGVNWAREAANNLNCRQLECLFLYLGIPIGANPSSQLVWEPIITKFKSKLAKWAQKNISMAGKVTLINYVLNALPIYLLSFFKIPQKVVKKLISLKRNFLWGGDTDQKKIPWVKWTDLCLPKADGGLGIKDISKFNSALMGRWLWAFASDQQQLWARVITSKYGGWSYLQNARDKRGYSHWWRDIRNLYHQLDCSIFKDNLSWKTDDPHKVKEEVKSFFFHRFQEPIGQRPKIDGIRFQTVNLQQNNELLAPFMDEEIQKAIFKAAAKFFMKEGNSQKDCMDLMEISMLTKRKGWLGHQGY

SEQ ID NO: 190377 - protein, 147 aa, Glycine max
  Clone ID: PAT_MRT3847_14292C.1.pep
LHFLPFRYRAVTSAYYRGAVGAMLVYDMTKRQSFDHMVKWLEELRGHADQNIVIMLIGNKCDLGSLRAVPMEDAEELAQRENLFFMETSALESTNVETCFLTILTEIYRIHAKKSLTTSDDDIGGSGLLKGSRIIVPNQEIYNGGKK

SEQ ID NO: 190378 - protein, 130 aa, Glycine max
  unsure (1)..(130): unsure at all Xaa locations
  Clone ID: PAT_MRT3847_142930C.1.pep
KSFPNMINAPINYLSSSRVIISYSCFFHSIXLSRRTDSISPPPFLASLFLFPLLLHPLSLCRNVKAITVPQWLPQAGPWKGQSRRIKGNMTSNYPTALIYRDSMVAMVTQGAHAANSFLYRDNISQSVFA

SEQ ID NO: 190379 - protein, 46 aa, Glycine max
  Clone ID: PAT_MRT3847_142932C.1.pep
VYRHGLLGIMQRNADGSGADYSALETRRNMSVRRMPSPEYDKRLIM

SEQ ID NO: 190380 - protein, 80 aa, Glycine max
  Clone ID: PAT_MRT3847_142933C.1.pep
LVLYWLGMNAYNDHLLTCVNRIKDIASISDLVWILCKMSALYVCPTVLFTGLLQCFASCLAARFFANSSVLFCKERPVLN

SEQ ID NO: 190381 - protein, 241 aa, Glycine max
  unsure (1)..(241): unsure at all Xaa locations
  Clone ID: PAT_MRT3847_142934C.1.pep
MATDARAKFQNPEFRPDFHADLTVSSHDGLQFWQFMIAGSIAGCVEHMAMFPVDTVKTRMQALGSCPVKSVTVRHAXRPFSVYETCKKKFSEGNPSSDAVLTPMDMVKQRLQLGNSGYKGVWDCVKRVMSEEGFGAFYASYRTTVLMNAPFTAVHFTTYEAAKRGLMEVSPESVDEERLVVLSTAGAAAGGLAAVVTTPLDVVKTXLQCQGVCGCDRFTXGSXGGVVGAXVGXDGXGGVVX

SEQ ID NO: 190382 - protein, 59 aa, Glycine max
  Clone ID: PAT_MRT3847_142935C.1.pep
DTVPLPDLIAPLLSLSLTSYTTNLVRFSLSLPCLCPKFGGCNHHTYFAIKIPPKTVSPF

SEQ ID NO: 190383 - protein, 28 aa, Glycine max
  Clone ID: PAT_MRT3847_142936C.1.pep
THGGLRPNQFCNTVVSSFFMKSGFDSFE

SEQ ID NO: 190384 - protein, 54 aa, Glycine max
  Clone ID: PAT_MRT3847_142937C.1.pep
VRQHIMGLKEILFAKAIYDEHGGLNFDGASTPSLAFSIYHYESLLISHPLDLLK

SEQ ID NO: 190385 - protein, 49 aa, Glycine max
  Clone ID: PAT_MRT3847_142938C.1.pep
ASSWTNPMYLTSLCIFSTSWSSLYLYTPIFADQKKIPTKKTNSARSEDP

SEQ ID NO: 190386 - protein, 59 aa, Glycine max
  Clone ID: PAT_MRT3847_142939C.1.pep
LGIRLEQIPTYFYYTSVASTLFFFLQQIISHENNTEWVEELIIPMLPKIHTDYFPDQDE

SEQ ID NO: 190387 - protein, 43 aa, Glycine max
  Clone ID: PAT_MRT3847_14293C.1.pep
HMSEALDIIYRCGSHVRVLRIRGSAPKSVRANPRYVRVNTETK

SEQ ID NO: 190388 - protein, 62 aa, Glycine max
  unsure (1)..(62): unsure at all Xaa locations
  Clone ID: PAT_MRT3847_142940C.1.pep
TAAFFLFNFSNIFFTXRPFWSNVKTVTYKPNIFHSKIVYSQVQIINIQPQRGLKPPKNIQKL

SEQ ID NO: 190389 - protein, 69 aa, Glycine max
  Clone ID: PAT_MRT3847_142941C.1.pep
PGSPISEWGTPSFSLSSIRRRGTTPCKNQCPPATIYHVALFNNLKAPPFFQGGKNPPFLLKIVLLSHIP

SEQ ID NO: 190390 - protein, 80 aa, Glycine max
  Clone ID: PAT_MRT3847_142942C.1.pep
MLWSSHQNHGVFNYARHKRVRGMSRLHHQKVRTCPMSVRHYLDSYCRHHPLCLGVVLILWYKRGYVILASWESRGFLSLH

SEQ ID NO: 190391 - protein, 66 aa, Glycine max
  Clone ID: PAT_MRT3847_142943C.1.pep
KTLRFLSIFQSSPRNCCASEGGLGLILAFQRGIIVVVLSYGSSWQQPILIRWSSTPGIKSCTCIAS

SEQ ID NO: 190392 - protein, 180 aa, Glycine max
  Clone ID: PAT_MRT3847_142944C.1.pep
PHHAHKEYVPQLAKMKRGGGLVLVSQFMVELQGLKSVDGEDPPKILHLNPRIRGDWSRQPVIEHNTCYRMHWGTSQRCDGLPSGDEEEMLVDGYRRCEKWLPNDIIDSKESKTTSWFKRFIGREQKPEMTLPFPLVEGRMFVLTLRAGVDGYHINIGGRHVTLFPYRTWFTLEDATRLAI

SEQ ID NO: 190393 - protein, 69 aa, Glycine max
  Clone ID: PAT_MRT3847_142945C.1.pep
KLTPKSLITRGHPGPCRLHDVVHRHQLSFVESLPEQAMQKPLLIRGPSMLHLLGEPRTLCVTPPRRILR

SEQ ID NO: 190394 - protein, 57 aa, Glycine max
  Clone ID: PAT_MRT3847_142946C.1.pep
SQHSLIDFFLEAISLLEGSRMELKAGLQNQNVRATKYRKISCSRLHQCPSSRMFRGL

SEQ ID NO: 190395 - protein, 56 aa, Glycine max
  Clone ID: PAT_MRT3847_142947C.1.pep
CLTEYVFQKINYNFELGNEEKKLQPFKIIIPLIFNHLLDYPLRNMFNIFGIIILKD

SEQ ID NO: 190396 - protein, 65 aa, Glycine max
  unsure (1)..(65): unsure at all Xaa locations
  Clone ID: PAT_MRT3847_142948C.1.pep
DLHTIVECRGWRIRMPCICAVRIFHLTRXLDHKSYCYTIQLHFLLALPSIIVSTCTGTNPFISIA

SEQ ID NO: 190397 - protein, 167 aa, Glycine max
  unsure (1)..(167): unsure at all Xaa locations
  Clone ID: PAT_MRT3847_142949C.1.pep
GNWIVLLLANLVCLNNQVTELPTSLELCLELTNLQGPTYLITRLPEXLTIXSKLSKLDLEGTRLPVISENLITSGTMLTEFNASKNWLTGIPASIGGLSRLIHVYGHQTRIXHSLAQSYGCHSLTELYLMNNSISTLPVDIGALSRLGTLYLHSNQLKDYPVDACTL

SEQ ID NO: 190398 - protein, 85 aa, Glycine max
  Clone ID: PAT_MRT3847_14294C.1.pep
APQLEQVVRQIPSEAKGANLHRTPFFFPSHFTGLGTIPGLGWEGQQFFGNRTHLVQLSPSTEPALGPVLCSSVGAGLFPSGPAQR

SEQ ID NO: 190399 - protein, 68 aa, Glycine max
  Clone ID: PAT_MRT3847_142950C.1.pep
ASNAGGSPSHSSDVCSEIHGNSQYCTHADWWDANGQTPLCPRILGHEASAIVETVRNGVKHLQPGDHA

SEQ ID NO: 190400 - protein, 394 aa, Glycine max
  Clone ID: PAT_MRT3847_142951C.1.pep
MKKERAWPQFIRNLLLMVGSRSRPQLRRPTWIIVLLSIVCVFLIAAYVYPPPSPSSCSVFSSHGCGSGAFDLPPAAHTRELTDAEVESRVVINEILNSYPMHTKKPKVAFLFLSPGSLPFEKLWHMFFQGHEGKFSVYVHSSKEKPTHVSSFFVGREIHSEPVGWGKISMVEAERRLLAHALLDPDNQHFVLLSESCIPVRRFEFVYNYLLLTNVSFIDSYVDPGPHGNGRYIEHMLPEVEKKDFRKGSQWFSMKRQHAIIVMADSLYFTKFKHHCRPNMEGNRNCYADEHYLPTFFTMLDPGGIANWSVTYVDWSEGKWHPRSFRARDITYQVMKNIAYIDESPHFTSDAKRTVVITPCMLNGSKRSCYLFARKFFPETQDRLIQLYSNSTIF

SEQ ID NO: 190401 - protein, 59 aa, Glycine max
  Clone ID: PAT_MRT3847_142952C.1.pep
ARALFLNFFYNNMPSSLELVTCSCRAFYFIQEFRASFSPLNDDFILRSSLSLDVRVANS

SEQ ID NO: 190402 - protein, 164 aa, Glycine max
  unsure (1)..(164): unsure at all Xaa locations
  Clone ID: PAT_MRT3847_142953C.1.pep
LFLDLLFIHLRFFALCFLRFFRCVPLRSLSGSQGHEGKFSVYVHSSKEKPIHVSPFFVGRDIHSEPXWGKISMVEAERRLLAHALLDPDNQHFVLLSESCIPVRRFEFVYNYLLLTNVSFIDSYVDPGPHGNGRYIEHMLPEVEKKDFRKGSQWFSMKRQHAII

SEQ ID NO: 190403 - protein, 91 aa, Glycine max
  Clone ID: PAT_MRT3847_142954C.1.pep
SRNIAFYQSNQSYSQFFFYFSFSSSLYFFFTTQMTKKILCFLTFFVPLIFFTQTRYVGIDCNRQTPLTHSSTISLGLRHVFVSISRCHSKD

SEQ ID NO: 190404 - protein, 83 aa, Glycine max
  Clone ID: PAT_MRT3847_142955C.1.pep
EFYLRDNVTLLEPTPTVFIRQCLSSSNALGLHHGTNSYTYKAKVPYDLLRRKQTAEKRKESELWWLSHNTTQSFLQQYFDVAV

SEQ ID NO: 190405 - protein, 94 aa, Glycine max
  Clone ID: PAT_MRT3847_142956C.1.pep
ARANLRLEGNHSSLCSLLSTLCPCRCVISFSHTPIHHLRSSSSPSISYFSFFSFFLIYYLFIFVSSHCAFFDFFAASLLDPSLDHSENSVVEFE

SEQ ID NO: 190406 - protein, 226 aa, Glycine max
  Clone ID: PAT_MRT3847_142957C.1.pep
PRVRLVACGEYHTCAVTYSGDLYTWGDGAHNSGMLGHGNEVSHWIPKKVGGNLEGLRVLYVSCGPWHTAIVTSAGQLFTFGDGTFGALGHGDLSSANIPREVENLKGLRTTRVACGVWHTAAVVEVVNESVESSTRSSSGRLFTWGDGDKSQLGHADREPRLVPECVNALSTENICRVACGHSLTIALTTSGRLYTMGSTAYGQLGCPASDGKVPTCVEDIISDSF

SEQ ID NO: 190407 - protein, 53 aa, Glycine max
  Clone ID: PAT_MRT3847_142958C.1.pep
SQSTNPRMHGPVSFNQPALPNKHTAFFDRDNTTVEKPAPSTQMKLKGMMYRKC

SEQ ID NO: 190408 - protein, 71 aa, Glycine max
  Clone ID: PAT_MRT3847_142959C.1.pep
RNLPGTPDPNAEVIALSPTTLMATNRFVCEICNKGFQRNQNLQLHRRGRNPPWKLRQRGSNELMKKRVMCA

SEQ ID NO: 190409 - protein, 168 aa, Glycine max
  Clone ID: PAT_MRT3847_14295C.1.pep
AFLTAARRRQKGLKGMVIRSSSIIPEIREAIFRCLVCGFCSEPVPVERGRITEPTICLKEECQSRNSMTLVHNRCRFADKQIVRVQETPDEIPEGGTPHTVSLLMHDKLVDTAKPGDRVEVTGIYRAMSVRIGPTQRTVKSLFKTYIDCLHIKKTDKSRMLVEDAMDC

SEQ ID NO: 190410 - protein, 55 aa, Glycine max
  unsure (1)..(55): unsure at all Xaa locations
  Clone ID: PAT_MRT3847_142960C.1.pep
IXHAHXPTLQRIYQSITDTAKNLSINQKLSYMIILSTFMIITLKXIFNIIFDWSS

SEQ ID NO: 190411 - protein, 56 aa, Glycine max
  Clone ID: PAT_MRT3847_142961C.1.pep
DEASYRRQWKCSGVLGLANSLKLGTLFKRLSNMVNIDILSIHGYFGPADFLRMADT

SEQ ID NO: 190412 - protein, 171 aa, Glycine max
  Clone ID: PAT_MRT3847_142962C.1.pep
MLVNVIHPMPLCHHSLKDEISSPISARIFELCEPDFFPDTLQNSDVTSSSNCCHEEKSSYATTISPPLDLVDNKININNNSNIVTTTSSSTTTTSTTTNNNNNNTTNSNNLSILFDTQDEIDNDISASIDFSSCRSLVVPPLLSISTQQDQFDFSSAQPQVQLSAAAGSVK

SEQ ID NO: 190413 - protein, 49 aa, Glycine max
  Clone ID: PAT_MRT3847_142963C.1.pep
VMLSYYLPLDHLRIERPYSEYQDSSVDVVIEVFASMIQHSPYLYLSVPL

SEQ ID NO: 190414 - protein, 71 aa, Glycine max
  Clone ID: PAT_MRT3847_142964C.1.pep
YWSLGRVDVSGSLTSVSGERLFLGFECDFKVRQQCYSCSRLALYVSIAICEYENYLCRDSLLYCIYILYKE

SEQ ID NO: 190415 - protein, 63 aa, Glycine max
  Clone ID: PAT_MRT3847_142965C.1.pep
VQNWGAGFPTPPKKVRKKLVSSIECLKAAMLNAVPIVRASDAGQDDPKQHINASLSFFLAPYP

SEQ ID NO: 190416 - protein, 161 aa, Glycine max
  Clone ID: PAT_MRT3847_142966C.1.pep
ARNSARERRKHVEHELDLVQQEIPECRKKSVVAEQAKTQVLQELDSTKRLIEELKLNLERAQTEERQARQDSELAKLRVEEMEQGIADDSSIAARAQLEVAKARYTSAITELTSVKEELEGLRGEYAALDVEKDEAIKRAEGAVASSKQVEKTVEDLTIEL

SEQ ID NO: 190417 - protein, 49 aa, Glycine max
  Clone ID: PAT_MRT3847_142967C.1.pep
NFTHFAINAALRISASPAKKKKVLMVNTNSGGHAIMGFYFAKRLFGAGH

SEQ ID NO: 190418 - protein, 90 aa, Glycine max
  Clone ID: PAT_MRT3847_142968C.1.pep
KIDKGDVGDECTLRGVKFISLSLSSFGNFSRVEVEQKVEELRGLVKASEHSKGYVLYLGDLKWVLDFRASGSQGRGCYCPVDHMVGEIGN

SEQ ID NO: 190419 - protein, 139 aa, Glycine max
  Clone ID: PAT_MRT3847_142969C.1.pep
TSELVANPSIIFMDEPTSGLDARAAAIVMRTVRNTVDTGRTVVCTIHQPSIDIFESFDELLLMKQGGQEIYVGPLGHHSSHLINYFEGIQGVNKIKDGYNPATWMLEVSTSAKEMELGIDFAEVYKNSELYRRNKALIK

SEQ ID NO: 190420 - protein, 56 aa, Glycine max
  Clone ID: PAT_MRT3847_14296C.1.pep
LTHRFFQSCLKCINWSTHGHSHWYILLEWSQLVFLSRFWEPSPKACNVHNERTQVF

SEQ ID NO: 190421 - protein, 69 aa, Glycine max
  Clone ID: PAT_MRT3847_142970C.1.pep
QEKEGDFHIYFYGILTSKMNRKGLSTSAHPRNHGNAPELIIKPLISTLKRNTLETPTLWNLSSTPKKNF

SEQ ID NO: 190422 - protein, 77 aa, Glycine max
  Clone ID: PAT_MRT3847_142971C.1.pep
TYYILSYITSFGGIRATPTRQERGPLAAMQRIKELGKRSGTVRCVRILIQVIAERDAMRLNSHALADTMQCVVMTTQ

SEQ ID NO: 190423 - protein, 74 aa, Glycine max
  Clone ID: PAT_MRT3847_142972C.1.pep
RSLILRAAALFFFFFFFFFFFFFFFFFFFFFFFLGGKPPLNLRGKQTNHKNSPPSLLRKLKGGGTTFFKRYQIH

SEQ ID NO: 190424 - protein, 56 aa, Glycine max
  Clone ID: PAT_MRT3847_142973C.1.pep
DSAMMFHRVFARFLKRIVMIGGISFDKGSNWCHIHQDQDQVSTANRYTQVTASSKD

SEQ ID NO: 190425 - protein, 65 aa, Glycine max
  Clone ID: PAT_MRT3847_142974C.1.pep
MTLSKMFLCVTVSLSAMVLCDTTCEYNVSVHSTLDHRDVRTQLPKIKMPDEWLPKEAAYHIIHDE

SEQ ID NO: 190426 - protein, 53 aa, Glycine max
  Clone ID: PAT_MRT3847_142975C.1.pep
MIHVKMLRYSCNIIGNACVIMLCRFKVCIDSDVYIYICIYIYRYICYVFNYMK

SEQ ID NO: 190427 - protein, 124 aa, Glycine max
  Clone ID: PAT_MRT3847_142976C.1.pep
SMHKPTILATSNTKEMAGFPPVEIGTRGTVGSLLMQEIEYYSRQEFNSQDWSQKNKSQTINMGSSVSTNSRPTTVSRVESTKKKQSSKLLPKMCSVVDVSDNSKPKGTSAFSYKNLKSDIKHHP

SEQ ID NO: 190428 - protein, 40 aa, Glycine max
  Clone ID: PAT_MRT3847_142977C.1.pep
TKTKGATWVELYIIGHTICISNMGHITNERQEFSSKLKEV

SEQ ID NO: 190429 - protein, 863 aa, Glycine max
  unsure (1)..(863): unsure at all Xaa locations
  Clone ID: PAT_MRT3847_142978C.1.pep
MASRSYVNLLDLAGGLLDIPHMPRTIPRIMTVPGVISDLDVYGRYDGDSDVSSSGYRERKILVANMFCSRTEILSXTGEWETSPLSPDXDWIKIXLKDGFSCDTEVIYVGSLKVEIDAHEQEEVAQKLLEDFNCIPTFLPHDVQKKFYYGFCKQQLWPLFHYMLPMFPDHGDRFDRSLWQAYVSANKIFADKVMEIINPDDDFVWVQDYHLMVLPTFLRKRYNRVKLGFFLHSPFPSSEIYRTLPVRDEILRGLLNSDLIGFHTFDYARHFLSCCKRMLGLDYESKRGHIGLDYFGRTIFIKILPVGIHMGRLESVLNLQSTSAKLKEIREEFKGRKVILGVDDMDIFKGISLKLLAVEQLLQQNQDLKGKVVLVQIVNPARSSGKDVQEAKKETYLIAQRINDTYSSNNYQPVILIDRPVPRFEKSAYYAVAECCIVNAVRDGMNLVPYKYIVCRQGTAQMDKALTRKSDSPRTSMLVVSEFIGCSPSLSGAIRVNPWNIDAVADALYSAVTMNDSEKQLRHEKHYRYISSHDVAYWARSFVQDLERACKDHYTKRCWGMGLGLGFRVVSLSPGFRKLSVDHIVSAYKRTGRRAIFLDYDGTIVPKSSINKTPSPEVISVLNDMCNDPKNTVFIVSGRGRDSLSKWFTSCKMIGLAAEHGYFLRWSKDSEWETSPLSPDLDWKKIVEPVMQLYTEATDGSNIETKESALVWHHQYADPDFGSCQAKELLNHLESVLANEPAVVTRGRHIVEVKPQGLNKGWVAEKVLSNMVNDGNPPDFVMCVGDDISDEDMFESILRTVSCPSLPVVPEIFACTVGQKPSKAKYYLDDPADVMKLLQGLGASSKPKPRHLAQFQVSFESTV

SEQ ID NO: 190430 - protein, 173 aa, Glycine max
  unsure (1)..(173): unsure at all Xaa locations
  Clone ID: PAT_MRT3847_142979C.1.pep
MASRSYVNLLDLAGGLLDIPHTPKTIPRIMTVPGVISDLDVCGRYDGDSDVSSSGYRERKILVANMLPLQAKRDIQTGKWCFSLDEDSILLQXKDGFSCDTEVIYVGSLKXEIXLMXQKEVAQKLLEDCNCIPTFLPHDXQKKLYXGFCKQQLWPLFHYMLPMVPDHGDXFDR

SEQ ID NO: 190431 - protein, 78 aa, Glycine max
  Clone ID: PAT_MRT3847_14297C.1.pep
FDQMGVRNLVSWNTMIDGYMRNGKFEDALQVFDGLPVKNAISWTALIGGFVKKDYHEEALECFREMQLSGVAPDYVTV

SEQ ID NO: 190432 - protein, 82 aa, Glycine max
  Clone ID: PAT_MRT3847_142980C.1.pep
MCVGDPRVREDMFESILRTVSCPSLPVVPEIFACTVGQKPSKAKYYLDDPADVLKLLQGLGASSKPKSRHLAQFQVSFESTV

SEQ ID NO: 190433 - protein, 42 aa, Glycine max
  Clone ID: PAT_MRT3847_142981C.1.pep
DCCLTVEESLNSVYRQGRVSDKSIGALEIKIVEQGTFDKLMD

SEQ ID NO: 190434 - protein, 69 aa, Glycine max
  Clone ID: PAT_MRT3847_142982C.1.pep
NPQGNWGHGCGVPPQNWSPHAKCFQTKGLGSKIWGHLISPSHFGFDYFPTVQNFLIPLGKKGPFFFFFF

SEQ ID NO: 190435 - protein, 120 aa, Glycine max
  Clone ID: PAT_MRT3847_142983C.1.pep
RNIGGVDADLSCPMCHGDDVTTTHLFSCRFGYSVWQRCYQRLGFEQVLPGSSCAYFWHHQGYGHWMTFWLVVIWLIWLQRNTIIFRGKQACVQEVVDSVVFKTWSWVKAYYARDTFSFSD

SEQ ID NO: 190436 - protein, 50 aa, Glycine max
  Clone ID: PAT_MRT3847_142984C.1.pep
KRSFPLPRSPMSNRRVFSKYPQNAKQHDSPSLWSAQRVIFFPSKKWPTRK

SEQ ID NO: 190437 - protein, 82 aa, Glycine max
  Clone ID: PAT_MRT3847_142985C.1.pep
KCAVFSVPITLQGRLVSRLTIPTGPQILIYLLGISQEFGTAGKPHKPAFCVPQGAYRYSWNAASSAGSGGCGVIRLEECVIP

SEQ ID NO: 190438 - protein, 90 aa, Glycine max
  unsure (1)..(90): unsure at all Xaa locations
  Clone ID: PAT_MRT3847_142986C.1.pep
VNDHGWPTTNKNYPADDSLWMAELPYXCSAANATLSLQKTALVTGLDTNEPSYISGLPKRVFRTDNHNFANLQRLGNKAGPASTHPSHAE

SEQ ID NO: 190439 - protein, 97 aa, Glycine max
  Clone ID: PAT_MRT3847_142987C.1.pep
MFTTPIMCSVKRQLTLCKAVSQPAIHPPIILTKRGLSISFPTTFSLSLAGEDANAAILDADDDEELLEKVKRDRKKRLERQGMIKSSSKETGLILQK

SEQ ID NO: 190440 - protein, 208 aa, Glycine max
  Clone ID: PAT_MRT3847_142988C.1.pep
GSRENEIATFDSSLLHCDVDQSHLVDTGVSSSSVSAGNMETKLTTSTVSVDVEPVNNSASQYILENISSTSCEIVDVCVLSPSRIVSTHEVTDHCEVQGVTPVGSASIDEKEKAEAKIANEATIVNEASCEAKLANEASSEAKIVNEANCEAKIENEAGPEAKVVNEASSEAKIANEASTALLVGSSEQETAPCPETEIHFSDTSGQL

SEQ ID NO: 190441 - protein, 104 aa, Glycine max
  Clone ID: PAT_MRT3847_142989C.1.pep
PPKVNPRAETVSSPPVDVKRKPPPNEKKVVGENVKAVVKKEKIPGPVGGCFWGVPLTPFLWAGFWASDLKEIFYIPRGSPLFPFGFSPPGGGGNSNLGGGFLGV

SEQ ID NO: 190442 - protein, 77 aa, Glycine max
  Clone ID: PAT_MRT3847_14298C.1.pep
QVHGDYFQHVLQLLSSCSPDVLESIRQSILLSGQSLKSVEPLVIKAVVESLVEKSVEDLSSQYCILPFIMAMCGSCR

SEQ ID NO: 190443 - protein, 128 aa, Glycine max
  unsure (1)..(128): unsure at all Xaa locations
  Clone ID: PAT_MRT3847_142990C.1.pep
RRHRPGRNNRPDRPAYLAGGRPKKXGGGTRKTTPTKPPNASRTRRADTENGKKSNENKTYTSKHGRPQEKPPAEEGTQRRKELSHGREGRRKQETNRKAGEGTHKREKKSEQANPAKNQEPSPGGGKP

SEQ ID NO: 190444 - protein, 52 aa, Glycine max
  Clone ID: PAT_MRT3847_142991C.1.pep
KPLPKPGLILRPKVEQPHLRALIHSQFGRHPIFKDVGHALEQKGEINVGKPK

SEQ ID NO: 190445 - protein, 249 aa, Glycine max
  Clone ID: PAT_MRT3847_142992C.1.pep
PTVYHGGGVWKEFFLYPTPAVRHILIAALGIHFFQQASGIDAVVLYSPEIFKKAGLESDGEQLLATVAVGFAKTVFILVATFLLDRVGRRPLLLTSVGGMVFSLLTLGLSLTVIDHSRAVLKWAIGLSIGMVLSYVSTFSVGAGPITWVYSSEIFPLRLRAQGAAMGVVVNRVTSGVISMTFLSLSNKITIGGAFFLFGGIAMCGWIFFYTMLPETQGKTLEEMEGSFGKFASWSKGKDGDNGDIQLAN

SEQ ID NO: 190446 - protein, 94 aa, Glycine max
  unsure (1)..(94): unsure at all Xaa locations
  Clone ID: PAT_MRT3847_142993C.1.pep
MRGMAAKPASTDRCVGLNKGYGFTYKDYVALPLYRRGITSKRVHFVRDLVREVAIIAPYQXCITEVLKVGKDKRALNVAERKLRTHTRAEMNRV

SEQ ID NO: 190447 - protein, 56 aa, Glycine max
  Clone ID: PAT_MRT3847_142994C.1.pep
GISMELRPKCLLSRFSLHLFYVASLFSFLTAKLLYSSNLTFYVITTHILFHISETK

SEQ ID NO: 190448 - protein, 128 aa, Glycine max
  Clone ID: PAT_MRT3847_142995C.1.pep
IALTIVTGIILGFAQTALNMQPRACLPKIPERLIQAKGFLAPALMRYRKDSPTIILSNHTQWQLSFYTVGYIASSCILGRVKPSSILPLGITGQPVHFISISQTTLEYIRVPLGTRLLGKLVQRMISN

SEQ ID NO: 190449 - protein, 130 aa, Glycine max
  Clone ID: PAT_MRT3847_142996C.1.pep
MKYKSSVTAISIKTIHLDRMAAPTPVAIGTRGTIGSLVKKEIEYFSMFELGNSQRPQPHFVNIVSGRGYSTSRSSFWVLLMTGKRRKRRDNNVFLPKMCSVAEVVESNKWNRVPGYSYRILKDDINNFQL

SEQ ID NO: 190450 - protein, 89 aa, Glycine max
  Clone ID: PAT_MRT3847_142997C.1.pep
CVFNSLLRNQPSTKSLRTGRLSLVKTGFYSLPHYVFVTSHNTLHTCQGLQHAPSTTLYWRCPTQLSASHAAKCTFLTLLLRREDLYQWK

SEQ ID NO: 190451 - protein, 100 aa, Glycine max
  unsure (1)..(100): unsure at all Xaa locations
  Clone ID: PAT_MRT3847_142998C.1.pep
AIPXXGFFLXMIXSTXXTSXXCFLPSYGPVAGRRXXISIFEAIFFPITRSRQFXXTVYIPLLNPPAEHXCVDQVHPPMQICRPSXHPXSSPPHYTXPSPP

SEQ ID NO: 190452 - protein, 72 aa, Glycine max
  Clone ID: PAT_MRT3847_142999C.1.pep
LLNYYSYLILNHHKWWWWWNNLQPLTTFVDLVLNPLKPFLKKPLNFSFTTLNLELANLFFLLHLRVIKPPLL

SEQ ID NO: 190453 - protein, 167 aa, Glycine max
  Clone ID: PAT_MRT3847_14299C.1.pep
SRMLKSCLDVSSMRLGVPFIAPRQLGAVESKSGRPSLPSIAGRTGQSGARFLSSHGGAPRCSAALRTVRCPLPTVGSATCPALIARPTVGPDRPLAHRAVRCTPDSPVNFSRTPSANFPERPLRPGQPGAPYAVRCTSGQSGAPDRDSLLAVHSQVFSSLLLSVSST

SEQ ID NO: 190454 - protein, 634 aa, Glycine max
  unsure (1)..(634): unsure at all Xaa locations
  Clone ID: PAT_MRT3847_1429C.1.pep
MKCFSVSLASLWVLLALFSLSVSSQNVSESEQQQASIPPRGWNSYDSFCWTISEDEFLQSAEIVSQRLHDHGYEYVVVDYLWYRRKVEGAYHDSLGFDVIDEWGRMVPDPGRWPSSENGKGFTEVANQVHSMGLKFGIHVMRGISTQAVNANTPILDTTMGGAYQESGRVWYAKDIAIPERACAWMSHGFMSVNTKLGAGKAFLRSLYEQYAAWGVDFVKHDCVFGDDFDLNEISYVSEVLKEFDRPIVYSLSPGTSVTPAMAKDVSGLVNMYRITGDDWDKWEDVKAHFDVTRDFSTANMIGGKGLKGNSWPDLDMLPFGWLTDPGSNEGPHRFSKLTLEEKRTQMTLWSLAKSPLMYGGDVRRIDPTTYELITNPTLLEINYFSSNNMEFPYITSSINLKHPGGKERRLKKGIHSLGLTSCSESKARGWSIESLNQDLERICWKKGLENKHQAPFCVHKRELQFRLDGVSMYQEDYRGKHQLVATDRMKFCLDASPRRKVTSKEFKRGTFSPCRWDSNQIWELNSNGTMVNSYSGLCATVEYIEANVNSGGIRSWIATGRTGEIYLAFFNLSEQKTEIYAKTSYLAKVLPDKSITSCKGEEVWSGXDVITTQGTISMNVEIHGCALFVLNCN

SEQ ID NO: 190455 - protein, 173 aa, Glycine max
  Clone ID: PAT_MRT3847_142C.1.pep
SGFRKLTSFPPLNLTSLETLELSHCSSLEYFPEILGKMENIRELSFQWCESLVAVDESIGFLKKLKILNAAGCRKLTSFPPLNLTSLETLELSHCSSLEYLPEILGEMENIRELSFQWCESLVAVDESIGFLKKLKILNAAGCRTLTSFPPLNLTSLEHLNFLTVQSWYFQNI

SEQ ID NO: 190456 - protein, 54 aa, Glycine max
  Clone ID: PAT_MRT3847_143000C.1.pep
DELKVHQKDIKDQCLKSGPMIELVKTLKFNDLIMVEPMMIKFIIFNINNVNKYK

SEQ ID NO: 190457 - protein, 329 aa, Glycine max
  unsure (1)..(329): unsure at all Xaa locations
  Clone ID: PAT_MRT3847_143001C.1.pep
MFVASLACSCTYPSLLLRSLCPTFTSWSYQLKQLNRKKNRILASINGNSAYDVGGGYPELEQNQNGKLHSDMSSQREALLKGGDQVISVLEEMITLLEDMNMDEESEKVAVELAAQGVIGKRVDEMESDFMMALDYMIQLAENDQDDKRKSLXEVIKETVLSHLTKKCPPQVQVIGLLCRTPKKESRHELLRRVAAGGGVFKGENELKIHIPSANLNDIANQADDLLEGKATRPVAPGRSRRGRLERRRGEAGAKPGGEFMDERNHRGFXLLPQPEVXFLAKLVALKPGKNVLDMLRNVMQGKDETKETTVDSILFLSLRWEPWPNWWS

SEQ ID NO: 190458 - protein, 105 aa, Glycine max
  unsure (1)..(105): unsure at all Xaa locations
  Clone ID: PAT_MRT3847_143002C.1.pep
QVVPFTTPWNCDSSKRSXCQLCIDLRGGGLLEDSTGDRITLMQNTAIRNWLRCXAWMNGXPMVKIVMFGDATGKRSDCVLXVHVAVTNSISPEAYDACACTESDL

SEQ ID NO: 190459 - protein, 69 aa, Glycine max
  Clone ID: PAT_MRT3847_143003C.1.pep
EVMGAASDSIPQYWSMFRYIRYTQLSVQAAHDDKRCIYVLELSGTPGSDNRAPRNSTPTKIISRTLDIS

SEQ ID NO: 190460 - protein, 48 aa, Glycine max
  Clone ID: PAT_MRT3847_143004C.1.pep
SKTLVFSHFFFYPPLYLFSPPPLFNHFFFFFQHIFCIPPWGVKLLMLD

SEQ ID NO: 190461 - protein, 101 aa, Glycine max
  Clone ID: PAT_MRT3847_143005C.1.pep
RPKFPFLKKKRDQPYPLLEKRGPLPTPQTFLPQPRCFIKGGKTHILGILISFFHPKKPRGAQKTRGGLPSPQQGICPEPFWAQIWENPGAPGQWFNPPRVN

SEQ ID NO: 190462 - protein, 39 aa, Glycine max
  Clone ID: PAT_MRT3847_143006C.1.pep
VQTIIRDSTYIGNKHGQMLYDSTLSTCVQHLKDTFASQI

SEQ ID NO: 190463 - protein, 396 aa, Glycine max
  Clone ID: PAT_MRT3847_143007C.1.pep
QKIEEFSVTFNKVLCNNASLLQFVLDLSYVLDKASEFRFNVLGYKGTEAESNSPDCIDKIALPENKLVHDNSSGERYQNGCSHILNPCSNPEVPDDGNLVSGYKADAASQKLSIEEFEELKLEKEKVVIDLSNCTENLEMTKSQLLDTEQLLAEVKSQLASALKSKSLAETQLKCVAESYNSLETRAQVLETELNHLQIKIESLENELQDEKRAHEVAMARSKELEEQLKRIECSAADDDHKTPHERNLTAAAEKLAECQETILLLGKQLNSLRPQTEPNDSLYSKINPKDEGFTEDEHTTNQNFQELGQLEMDSSTSAFVQRLSSESPLHFSNSLFSPSDSESTIPARSPVQHSKSKPKHRPTKSASCSVSSATTPEKHARGFSRFFSPKGKSGH

SEQ ID NO: 190464 - protein, 40 aa, Glycine max
  Clone ID: PAT_MRT3847_143008C.1.pep
YRETLQEKTVCFKLMVQTIYFPDTKSNSVLKTLELELFSS

SEQ ID NO: 190465 - protein, 256 aa, Glycine max
  unsure (1)..(256): unsure at all Xaa locations
  Clone ID: PAT_MRT3847_143009C.1.pep
MAEDRSLPPRASIPSADNSVWADVSPLLQAACQDLQEGELIHGDNFNLFAAMSALEIMDPKMDSGIACTYYSLDEAIENGVAPVPISADKTTDVRCMIDIMDHLLACEATWHKGHSLAQTVYSCLYLLRPERTSSHALLHSYCKVIRATCKAILSVVSQARTHEEEDLFTMAYGLPLSGDGDEKCLSMLNAVEETISRQLRACKVSSSKRRVPEDIEPLQNNPDLEEGYCKALXCRLRFRKHFYHVXMGIKRPRGR

SEQ ID NO: 190466 - protein, 755 aa, Glycine max
  Clone ID: PAT_MRT3847_14300C.1.pep
MADPIPAPPRSATDLFSDPLDAHPLWFKPASFLSPDFDSESYISELRTFVPFDTLRSELNSYLSFLNHELIDLINRDYADFVNLSTKLVDVDAVVVRMRAPLRELRDKIEQFRGSVEVSLVAIKNRLRQRSEVASARETLELLLDAFHVVSKVEKLIKELPSVPTDWSNGDVNLSERNNLSNGVSAQHVENEMIIRETQSMLLERIASEMNRLKFYVTHAKNLPFIENMEKRIQNASVTVDASLGHCFVNGLEHRDATAIFNCLRAYAAIDNTKSAEEIFRVTVVAPLIQKIIPHGSSAVVAGSFGDGLENDYQLIKEFIDKDCKFLLEISSAENSGLHVFDFLANSILKEVLSAIQKGKPGAFSPGRPTEFLKNYKSSLDFLAFLEGYCPSRSAVAKFRSEAIYTEFMKQWNIGVYFSLRFQEIAGSLDSVLTTSSLVPVQNSDAGEANYQGLTLKQSVTLLESLRSCWREDVLVLSCSDRFLRLSLQLLSRYSSWLSSGLTARKNHNTSTSPGCEWAVSAVIDDFIFVIHDIRYLEEQVHGDYLQHVLQLLSSCSPDVLESIRQSILLSGQSLKSVEPLVIKAVVESLVEKSVEDLRQMKGITATYRMTNKPLPVRHSPYISGVLRPLKAFLGGERATRYLVSETRNEILLCAATEITDRYYELAADLVSVARKTESSLQKIRQSAQRRAGASSDILDNNVSDTDKICMQLFLDIQEYARNLSALGVEAANIASYRSLWQCVAPADRQNTINL

SEQ ID NO: 190467 - protein, 43 aa, Glycine max
  Clone ID: PAT_MRT3847_143010C.1.pep
PHAPTKQSTCHISYCQYSIGQVKGMHRIVGQLSVRAPASAPFC

SEQ ID NO: 190468 - protein, 92 aa, Glycine max
  Clone ID: PAT_MRT3847_143011C.1.pep
YYDAAVSYPPALYVSAPPPMGYPCDPTAVGYPQQRVEETTGDERIRIFVLLDSLYFIHLVDAVLFPCILNFFMMYLGIIIRFFLLLIRVKLS

SEQ ID NO: 190469 - protein, 63 aa, Glycine max
  Clone ID: PAT_MRT3847_143012C.1.pep
KKTTISHSRALVLFIPLSQIVSKQAISFVFLKKGVLYDSQKYIISLRLKCIKNKNLVSCKLKL

SEQ ID NO: 190470 - protein, 108 aa, Glycine max
  Clone ID: PAT_MRT3847_143013C.1.pep
SSWNKILNILKLDINESEPNVAAKLMKNKLCSFNGHLDDICNVQSAWFVLTKELRRIMIESIEKILLPAYGNFIGRLQDFLGNQAYEHIEYGMFDIQDRLNNLFLVRE

SEQ ID NO: 190471 - protein, 118 aa, Glycine max
  unsure (1)..(118): unsure at all Xaa locations
  Clone ID: PAT_MRT3847_143014C.1.pep
ILFGVLFCVVMRCQDFIITQTRARSLYKYYLGLFVHFIFTFVIIIFCWLDFKFCNFTYVYIRKKLRLCSSTPESVWSYLFRGKEEECLSIFLVYVNMRIFGFQFVAIRLYFXILNYKY

SEQ ID NO: 190472 - protein, 65 aa, Glycine max
  Clone ID: PAT_MRT3847_143015C.1.pep
TFTINAPCVLGLQGRGDWYLDAVAYTLRYQRSESRPTKVHSSSRGSAAPDTKCTSSKDGSVTNVN

SEQ ID NO: 190473 - protein, 33 aa, Glycine max
  Clone ID: PAT_MRT3847_143016C.1.pep
FSYLEYSSVQSECWIIFKRKVVDTTPFMTEHPL

SEQ ID NO: 190474 - protein, 86 aa, Glycine max
  unsure (1)..(86): unsure at all Xaa locations
  Clone ID: PAT_MRT3847_143017C.1.pep
XRPRAVASEYGWSTYPVTLFLRHTLAKASDGPLARLVAFLTSIPAQFGIAFWDKAYPNLIQCLMSPNIHKDYYRILSSLAISNFPN

SEQ ID NO: 190475 - protein, 46 aa, Glycine max
  Clone ID: PAT_MRT3847_143018C.1.pep
ECENYPLQFSIRSETAMKLNTLISATIDFLRLGWHSILLLSLCPIY

SEQ ID NO: 190476 - protein, 68 aa, Glycine max
  unsure (1)..(68): unsure at all Xaa locations
  Clone ID: PAT_MRT3847_143019C.1.pep
MVILALVSVSYMIIDSRVVEGRTLPKXDLLPSKGDIPTAGPLTLVAPLTNLPVTLSPVTELPSVPKVP

SEQ ID NO: 190477 - protein, 37 aa, Glycine max
  Clone ID: PAT_MRT3847_14301C.1.pep
NFYFNYLLVLTTKKIYLKIISYKLVINYQLFFYYKLS

SEQ ID NO: 190478 - protein, 108 aa, Glycine max
  Clone ID: PAT_MRT3847_143020C.1.pep
IFSSYILETESSAQPSSSFLLSKPPPKHHSYPLKAKVSVSLTSAHVKPSARRVTQKAPRRETFETKGTGKKILKNKTQPNKPYFVTCESYSRAVFTKLTEQHSDTCSS

SEQ ID NO: 190479 - protein, 53 aa, Glycine max
  Clone ID: PAT_MRT3847_143021C.1.pep
MDLAEKLFFAAFLILSVAIDGMQADTMVTGTVFCDQCKDGQRSLFDYPVNGQI

SEQ ID NO: 190480 - protein, 76 aa, Glycine max
  Clone ID: PAT_MRT3847_143022C.1.pep
KTTSCLLRVYIWTLEYLEKGRNKSMHVSCMVPYINFISRLIYNEKGRKLVFFFFQYEDKNIIIYIISHVLLLRHYL

SEQ ID NO: 190481 - protein, 76 aa, Glycine max
  Clone ID: PAT_MRT3847_143023C.1.pep
MLLLGIHSPPVDLHCTVCPSLWCATDESSVQASKTFQHTAMMLFGKNSEGLQAHMPFGLTDCESPFNPVANSSSRA

SEQ ID NO: 190482 - protein, 58 aa, Glycine max
  Clone ID: PAT_MRT3847_143024C.1.pep
KEPIKNYFRFFGFGKLLKKKKGGIIIFNFFLRAFHLQKKKFFWAKKIRSFIFFPNHNV

SEQ ID NO: 190483 - protein, 33 aa, Glycine max
  Clone ID: PAT_MRT3847_143025C.1.pep
LQDSPRDNQFRADTAPSRALNNLFDSHHHKGAH

SEQ ID NO: 190484 - protein, 43 aa, Glycine max
  Clone ID: PAT_MRT3847_143026C.1.pep
TPPGQLLKYNPTSNDTIIVLDNVAFANSFTLSKDQHYLVLSKT

SEQ ID NO: 190485 - protein, 49 aa, Glycine max
  Clone ID: PAT_MRT3847_143027C.1.pep
MSTRLVVVVKSVEMHHEALTEALPGDNVGFNVKNVAVKDLKRGFVASNS

SEQ ID NO: 190486 - protein, 276 aa, Glycine max
  Clone ID: PAT_MRT3847_143028C.1.pep
MAPAREENPYEGGGDGGFGKFRKRPFRRSQTTPYDRPPTALRNPNRNNGWLSKLVDPAQRLIASSAHKLFASVFRKRLPPPQEAVQEVRDHHQETALIIANESSGKQVVGETSVQINCSDGDGLTELEKLLKQKTFTRSEIEHLTELMRSRTVGSSVVEEGTSTEVVPSDPILPREQKEEYPKTPDPENAIENQLVSTPYVTKAISTVSVDDVASPAELAKAYMGSRPSKLSPSMLGLRSSPREDPFLLKNQHVAQKSPVKSIVPKATNLARVHEN

SEQ ID NO: 190487 - protein, 82 aa, Glycine max
  unsure (1)..(82): unsure at all Xaa locations
  Clone ID: PAT_MRT3847_143029C.1.pep
KNVVRAHIFALFNKNKKPGHSSXKNNGLFKVDGSKSYHIGFPGIKAGHSSLLSLKNIKTQGLSQSTRRGFFLSSLRPLIFWR

SEQ ID NO: 190488 - protein, 65 aa, Glycine max
  unsure (1)..(65): unsure at all Xaa locations
  Clone ID: PAT_MRT3847_14302C.1.pep
LILYGLNKLATVGPVNTSATEMYNTRDIAKLDAWKAVRGXSKDKAVGDYINKVEQLLEAHDLPAG

SEQ ID NO: 190489 - protein, 265 aa, Glycine max
  Clone ID: PAT_MRT3847_143030C.1.pep
MELSSSNKVINAGYHVCTAIGRGPKIDVDIIDKKNPHTGVIVKMSNSGPKYNCSLAVSVLCNLNGVQGPQALERLGACDYVTELKHPSGCAIIINVHGGGWGWFGTLLIIVLCLFAAYLLAGIVYRFFFLGIRGIDIIPNLDFWVSLPRRTQSLCTSLVRKFKGPSEGHRTHLFSCELLRLDFRFWICLMNSLRLISKTRPTFCRQCRKPPFQIPYRSALGFLDMEHSTEICNSCFDCPSMNLAFNILLSLSERRERGGRRRKRR

SEQ ID NO: 190490 - protein, 49 aa, Glycine max
  Clone ID: PAT_MRT3847_143031C.1.pep
GPDVGPLSYWLGWSVISFRLGVLRPCAVVCKGPHGVVVCGSGPTFSFVD

SEQ ID NO: 190491 - protein, 59 aa, Glycine max
  Clone ID: PAT_MRT3847_143032C.1.pep
TQLISLLTGRRTHTHTLSIFCGTACDYYNLQIPLMLHDDMNPFMASICISPRECKKSQT

SEQ ID NO: 190492 - protein, 34 aa, Glycine max
  Clone ID: PAT_MRT3847_143033C.1.pep
ITIIKFLSLSQSFSKFQLDNIFQKFFERVVERVG

SEQ ID NO: 190493 - protein, 214 aa, Glycine max
  Clone ID: PAT_MRT3847_143034C.1.pep
IAPPPPADPSTDPTSPFFVHPSDGPSSVKVTPLLDGSNYHSWARSLRRALGAKLKFEFLDGTIPMPVDAFDPSFRAWNRCNMLIHSWILNSVEPSISRSIVFMDNASDVWLDLKERFSQGDLVRVSEIQQEIYALTQGTRSVTTFYSDLKALWEELEIYMPIPNCTCHHRCSCDAMRLARRHHHTLHVMRFLTGLNDEFNAVKSQILLIEPLPS

SEQ ID NO: 190494 - protein, 53 aa, Glycine max
  Clone ID: PAT_MRT3847_143035C.1.pep
SDNYHLIAACRILNRYAGPQNALILLSVKDAVVDALLGGFKGYNLRRKFPRAE

SEQ ID NO: 190495 - protein, 43 aa, Glycine max
  Clone ID: PAT_MRT3847_143036C.1.pep
AQEVKKLETLNKMFLPFMARGPNVDLSEVPGKDQMDAHPPQKG

SEQ ID NO: 190496 - protein, 110 aa, Glycine max
  Clone ID: PAT_MRT3847_143037C.1.pep
PTTNIRKGQTAHRPRNPKSPPNPSQRQPERHSHKASNNTLEPSQELHSEEMEGKPPTKESPTTIPKGQKKRPQTTNAPCHNYPSHKTPPPNARRKPTAPLPTKTTQHNNN

SEQ ID NO: 190497 - protein, 124 aa, Glycine max
  unsure (1)..(124): unsure at all Xaa locations
  Clone ID: PAT_MRT3847_143038C.1.pep
KSESMLPLWKYSRRISLEELHRSIDFSRICIDSSNHQADLVAGIAKACISYGMLGRNLSQLCEEILQKEGSGVEICKEFLAMCPIVQEXNSNILPQSRAYQVQVDLLRACNDEGMACELEHKVW

SEQ ID NO: 190498 - protein, 48 aa, Glycine max
  Clone ID: PAT_MRT3847_143039C.1.pep
KCLIKITGVNRYWLSPLLYFRVLGPKSSLFNFINFVLEIQITSFFQHV

SEQ ID NO: 190499 - protein, 68 aa, Glycine max
  Clone ID: PAT_MRT3847_14303C.1.pep
FHWRLWVLCEKKKKGAIVVKNPPNLRPFKGGQIYWGKLPLNSECHPFHPFHPRGEPSYGPLGGQTQKL

SEQ ID NO: 190500 - protein, 71 aa, Glycine max
  Clone ID: PAT_MRT3847_143040C.1.pep
EGIAMGVRDRIWCRSEYLRAGIQCKSNLNVGSPLYVTCIYSLFAFTNNVIYACHYVSLSSCWSFGGRRRRE

SEQ ID NO: 190501 - protein, 30 aa, Glycine max
  Clone ID: PAT_MRT3847_143041C.1.pep
MTLKSHHCARPVCVAHADPMTLLTQWELVH

SEQ ID NO: 190502 - protein, 98 aa, Glycine max
  unsure (1)..(98): unsure at all Xaa locations
  Clone ID: PAT_MRT3847_143042C.1.pep
LLIGTGPGIGAEVLSHHENXSLYTEHKTCTGLWLWQQEAGILKVXLWTIPVYHKGGRVXMILMXDQGAEYYRPXPYYHQKELAAIETKAGTEVAIHGD

SEQ ID NO: 190503 - protein, 83 aa, Glycine max
  Clone ID: PAT_MRT3847_143043C.1.pep
DFVDSIKQNMNVKYVYMWHTLTGYWGGVLPSSDALKKYNPKILYPIQSPGTTGNLRDVAMDIYFDSIYTTACKVTVGIIVKVI

SEQ ID NO: 190504 - protein, 43 aa, Glycine max
  Clone ID: PAT_MRT3847_143044C.1.pep
NPHSGGGASPNKIFIGGLTKNTTLKTFLKYFDKYREITHSLII

SEQ ID NO: 190505 - protein, 65 aa, Glycine max
  Clone ID: PAT_MRT3847_143045C.1.pep
PFFPSFFHPSFLSLANFEVSEKHVIPSLLSFFLSLTKFLPYPGKAPSTTTLRANLLPRVRGRVGR

SEQ ID NO: 190506 - protein, 47 aa, Glycine max
  Clone ID: PAT_MRT3847_143046C.1.pep
RNRIRNLAQSLKDKASGFDEGLFTNRHVSSVRVHVLRAITHALDEPP

SEQ ID NO: 190507 - protein, 96 aa, Glycine max
  Clone ID: PAT_MRT3847_143047C.1.pep
VLIHSRRPTVHVTSKIAKCFPFTFFVKNMRLYCLFGFSTHSFGYLYIERISADTISLMLGHCGCLLFMPGLPLFHASSSLSPGAINQPWVDTLTKF

SEQ ID NO: 190508 - protein, 84 aa, Glycine max
  Clone ID: PAT_MRT3847_143048C.1.pep
APSWAWGGGGGGGGGGGGGGGGGGGRVQAHNCWKHSKNNTQLGEIKALRGTGFPSWRRYRRNSLTPIRGNRVRFVGNFGKGGFN

SEQ ID NO: 190509 - protein, 306 aa, Glycine max
  Clone ID: PAT_MRT3847_143049C.1.pep
CEIWMLSRVKNYLEDQLLGFALVPLSEVLVQNGKLEKEFSLSSTDLFHSPSGFVQLSLSYTGASPDVMTISAMPNKVATDAAVQDSETSESLARDLDKIEFPDPKIVNEDHLMVSEYFGIPCEETQCSDSLATSDAENQSSEAGVRLVESFSACSVESVQPTKVDSPPSSVSTNGVSSPSVPANSESSDAAASKSPIQEQVSGTKEDKNVDTKDSESDSSSGVPSESFPKPVVTVNIEPEPKVVQQDIVDMYMKSMQQFTESLAKMKLPMDLESEPTSSGNSTTEQKLQPSKSNNSRVFYGSRAFF

SEQ ID NO: 190510 - protein, 96 aa, Glycine max
  Clone ID: PAT_MRT3847_14304C.1.pep
KNAKPEKKEAAQKKNPSDEELTKKKNNFSNKKVVGKENPKPGKKGRFFQFNFLIEKNVQVMLIPPIKRKEIGWEKGKIPPPVIKFTGPGKKGPLIP

SEQ ID NO: 190511 - protein, 430 aa, Glycine max
  Clone ID: PAT_MRT3847_143050C.1.pep
MDSPQSVVSPFRSSVLGESEKHKSDVFPGNSSPFSKDIEVNGKEVVMSNVEEFLGVLDVYIHQARDIQNICIYHKQDVYAKICLTSNPETTMSTKTINGGGRNPVFNENLRIDVRTVDASLKCEIWMLSRVKNYLEDQLLGFALVPLSEVLVQNGKLEKEFSLSSTDLFHSPSGFVQLSLSYTGASPDVMAISAMPNKVATDGTVQDSDTSESLARDLDKIEFPDPKIVNEDHLMVSEYFGIRCEETQCSDSLATSDAENHSSEAGVQLVESFSACSVESVQPTKVDSPPSSVSTNGVSSPSVPANSESSDAAAAASKSPIQEQVSGTKEDKNVDAKDGESDSSCGVPIDSFPKPVVSVNIEPEPKVVQQDIVDMYMKSMQQFTESLAKMKLPMDLESEPTSSGNSTTEQKLQPSKSNNSRVFYGSRAFF

SEQ ID NO: 190512 - protein, 240 aa, Glycine max
  unsure (1)..(240): unsure at all Xaa locations
  Clone ID: PAT_MRT3847_143051C.1.pep
MHSHIPFHSNTMTKPRNLNLTFLLQDIQILEIFLAXFLVFIIIHSLRQKKHHGLAVWPVLGMVPSLVTGLRTNLYEWITEVLKRQNGTFRFKGPWFSNLNCIVTSDPRNLEHLLKTKFPLYPNGGYFRNTVRELLGDGIFNADDDTWQKQRKTASIEFHSTKFRQLTTESLFELVHYRLLPVLEASVKKSVAIDLQDILLRLTFDNVCMIAFGVDPGCLQLGLPEIPFAKAFEDATEATV

SEQ ID NO: 190513 - protein, 78 aa, Glycine max
  Clone ID: PAT_MRT3847_143052C.1.pep
SKLVECIRSKLKIVTSPFFGTCVSDFLITSQQSKHFLAHPASHVRSLHCQFRFTQLSHSLIFLTLSYAFFLFFSFLVF

SEQ ID NO: 190514 - protein, 89 aa, Glycine max
  Clone ID: PAT_MRT3847_143053C.1.pep
ITECGNRYGLCEKYSERKHHIILSCILRPLYLHSLTGLEHVPDTCYTWRQILLTYDVLPIASCHFGGRCPCTNALPVNVCTGYPQQYFT

SEQ ID NO: 190515 - protein, 88 aa, Glycine max
  Clone ID: PAT_MRT3847_143054C.1.pep
KKRPFKELSGIIILEPGSRWESFPFTFLQALDFNTITLKTSSLSWGNPLWYQTNILKGWIALLYNRNLINLRDHHRDKKLSKRYAQFH

SEQ ID NO: 190516 - protein, 53 aa, Glycine max
  unsure (1)..(53): unsure at all Xaa locations
  Clone ID: PAT_MRT3847_143055C.1.pep
PAXSAXGXXXKRGXXXTTXVXGVXXDLXLXRXIRXLDXXARXEXRAXVRXHKT

SEQ ID NO: 190517 - protein, 779 aa, Glycine max
  Clone ID: PAT_MRT3847_143056C.1.pep
MKSTMAQNQSNWEADKMLDVYIYDYLMKRKLHAAAKAFVAEGKVSTDPVAIDAPGGFLYEWWSVFWDIFISRTNEKHSEAAAAYIETQQTKAREQQLQMQQLQLMQQRSAQLQRRDPNHPVLGGSINAMNSEGMLGQPPASVLAMKMYEERMKHPHSMDSEASPTLIDPNRMALLKSAASHQGQLVHGNSGNMSTALQQIPGRTPLTTDIKGEVNLGATPKSLPMDTSVYRQAILQTKSGLQGLNSFGGLKAQNNVTLLGLPVCTEQCFAKVVSSLKYPSSSSPQNQFVLASQQQQVLAQAQAQNNLGNSNYGDMDPRRLSGLPRGSLSAKDGQSTRNDGSICSQMQSDSPKMKIAQSQHSLSSQQQEQLQQQSNRKRKSGAANSTGTGNTAAPSPTSSPSTHTPGDGLNTASSMQHVQKSMMMYGTEATGGLASSSNLLDDMDRFGDVDALDDNVESFLSNDGGDGGNLYGTVKQSPAEQQKESSKGFTFAEVGCRRTRNSKVTCCHFSSDGKWLASAGDDMKVDIWNMDTLETESTPAEHKSVITDVRFRPNSSQLATASTDKSVRLWDTTNPSRCLQEYSGHSSAIMSLDFHPKKTEVFCFCDGENEIRYWNINSATCTRVTKGASAQVRFQPRLGRFLAAASDKGVSIFDVESDTQIYTLQGHPEPVSYICWDGNGDALASVSSNLVKVWSLTSGGECIHEFSSPGNQFHSCVFHPSYSTLLVVGGISSLELWNMTENKSMTITTHENVISALAQSSVTGMVASASHDNYVKLWK

SEQ ID NO: 190518 - protein, 40 aa, Glycine max
  unsure (1)..(40): unsure at all Xaa locations
  Clone ID: PAT_MRT3847_143057C.1.pep
FNKDXXWDEXWIYLGGTXIGAAPAALYXQVVIRAIPFKSK

SEQ ID NO: 190519 - protein, 61 aa, Glycine max
  Clone ID: PAT_MRT3847_143058C.1.pep
KKNKNKKKKKKKKKKKKKKKKKKRNKCQRTTKRNKKAQENKHGPYPTSLPSNRTLSMFRTH

SEQ ID NO: 190520 - protein, 52 aa, Glycine max
  Clone ID: PAT_MRT3847_143059C.1.pep
LQLVHSFISPFDFEMLFSTQLHLLFYCVFNSIQSKLSAQLNLMKSSLIVAPF

SEQ ID NO: 190521 - protein, 156 aa, Glycine max
  Clone ID: PAT_MRT3847_14305C.1.pep
MSSSCGRTHGFNGDLAKSSSTSTLTSPTSSPSSTTTSETTNSPQSIIFTKKPRTLRKRPNQTFNEAATLLSTAHPNLFSIKNLKKPEKFTKPVTENISHSSEPLLLFRECENNDNDAFSFLLESKRGFQTESNKVFFGVRENINKPCELSTSVPNC

SEQ ID NO: 190522 - protein, 69 aa, Glycine max
  Clone ID: PAT_MRT3847_143060C.1.pep
TCSVSTRSLRQFSDIFGSGCSYKSLSSIRIRVPFLVLPVLCLSMRYFSLCCHDAFEGLRQDLRLHVYTD

SEQ ID NO: 190523 - protein, 142 aa, Glycine max
  Clone ID: PAT_MRT3847_143061C.1.pep
MPTRFSNTRKHRGHVSAGHGRVGKHRKHPGGRGLAGGLRHHRSNFDKFHPGYFGKLGMRHYHLLRNQYYRPTINIDKLISLPEAQVEAPEGSVPVIDLQHLGKFKLLGKGRIDKPFIVKTRFVSALAEKKIKEAGGVVKLVA

SEQ ID NO: 190524 - protein, 66 aa, Glycine max
  Clone ID: PAT_MRT3847_143062C.1.pep
KTRFLRFNGYLSFLNPSFALSPSLSLAVQTRFLCSLKNLNPFPFLHLPLGCFPKPHPISPRSKDPL

SEQ ID NO: 190525 - protein, 47 aa, Glycine max
  Clone ID: PAT_MRT3847_143063C.1.pep
SAWNSARGLIKDQWLTFVLKGGLARINSDEITVLDNDADNGCDIDPH

SEQ ID NO: 190526 - protein, 346 aa, Glycine max
  Clone ID: PAT_MRT3847_143064C.1.pep
MKNNRDKEKGNDVDQSYRQHHTLSMPMMFSGLNREKEMSAMISALTHVVCGEDEHHGADYSLLNHNINNTNSAVVGDDDFTVTSNMASGSMPPSSTCSSQGGNSVLKRRREYDNTNDFSRGGSFPAISTIAESSSTVTRRTANTVYDYEYRTENVKVVEEEPRRKYRGVRQRPWGKWAAEIRDPFKATRVWLGTFETAEDAARAYDQASLRFRGNKAKLNFPENVRLRQQQEPPLNLNPPPPPNHGAILSIPSTTVHTEALQGSLGSSNFYEHSYSHLHEFPVSLYDQIAESTSTTMASHHLQFLPPASSSTMTMTSPQAPPSIYPTHPAAWSSGYSYNSSSSASG

SEQ ID NO: 190527 - protein, 72 aa, Glycine max
  unsure (1)..(72): unsure at all Xaa locations
  Clone ID: PAT_MRT3847_143065C.1.pep
RRRTPQEGPKKEGGTQKEEKSNRNLFRGXRTNTGAFFSDKKPYSPDFVCANKPREGQHSSPGSANSSLKNCP

SEQ ID NO: 190528 - protein, 48 aa, Glycine max
  Clone ID: PAT_MRT3847_143066C.1.pep
NHLHRPRSLVQKHGYAVNERDDVTVVALESKRISLVGGNNTAARFCTG

SEQ ID NO: 190529 - protein, 92 aa, Glycine max
  Clone ID: PAT_MRT3847_143067C.1.pep
NKSAFCPLVGGSTKNGKSFFEKKSFFFMEPSVLGAFNVKKAFVKVLTQISPIFSKKPVKGVENGTAFVPPKEKKIFFKNNVFSFKKVGFCSS

SEQ ID NO: 190530 - protein, 152 aa, Glycine max
  Clone ID: PAT_MRT3847_143068C.1.pep
MEGITASVCRGVKEYWRRKGYKRLNGSGRRRRNRVELGSTRTGKGRFWRWRIRLAPKIRIRKIPSPKKMVLWVRDAYVRMMLGLANSRIMTVSASASGFGGTLAGADTSFAGFGRAPPKEYDEKTIIQIYKSLLMAHGGPLVPRDAAATQIR

SEQ ID NO: 190531 - protein, 143 aa, Glycine max
  Clone ID: PAT_MRT3847_143069C.1.pep
VEKGRADFERKKAVEACKLLENQKNKVVEKEKEIGGLKRLIEAEKGRADSERKKAAEACKLLENEKNKVVEKEKEISGLKRLIEAEKRRADSESKKAAEACKMVGDEKNKAAEKEKEMSRLKELIEVEKRKPDSERKEDTDVC

SEQ ID NO: 190532 - protein, 214 aa, Glycine max
  Clone ID: PAT_MRT3847_14306C.1.pep
PRVRGRVGSNNYSPIFLQWVDCVSQLLRIYPFAFEFSAAFLVDFVDCMLSCRFGNFLCNSEKERQQFNVFEACGCLWVYLADLRTSSGGSHVHHNPFYDPPKHNGPLLPPAAALAPTLWPQFHLRWACPEEAQAGEIEARCRKIVMKYAEMQKAKEMAERKAKEVTNSMESLNAELRREKQLNSSAMNMAKSMSKENMAIKRAIQSMGCKVHVS

SEQ ID NO: 190533 - protein, 64 aa, Glycine max
  Clone ID: PAT_MRT3847_143070C.1.pep
GFRVQTLGKGGKEFATLKILTPLLSHFWCRHDPLALIGILGVNPSRGENQTNSTKCIPCLLKAP

SEQ ID NO: 190534 - protein, 112 aa, Glycine max
  Clone ID: PAT_MRT3847_143071C.1.pep
AMGKFNLLSTCITPTPPSTRPSQLLQPNVTRPITPCQPRLPTHPPHTPPLDNIPPRPTCTSSQETPHPTFCPLVWYFSNCFTLNLLSSRGHLHSFRIHIRFLTIAFSVTLKS

SEQ ID NO: 190535 - protein, 52 aa, Glycine max
  Clone ID: PAT_MRT3847_143072C.1.pep
VYSSEGTSEVYVSHFRPFTSLHRPSVTTGLTSHQHTSCQQYEHYAQVHKIQK

SEQ ID NO: 190536 - protein, 50 aa, Glycine max
  Clone ID: PAT_MRT3847_143073C.1.pep
RFVVGINYQLVIFIYPYYLTKQEFMLFNCPTIVNLFLYFIMLEYIKSYIL

SEQ ID NO: 190537 - protein, 64 aa, Glycine max
  Clone ID: PAT_MRT3847_143074C.1.pep
YCFTKLEISERQSISIITVCKSWCSRQVKCGQLSHTPHKRNLSQALGHVSYNEVQDEWKGHQYH

SEQ ID NO: 190538 - protein, 125 aa, Glycine max
  Clone ID: PAT_MRT3847_143075C.1.pep
RSPLGNNIQLASLSAVGLSLRLGAFLVSLVKTGLSAGNHSFCLAPLFCAPAFIIYPWVFYFFFQFVCFAILSRDHLFPQLPPISIRPPICNTGPPTGTCSAFPGRPKLPAQNTPPIPYKKTCTPT

SEQ ID NO: 190539 - protein, 103 aa, Glycine max
  unsure (1)..(103): unsure at all Xaa locations
  Clone ID: PAT_MRT3847_143076C.1.pep
SSNFLQLKVRGANEPGARHAKGXRFATVVSVXTTLFVGFIFWLVIVSFNKNLALIFTSSSSVIQMVNELAMLLAFTGLLNCIQPVLSRVAVGSGRQAIVAYIN

SEQ ID NO: 190540 - protein, 70 aa, Glycine max
  Clone ID: PAT_MRT3847_143077C.1.pep
PWLPLLYILQSLVRYAQEKVGFSVLQDIRDKVRWWCWCFRGVWEWDLEICGFRVCLVCDMMVRVWRNVFC

SEQ ID NO: 190541 - protein, 63 aa, Glycine max
  Clone ID: PAT_MRT3847_143078C.1.pep
VLNEPATVVQSRSHILDPDSLRFLGRKRRVEHVVSERRSSSASLHSSVCSQRSLSLQCHLHES

SEQ ID NO: 190542 - protein, 72 aa, Glycine max
  Clone ID: PAT_MRT3847_143079C.1.pep
GQYPPTYKVKVACLCSTCRANTHPFSFQRRKRLSPQPLQRPLKNHFLFGDTTKENPVFEFRKKHQFSKFVKL

SEQ ID NO: 190543 - protein, 120 aa, Glycine max
  Clone ID: PAT_MRT3847_14307C.1.pep
MAGSSEEGQVISCHTVEEWNDQLQKGNESKKLIVVDFTASWCGPCRFIAPFLAELAKKFTSVIFLKVDVDELKSVSQDWAIEAMPTFVFVKEGTLLDKVVGAKKDELQQKIQKHVASASA

SEQ ID NO: 190544 - protein, 424 aa, Glycine max
  Clone ID: PAT_MRT3847_143080C.1.pep
NYYGGPHGDHVVRMQQNGMGPGGGGWGAPPPPPPMMMSSAEFSSNYSTGPAPLPPPSPNLALGLKGGTFTYEELAAATNGFNDANLIGQGGFGYVHKGVLPSGKEVAVKSLKAGSGQGEREFQAEIDIISRVHHRHLVSLVGYSISGGQRMLVYEFIPNNTLEYHLHGKGRPTMDWPTRMRIAIGSAKGLAYLHEDCHPRIIHRDIKAANVLIDDSFEAKVADFGLAKLTTDNNTHVSTRVMGTFGYLAPEYASSGKLTEKSDVFSFGVMLLELITGKRPVDHTNAMDDSLVDWARPLLTRGLEEDGNFGELVDAFLEGNYDPQELSRMAACAAGSIRHSAKKRPKMSQIVRILEGDVSLDDLKDGIKPGQNVAYNSSSSSDQYDTMQYNADMQKFRKAVFSNSEEFGTSSGSSGEVSQKQQRL

SEQ ID NO: 190545 - protein, 64 aa, Glycine max
  Clone ID: PAT_MRT3847_143081C.1.pep
PNPKKGSSGLLIQYIGGRRLLIRNSTNCSPRPLPPSINYAHPANCCTSCIAEQCDTISINIGKS

SEQ ID NO: 190546 - protein, 49 aa, Glycine max
  Clone ID: PAT_MRT3847_143082C.1.pep
NQEFINPPSVYNNTLLQTKEGRTILIQLKITPCMTGPQIKTYCNSKTIS

SEQ ID NO: 190547 - protein, 130 aa, Glycine max
  unsure (1)..(130): unsure at all Xaa locations
  Clone ID: PAT_MRT3847_143083C.1.pep
GPIPPNXXIRKAAPKSXKPSKXTPPPXPHTTNTPXPKGPXXXPPPPIPXXPPPQXXPTPXQPPHXXAXPPXPQXTXXXXQNXTQXPXTEXPTHTXXPPPPXPQPXQPPTPPPPPPPTPXHPPXPKKYKDK

SEQ ID NO: 190548 - protein, 148 aa, Glycine max
  unsure (1)..(148): unsure at all Xaa locations
  Clone ID: PAT_MRT3847_143084C.1.pep
SKTEARRQAFPPPLFVFVVGYSFPNETGAAKXDSLEGGQRESGNGGQWGGVWVFNAVCEKEASQVFQFLWPTPAPARDSNISFTAERPXHFVAGSEGSFAHDGGARRPXHVVARVHHTPALRRFQNLTPSSSSSRKQHKRHKANPSCL

SEQ ID NO: 190549 - protein, 89 aa, Glycine max
  unsure (1)..(89): unsure at all Xaa locations
  Clone ID: PAT_MRT3847_143085C.1.pep
ATEDARPKHITSHGNWTFMKLNXYLLPLVCVILGHGKQQQHKHRHTQSVCYXXNKKSCTQXSPLXKQTMPPTVSARAGAAYVSIKANTN

SEQ ID NO: 190550 - protein, 113 aa, Glycine max
  Clone ID: PAT_MRT3847_143086C.1.pep
KQNPLPLKINFKFLYKQPELGTPQYQAREQRRSVQPWKDPGYPKHRRGFKPPPPKRPPTPRLGSLFNTIHHHSFFFFPNTPGERTSPITLFRSTIKKKGLFFLGKTWEGGGPF

SEQ ID NO: 190551 - protein, 94 aa, Glycine max
  unsure (1)..(94): unsure at all Xaa locations
  Clone ID: PAT_MRT3847_143087C.1.pep
PKGLTFLTVILFFSTLSXXPDSXLXRQENASFINFYNXSFPPPIYIITKHIYLFYXHHKNTSFSLLXNIFHYYTFLIYYSSLLLNSTINNFSYK

SEQ ID NO: 190552 - protein, 81 aa, Glycine max
  Clone ID: PAT_MRT3847_143088C.1.pep
IMAIFINLTLKSSYSHYNLSFPPHKAAYCSIEHNDNVTVVNDTNSAYITDLTGEGTKTDEAIYQLYLIHRVRKAGASVLLS

SEQ ID NO: 190553 - protein, 87 aa, Glycine max
  unsure (1)..(87): unsure at all Xaa locations
  Clone ID: PAT_MRT3847_143089C.1.pep
MDFLRCLLLVIILPLCYSIDAACSNGKCKLDDECSSNGDCGAGLYCFSCPHGFSGSRCVRSSITDQFKLINDSLPFNKYAXLTTHNA

SEQ ID NO: 190554 - protein, 163 aa, Glycine max
  Clone ID: PAT_MRT3847_14308C.1.pep
FVNHKKMVQLKLIALTLLVLWSWWSFEGTVGDPQLFLLKWECGVVSVHDLSNFNQNRNAILADLRAQVRNQSKYFATAESTSGADPVYAMFQCRNYLSKNDCAVCFAVTDTNIRNCSVGNTGRIVYDGCFLKCENNDIFDHSFISGLHTLCGNQTADESTGFG

SEQ ID NO: 190555 - protein, 276 aa, Glycine max
  unsure (1)..(276): unsure at all Xaa locations
  Clone ID: PAT_MRT3847_143090C.1.pep
CVKVVRXKIAKKRKEKFFKQNGGLLLEQRLSTGEVNVDKTKLFSLKELGKATDHFNINRILGKGGQGTVYKGMLVDGKIVAVKKFKVNGKVEEFINEFVILSQINHRNVVKLLGCCLETEIPLLVYEFIPNGNLFEYIHGQNDELPMTWDMRLRIATEVAGALFYLHSAASQPIYHRDVKSTNILLDGKYRAKVADFGASRMVSIEATHLTTTVQGTFGYMDPEYFHTSQLTDKSDVYSFGVVLIELLTGKEPISSAKQQELRSLASYFLHTEKEI

SEQ ID NO: 190556 - protein, 93 aa, Glycine max
  unsure (1)..(93): unsure at all Xaa locations
  Clone ID: PAT_MRT3847_143091C.1.pep
MKVQGHYKGTPGGSAAMDAPVYMKPVGLESLRERIPDDDKMHNAKVKDLAXLLNLXQRAGGDPKLLTEGKSPLGRRIPVLKVRAGENYLHQIP

SEQ ID NO: 190557 - protein, 49 aa, Glycine max
  Clone ID: PAT_MRT3847_143092C.1.pep
PLFFFLEANIKFHRYPSENNTPYIAYNFFPKVAGIGQLLYRPLQLKREN

SEQ ID NO: 190558 - protein, 21 aa, Glycine max
  Clone ID: PAT_MRT3847_143093C.1.pep
ENQLLILKSDKDVLEAYFTNH

SEQ ID NO: 190559 - protein, 70 aa, Glycine max
  Clone ID: PAT_MRT3847_143094C.1.pep
YCSIELQTEMWSSQTFPWKIKENTKEVKPLGHAILLLRGNITKKEKRKKLSFPTFKADLGLLEPDFSMFN

SEQ ID NO: 190560 - protein, 576 aa, Glycine max
  Clone ID: PAT_MRT3847_143095C.1.pep
MEQKENHARRKKGGLITMPFIFGNEVCEKLAVVGFNTNMISYLTTQLHMPLTKAANTLTNFGGTASLTPLLGAFIADSYAGKFWTVTLASIIYQIGMISLTLSAVLPQFRPPPCKGEEVCQQASAGQLAILYISLLLGALGSGGIRPCIVAFGADQFDESDPKQTTRTWTYFNWYYFVMGVAILVAVTVLVYIQDNIGWGIGLGIPTIAMFLSIIAFIVGYPLYRNLNPSGSPFTRLVQVAVAAFRKRKVPNVSHPSLLYQNDELDASISMGGKLLHSGQMKFLDKAAIVTEEDDNKTPNLWRLNTIHRVEELKSIIRMGPIWASGILLITAYAQQNTFSLQQAKTMDRHLTKTFQIPAGSMSVFTILTMLTTTAFYDRVFIKVARRFTGLDRGISFLHRMGIGFVISTLATLVAGFVEMKRKKAALAHGLFDHPHAIIPISVFWLVPQYSLHGMAEAFMSIGHLEFFYDQAPESMRSTAMALFWTAIAAGNYVSTIMVTLVHKFSAGSNGSNWLPDNNLNKGKLEYFYWLITILQFLNLIYYLVCAKLYTYKPIQVHDKGDSNSEGNQIELSTTV

SEQ ID NO: 190561 - protein, 173 aa, Glycine max
  Clone ID: PAT_MRT3847_143096C.1.pep
GPFWGGGNPPFGGGPFLGPGAFGAPPCFSQRGFLAPRSPGPRFFGKIWPPPADNPGGGAFFPGETRGASFLPPFGNGGSKAFSPGGGCFCRGPKSLFLVLTIFGPKGWVGALILSQIFILGGPFFFRGVVLAPSFLKGNQKGKPNKKKKKKHKKKKKKKKKKKKKKKKKKKER

SEQ ID NO: 190562 - protein, 52 aa, Glycine max
  Clone ID: PAT_MRT3847_143097C.1.pep
LLFFFFFLLFDWVIIHTSLQFNCLQRDRAVRVNDRRALAMVQTETWQSSICS

SEQ ID NO: 190563 - protein, 66 aa, Glycine max
  unsure (1)..(66): unsure at all Xaa locations
  Clone ID: PAT_MRT3847_143098C.1.pep
GSQVLPDQKEFSGGLQGGGARPSLDVRXKIAERGGGGXPXXMNRCDCLRGWGNTPEPCVXAGCVLV

SEQ ID NO: 190564 - protein, 53 aa, Glycine max
  Clone ID: PAT_MRT3847_143099C.1.pep
KKVKPRRAISLFFFGGLRLMLFDVFKFINQKACLKIFIIEKRKKLRCFSVLFF

SEQ ID NO: 190565 - protein, 104 aa, Glycine max
  Clone ID: PAT_MRT3847_14309C.1.pep
DGGGRQSVPGGPLIFWVPPLKGGPSKKGGCSNMAPPRRDSTWQRLCPDLAVFQPWFEKSEAGGKKPQITGLKEGGLWRGPKEGKSALCKPLEGKPWGGGGPETR

SEQ ID NO: 190566 - protein, 81 aa, Glycine max
  Clone ID: PAT_MRT3847_1430C.1.pep
GRHYLFPFKYIDYRLLLLGKNSSPISAKGEAKKRYTSGRQPTPYKLAFGVELDPNLRSKMVSELILDPLNGPPIMSSTHQV

SEQ ID NO: 190567 - protein, 41 aa, Glycine max
  Clone ID: PAT_MRT3847_143100C.1.pep
CAIHLSFNVTQLEPIMKPQLTTYTLNQTELYPLLHGQQIRN

SEQ ID NO: 190568 - protein, 35 aa, Glycine max
  Clone ID: PAT_MRT3847_143101C.1.pep
MHGAKPDVTHTKARDLVSLVLIRILDPVFQVITNV

SEQ ID NO: 190569 - protein, 67 aa, Glycine max
  Clone ID: PAT_MRT3847_143102C.1.pep
SNSLFSNNEEATFPQITVFSSPLVHAAFSSQFQLGSASKHFAISVWLISTNLGRLISPKPRQGKGYL

SEQ ID NO: 190570 - protein, 63 aa, Glycine max
  Clone ID: PAT_MRT3847_143103C.1.pep
RDRNEAISTGAAHLVAYGRLFLANNPDLPPRVRLDAHLNQPDVTTFYTHHPVLSSTQPQVMLL

SEQ ID NO: 190571 - protein, 44 aa, Glycine max
  Clone ID: PAT_MRT3847_143104C.1.pep
SCIAGAIYAFVHAYDTILSIHTRTRYMMIHYVSFSQKASLLSNY

SEQ ID NO: 190572 - protein, 242 aa, Glycine max
  Clone ID: PAT_MRT3847_143105C.1.pep
FPKSPAPPTPPHSTPGRSSFTRSFGAYFSRSSSQVQPRPSEVLDLLRLVEDLRERESRLKTELLEHKLLKETLAIVPVLENEISIKNSQIESNAKKMEQLEAENEKLGNELQELKLRMKEEKTENLRKIQALEDEIAELKKTASDRVCKALVNNEHSSLECKSLENDEHLQTTSILQAHLEVPVRPNFIRSLKKTALDYRSLNHKQFEATVVVADFKQEVAESQRPRRDSEELIDSIESNLT

SEQ ID NO: 190573 - protein, 109 aa, Glycine max
  Clone ID: PAT_MRT3847_143106C.1.pep
FSPFFYDCSTDFTLHVHLVPLKRVRYRKLDLILLGTYCFSTLPSTASSYPTLPLGPYFKQHKPLLYSKPSKFNSLSINGHRRICDLFDLHQEQVPYEVAWSLAKGDCQG

SEQ ID NO: 190574 - protein, 274 aa, Glycine max
  Clone ID: PAT_MRT3847_143107C.1.pep
MLYIIGLGLGDEKDITLKGLEAVKKCDKVYMEAYTSLLSFGLSTNGISNLEKLYGKPIILADREMVEEKADEILSEADHAHVAFLVVGDPFGATTHTDLVVRAKKMAIEVKVVHNASVMNAIGVCGLQLYRYGETVSIPFFTETWRPDSFYEKIQRNLSMGLHTLCLLDIRVKEPTLESLCRGRKAYEPPRYMTINTAIEQLLEIVQAREEPAYTEDTECVGLARLGSEDQMIVAGTMKQLQMIDFGAPLHCLVITGPTHPVEEEMLDFYRCRT

SEQ ID NO: 190575 - protein, 51 aa, Glycine max
  Clone ID: PAT_MRT3847_143108C.1.pep
IFLSSNPSFGHSSNIQFACLCPNFHSITTSIVFFKGPPIAHLMIKPSFNIP

SEQ ID NO: 190576 - protein, 126 aa, Glycine max
  Clone ID: PAT_MRT3847_143109C.1.pep
RHPHQYVKAQTITSRHLHLFHLLLRHTMTHNHLRDFPAGRSQVRGQSMSTFRRDICYHTMTYLQVRVKSGSTIGDQSCGSRNRGIKARCMWSHEIHLSSCPSSWKISMNGWSVAYNIRDCGHGGPL

SEQ ID NO: 190577 - protein, 33 aa, Glycine max
  Clone ID: PAT_MRT3847_14310C.1.pep
RYSARDFKQLLLVFSGSASVKVRCFFGNAGLAS

SEQ ID NO: 190578 - protein, 81 aa, Glycine max
  Clone ID: PAT_MRT3847_143110C.1.pep
EPVDKAILVALLSCCNICGNCQLSEAVAHQLFESSPADNVYRVMLSNIYAGDGRWDEGTKLRYNMTGGGNIMLDMSWIDGS

SEQ ID NO: 190579 - protein, 230 aa, Glycine max
  Clone ID: PAT_MRT3847_143111C.1.pep
MDGKPNPYSSSTDLLRDVQAALKRHRPLGSMQSNCIRPRRTLLPQRRASSTSSSSSDVTNSQEEASSKDSLNAVVPSQNLDSQKKVQFSVPSNAASQDGKATELENLSSHMSSLGFAEMEWVEGSQIEAWSSSSSLGCNQQESVQQAGIDASLKCESGVSSVLPKRSVVTPDHLQQFRSFLSQPATQSSVVGPTCATTTSVHSTSAPMLNSTHGILISVNIVAQVWLLSL

SEQ ID NO: 190580 - protein, 87 aa, Glycine max
  Clone ID: PAT_MRT3847_143112C.1.pep
MANNPSQLLPSELIDRCIGSKIWVIMKGDKELVGTLRGFDVYVNMVLEDVTEYEITAEGRRITKLDQILLNGNNIAILVPGGSPESE

SEQ ID NO: 190581 - protein, 227 aa, Glycine max
  unsure (1)..(227): unsure at all Xaa locations
  Clone ID: PAT_MRT3847_143113C.1.pep
MEAQASFLFISLFFSLVLHLLAKYYYKPKTTLSHKLPPGPKKLPLIGNLHQLAMAGSLPHRTLRDLALKYGPLMHLQLGEISSVVVSSPNMAKEIMKTHDLAFVQRPQFLPAQILTYGQNDIVFAPYGDYWRQMKKICVSELLSAKRVQSFSHIREDETSKFIESIRISEGSPINLTSKIYSLVSSSVSRVAFGDKSKDXXKFLCVLEKMILXXGGFEPXXLFPSMK

SEQ ID NO: 190582 - protein, 99 aa, Glycine max
  unsure (1)..(99): unsure at all Xaa locations
  Clone ID: PAT_MRT3847_143115C.1.pep
ICSYLFLEVVLFDNNDFNPAKHAEIAVPNLQVIKLTHICKCRXCLWDTFAWMHYYWVLSRAGIEFLRTYVNLSYHIVPVTLQIQAKRAGRPFGGPPGDR

SEQ ID NO: 190583 - protein, 52 aa, Glycine max
  Clone ID: PAT_MRT3847_143116C.1.pep
RISLCVHMGAGRGVPAHLRGEGQNLMQSQSLNRALFPVRYNDTFYVYAFPSG

SEQ ID NO: 190584 - protein, 63 aa, Glycine max
  Clone ID: PAT_MRT3847_143117C.1.pep
SQSSCCIIVSSLSKDDRRFSYQFWFIEGEVLQLGVVSQWYISCSVSEERLKSEILRFSCLVKK

SEQ ID NO: 190585 - protein, 61 aa, Glycine max
  Clone ID: PAT_MRT3847_143118C.1.pep
SILHWVPIKKISHLPSPRQFSDAHGHFYSKCIMSDLFIHAFTCVAFTSFCTSSADVCNSTP

SEQ ID NO: 190586 - protein, 44 aa, Glycine max
  Clone ID: PAT_MRT3847_143119C.1.pep
LLPIPNNNKYIFLNFTYDKQTVGIRIFFTFTFMCVGPFCRLLAA

SEQ ID NO: 190587 - protein, 154 aa, Glycine max
  unsure (1)..(154): unsure at all Xaa locations
  Clone ID: PAT_MRT3847_14311C.1.pep
MYGGDEVSAIVVDLGSHTCKAGYAGEDAPKAVFPSVVGAIDQMDVDEADNGENNSASAPESNNNGRNADSDQNSAXRKLYVGSQSLGYRRDHMXVLSPFKDGIGADWDTGDRIWDHAFRECLLIDPKXLHPMLLAEPSSNSQQQRERTAELMFE

SEQ ID NO: 190588 - protein, 61 aa, Glycine max
  Clone ID: PAT_MRT3847_143120C.1.pep
KRFKRLKKCGLFIERLKYKWGKMGRINILRNMELNRLELVCVVNEDRLYRNGVVCREKTLL

SEQ ID NO: 190589 - protein, 63 aa, Glycine max
  Clone ID: PAT_MRT3847_143121C.1.pep
KKKNPWQFCWVQRHQFCPQAVSTGNAIGGGKTSCWRGIAPMGFFRQFMIQWRMYLNGGQSSSA

SEQ ID NO: 190590 - protein, 337 aa, Glycine max
  unsure (1)..(337): unsure at all Xaa locations
  Clone ID: PAT_MRT3847_143122C.1.pep
MGTVSLLKCYRPFFSMLFPHSAPPRLHAAIFRSKNFSFCATSSPPLTAEKGCGKSDAECPTLPEVWLHNTMSRTKELFKPKVESKVGMYVCGVTAYDLSHIGHARVYVNFDLLYRYFKHLGFEVCYVRNFTDVDDKIIARAKELGEDPISLSWRYCEEFCQDMVTLNCLSPSVEPKVSEHMPQIIDMIEKILNNGYAYIVDGDVYFNVEKFPEYGKLSSRDLEDNRAGERVAVDSRKKNPADFALWKSAKPGEPFLESPWGPGRPGWHIECSAMSAAYLGYSFDIHGGRIDLVFSHHENGIAXXCAACKKSDISIWMHNGFVTIDFGKMSKFLGNFF

SEQ ID NO: 190591 - protein, 170 aa, Glycine max
  unsure (1)..(170): unsure at all Xaa locations
  Clone ID: PAT_MRT3847_143123C.1.pep
PPAPPPPPTPPRPPAPPHPPPTPPPAPAQLKTEPKGSPRRTAGREKPANXPTNTGHPPPAAAATAQAPHPHPARPPPPPRPPTHPPQPPTHPPPRTTPRPPGRPDTDQSPTLPPPAXPRPPPTRWAPPRPPSPRETPPSPPTQAPPQQEPSPPHARARKPPSSRAAAREQ

SEQ ID NO: 190592 - protein, 93 aa, Glycine max
  Clone ID: PAT_MRT3847_143124C.1.pep
TGGRGRIGVPCVMGTKTTCVIIDTGWRKLHEHFTMCQTLHQPILLYLINPQEWSSIKVSTKPCLSLCGNIIKKRIERLYVIQVDRDRENDELH

SEQ ID NO: 190593 - protein, 64 aa, Glycine max
  Clone ID: PAT_MRT3847_143125C.1.pep
RACHTRLLCVIYLISGRINKVATGNTCSELNCLHNNLFAAMYIKGGLSTSNTCHLNGNGPHEMA

SEQ ID NO: 190594 - protein, 103 aa, Glycine max
  unsure (1)..(103): unsure at all Xaa locations
  Clone ID: PAT_MRT3847_143126C.1.pep
MNRRFPEGQVSFYRGWRXDRVGDPQYWTTISACLRDGHACAGMRRLARDPNTGMLVPETPTMSYGRNLSPXQPGCCKPPTSCAIRYMNDTYWTQILNVPTETN

SEQ ID NO: 190595 - protein, 243 aa, Glycine max
  Clone ID: PAT_MRT3847_143127C.1.pep
MDGHHQKQKNKYSIIVPTYNERLNIGLIVYLIFKHLGDADFEIIIVDDGSPDGTQDVVKQLQQVYGEDRILLRARPRKLGLGTAYIHGMKHASGNFVVIMDADLSHHPKYLPSFIRKQSETGADIVTGTRYVKGGGVHGWNLMRKLTSRGANVLAQTLLWPGVSDLTGSFRLYRKSVLEDIISCCVSKGYVFQMEMIVRASRKGYHIEEVPITFVDRVFGSSKLGGSEIVEYLKGLAYLLVTT

SEQ ID NO: 190596 - protein, 44 aa, Glycine max
  Clone ID: PAT_MRT3847_143128C.1.pep
NHSGSHESDKNEPHLVLLNDTFGVKRSQQPKTNGENSHTIPNLI

SEQ ID NO: 190597 - protein, 42 aa, Glycine max
  Clone ID: PAT_MRT3847_143129C.1.pep
VKFLKPNLALIALPGRYAGRKAAFVMTYDEGTMERPYCHCLV

SEQ ID NO: 190598 - protein, 114 aa, Glycine max
  unsure (1)..(114): unsure at all Xaa locations
  Clone ID: PAT_MRT3847_14312C.1.pep
DANLYTLNEFPESNTMTTSKFLPHSRKTIDIDHLAHPFLTTHDVAHANDXKKSPMLLYLYYLGQIVLETSTLXNNSLFLDYHPNPYPMVFTTXLNEALYTDETLXDHLANEPSG

SEQ ID NO: 190599 - protein, 100 aa, Glycine max
  unsure (1)..(100): unsure at all Xaa locations
  Clone ID: PAT_MRT3847_143130C.1.pep
SXSGXXXXLXRXSGXXSSSSELTXRATXSSSSXXXSISXLATXAXXXSXXXXKKIRXKPTXWXXXPLXXFFKXXXXXSMSXXXAXXXQAXXXAYIXXXXX

SEQ ID NO: 190600 - protein, 47 aa, Glycine max
  Clone ID: PAT_MRT3847_143131C.1.pep
KEREAAKREAERAPVIQEVPVVDHAMVEKLTSENEKLKTLVSSLEKK

SEQ ID NO: 190601 - protein, 251 aa, Glycine max
  Clone ID: PAT_MRT3847_143132C.1.pep
MDESPNDNDLNFMHNSDQEIRSNLDSRTGKCSTSGKQSSKEELSRCKNICAYPSYKISKAFWPHWAYRMFDSYSLAQRAADMWKRIVGMPDMDSLIKKPDILSFHIASKIPVSESTRQELLDIDGIAYRLRREIELLESIDLIRCKSCETIIAKRSDMLVMSSEGPLSAYVNPGGYVHEIMTLYKANGLALVGSAATDYSWFPGYAWTIATCATCKTQMGWLFTARNKQLKPSYFWGIRSCQLAEEIRQNL

SEQ ID NO: 190602 - protein, 165 aa, Glycine max
  unsure (1)..(165): unsure at all Xaa locations
  Clone ID: PAT_MRT3847_143133C.1.pep
KRMVGMPDMDSLIKKPDVLSFHIASKIPVSESTRQEFLDIDSIAYRLRREIELLESIDLIRCKSCETIIAKRSDMLIMSSEGPLSAYVNSGGYVHEIMTLYKANGLALTGSAVADHSWFPGYAWTIXNLATCKNKLDGFLQPGNKQLKPSSFLGIRKLSLAEEYA

SEQ ID NO: 190603 - protein, 81 aa, Glycine max
  Clone ID: PAT_MRT3847_143134C.1.pep
SGLTLIKVMQWCSLSSSLHKCTKQITLVIKLHPLTTRSSIAHQCHNQTPEVLSNSSGNHNRTQEQASTQSRFNTCSNCYYI

SEQ ID NO: 190604 - protein, 34 aa, Glycine max
  Clone ID: PAT_MRT3847_143135C.1.pep
PFLPAIMREFYTLIPLKEIGVIRGLQAFLAFYNR

SEQ ID NO: 190605 - protein, 62 aa, Glycine max
  Clone ID: PAT_MRT3847_143136C.1.pep
MTVYATIVRPNGETLRGMQKENDVLIFNIFTAEAICKLYAYETKTTLYGPADITKKLSGGFI

SEQ ID NO: 190606 - protein, 102 aa, Glycine max
  unsure (1)..(102): unsure at all Xaa locations
  Clone ID: PAT_MRT3847_143137C.1.pep
GYFITGASAIYDGGREDAEFPITRLKRKGTKTVLESGDRXEAVASVADTHGTENDSVNXSFRPEQNSGFSSSLKADGHDVSLSGDGIYDARSLAVTDLGIAL

SEQ ID NO: 190607 - protein, 141 aa, Glycine max
  Clone ID: PAT_MRT3847_143138C.1.pep
WFVSPIWFCPAPTPKGITQKGVKDYWGGLWKSFPPKKKKKKRGLNWGGKKKGFVFFQGGPFPPAFQTVFPFFFFFLGPPTRGSLFFFWFLEKNDWKTGVFFEAPFLLGGGPFGKKKGVKIFFWPPPGGPHRAQGKKSFFFL

SEQ ID NO: 190608 - protein, 511 aa, Glycine max
  Clone ID: PAT_MRT3847_143139C.1.pep
MEESLGQKWKQPEFALASVSDLSLAPSSSASPGIARFNSDGLQIHHQSHQIPFNVDPRTVQLFKVSPVLSVCLVEGSDVGKKGNVPNGTNTTSKSKFDEKIESSSAKMYFHYYGQLLHQQNMLQDYVRTGTYHAAVLENRADFIGRVVVDVGAGSGILSLFAAQAGAKHVYAVEASEMAEYARKLIAGNPTLAQRITVIKGKVEDVELPEKADILISEPMGTLLVNERMLESYVIARDRFLIPNGKMFPTVGRIHMAPFSDEYLFVEIANKALFWRQQNYYGVDLTPLHGTAFQGYFSQPVVDAFDPRLLIAAPMFHVLDFTKIKEEELYEIDIPLKFTATVGARLHGLACWFDVLFNGSTARRWLTTAPGSPTTHWYQLRCVLSQLNKSGDRVLTIYVMAGQEITGRMHLIAHTAQSYTIYLKLSAKTWGPGAEQGGILQTSSCKLDLKEPYYRMSQPQAYPLAQDQQPQPLLQTQDIHIQSQELDEVEMMQQPSTKSCAQIDSLMQNAS

SEQ ID NO: 190609 - protein, 37 aa, Glycine max
  Clone ID: PAT_MRT3847_14313C.1.pep
LKIKNLTPVIIEIFLLSFSIKLFLKYFFIFHIKFNIN

SEQ ID NO: 190610 - protein, 91 aa, Glycine max
  Clone ID: PAT_MRT3847_143140C.1.pep
AGISWLDVCIQFNAGNNFILANNKNHTFDGFGINNLDWYKPEHFGPHYLGGSKWKIAYLGPLVEVEPLGEFSFQRIQVHGPCFFERHQGGD

SEQ ID NO: 190611 - protein, 57 aa, Glycine max
  Clone ID: PAT_MRT3847_143141C.1.pep
HLRLYDKKVRGVIKQRKGSSVKKLNYACVQRHKVSIPILIYILMGFVDHTFLNRNFR

SEQ ID NO: 190612 - protein, 368 aa, Glycine max
  Clone ID: PAT_MRT3847_143142C.1.pep
MEKELVELYEAAKKAADAAISGDGKHEESRCIDALEQLKKFPVNYKILVNTQVGKHLKVLTKHPRLKIKAFAIDLIEIWKGIIIKETSKNKNGGSDSKVESANGEKSKAGKMQKSPSVKVEKGETVKVEKIDRNGTTKSSSENMKKVQNDVKNEKTDRSASVKVEKIAKEEKPVSGAKKMSSSSAAPPKLKTMIKSNDATRDKIREILHEALSKVTGEADEDLVDVVNNSDPIRVAVTVESVLFEKWGPSNGAQKVKYRSLMFNLKDSNNPDFRRKVLLGVIEPEQLINMSTAEMASEQRKQEYQKITEKALFECERGGPPKATTDQFKCGRCGQRKTTYYQMQTRSADEPMTTYVTCVVCNNRWKFC

SEQ ID NO: 190613 - protein, 47 aa, Glycine max
  unsure (1)..(47): unsure at all Xaa locations
  Clone ID: PAT_MRT3847_143143C.1.pep
RADSARGMVEARVITXEHGHRFCGGSTQVLMMFDFSYSYPSSYNKYL

SEQ ID NO: 190614 - protein, 62 aa, Glycine max
  Clone ID: PAT_MRT3847_143144C.1.pep
IIKGSHDLVIICGGGLCKNRFGKKPNQTGFQTGLTSFVFNPNLRTGFQTSLKLNWFRKPVLN

SEQ ID NO: 190615 - protein, 48 aa, Glycine max
  Clone ID: PAT_MRT3847_143145C.1.pep
SPNHTSWVFVEECRTGLAKSVKPCLLPTANAHFSFIFISVSFYSILCF

SEQ ID NO: 190616 - protein, 57 aa, Glycine max
  Clone ID: PAT_MRT3847_143146C.1.pep
SDFGSRFYRILVNNMDGFYWPFPARVFKFNSRVLKINKSYWIFILDLWGYFTCCSHG

SEQ ID NO: 190617 - protein, 154 aa, Glycine max
  Clone ID: PAT_MRT3847_143147C.1.pep
LLIFFLFLSPPQQSSERLHNPKMPFKRYVEIGRVAQINYGKEYGRLVIIVDVIDQNRALVDAPDMVRSQVNFKRLSLTDIKIDIKRIPKKKDLIQAMEAADVKNRWEKSSWGRKLIVQKRRASLNDFDRFKIMLAKIKRAAVVRQELAKLKKSA

SEQ ID NO: 190618 - protein, 78 aa, Glycine max
  Clone ID: PAT_MRT3847_143148C.1.pep
RQLMVLKPLVYSNLKKINDDGDINRKELIQMQKLSHCLSLLIFYVSSIQKACFFFLMHSYKMYLLSFVDVLIILSLKD

SEQ ID NO: 190619 - protein, 195 aa, Glycine max
  unsure (1)..(195): unsure at all Xaa locations
  Clone ID: PAT_MRT3847_143149C.1.pep
TQVAPEAIRPRARLPGCHTKKKKKKKKKKKKKKKKKKKKKKKKKKNLSPLQQSLQRLHNPKMPFKRYVEIGRVAQINYGKEYGRLVVIVDVIDQNRALVDAPDMVRSQVNFKRLSLTDIKIDIKRIPKKKDLIQAHGAXYDVKNRWEKSSWGRKLIVQKRRASLNDFDRFKIMLAKIKRAAVVRQELAKLKKSAS

SEQ ID NO: 190620 - protein, 59 aa, Glycine max
  Clone ID: PAT_MRT3847_14314C.1.pep
MIKKQLMCLTFWTEYHLLIYLSRYAMHVNKLASMRIVYNLLFVNRALVTEDFLRRELRF

SEQ ID NO: 190621 - protein, 124 aa, Glycine max
  unsure (1)..(124): unsure at all Xaa locations
  Clone ID: PAT_MRT3847_143150C.1.pep
LLPLFLSGGKKKKKKPPPPRGGEKKKKKGGGGAPLFFFCFLWGGENIFFLRGFIKHPRRGNKKKPLPQKKKPPFFVVFFWGKKNFFFLKKKGGCGGGXXKILPQGPPGRVFFQNFFPGFPVMVF

SEQ ID NO: 190622 - protein, 673 aa, Glycine max
  unsure (1)..(673): unsure at all Xaa locations
  Clone ID: PAT_MRT3847_143151C.1.pep
MKKVCHCPIFLALALCLCILCVAAEAAGQNDTLALTEFRLQTDTHGNLLTNWTGADACSAAWRGVECSPNGRVVGLTLPSLNLRGPIDTLSTLTYLRFLDLHENRLNGTISPLLNCTSLELLYLSRNDFSGEIPAEISSLRLLLRLDISDNNIRGPIPTQLAKLTHLLTLRLQNNALSGHVPDLSASLLNLTVLNVTNNELRGHVPDSMLTKFGNVSFSGNHALCGSTPLPKCSETEPDTETTITVPAKPSSFPQTSSVTVPDTPRKKGLSAGVIVAIVVAVCVAVLVATSFAVAHCCXRGSTSGSVVGSETAKRKSGSSSGSEKKVYGNGGNLDRDSDGTNTETERSKLVFFDRRNQFELEDLLRASAEMLGKGSLGTVYRAVLDDGCTVAVKRLKDANPCERNEFEQYMDVVGKLKHPNIVRLRAYYYAKEEKLLVYDYLPNGSLHALLHGNRGPGRIPLDWTTRISLMLGAARGLARIHAEYNASKIPHGNVKSSNVLLDKNGVALISDFGLSLLLNPVHAIARLGGYRAPEQVEVKRLSQEADVYGFGVLLLEVLTGRAPSKEYTSPAREAEVDLPKWVKSVVKEEWTSEVFDQELLRYKNIEDELVAMLHVGLACVAAQAEKRPCMLEVVKMIEEIRVEESPLGDDYDEARSRTSLSPSLATTEDNLA

SEQ ID NO: 190623 - protein, 61 aa, Glycine max
  Clone ID: PAT_MRT3847_143152C.1.pep
SYYDKKGNKIKQFGMCFNLVFQCLVSYKWLIIPIEAFQSMWNGYSIGIWANRISKYIPHYL

SEQ ID NO: 190624 - protein, 103 aa, Glycine max
  Clone ID: PAT_MRT3847_143153C.1.pep
TPHTVIYQLHQLGGKLACAQSVDTLSPRNTSLLVPYLLQGMKSPHNGGPFGCPNWGCFHGHDGASCNDNSTWPQRVSPDAHCCLPIMFLSVKVTHGHFLFCAH

SEQ ID NO: 190625 - protein, 146 aa, Glycine max
  unsure (1)..(146): unsure at all Xaa locations
  Clone ID: PAT_MRT3847_143154C.1.pep
MSAMDFSSIYGVSHKPFLTLFLLFLLPLHSHSHNSTTSAHINSGSILDAMLDSHYTELVXLVEKALLLQQLENAVGNHNITIFAPRNQALERDLDPEFKRFLLEPRNLRSLQTLLMSNILPTRIAYHHWTVGDLLHRTLSDHHLDL

SEQ ID NO: 190626 - protein, 66 aa, Glycine max
  Clone ID: PAT_MRT3847_143155C.1.pep
PGVSEQPVYCVVIRATHVHIKQPKEYNRRCRKLVTFPLSWHNRCSQSSLCSCGVASLASSLLLCVA

SEQ ID NO: 190627 - protein, 49 aa, Glycine max
  Clone ID: PAT_MRT3847_143156C.1.pep
LQCIECQLHYYLDNNKNNDNNNIVLPKVSMFGVKLLKLHQLRNGNSLWI

SEQ ID NO: 190628 - protein, 88 aa, Glycine max
  Clone ID: PAT_MRT3847_143157C.1.pep
TRPISLHKNYWSGNVTGFAMACSNTFGLVTGAFLLGFGLSEIPKGIWLSADWNIEQKVLSHKVAKMAVKLDDAHHDFSNAIVVSYSYL

SEQ ID NO: 190629 - protein, 139 aa, Glycine max
  Clone ID: PAT_MRT3847_143158C.1.pep
IRDDILQPCCASLMIPSRERNTFKTLSIAKMDDHPMRTRWCLQNLKLSSHAMCGRTKDAEIGDTAPALADSIGNSVTETMACNGNQTASHMAANEQLRGEGLNQNHTEGFVTTIVDERPQKSPLPPSESAEMLSLAESL

SEQ ID NO: 190630 - protein, 67 aa, Glycine max
  Clone ID: PAT_MRT3847_143159C.1.pep
IQFWNSEENFISTLPVITHSECPFVLNRIAIMSNIFPHHKHHKKSPFYINWILCFVELMYHRDSHLN

SEQ ID NO: 190631 - protein, 96 aa, Glycine max
  unsure (1)..(96): unsure at all Xaa locations
  Clone ID: PAT_MRT3847_14315C.1.pep
GAILTLAITEGHAFIELVGLKXQHQDQEQGEQPLELRQYRPELSEQDIFVNPPRYPLVLSAISNLNFFATAIXNAHHNHTHFLLTFAIHSAQPYTF

SEQ ID NO: 190632 - protein, 71 aa, Glycine max
  unsure (1)..(71): unsure at all Xaa locations
  Clone ID: PAT_MRT3847_143160C.1.pep
DYLVDRKENKKITITETEHFSNKKRRKQHSKFQLFSFMYCNKMNFSGAQQNFKTLTLSSSRCVWXYIYIYI

SEQ ID NO: 190633 - protein, 48 aa, Glycine max
  Clone ID: PAT_MRT3847_143161C.1.pep
LESTHGGVVCRFLLRVISQVYVEEKCLGHRETNRFFCLCNSIAVRETV

SEQ ID NO: 190634 - protein, 67 aa, Glycine max
  Clone ID: PAT_MRT3847_143162C.1.pep
KTCSTCIVALCTHIVYGCLPITNTKFLCHCTQYTIMHHVILRCSPSSNHSCCCRHLSAPTCDQFPHE

SEQ ID NO: 190635 - protein, 133 aa, Glycine max
  Clone ID: PAT_MRT3847_143163C.1.pep
MALNMTHQIGTLAAATVPVPNSSAGESTAAMSAATLWKPPAVSLKCKVTRTEGGAEGLSPPLSPCRSPVLRADLSAACQAFTAEVAAEEYIAGGKEKGEGKKGVPLFVMMPLDSVKTGNAVNRKKAMNAAMAA

SEQ ID NO: 190636 - protein, 77 aa, Glycine max
  Clone ID: PAT_MRT3847_143164C.1.pep
NSLQSGHGWYLRLHFIEKKHANESTQDLYFCRFRQTIAKYIQQYARSSKITHNEQQITESNNNMFSSITLDIITRSR

SEQ ID NO: 190637 - protein, 122 aa, Glycine max
  Clone ID: PAT_MRT3847_143165C.1.pep
LSSPGFSKGGTAVNEDVGNLYKRLGLMEPNATTLCGAKISFSNWPNPAPWVALSLGGPLTEVLRSSTVVAATSTNVATSGTPLPATSTHVAFPYGVVQKTPVSLCHNSSNSSPRGASSRAHS

SEQ ID NO: 190638 - protein, 46 aa, Glycine max
  Clone ID: PAT_MRT3847_143166C.1.pep
KITSLLYWYVKTYRNRSITRSCWSGSESRQINYVCPSSALLHSKCW

SEQ ID NO: 190639 - protein, 196 aa, Glycine max
  unsure (1)..(196): unsure at all Xaa locations
  Clone ID: PAT_MRT3847_143167C.1.pep
MAKGRKLTTSRSERFLGTYAYSQGSAAVNPSELREEDVWGAGDDAGEREWDPHFAAMSNGGGSRRRIPRDTDVHRRVGGLSLAFEAPASGASPRIVHQFRAREEMASTPRVRHMATSAPMNVPDWSKILRVDSVDSLNDDYNDEDESEMVPPHEYLXARSQTMVANSVFEGVGRTLKGRDLSRVRDAVWSQTGFDG

SEQ ID NO: 190640 - protein, 86 aa, Glycine max
  Clone ID: PAT_MRT3847_143168C.1.pep
MHKNHGHSTNEGLLYFASDKCSSHTPKHEDVKKSQQNFDGDPSKAQLMVALCHSQTRAREAEVAANIAYAEKEDIATLIFKQASQL

SEQ ID NO: 190641 - protein, 427 aa, Glycine max
  unsure (1)..(427): unsure at all Xaa locations
  Clone ID: PAT_MRT3847_143169C.1.pep
MAGAEARALWQRTANRCFVQEDAKRAPKLACCQSSCATSKSVDTGPASTADESDHNTVNVTHFNRKSSISNLSSDCRWWLHSQPNYGYQKGLTYEQLNALEDEVETLLASDLSKNSEEFHELMDVMEKHETMEIDCVGCSGSSKKMIFTWNQTEEXSWIESDKAEPWWRTTDRDELAPFVSQKSLNQVKMVMACFWDGQASXGHPCAHVNNDKIKTASYDWEAKSRSFSNLTAHTPGSLDSRLMHKNQGHSANEGLLYFASDKCSSQTPKHEDLKKSQQTFDGDPSKAQLMEALCHSQTRAREAEEAAKKAYAEKEHIVTLIFKQASQLFAYKQWLQLLQLETLCIQIKSKDQPISTLFPVALPWMSYEGRSSRKRKQKISNSKQGERKANSKCDITTYAVAFALGLSLVGAGLLLGWTVGWMLPRS

SEQ ID NO: 190642 - protein, 153 aa, Glycine max
  unsure (1)..(153): unsure at all Xaa locations
  Clone ID: PAT_MRT3847_14316C.1.pep
MSAAMWSVVIRRSSWEILRQIKRNILLGVAIRTFSTPTGLYGFPHXKTPKGFQPFVDDAIQRSGELISYICSKRPAAEVMRAMDEISDTVCSVVDSAELCRNTHPDRELXEEATKASMKINEYLHYLNTHHDLYXLVKKAEQECHMLSEEAQR

SEQ ID NO: 190643 - protein, 80 aa, Glycine max
  Clone ID: PAT_MRT3847_143170C.1.pep
RPTSTRPSASPPDWSRSASPTASTSGSMVKSSSGSPSRGSPHQRPPPQPQLPHWGGKPSERPIRLPIWKTRVCSPRTTGG

SEQ ID NO: 190644 - protein, 168 aa, Glycine max
  Clone ID: PAT_MRT3847_143171C.1.pep
MLAQGFEDEEKWLAEGIAGIQHNAFFMHRALDDNNLRDALKYSAQMLSELRTSRLSPHKYYQLYMRAFDELRRLEIFFKDESRHGVSIVDLYELVQHAGNILPRLYLLCTVGSVYLRCKDAPVKDVLKDLVEMCRSVQHPIRGLFLRSYLSQVSKDKLLDIGYEYEEG

SEQ ID NO: 190645 - protein, 45 aa, Glycine max
  unsure (1)..(45): unsure at all Xaa locations
  Clone ID: PAT_MRT3847_143172C.1.pep
AHGLXRAFXGFXVXPXSGALDFFXLXVDGXGARCXXCXAVFNXXH

SEQ ID NO: 190646 - protein, 122 aa, Glycine max
  Clone ID: PAT_MRT3847_143173C.1.pep
MGGSSSFRDEYTLEQRLGESRDIVAKYPDRVPVIVERYAKCDLPELEKKKYLVPRDLSVGHFIHILSSRLSLPPGKALFVFVKNTLPQTANMMDSVYRSFKDEDGFLYMYYSTEKTFGSYIM

SEQ ID NO: 190647 - protein, 81 aa, Glycine max
  Clone ID: PAT_MRT3847_143174C.1.pep
KGLVVEGWPIKEPERLKLVWKEGAWKKMERQGRLIQHSDLFVARPDQPKIKGDLNNWPFPPDGPKVGKLNPNLWNYGPQMA

SEQ ID NO: 190648 - protein, 87 aa, Glycine max
  Clone ID: PAT_MRT3847_143175C.1.pep
FFSIETELQSMAAFTSIVVQYSSTSSLQSLVPSLEATRDHNSWWGRVRSYRPTAKISLQQNITRGLTIQNAATKPAKSPGIVLSFSY

SEQ ID NO: 190649 - protein, 53 aa, Glycine max
  Clone ID: PAT_MRT3847_143176C.1.pep
HSWYLRIFLDCLRTPRNRQGEDQPVIVIFSFLKLSFSQPHNLLQILNRIVTAE

SEQ ID NO: 190650 - protein, 129 aa, Glycine max
  Clone ID: PAT_MRT3847_143177C.1.pep
FDVSIEYEACSIPNDCGSLVVAKVGNHKHIVGFHVAGIKRRLGFASLIPYVEPVVQAQSAEAYFDFFPVEVDSQDGVAHIGELKSGVYVPLPTQTNSVETPKGWHLDLPRDKIASGSTTTDDRLFGTDH

SEQ ID NO: 190651 - protein, 73 aa, Glycine max
  Clone ID: PAT_MRT3847_143178C.1.pep
MSCSNTRTALEFALFPKEMLLGSWYGWGLSLYRRGRCQDSAHPEEDTCPHGEGAPAQAGESVPSQQLCHHPAG

SEQ ID NO: 190652 - protein, 137 aa, Glycine max
  unsure (1)..(137): unsure at all Xaa locations
  Clone ID: PAT_MRT3847_143179C.1.pep
FAKRGLTVKDLVTLSGGHTLGFSHCSSFEARLRNFSSLHDTDPSMNTEFALDLRKKCPKPNHNHNAGQFLDSTASVFDNDYYKQLLAGKGVFFSDQSLXGDHRTRWFVEAFVKDQSLFFKEFTASMFKLGNLRGSRN

SEQ ID NO: 190653 - protein, 107 aa, Glycine max
  Clone ID: PAT_MRT3847_14317C.1.pep
HAYGYNINFTLLCDSLCDVQRTLRDTQCAAAAAGAAAGDEDGSDTVGDIEGGHSCLHGDLLDHLVHDSSPVPSPILRRSWALPLLRPRLQQLVARLGASDRACANRR

SEQ ID NO: 190654 - protein, 439 aa, Glycine max
  Clone ID: PAT_MRT3847_143180C.1.pep
MAEPHSTAAILPPSTARLEETPSGSSQTPLRSGRGGWSIVDGSFAIVRDNTCSCFVVVFSLWFFVSMTMILGVYGSMTIVLGPKSSIVFQPSPVFVQSVKVENLKANPGPGPILYGTYRYPPLDVVTTWGESINVSLPSGSYKEWKYYLNCGSSINISYHVSSKSSSVFLIIAEGDVSLTRWLEDPTEPNTTLSWNVIHGTGMITQDIFWSSSYYVALGNLDEDVEVALNLSIRASLHNTTNAFYKCDLANGPCSLNLLFSDGSAAVLVTPGPQQNASNEWYVKLSYGPRWVTYIFGIGGLTLLVFGAFNFLNKLQCAHEDRAGVRSEGTERQRAPLLPHKDDDLSSWGSSYESLPQDEKDLGFLPGGPIDGKTLVDGETSNNTRHLCAICFDAPRDCFFLPCGHCVACFACGTRIAEAAGTCPVCRRNMKKVRKIFTV

SEQ ID NO: 190655 - protein, 85 aa, Glycine max
  Clone ID: PAT_MRT3847_143181C.1.pep
NPPLSSVCSLPFVSLVSLPHTAGRCLPAPWLAAHGWRGRRVGHLASYFSRKHYVRPISFFLLRLGCSVMLRRPSLIQPLSSLASL

SEQ ID NO: 190656 - protein, 140 aa, Glycine max
  unsure (1)..(140): unsure at all Xaa locations
  Clone ID: PAT_MRT3847_143182C.1.pep
SXXXXPHRXXXXSAVXXXAXAXRXAXXVXXXXXIPXVXDXCXXXXXXXXRXRSXLXPAXXSXXXXXXXLXXXGARXXXXRXXXXXXXXVXSXXVXXXXXXCXXXXXCXXXXXLCXXXCXXXSSXXXXLSVXXAXXXXXXX

SEQ ID NO: 190657 - protein, 54 aa, Glycine max
  unsure (1)..(54): unsure at all Xaa locations
  Clone ID: PAT_MRT3847_143183C.1.pep
RVSXQXPTKXVGXXXXXLFLQQKXNHLWACLVQIMSNDPDXXXXTLSXXFXRLX

SEQ ID NO: 190658 - protein, 60 aa, Glycine max
  Clone ID: PAT_MRT3847_143184C.1.pep
FLESRCGGPYRIGSSLVAANTHALLVRPVAWKSAGAIDWCYTTAGAFLTLKHACKQEQGC

SEQ ID NO: 190659 - protein, 195 aa, Glycine max
  unsure (1)..(195): unsure at all Xaa locations
  Clone ID: PAT_MRT3847_143185C.1.pep
CRCQVIRSVSQWSAGTSQTEESIHNAYCSLIEKAEYFIYIENQFFISGLSGDEMIRNRVLEALYRRIMRAYNDKKSFRVIVVIPLLPGFQGGLDDSGAASVRAIMHWQYRTIXRGQNSIMHNLYELRGSKIHDYISFYGLRSYGRLSNGGPVATRQGYVHSKIMIVDDSITVIGSANINDRSLLGSRDSEIGIVL

SEQ ID NO: 190660 - protein, 124 aa, Glycine max
  Clone ID: PAT_MRT3847_143186C.1.pep
QVHLQTDGFDFSSNKWVDQIKMPKEMAHSHLGIASDGRYIYIISGQYGIQCSGPTTASFSLDTATKKWKPLPPLPAPRCTINICISTALTHLLFVNVCCMLFFKLQINADDGTAIVVIMWLLQL

SEQ ID NO: 190661 - protein, 80 aa, Glycine max
  Clone ID: PAT_MRT3847_143187C.1.pep
GPPGSFRNTRKFRVGPGARSKKICPPHYKGPRVSAPRLKINFGPPSFFKGEKKNAVPSWVPMGQKGLLEDLSEFGGAPAG

SEQ ID NO: 190662 - protein, 65 aa, Glycine max
  Clone ID: PAT_MRT3847_143188C.1.pep
EKKPRKDSGTEREWSDRGRLKSQYFRYFLIFSSQFGDFKNKVQNKENLGKIWPFGIWFKGINQPF

SEQ ID NO: 190663 - protein, 71 aa, Glycine max
  Clone ID: PAT_MRT3847_143189C.1.pep
HFSDMADLNFLMCKAIENPGLTPSSSLRTSIMSVFEDTVIDNGGKNQREVGVEDYMGCASVHGVGSSIAIF

SEQ ID NO: 190664 - protein, 111 aa, Glycine max
  Clone ID: PAT_MRT3847_14318C.1.pep
CHHLSMDSQQLFSFGGVTSAGLPYMSSFPTVPSLPNSLLRSLKYDTGNSPNSPFSTYFDSDTLSALSDGQEQYSPGEILSGVSSSLETNHYMYNRSISTLDSFPLYSDRNS

SEQ ID NO: 190665 - protein, 131 aa, Glycine max
  Clone ID: PAT_MRT3847_143190C.1.pep
FPEAWHSDSASVKGDGVYNIRSKVYVNPKLWYLRVNVIEAQDVEPNDKSQPPQVFVKGQVGQQVLKTKLCPTKTPNPMWNEDLVFVAAEPFEEKLVLTVENKASPGKDEVAARISLPLNKFEILLDHRAVH

SEQ ID NO: 190666 - protein, 67 aa, Glycine max
  Clone ID: PAT_MRT3847_143191C.1.pep
KHLVRGSLACQTSDAGVSPSQPPLSQSVIRESPAPAGRFPNGSITSRRALVIEKSVGREWKITLRGT

SEQ ID NO: 190667 - protein, 391 aa, Glycine max
  unsure (1)..(391): unsure at all Xaa locations
  Clone ID: PAT_MRT3847_143192C.1.pep
MLIGGIEPRIFKSWSCRDWCLLKLMRDGMNSRILLDAAKSCILASSPVFRRQQFLIRCVGGSTDQRDMQALRSLEVDSQSIIRAITPALDPTRHKGQAGNIAVIGGCREYTGAPYFSAISALKIGADLSHVFCTTDAAPVIKSYSPELIVHPVLEESYNVGEEHKSSIASKVLAEVDKWLERFDCLVVGPGLGRDPFLLDCVSEIMRHVDXDLLTIFIDGDGLFLVTNNLELVSGYALAVLTPNVNEYKRLVQKVLSSEVNDIDAPQQLLSLAKQIGGVTILSKGNSDLISDGDTVKSVSVYGSPRRCGGQGDILSGSVAVFLSWARQHILAADSNSNLSCKNPIVLGCIAGSAILRKAASLAFSNKKRSTVTGDIIECLGRSLEDISPAC

SEQ ID NO: 190668 - protein, 144 aa, Glycine max
  Clone ID: PAT_MRT3847_143193C.1.pep
MKDSVTPPLLLDAAKSCILASSPVFRRQQFLIRCVGGSTDQRDMQALRSLEVDSQSIIRAITPALDPTRHKGQAGNIAVIGGCREYTGAPYFSAISALKIGADLSHVFCTTDAAPVIKSYSPELIVHPVLEESYNVGYNFKSSS

SEQ ID NO: 190669 - protein, 58 aa, Glycine max
  Clone ID: PAT_MRT3847_143194C.1.pep
KIPNSSLGKLEKQQHLSFYTEVVSDFVLLQVYRKNNHTLNKHLVISWISNSNSLLTMA

SEQ ID NO: 190670 - protein, 267 aa, Glycine max
  unsure (1)..(267): unsure at all Xaa locations
  Clone ID: PAT_MRT3847_143195C.1.pep
MRDGMNSRILLDAAKSCILASSPVFRRQQFLIRCVGGSTDQRDMQALRSLEVDSQSIIRAITPALDPTRHKGQAGNIAVIGGCREYTGARELSTXSTINIFLFCAQLCRPIFKYRLCSYIHNYIFRILELNYLHDCDRVIFKLLHSLLQFGRHFSCKLIPFEPLDCVSEIMRHARRSNIPIVIDGDGLFLVTNNLELVSGYALAVLTPNVNEYKRLVQKVLSSEVNDIDAPQQLLSLAKQIGGVTILSKRNSDLISDWDTSRSFTNI

SEQ ID NO: 190671 - protein, 156 aa, Glycine max
  Clone ID: PAT_MRT3847_143196C.1.pep
MKSLNLWPNPNGRILPRISTCPTLNLVYSVPPSPSSVRCHSSPTQLPLRCAVLGAGFAGLSVVWHLLKQSPKELQMRIDIYDEVGIGGGASGVSGGLLHPYSPKVKLLWEGAQCWKESMKLLRVAEEASVSKDCRTGESAEDMKAFVAHKRVALHC

SEQ ID NO: 190672 - protein, 161 aa, Glycine max
  Clone ID: PAT_MRT3847_143197C.1.pep
MRDGMNYRILLDSAKSCILASSVPRRQQFLIRCVGGSIDHRHRDMQALRSLEVDSQTVIRAITPALDPTRHKGQAGNIAVIGGCREYTGAPYFAAISALKIGADLSHVFCTKDAAPVIKSYSPELIVHPVLEESYNVGEGHKSSIASKGLAEVDKWLERFD

SEQ ID NO: 190673 - protein, 753 aa, Glycine max
  Clone ID: PAT_MRT3847_143198C.1.pep
MESSISLSFFSFFLLQLTLLSATKKTYIVHMKHRHDSTVHPTHRDWYTATLDSSPDSLLYAYTAAYNGFAATLDPQQAHALRASHSVLAVYEDTRYTLHTTRTPEFLGLQAHSAFWQDLHQASHDVVIGVLDTGVWPESQSFDDSQMPQIPTRWRGNCESAPDFDPSLCNNKLIGARSFSKGYRMASSNARKTRDPATPRDLDGHGTHTASTAAGSAVANATLLGYATGTARGMAPQARVAAYKVCWTGGCFASDILAGMDQAIQDGVDVLSLSLGGSSSVPYYFDTIAIGAFAALERGIFVACSAGNTGPRSGSVANVAPWIMTVGAGTLDRDFPAYATLGNGKRFAGVSLYSGEGMGDEPVGLVYFSDRSNSSGSICMPGSLDPDSVRGKVVVCDRGLNSRVEKGAVVRDAGGVGMILANTAASGEGLVADSHLVAAVAVGESAGDEIREYASLDPNPTAVLSFGGTVLNVRPSPVVAAFSSRGPNGVTAQILKPDVIGPGVNILAGWSGAVGPSGTEDSRKTNFNIMSGTSMSCPHISGLAALLKAAHPDWSPSAIKSALMTTAYTNDNTESPIRDAKGEETISTPWAYGAGHVNPQKALSPGLVYEASTQDYIAFLCSLNYTLDHLRLVVKHPDANCSKKFADPAELNYPSFSLVFGSNKLLRYTRTLTNVGEPGSVYDLVLSVPSTVHVTVNPRRLQFRQLGESQTYTVTFLSNRTLNDSVTSDFGTIMWTNQLHQVRTPLAFTWTYF

SEQ ID NO: 190674 - protein, 97 aa, Glycine max
  Clone ID: PAT_MRT3847_143199C.1.pep
VFAQIFASLAGCAQGLQMHLFGAIRGIPFTPATEVLFVGKAVRTYGSLLKFNRKRPYNHLHSFPWSGVPQDEQHLLLVHIHQRILPIGLKYIWCMFF

SEQ ID NO: 190675 - protein, 71 aa, Glycine max
  Clone ID: PAT_MRT3847_14319C.1.pep
VILVYCKVGGNPTLPLSPFSYAIYQPPPPSTCSNSLPPNTTQHSIPCFIFSHTQTSFVFIDFSGGITTICR

SEQ ID NO: 190676 - protein, 168 aa, Glycine max
  unsure (1)..(168): unsure at all Xaa locations
  Clone ID: PAT_MRT3847_1431C.1.pep
LGVLNQWKLPVKAWVGPFGEMALPNIVNETSQSTNMESKTSIDVKNDGDLTPSVPHEDFQQIEQGFLATSGEVKHHKLNVDGVPKKIKVHKRPANDLKSKTSGIEGKRKKKKKNEINLQPISGHLEKISTSEKAVQLSGQSVKPVSIGLASREDLRSEPMQXDASTVI

SEQ ID NO: 190677 - protein, 242 aa, Glycine max
  unsure (1)..(242): unsure at all Xaa locations
  Clone ID: PAT_MRT3847_143200C.1.pep
MDSSISLFFLLLQLTMLSATKKTYIVHMKQRHDSSVHPTQRDWYAATLDSSPDSLLYAYTASYNGFAAILDPQEAHVLRASDSVLGVYEDTRYTLHTTRTPEFLGLQAHSAFWQDLHQASHDVVIGVLDTGVWPESQSFDDSQMPQIPTRWRGNCESAPDFDPSLCNNKLIGARSFSKGYRMASANARKNREPASPRDLDGHGTHTGSTXAGSAVSNATLLGYATGTARGMAPAARVAAYKV

SEQ ID NO: 190678 - protein, 46 aa, Glycine max
  Clone ID: PAT_MRT3847_143201C.1.pep
CNALNWESFLGRTMQFLGGLQTQKGGGVTKQDKNMEIYLVQRRGRG

SEQ ID NO: 190679 - protein, 415 aa, Glycine max
  Clone ID: PAT_MRT3847_143202C.1.pep
RTAASLEAGFSHDIFVEWANDVKNLVLFTERGQFATLARMLQADPPPKAVKVVVSKRVPLVGEELIAYEEEQNRIKKEALKASLMKEEELKTSHGADNNISDSMVIDSGNNHVPPEVSGPRGGGYRDIFIDGFVPPSTSVAPMFPCYENTSEWDDFGEVINPDDYVIKDEDMDQTAMHGGSDINGKLDEGAASLILDTKPSKVVSDERTVQVRCSLVYMDFEGRSDGRSIKNILSHVAPLKLVLVHGSAEATEHLKQHCLKHVCPHVYAPQIEETIDVTSDLCAYKVQLSEKLMSNVLFKKLGDYEIAWVDAVVGKTENDPLSLLPVSGAAPPHKSVLVGDLKLADIKQFLSSKGVQVEFAGGALRCGEYVTLRKVGDASQKGGGSGAQQIVIEGPLCEDYYKIRDYLYSQFYLL

SEQ ID NO: 190680 - protein, 176 aa, Glycine max
  Clone ID: PAT_MRT3847_143203C.1.pep
MHDSSPIQRFNHGPGTKARQPPIGIGSSWNRIQSCDTYRDSYYWLAMQDPRKKRNLTQKASLFQLQANGVKEDGQTSLSLKSRQKGSKRHLMTEVSPPFQKQEGSNSNSLPDSSAAGNEYRALRRKYMLLEDESFALGKEVREVEDEVKTLEDEKFALLDQLIIMEGLVDPTEKHS

SEQ ID NO: 190681 - protein, 77 aa, Glycine max
  Clone ID: PAT_MRT3847_143204C.1.pep
MAQEGSNSDSLPDSSAAGNEYRALRRKYMLLEDESFALGKEVREVEDEVKTLEDEKIALLDQLVLMDALVNPAEKHS

SEQ ID NO: 190682 - protein, 58 aa, Glycine max
  Clone ID: PAT_MRT3847_143205C.1.pep
RFYYKQTLAGITFPGFTISFQPTTSFIFFIVLNDPPSNPILKHFIFPISNTMFTFSSS

SEQ ID NO: 190683 - protein, 69 aa, Glycine max
  Clone ID: PAT_MRT3847_143206C.1.pep
VSKGMEQRAPKSKQPMNPDFKYQRSYLAWDDNLFSPSYNVLIFSPINPNLLNFATLLGIISCVSLLFQM

SEQ ID NO: 190684 - protein, 79 aa, Glycine max
  unsure (1)..(79): unsure at all Xaa locations
  Clone ID: PAT_MRT3847_143207C.1.pep
VTTLIVYNYQLLQGKHYGLEELQGMLMEMAKGFECPSMYCGVNSVIDESPCVKRTRFDTXMMENKGSHFQVPDLNLYCS

SEQ ID NO: 190685 - protein, 55 aa, Glycine max
  Clone ID: PAT_MRT3847_143208C.1.pep
KEKAQRCCFMSTKKYSFFSCTENHRIIGLSGSSLLEEEPDATPIKLKVLVTEIIL

SEQ ID NO: 190686 - protein, 75 aa, Glycine max
  Clone ID: PAT_MRT3847_143209C.1.pep
SKFHVRSVWRDLRGLLVVVLKGVGQPLSMASPYYSPLLGGFFGDNFLNSLVGPTLETSDLSPFSFFRLRAVWVAL

SEQ ID NO: 190687 - protein, 112 aa, Glycine max
  Clone ID: PAT_MRT3847_14320C.1.pep
EDYNSLRSIGLTGKWKQIAPCITQLQPRKTNPDLANISKTSIGDQYLETLTTRCMRKTNQKAGTYSTIPYVLYHLLGQIIKHAVRSERNRGTMLIRELISNETQVGLVNGTK

SEQ ID NO: 190688 - protein, 799 aa, Glycine max
  Clone ID: PAT_MRT3847_143210C.1.pep
MANPTQPNVGFTPERESSNPEKSPRPPPPSFVASPPGFPPPKLHLQQDQASSRSVKTPNVLSPANGVTTGSPVPHLSTPPGPPVFTSPVRPAAVPFRTSPASPQPLAFSSASSLPTSSSPLQFSNGSFESQHQVSDSIEDHVPLGESSFVLFSAHKVLKQKKQANVPSLGFGALVSPGREVSVGPQIIQRDPHRCQSCGAYANIYCNILLGSGSWQCVICRKLNGSEGEYIAHSKEDLHRFPELSSPMFDYVQTGNKRPGFVPVSDSRMSAPIVLVIDECLDEPHLHHLQSSLHAFVDSLPPTTRLGIILYGRTVSVYDLSEEAMASADVLPGDKSPSQESLKALIYGTGIYLSPMHASLAVAHSIFSSLRAYKLNVPEASRDRCLGTAVEVALAIIQGPSADLSRGLVKRSGGNSRIIVCAGGPNTYGPGSVPHSFSHPNYPYMEKTGIKWMENLGHEAHRHNTIIDILCAGTCPVRVPILHPLAKTSGGVLVLHDDFGEAFGVNLQRASARSAGSHGLLELRTSDDILITQVVGPGEESHVDTHETFKNDTALYIQMLSVEETQSFSLSMETEGDIKSDFVFFQFAIQYSNVYQADVSRVITVRLPTVDSISAYLESVQDEVAAVLIAKRTLLRAKNHSDAIDMRATIDERIKDIALKFGSQLPKSKLHSFPKELSLLPELLFHLRRGPLLGSIIGHEDERSVLRNLFLNASFDLSLRMVAPRCLMHREGGTFEELPAYDLAMQSDAAVVLDHGTDVFIWLGAELAADEGRSAAALAACKTLAEELTGYRFPAPRIL

SEQ ID NO: 190689 - protein, 103 aa, Glycine max
  Clone ID: PAT_MRT3847_143211C.1.pep
LCSKLQLYVYISHRHNTITNTMAYYSYYRHQSKKLIWFLMFVFLVFSLMETSLTEGREVYRLKDIGRSRSQVENGGQMKRLETLAELLPRGPVPPSAPSPDIN

SEQ ID NO: 190690 - protein, 79 aa, Glycine max
  Clone ID: PAT_MRT3847_143212C.1.pep
IRHEARLSVRLTLSSIPLTRAKREGGAKRSVAISEPIQSLSCTELGYTFYNTFYENFYTLVQNGQGTEFQSSHRPIWGK

SEQ ID NO: 190691 - protein, 94 aa, Glycine max
  unsure (1)..(94): unsure at all Xaa locations
  Clone ID: PAT_MRT3847_143213C.1.pep
MLKNQPQPDWPEPLVLVQCLSQYCEYSIPEKXIKPATDIPYMKRCDYADANIAIMNLDGLFGADQHVSTSILKPLSNARKEWGFFHVTNHGVDP

SEQ ID NO: 190692 - protein, 60 aa, Glycine max
  unsure (1)..(60): unsure at all Xaa locations
  Clone ID: PAT_MRT3847_143214C.1.pep
DXPCCKCFNNGTFSTXAHSTXNFFSHYKNLHVHSESCVIFNSSTAHQGRQCLSCVYPRLS

SEQ ID NO: 190693 - protein, 85 aa, Glycine max
  Clone ID: PAT_MRT3847_143215C.1.pep
VVFPQTKKTFLVLPNFQKKRLKSSAYVPGEKKGPPSRRFSRKGFVKMFYPPRNKNQLGFDHGFPRFFSPQGEAKTGTRAKYLFSG

SEQ ID NO: 190694 - protein, 83 aa, Glycine max
  Clone ID: PAT_MRT3847_143216C.1.pep
RVRFNVVADVDNVFERYIFTTLVSSKPYLKSVCFNIVADVDNVFEGEASTTTVTSVPSPESRPSKTVLSDRRRLVGDLQRRRI

SEQ ID NO: 190695 - protein, 404 aa, Glycine max
  Clone ID: PAT_MRT3847_143217C.1.pep
MAPLSCIIVLFALSLLTPCFVSSSAVRDPELVVQEVQRSINASRRNLGYLSCGTGNPIDDCWRCESNWENNRQRLADCAIGFGKDAIGGKNGRIYVVTDSGDDDAVNPRPGTLRYAAIQDEPLWIIFKRDMVITLKEELLVNSFKTIDGRGASVHIANGGCITIHYVSNIIIHGIHIHDCKPTGNTNIRDSPHHSGFWTQSDGDGVSIFNSKHIWVDHCSLSNCRDGLIDAIHGSTAITISNNYMTHHDKVMLLGHSDSYTQDKDMQVTIAFNHFGEGLVQRMPRCRHGYFHVVNNDYTHWEMYAIGGSANPTINSQGNRFLAPNIRFSKEVTKHEDAPQSEWMGWNWRSEGDMFLNGAYFRQSGAGASSSYARASSLSARPSSLVGSMTTTAGALTCRKGNRC

SEQ ID NO: 190696 - protein, 113 aa, Glycine max
  unsure (1)..(113): unsure at all Xaa locations
  Clone ID: PAT_MRT3847_143218C.1.pep
VYHASKTVWFSQRNKKGVPKKPFLESXKQLGQFFGXNPYFGGDTFGFVEDDPLPFXRRLYTYXTFGIFKVQGESPDLFPXQKRIHKQSVCAPLSVYKEVXEPVLYYKNGFILK

SEQ ID NO: 190697 - protein, 49 aa, Glycine max
  Clone ID: PAT_MRT3847_143219C.1.pep
FGKIVELIIELVVKDVKDSGDLEALAATSDVVGGMGVAAAGSGNPNVGF

SEQ ID NO: 190698 - protein, 49 aa, Glycine max
  Clone ID: PAT_MRT3847_14321C.1.pep
ISNYPPLLKQDVIPFFLFGPNKSSIYSHPHFFLFIRFYNYKKTFTHPLV

SEQ ID NO: 190699 - protein, 46 aa, Glycine max
  Clone ID: PAT_MRT3847_143220C.1.pep
GLRDRDIIRWRNNKCLNICWFWVSNFMSIKMLVLRGRMRLCRRAWW

SEQ ID NO: 190700 - protein, 92 aa, Glycine max
  Clone ID: PAT_MRT3847_143221C.1.pep
ESIPWSETARKLDSLSKNLEIEQLDVKTTFLPGDLEEEIYMEQPEGFKVPGKENLVCRLTKSLYGLKPALRQWYKKFDAFIAEHDFKRMDSD

SEQ ID NO: 190701 - protein, 45 aa, Glycine max
  Clone ID: PAT_MRT3847_143222C.1.pep
IFVLRGSKKTSSSFFLGGERKYSDKLTVEKNLSIYTMGSESHPPC

SEQ ID NO: 190702 - protein, 71 aa, Glycine max
  Clone ID: PAT_MRT3847_143223C.1.pep
KQKNQIKSILQRSFNPSNQMKSLPSGFPFFFPPKIKNPKFALNLETQPENLPPKTLIPLSKRVLVGFFPIG

SEQ ID NO: 190703 - protein, 43 aa, Glycine max
  Clone ID: PAT_MRT3847_143224C.1.pep
SMQSMLLLTMGLDQCDPVIKGVYTDLIQHVLFKLINSIFISTG

SEQ ID NO: 190704 - protein, 395 aa, Glycine max
  Clone ID: PAT_MRT3847_143225C.1.pep
MAKNHPQRMTLEDYSSPIIPQYFTSIARPEVQTANFSYPYSLIQLIQGNLFYGLPTEDPYAHLATYIDICNTVKIVRVSEDAIRLDLFCFSLAGEAKTWLRSFKGNSLRTWDEVVEKFLKKYFPESKTIEGKVEISSFHQHPHESLSEALDRFHGLLWKTPTHGFSEPVQLNIFIDGLQPHSKQLLDTSAGGKIKLKTPEEAIEIIENMAANDYVILCDQEPRPQEESSRLEELLVQFMQETRSHQKSTDAAIRNLEVQLAKLVAERPTETFTVNTEMKPKKECKVILTEEDVKEEKKEEIERNEEKAQQWEKYSQVEIQQESILQVNTTPHQLIVKEERHGEHEKPLSVILSLITSTSLAMIWKVLPEYMTFMESLARRQKYKEYVFFVTFMPP

SEQ ID NO: 190705 - protein, 314 aa, Glycine max
  unsure (1)..(314): unsure at all Xaa locations
  Clone ID: PAT_MRT3847_143226C.1.pep
MALARIARANLRRSGGAFGSYAHEKDTFNVGGYTSRCNIPSHANFESDGKFSYAPRIKEQNYMNFSMRGISGTPHHQFPSASTQTVIEESEYEFENDRQRYAGLEATKPGEKPRVVVLGTGWAACRFLKGIDTKIYDVVCISPRNHMVFTPLLASTCVGTLEFRTVTEPVSRIQDALARDPNSYFFLASCTGIDTGKHEIYCEAVNNGGLPQEPYQFKVAYDKLVIATGSEPLTFGIKGVKENAFFLREVNHAQEIRKRLLLNLMLSENPGISEEEKXCLLHCVVIGSGPTGVEFSGEXSDFIMRDXHERYTHV

SEQ ID NO: 190706 - protein, 282 aa, Glycine max
  unsure (1)..(282): unsure at all Xaa locations
  Clone ID: PAT_MRT3847_143227C.1.pep
MVSLNLNPNPPQTFHFFDPFNMEDQNKKVRKPYTITKSRENWTDQEHDKFLEALHLFDRDWKKIEAFVGSKTVIQIRSHAQKYFMKVQKNGTSEHVPPPRPKRKAAHPYPQKASKNALTISQVARPLQSSSALSESSHIYRPDSSSVVRTPVRQCGXLPSWGYNVTPLVSLPRVTKDDMVLMSQQINPFSSSNENTPRGWPISKQTDQGDQGKPTIVMPDFAQVYSFIGTVFDPNAINHLQRLKQMDPINVKTILLLMRNLSTNLRSPEFENERRDAVIVLC

SEQ ID NO: 190707 - protein, 72 aa, Glycine max
  Clone ID: PAT_MRT3847_143228C.1.pep
WRLLPLSFLVSIIIFEELVHEIDMVCFLVENVEASFMMMNQVDSSSFNDDKDDDKKLQRIILRLSQQVQDQV

SEQ ID NO: 190708 - protein, 76 aa, Glycine max
  Clone ID: PAT_MRT3847_143229C.1.pep
EIICHLPLWQVIFNQMMLCHDKIYHCHHIQEGYQSLWSTKSAIHEARYEVPKARARTRATKMVIFKFVVLSKTFDD

SEQ ID NO: 190709 - protein, 87 aa, Glycine max
  unsure (1)..(87): unsure at all Xaa locations
  Clone ID: PAT_MRT3847_14322C.1.pep
NHTARXXEAAAAHKKKTGXKGTAXXEPKPQEPTKHPHDRDAATPANFLRKHALTGEFTLNIERNHATLFFYSSQHELETASINAIAG

SEQ ID NO: 190710 - protein, 55 aa, Glycine max
  Clone ID: PAT_MRT3847_143230C.1.pep
SLTLLILKCHRELPDDVVHRLYSQILWRMLCVILFSMLILGKLWFLFQHLYSMNL

SEQ ID NO: 190711 - protein, 91 aa, Glycine max
  Clone ID: PAT_MRT3847_143231C.1.pep
RWRIEEMLRSFLISSPFPSPKPVREGVLRDLAAIGKFECGCEFVPLLTCISEMREFVLLVLIFVVKCKPGAQALRMYFSSGSGIHWVNKEN

SEQ ID NO: 190712 - protein, 80 aa, Glycine max
  Clone ID: PAT_MRT3847_143232C.1.pep
GSDADVEGKKVSSSSADDKEVRYINLGGKNTASMQAGDRIIINTPGGGGWGPVGKESLSKLCEEGPETCVERWQYCWKAI

SEQ ID NO: 190713 - protein, 108 aa, Glycine max
  unsure (1)..(108): unsure at all Xaa locations
  Clone ID: PAT_MRT3847_143233C.1.pep
LETRKNAGANIIGKPEAYVMIVLKGTVPIASGGNEQPAAYGELVYIGGFNPSVNMELSAAIXSILETKLIVPKSRFFLKFYDTKGSDFGWYGPTFMNPNSMSTLVVVP

SEQ ID NO: 190714 - protein, 74 aa, Glycine max
  Clone ID: PAT_MRT3847_143234C.1.pep
QVQCFSFLLKDYHFSSSIFGLPGIKFPSLCIFVLEVDPSFNLVDDGTGSNAGMRMGLMNLVVLSISFGEMELWN

SEQ ID NO: 190715 - protein, 156 aa, Glycine max
  Clone ID: PAT_MRT3847_143235C.1.pep
LTRSLQNYGFIATEDNEEVSEVQRQLRWSYSHIVEEFIVGLDKDIDKVVEWLLNENHHCQFVYICGMGGLGKTTLAKSIYHYNAIRRNFDGFAWAYISQKCKKRDVWEGILLKLISPTKEERDEIKNMTDDELARKLFKVQQDKKCLIILDDIWSN

SEQ ID NO: 190716 - protein, 261 aa, Glycine max
  unsure (1)..(261): unsure at all Xaa locations
  Clone ID: PAT_MRT3847_143236C.1.pep
MEFQDKRLSLRSSLTFSETLCAVFIPFIGIVEALVFTFTSCFDFQSPRNKKKHSSTFDDILTLAEDSPFSINEIEALRELFKKLSSSIIDDGLIHKEELTLALLKTTTGENLFLDRVFDVFDEKRNGVIEFEEFVHALSIFHPXTPLEKKIDFAFRLYDLRQTGYIEREEVRQMVVAILSECGMDLDDEILDTIIDKTFQDADADKDDKISKEEWKAFVIRHPTLLKHMTLPHLKDITTLFTSFIFNTEVDDSHWHINGNH

SEQ ID NO: 190717 - protein, 91 aa, Glycine max
  unsure (1)..(91): unsure at all Xaa locations
  Clone ID: PAT_MRT3847_143237C.1.pep
FLDRVFDVFDKKRNGXIEFEEFVHALSIFHPCTPLEKNIDFAFRLYDLRQPGYIEREEVRHMVVAILSEYGMDLDEEVLDTIIDKGHHHPV

SEQ ID NO: 190718 - protein, 101 aa, Glycine max
  Clone ID: PAT_MRT3847_143238C.1.pep
RHNSTPNKLGQMVVAILSEYGMDLDEEVLDTIIDKTFQDADTNKDDKISKEEWKVFVIRHPTLLKHMTLPHLKDITTLFSSFIFNTEVDDSHWHFNGNHKH

SEQ ID NO: 190719 - protein, 144 aa, Glycine max
  Clone ID: PAT_MRT3847_143239C.1.pep
VADLCVAVSVNEIEALHELFKKLSSSIIDDGLIHKEELALALLKTTTGENLFLDRVFDVFDEKRNGIIEFEEFVHALSIFHPCTPLEKKIDFAFRLYDLRQTGYIEREEVSILARPGYEYVIGLSIFDIIELYCTRVPLLQLSI

SEQ ID NO: 190720 - protein, 73 aa, Glycine max
  Clone ID: PAT_MRT3847_14323C.1.pep
RLERLEYGCEKTTEGVDKFMTASSGYIHPMNLSTIIALDSTTYAPLLYELSSYLVYAHKIHTRYCIFLECLKL

SEQ ID NO: 190721 - protein, 159 aa, Glycine max
  Clone ID: PAT_MRT3847_143240C.1.pep
IDSALHNHRQSCSTNLSSKSKEQSLPNSDIVHVLEGAEEIVEVELRKEGKVELGVYKSYAVFTGWFMTVIICLSAILMQASRNGNDLWLSFWVDTTTESSQTRYSVSFYLAILCLFCIMNSLFTLVRAFSFAFGGLQAATKVHNKLLNKLVNAPVQFFD

SEQ ID NO: 190722 - protein, 51 aa, Glycine max
  Clone ID: PAT_MRT3847_143241C.1.pep
ISDQIASPQSLTTTLTTHFRRSRNRPSTSDTPSLPRSLSSYSHVYCVNITT

SEQ ID NO: 190723 - protein, 68 aa, Glycine max
  Clone ID: PAT_MRT3847_143242C.1.pep
FLLFLFFLLWKKNLVQPEYYKGRFHSIFACHFFISKVICYGHCLSMPPNPSRDPALFNPDQPQYLLLL

SEQ ID NO: 190724 - protein, 45 aa, Glycine max
  Clone ID: PAT_MRT3847_143243C.1.pep
VEQCSKVNSKESPSSCNWDLKEDHELKYVIFTYCPHKFTTGKRIK

SEQ ID NO: 190725 - protein, 101 aa, Glycine max
  Clone ID: PAT_MRT3847_143244C.1.pep
MPKGKLNKSASALKNPREKDLSPLAKGSQQKISTFTPESLSFRKSRSGRLLLPPLEFWRNQIPIYNADHEITEIRDGASLISPCRGFSPSLSRFSNQKRGA

SEQ ID NO: 190726 - protein, 79 aa, Glycine max
  Clone ID: PAT_MRT3847_143245C.1.pep
TLLFCFCDFNLRKTTTCHYLKRESPNANIIHLHLTYYLLQILAFPDFLNTSIRVICICCAFYPIPLPIIDYCYIYFLYH

SEQ ID NO: 190727 - protein, 66 aa, Glycine max
  unsure (1)..(66): unsure at all Xaa locations
  Clone ID: PAT_MRT3847_143246C.1.pep
LLQLLYLKRRXTVTLSYTNNCSYCSGFFTGATMCYAMIRQEEVLLCSKTHLFSLSYCHASTRSVCI

SEQ ID NO: 190728 - protein, 58 aa, Glycine max
  Clone ID: PAT_MRT3847_143247C.1.pep
TYGVFGHAFSTLIFPVFSHQMKKKMQKLLFVISNLMQIFPDTPSVVFSSRLERLERLE

SEQ ID NO: 190729 - protein, 39 aa, Glycine max
  unsure (1)..(39): unsure at all Xaa locations
  Clone ID: PAT_MRT3847_143248C.1.pep
EVGMALLRRIEXLSAEEPIPXXLRQGSPVSLLFVYIGCG

SEQ ID NO: 190730 - protein, 147 aa, Glycine max
  unsure (1)..(147): unsure at all Xaa locations
  Clone ID: PAT_MRT3847_143249C.1.pep
TRVVAKYESVDTFYRRCSSSTYVQSVSVPLLCISALDDPICTTEAIPWDECKANKNIVLATVKHGGHLAFFEGITASHLWWVRAVNEFLGVLHSSNYMHVQEKVKTXSKPNIPLDSSIDHGRYFNVAEDGMVAELNNDQLTMWKKHM

SEQ ID NO: 190731 - protein, 95 aa, Glycine max
  unsure (1)..(95): unsure at all Xaa locations
  Clone ID: PAT_MRT3847_14324C.1.pep
MHAAQGSIYQALGLRDNARLFCMPGRKVHERKISPGIMMSSYAKAXDMSALNIRSIADGPILKSXAHLLHRNKKVEFIEQINQIATLKERKRDPP

SEQ ID NO: 190732 - protein, 191 aa, Glycine max
  Clone ID: PAT_MRT3847_143250C.1.pep
MVLKGGEVSMSEKKREVMVAIPHEGGAESLMPKQQSRVNSPHRTLNDNEVAAKSPPLNCASPEIRLMPSPNKPPKVPTSNAILTRRKSLTRSVYSKPKSRFGEQSYPIDGTLLEDNATSTLQENLTVGSPYKASPNNNNKPGTVNRTFSILSVVTPKTPLMASPGLAREDFDEIIYKKDELSKNMRTRRLT

SEQ ID NO: 190733 - protein, 56 aa, Glycine max
  unsure (1)..(56): unsure at all Xaa locations
  Clone ID: PAT_MRT3847_143251C.1.pep
KQDTCIALPQHSFHGLGCSHFARRYYGNRFCFLFLWLIRCFSXPGCLLHARGFSSS

SEQ ID NO: 190734 - protein, 133 aa, Glycine max
  Clone ID: PAT_MRT3847_143252C.1.pep
IVFVDMDRILVVIPVILCIVGISVHNSKSSTSLLVFFVINTIIFSILVGSRKSSLAEVDMASPLLPSFFEVAGEAQGGFLENATYDKVDESNDGYHKSLFNIEDESVDNVDEITTLDHVESDDNLKTRIESFI

SEQ ID NO: 190735 - protein, 86 aa, Glycine max
  unsure (1)..(86): unsure at all Xaa locations
  Clone ID: PAT_MRT3847_143253C.1.pep
THHKSYTIXHSLIFKGVIVIYILNTNLFTFLINFLIKNFQYNIFQFSFSNFSFHLNNFKIIPYISINSLSFTQIITTNNYKILPFL

SEQ ID NO: 190736 - protein, 76 aa, Glycine max
  Clone ID: PAT_MRT3847_143254C.1.pep
TPPFSLCLVQPRMQGKHRVSRLLLLAVCSQTRCLCPCSSSSSVTNFIVVSLVIILTITMFSYGRVLFKKKKKKKYK

SEQ ID NO: 190737 - protein, 96 aa, Glycine max
  Clone ID: PAT_MRT3847_143256C.1.pep
APKTKDNNSKGVRTYESRDSQLHLVSTDNAFFRQNVFPFDCKFMVFPEKIPTVSDGESGEYHCWNWCLSEAGRGRSNSMDCVQQVFLLTHALSLLF

SEQ ID NO: 190738 - protein, 767 aa, Glycine max
  unsure (1)..(767): unsure at all Xaa locations
  Clone ID: PAT_MRT3847_143257C.1.pep
MKGNDTLLLHLFYTLLLFLGVRSSSSAGNGSNDVTNRKEVYIVYMGAADSTDASFRNDHAQVLNSVLRRNENALVRNYKHGFSGFAARLSKKEATSIAQKPGVVSVFPGPVLKLHTTRSWDFLKYQTQVKIDTKPNAVSKSSSVIGILDTGIWPEAASFSDKGMGPVPSRWKGTCMKSQDFYSSNCNRKLIGARYYADPNDSGDNTARDSNGHGTHVAGTAAGVMVTNASYYGVATGCAKGGSPESRLAVYRVCSNFGCRGSSILAAFDDAIADGVDLLSVSLGASTGFRPDLTSDPISLGAFHAMEHGILVVCSAGNDGPSSYTLVNDAPWILTVAASTIDRNFLSNIVLGDNKIIKGKAINLSPLSNSPKYPLIYGESAKANSTSLVEARQCRPNSLDGNKVKGKIVVCDDKNDKYSTRKKVATVKAVGGIGLVHITDQNEAIASNYGDFPATVISSKDGVTILQYINSTSNPVATILATTSVLDYKPAPLVPNFSSRGPSSLSSNILKPDIAAPGVNILAAWIGNGTEVVPKGKKPSLYKIISGTSMACPHVSGLASSVKTRNPTWSASSIKSAIMTSAIQSNNLKAPITTESGSVATPYDYGAGEMTTSEPLQPGLVYETSSVDYLNFLCYIGFNVTTVKVISKTVPRNFNCPKDLSSDHISNINYPSIAINFSGKRAVNLSRTVTNVGEDDETVYSPIVDAPSGVHVTLTPNKLRFTKSSKKLSYRVIFXSSTLTSLKEDLFGSITWSNGKYMVRSPFVLTK

SEQ ID NO: 190739 - protein, 138 aa, Glycine max
  Clone ID: PAT_MRT3847_143258C.1.pep
SSAMKRASEWAYSHEILSDVTVQVGEVSFSLHKFPLVSKSGYIGKLVSESSDDVSFIELYDVPGGAKPFELATKFCYGINFEISVENIATLRCVAEYSGMTEDYSEGNLVGRVDSYWNEGALKTIYGACAIFTHVETL

SEQ ID NO: 190740 - protein, 367 aa, Glycine max
  Clone ID: PAT_MRT3847_143259C.1.pep
MSRMRVVLMILTLVVVTLLINTKSVESARTFFVFGDSLVDSGNNNYLPTTARADSPPYGIDYPTRRPTGRFSNGYNLPDLISQHIGSEPTLPYLSPELTGQKLLVGANFASAGIGILNDTGIQFVGILRMFQQYALFEQYQQRLSALVGAAQTQRIVNGALFLMTLGGNDFVNNYFLTPVSARSRQFTVPQYCRYLITEYRKILMRLYELGARRVLVTGTGPLGCVPAQLATRSSNGECVPELQQAAQIFNPLLVQMTREINSQVGSDVFVAVNAFQMNMNFITDPQRFGFVTSKIACCGQGRFNGVGLCTALSNLCPNRDTYAFWDPYHPSQRALGFIVRDIFSGTSDIMTPMNLSTIMAIDSNIY

SEQ ID NO: 190741 - protein, 55 aa, Glycine max
  Clone ID: PAT_MRT3847_14325C.1.pep
HASEFLSAFLPNSSIIQFSSLACLFLILFLLLSLHIWFCSISSDMFFFSSLQSSL

SEQ ID NO: 190742 - protein, 503 aa, Glycine max
  Clone ID: PAT_MRT3847_143260C.1.pep
MWNLNDSPDQRKDYESEGCSSSLNDDKGKRVGSVSNSSSSAVVVEDGSEEEDSERGGSRTLDKKTNKIFGFAVAHDDSDHPPVTHQFFPVEDSELPVSAAAAGSGGGGGGSSFPRAHWVGVKFCQSETPGAGKAVKVSEPMKKSRRGPRSRSSQYRGVTFYRRTGRWESHIWDCGKQVYLGGFDTAHAAARAYDRAAIKFRGVEADINFNIEDYEEDLKQMTNLTKEEFVHVLRRQSTGFPRGSSKYRGVTLHKCGRWEARMGQFLGKKYVYLGLFDTEIEAARAYDKAAIKCNGKEAVTNFDPSIYDSELNSESSGGVAADHNLDLSLGNSSSKHNNSQTSGNHFANSATDQHMPPESNWRNGGSKPKLVNILPKPCGRSNIEAYGHGESETLRLLSQTHLQSPTNKEMHRYGPYRSPAEPQKPHNFAHHLHQPSFHVPSSSSNGGRIGSDLSLSMSDQQQWQAGPPHLLATAAASSGFPQQIRPSQGWLQKNGFHSLMRPS

SEQ ID NO: 190743 - protein, 323 aa, Glycine max
  Clone ID: PAT_MRT3847_143261C.1.pep
PVEDSELPVSAAAAGSGGGGGGSSFPRAHWVGVKFCQSETPGAGKAVKVSEPMKKSRRGPRSRSSLYRGVTFYRRTGRWESHIWDCGKQVYLGLFDTEIEAARAYDKAAIKCNGKEAVTNFDPSIYDSELNSESSGGVAADHNLDLSLGNSSSKHNNSQTSGNHFANSATDQHMPPESNWRNGGSKPKLVNILPKPCGRSNIEAYGHGESETLRLLSQTHLQSPTNKEMHRYCPYRSPAEPQMPHNFAHHLHQPSFHVPSSSSNRGRIGSDLSLSMSDQQQWQQAGPPHLLATAAASSGFPQQIRPSQGWLQKNGFHSLMRPS

SEQ ID NO: 190744 - protein, 151 aa, Glycine max
  unsure (1)..(151): unsure at all Xaa locations
  Clone ID: PAT_MRT3847_143262C.1.pep
MWDLNDSPDQRKDYESEGCSSSLYDDKGKRVASVSNSSSSAVVVEDGSEEEDSERGGSRTLDNKKTNKIFGFSVAHDDSDHPPVTHQFFPVEDSELPVTAAAAAAGSSFPRAHWVGVKFCQSETPGAXXAVKVSEPMKKSXRGPRSRSSQY

SEQ ID NO: 190745 - protein, 91 aa, Glycine max
  Clone ID: PAT_MRT3847_143263C.1.pep
LLPDDVFSSFLNSLINDDAFEAQQQQHHVQTEIPTPSERSINPLPCDDRVDDHHLGSITTASASQGYDDELGVLWESPLVSATFSQHVNAR

SEQ ID NO: 190746 - protein, 90 aa, Glycine max
  unsure (1)..(90): unsure at all Xaa locations
  Clone ID: PAT_MRT3847_143264C.1.pep
VAHLLQNGNMHGQEISSGRPDEMTDRVWDFVLCDGPRPXSEIPAALLNKMKHEFKXWYRFDIRVSGKDIIQNHLTFCIYNHTALLPEHHW

SEQ ID NO: 190747 - protein, 42 aa, Glycine max
  unsure (1)..(42): unsure at all Xaa locations
  Clone ID: PAT_MRT3847_143265C.1.pep
NKLGSPFXXTSTTXHCHXTLLPXPHXXPLHXPVTLXVPPXXX

SEQ ID NO: 190748 - protein, 74 aa, Glycine max
  unsure (1)..(74): unsure at all Xaa locations
  Clone ID: PAT_MRT3847_143266C.1.pep
ASFRIHSTXFSGKHYXNGAXGXXXFWVVQXLWXXGYXXXGXXRNPXXPKTGXLKDXKELPXXNSAXVNSXLXSV

SEQ ID NO: 190749 - protein, 83 aa, Glycine max
  unsure (1)..(83): unsure at all Xaa locations
  Clone ID: PAT_MRT3847_143267C.1.pep
VFKKKKNIPSVKKSRYKARLVAKGFTQVDRVNYNEIFSPVVKHYSIRILMAIVNQYDLELXNWLPRQLFLHGDLEETLEFKRP

SEQ ID NO: 190750 - protein, 42 aa, Glycine max
  Clone ID: PAT_MRT3847_143268C.1.pep
FTAFDILLGISLDFEIAGKTFMPAFSVPHVLARSSENAESSA

SEQ ID NO: 190751 - protein, 44 aa, Glycine max
  Clone ID: PAT_MRT3847_143269C.1.pep
NSFNSSLISQDPRDSLLEFILEHKLRRSTQNSPSASLFPSSTRA

SEQ ID NO: 190752 - protein, 78 aa, Glycine max
  unsure (1)..(78): unsure at all Xaa locations
  Clone ID: PAT_MRT3847_14326C.1.pep
MRSPSASSRFHRTSWYRILAGVVSVVIIIDAAMPRYDRDDCETXLNQESPAVRTHQNAGXKHKANVTTYNQQFEAQQP

SEQ ID NO: 190753 - protein, 49 aa, Glycine max
  Clone ID: PAT_MRT3847_143270C.1.pep
SYNKILTPPIKEVMQKGKMSQGTKKGRDLLLTKFQQGISRILRNQATIE

SEQ ID NO: 190754 - protein, 126 aa, Glycine max
  Clone ID: PAT_MRT3847_143271C.1.pep
KGGKKKNLSLEIPPPLKKAPPQTGGVSPKDKRKNPKFKPLRGNPTPKKKKKRGKNKKNLCPGKKRSTHPPFFLEKKRAWFPPPKLMQRHRGSPPPQKPKFPRSRVGNQKRPQKNPPPPGYPPPAFF

SEQ ID NO: 190755 - protein, 55 aa, Glycine max
  Clone ID: PAT_MRT3847_143272C.1.pep
IKLGVHLGSAFTGQGFPSFLYDWPPRDEPLPIFLFLCFPTGFFLNPAFSFIQQKT

SEQ ID NO: 190756 - protein, 413 aa, Glycine max
  Clone ID: PAT_MRT3847_143273C.1.pep
MNDASLDQNPNLCESDPCIQQTNNKQPDGDQQKNKNNIVIPVVASVAGVLVLLIIVAAAIICGLKRKKPQASDVNIYVETNTPNGSQFASKQRQYTFNELVKITNDFTRILGRGGFGKVYHGFIDDTQVAVKMLSPSAVRGYEQFLAEVKLLMRVHHRNLTSLVGYCNEENNIGLIYEYMANGNLDEIVSGKSSRAKFLTWEDRLQIALDAAQGLEYLHNGCKPPIIHRDVKCANILLNENFQAKLADFGLSKSFPTDGGSYMSTVVAGTPGYLDPEYSISSRLTEKSDVYSFGVVLLEMVTGQPAIAKTPDKTHISQWVKSMLSNGDIKNIADSRFKEDFDTSSVWRIVEIGMASVSISSFKRPSMSYIVNELKECLTTELARKYSGRDTENSDSIELVTLNFTTELGPPAR

SEQ ID NO: 190757 - protein, 37 aa, Glycine max
  Clone ID: PAT_MRT3847_143274C.1.pep
LPGTRPRRRPRNTPSVFSSMLRQLAFESYFISLMYVG

SEQ ID NO: 190758 - protein, 41 aa, Glycine max
  Clone ID: PAT_MRT3847_143275C.1.pep
LTWSTDYRGFISACSSYPSTSGASRSEKKEALLHLVTLKGG

SEQ ID NO: 190759 - protein, 77 aa, Glycine max
  Clone ID: PAT_MRT3847_143276C.1.pep
FQSFSLIMAFFSKQKPYCYPPSMTRTRFENGITILLLPSSYSLSGTKSSVMGPPTTWSPDGVGFETHWATLESGEES

SEQ ID NO: 190760 - protein, 88 aa, Glycine max
  unsure (1)..(88): unsure at all Xaa locations
  Clone ID: PAT_MRT3847_143277C.1.pep
VVSXHXXPXXKYGKRVHIXXXDXXXEGXTGXLXDAXLKPYXXEAYRPXRKGDLFLVRGGMRSXEXKXIETDPSEXCXVAPDTEIXCEG

SEQ ID NO: 190761 - protein, 89 aa, Glycine max
  Clone ID: PAT_MRT3847_143278C.1.pep
DSFRTATLLIFFFIFFFFFIYFFFFFFKFLTAVASLIEPYKLESNRKKRVKVLHSFHPSPFLFRWYSFGPTNLNDLSTTLMIGRSRSYI

SEQ ID NO: 190762 - protein, 68 aa, Glycine max
  Clone ID: PAT_MRT3847_143279C.1.pep
SFLTAILNSLCMPAKKLEIQSKWDYVGFIANFLGKLIDIELIQSFGCSWGVDCVILKLLDPHLQIHPL

SEQ ID NO: 190763 - protein, 115 aa, Glycine max
  unsure (1)..(115): unsure at all Xaa locations
  Clone ID: PAT_MRT3847_14327C.1.pep
PLLPYVEPVAQAQSAXGYFDCFPVVGGWDHGDALIGEVDTDVYEXLPTNSKLLESSKEWPLDLRCDKSASGLPTTGERLDGSEHEGSEPCLARIQKYGSTMMPLDEDKLSEVAQD

SEQ ID NO: 190764 - protein, 65 aa, Glycine max
  Clone ID: PAT_MRT3847_143280C.1.pep
MVAQPLFQHPEEVTSSRGKFVYLGSSFLRIIIIEPKFISLLSLLFYNSNEHGIQSYLCFRGEREL

SEQ ID NO: 190765 - protein, 55 aa, Glycine max
  Clone ID: PAT_MRT3847_143281C.1.pep
NLDCAAIVGVVCNLKSIICIVMFWSNAFFLCHLTSIFFKCVFLYNYFLVLASLTN

SEQ ID NO: 190766 - protein, 35 aa, Glycine max
  unsure (1)..(35): unsure at all Xaa locations
  Clone ID: PAT_MRT3847_143282C.1.pep
SKXLFSTTSNAMYSKQLKSTTEYDLLNYLMPCDFK

SEQ ID NO: 190767 - protein, 50 aa, Glycine max
  Clone ID: PAT_MRT3847_143283C.1.pep
GHSLNKGSMQIIKLRSHSHLPDPLIIHTDLNCCTVFLNPNTAPVTIVDYC

SEQ ID NO: 190768 - protein, 107 aa, Glycine max
  Clone ID: PAT_MRT3847_143284C.1.pep
MFSCSGNNLQVPLIAYSVGERGLISQLLSQKFGGFFVYESLAGNPIPGLPSLDNIQEAYKLEHVKADTKVFGLISKPISHNKGPILHNPPFRHINYNGPFCRLLAAV

SEQ ID NO: 190769 - protein, 39 aa, Glycine max
  Clone ID: PAT_MRT3847_143285C.1.pep
VCGPPGCWLSPGPFVGRFRARSSFCARWLDEAGSVVLSS

SEQ ID NO: 190770 - protein, 116 aa, Glycine max
  Clone ID: PAT_MRT3847_143286C.1.pep
IGLSLQQEHRKISVIRSFSCSSINSHFLALVSSDIHCQVPYDAHSLYLPHQRYYTPHASLRVSMAHDNETRHVHMQIAITRDNTSEALPVTLQGFPCENADHTVLDRLYNPAASTV

SEQ ID NO: 190771 - protein, 95 aa, Glycine max
  Clone ID: PAT_MRT3847_143287C.1.pep
VKTSCLMVGVTRSCGVVFGASLEKIFPARMSEDASLERKRGPKKHMTVCSVYERLTSAAAAVGDISCHNDSVGYATRVRILNTEIVGSFRERADG

SEQ ID NO: 190772 - protein, 66 aa, Glycine max
  Clone ID: PAT_MRT3847_143288C.1.pep
NIIIKKKKLKTFFLLTLKLGRLFWTPLQSWALDNSPLTASRSALMLICNTQIIFLSNITTKLLFFI

SEQ ID NO: 190773 - protein, 178 aa, Glycine max
  unsure (1)..(178): unsure at all Xaa locations
  Clone ID: PAT_MRT3847_143289C.1.pep
EMLLEMQKNEMKRHEAWLVYGALXGQCIYDRLKIFPTFPSPPLHAVWKTNAKVLTSTHKRKASPEQLEQQPPLKKAATDGEIGVDLMNHEQEEAGTQASSADSIIGSSSSNTQMKNETTLDGEVRSNGGDTQALKTSAALTQVWKDELNSGRTLVSLFELFGEGILSFIQAPEMYMFL

SEQ ID NO: 190774 - protein, 129 aa, Glycine max
  unsure (1)..(129): unsure at all Xaa locations
  Clone ID: PAT_MRT3847_14328C.1.pep
GIGINLRTCYYCDRVLLSEPISILPNLRGNRTTLSYVKFSDTNRVIEEAPNNQVSLIPIDSFFNGNRTIGPXFPYSSASMDIRLWAFNAIAGVVEKTLILGLYKALEKLLTAQXISSMLIIKMSDILED

SEQ ID NO: 190775 - protein, 561 aa, Glycine max
  Clone ID: PAT_MRT3847_143290C.1.pep
YLIPLPIYLYIVFPCFFLEYLFKYSFICSNLSSWICNMSHDVTLEVARYVEYGWRAIIQEAIKGMRHSKRTTLIADDVDAALNLKNVEPIYGFASGGPLRFKRAVGHRDLFYIDDKDVDLKDVIEASLPKAPLDTAVTCHWLAIEGVQPAIPENAPVEVISAPSDVKKHEQKDDNLPVDIKLPVKHVLSRELQLYFDKVAELTLSESDSVLFKEALVSLATDSGLHPLVPYFTCFIADEVSRGLNNFPLLFALMRVVSSLLQNPHIQIEPYLHQLMPSVVTCLVAKRLGTRLADNHWELRDFTAHLVASICKRFGHVYSNLQSRLTKTLLNAFLDPKKALTQHYGAIQGLGALGPNVVRLLLLPNLETYMQLLEPEMLLEKQKNELKRHEAWRVYGALLRAAGQCIYDRLKIFPTFPSPPLHAVCKTNSKVLTSSTYKRKASPDQLEQQPPLKKAATDGEVGVDLMNFSPVHKQEEAGTQASSADSIIGTSSSSAQMKNETTLDGELRGKRGDTQALKTSAALTQVWKDELNSGRTLVSLFELFGEGILSFIKAPEMYMFL

SEQ ID NO: 190776 - protein, 76 aa, Glycine max
  unsure (1)..(76): unsure at all Xaa locations
  Clone ID: PAT_MRT3847_143291C.1.pep
MMMKSAMCALVLVALVVVEVGPMAEAAVTCNPTHLISCVSAINGCSGLXSAFCLKLIEHKPCFCGYLENPSLRQYV

SEQ ID NO: 190777 - protein, 86 aa, Glycine max
  unsure (1)..(86): unsure at all Xaa locations
  Clone ID: PAT_MRT3847_143292C.1.pep
FCILRKHLICSSAEGSTCSXXLRRLQLNIDGKGDYMACKLVVLLETVVCQLXSCKPXSCFHSAXXLGFLXXYHXXGDEISPXXYXX

SEQ ID NO: 190778 - protein, 49 aa, Glycine max
  Clone ID: PAT_MRT3847_143293C.1.pep
KHKRRSMQQPAVLPAILEHSLLLSPPAHPQGAPALFCATLIADFYFWGR

SEQ ID NO: 190779 - protein, 331 aa, Glycine max
  Clone ID: PAT_MRT3847_143294C.1.pep
DSVRKMADKSARDMISPSGGVHIILPDYYSPEGMGLIVPKTKDGRVVFMLPWLGRTVAGTTDSNTSITFLPEPHEDEIQFILDAISDYLNVKVRRTDVLSAWSGIRPLAMDPTAKNTESISRDHVVFEDHPGLVTITGGKWTTYRSMAEDAVNSAIKSGKLTPANGCITNNIRIVGGEGWDPVSFTILSQQYMRMKVTYRGKVVPGVMDTASAKHLSHAYGTLAERVAAIAQNENLGKRLAHGYPFLEAEVAYCARHEYCESAIDFIARRSRLAFLDTDAAGRALPRVIQILAAEHKWDKSRQKEEMFKAKEFLETFKSSRNAQFYDGKHN

SEQ ID NO: 190780 - protein, 128 aa, Glycine max
  Clone ID: PAT_MRT3847_143295C.1.pep
PTRAGDQDDSEEHPVSVTMTAGKRTTYRNMAKDAVNSAIKTGKMTPVNGCITNNIRIGGGEGWDPVFFTILFQQNMPMKVTYRGKVVPAVMDTASAKHLANAYGTLAERVDAIAEHATGLMNHEMGSG

SEQ ID NO: 190781 - protein, 105 aa, Glycine max
  Clone ID: PAT_MRT3847_143296C.1.pep
MAPHLRLRLCVPLVFLRIGFLLNSNAELDHQDSHKGLAAPHKDGRTDVLEGPGVENAFNFENATSVLGSRKGGNSKVCGYDRSLCLLMAMAGATGLCAEPFFFVE

SEQ ID NO: 190782 - protein, 61 aa, Glycine max
  Clone ID: PAT_MRT3847_143297C.1.pep
YNPRSSQLVYDHDLAINYSLMTSNTSQLTIYIIYYIYIYQKLTGSSCYCHDQLHKKANTKT

SEQ ID NO: 190783 - protein, 86 aa, Glycine max
  unsure (1)..(86): unsure at all Xaa locations
  Clone ID: PAT_MRT3847_143298C.1.pep
MASSCASSAIAAVAISTPRSQKNGSLLGSTKASFLSGRKLKVNIFTAPAGALSNTTVCANVEPDRPLXFPGSTNSPWLDGTLSGDI

SEQ ID NO: 190784 - protein, 196 aa, Glycine max
  Clone ID: PAT_MRT3847_143299C.1.pep
LSRPLDLKKPRYKNFDELYLYCYYVAGTVGIMSVPIMGISPNSQATTESVYNAALALGIANQLTNILRDVGEDASRGRVYLPQDELAQAGLSDEDIFAGKVTDKWRNFMKSQIKRARMFFDEAEKGVTELNEASRWPVWASLLLYRQILDEIEANDYNNFTRRAYVSKAKKLLSLPAAYARSMVPPSKKLSSVMKT

SEQ ID NO: 190785 - protein, 73 aa, Glycine max
  Clone ID: PAT_MRT3847_14329C.1.pep
TLVYMKISGAQHLHDPHFQTTALLTILRNPPRYTFQGQLQPGEPTQVLHTMTLRFFRDAFGALCDYIYTLHVA

SEQ ID NO: 190786 - protein, 130 aa, Glycine max
  unsure (1)..(130): unsure at all Xaa locations
  Clone ID: PAT_MRT3847_1432C.1.pep
RRPFGLLLAVFFIFVIILLGVCKLXDSAMRLMFVGXLSCAFLISMLPLHCLYLNRXRGTKSFEFMTIYLSLYTFLMSLXKLLYGPKNNDALMYVPNGIGTVVGKIQLVSYLYYKGSSREECIKPKMASYK

SEQ ID NO: 190787 - protein, 430 aa, Glycine max
  unsure (1)..(430): unsure at all Xaa locations
  Clone ID: PAT_MRT3847_143300C.1.pep
MSGTLLWVVSSPGLEVSHSSGLLDSIRSVKFLDSSKAMSRDFGSIRAKLGKEKGWRLCSLSTDMKYTCVGRSGLESASNFPLIANVLVNPAAGEVAVSSEQKVYDVVMKQASLVKRKLGAAGELDAKPDIALPGNLSLLNEAYDRCGEICAEYAKTFYLGTLLMTPERRRAIWAIYXVWCRRTDELVDGPNASQITPTALDRWESRLEELFQGRPFDMLDAALSDTVAKFPVDIQPFKDMIEGMRLGLKKPRYKNFDELYLYCYYVAGTVGIMSVPIMGISPNSQATTESVYNAALALGIANQLTNILRDVEEDANGGRVYLPQDELAQAGLSDEDIFAGKVTDKWRNFMKSQIKRARMFFDEAEKGVTELNEASRWPVRNSKNLSFYKNSYVLEILRINHQFILIKVFSSLKKGFFCNEDINRAPYGIL

SEQ ID NO: 190788 - protein, 107 aa, Glycine max
  Clone ID: PAT_MRT3847_143301C.1.pep
GSRAVMSLAYLQAETSQRHGDDIWALRWTHTNHILTGAADGHVRIFDAGEPSVALHDLAAHPLAETSMSVSKDRRKAVSASWDGTVVLVHPSEGMVLGRLATGREEV

SEQ ID NO: 190789 - protein, 293 aa, Glycine max
  Clone ID: PAT_MRT3847_143302C.1.pep
MPSILKLFSLPKPLTLRPQFSRHPINPNPTTSDRGLVFHEKVLYLKALKVNPNKAFRLNPTLRSSPLSTLKSVTRSLSSLGIPRAAMGRILDMLPVLLTCDPYLQFYPLLDFLLHEVPILYPDVHLSILRSPRLLVSSVNNRLRPTLHFLRKLGFNGPHSLTCQTTLLLVSSVEDTLLPKIEFLKGLGFTHEEVANMVVRSPGLLTLSVEKNLRPKVEFFLREMNGDVAELKRFPQYFSFSLERRIKPRYGMLRRVGVSMDLEDMLKVSDGGFKARLLDLRFKKLEIGVGQHL

SEQ ID NO: 190790 - protein, 115 aa, Glycine max
  unsure (1)..(115): unsure at all Xaa locations
  Clone ID: PAT_MRT3847_143303C.1.pep
TPVPVSFVDSASXVLLSPSNCXFLQPLXXYFXLYXXSSLXXSNIYXSSFSPTXVLXIFPSLSXXISLFNXXXXTXFPXXGLGDQPXXSFXXFLLVATGNPNPKLCLRQGYWVNWG

SEQ ID NO: 190791 - protein, 213 aa, Glycine max
  unsure (1)..(213): unsure at all Xaa locations
  Clone ID: PAT_MRT3847_143304C.1.pep
QLSPPQPPAPPANNTSPPPQRNSPPPPAATPPRTSPPQTSPSPPAAPPPRNSTRLPPPVNSPPPPVDAPPPRSSSPPAPAPSTPPSRTSPPPTPSSQPAPPSNSTPRSSPPSPPSITNLAPSPPSRILSSPPPPPAQNGTENSSPDGGGDGIGIGGVVAISVVAGFLLLGFIGVLIWCMRRKKRKVLVSGDYVMPSTLASSPESDSSXFKTHS

SEQ ID NO: 190792 - protein, 49 aa, Glycine max
  Clone ID: PAT_MRT3847_143305C.1.pep
ELIFIGRYLRPTLSVSRSPFNSCIIKFSPFSSYYLHSRTFKRRSPSHIL

SEQ ID NO: 190793 - protein, 47 aa, Glycine max
  unsure (1)..(47): unsure at all Xaa locations
  Clone ID: PAT_MRT3847_143306C.1.pep
ARKAARLKNLYRAQLHGSASSSVIHLSXLDLQXPTVPTPTLTKPAXD

SEQ ID NO: 190794 - protein, 168 aa, Glycine max
  Clone ID: PAT_MRT3847_143307C.1.pep
HEANKNLAEDFFFPPNPFFPPPLVPNPFQPPPLIPNPFQPPPLIPNPLQPPSPPLIPNPFQPPSPPPLIPNPFQPPPSPPTLFPNPFQPPPSPPPLIPNPFQPPPSPPPSLFPPFPPIVIPGLTPSPPPPPPPKPIFPPLPPLFPPEFGPRHTPGTPPASASKNHPYP

SEQ ID NO: 190795 - protein, 38 aa, Glycine max
  Clone ID: PAT_MRT3847_143308C.1.pep
CGYSNVILGYRCTLYSRFQSSFVLWPINGIKEIKRMYA

SEQ ID NO: 190796 - protein, 49 aa, Glycine max
  Clone ID: PAT_MRT3847_143309C.1.pep
LLTNFSREGINNSNIPLTTQPVIMQPLLDMKFINSVTSQTLNTWCPQHL

SEQ ID NO: 190797 - protein, 173 aa, Glycine max
  unsure (1)..(173): unsure at all Xaa locations
  Clone ID: PAT_MRT3847_14330C.1.pep
NVLGRDFEIGGMVRGKLKSHAXDDRRAGHIYNEAFASSAVRRTKREGHVLVAFFGDSSYGWFEPSELIPFDANFAEKSRQISSRNFLKAVEEAVDEASRRCGLGLVCRCRGPGNFRPTDVEGYYSVQVPDYEPGVYSNAQIRRAMSEFGTVEMLSFVKQLAMNPHGGDPRSID

SEQ ID NO: 190798 - protein, 676 aa, Glycine max
  unsure (1)..(676): unsure at all Xaa locations
  Clone ID: PAT_MRT3847_143310C.1.pep
LSICKHTSDTVLSFFVNDDENGEGLTDKDFLEDLWDRIXVLSRYGWKVDIFPKPHLSFEVQLFVVKSHEFVLRCWNSLAGLISVPSGVFIVQQKHVAYLKNTQSKQLLNIFPPSNIDQLESIDRLVEEEYLLDVLLFCKASRKECASFMVGLPVSFRYEYLMAETIFSQLLMLPQPPFKPVYYTLVIIDLCKALPGAFPAVVAGAVRTLFERIADLDMECRTRLILWFSHHLSNFQFIWPWEEWAYVLDLPRWAPQRVFVQEVLEREVRLSYWDKVKQSIENAPGLEELLPPKGGPNFSFGAEDDKESNEHVLSGQLNNMVKGKAPVREIISWIDESVLPNNGLEVTLRVVVQTLLNIGSKSFTHLMTVLERYGQVFAKLCPDQDKQVMLIAEVSSFWKSNTQMTAIAIDRMMGYRLVSNLAIVRWVFSAENIEQFHMSDRPWEILRNAVSKTHNRISDLRKEILSLKKNISSSEEAAKEAKAELDAAESKLTLVDGEPVIGDNPARLNRLKSHAEKTKEEVVSLQESLEAKEALLSRAIEENEALFLLLYKSFSNVLTERLPEGSRTLHELKSAQVDVVMAVDPEEPSSMELDNQNQRPQNSHTNGEKKGGAYNVGEKEQWCITTLGYVKAFSRQYAAEIWPHVEKLDAEVLTEDAPLLFRSAVYSGLRRPIHEA

SEQ ID NO: 190799 - protein, 118 aa, Glycine max
  unsure (1)..(118): unsure at all Xaa locations
  Clone ID: PAT_MRT3847_143311C.1.pep
MKIDTLYKVSVYSYVYHSCICQVKLMCHLSCLNWVPQARIHPNKKYISITNKTKNSKLAAVNPPRIPKSICFYNKHIISHDQXILWLGPICLPTXATFYHQYILTPAAINALRSFRTT

SEQ ID NO: 190800 - protein, 61 aa, Glycine max
  Clone ID: PAT_MRT3847_143312C.1.pep
TSDSYGQVTVHSYIKWVKHILAFSPGVLGAQSNTQGLGFKTGIKKAIDSIDCKFAWDFFPA

SEQ ID NO: 190801 - protein, 65 aa, Glycine max
  Clone ID: PAT_MRT3847_143313C.1.pep
QACLGRESKKANQLDLKEKIVQKILPPKRFSKPKESPPQFLKKGGGQGTNQSPKKGCPVPPRGYG

SEQ ID NO: 190802 - protein, 89 aa, Glycine max
  unsure (1)..(89): unsure at all Xaa locations
  Clone ID: PAT_MRT3847_143314C.1.pep
ASYTGTEVPQWAFVDVEAGNGPTWDPKSSQCNTALXERSSGGTTQRRELSPNFLTGGISTAGCNLQRTHRIDGMIDMVATDGIPDYTGV

SEQ ID NO: 190803 - protein, 53 aa, Glycine max
  Clone ID: PAT_MRT3847_143315C.1.pep
IHNPAFHVIAKNHNQMKPNTTTFLSKSILPSTQVPKTPKGLKFTKWVSHYPTF

SEQ ID NO: 190804 - protein, 52 aa, Glycine max
  Clone ID: PAT_MRT3847_143316C.1.pep
TSEALAFFFFLKGTFLSWKTLKAVHQMLVIRITWPSFWFLTNKYYYKGVIIV

SEQ ID NO: 190805 - protein, 115 aa, Glycine max
  unsure (1)..(115): unsure at all Xaa locations
  Clone ID: PAT_MRT3847_143317C.1.pep
HGKRHETKHICSKTQTTKNKGGAKEKRNTKEHKDPQKEPTTXSKAGTGAEDKXHRQATNKGPPDRPQAGGDKQGTKQNPPEKPTKPPKEEHKTKARHPKKKSKGSXRTDKTKEQR

SEQ ID NO: 190806 - protein, 60 aa, Glycine max
  unsure (1)..(60): unsure at all Xaa locations
  Clone ID: PAT_MRT3847_143318C.1.pep
SQDRGNAESRXKXRXERFESPRHLCEHPDSTIVRILLRRPYFPLTWEYVRGAXWRSXSXA

SEQ ID NO: 190807 - protein, 119 aa, Glycine max
  Clone ID: PAT_MRT3847_143319C.1.pep
TALLVPAYEPVFEALIKSLTKVKRVTGEDFGALEFCFDAQGFDHSVVPRLVFHFAGGARFEPPVKSYIIDVAPLVKCIGIVPIDGIGGASVIGNIMQQNHLWEFDLSTNTVGFAPSTCT

SEQ ID NO: 190808 - protein, 88 aa, Glycine max
  Clone ID: PAT_MRT3847_14331C.1.pep
MGGDPGLTDILNRGGRHQTKPPVMVFNTAHKYYSIDGVLTHGNVTGLIGPHLNVADSTLDILSDIVCLKVSLHLIIATMTLGDGKGHA

SEQ ID NO: 190809 - protein, 68 aa, Glycine max
  unsure (1)..(68): unsure at all Xaa locations
  Clone ID: PAT_MRT3847_143320C.1.pep
ATEAATSSFMGTRLLSAHSGAVRVQARFEFRKKKADGPXKLYTGSGSSSDRPLWYPGAKASRTYDGSL

SEQ ID NO: 190810 - protein, 73 aa, Glycine max
  Clone ID: PAT_MRT3847_143321C.1.pep
LLSCVCQFFSLHPMDNFLKFIDFTYTILSSFTICDGSLSKKLNFNGSTVITGCRNSKFLCMLFCVQALHYDII

SEQ ID NO: 190811 - protein, 77 aa, Glycine max
  Clone ID: PAT_MRT3847_143322C.1.pep
VLITYLKQTIVKETTNAKDTGLPCSDVLCLFSAGKGQRSVGRDPIPICIHPHVPASRRQNTWPIVTGHRLTLVDFCH

SEQ ID NO: 190812 - protein, 71 aa, Glycine max
  Clone ID: PAT_MRT3847_143323C.1.pep
ITIRLCWKHGMDGFLPRVQEKSFSIIAVRLEGPGRRSGPSPSTLHHVALFIFSYLIKSSLNPTPPNTHFPS

SEQ ID NO: 190813 - protein, 52 aa, Glycine max
  Clone ID: PAT_MRT3847_143324C.1.pep
FQLFSHLPSSNWRGTPLMASDSKKDFPSDDKAGTEERKRAKDETSSKDSPAE

SEQ ID NO: 190814 - protein, 62 aa, Glycine max
  Clone ID: PAT_MRT3847_143325C.1.pep
AESSSLNKSTISINYHLSSYDTYINILFFSITSGIFPIIPPVIYFYIYRYTLIYSHTIKIFH

SEQ ID NO: 190815 - protein, 163 aa, Glycine max
  Clone ID: PAT_MRT3847_143326C.1.pep
GIVDFLTCLVRKMLKKMKKQPLLFVELLFWKTRRECHYINAEYLLSELGHLKKESANWNNSQGDEEIGSSPTKVWTRRSIADALGEDEADVVITHDSRCQQDKLEDVIEGFASTSGSNSGKDVHNGEQLMEDESQLAPRRRKKLVLDGDLERQIKDLYEKFKD

SEQ ID NO: 190816 - protein, 130 aa, Glycine max
  unsure (1)..(130): unsure at all Xaa locations
  Clone ID: PAT_MRT3847_143327C.1.pep
YSGIKLALPAESTTGTCFVQQYIESILALQEASSQGESQTQIPLVIMTSDDTHGRTLELLESNSYFGLQPTQVTLLKQEKVACLEDNDARLALEPQNKYKIQXEAGLKWVLFFQDTNGLLFKAIPSALGV

SEQ ID NO: 190817 - protein, 636 aa, Glycine max
  Clone ID: PAT_MRT3847_143328C.1.pep
PEFPGRPTRPIYFHASSSVFSPPPSTSTLFSIDPISMASSLGDNFNLLSPQQQELVKMLLDNGQEHLFRDWPAPGVDDDHKKAFFDQLTRLDSSYPGGLEAYITNAKRLLADSKAGRNPFDGFTPSVPTGETLAFGDENYIKFEEAGVLEARKAAFVLVAGGLGERLGYSGIKLALPAESTTGTCFVQQYIESILALQEASSQGESQTQIPLVIMTSDDTHGRTLELLESNSYFGLQPTQVTLLKQEKVACLEDNDARLALEPQNKYKIQTKPHGHGDVHALLFSSGILKVWYEAGLKWVLFFQDTNGLLFKAIPSALGVSAAKQYHVNSLAVPRKAKEAIGGITRLTHSDGRSMVINVEYNQLDPLLRASGYPNGDVNCETGYSPFPGNINQLILELGHYIEELSKTGGAIQEFVNPKYKDASKTSFKSSTRLECMMQDYPKTLPLSARVGFTVMETWLAYAPVKNNAEDAAKVPKGNPYHSATSGEMAIYRANSIILRKAGVQVADPVVQVFNGQEVEVWPRITWKPKWGLTFNRIKSKVSGNCSISLRSTLAIKGPNIFIENLSVDGALIIDAVDDAEVNVSGSVQNNGWVLETVDYKDASEPEVLRIRGFKFNKIEQLETKYSEPGKFHLKA

SEQ ID NO: 190818 - protein, 147 aa, Glycine max
  Clone ID: PAT_MRT3847_143329C.1.pep
NCNYFCAILVPEKDQTRADSARGESFFNFFNPPEVPEDDDDIDEDAVEELQNLMERDYDIGSTIRDKIIPHAVSWFTGEAAQSDFEDIDEVDYDDEEGDEDEDEDEDEEEEEEEEEEKKGKSRSKSGGRVKPGKDQPTERPPECKQQ

SEQ ID NO: 190819 - protein, 56 aa, Glycine max
  Clone ID: PAT_MRT3847_14332C.1.pep
ASFRKKKKKKKKKKKKKKKKKKKKKTKKKKKKKKKKKKKKKKKKKKKKKKKGGGPF

SEQ ID NO: 190820 - protein, 60 aa, Glycine max
  Clone ID: PAT_MRT3847_143330C.1.pep
LSSAVEELENGVEHDYDRGSTIRDKIIPHAVSWFTGEAAQSDFEDIDEDDYEDEEGDDDD

SEQ ID NO: 190821 - protein, 96 aa, Glycine max
  unsure (1)..(96): unsure at all Xaa locations
  Clone ID: PAT_MRT3847_143331C.1.pep
SVFASEEGKHIPSSNISAGENHVVQKPLMALEEILSYNASEHRTXMVSKNSKPKATAMHGGAIDIIIDRXASADCNIVGAMLLVDTYHTNAENAVT

SEQ ID NO: 190822 - protein, 116 aa, Glycine max
  unsure (1)..(116): unsure at all Xaa locations
  Clone ID: PAT_MRT3847_143332C.1.pep
MATSNFSIVLSVSLAFFLXVLLTKAHSTDTVSFTFNKFNPVQPLLXREKEAXKTPPGGEQPTKGGSNGAPTPGTPGRAXDAAPNQNGDSETGKGASRATTXKSNTGAPNKTNPADG

SEQ ID NO: 190823 - protein, 86 aa, Glycine max
  Clone ID: PAT_MRT3847_143333C.1.pep
PCVLRRGVPVRGWSPSVSHVAVFVLGSGGVWLVLCSVRHGPCFRPGVARQGLLSAVCSSLCSLRWVFCRRGCVCIPVGFRRVRAGY

SEQ ID NO: 190824 - protein, 59 aa, Glycine max
  Clone ID: PAT_MRT3847_14333C.1.pep
LLLSVTSPSHLMKCIVVGGNSFDGRSLDWAKSEGKAYGGRNQPPWRRSRESEGARSSKG

SEQ ID NO: 190825 - protein, 85 aa, Glycine max
  Clone ID: PAT_MRT3847_14334C.1.pep
GFETKKTGLIHEPLEDDFAQYINRTLSVAVHDLRIQLGFSAPAEIRAVYSCSGGPTALSSNSARLGDLYAEEEKELLVEVRVPTS

SEQ ID NO: 190826 - protein, 116 aa, Glycine max
  Clone ID: PAT_MRT3847_14335C.1.pep
KISIKWIMFLVYMRSLKLLSAYPNLKRAYYGDSAPYITAYQELVYDNGQGEISLFEARPPLRLTLFTVPIYIHILSTMGIQNCTQDADQQARPLSKATIHIWRLSSWPDSNPVDIK

SEQ ID NO: 190827 - protein, 49 aa, Glycine max
  Clone ID: PAT_MRT3847_14336C.1.pep
VLDPSAGRTIILSLAWRSRPRPRVHSPDRLIPKHQSAIPAGSERQPPRA

SEQ ID NO: 190828 - protein, 91 aa, Glycine max
  Clone ID: PAT_MRT3847_14337C.1.pep
GWSSPTGKLDWGVNGDELNKLRKSASFGFRNSGVTASSSSSPIAQPEFGTEQDVSWVHSLVKDVPSERSEKQQYDHLSKEMLLSPWVEATI

SEQ ID NO: 190829 - protein, 193 aa, Glycine max
  Clone ID: PAT_MRT3847_14338C.1.pep
YCKDETGCARKVCFFAHKPEELRPVYASTGSAMPSPKSYSASGLDMTAMSPLALSSTSLPMPTVSTPPMSPLTASSPKSGSLWQNKINLTPPSLQLPGSRLKAALSARDLEMEMELLVLKSPARHHHHHQQQQQQQLIEEIARISSPSFRSKEFNRIGDLNPTNLDDLLLASADPSVLSQLQSGLQMRQSMNN

SEQ ID NO: 190830 - protein, 681 aa, Glycine max
  Clone ID: PAT_MRT3847_14339C.1.pep
MCSDSKSKLSSPTLVVMENSNIQKQNLDGLYNSVLLELSASDDYEAFKREVEEKGLDVNEAGFWYGRRIGSKKMGSETRTPLMIASLFGSAKVLNYILLQKGGGVDVNRVCGSDRATALHCAVAGGSESSLEIVKLLLDAGADAECLDASGNKPVNLIAPAFDSLSKSRRKAMEMFLRGGGERDDELMSQEMELQMFSVPEKKEGSDNKKEYPVDISLPDINNGVYGTDEFRMYNFKVKPCSRAYSHDWTECPFVHPGENARRRDPRKYPYSCVPCPEFRKGTCQKGDSCEYAHGVFESWLHPAQYRTRLCKDETGCARKVCFFAHKPEELPPVYASTGSAMPSPKSYSASGLDMTAMSPLALSSTSLPMPTVSTPPMSPLAAASSPKSGSMWQNKINLTPPSLQLPGSRLKAALSARDLEMEMELLGLESPARQQQQQQQQLIEEIARISSPSFRSKEFNRIVDLNPTNLDDLLASADPSVFSQLHGLSVQPSTPTQSGLQMRQNMNHLRASYPSNIPSSPVRKPSAFGFDSSAAVATAVMNSRSAAFAKRSQSFIDRGAATHHLGLSSASNSSCRVSSTLSDWSSPTGKLDWGVNGDKLNKLRKSTSFGFRNSGVTASPIAQPEFGAEPDVSWVHSLVKDVPSERSEIFGAEKQQYDLSKEMLPPWMEQLYIEQEQMVA

SEQ ID NO: 190831 - protein, 58 aa, Glycine max
  Clone ID: PAT_MRT3847_1433C.1.pep
FRSGWYNHTQRRNHFYLNLGNQNIQSNLAICIRFKCKAQTKEEEGRGGEAQCMRLPSL

SEQ ID NO: 190832 - protein, 42 aa, Glycine max
  Clone ID: PAT_MRT3847_14340C.1.pep
MWRKLTEHTIDNILRMQLHRDPNVLFVGYKLPHPLQYKIIVR

SEQ ID NO: 190833 - protein, 43 aa, Glycine max
  Clone ID: PAT_MRT3847_14341C.1.pep
PRARGLIWFKQNSPHILFFVVRTKCAFWFWRQAGRRGPQVKAP

SEQ ID NO: 190834 - protein, 57 aa, Glycine max
  Clone ID: PAT_MRT3847_14342C.1.pep
GTGQPLIGNTLIGRGVGGGPSLKKEDLRGACYRGRETGFPIFYRWAPMSLGGPSFSF

SEQ ID NO: 190835 - protein, 131 aa, Glycine max
  unsure (1)..(131): unsure at all Xaa locations
  Clone ID: PAT_MRT3847_14343C.1.pep
HQDVVWKGECPRVGAWADILAHSFKRKMESTRMSHIYTFKTXRLYGQRHITPTLDQVLPYHKEGMNATIDTTPAKATDTPKAIAKFRSTPQQNAPTDQRWTTRQYPEIPASLENTHLPNIQEKCPYFIIDT

SEQ ID NO: 190836 - protein, 232 aa, Glycine max
  unsure (1)..(232): unsure at all Xaa locations
  Clone ID: PAT_MRT3847_14344C.1.pep
MGEAPTFIPQDLQNGTCNGFELKSGTFETDTIVGNKKYVIGGTYGETFSVKDQILDNNGLGEWVDLIQLGTKPISCNGHSAVLLKDRILILKKNAKPDDCIWFLEVDTPYVRQQKKILGIDVVAWSKGVIGNAEKPVVISGPSGVGKGTLISMLMTEFPSMFGFXSHTTRAARGMEKDGVHYHFTEKNVMEKEIKDGKFLEFASVHGNLYGTSVEAVEXVSDAGKRCILDID

SEQ ID NO: 190837 - protein, 90 aa, Glycine max
  unsure (1)..(90): unsure at all Xaa locations
  Clone ID: PAT_MRT3847_14345C.1.pep
YHTPPRPRPTLTHMQPPSYXQCYQWRIAKHGGRPKFHHINTRHCALLRXHGGPPLHIVYGWVGKKSAKPFHCGQCHGLLFFHTDLHYVFQ

SEQ ID NO: 190838 - protein, 82 aa, Glycine max
  Clone ID: PAT_MRT3847_14346C.1.pep
SHIGFLQPMQKGLLPRPPPKALQEIGHCLIQLLRKLWSKECNESSAWFAQSAPFLSIKPFWIIRIGLSQIDFQLVTVHKKAT

SEQ ID NO: 190839 - protein, 64 aa, Glycine max
  unsure (1)..(64): unsure at all Xaa locations
  Clone ID: PAT_MRT3847_14347C.1.pep
GASPDTSALSCGPPPMIQYAVQPNLQKVGIXDPRNNLMVFQGPQLESIVGVHSSLLLDINNGFY

SEQ ID NO: 190840 - protein, 66 aa, Glycine max
  Clone ID: PAT_MRT3847_14348C.1.pep
FNLFFLFYLSLAKVLNTSNKKMLESWKEWLKGITRDLVFTYSEKHLECFFFISLLVCVSVSIMQSK

SEQ ID NO: 190841 - protein, 89 aa, Glycine max
  unsure (1)..(89): unsure at all Xaa locations
  Clone ID: PAT_MRT3847_14349C.1.pep
GKAYPAMSTHSHTAGGMAKKTLRSSIPEKRCATLLRRLTCHCIPTDDVRLRTGGRFRTIXHHSDLAHCCNSGIDSVDMMLEPLRAQSPI

SEQ ID NO: 190842 - protein, 79 aa, Glycine max
  Clone ID: PAT_MRT3847_1434C.1.pep
SHLKTVSTCAPRSSAQDRCCGPDQPAHRSTEPLPKGSLFAWDTVARESPTLCMGPCSSSPRAHEECSWSSRGKHHDLGR

SEQ ID NO: 190843 - protein, 81 aa, Glycine max
  Clone ID: PAT_MRT3847_14350C.1.pep
AIFVLRELILWTYPLIYSLEDLALVDITAATPVKDYTLGTLMLCMTNTSISILYKHEATDLTALDSHGFFQLMLDPEYFDT

SEQ ID NO: 190844 - protein, 65 aa, Glycine max
  Clone ID: PAT_MRT3847_14351C.1.pep
NNNIFSSRQLCHFFTHVNLYWFPRSCLFVGGLSLLLLPFVQLMTFVVFTVADFDLLFVAFVVADL

SEQ ID NO: 190845 - protein, 43 aa, Glycine max
  Clone ID: PAT_MRT3847_14352C.1.pep
FSSLKFIKNPVLLSCDLPWGQPHANSAGMCWVVTLHCYLTFCP

SEQ ID NO: 190846 - protein, 109 aa, Glycine max
  unsure (1)..(109): unsure at all Xaa locations
  Clone ID: PAT_MRT3847_14353C.1.pep
FILVNAGFALAGAMNSIFRGRANADIYTICSQDWELWNTDCTKSTTMILKPNPCADAWSSELMKRTGFYXDIISVTGWAAILRQDVQVTYDWYIPSQECGTRTYCVLKP

SEQ ID NO: 190847 - protein, 79 aa, Glycine max
  unsure (1)..(79): unsure at all Xaa locations
  Clone ID: PAT_MRT3847_14354C.1.pep
RIQEGVTEAXLKVAINGFGRIGRXFLKXWXGRKDSLLCHCINDTGGVKQASHXSSTIRSRTFVMSAVGTSSLSMERKCL

SEQ ID NO: 190848 - protein, 105 aa, Glycine max
  unsure (1)..(105): unsure at all Xaa locations
  Clone ID: PAT_MRT3847_14355C.1.pep
SSTITSTISVLNKLPEDTFSYLNSSGXVHTTTASELTKDKNAALIACPGALHPTCXQNHVPAFEQKYAHLRPNVIDSISCISVNDTFDVKACKDDLNVYDEDILL

SEQ ID NO: 190849 - protein, 65 aa, Glycine max
  Clone ID: PAT_MRT3847_14356C.1.pep
AGLRVMCSNMLALHLDVQLCQIDYNALHGNLMLCHNFNLPYIKYGPPAWHWEGENFNGTSFGRVG

SEQ ID NO: 190850 - protein, 41 aa, Glycine max
  unsure (1)..(41): unsure at all Xaa locations
  Clone ID: PAT_MRT3847_14357C.1.pep
WRILPQIFPPPRWELXGTAFDLCKRNKPNWILAWEDGFCNY

SEQ ID NO: 190851 - protein, 70 aa, Glycine max
  Clone ID: PAT_MRT3847_14358C.1.pep
SLRWIQAFEEEDGAKVVRVENMDNPYKRPDNFDKRFKLSLNKLYAWSLVDYDRVVMLDADHLFLQNTDEL

SEQ ID NO: 190852 - protein, 65 aa, Glycine max
  unsure (1)..(65): unsure at all Xaa locations
  Clone ID: PAT_MRT3847_14359C.1.pep
RLLTLSGVYGFWKPVTNLXRRQSHRLLEMFYALQYRXLAESAPPAIEESTHVWREHQWRFRLLAV

SEQ ID NO: 190853 - protein, 43 aa, Glycine max
  Clone ID: PAT_MRT3847_1435C.1.pep
LKLHDALLMHLLRIYIYCRVAEERETLLLWLVIFETNSNIFFN

SEQ ID NO: 190854 - protein, 52 aa, Glycine max
  Clone ID: PAT_MRT3847_14360C.1.pep
RAPKTQRPLLKATVPCLHIEGAAKKPEPMAGAKTPLRWAPMGIFKPVIPYPH

SEQ ID NO: 190855 - protein, 49 aa, Glycine max
  Clone ID: PAT_MRT3847_14361C.1.pep
KNNLFLWYMKILQPSYGNFIKNIFVLRFWDSLCFQYLFVHFKINSRKLK

SEQ ID NO: 190856 - protein, 52 aa, Glycine max
  Clone ID: PAT_MRT3847_14362C.1.pep
QEEGGCYLGGDIFVVAKFKMGFEVKYRDGSWYLGVLLGKDGNKRYYAKKRCI

SEQ ID NO: 190857 - protein, 405 aa, Glycine max
  Clone ID: PAT_MRT3847_14363C.1.pep
MEGGYGNRGSSFSQSRRGRGRGRGQRFPSNQSKVSSFAERGTPSSSSANRASASVISNTLEDDAQPSSNFVGTCPYMCPERERIQREKLRDLAIFERLHGNPGKSSPALAVKKFCRTISTKYVQASDMRPITVLEDTLNYLLSLLESKEHLSEVVHDFVFDRTRSIRQDITMQNIVNKKAIYMYEGMVKFHVVSHYKLWCSMSDPNTASLHHLNMEQLTKTLASLFNLYEANQNSNHVHENEAEFHSLYVLLHLGSYSQPMGEPLSLWFQRVSTPVLKSKEMCFARRILRSFRLGNYKDFFCTAAAQASYLQFCIMMPYINEVRVLALSCINFGGYKLHPYPLLDLSKLLFIKESDLESFCNHCGLETGTDESGNKLLPTKQTTFSHPKGGFQRYSFLGLQEYER

SEQ ID NO: 190858 - protein, 152 aa, Glycine max
  Clone ID: PAT_MRT3847_14364C.1.pep
NVAISNAQGEPLSLWFRRVSTPVLKSKEMCFARRILRSFRFGNYKDFFCTAAAQASYLQFCIMMPYINEVRVLALSCINFGGYKLHPYPLLDLSKLLFIKESDLESFCNHCGLETGTDESGNKLLPTKQTTFGHPKGGFQRYSFLGLQEYER

SEQ ID NO: 190859 - protein, 183 aa, Glycine max
  unsure (1)..(183): unsure at all Xaa locations
  Clone ID: PAT_MRT3847_14365C.1.pep
PLAFTVRALDAGPVIATETIQVDDQIKAPDLLELLFHKGSKLLIGELPSILDGSARVKAQPQDDSKATLAPKINPDESWLFFDQEASVLHNXGWPGTRARVLVVEKNGQQKTLEIKIITTRVRSHESVQFDEADDIAFVEGALVFPCGRGTTLEVLEVQLPGKKVVNSAAFWNGLRGQKLKKL

SEQ ID NO: 190860 - protein, 54 aa, Glycine max
  Clone ID: PAT_MRT3847_14366C.1.pep
RNITVNEAQSPGGGGGGGEGGGGYNRGGGGYGGRSGGGGGGCGYRNRDGGYGGC

SEQ ID NO: 190861 - protein, 34 aa, Glycine max
  Clone ID: PAT_MRT3847_14367C.1.pep
VAVQAKGRELRFYVRSPQGHSMKAAFQLSGIASA

SEQ ID NO: 190862 - protein, 70 aa, Glycine max
  Clone ID: PAT_MRT3847_14368C.1.pep
SVIYAEACDIRGSMFEGMMPKDLKIYATTASNAQENSWGTYCLGMDPSPPPEYIICLGDLYSVAWMEDKY

SEQ ID NO: 190863 - protein, 403 aa, Glycine max
  Clone ID: PAT_MRT3847_14369C.1.pep
ARAGIVIGSVVGVLLILLLLFFLCRKRNKKDENETLPPEKRVVEGEVVSREKSNESGGNSGSVEKSEVRSSSGGGGDNKSLVFFGNVSRVFSLDELLRASAEVLGKGTFGTTYKATMEMGASVAVKRLKDVTATEKEFREKIEQVGKMVHHNLVPLRGYFFSRDEKLVVYDYMPMGSLSALLHANGGVGRTPLNWETRSAIALGAARGIAYIHSLGPTSSHGNIKSSNILLTKTFEARVSDFGLAYLALPTSTPNRVSGYCAPEVTDARKISQKADVYSFGIMLLELLTGKAPTHSSLNDEGVDLPRWVQSVIQDEWNTEVFDMELLRYQSVEEEMVKLLQLALECTAQYPDKRPSMDVVASKIEEICHPSLEKEEEKNHDFKDADNGFSQQYHSVDSGVSQA

SEQ ID NO: 190864 - protein, 103 aa, Glycine max
  Clone ID: PAT_MRT3847_1436C.1.pep
ASDPHLYYFCLFFNTLAFSISISVILLPIYQLPCHLDQCFVLFPMAITYGSAIFFSFPHDPLLLGFCLLSATCPYGIRFLVRIFYLNQTKHVPSLILLLDPGS

SEQ ID NO: 190865 - protein, 56 aa, Glycine max
  Clone ID: PAT_MRT3847_14370C.1.pep
LRGIYLLRVFFSKIGKNLFLKTLSIKNLLKPFYWLFKPIYFFDLPLGFGKINSLSL

SEQ ID NO: 190866 - protein, 123 aa, Glycine max
  Clone ID: PAT_MRT3847_14371C.1.pep
DLGELREDYNMDRDKGHDKTLVCLPNRRDGLDHLLLAMQRAWPLGPGAPGSAPMAHCFGRGCCLRSKCSLCFPGPTIRRQLLPHFLLPQTLLMLTRSPCRPFLGTSPELTFSDASQIMRSSTW

SEQ ID NO: 190867 - protein, 54 aa, Glycine max
  Clone ID: PAT_MRT3847_14372C.1.pep
IPPEPQRAHIFSEHPPFGRSVVRHMRPLVAVGVINSVDKKDPTAAKVTKAAAKK

SEQ ID NO: 190868 - protein, 45 aa, Glycine max
  Clone ID: PAT_MRT3847_14373C.1.pep
GLLLLLGLLGFLALLALMSRLGRAAADSDPNLDPLMNPHIRVGPS

SEQ ID NO: 190869 - protein, 76 aa, Glycine max
  unsure (1)..(76): unsure at all Xaa locations
  Clone ID: PAT_MRT3847_14374C.1.pep
YHXSLGSPKXRNLRXQXXXXWIXXXXXIHXTEPISXDAKXXSPAPKNSDSNDXHKXWXNFRRXXMFVXMXRAXXIM

SEQ ID NO: 190870 - protein, 35 aa, Glycine max
  unsure (1)..(35): unsure at all Xaa locations
  Clone ID: PAT_MRT3847_14375C.1.pep
MASHMQSYXAGQTKGRTEEKMNQMMGTIGDNAQAA

SEQ ID NO: 190871 - protein, 40 aa, Glycine max
  Clone ID: PAT_MRT3847_14376C.1.pep
FLEVTCLQQSAQYEKINNWEYTEEHSYRYLSFHTMLIADS

SEQ ID NO: 190872 - protein, 63 aa, Glycine max
  Clone ID: PAT_MRT3847_14377C.1.pep
VFFFFFFFFFFFFFFFFFVFFFFFFWPKTTRFFIYTRAPPGKKKKFPPPFFFSGFPPKWFYFV

SEQ ID NO: 190873 - protein, 145 aa, Glycine max
  unsure (1)..(145): unsure at all Xaa locations
  Clone ID: PAT_MRT3847_14378C.1.pep
PFQTLLLLPPPNTGRRPPPNPQXPASRPPTADAXPRRHPASPLCAPTPASSRRHPSKACRPTTPTPRPRRPTSPRPTPCRLPPRDPSTRCCRRASRPLRPCAPSRRPTVRERGAAAKTRASAPWRARGLSRRSWRISLVPTPPSS

SEQ ID NO: 190874 - protein, 54 aa, Glycine max
  unsure (1)..(54): unsure at all Xaa locations
  Clone ID: PAT_MRT3847_14379C.1.pep
VRMGSHCTSVPLRPSLLCEPIYQQAVWRVYDXTHAKEIILVLELFFIIEINIFF

SEQ ID NO: 190875 - protein, 54 aa, Glycine max
  Clone ID: PAT_MRT3847_1437C.1.pep
RYKTIYVPLANMSNFWGSWLVTTVISHCMHHGLKKCHLTLISQILQVTNSTKMF

SEQ ID NO: 190876 - protein, 67 aa, Glycine max
  Clone ID: PAT_MRT3847_14380C.1.pep
LMLTFRTWIASFRLRFVFYVFVYKTYALHLALSCPMILKIFHIPMSLSYCICHSVCVIYIIRDVTLE

SEQ ID NO: 190877 - protein, 79 aa, Glycine max
  Clone ID: PAT_MRT3847_14381C.1.pep
VMQAAAKLGISITISQVGSDMLSTGTPSALPTINKNQEWQPAMSLNEDGLLHQLHSTLVQAIDSSKCMLLHNNQLNVIF

SEQ ID NO: 190878 - protein, 36 aa, Glycine max
  Clone ID: PAT_MRT3847_14382C.1.pep
LTLLNTTYSNVSPSIFPKGIPNIIPFNSNLMTHAKT

SEQ ID NO: 190879 - protein, 86 aa, Glycine max
  Clone ID: PAT_MRT3847_14383C.1.pep
RSVSVNNGFFTFKRGGVLSRRNTCGSNRHRWPNLPHSIPSRCFFTPNCFARETIARQGRRNELYRSSKRASRAVIQYSIVLQQSFY

SEQ ID NO: 190880 - protein, 70 aa, Glycine max
  unsure (1)..(70): unsure at all Xaa locations
  Clone ID: PAT_MRT3847_14384C.1.pep
RGGAWGNTFXREGVQELGGDNVGFRGAHRGLQMSRNLSTLAVEWVSKPEAFPAKRQAGSSSYTGYTSSSQ

SEQ ID NO: 190881 - protein, 62 aa, Glycine max
  Clone ID: PAT_MRT3847_14385C.1.pep
GEACVAEMYPETNLQPKAQTPRFESENDYRNYLEFHDPKTSFLGEAREDLVGTICDTEYQNG

SEQ ID NO: 190882 - protein, 503 aa, Glycine max
  unsure (1)..(503): unsure at all Xaa locations
  Clone ID: PAT_MRT3847_14386C.1.pep
MASSATDDNPRSVKRVAVVGAGVSGLAAAYKLKSHGLDVTVFEAEGRAGGRLRSVSQDGLIWDEGANTMTESEIEVKGLIDALGLQEKQQFPISQHKRYIVKNGAPLLVPTNPAALLKSKLLSAQSKIHLIFEPFMWKRSDPSNVCDENSVESVGRFFERHFGKEVVDYLIDPFVGGTSAADPESLSMRHSFPELWNLEKRFGSIIAGALQSKLFAKREKXTGENRTALRKNKHKRGSFSFQGGMQTLTDTLCKELGKDDLKLNEKVLTLAYGHDGSSSSQNWSITSASNQSTQDVDAVIMTAPLYNVKDIKITKRGTPFPLNFLPEVSYVPISVMITTFKKENVKRPLEGFGVLVPSKEQKNGLKTLGTLFSSMMFPDRAPSDLYLYTTFIGGTQNRELAQASTDELRKIVTSDLRKLLGAEGEPTFVNHFYWSKGFPLYGRNYGSVLQAIDKIEKDLPGFFFAGNYKGGLSVGKAIASGCKAADLVISYLNSASDNTVPDK

SEQ ID NO: 190883 - protein, 304 aa, Glycine max
  unsure (1)..(304): unsure at all Xaa locations
  Clone ID: PAT_MRT3847_14387C.1.pep
MVARGVPAMAVVAVAALDLTESSNWWRDINRSPLWQDRIFHLLSILYGIVAAVALVQLVRIQWRVPEYGWTTQKVFHFLNFIVNGVRCFVFVFRRDVQKLQPEIVQHILLDMPSLAFFTTYALLVLFWAEIYYQASADAWAGLRRAVSTDGLKVXPSFYTINIVVYVVQITLWLILWWKPISGLLILSKIFFAGVSLFAAIGFLLYGGRLFLMLQRFPVESKGRRKKLQEVGYVTTICFLCFLVRCIMMCFNAFDKNANLDVLDHPILNFIYYLVVEILPSSLVLFILRKLPPKRGITQYHPIR

SEQ ID NO: 190884 - protein, 52 aa, Glycine max
  Clone ID: PAT_MRT3847_14388C.1.pep
VELRLVFFYKRYMKDDFILSHFYFIGAWKHSFYLTPNMGGEIYGSIKFLGIP

SEQ ID NO: 190885 - protein, 146 aa, Glycine max
  unsure (1)..(146): unsure at all Xaa locations
  Clone ID: PAT_MRT3847_14389C.1.pep
HPXVILVVNKIDCKPCAETKWDKGCQSHIFSKRVFTRDVLVIGLQQLERAVAQIEGLEGIPAGGTMMTVNQRQWEQLVRTKEALARLQSSIKEELPLDFWKIDMRYTGLSLVQNSGEDLSEXVLWNIICTFCIVKRIGSQNVLSIF

SEQ ID NO: 190886 - protein, 230 aa, Glycine max
  Clone ID: PAT_MRT3847_1438C.1.pep
MAPSSSFVHLVNLGLVLVLLGFIVPRSEARPRAFFVFGDSLVDNGNNNYLQTIARANAPPYGIDYPTHRATGRFSNGFNIPDFISQQLGAESTMPYLSPDLTRENLLVGANFASAGVGILNDTGDQFMNIIKMHKQIDYFKEYQQRLSALIGVSRTKRLVNQALILITVGGNDFVNNYFLVDSTARSRQYSLPDYVKFLINRYSKHLQRLYNLGARRVLVTGSGPLGCAP

SEQ ID NO: 190887 - protein, 187 aa, Glycine max
  Clone ID: PAT_MRT3847_14390C.1.pep
MLDSSIYAKLILELGKNPDRHRHVLPLLDELGERDELNLSQQDCTAIMKVCVKMGKFEVVESLFSWFKQSGYQPSIVMFTSVIHSRYTEKKYREALAVVWEMEASNCLFDLPAYRVVIKLFVALNDLSRATRYFSKLKEAGFSPSFGLYKDMLQIYMASGRIAKCKELCREAEIAGFKLDKYLVSVR

SEQ ID NO: 190888 - protein, 54 aa, Glycine max
  Clone ID: PAT_MRT3847_14391C.1.pep
SHDRRVRIFRYLHHCAGYQTLGEGGIIISSKNGKGIHRVAVGHSSQHNGRQQEE

SEQ ID NO: 190889 - protein, 56 aa, Glycine max
  Clone ID: PAT_MRT3847_14392C.1.pep
LGSGIRGNKYPPINISPRRNWLSLFLWFTVVNALVKIWFLDKTFHFNSFSNVTTMR

SEQ ID NO: 190890 - protein, 246 aa, Glycine max
  unsure (1)..(246): unsure at all Xaa locations
  Clone ID: PAT_MRT3847_14393C.1.pep
MAETSFFVGVFFLLYDILMFHNCVPTTLXKKKHGSTEDFSSLPYICTLLNCSLLTYYGIIKAGEYLVATVNGFFGIVVEIYYVLLFLIYAPKGRSMXTDILAVILDVALVAAAVITTQLAFQGKARSGAVGVMGARLNSVMYFSPVSDMKTVVKTKSVEYMPFLLSFFFFLNGGVWLLYAVLVRDVILGVPNGTGFLLGAMQLVLYAIYRNGKPSSNNRLEEGLQHEPLISQPNKESHQIREDRPI

SEQ ID NO: 190891 - protein, 66 aa, Glycine max
  unsure (1)..(66): unsure at all Xaa locations
  Clone ID: PAT_MRT3847_14394C.1.pep
FLVVKFSTRYIYSSYKKYRXTSSETEAWKADKKTCGGLHFRAVQPDIDXENCVGIFLILDMPFPPV

SEQ ID NO: 190892 - protein, 96 aa, Glycine max
  Clone ID: PAT_MRT3847_14395C.1.pep
TICFLRGIVNGAAVLVKKENLLSGLLIPSFRNRIPRVIPSILESTVHKFIGMVLDISRSTRRSHCSSRQRRHFRPSRIRLPFFFPLLSSSHDHAST

SEQ ID NO: 190893 - protein, 81 aa, Glycine max
  unsure (1)..(81): unsure at all Xaa locations
  Clone ID: PAT_MRT3847_14396C.1.pep
YGQXKCRXFTLNRCXXDXPNXNHRERCSKSWPEWEXVNSIPXXXNLCLKCSEILEVGKRXGILLXXSISXREPKAVPFLRT

SEQ ID NO: 190894 - protein, 102 aa, Glycine max
  Clone ID: PAT_MRT3847_14397C.1.pep
MHFLSLLTVKSNGILSKIYRLRAEQARCCKRAKKKKKKKKKKKKKKKKKKKKKKKKKKKKKKKKKKKKKKKKKKRGDRFKGSKLTYAVMQSFNFLFGSQKLN

SEQ ID NO: 190895 - protein, 119 aa, Glycine max
  Clone ID: PAT_MRT3847_14398C.1.pep
VVWGWLSFYTHLSSAIWVGVPASVGLVLFLKRGICVQQILLADVFFLSPSYSLLAGGPNLALPACACSLSVRGLSMAYSRALATLLPVSPLLCLGPRPLAPLAYCPPTSHFSVGLRSTL

SEQ ID NO: 190896 - protein, 74 aa, Glycine max
  Clone ID: PAT_MRT3847_14399C.1.pep
ISFSLIFILESQNQRSQFPFHSASLQPQLPMSASRSGRISWPQWKSRSNLKKNKKRILCSESHKLFPTPSKLKN

SEQ ID NO: 190897 - protein, 71 aa, Glycine max
  Clone ID: PAT_MRT3847_1439C.1.pep
IKIPHHIINKLENIIFAFLAGTPCLFSLHLKHVLTSNKLYKFKHSFSKLICPTFISIQPLIHPPSVLRNLY

SEQ ID NO: 190898 - protein, 103 aa, Glycine max
  unsure (1)..(103): unsure at all Xaa locations
  Clone ID: PAT_MRT3847_143C.1.pep
KAKEASEGRPCRGPVYGHLFSKDGFPAPIQGLNRCXDVLRVSDEKYAXNPLLVHQEIVNGKPIKYKWLTYNEIYHQCMNVGNYIHSCGYGESVKCAIYCAKTA

SEQ ID NO: 190899 - protein, 81 aa, Glycine max
  Clone ID: PAT_MRT3847_14400C.1.pep
DEGLRVGSGAGNCARKYLHLGVDLAAVVEAYGHAHGHPLQLRLRINLVINRGVLPPVPGTLTGPPPRQLLFIRLKIRHTIL

SEQ ID NO: 190900 - protein, 49 aa, Glycine max
  Clone ID: PAT_MRT3847_14401C.1.pep
TPWNQDPLRHSFTQSSIDQLGGGITVVTTGHWLTLIQNASIYNWRSVAA

SEQ ID NO: 190901 - protein, 34 aa, Glycine max
  Clone ID: PAT_MRT3847_14402C.1.pep
SDSNHDTYGGISSYSVFDIKASYKIDAHLTASAG

SEQ ID NO: 190902 - protein, 60 aa, Glycine max
  Clone ID: PAT_MRT3847_14403C.1.pep
RQSERTIYNFAKSRKHSCYPYNGFTQKHSYHPTSSYFKYFYLLSSHILLISRPNSFLFIS

SEQ ID NO: 190903 - protein, 46 aa, Glycine max
  Clone ID: PAT_MRT3847_14404C.1.pep
SFFPSNLFIWMIINYCPKVDIFFMFFLQLIPYLLILAHFFEKVTNS

SEQ ID NO: 190904 - protein, 52 aa, Glycine max
  unsure (1)..(52): unsure at all Xaa locations
  Clone ID: PAT_MRT3847_14405C.1.pep
EYKSELFSKFLLPPCESNKKKSLSLPVFLTNSIECFNQSFSXQASPLTPIVK

SEQ ID NO: 190905 - protein, 55 aa, Glycine max
  Clone ID: PAT_MRT3847_14406C.1.pep
LLSKKVSIYATHGFYFILLVLKGRVKKPKRKNYTAIYQGVETPIKSASQHKFNIF

SEQ ID NO: 190906 - protein, 79 aa, Glycine max
  unsure (1)..(79): unsure at all Xaa locations
  Clone ID: PAT_MRT3847_14407C.1.pep
PGRPRXRKKKKXXKXXXLLCSXALKEPSGGARPCNGFTLTYAHLKPINWPSCYTKCNWKNPGLNQLNWQNHIPPNSTGL

SEQ ID NO: 190907 - protein, 58 aa, Glycine max
  Clone ID: PAT_MRT3847_14408C.1.pep
ITLNFSPSIQGHILLRSMFHQLLVLSVFLSNLPVLTIDMVLHQLFTIKGFVLFIKNPP

SEQ ID NO: 190908 - protein, 68 aa, Glycine max
  unsure (1)..(68): unsure at all Xaa locations
  Clone ID: PAT_MRT3847_14409C.1.pep
LRRSGKVHEFVPTFKLVYREENIRLFVFFAAALDLVAWPCHGAGYQRFPLRMNTGYXGERSSHVECPR

SEQ ID NO: 190909 - protein, 319 aa, Glycine max
  unsure (1)..(319): unsure at all Xaa locations
  Clone ID: PAT_MRT3847_1440C.1.pep
LRDLSSPGKSGSIFYLSKDDRFVIKTVNKSELXGDHENTLITKFFGLHRITLRGGKKVRFVVMGNVFCTELQIHRRYDLKGSKQGRYTNNDKINCNTTLKDLDLKYEFHMDKKLRESLLKQISLDCKFLESQHIIDYSLLLGLHFRAPENMKAFVEHHESVQRQESLPSGDEGQLLILPKGLLLVSHEPSIVNTAPGPHIRGNTLRAYSMGDNEVDLLLPGIARLRVQLGVNMPAQATRRLQEDKDKVEAKEVELFEVYDVVLYMGVIDILQNYNLRKKIEHAYKSLQFDPMTISVVEPKIYDERFIKFLEEKVFPKTP

SEQ ID NO: 190910 - protein, 409 aa, Glycine max
  unsure (1)..(409): unsure at all Xaa locations
  Clone ID: PAT_MRT3847_14410C.1.pep
MRRARNMRPNIVSEAGLPTRMSQWWESIPFLTSAVVVVCGIIYLVCLLVGYDSFNEVCFLPSAVVSRFQVYRIYTSILFHGSLLHVVFNMMALVPLGSELERIMGSVRLLYVIILVATSNAIFHVLIALLVAHNPLLTYDYLMNECAIGFSGVLFSMIVIETSLSGVQSRSVFGLVNGPAKWYAFFLVVVFQLLMQNVSLLGHLCGILSGFAYTYGLFNFLIPGTSFYSSIESSSWFSSCVRRPKFIGRAGGNPSGYIPTHTSQNSTTSGLLSGNVWRNLSSFMPQREVSAQSTEDSRFPGRGRTLGAVQGQTASHLHSDSNLQARLLEDSSPNSPLDSSTPSNPQRLSEGRHSVDNVATAAAGVLQNQGAAVSEEGIRKLVSMGFDRTXVEVALAAADGISMCSGKLM

SEQ ID NO: 190911 - protein, 73 aa, Glycine max
  Clone ID: PAT_MRT3847_14411C.1.pep
FFNQQQQTKKDNHVIIEGVPILTNTAKQKFIYNETNRPNKPTTSLHNRIQPTAYYLFFPLLSSSRSRLEPLEP

SEQ ID NO: 190912 - protein, 175 aa, Glycine max
  Clone ID: PAT_MRT3847_14412C.1.pep
SGLPGRPTRPENDEGDVDDAVGSEDEAGSEDGMEFDAESSGGREDKLMSSPDNMVKVIMDRWLYFRSTAIDVAQLYCLRERLSAAILYKVTHPRNTLPPIMAASVHAIACILSCDGCIGVSAMLEGVDTLTTMVNATSLGKPATGTRRFGKRPKGSLAELLNYDGRQNSGPHFKA

SEQ ID NO: 190913 - protein, 43 aa, Glycine max
  Clone ID: PAT_MRT3847_14413C.1.pep
GEILKYFFYWGELTLFFFLEQIYFRFLWHRKESLSKQNLVNNH

SEQ ID NO: 190914 - protein, 100 aa, Glycine max
  unsure (1)..(100): unsure at all Xaa locations
  Clone ID: PAT_MRT3847_14414C.1.pep
VSLSHETGCSKECNRVLIDGTLVMQIQDGYPEGQDLSVLDMSSMGXKQICALKDFGPNVIDLGLHLYKWNQIICFTLYRVFEDEFSTNGCDILYNHVDSR

SEQ ID NO: 190915 - protein, 74 aa, Glycine max
  Clone ID: PAT_MRT3847_14415C.1.pep
QWESLSAGCLCPVNGRVADCAHSLTCSSNLYYPYSSLPLSAPVLNVFAVLVNLFAIARDRTLDSSIEIARALLS

SEQ ID NO: 190916 - protein, 84 aa, Glycine max
  Clone ID: PAT_MRT3847_14416C.1.pep
QRASCTNMYDRADHPTDDGEILIGDHNIADRICHGATGMCCRSRGTQQHAGHPKCYSACTRQRCKANRSAETYNFITDVKRYAR

SEQ ID NO: 190917 - protein, 69 aa, Glycine max
  Clone ID: PAT_MRT3847_14417C.1.pep
DEDEDDHHDEGLEGDASGRSAQTSCEEKTRKAMLKRGMTPVTGVSLVTLKKIRTSWFVISKPDVFKSPI

SEQ ID NO: 190918 - protein, 129 aa, Glycine max
  unsure (1)..(129): unsure at all Xaa locations
  Clone ID: PAT_MRT3847_14418C.1.pep
RRPSSVSLVLMIATNFNSCDVIVPSMPPASMYIWYSSIQCSRFSLKVTASGVSLPCWCKASLGHKVLMLMWQSVLGHQLMLERSIIMMEVMVRWIGAWTLRDSVCIPLPRLRARACVLINSCILHXSXX

SEQ ID NO: 190919 - protein, 83 aa, Glycine max
  Clone ID: PAT_MRT3847_14419C.1.pep
HGKGPLPITKKKKQDNYLAFLLYIYTSHRHSSLASINHNHHTSTKVLSIGCESHCSLSRLLISRQIADKCHMPPMRSQLQSVI

SEQ ID NO: 190920 - protein, 53 aa, Glycine max
  Clone ID: PAT_MRT3847_1441C.1.pep
TSNNLISISSGRRNFNFKGHLHQLFISNFLRERKNTTGCWASRFVHHDQVAHA

SEQ ID NO: 190921 - protein, 84 aa, Glycine max
  Clone ID: PAT_MRT3847_14420C.1.pep
HGKGPLTITKKNRTTILHSCCIYTSHRHSSLASINHNHHTSTKVLSIGCESHCSFLAFIDIAANRRQMPHATYAVAIATRYLKP

SEQ ID NO: 190922 - protein, 107 aa, Glycine max
  Clone ID: PAT_MRT3847_14421C.1.pep
HGKGPLTITKKKKQNNYLAFLLYIYTSHRHSSLASINHNHHTSTKVLSIGCESHCSLSRLLISRQIADKCHMPPINSKLHSESGVNYSDSSLSTRDHQHPPQKDHVR

SEQ ID NO: 190923 - protein, 49 aa, Glycine max
  unsure (1)..(49): unsure at all Xaa locations
  Clone ID: PAT_MRT3847_14422C.1.pep
GIXLSTVPQGRILDGMALICLNLIYLELCVCPTLDGAMLQLHYDHVLQA

SEQ ID NO: 190924 - protein, 60 aa, Glycine max
  Clone ID: PAT_MRT3847_14423C.1.pep
SKVCLRRSTIGFHRPKLVTPINNSKKLTPRLPYAYTLLICIIYPKVHKLLINDHRTMTLK

SEQ ID NO: 190925 - protein, 163 aa, Glycine max
  Clone ID: PAT_MRT3847_14424C.1.pep
MGGKSGVVWILLALIAAAWCLLTPARANSTTIYEELRAQGLPVGLLPKGIAKYSMNATSGEFEVWMKEACNAKFENEVHYDSNIKGVLGYGRIGELSGVSAQELFLWFPVKGIRVDVPTSGLIHFDVGVADKQFSLSLFEDPPDCNPQAQVNVGGEGEQRAVW

SEQ ID NO: 190926 - protein, 76 aa, Glycine max
  Clone ID: PAT_MRT3847_14425C.1.pep
LDRRTNHAIKRLQTEYRAPRQEPAPHAEARPSPETSRSGITLMEGSDGTPSASATTKGKPRLPPNKPPNPPETTRP

SEQ ID NO: 190927 - protein, 38 aa, Glycine max
  Clone ID: PAT_MRT3847_14426C.1.pep
YILWGGCHFVKCKFYQMKIWLLNNSFVLSYVKNFHIYT

SEQ ID NO: 190928 - protein, 42 aa, Glycine max
  Clone ID: PAT_MRT3847_14427C.1.pep
GKRKKLLKPNTKEPFGSQNITLSDEVQWTIKWGESINKQFIG

SEQ ID NO: 190929 - protein, 112 aa, Glycine max
  unsure (1)..(112): unsure at all Xaa locations
  Clone ID: PAT_MRT3847_14428C.1.pep
RTTRAGEWFTARVSACGLFHMASPSAPETSKTEWRSIYSRVXQDDMPMARGAGASNTGKLGATAEYADLKADVMSMFDDLTQDDHDAAQXMAEEGCAGLGKLEEPQDCVAHI

SEQ ID NO: 190930 - protein, 96 aa, Glycine max
  Clone ID: PAT_MRT3847_14429C.1.pep
SLLNVQHVVQSGNWLAVLERELEERLRTQPQQTPKMKAYAPAADYGYVHHRQHGKSDKFIKQSFFRKVAHVQDRSYPNPILRDAYAYTPRVDPSHV

SEQ ID NO: 190931 - protein, 130 aa, Glycine max
  unsure (1)..(130): unsure at all Xaa locations
  Clone ID: PAT_MRT3847_1442C.1.pep
AFDHAYGGADKALAYGAKAKGARVEIANRTYDHAIQLAHAVGGYAVTLVDXNNHHSKDGLILANTTLIVKQPIDDETAVSKHASEXTGLGGDARYTPKIARLLLECXESGATIVTGLAMYIAHAYGQYEN

SEQ ID NO: 190932 - protein, 77 aa, Glycine max
  Clone ID: PAT_MRT3847_14430C.1.pep
FQESDNYLPTTGCPTASGKENHSLCWPQTQRIIGFSTLSICAEHSLFDIGLRVRFKLLVALCNSLLNMRAHAGENLD

SEQ ID NO: 190933 - protein, 62 aa, Glycine max
  Clone ID: PAT_MRT3847_14431C.1.pep
SDLNRLRVASVSLKSRLDHEKTVLVCLNQSLQKSRTEVVYLRPELSKSTSSIAWIQMMDIES

SEQ ID NO: 190934 - protein, 180 aa, Glycine max
  unsure (1)..(180): unsure at all Xaa locations
  Clone ID: PAT_MRT3847_14432C.1.pep
GHSLKQPRHFHARSIQTSPNWCFFEDNMLPVEVIDNGLTSLASGCPNLRRLHVIGTTEIGLLTVAEECSTLQELELQRCSDNVLRGIAACGNLQILKLVGHVDGFYDSVVSDIXLTILAQGCKRLVKLELSGCEGSXDGIKAIXKCCQMLEELTFSDHRMDDGWLAAISYCENLKTLRFQ

SEQ ID NO: 190935 - protein, 39 aa, Glycine max
  Clone ID: PAT_MRT3847_14433C.1.pep
TIGSIRFQTAQRLCAKNQKKIQLSFFFKNLEGVAGWCSI

SEQ ID NO: 190936 - protein, 153 aa, Glycine max
  Clone ID: PAT_MRT3847_14434C.1.pep
WGGGGGGGGGGGGGGGGGGPGGGGGGEKQIPHNYPFLPFVGSNLFSRNFTLGGALTRFSPPKICLGFPRIIFAISKGPLAPYLLFGRRAYPNLVGFRLIFGPTAAQIRRGLPVCIPHKTNLRGALKLFFPPKHFPDGSYPILGCPDFNGVLSF

SEQ ID NO: 190937 - protein, 54 aa, Glycine max
  unsure (1)..(54): unsure at all Xaa locations
  Clone ID: PAT_MRT3847_14435C.1.pep
ILFSHEDCREQEATADEQGGGEDALVCTLCIAXVRKFSXHCRSCDXCVDCFDHH

SEQ ID NO: 190938 - protein, 103 aa, Glycine max
  Clone ID: PAT_MRT3847_14436C.1.pep
HTVYSLNGYDQDSGPCRRATGPSYAKIYKNKSCSSNRSHTTLITAYSCNLQQMVQHVTGLRLVSTPEIPDPEVEHRDILLRLTIVVLVKQGSSILRTMHLITS

SEQ ID NO: 190939 - protein, 66 aa, Glycine max
  Clone ID: PAT_MRT3847_14437C.1.pep
KLKGFSETSCVLSLHISIYMITGIFIAIKFYLYNRSSHFSCSANEIKSSNNTRPEKIRGHSQICNT

SEQ ID NO: 190940 - protein, 189 aa, Glycine max
  unsure (1)..(189): unsure at all Xaa locations
  Clone ID: PAT_MRT3847_14438C.1.pep
MPVSTRSQISVSNNNGESEPNPSSAATRLRNPHHGLKEKLKTLTLLYEQQKQASASLRNASFTFRPPPPEKAVMRENTMPNTTITRTFVLPQPPSNDNDDAKENVIMGADRIVAFSCPRKTMKANNNVLASQSASVARKLSMGPVRVEAVXEKHGKLGSRILVFVRVRPMNRRKGSAHVLRRVVSRDVL

SEQ ID NO: 190941 - protein, 70 aa, Glycine max
  Clone ID: PAT_MRT3847_14439C.1.pep
SAVNVSPRQCNSDYPIIFGVCSYINRVGYMVGGNARMDSNSPSSRLWICAEKAQMEDVVIKLPMASVVPR

SEQ ID NO: 190942 - protein, 90 aa, Glycine max
  unsure (1)..(90): unsure at all Xaa locations
  Clone ID: PAT_MRT3847_1443C.1.pep
XAXVSKIGIXLERGVXXXXPXXXSGSXPGXSXXQXSXXXHXXXALXIXXRXXXXXQXXXHXXXXSLPXXXXXLXXVXXXXXKXXXXXXXG

SEQ ID NO: 190943 - protein, 329 aa, Glycine max
  unsure (1)..(329): unsure at all Xaa locations
  Clone ID: PAT_MRT3847_14440C.1.pep
MSGRNRGQPLPPPHAAGISPPLHDPLYGPRAHHHHHHHHHLVGPVPPHPHHLLHPGPAARLPPPPPRPRAPPARPPAAIIEERLAAQHQDXQGLLGDNQRLAATHVALQQELEAARHELQRVAHFRESLRADTEARMRELYDXAAQLEAERGGAEAARTELLQVRSDVKELTAVRQDLSGQVQAMTQDLARMTADAKRVPALRADVEAMKQELQCARAAIEYEKKGFAENYEHGQVMEKKLVAMAREMEKLRAEIANAEKRARAAAAAGNPGQGYNANYGTADVGYAGNPYPGIYGMNPVQPGVENFPHYGPGPAAWGAYDMQRAQGHR

SEQ ID NO: 190944 - protein, 142 aa, Glycine max
  unsure (1)..(142): unsure at all Xaa locations
  Clone ID: PAT_MRT3847_14441C.1.pep
MSGRNRGQPLPPPHAAGISPPLHDPLYGPRAHHHHHHHHHLVGPVPPHPHHLLEDFRDSQLGLGPTRGGSIPLHPAAAIIEERLAAQHQDIQGLLGDNQRLAATHVALKQELEAARHELQRVGHFRESLRADXEGRMRELYD

SEQ ID NO: 190945 - protein, 427 aa, Glycine max
  Clone ID: PAT_MRT3847_14442C.1.pep
MASAMFRRNIITHYSKFASSLSSLPRHSSIYNPLSMSVSSFHSESVGGGGGLPSSMRGAVYWEPNKPLTIEEFHMPRPKAGEVLIKTKACGVCHSDLHVMKGEIPFTSPCVVGHEITGEVVEHGALTDSKTIERLPVGSRVVGAFIMPCGNCSYCSKGHDDLCEAFFAYNRAKGTLYDGETRLFFRNSGKPAYMYSMGGLAEYCVVPANGVSVLPDSLPYTESAILGCAVFTAYGAMAHAAQVRPGDSVAVIGTGGVGSSCLQIARAFGASDIIAVDVRDEKLQKAKTFGATHTVNSAKEDPIEKILEITGGKGVDVAVEALGKPQTFAQCTQSVKDGGKAVMIGLAQAGSLGEVDINRLVRRKIQVIGSYGGRARQDLPKLIRLAETGIFNLGHAVSRTYTFEEAGKAFQDLNEGKIVGRAVIEII

SEQ ID NO: 190946 - protein, 108 aa, Glycine max
  Clone ID: PAT_MRT3847_14443C.1.pep
VGNLGLQLPWYFLQIIVSAWYFISVVGNLFESYFISLKKYKSLHSGKVRYLAIVIESEEAYQISKVVKLSQWLDSIGVKNVCLYDMNGVLKKSKETMFQKLKNAKSIE

SEQ ID NO: 190947 - protein, 45 aa, Glycine max
  Clone ID: PAT_MRT3847_14444C.1.pep
PRVRTLDALKDELLVPVSWRIEKNKGMFQQNDGSWKLMDHEEDDF

SEQ ID NO: 190948 - protein, 51 aa, Glycine max
  unsure (1)..(51): unsure at all Xaa locations
  Clone ID: PAT_MRT3847_14445C.1.pep
PYSRAAKNXLKNSNGHCYMHPTKLLVHSAIMRFFHFPYEVYGLADLYEPNS

SEQ ID NO: 190949 - protein, 72 aa, Glycine max
  Clone ID: PAT_MRT3847_14446C.1.pep
IRICFLLQKTYSNLSSHLNINHNMFFAAKQKIHLRGVTLPPFTLYFSLSYIYVPIDHSGYFHPDSFPPDCQS

SEQ ID NO: 190950 - protein, 48 aa, Glycine max
  Clone ID: PAT_MRT3847_14447C.1.pep
HTTHHRPSHQIALKALQPTIQASPFWVIIQCCAHPFCAATVLPSCQFT

SEQ ID NO: 190951 - protein, 78 aa, Glycine max
  Clone ID: PAT_MRT3847_14448C.1.pep
IPSHMKVCTYSEYAKSNDTLKLNPSAALTDAKENHTLIKVAAASLTPIDHKIMERYFKNSYSPLPTAPRYDVAGLVDK

SEQ ID NO: 190952 - protein, 43 aa, Glycine max
  Clone ID: PAT_MRT3847_14449C.1.pep
ITLAPSLVDSSICSKSFLVEIHHHGKASGKWINVPEFEVRTAS

SEQ ID NO: 190953 - protein, 87 aa, Glycine max
  Clone ID: PAT_MRT3847_1444C.1.pep
QPNHITVGNCVRRQDEGIEYAACTIPNDCGPWVAAKGGNNKQIDGCHADGSKGRLGYAALKPYVAPEVQAQSAEVYYELVPVEVDSQ

SEQ ID NO: 190954 - protein, 67 aa, Glycine max
  Clone ID: PAT_MRT3847_14450C.1.pep
PNLLVLVFCLNFCKSTWSHCWIGSGSRYQVNWGKKPLKSLWKEKPSPYAQGGQIMPYEFTFRYLICA

SEQ ID NO: 190955 - protein, 40 aa, Glycine max
  Clone ID: PAT_MRT3847_14451C.1.pep
DLKRVVKCLVYKKAEFYDDRYFYKNITVGYEPRDNRMDEP

SEQ ID NO: 190956 - protein, 391 aa, Glycine max
  Clone ID: PAT_MRT3847_14452C.1.pep
VGNRDGWENRWVKSDWKKDENVAGEWNHTSGQWNGDANDKGIQTSEDYRFYAISAEYPEFSNKGKTLVFQFSVKHEQKLDCGGGYMKLLSGDVDQKKFGGDTPYSIMFGPDICGYSTKKVHAILTYNNTNHLIKKDVPCETDQLTHVYTFILRPDATYSILIDNVEKQTGSLYSDWDLLPPKTIKDPEAKKPEDWDDKEYIPDPEDKKPEGYDDIPKELPDPEAKKPEDWDDEEDGEWTPPTIANPEYKGPWKAEKIKNPNYKGKWKAPLIDNPDFKDDPDLYVFPNLKYVGIELWQVKSGTLFDNVLITDDPEYAKQLVEETWGKHKDAEKAAFEEAEKKREEEESKDDPVDSDADEEEEDADEAGNDSDAESKTEAGEDTKEEGVHDEL

SEQ ID NO: 190957 - protein, 61 aa, Glycine max
  Clone ID: PAT_MRT3847_14453C.1.pep
KCKNLKYAISRNITCTQMKKIGSNGMHTLYAIPKAALEQKLENESLLCSRSWNNAIIRGNS

SEQ ID NO: 190958 - protein, 420 aa, Glycine max
  Clone ID: PAT_MRT3847_14454C.1.pep
MAFRVRSPDLRSLFLLSLLSIASANVFFEERFDDGWENRWVKSDWKKDENVAGEWNHTSGQWNGDANDKGIQTSEDYRFYAISAEYPEFSNKGKTLVFQFSVKHEQKLDCGGGYMKLLSGDVDQKKFGGDTPYSIMFGPDICGYSTKKVHAILTYNNTNHLIKKDVPCETDQLTHVYTFILRPDATYSILIDNVEKQTGSLYSDWDLLPPKTIKDPEAKKPEDWDDKEYIPDPEDKKPEGYDDIPKELPDPEAKKPEDWDDEEDGEWTPPTIANPEYKGPWKAEKIKNPNYKGRWKAPLIDNPDFKDDPDLYVFPNLKYVGIELWQVKSGTLFDNVLITDDPEYAKQLVEETWGKHKDAEKAAFEEAEKKREEEESKDDPVDSDADEEEEDADEAGNDSDAESKTEAGEDTKEEGVHDEL

SEQ ID NO: 190959 - protein, 91 aa, Glycine max
  unsure (1)..(91): unsure at all Xaa locations
  Clone ID: PAT_MRT3847_14455C.1.pep
QIICYVYNTKQKQNRSTNKEGGFYLFSKNGNNFYRNDEEKYELRVVKQPLVNLLFNSKRWHRAFRYIKNHRLRNDIINEISKSFFXTCHSD

SEQ ID NO: 190960 - protein, 90 aa, Glycine max
  unsure (1)..(90): unsure at all Xaa locations
  Clone ID: PAT_MRT3847_14456C.1.pep
VILLFSDSRMDILGIQWRSKPRPLSRPQDAGGLALRPAAGPLWFAVEASWHHAPMIARSVRSLLFRLQVPSFVQPMEKNICXSXAFAQSS

SEQ ID NO: 190961 - protein, 232 aa, Glycine max
  unsure (1)..(232): unsure at all Xaa locations
  Clone ID: PAT_MRT3847_14457C.1.pep
PRVRIVVTTCLSNRYKVPLVTFVGVNHHGQSVLFGCGLLSYEDSESFAWLFQSLLHCMSDVPPQGIITDHCCXTMQKAVETVYPSTRHRWCLSNIMEKLPQLIHGYANYKSLRDHLQNVVYDTPTISEFEQKWKKIVEDFDLKDNKWLKELFLERHRWAPSFVRGEFWAGMSINPHNESMHAFFDGYVSRLTTLKQFVDQYDNALQYKAEKEYVADIHSSSNSQACVTKSPI

SEQ ID NO: 190962 - protein, 72 aa, Glycine max
  Clone ID: PAT_MRT3847_14458C.1.pep
SGGHGGHRVRQHGGSLPTPTNRVVHEIAHKLWEAPKYGACFSRSLFLTTIRWPPAMPAEILRPSDHHVCFGL

SEQ ID NO: 190963 - protein, 77 aa, Glycine max
  Clone ID: PAT_MRT3847_14459C.1.pep
HPWIQRWSHDRSASSQKSLGIGELHEPKSSTAVLKELKKKQFPSIAAMALMGKAMNNLNPSELIKKGPVIVWNMKGF

SEQ ID NO: 190964 - protein, 107 aa, Glycine max
  unsure (1)..(107): unsure at all Xaa locations
  Clone ID: PAT_MRT3847_1445C.1.pep
MACLEVSKEVKFKGDTEELTLDGSVDWHGRPAIRAKSGRWVAGTIVLLNQGLATLAFFGVGVNLVLFLTRVMGQDNAEAANNVSKWTGTVYIFSLVGAFLSDSYWXR

SEQ ID NO: 190965 - protein, 130 aa, Glycine max
  Clone ID: PAT_MRT3847_14460C.1.pep
MDTVVSMYEDRFDLCILESQPVDVTDSIQTEEQNWWKRLTQQNSKAMSPELHCIDISHFSMPVKRTKELRAVTGWRYYFSLFLELSDIRMPLIRAVIDKVSDAISFFLVSLIGRSLGLIYTGIRQSLRWK

SEQ ID NO: 190966 - protein, 48 aa, Glycine max
  Clone ID: PAT_MRT3847_14461C.1.pep
KCIPTKDNIIRCSGVSYKEIQGKSSPGAKDYVIVHGAIIRIKEIPSPE

SEQ ID NO: 190967 - protein, 70 aa, Glycine max
  Clone ID: PAT_MRT3847_14462C.1.pep
SLIPNNRLPLHVVQGKPIPVGHIHNDLHTLWAVVILLRGCHPGSEAVLLEQEMRPQKHDARGLGWITCTY

SEQ ID NO: 190968 - protein, 38 aa, Glycine max
  Clone ID: PAT_MRT3847_14463C.1.pep
HNHHYYFTSNDTDYILYINHIYCSIVFITHILYYYFII

SEQ ID NO: 190969 - protein, 54 aa, Glycine max
  Clone ID: PAT_MRT3847_14464C.1.pep
NKAQILSRQQHHRLHFKKHLFQENHYFTQITTLLKKKKKSLTSCAVITHKLSTN

SEQ ID NO: 190970 - protein, 70 aa, Glycine max
  Clone ID: PAT_MRT3847_14465C.1.pep
GKEVIKFLFLPTCFLTRLILFDLILLCYCRTYCHLIFLLNIYHLSYNFLKKTKQFIKKYYLNFYMGGPLL

SEQ ID NO: 190971 - protein, 69 aa, Glycine max
  Clone ID: PAT_MRT3847_14466C.1.pep
TLATMQIPMFCIFFKTMSNKLMIFVTHIFHRLNIKEFKKKYMMHHFRAQSPQNRITKRKNYDLDLCNYA

SEQ ID NO: 190972 - protein, 81 aa, Glycine max
  Clone ID: PAT_MRT3847_14467C.1.pep
SQCCQIVAMPAPWWRPVAVFQQPPMDYGGGVVGFKIGNTNEVCVILQLSNLKLEATNFLFALLLTHLKDSLYYDYYFFPTI

SEQ ID NO: 190973 - protein, 285 aa, Glycine max
  Clone ID: PAT_MRT3847_14468C.1.pep
LRSSLSARDMPPEDFDVLQDFDGQQHLLSDLGCFSQPRPGAISVSRSGRSKTLTPSNLDELFSAEISSSPRYSDPAVASVFSPRHKSTIMNQFQQLQSSLSPINTSVSSPRNVEHPLLQASFGVSSPGRMSPRSMEPISPMSSRLSAFAQREKQHQQLRSLSSRDLGANVPASMVGSPVNSWSNWGSPHGNGKVDWSVNGNELGRLQRSSSFELGNNGEEPDLSWVQSLVKESPSEIKEKLTGSGPVASVDGPSSNPKSNPQVESVDHSVLGAWLEQMQLDQLVV

SEQ ID NO: 190974 - protein, 55 aa, Glycine max
  Clone ID: PAT_MRT3847_14469C.1.pep
PRVRKNKRFWSWSGSLSASIRAKRKQHNKEGHMTSIWKKRGQLEVLEGAQCVNTC

SEQ ID NO: 190975 - protein, 45 aa, Glycine max
  Clone ID: PAT_MRT3847_1446C.1.pep
LYCGIRQCLPDVTLVHPGVDELYHVCVPFKFPVLCVRCAQLFLFI

SEQ ID NO: 190976 - protein, 358 aa, Glycine max
  unsure (1)..(358): unsure at all Xaa locations
  Clone ID: PAT_MRT3847_14470C.1.pep
TGSAVPSPRSSASTPNVMDMAAAMSLFPGSPSSISSMSPSPFAQPMSPSTSGISHSSNAWPQPNVPALHLPGSNIQTSRLRSSLSARDMPPEDLDVLQDFDGQQHLLNDLGCFSQPHPGGISVSRSGRSKTLTPSNLDELFSAEISSSPRYSDPAVASVFSPTHKSAIMNQFQQLQSSLSPINTSVSSPRNVEHPLFQASFGVSSPGRMSPRSMEPISPMSSRLSFAQREKQHQQLRSLSSRXLGANIPVSMVGSPVNSWSNWGSPGGNGKVDWSVNGNELGRLHRSSSFELGNNGEEPDLSWVQSLVKESPSEIKELGGSGPVAFADGPSSNPQVESVDHSVLGAWLEQMQLDQLVV

SEQ ID NO: 190977 - protein, 643 aa, Glycine max
  Clone ID: PAT_MRT3847_14471C.1.pep
RGSGFPGRPTRPRSGRTRGRTRGVNFACGANKTTALHCAASGASTKAVDAVKLLLSAGADVNCVDANGNRPIDVIAVPPKLQGAKAVLEELLSDNASDVSVGEFSVPVSVNSSSPGSPAHSSNGMPYTPSVSPPSPVAAKFTDAAICSLSEKAREYPIDPSLPDIKNSIYATDEFRMFSFKVRPCSRAYSHDWTECPFVHPGENARRRDPRKFHYSCVPCPDFRKGACRRGDMCEYAHGVFECWLHPAQYRTRLCKDGTSCNRRVCFFAHTAEELRPLYVSTGSAAPSPRSSASGPNVMDMAAAMSLFPGSPSSGSSISLSISFSLDPMSPSANGMPLSSAWAQPNVPALHLPGSNLQSSRLRSSLSARDIPPEDLNMMSDLDGQQQHHLNDLSCYIQPRPGASSVSRSGRSKTLTPSNLEELFSAEISLSPRYSDPAAGSVFSPTHKSAVLNQFQQLQSMLSPINTNLLSPKNVEHPLFQASFGVSPSGRMSPRSVEPISPMSARLSAFAQREKQQQQLRSVSSRDLGANSPASLVGSPANPWSKWGSPIGKADWSVNGDSLGRQMRRSSSFERKNNGEEPDLSWVQSLVKESPPEMIKEKFASPMPTASADGPNSNSQIESIDHSVLGAWLEQMQLDQLVV

SEQ ID NO: 190978 - protein, 441 aa, Glycine max
  unsure (1)..(441): unsure at all Xaa locations
  Clone ID: PAT_MRT3847_14472C.1.pep
AFRSTVREKFHYSCVPCPDFRKGACRRGDMCEYAHGVFECWLHPAQYRTRLCKDGTSCNRRVCFFAHTAEELRPLYVSTGSAVPSPRSSASAPNVMDMAAAMSLLPGSPSSVXSMSPSPFGQPMSPSTNGISHSSNAWPQPNVPALHLPGSNIQTSRLRSSLSARDMPPEDLDVLQDFDGQQHLLNDLGCFSQPRPGAISVSRSGRSKTLTPSNLDELFSAEISSSPRYSDPAAGSVFSPTHKSAVLNQFQQLQSMLSPINTNLLSPKNVEHPLLQASFGVSPSGRMSPRSVEPISPMSSRISAFAQREKQQQQQQQLRSLSSRDLGANSPASLVGSPANPWSKWGSPNGKADWSVNGDTLGRQMRRSSSFELKNNGEEPDLSWVQSLVKESPPEMIKEKFASPMPTASADGPNSNSQIESIDHSVLGAWLEQMQLDQLVV

SEQ ID NO: 190979 - protein, 41 aa, Glycine max
  unsure (1)..(41): unsure at all Xaa locations
  Clone ID: PAT_MRT3847_14473C.1.pep
TNDLGHFLQKNLLLDKMKQIAXDTGTEGRIANLSSIAHHHT

SEQ ID NO: 190980 - protein, 101 aa, Glycine max
  Clone ID: PAT_MRT3847_14474C.1.pep
QVLGGDGISNIFKGLFWSSSWCRLGGDFTSSQRGKYFAKIYSQGGLGNHFFVRKGWWVIISCYWGAGGIGPMTFSSLLFLLHPREPFGLGGGSPYLGPGEG

SEQ ID NO: 190981 - protein, 104 aa, Glycine max
  Clone ID: PAT_MRT3847_14475C.1.pep
KELRGVIKGAGYLCSCHSCNFSKVINAFEFERHAGCKTKHPNNHIYFDNGKTIYGVVQELRSTPQSMLFEVIQTITGSPIDQKSFCIWKGNLSCSVSAVFPGFV

SEQ ID NO: 190982 - protein, 123 aa, Glycine max
  Clone ID: PAT_MRT3847_14476C.1.pep
DFFMIFTTLHPIDNSQNEQRNLPSSIQIPPNSYLPLHFHYFNHHSQLSYKIYILISNNSFLNSFLPYILSYFILLHLFQHIQLIIYTHLLLFHSLFLSTITLITFFLILHLPYLFLFSLISIP

SEQ ID NO: 190983 - protein, 48 aa, Glycine max
  Clone ID: PAT_MRT3847_14477C.1.pep
VLLFSLRKGQILCLCLSMCLLGVIVYRRSFVGFFPLTHSALVRWVCHG

SEQ ID NO: 190984 - protein, 59 aa, Glycine max
  Clone ID: PAT_MRT3847_14478C.1.pep
NVLSIDLQLYCVYHDMTVKWKLPKPNFCFNLIIFKMLHFSPLTLPQRIKLPSNKRLIEQ

SEQ ID NO: 190985 - protein, 45 aa, Glycine max
  Clone ID: PAT_MRT3847_14479C.1.pep
SQADVDNSGTIDYREFIAATLHLNKGGRKDHLIAAFSFFDRSGSG

SEQ ID NO: 190986 - protein, 140 aa, Glycine max
  Clone ID: PAT_MRT3847_1447C.1.pep
PRVRLGMDGESGTSETLICLEGHTMHHMTQPCLASGRTRFTLRRLRSPTLRPRLGKLFHSSILLSDHPPSATLLQLPSLHLGIYPNTLPEFSGTTMNTKAEPWNTPPASLPAIPNARKTRSRPSPLLKPRHPSGLRGYFT

SEQ ID NO: 190987 - protein, 1058 aa, Glycine max
  unsure (1)..(1058): unsure at all Xaa locations
  Clone ID: PAT_MRT3847_14480C.1.pep
MAGNDWLNSYLEAILDVGPGLDDAKSSLLLRERGRFSPTRYFVEEVIGFDETDLYRSWVRASSTRSPQERNTRLENMCWRIWNLARQKKQLESETAQRVNKRRLERERGRREATADMSEDLSEGEKGDPLSDLSAHGGVGDFNRSRLPRISSADAMETWANSQKGKKLYIVLISIHGLIRGENMELGRDSDTGGQVKYVVELARALGSMPGVYRVDLLTRQVSAPDVDWSYGEPTEMLSPRDTDDFGDDTGESSGSYIVRIPFGPRDKYIPKELLWPYIPEFVDGALNHIIQMSKSLGEQIGSGHAVWPVAIHGHYADAGDSAALLSGALNVPMLFTGHSLGRDKLEQLLKQGRLSKDEINTTYKIMRRIEAEELALDGSEIVITSTRPEIEEQWRLYDGFDPVLERKLRARIRRNVSCYGRFMPRMATIPPGMEFHHIVPHDGDIEGEPEGNLDHPAPQDPPIWSEIMRFFTNPRKPMILALARPDPKKNITTLVKAFGECRPLQELANLTLIMGNRDGIDEMSSTNASVLLSVLKLIDKYDLYGQVAYPKHHKQYDVPDIYRLAAKTKGVFINPAFIEPFGLTLIEAAAHGLPIVATKNGGPVDIHRVLDNGLLVDPHDQQSIADALLKLVSNKQLWAKCRQNGLKNIHLFSWPEHCKTNLPSIRCYAIRQPQHHRSXEGSKGADRYALIEKVGYLTGGSKLEIILVXEKSEGSGNDNSLNSDGNAADRGAKLENAVLSWSKGISKDTRRGGATEKSDQNPNAGKFPPLRRRKHLFVIAVDCDTTSSLLETIKAIFESAGKDRAESIVGFILSTSLTISEIQSFLISGGLSPIDFDAYICNSGSDLYYPSLNPGDRPFVVDLYYHSHIEYRWGGEGLRKTLVRWADSITDKKGDNDEQIVSPAEQLSTDYCYAFKVRKPGMAPPVKELRKLLRIQALRCHPIYCQNGTRLNVIPVLASRSQALRYLYVRWGFELSKMVVFVGECGDTDYEGLLGGLHKSVILKGVGSSAISQLHNNRSYPLSDVTPLDSPNIVEATEGSSGADIQALIEKVGYLNG

SEQ ID NO: 190988 - protein, 50 aa, Glycine max
  unsure (1)..(50): unsure at all Xaa locations
  Clone ID: PAT_MRT3847_14481C.1.pep
XXARGGMVVPVLNLYFIHRLLPSNILLQHSDYTVPPILMRLESTPYSSTI

SEQ ID NO: 190989 - protein, 738 aa, Glycine max
  Clone ID: PAT_MRT3847_14482C.1.pep
SATLLSGALNVPMLFTGHSLGRDKLEQLLKQGRLSKDEINTTYKIMRRIEAEELALDGSEIVITSTKQEIEEQWRLYDGFDPVLERKLRARIRRNVSCYGRFMPRMATIPPGMEFHHIVPHDGDIEGEPEGNLDHPAPQRPLIWSEIMRFFTNPRKPMILALARPDPKKNITTLVKAFGECRPLRELANLTLIMGNRDGIDEMSSTNASVLLSVLKLIDKYDLYGQVAYPKHHKQYDVPDIYRLAAKTKGVFINPAFIEPFGLTLIEAAAHGLPIVATKNGGPVDIHRVLDNGLLIDPHDQQSIADALLKLVSNKQLWAKCRQNGLKNIHLFSWPEHCKTYLSKIATCKPRHPQWQRSEDGGESSESDSPGDSLRDLQDLSLNLKFSLDGEKSEGSGNDNSLNSDGNAADRGAKLENAVLSWSKGISKDIRKGGAIEKTDQNPNAGKFPPLRRRKHLFVIAVDCDTTSGLLETIKAIFESAGKDKAEGTVGFILSTSLTISEIQSFLISGGLSPIDFDAYICNSGSDLYYPSLNPGERPFVVDLYYHSHIEYRWGGEGLRKTLVRWADSTTDKKGDNDEQIVSPAEQLSTDYCYAFKVRKPGMAPPVKELRKLLRIQALRCHPIYCQNGTRLNVIPVLASRSQALRYLYVRWGFELSKMVVFVGECGDTDYEGLLGGLHRSVILKGVGSSAISQLHNNRSYPLSDVMPLDSPNIIEATEGTRGADIQALIEKVGYLTG

SEQ ID NO: 190990 - protein, 58 aa, Glycine max
  Clone ID: PAT_MRT3847_14483C.1.pep
RIPLPRQNKRETCMNHRTHHGLFHTFLHHSTETHHHYWTHYSTRRTCRNTHISIECFQ

SEQ ID NO: 190991 - protein, 43 aa, Glycine max
  Clone ID: PAT_MRT3847_14484C.1.pep
SKVLYRCAIGKVHVLNSNVVEKIRFKKQWTIAKIMLDNKKNKV

SEQ ID NO: 190992 - protein, 79 aa, Glycine max
  Clone ID: PAT_MRT3847_14485C.1.pep
SPRLLIPMLYSLCPRLRFAAPNVRELHPTDRYDTIHSFFSTVRSVLATSLVEQLPPPPLPGASIAYAKFTMPHHRSASK

SEQ ID NO: 190993 - protein, 334 aa, Glycine max
  Clone ID: PAT_MRT3847_14486C.1.pep
MEVLRVQTIASKSKDAAIPAMFVRAETEQPGITTVQGVNLEVPIIDFSDPDEGKVVHEILEASRDWGMFQIVNHDIPSDVIRKLQSVGKMFFELPQEEKELIAKPAGSDSIEGYGTKLQKEVNGKKGWVDHLFHIVWPPSSINYSFWPQNPPSYREVNEEYCKHLRGVVDKLFKSMSVGLGLEENELKEGANEDDMHYLLKINYYPPCPCPDLVLGVPPHTDMSYLTILVPNEVQGLQACRDGHWYDVKYVPNALVIHIGDQMEILSNGKYKAVFHRTTVNKDETRMSWPVFIEPKKEQEVGPHPKLVNQDNPPKYKTKKYKDYAYCKLNKIPQ

SEQ ID NO: 190994 - protein, 58 aa, Glycine max
  Clone ID: PAT_MRT3847_14487C.1.pep
HYWRYVLSKGDCQTKSPVDLFAAITAAGPYIPKIRRSTSAIVGVALATVQLTPATNPV

SEQ ID NO: 190995 - protein, 66 aa, Glycine max
  Clone ID: PAT_MRT3847_14488C.1.pep
NHLIKHYEKYNVATPCWLNLALSSKIKVTKHVEFIEFTHQEKRRGSGDSTNQPTHIVYQSNKLKRG

SEQ ID NO: 190996 - protein, 99 aa, Glycine max
  unsure (1)..(99): unsure at all Xaa locations
  Clone ID: PAT_MRT3847_14489C.1.pep
EMHDAYIANLDNEIRELYLHRPKEARQLKRKAISRIEWLQKADVXPTIAQIEEVHSMQMMINAPDSNDTIDLLKSIDLKGLQGAGXAFSNKHRCDDKLV

SEQ ID NO: 190997 - protein, 309 aa, Glycine max
  unsure (1)..(309): unsure at all Xaa locations
  Clone ID: PAT_MRT3847_1448C.1.pep
DSDQDSAKTKNDDKWWLPTPKVPAEGLSDMARQFLQYQKDCVKQVLKAAMAINAQILTEMEIPESYIDSLPKNGRASLGDSNYRSITVEFFDPDQFLSTMDLSSEHKILDLKNRIEASIVIWKRKMHQKDSKSAWGSAVSLEKRELFEERAETILLLLKHRFPGLPQSALDXKIQYNRDVGQAVLESYSRVLESLAFTVLSRIDDVLQADYQIQSQNLSGRRRSSVSRPFREEIDKASAEAGSMTLSDFMGWGSDQGEADMKKDPYAISDDLCKDDDDPKQQKLPTIVTNKKVSYLETLGVMRSPTSRH

SEQ ID NO: 190998 - protein, 96 aa, Glycine max
  Clone ID: PAT_MRT3847_14490C.1.pep
FRGSQNSAGVYLGIPGGCPFPFWGGLFFERAPSRALLYICPTGERGIASPLFWAGPPGVFPFNRCLNAVPVFKFCAPYKEVFPSEKGVGISHFGPP

SEQ ID NO: 190999 - protein, 60 aa, Glycine max
  Clone ID: PAT_MRT3847_14491C.1.pep
RLRMHTNLGTLDPLNLVSSTPLCSWVLSFAALSNICLKIVDAGDQKPNMGNNNCWVLEET

SEQ ID NO: 191000 - protein, 134 aa, Glycine max
  unsure (1)..(134): unsure at all Xaa locations
  Clone ID: PAT_MRT3847_14492C.1.pep
KTREKLASTELVPNTALKKLIQKFCSENGVIVVNPIDHNQTVTKTSDAGSPAAAHAMQFLSWFLSRRLVFGTEEQKTKAAYEIRLLAKSSVINRACLXVEMGTVPTLLDLLAADDKNWQESAISALMKLSKHTN

SEQ ID NO: 191001 - protein, 186 aa, Glycine max
  Clone ID: PAT_MRT3847_14493C.1.pep
MHERSMKEAAGTCPQRRRTPSFSSSLLDAIYRSIDESKSNLHDDQQLGHHHHHDQTLATHSFTSEEKGGKKERMNLRRAVMLEDWMEKYGSSRSLNAQLLNSSSSSSECSSAGGIFSSSETDTTTTTLKKQRPARPTSEKKKKKKKKQDHIMSSEKKNKEGGFARTKLRALKIYGELNQRVKQPIS

SEQ ID NO: 191002 - protein, 55 aa, Glycine max
  unsure (1)..(55): unsure at all Xaa locations
  Clone ID: PAT_MRT3847_14494C.1.pep
KFILFLGIFFFSICCLVXFTSHSIFTKGGKMSNWLTQNYQMKHKSLTLNFVYKLN

SEQ ID NO: 191003 - protein, 85 aa, Glycine max
  unsure (1)..(85): unsure at all Xaa locations
  Clone ID: PAT_MRT3847_14495C.1.pep
FTNFXRGKRXXLXAFVEKXNGACSFSVLSLSXXXIRQTDTRILHIDXAEKLSXLSXXLSLLCILLQXHTEYRXIXEYSGFXXWNL

SEQ ID NO: 191004 - protein, 71 aa, Glycine max
  unsure (1)..(71): unsure at all Xaa locations
  Clone ID: PAT_MRT3847_14496C.1.pep
MPTPVAAARQCLTTDAARALDEAVSVARRRGHSQTTSLHAVFDLLSLPYXPLLRDACSRTRNCAYSPRLQF

SEQ ID NO: 191005 - protein, 56 aa, Glycine max
  Clone ID: PAT_MRT3847_14497C.1.pep
GSRPPVACCNHSTRRVSDIRQGRGNYRPQLMICTAPDETDSHDTVFASHSLNGAIG

SEQ ID NO: 191006 - protein, 85 aa, Glycine max
  Clone ID: PAT_MRT3847_14498C.1.pep
WKDFSPVKNVYVNRFQLLSDSDDLDVDVGAANKANLDSNLEKNKKTLLDEDLWKDFSPVKNVSVPTPAFNGCVKSTFVLPIARKW

SEQ ID NO: 191007 - protein, 77 aa, Glycine max
  Clone ID: PAT_MRT3847_14499C.1.pep
GFGRLLPPIFFPHGPRGVWPPRWGSWCPQGSGRGPPLGGKGGGPQILESGLKGAAFPPNPVLKPFFPLGFFNGVLIA

SEQ ID NO: 191008 - protein, 252 aa, Glycine max
  Clone ID: PAT_MRT3847_1449C.1.pep
MGFFFFFFPFLHLQNGRASLGDSNYRSITVEFFDPDQFLSTMDLSSEHKILDLKNRIEASIVIWKRKMHQKDSKSAWGSAVSLEKRELFEERAETILLLLKHRFPGLPQSALDISKIQYNRDVGQAVLESYSRVLESLAFTVLSRIDDVLQADYQIQSQNLSGRRRSSVSRPFREEIDKASAEAGSMTLSDFMGWGSDQGEADMKKDPYAISDDLCKDDDDPKQQKLPTIVTNKKVSYLETLGVMRSPTSRH

SEQ ID NO: 191009 - protein, 57 aa, Glycine max
  Clone ID: PAT_MRT3847_144C.1.pep
KLVFLICPLFAGYILPKAPWAGAFKGFHLNQPLARPLTTIGFGLPNPTSSIHGSQKG

SEQ ID NO: 191010 - protein, 50 aa, Glycine max
  Clone ID: PAT_MRT3847_14500C.1.pep
ALPGYQIPEIKRMPIEELCLQVKLLDSNCRIADFLKKTLDPPIPETVRNA

SEQ ID NO: 191011 - protein, 37 aa, Glycine max
  Clone ID: PAT_MRT3847_14501C.1.pep
AYLRVERCTDVSIFLCRRRSLMRQIIILKTHNSGFFP

SEQ ID NO: 191012 - protein, 63 aa, Glycine max
  Clone ID: PAT_MRT3847_14502C.1.pep
MPSAFNFLTTSLLPFLPLYRGNMVFLGVLLVGFLLSAYGDSDGWMDAHATFYGGGDASGTMGG

SEQ ID NO: 191013 - protein, 136 aa, Glycine max
  unsure (1)..(136): unsure at all Xaa locations
  Clone ID: PAT_MRT3847_14503C.1.pep
VSGSGICAKRVVVDARHHMLGLLASIVTKDLLNVQKVDMKHFKXISIYGGLMKQKIKYMLSIKXKHIHMNPYNEPIQLQTQNNIIYDNIRGIIPHXTKHRGTKFTNKNVKEGIPSPYYINRKNGVTDTLSVLKLNR

SEQ ID NO: 191014 - protein, 109 aa, Glycine max
  unsure (1)..(109): unsure at all Xaa locations
  Clone ID: PAT_MRT3847_14504C.1.pep
GGAIYVAPGYTKGDGLGAEIVGTFILVYTVLSGTDAKRSSRYLHVPILAPLPIGFGVFLVHXATYAIAGTGINPALILDDAIMFNNDLGWDEHWILXVGPFICAARAAL

SEQ ID NO: 191015 - protein, 419 aa, Glycine max
  unsure (1)..(419): unsure at all Xaa locations
  Clone ID: PAT_MRT3847_14505C.1.pep
SDLTSFIEHKPHSPPKSTNRIGYMFRERVPFLLVGVAIATVFFQLLPSPSTVAAPHESFLETDSALPTRRVLLEGSTAIQEKRGRVPLGIKGKKQKRVLVTGGAGFVGSHLVDRLIERGDSVIVVDNFFTGRKENVLHHMGNPNFELIRHDVVEPILLEVDQIYHLACPASPVHYKFNPVKTIKTNVVGTLNMLGLAKRVGARFLISSTSEVYGDPLQHPQAETYWGNVNPIGVRSCYDEGKRTAETLAVDYHRGAGIDVXRIARIFNTYGPRMCLDDGRVVSNFVAQALRKEPLTVYGDGKQTRSFQYVSDLVEGLMRLMEGEHVGPFNLGNPGEFPMLELAQVVQETIDPNAKIEFRPNTEDDPHKRKPDISKAKELLGWQPSVSLREGLPLMVSDFRQRLFGDSKFTGGKGASASA

SEQ ID NO: 191016 - protein, 106 aa, Glycine max
  Clone ID: PAT_MRT3847_14506C.1.pep
MGRKKGYVEFEESPPDDFDPAHPYKDPVAMLEMREHIVREKWIQIEKAKIIREKLRWCYRIEGVNHLQKCRHLVNQYLESTRGIGWGKDGRHPSLHAPKVDPVESD

SEQ ID NO: 191017 - protein, 38 aa, Glycine max
  Clone ID: PAT_MRT3847_14507C.1.pep
RCAMLLSLINIVYGFILFLSCTHGGIFSRISHSIKSFV

SEQ ID NO: 191018 - protein, 134 aa, Glycine max
  Clone ID: PAT_MRT3847_14508C.1.pep
LKSKGLSLKMFLRVPAMNRSLNRENPDILIMMIAGKQKRDQIREREGEDGPSKACNSNECHCTKHSSPLLSCLFSLFYLSLLIFGFFFHFPFNFNTGASPTPFLTWTLNKHFLPFHGFLLQLLVLNVQRLDNII

SEQ ID NO: 191019 - protein, 98 aa, Glycine max
  Clone ID: PAT_MRT3847_14509C.1.pep
EANEESKIFNTVRIIFQRNLVKASESNEALGREVTALKTKLRGPPPQEASQGCSTQGSETSFYPSRRSGGRKVIDNANGSEDETDTRDADLSGTFASE

SEQ ID NO: 191020 - protein, 45 aa, Glycine max
  Clone ID: PAT_MRT3847_1450C.1.pep
KLEENNQIFFLTNDNIIHLTNYCISQDLLNTILHVFNGPSIFWSN

SEQ ID NO: 191021 - protein, 54 aa, Glycine max
  Clone ID: PAT_MRT3847_14510C.1.pep
HVVAINSRLATDKPSMFVPLHPSFNIPSRYSLASESHWYFCIVLLDSYACISAI

SEQ ID NO: 191022 - protein, 354 aa, Glycine max
  Clone ID: PAT_MRT3847_14511C.1.pep
SRSTAEMPLIEMGFSRAYIEVLVANNKDKKVLHVQSISSWAPRCIGPYSQATLHEGILHMAGQLGLDPPTMNLCKGGPGVELEQALKNSEAVAKCFNCSITTSAIAFVIYCSKHISLLERLDIQEKQETILRQMKISHLQERTTYKALDPLFLYVLVPDLPKRAYVEVKPILYVEDDTDVAFEVVTERFCLETPPSYWGFKPENWHDSCTQKCVISGKICAIILSITSELAAKICFDSLPAEYVNNGQHSLPKAHMEKISKFCIYLLDKVMTDDDFAWEDIMSLRFYIPVSLQMSVQLLQPMFCNALFELSEMSQKKLKTGEEPIFNIVPVIGSGRSASSMDDVVTCELMAQKS

SEQ ID NO: 191023 - protein, 136 aa, Glycine max
  unsure (1)..(136): unsure at all Xaa locations
  Clone ID: PAT_MRT3847_14512C.1.pep
SHPLTSYHLGCLPRMPITPTCPCTLCPGPNHSHLPHMRFLNKSRHCQAARHQFWPAVLRTRASVYRHVVVLAIILPLDINTTTKRTRPHNXTGLVNTVIIPVDKAMVGTPETPGLVTQNPRSLRTLRSAGIWGCCC

SEQ ID NO: 191024 - protein, 39 aa, Glycine max
  Clone ID: PAT_MRT3847_14513C.1.pep
PLSRDRIAQLSTPVHTLCYACTNKCMFESKDSAELTAVA

SEQ ID NO: 191025 - protein, 127 aa, Glycine max
  unsure (1)..(127): unsure at all Xaa locations
  Clone ID: PAT_MRT3847_14514C.1.pep
RNLFKKTTKGDTGGHKQRKKKPLSNTTIIATSAINQTTFTGQTALKQINEFVHKTRGARKSRTNMRRTVKNAPQSILYGPDRPKYLGPFLEHIPSYLTGEFPGDYGWDTAXYKXDPETFVKNRELEV

SEQ ID NO: 191026 - protein, 46 aa, Glycine max
  unsure (1)..(46): unsure at all Xaa locations
  Clone ID: PAT_MRT3847_14515C.1.pep
VSWVFVAWWFPLPFRGSVRMNCKRGCGGGGFSXPGGLLGVLGLSXF

SEQ ID NO: 191027 - protein, 158 aa, Glycine max
  Clone ID: PAT_MRT3847_14516C.1.pep
SICRDLSVGMYQGPVTSARSRCSLGISQTPIICELERGCKHSDSITIRTQTAKQFEGPTLRHNCTVQLNKYVNHWTLGMAEGRNSMYVNPRLGLAARTHKSPILLELRTATSWVHRQVVTVVEGISNSVSDLALPATHCEYLGQHSCIERLKDPQHGA

SEQ ID NO: 191028 - protein, 68 aa, Glycine max
  Clone ID: PAT_MRT3847_14517C.1.pep
VVSWYTILAIYAHPLESGVRCFPTDCCFSSCAYDQSALWNFFAFASHPEFSMISDTLMSHDSSYLQLQ

SEQ ID NO: 191029 - protein, 34 aa, Glycine max
  Clone ID: PAT_MRT3847_14518C.1.pep
ITSSLEGLRITGTRMADHNYILDNKENDLLYLDC

SEQ ID NO: 191030 - protein, 122 aa, Glycine max
  Clone ID: PAT_MRT3847_14519C.1.pep
AKAEGNKASGTLASVNVKPAKAAKPPQKVDNASVAASEKKGGDRPPEKDRKKDVPQPRLQYDDKSRVEKAKRRAVVKQTEAKNRVELFRHLPQYEHGSQLPDLEAKFFQLGPVHPAVYKVGL

SEQ ID NO: 191031 - protein, 206 aa, Glycine max
  unsure (1)..(206): unsure at all Xaa locations
  Clone ID: PAT_MRT3847_1451C.1.pep
MAKNQGFAVGIDLGTTYSCVAVWQGQQNRVXIIHNDQGNRTTPSFVAFTDDQRLIGDAANNQAAANPENTVFDAKRLIGRKYSDPTIQNDKMLWPFKVIADNNDKPMITVKYKGHEKLLSAEEVSSMILMKMREIAEAYLETPVKSAXVVTVPAYFNDSQRKATIDAGTIAGLNVMRIINEPTAAAIAYGLDKRINCVGERDIFIF

SEQ ID NO: 191032 - protein, 80 aa, Glycine max
  Clone ID: PAT_MRT3847_14520C.1.pep
VDVMDGRFVPNITIEPLVIDTLHPLTNLPLHIHLIIINPKQIIPYFIKAKSNIVNIHYEQSSTIHLHHTINQLKTLITKA

SEQ ID NO: 191033 - protein, 40 aa, Glycine max
  Clone ID: PAT_MRT3847_14521C.1.pep
CLWNMYKYTSLSTRKDSDRIFLMMGENSSSMCLSCIYDLK

SEQ ID NO: 191034 - protein, 52 aa, Glycine max
  Clone ID: PAT_MRT3847_14522C.1.pep
HDEAHPNIVHRDIKASTILLDGNFNPKIGDFGLAKLFPDNVTHVSTRVAGTV

SEQ ID NO: 191035 - protein, 85 aa, Glycine max
  Clone ID: PAT_MRT3847_14523C.1.pep
VMSTSKHPSALSLSLCCPGLASPLGHCGRCLPGMSKLCCSGASCHLLGLIPHLIPYREKCEFRWRVGPGPMRHQWKHSSKFRQVP

SEQ ID NO: 191036 - protein, 104 aa, Glycine max
  Clone ID: PAT_MRT3847_14524C.1.pep
RRSWIGSTRTRTTCLPRGCGDVKVVTVEMTGLLLLTPVPHRENVAVQMLSTRQCTETVALYIRNPMATSSVLYCHGSTADLGQMYELFIQLNMHLRDDLMAYDY

SEQ ID NO: 191037 - protein, 325 aa, Glycine max
  Clone ID: PAT_MRT3847_14525C.1.pep
VAVKQLEGIEQGEKQFRMEVATISSTHHLNLVRLIGFCSEGRHRLLVYEFMKNGSLDDFLFLTELHSGNFLNWEYRFNIALGTARGITYLHEECRDCIVHCDIKPENILLDENYVAKVSDFGLAKLINPKDHRHRTLTSVRGTRGYLAPEWLANLPITSKSDVYGYGMVLLEIVSGRRNFDVSEEPNRKKFSIWAYEEFEKGNISGILDKRLANQQVDMEQVRRAIQASFWCIQEQPSHRPTMSRVLQMLEGVTEPEKPPAPKSVMEGAVSGTSTYLSSNASAFSVGVSPPGPSSSSSFQTSAVSTFTSGRNLEKTTSSLLQSDT

SEQ ID NO: 191038 - protein, 286 aa, Glycine max
  Clone ID: PAT_MRT3847_14526C.1.pep
MCMEKHGHDEEEQPKPVVLITGCSTGGIGHALARSFAANRCRVVATSRSRWSMADLEHDHRFFLQELDVQSDESVRKVVDAVVNKFGRIDVLVNNAGVQCVGPLAEVPLSAIQNTFDTNVFGSLRMIQAVVPHMAVRKQGKIVNVGSVAALASGPWSGTYNASKAALHAFTDTLRLELGHFGIDVVNVVPGAITSNIANNALANYNRMPEWKLFKPFEAAIRDRASLSQGSKSTPSEEFAKNTVAAVLKKNPPAWFSYGHYSTFMAIMYHLPLFLRDFFLKKLMKC

SEQ ID NO: 191039 - protein, 43 aa, Glycine max
  Clone ID: PAT_MRT3847_14527C.1.pep
HPMLSRIGSSSFLTIISNSSLKLNNYIQILLYKYPADIKVTST

SEQ ID NO: 191040 - protein, 43 aa, Glycine max
  Clone ID: PAT_MRT3847_14528C.1.pep
NVYKSSLLQRLRMPSHLECLYLHHDMTSTNISCFKLSTITDLT

SEQ ID NO: 191041 - protein, 164 aa, Glycine max
  unsure (1)..(164): unsure at all Xaa locations
  Clone ID: PAT_MRT3847_14529C.1.pep
RTAARRRQKGEELLPLLDILANKVKAVRRLRELLTTKFPPGSFPVKVAIPVVPTVRVVVTFTKFVELQPVEKFYTPLSSPTHLLNAXDDDDPQKLRRQGSSSFGRSTWLRRSTSSSSNHHQQRCSSXGALDSDPFAIPVGYTWTNSGNDSSRKMKKSRSVRKSK

SEQ ID NO: 191042 - protein, 163 aa, Glycine max
  unsure (1)..(163): unsure at all Xaa locations
  Clone ID: PAT_MRT3847_1452C.1.pep
LEHAGTSMGNVDAPVDETISDVEKEIDDLLPVEVKEQRLSNSLQSTMVXGCLAAMPMTTKILTLSLWGHYASMAIVSLPRYQLRETILLLFTVPQXRYMVLDDYHATFVETVTYKTIASFTIVQSIYLXYTRWLTWVPNDRVMSPMTIMLLVSDRHNSRPKFF

SEQ ID NO: 191043 - protein, 44 aa, Glycine max
  Clone ID: PAT_MRT3847_14530C.1.pep
TNMIACLKPCDQMHLRLSGPLLLSRRGKLSICYLLRCYLSPPWL

SEQ ID NO: 191044 - protein, 157 aa, Glycine max
  unsure (1)..(157): unsure at all Xaa locations
  Clone ID: PAT_MRT3847_14531C.1.pep
TAARRRQKGEELLPLLDILANKVKAVRRLRELLTTKFPPGSFPVKVAIPVVPTVRVVVTFTKFVELQPVEKFYTPLSSPTHLLNADDDDPSGRSTCLRRTSTSHSWGGXSKHQQRSSSSSGALDSDPFAIPVGYTWTNNGDDSSRKLNKSKSVRKSK

SEQ ID NO: 191045 - protein, 164 aa, Glycine max
  unsure (1)..(164): unsure at all Xaa locations
  Clone ID: PAT_MRT3847_14532C.1.pep
TQRSCFGVLINSVLDIEDDPAWHGAEDEEEDAGETSNYGFGQECLDRLSISLGFFTIVPVASELVPTYLSAPEWEKHHAALIALAPXAEGCSKVMIKNLEQVLSMILNSFDDPHPRVQWAALNAIGQLSTVLGXDLLVXFHHLVLPALAXALGDFQNPRVQAYA

SEQ ID NO: 191046 - protein, 46 aa, Glycine max
  Clone ID: PAT_MRT3847_14533C.1.pep
GSTCREVGGIFSHYHVDQIRTYKLAVFKKRPFEDIASESISANYMH

SEQ ID NO: 191047 - protein, 74 aa, Glycine max
  unsure (1)..(74): unsure at all Xaa locations
  Clone ID: PAT_MRT3847_14534C.1.pep
MMGARVPLLLLGHVFLASVSGSFGIXAYWEKDDPIHDKCLQSCNSERXSYRNHACHARCHLLKVAKEECEKGEI

SEQ ID NO: 191048 - protein, 92 aa, Glycine max
  unsure (1)..(92): unsure at all Xaa locations
  Clone ID: PAT_MRT3847_14535C.1.pep
GWCLXFSVVFSFLSFLLFFPFRQTGTPSSCPGPPPLTMPYAPFPGGNFPAKATANSLHNGLQXPQTTPPPPGRPLFPPFKNKPPFSLRPGPS

SEQ ID NO: 191049 - protein, 74 aa, Glycine max
  Clone ID: PAT_MRT3847_14536C.1.pep
PKLNFSKIFLNSSSSSALSGTYSISTCSTTCCGSVFSFASSPSSVALPGFFGGGGGGVGVGILIGVVNDDVLIR

SEQ ID NO: 191050 - protein, 93 aa, Glycine max
  unsure (1)..(93): unsure at all Xaa locations
  Clone ID: PAT_MRT3847_14537C.1.pep
KERQCHIVIRLSDGLXKSKQKPYSQPNMFQHKLKIVKLALLQFIKFPDSGKVLRLPKXAPTSSXGPWTFMANRFDRQYCGKCGFPYVYQKAQV

SEQ ID NO: 191051 - protein, 152 aa, Glycine max
  Clone ID: PAT_MRT3847_14538C.1.pep
RNETHEGNATRAFQFQDVFSLENEDSDDVTTLIDKKDNVFVMSNKKSKYPVLQVDLRLISDLVVVIVSAAIGGIVFSCLGQPVIVGYLLAGSLIGPGGLKFISEMVQVETVAQFGVVFLLFALGLEFSLAKLKTGGPCACLGGLLQIIISMV

SEQ ID NO: 191052 - protein, 63 aa, Glycine max
  Clone ID: PAT_MRT3847_14539C.1.pep
IWALVRFEIFQTSHRAQILIVHRVIEEGKVIIILIRGGFYIYLYVGINAYYQFVAGYSCRVSI

SEQ ID NO: 191053 - protein, 127 aa, Glycine max
  unsure (1)..(127): unsure at all Xaa locations
  Clone ID: PAT_MRT3847_1453C.1.pep
ELDGRNITVNEAQSRRSEGGGGGGYGQRGGGGGYGGGGYGGGGGGGGYGQRREXAATAVAVATVAAVVAAATAAATAAATAAAAAATPTGTGGTERWGPHGQVIYLSNRATIIIIRSLSSLVLCGTI

SEQ ID NO: 191054 - protein, 72 aa, Glycine max
  Clone ID: PAT_MRT3847_14540C.1.pep
AKGGWHNIIDHVDPVFFLPDCPLIWLEENLKKSQHEDVDSWSRHFTVMLDKLGVQCNNFVFNKNWLAANGVV

SEQ ID NO: 191055 - protein, 120 aa, Glycine max
  Clone ID: PAT_MRT3847_14541C.1.pep
DRATGVMLGLLYFIHESMIFSLDLRVIHAAWSIQSHIGCSHSRTNTHDLVCYSIHPTPQLKRAIRTSPILYMTYQWLIRTNHLFTPFTPLLWLVLCSLLRTSSSTFTFSVPRRLDLSPLF

SEQ ID NO: 191056 - protein, 173 aa, Glycine max
  unsure (1)..(173): unsure at all Xaa locations
  Clone ID: PAT_MRT3847_14542C.1.pep
ILIYIPGPGIVLSTLFSPTLTSQWTIFILTTAAPTVGARTEIDRQSRVHALLILILGVKRHDRGLYIMDASDPDCSDGWCYQIVKEVRDYEKIVGYNREQIPYVPISSFDGDNMIERSSNLDWYNGPTLLNDLTRSLKPRGHLNKPLSLPLQMGTKTEGIXTVPVGRVDNGAL

SEQ ID NO: 191057 - protein, 475 aa, Glycine max
  unsure (1)..(475): unsure at all Xaa locations
  Clone ID: PAT_MRT3847_14543C.1.pep
MKLRIAAANKQASIEMGEFTGSGEYVTIGEFPSSRTNHSRKVSVLPLVFLIFYEVSGGPFLFDDTVHAAGPFLAECCXSLITAEMGTMFPENSGYVVWVSSALGPFWGFQQGWMKWLSGVIDNALYPVLFLDYLKSGIPALGGGFPRVVATWGLTIVLTYLNYRGMTIVGWVAVCLGVFSLLPFVVMGFLAIPDLKPSRWTVTNPNDINWNLYLNTLFWNLNYWDSISTLAGEVENPKKTLPKALFYAVILVVLGYFFPLLIGTGAVPVNRELWTDGYFSDIALIIGGAWLRWWLQAAAAMSNMGMFVAEMSSDAFQLLGMAERGMLPEFFSKRSRYGTPLIGILFSASGVILLSWLSFQEIVAAENFLYCFGMILEFIAFILLRIKHPDASRPYKIPGGTAGAIIMCIPPTILIGVVLFFSTLKVMVVSLIAMAIGLLMQPCLKFVEKKRWMKFSHSSELPDFGNQEDTRTLVH

SEQ ID NO: 191058 - protein, 85 aa, Glycine max
  Clone ID: PAT_MRT3847_14544C.1.pep
GQEWAGAAEAQKARIVPHQEGLPPAQVPPAQSLCFPSGGGVSSVTKRSDFPGAPVSSQRCCQRGLLRSRQNLRQSLLVLHVCNSS

SEQ ID NO: 191059 - protein, 56 aa, Glycine max
  Clone ID: PAT_MRT3847_14545C.1.pep
YLNINRMNGCCLLLKLIFYLFTPQGSKAYLAKVGPFLARAVNLTCYTLSSVFTFHF

SEQ ID NO: 191060 - protein, 89 aa, Glycine max
  unsure (1)..(89): unsure at all Xaa locations
  Clone ID: PAT_MRT3847_14546C.1.pep
GSAAGAISSSAXFPLEVARKHMQVGALSGRQVSKNVIHALASILEQEGIQGLYKGLGPSCMKLVPAAGISFMCYEACKRILVEDDDDEE

SEQ ID NO: 191061 - protein, 82 aa, Glycine max
  Clone ID: PAT_MRT3847_14547C.1.pep
RVLIIHSQLTSTKVNNLKPFIGSTTKLKTNCLGGLATCSTLESESAAEDLIGCGINDWRLMAKKFYERSAKSYDSVSMKHVI

SEQ ID NO: 191062 - protein, 137 aa, Glycine max
  Clone ID: PAT_MRT3847_14548C.1.pep
ENGSEEVLLREAIPRHSSGSETARSGYSTAAGQSSLGFCRYGDSCKYLHPIPNNNLQQPPVLTTPSPSPPPGNVVGVSLDNLPPLLQPPPEGVYPHLPFSTGDKFVILRTSHYCIYESVWNHFISLLFLPMSLPVFP

SEQ ID NO: 191063 - protein, 53 aa, Glycine max
  Clone ID: PAT_MRT3847_14549C.1.pep
MSQDQCVRALAEHAGIKPLVTVTVWKELQKENKEFFRAYLQVTTPRPLFMSKI

SEQ ID NO: 191064 - protein, 81 aa, Glycine max
  Clone ID: PAT_MRT3847_1454C.1.pep
KEPRGKPLTILLVWPKHVYLFKQYGLNTLPKGQQALPLILKNLWLLQLSFFLPKFGPGDFQLPSHGPLVFLTGAPDPISCG

SEQ ID NO: 191065 - protein, 91 aa, Glycine max
  unsure (1)..(91): unsure at all Xaa locations
  Clone ID: PAT_MRT3847_14550C.1.pep
MAETFLLTSQSENXGHPDKLCDQICDAGLDACLEHDPYIKFAFXTCTKTHLVMVFGEITTKANVDYATIARDTCMNIGFLLNEVGLDADNC

SEQ ID NO: 191066 - protein, 60 aa, Glycine max
  Clone ID: PAT_MRT3847_14551C.1.pep
SNGPMGDTWGDPIIIRSGKLISATVVYYAFCTFNTYHSRACYYLQIREVTLTPVIATSEI

SEQ ID NO: 191067 - protein, 53 aa, Glycine max
  Clone ID: PAT_MRT3847_14552C.1.pep
VTPVLFGSACVCPGPGNKGVGSVKRADRIYQEPFWGGNPRWGLHAMRLILPSC

SEQ ID NO: 191068 - protein, 61 aa, Glycine max
  Clone ID: PAT_MRT3847_14553C.1.pep
KLTNADFIEVIDFERGTECKYYGDKSNYIHYVLTSDGYGMIFTNSCVEAIIQPNVLNRYIV

SEQ ID NO: 191069 - protein, 32 aa, Glycine max
  Clone ID: PAT_MRT3847_14554C.1.pep
FQCWFNFVSLLLNEIYVYFAAVWETMNILFSP

SEQ ID NO: 191070 - protein, 66 aa, Glycine max
  unsure (1)..(66): unsure at all Xaa locations
  Clone ID: PAT_MRT3847_14555C.1.pep
IESPILTFLLIKTPPLFFPPPFFYIYIYXSGPWALGKFPCLKPFPRGPFRHFILIFQSPWLGGNSG

SEQ ID NO: 191071 - protein, 466 aa, Glycine max
  unsure (1)..(466): unsure at all Xaa locations
  Clone ID: PAT_MRT3847_14556C.1.pep
MAASFSSMLIIPSSKISYEASLGGLSFHNFLTAKSPPLKRNQKSIKVVTRDNHSPLVDDLMIEVQEHEHEHATLHQKDLSEMWRQIHGEKNWEGLLEPMDPLLRSEVIRYGELAQACHDAFDYEPFSRYCGTCRFEEEKFFSSLGMTHHGYKVTRYIHLTANTDFLLKWLIHSKWPTAMGSKVNWGGYVAVSNDDTSRCLGRRDIVIAWRGTTTHLEGEKDLRSSLTPVSSKGIPCHDDGVKVDNGFLDMYTGKDETSEYCQHSARDHVLREVKRLMDMYSEEEVSITVTGHSLGSALAILSAYDIVEKGLDRGVPVXVMSFSGPAVGNKSFHKRLKKLGIKVLRVINANDWVPWFSLWLPPFQYYHVGVELKLDNNKSPFLKHDVDCAHNLEVLLHLLDGYHGERGEFMLASDRDHALVNKGGDFLKESYLVPPNWWQDENKGLKRSSDGRWVQPERTIEVDGYP

SEQ ID NO: 191072 - protein, 54 aa, Glycine max
  Clone ID: PAT_MRT3847_14557C.1.pep
ILLSYLFLGKNYQVILCYVLLYNNNCVQECVLSYRFTSQGLQGGGVVQLIMLEN

SEQ ID NO: 191073 - protein, 88 aa, Glycine max
  Clone ID: PAT_MRT3847_14558C.1.pep
SKSGNLNSTITMVIAGHRFHQNPQVRRAWPRSSCLLLLLSNNGFSPSELELLDPNFRGLGIFLIIFLGVPSFILIHQYLYLIFNGEED

SEQ ID NO: 191074 - protein, 159 aa, Glycine max
  Clone ID: PAT_MRT3847_14559C.1.pep
MDRDEAETMENVEFDASEIEYVSYGGEHHLPLVMNLVDQELSEPYSIFTYRYFVYLWPQLSFLAFHKGKCVGTVVCKMGEHRNTFRGYIAMLVVIKPYRGRGIATELVTRSIKVMMESGCEEVTLEAEVTNKGALALYGRLGFIRAKRLFHYYLKWSDA

SEQ ID NO: 191075 - protein, 78 aa, Glycine max
  Clone ID: PAT_MRT3847_1455C.1.pep
DCCDSFFFVVIFFLCCMCVCNYSHLTIVRDFGSYGCLESAFKHVSIVYASLLTPRRVYGHNFIMFRGIIWKCQKLILS

SEQ ID NO: 191076 - protein, 103 aa, Glycine max
  Clone ID: PAT_MRT3847_14560C.1.pep
APIPLERAGFKAVWFSRGHLFFPVGEPAKGLGSIFMHFPHLFKFHLSQDRLIRVLHVLPNEIQPKCLDGFQVPTTGSEGNTSSFVCKKKKKRKKKSKKNIDKY

SEQ ID NO: 191077 - protein, 37 aa, Glycine max
  unsure (1)..(37): unsure at all Xaa locations
  Clone ID: PAT_MRT3847_14561C.1.pep
SVLISHHRLTFKPSSQTQXLWXSTRSNIASQQRQIPT

SEQ ID NO: 191078 - protein, 123 aa, Glycine max
  Clone ID: PAT_MRT3847_14562C.1.pep
MSGEEVAVAVEVPATSIPGEPMDIMTALQLVLRKSLAYGGLARGLHEGAKVIEKHAAQLCVLAEDCDQPDYVKLVKALCAEHNVSLLTVPSAKTLGEWAGLCKIDSEGKARKVTSCSCVVVKV

SEQ ID NO: 191079 - protein, 338 aa, Glycine max
  unsure (1)..(338): unsure at all Xaa locations
  Clone ID: PAT_MRT3847_14563C.1.pep
MAGNPATTTSSALSPENLKFNFSPDNPSRIILTSDQVNHCTQALNLLKEKLHDPHVITQEFAHLQANRITPSEMRRRCTVAYDAVNLRKNRYTDVLPFDKNRVVLKSSTDYRPEAQGYINASLVSTSSAGNVSHFIATQGPLQHTYEDFWEMIIQYHCPAIIMLTSLVDNYPKTSGGYWEMITQXSREVGNISIIGKWENPTETSLVLRHLEVNHREVEDAPLSVLHIQYPEWPDHGVPKDTFAVREILKRLYHLPPNFGPIVVHCSAGIGRTGTYCTIHNTIQRIVAGDMSAVDIAKTIAMFRSQRIGMVQTQDQYIFCYNAIIDELEDLVSQQQSE

SEQ ID NO: 191080 - protein, 91 aa, Glycine max
  Clone ID: PAT_MRT3847_14564C.1.pep
FGSLPCTILTHNHYHHIILFHMFLLWLDPSMEFWHAYLFLFNIFWVFYSRLIQRFNGFLIVVFGFTADLTFPPCVYLDSPPPPPKKEDVIQ

SEQ ID NO: 191081 - protein, 40 aa, Glycine max
  unsure (1)..(40): unsure at all Xaa locations
  Clone ID: PAT_MRT3847_14565C.1.pep
FSSNYAMMWCVVCQKLWINKKTRRTTFPSPILLNYVRKXL

SEQ ID NO: 191082 - protein, 85 aa, Glycine max
  Clone ID: PAT_MRT3847_14566C.1.pep
FIEFFSITRPYKRRINCSIVSTSYIKKKTHLPKLTRRGGCVYFLSQTLSMARTKHADPTTTEGRAPRISSRHQGTQIWVTLFFFF

SEQ ID NO: 191083 - protein, 99 aa, Glycine max
  unsure (1)..(99): unsure at all Xaa locations
  Clone ID: PAT_MRT3847_14567C.1.pep
XPXAXMXHXSPFXXXTTXKSXXXXXLXXXXXXXXLXXXXXXXXXXXXXXSXXXXRXXXRXXTHXXKXXKXXXXTHAXLXQIXXCXHLEPNXELXXRXXQ

SEQ ID NO: 191084 - protein, 37 aa, Glycine max
  Clone ID: PAT_MRT3847_14568C.1.pep
KLTTCLVNSLASLKQKLYLQVSQEGHVDVLTIEIYNP

SEQ ID NO: 191085 - protein, 54 aa, Glycine max
  Clone ID: PAT_MRT3847_14569C.1.pep
HFPSTFHGIPFSIFIVPEAVREQLIACKEVMITDPVCRVLSPVYAVNVARSSAA

SEQ ID NO: 191086 - protein, 74 aa, Glycine max
  Clone ID: PAT_MRT3847_1456C.1.pep
LLRSTATSQEIISYPHFQQLNVRQILTGTRLNPTSTYRDLQHHKLNISSEASSAAEYRLKLVHRDKVPTVNTSQ

SEQ ID NO: 191087 - protein, 70 aa, Glycine max
  unsure (1)..(70): unsure at all Xaa locations
  Clone ID: PAT_MRT3847_14570C.1.pep
GHFMREKIMSREVTTALSTLMINYQIFLPSLLEGQGYPTFVPSWMHVTYMLQHEGECXRXDFHITAXINN

SEQ ID NO: 191088 - protein, 59 aa, Glycine max
  Clone ID: PAT_MRT3847_14571C.1.pep
VAVTTINLGRSGSKCCIGKRPVVRGGFMIPVDHPVWGGEGRAPIGRNPRSTRWGFSVFA

SEQ ID NO: 191089 - protein, 116 aa, Glycine max
  Clone ID: PAT_MRT3847_14572C.1.pep
LQHLSFHQKKPISLMGQKDSIKFRERKANKESQSEMILSLRESKIKVGARITLGLGHLPDYLLSQQALARRRQRHKGRLLQNKRCSCSSFSWKKNGVESVSSGGIIFIYNSRIPSP

SEQ ID NO: 191090 - protein, 85 aa, Glycine max
  Clone ID: PAT_MRT3847_14573C.1.pep
EAPHFDRMLISHCFDQISFFPLMDTLYKTITLNITYPIYFKERKNTNPIIIFFSIKEIKKGSSNSDLGLYEQGRWWLIWSRSRWS

SEQ ID NO: 191091 - protein, 76 aa, Glycine max
  Clone ID: PAT_MRT3847_14574C.1.pep
KKNMLSPHTYTPVHNLLIEPTTPYSYTVLQLLLNDPYAVHTSKVLFSKRKKTSIVSRTNVCASATGIHTENKTIKI

SEQ ID NO: 191092 - protein, 56 aa, Glycine max
  unsure (1)..(56): unsure at all Xaa locations
  Clone ID: PAT_MRT3847_14575C.1.pep
HAPIIDHIVSSLRISHVXTTYECRILLSVVNKYYCGIDKEIKIKKYLVRRSYMRKY

SEQ ID NO: 191093 - protein, 83 aa, Glycine max
  Clone ID: PAT_MRT3847_14576C.1.pep
LSTYVLAQHQRLCDALYFSHVYENPYITGLHLLFLYIIYYNHVLYSASPYAANLYKDNNIIYILYACMHDAFTGDWVLQEATP

SEQ ID NO: 191094 - protein, 178 aa, Glycine max
  Clone ID: PAT_MRT3847_14577C.1.pep
LSVRDFERGPRYHAYAALRETKLRMRQQEEEEGVVEAKVSTPPRKKQVKFQGAVVSGRKGSSSLVAQSVPDFSNVLRKENRKPVNGNMMLPPLMELTPPPSSSKSGCGVFSSARGSKSANAGEKRRGGVLMPRKSYASIDELKGGLSSATSNAINADNRGGRSSRLITRKTVLGYRHI

SEQ ID NO: 191095 - protein, 208 aa, Glycine max
  Clone ID: PAT_MRT3847_14578C.1.pep
MAMAAGNNNPIVFDPSTSMYLVSCDGLTIETTITDKSGIVDKWIQVVSSTYAGKQRIVGLDTEWTTAKKPKMKVAILQLCIENKCLIIQLFHMDNIPQSLRSFLMDSNFEFVGVGVINDLRMLKNDYGLECNKGIDVSLLAKEKWPHRISSGALKYLAKELVGLEMEKSKAVCTSEWQSKELTQTQIEYACIDAYASFKIGKMILNQD

SEQ ID NO: 191096 - protein, 81 aa, Glycine max
  Clone ID: PAT_MRT3847_14579C.1.pep
GKGVKKIPHFTKVWAPQFYFNSKKGPLRKKFWFFFFSQNLIKGFSLILATPRAPFFLKLKSPKLTLAQKLPEFPPRKPLKK

SEQ ID NO: 191097 - protein, 88 aa, Glycine max
  unsure (1)..(88): unsure at all Xaa locations
  Clone ID: PAT_MRT3847_1457C.1.pep
SPTTGRNLFCYDNGRGQEEGWNGYRYKNNGTQDKEWEAHXIXGQKGHGKEYPKGGGETXETKEKAGIRKTIEKXGXXGRXEXKTGRWN

SEQ ID NO: 191098 - protein, 78 aa, Glycine max
  Clone ID: PAT_MRT3847_14580C.1.pep
NLKYDKMIEYSLHLDMFPQDSRVQFILVYISVAVLFKHQINKNDVGPEHILDLLLGQWHMPHYRAVALNMRRSVQKLH

SEQ ID NO: 191099 - protein, 86 aa, Glycine max
  Clone ID: PAT_MRT3847_14581C.1.pep
STFPFLLTQWPPPTNIQTANPPNPPRENKPAGKRKRRVRSKGTWPLSNEAGHLSQSKRERRTVKLIDLELGGSIEGTSPLKTIIGH

SEQ ID NO: 191100 - protein, 97 aa, Glycine max
  Clone ID: PAT_MRT3847_14582C.1.pep
KQPADRLAFVGSLIEEESTGDQIQSLIRDLPNLCFSLSEQSTTLNADSFHHTDGITDPITKLGGYPFGPSESPHARECNSRTAARLLTTSWITYHTL

SEQ ID NO: 191101 - protein, 52 aa, Glycine max
  Clone ID: PAT_MRT3847_14583C.1.pep
CTMSSSGFMRLTNIKGYILMKPSKHLKAFVASKGLCVLDTQNGCEHFSYNIL

SEQ ID NO: 191102 - protein, 111 aa, Glycine max
  unsure (1)..(111): unsure at all Xaa locations
  Clone ID: PAT_MRT3847_14584C.1.pep
TLTYCWDSWCACRLPCPELTGLDPLSCGGTEPLIGGGAGSHSSMEPPDEENLYKAAQNVAEEXHERDAEDDEVEAHMVTAALKGAVDDDDTARGSMAALERSHSRAALPKN

SEQ ID NO: 191103 - protein, 46 aa, Glycine max
  Clone ID: PAT_MRT3847_14585C.1.pep
LLNMPNLLCLALYFVYGLIPLVPSSIYLCKFKKHVQRSQVLMRFKA

SEQ ID NO: 191104 - protein, 74 aa, Glycine max
  Clone ID: PAT_MRT3847_14586C.1.pep
SNPDSLFWIACSRSFNFKKFRSVGFFVVAFHVGHCPDFLHFLLRRTLRSSVKISILQIKQHCFSFCNTCNLSIV

SEQ ID NO: 191105 - protein, 66 aa, Glycine max
  unsure (1)..(66): unsure at all Xaa locations
  Clone ID: PAT_MRT3847_14587C.1.pep
GKKIXXFXXNDGCLXXIEENXEXLIGGFGXKGXGVGDIXGXRFKXVKXYGXXXLXXXKEKKEKXRF

SEQ ID NO: 191106 - protein, 47 aa, Glycine max
  Clone ID: PAT_MRT3847_14588C.1.pep
VPGNYQVQNAHCKPTEILKSTVTNIMPTYHSATDTSCTAHHHKGNPY

SEQ ID NO: 191107 - protein, 362 aa, Glycine max
  unsure (1)..(362): unsure at all Xaa locations
  Clone ID: PAT_MRT3847_14589C.1.pep
GTRKIVDDVFDKINKAEASIYVADHPVGLHLEVEKIRKLLEAGSSDAISMIGIHGMGGVGKSTLARAVYNLHTDHFDDSCFLQNVREESNRHGLKRLQSILLSQILKKEINLASEQQGTSMIKNKLKGKKVLLVLDDVDEHKQLQAIVGKSVWSESEFGTRLVLIITTRDKQLLTSYVXFDALEEEKKCFSDITCCLKGYKCREIEDILHRLYDNCMKYHIGVLVDKSLIQISDDRVTLHDLIENMGKEIDRQKSPKETGKRRRLWLLKDIIQVLKDNSGTSEVKIICLDFPISDKQETIEWNGNAFKEMKNLKALIIRNGILSQGPNYLPESLRILEWHRHPSHCLPSDFDTTNLAIRDLE

SEQ ID NO: 191108 - protein, 228 aa, Glycine max
  Clone ID: PAT_MRT3847_1458C.1.pep
MGPRNMFKHPHTNGVVSGEFPNGKVTNTSLIRQVTGSSPESTSHQSSRAAPAVVHGQEQGLSDPVQLMRMFAERAQKQHTSSNHSLVDTPPVTLSGPSGQRNDSGNASAAAAHAWMSVGAGGFKQGPNNSSSPKNHISADSLYNSTRELHQHISRIRGEFPSGGMPFQPFQAGAVSQFPNRPMVFPQLASADQSRFQMQPPWGGLSPHSQSRQKQETLPPDLNIDFES

SEQ ID NO: 191109 - protein, 459 aa, Glycine max
  Clone ID: PAT_MRT3847_14590C.1.pep
NRAGYEFKFIRKIVDDVFDKINKAEASIYVADHPVGLHLEVEKIRKLLEAGSSDAISMIGIHGMGGVGKSTLARAVYNLHTDHFDDSCFLQNVREESNRHGLKRLQSILLSQILKKEINLASEQQGTSMIKNKLKGKKVLLVLDDVDEHKQLQAIVGKSVWSESEFGTRLVLIITTRDKQLLTSYGVKRTHEVKELSKKDAIQLLKRKAFKTYDEVDQSYNQVLNDVVTWTSGLPLALEVIGSNLFGKSIKEWESAIKQYQRIPNKEILKILKVSFDALEEEEKSVFLDITCCLKGYKCREIEDILHSLYDNCMKYHIGVLVDKSLIQISDDRVTLHDLIENMGKEIDRQKSPKETGKRRRLWLLKDIIQVLKDNSGTSEVKIICLDFPISDKQETIEWNGNAFKEMKNLKALIIRNGILSQGPNYLPESLRILEWHRHPSHCLPSDFDTTNLAIRDLE

SEQ ID NO: 191110 - protein, 192 aa, Glycine max
  Clone ID: PAT_MRT3847_14591C.1.pep
MSAAEEAKVPAVEKPVEEVKAPKLAKEKKPKAPKEKKPKQAKTASHPPYLQMIKDALIALNEKGGSSPYAIAKYMEEKHKAVLPANFKKILGLQLKNQAARGKLVKIKASYKLAEAAKKVKESTAKATKESRPKRNKIATAVAPKKTEAVKKPAKKVGPKKTKKVSTPAKPKQPRSIRSPTKRARKAAVAAA

SEQ ID NO: 191111 - protein, 59 aa, Glycine max
  Clone ID: PAT_MRT3847_14592C.1.pep
MSAAEEAKVPAVEKPVEEVKAPKLAKEKKPKAPKEKKPKQAKTASHPPYLQVISRKFLS

SEQ ID NO: 191112 - protein, 60 aa, Glycine max
  Clone ID: PAT_MRT3847_14593C.1.pep
MHCNITNEVTFKKYIFFKSHIIYFLACMCYLIGSFWNFDALFQPQQHPARDSHDTFFLES

SEQ ID NO: 191113 - protein, 121 aa, Glycine max
  Clone ID: PAT_MRT3847_14594C.1.pep
GHPFERQTGRANWVFPQTGKRGCPPRVLNWGTARVSPVQWLKTPAKEIKFGAPKEKKIGSLKGGANLGSFKRAPPFFFFFFFFFFFFFFFFFFFFFFFFFFFFFFFFFFDNSKIHLQLITS

SEQ ID NO: 191114 - protein, 71 aa, Glycine max
  Clone ID: PAT_MRT3847_14595C.1.pep
AGRSFRGGFQISECVGIVKLTVTNAQFLRARKKEGILTPTCTIILEKYKPVRAEYRQITPKKEEKIYLQDS

SEQ ID NO: 191115 - protein, 49 aa, Glycine max
  Clone ID: PAT_MRT3847_14596C.1.pep
ESERESYFPQKVLCGIYKTKMGKGEKKYYRKRERKKEKRFNFKLLVISD

SEQ ID NO: 191116 - protein, 54 aa, Glycine max
  unsure (1)..(54): unsure at all Xaa locations
  Clone ID: PAT_MRT3847_14597C.1.pep
DLFKSNLLWRCEMHXQDDSALRTCYWDRDYPMIXQQRLLINRIQLEYLXXIYPC

SEQ ID NO: 191117 - protein, 62 aa, Glycine max
  unsure (1)..(62): unsure at all Xaa locations
  Clone ID: PAT_MRT3847_14598C.1.pep
WVAFFFQFSLPLYXFFLFPTIKKGPQMLPSPPINCGFPKRFNNQVGLLPPLKQTIFVPPPRV

SEQ ID NO: 191118 - protein, 63 aa, Glycine max
  Clone ID: PAT_MRT3847_14599C.1.pep
QYPIGPTWRRNLRGQKWKLDHTKTKLYNQKLEESRCSEERLVNGKYSKSNGICITQKKRLKPH

SEQ ID NO: 191119 - protein, 214 aa, Glycine max
  Clone ID: PAT_MRT3847_1459C.1.pep
MVPRNMFKQPDTNGIVSGELPNGKVTNTSLNIQVTGSSPESTSHQSSRAAPAVVHGQEQGLSDPVQLMRMFAERAQKQHTSSNHLLGDTPPVTLSGPSGQRNELGNASAAAAHAWMSVGAGGFKQGPNNSSSPKNQISADSLYNSTRELHQHISRIRGEFPSGGMPFQPFQAVAPQPIHTGAVSQFPNRPMVFPQLASADQSRFQMQSPWRGLS

SEQ ID NO: 191120 - protein, 134 aa, Glycine max
  unsure (1)..(134): unsure at all Xaa locations
  Clone ID: PAT_MRT3847_145C.1.pep
MGDGSGNRWSRAEWVQQYDLLGKIGEGTYGLVFLARTKGTPSKSIAIKKFKQSKDGDGVSPTAIREIMLLREITHENVVKLVNVHINHADMSLYLAFDYAEHDLYXHHRDKLNHSINQYTVKSLLWQLLNGLSY

SEQ ID NO: 191121 - protein, 51 aa, Glycine max
  Clone ID: PAT_MRT3847_14600C.1.pep
QKKEFPPSTKLERPSLAPKMVKTPFPCLKFPLYNRFSLFHPQGMNLIPGPG

SEQ ID NO: 191122 - protein, 58 aa, Glycine max
  Clone ID: PAT_MRT3847_14601C.1.pep
WCGSFDLSTILFPVQVFADVSLPPMRQSSRFRAISMCVKYSTRVRRISTYKTVNISIC

SEQ ID NO: 191123 - protein, 41 aa, Glycine max
  Clone ID: PAT_MRT3847_14602C.1.pep
SRSRAAALFFFFKPKFNLSKAQTYHVIKKSGAKSKFFFLLG

SEQ ID NO: 191124 - protein, 71 aa, Glycine max
  unsure (1)..(71): unsure at all Xaa locations
  Clone ID: PAT_MRT3847_14603C.1.pep
VLKKVKSQPNILHIYLLTKKLILVGFKAIFFTRSGWFLNXVGESLPRERNSKEEEVGEVSMIMGRGLSGSS

SEQ ID NO: 191125 - protein, 111 aa, Glycine max
  Clone ID: PAT_MRT3847_14604C.1.pep
TLCLSSASELNQDKAMHETNMMKANSNLHKRKSSLISGGHPSAFKKRISRRGSYEDSLEVERKQLEDNFTTEDNYNENEDKNDVGDNTDAEKARDDDDVVDDHQEAAEYLP

SEQ ID NO: 191126 - protein, 123 aa, Glycine max
  unsure (1)..(123): unsure at all Xaa locations
  Clone ID: PAT_MRT3847_14605C.1.pep
MGRRPARCFSLIKNTPYPRPRLXRGVPDPKITIYEVGMNKNAVDELPFCDHLDSWETEIVVREALEADHIARYEYMGKFDGEAAXYLKVTAHTFYDLRINTMLWGAGADGLPTGITGSFGKPA

SEQ ID NO: 191127 - protein, 54 aa, Glycine max
  Clone ID: PAT_MRT3847_14606C.1.pep
LKRNLKKNKTKKKSFPFYVKEKFLNSGSNPAKPILSHQKKGLSLFPMLQYRSKL

SEQ ID NO: 191128 - protein, 73 aa, Glycine max
  Clone ID: PAT_MRT3847_14607C.1.pep
QTFRSFNSGIPVCATRDLRILISSSTTPSTELQHSIFCIHLTHLHITSHLTPPLVLLSYLRENCDLQEDPRAE

SEQ ID NO: 191129 - protein, 57 aa, Glycine max
  Clone ID: PAT_MRT3847_14608C.1.pep
CGGAPKPHECTPLPFSKKSRLFLLVLKKKKKKKKKKKKKKKKKKKKKKKKKKRAAAG

SEQ ID NO: 191130 - protein, 131 aa, Glycine max
  unsure (1)..(131): unsure at all Xaa locations
  Clone ID: PAT_MRT3847_14609C.1.pep
CLNGAIGKEQXKWLDDVLLEATKIXNRKVVICCHLPLDPGAASEKGLLWNYDEVMNLIHXYNCVKVCLAGHYHRGGYSIDSHGIHHRVLEAALECPPGTDAFGYIDVYDDRISLVGTDRMKSTEMHFTPPS

SEQ ID NO: 191131 - protein, 264 aa, Glycine max
  Clone ID: PAT_MRT3847_1460C.1.pep
MGANSLSSAESTLDLDEQISQLMQCKPLSEHQVRVLCEKAKEILMDESNVQPVKSPVTICGDIHGQFHDLAELFRIGGKCPDTNYLFMGDYVDRGYYSVETVTLLVSLKVRYPQRITILRGNHESRQITQVYGFYDECLRKYGSASVWKIFTDLFDIFPIRGEFPSGGMPFKPFQAVAPQPIHTGAVSQFPNRPMVFPQLASADQSRFQMQSPWRGIIPHSQSRQKQETLPPDLNIDFESPGSPVKQSSGVLVDSQQPDLALQL

SEQ ID NO: 191132 - protein, 99 aa, Glycine max
  Clone ID: PAT_MRT3847_14610C.1.pep
GAGVNCFLQNLKCKVVCNATPTRPLFYSVCPPPPRKGQRCFIEEFVKFHLLIPTKGVGEFCLQHPPESGLLGTHLTSPGLEKRSPRPSWVLELKSIPKF

SEQ ID NO: 191133 - protein, 100 aa, Glycine max
  unsure (1)..(100): unsure at all Xaa locations
  Clone ID: PAT_MRT3847_14611C.1.pep
FSPNFESMGNFYFLSLXXFPSSFLQPLFVPFSTVKRPDYVEEIKKMGLLPMRPTSGFYMFSPLAENGCYLDKTARNHSQVCQHHHHFFTLVSGMVRLINI

SEQ ID NO: 191134 - protein, 76 aa, Glycine max
  Clone ID: PAT_MRT3847_14612C.1.pep
FPRRSPLSVVVKEQICIPVFADLPLDWPQVRNTSGYGPLHDHVFFPHKNVFKLFENRFLILILMNSRVLKLVFKIL

SEQ ID NO: 191135 - protein, 68 aa, Glycine max
  Clone ID: PAT_MRT3847_14613C.1.pep
DQSSEDVYGIDLGMSLPQALKKWQAYEGRSQMESSSSSLLPPSLDNTHTSIPTRPNGFVESFTSADGR

SEQ ID NO: 191136 - protein, 93 aa, Glycine max
  Clone ID: PAT_MRT3847_14614C.1.pep
FFSLGGFFAVLTPDFLEEARFFSFYLPPVLNEFSKFPRAGSYFCRTQGQGAGLWFSPRKKNPVYSNLSPLVSGPSSGVGIRAVAGTPFYRLRR

SEQ ID NO: 191137 - protein, 64 aa, Glycine max
  unsure (1)..(64): unsure at all Xaa locations
  Clone ID: PAT_MRT3847_14615C.1.pep
MPNPKVFCDITIGGQSAGRIVMEIYAYYTHRTDENFSALSICDYGVXRSSKXLYYKGSFFYSRS

SEQ ID NO: 191138 - protein, 107 aa, Glycine max
  Clone ID: PAT_MRT3847_14616C.1.pep
KELIYSTGECLCSDLYTKVDALVEEEVGGNSVADIFKQHGETFFHNKENSEAMISIDMPAGPSEVLVIADKHAIPSHVAADLLSQSQTILPWQQHDNVEAATLCHPS

SEQ ID NO: 191139 - protein, 54 aa, Glycine max
  Clone ID: PAT_MRT3847_14617C.1.pep
PHPPFHQHPLPHLPMLPSKPAARPSHPSTPIPLSTSKTPPSTTPPYSPTFTNSS

SEQ ID NO: 191140 - protein, 68 aa, Glycine max
  Clone ID: PAT_MRT3847_14618C.1.pep
LIPRGRRCTPIPLQETLLYYTNSALNTIITPPRFFTPRARTFKFTQRLSHHCNNILGRIVPHIICTTW

SEQ ID NO: 191141 - protein, 61 aa, Glycine max
  Clone ID: PAT_MRT3847_14619C.1.pep
ARLHVTSSSPSNFLMLSGIFPLSRFNTLGAKRNSSGLNFSSNPLSVFLQNKYHQKSITQIV

SEQ ID NO: 191142 - protein, 372 aa, Glycine max
  Clone ID: PAT_MRT3847_1461C.1.pep
GSRDKLRVYLISGIDSIRDEVRLLQSIYEGLQEDPREVKGYRKEDFRILWVPVVDEWNLLHRAEYDNLKLEMPWYVAEYFYPLAGIRLIREDLNYKNKPIIPVLNPQGRVVNYNAMHMIFVWGIDAFPFRPSDDDVLTQKWNWFWAEMKKVNPKLQDLIKADSFIFIYGGSDKKWLQDFTQTVEKIKRHEIIKRADAVIEHYPFGREDHRIVPRFWIGIESLFANMIQKTQKDPTIEEIKSLLCLKQQQPGWVLLSKGSNVKLLGGGDPMLATAADFEIWKEKVLEKAGFDVAFKEYYEQKRRNYPQECSHMQLANYPADILHPINCPDAACGRSMEIASVSYKCCHGQTAHHKAEVPESGDVMIEKKLYAS

SEQ ID NO: 191143 - protein, 32 aa, Glycine max
  Clone ID: PAT_MRT3847_14620C.1.pep
IIRYILHAYMLGENNLMYDIHKCFNVLYHFMY

SEQ ID NO: 191144 - protein, 261 aa, Glycine max
  Clone ID: PAT_MRT3847_14621C.1.pep
FTVQVFDGHGGKSAAQFVRDHLPRVIVEDADFPLELEKVVTRSFLEIDAEFARSCSTESSLSSGTTALTAIIFGRSLLVANAGDCRAVLSRGGGAIEMSKDHRPLCIKERKRIESLGGYIDDGYLNGQLGVTRALGDWHLEGMKEMNGKGGPLSAEPELKLMTLTKEDEFLIIGSDGIWDVFRSQNAVDFARRRLQEHNDVKQCCKEIIGEAIKRGATDNLTVVMICFHSEPPPPMVVERPRVRRSISAEGLQNLKCLLEG

SEQ ID NO: 191145 - protein, 383 aa, Glycine max
  Clone ID: PAT_MRT3847_14622C.1.pep
MCVQDGEQAGEDHIEKNVDNSIRVSWPLHCDLLNAHMDNKEKDSSFRTPSDQISVANSSPLESICEDAEIVDKKQNLMNFVPTLRSGEWSDIGDRTSMEDTHICIGDLAEKFGNNELCKEAISFYGVFDGHGGKSAAQFVRDHLPRVIVEDADFPLELEKVVTRSFLEIDAEFARSCSTESSLSSGTTALTAIIFGRSLLVANAGDCRAVLSRGGGAIEMSKDHRPLCIKERKRIESLGGYIDDGYLNGQLGVTRALGDWHLQGMKEINGKGGPLSAEPELKLITLTKEDEFLIIGSDGIWDVFRSQNAVDFARRRLQEHNDVKQCCKEVIGEAIKRGATDNLTVVMICFHSEPPAPMVVERPRVRRSISAEGLQNLKCLLEG

SEQ ID NO: 191146 - protein, 57 aa, Glycine max
  Clone ID: PAT_MRT3847_14623C.1.pep
KMEFLGTSSPWCCNLGRKMKNWRRRVGGGYLRLIFREMLLQRDRDSRFGSGVKVERK

SEQ ID NO: 191147 - protein, 62 aa, Glycine max
  Clone ID: PAT_MRT3847_14624C.1.pep
KLMVYTRGPKIMPEKGCKKNKIFFIFPHQKLPKKAIGDPTYPLLGQAPNFTKIFSLKKKIRG

SEQ ID NO: 191148 - protein, 55 aa, Glycine max
  unsure (1)..(55): unsure at all Xaa locations
  Clone ID: PAT_MRT3847_14625C.1.pep
LALAYKISMNILGALRDTVIRYDPAYXKAPVIAHREHAIANSLRRAEYIHETWNN

SEQ ID NO: 191149 - protein, 63 aa, Glycine max
  Clone ID: PAT_MRT3847_14626C.1.pep
KLQRLVFHFPSYGWQLLICFLSKVVLSPPNLNKFKYVLNACFILGSFDVKNISQKYGYTRVVL

SEQ ID NO: 191150 - protein, 97 aa, Glycine max
  unsure (1)..(97): unsure at all Xaa locations
  Clone ID: PAT_MRT3847_14627C.1.pep
GXCRLKIVXSDSLGYCPXNENMRHSXRGTSSVQDLLLPTRRLVNCSPGLLTQGWGELLGILLATGPVVQMPWATCMHYGDRGTPWLKFIQKKNLKRL

SEQ ID NO: 191151 - protein, 102 aa, Glycine max
  Clone ID: PAT_MRT3847_14628C.1.pep
LQRIFFRKARRIPPPSGCPWVQCNTPGGDTARRTIKLGAPWGMNPPKQEFAAPLFVEKERHQFRSAWDQLHKGRGRYKPPGHQKGPDFFYPPSFFFGGTETR

SEQ ID NO: 191152 - protein, 86 aa, Glycine max
  unsure (1)..(86): unsure at all Xaa locations
  Clone ID: PAT_MRT3847_14629C.1.pep
MAAASFMALSYPSSDGKAVKLGPXTLEVRRVSMRKTGTKHAYYGSPWYGPDRDEYLGPFSGEPPNYTTGXIPSDYGXNTARLSADP

SEQ ID NO: 191153 - protein, 158 aa, Glycine max
  unsure (1)..(158): unsure at all Xaa locations
  Clone ID: PAT_MRT3847_1462C.1.pep
FGLHRFRECXLIHGRWAMLVTLGALTAECLTAVTWYDAXKVELXKGHXYLVQPLPFSITTLIWIEVLVMCYIXFQRNAELDPEKRLYPCGRYFDPXGLSSDPXRKPLLXLAEIKHSRLAMMGXIERRKXACCSVDGQVHNCAHHVHEQLHTAIVESFS

SEQ ID NO: 191154 - protein, 141 aa, Glycine max
  unsure (1)..(141): unsure at all Xaa locations
  Clone ID: PAT_MRT3847_14630C.1.pep
AQFSWTLSLYIHHSRKTPCPLHIRAPPYKKRRGYLWPPHTHTQPLNTQSAISCISPKTVVVWALXXSXMGKPSVLCISRAHIPSEALVXXRDSRELWGDMRLVXGTQRGGHXXCPDTVIISRXXXRALYMXXXXPSLRPMR

SEQ ID NO: 191155 - protein, 228 aa, Glycine max
  Clone ID: PAT_MRT3847_14631C.1.pep
MKMSLVWPLLTRRGFSTSSENLVASVLFERLPVVIPKIDPVVYAFQEFSFRWRQQYQRRYPDEFLDKSDARGKGDYQIDYVPAPRITEADQSNDRRSLQRALDRRLYLLLYGNAYGAPSGKPVWHFPEKVYESEDTMRKCAESALKSVIGDLSNTYFVGNAPMAHMVVQPTENQSGSTSFKRFFFKSQVIAKNKFDIGKCEDFVWVTKDELTEYFPEQAEFLNKMIIS

SEQ ID NO: 191156 - protein, 136 aa, Glycine max
  unsure (1)..(136): unsure at all Xaa locations
  Clone ID: PAT_MRT3847_14632C.1.pep
PRVRQALEHRYFSSAPLLTDPVKLPRPAPKKESKVSDVISNEGPTVLSPPRKSKRVMPGRDGSESNSLQGEXFDDRCGRVRQATCGYTGKNEPSPXMALEFSLFGLKPSNXTIITNAYRIHLKRKLDPKFLPPKPM

SEQ ID NO: 191157 - protein, 80 aa, Glycine max
  unsure (1)..(80): unsure at all Xaa locations
  Clone ID: PAT_MRT3847_14633C.1.pep
MVLPLLKLGTLAVTTLSXPVASILNQQATLHPIFRELIVRMAHSNHHITTKMQMRIYSDSTDVEIHPLNEEYAVHTTVDL

SEQ ID NO: 191158 - protein, 95 aa, Glycine max
  unsure (1)..(95): unsure at all Xaa locations
  Clone ID: PAT_MRT3847_14634C.1.pep
PNSRLGDSTKRGRHTYNDHANDIAQNTKDYSSDTSXRTNEKLQYITSEADQYSTDKAREIKDAPSHNASHIPNAIHQKSHYLIKTLLKHHLNSDL

SEQ ID NO: 191159 - protein, 67 aa, Glycine max
  Clone ID: PAT_MRT3847_14635C.1.pep
KIYDSLVRWRICYDDTACVYMHGHCYWFKCLDFRVREVRLFPLHRGKSVTMQEPTSATVWCTLGRNQ

SEQ ID NO: 191160 - protein, 77 aa, Glycine max
  Clone ID: PAT_MRT3847_14636C.1.pep
VTSTSQGNDLGNGHGMMANLGNGLFACEDKIMYIYPPRLNHIRALPLGHPAHRFLIMTHDNFTCLHTSLCYFLNPGN

SEQ ID NO: 191161 - protein, 51 aa, Glycine max
  unsure (1)..(51): unsure at all Xaa locations
  Clone ID: PAT_MRT3847_14637C.1.pep
EAVLKHFGSSISSDPRVLKTPXNYXRVPVSGYCGWFLLRLSLHDPFLSLNI

SEQ ID NO: 191162 - protein, 46 aa, Glycine max
  Clone ID: PAT_MRT3847_14638C.1.pep
GPIHRSNPSQVFGDAGITPEGVLIVSCHFCTIESFCIFYVNRVFYK

SEQ ID NO: 191163 - protein, 38 aa, Glycine max
  Clone ID: PAT_MRT3847_14639C.1.pep
ELIRKRQMKKIKFLYKFKLIYFKLFYRNLFILASISLF

SEQ ID NO: 191164 - protein, 52 aa, Glycine max
  Clone ID: PAT_MRT3847_1463C.1.pep
IQTFEKCVNNYIPGLFSHDCASCPHPGWLLGCSWYILQVGPLGIIQVRGITR

SEQ ID NO: 191165 - protein, 57 aa, Glycine max
  Clone ID: PAT_MRT3847_14640C.1.pep
KTLEVQTSHSAIKSLNSMTDCSLPTKFGKTAKVKTLNKLSACLFFTKTHQQSVINFI

SEQ ID NO: 191166 - protein, 38 aa, Glycine max
  Clone ID: PAT_MRT3847_14641C.1.pep
FISHPLYLELCKQTLHVKMFMQYELPYAFALKKNQACR

SEQ ID NO: 191167 - protein, 45 aa, Glycine max
  Clone ID: PAT_MRT3847_14642C.1.pep
KNIIGLFSFPLVVLLEATVREVEYPWYVRHCDQACDFMNNILATV

SEQ ID NO: 191168 - protein, 45 aa, Glycine max
  unsure (1)..(45): unsure at all Xaa locations
  Clone ID: PAT_MRT3847_14643C.1.pep
VMYHVCNTIXXYVXLXXSCISSWLSXVLXVSPKKTIICTVXSVKI

SEQ ID NO: 191169 - protein, 140 aa, Glycine max
  Clone ID: PAT_MRT3847_14644C.1.pep
SIHAVVMANSNNSNGNGARKESEDEEKQMQSRMQHPLGDRSTNQMHRVVTSTMAMHAANKKQQQVNGGNGKQSYSYSGINMKGREIEDPDNKAYMKAMAARALRQLAKGNAAICRIITDSRALLCLAILLEKRTEDVMYN

SEQ ID NO: 191170 - protein, 62 aa, Glycine max
  Clone ID: PAT_MRT3847_14645C.1.pep
EDAKEPMHTASCCSEKHSMSYGIFWSPSTTEERYKLKTHTNKSWCFVLFSKKLLPTYLFSLS

SEQ ID NO: 191171 - protein, 425 aa, Glycine max
  Clone ID: PAT_MRT3847_14646C.1.pep
MLLLRPPAPTSTFLNSPHMAALVKPISNVTPKFGSSPRMGSHSSKFSTIIRMSATATPPPPPSTSTKPAASNKKGNIKETLLTPRFYTTDFDEMETLFNTEINKNLNQDEFEALLQEFKTDYNQTHFVRNKEFKEAADKLEGPLRQIFVEFLERSCTAEFSGFLLYKELGRRLKKTNPVVAEIFSLMSRDEARHAGFLNKGLSDFNLALDLGFLTKARKYTFFKPKFIFYATYLSEKIGYWRYITIYRHLKANPEFQCYPIFKYFENWCQDENRHGDFFSALMKAQPQFLNDWKAKLWSRFFCLSVYVTMYLNDCQRTAFYEGIGLNTKEFDMHVIIETNRTTARIFPAVLDVENPEFKRKLDRMVEINEKLVAVGESDDIAVVKNLKRIPLVAALVSELLATYLMPPIESGSVDLAEFEPQLVY

SEQ ID NO: 191172 - protein, 36 aa, Glycine max
  Clone ID: PAT_MRT3847_14647C.1.pep
IIISSHHRVLTMQGTIPLNILEFKKNRHPQFITKEV

SEQ ID NO: 191173 - protein, 41 aa, Glycine max
  unsure (1)..(41): unsure at all Xaa locations
  Clone ID: PAT_MRT3847_14648C.1.pep
XTRXXTEHAIDPTXDSFICSXSHTPNRHLISLILRVIMILV

SEQ ID NO: 191174 - protein, 41 aa, Glycine max
  Clone ID: PAT_MRT3847_14649C.1.pep
LCASNVPMNGTRALSKRCSSQSGNGYRLGWICEVTDLRLRS

SEQ ID NO: 191175 - protein, 314 aa, Glycine max
  Clone ID: PAT_MRT3847_1464C.1.pep
MGANSLPSAESNFDLDEQISQLMQCKPLSEHQVRVLCEKAKEILMEESNVQPVKSPVTICGDIHGQFHDLAELFRIGGKCPDTNYLFMGDYVDRGYYSVETVTLLVSLKVRYPQRITILRGNHESRQITQVYGFYDECLRKYGNASVWKIFTDLFDFFPLTALVESEIFCLHGGLSPSIETLDNIRNFDRVQEVPHEGPMCDLLWSDPDDRCGWGISPRGAGYTFGQDISEQFNHSNKLKLIARAHQLVMDGFNWAHEQKVVTIFSAPNYCYRCGNMASILEVDDSKGHTFIQFDPAPRRGEPDVTRRTPDYFL

SEQ ID NO: 191176 - protein, 63 aa, Glycine max
  Clone ID: PAT_MRT3847_14650C.1.pep
MDANREQIVVDVGSMVEAVSADDGHASFYSIESLCMRCHENGITRFLLTSIPNFRKIFVSAFE

SEQ ID NO: 191177 - protein, 132 aa, Glycine max
  Clone ID: PAT_MRT3847_14651C.1.pep
FPFFFFFFFFFFFFFFFFFFFFFLKKNPRGVPFFGGFLKLNPNIFTSPPKKKTPPPLVAGGSPKRSSTFAPLNLLVGFPPKNFFGIFRAQKGKPLETPTIKSSHPRVPKVGPPPAPGKLPGGGSHVGQKKIV

SEQ ID NO: 191178 - protein, 69 aa, Glycine max
  Clone ID: PAT_MRT3847_14652C.1.pep
KTPWNIDNFYEKISTKSYFFGKKHAPPLSKRKEKAPLGGAMEHILLTLDMWGGRKLKKQPVSPFKKNEN

SEQ ID NO: 191179 - protein, 301 aa, Glycine max
  Clone ID: PAT_MRT3847_14653C.1.pep
SFSQDGTSQLLNLSGSNSVMSSAAMLPKQITTEPPQLPSAAPQCVLPQVENLGTSQSNVSELAALPPFAGREHSAYHAAADPQSNLLFGINIDPSSLMLQNGMSNLRNIGNVNNSLSLPFSASNCGGASGTDFPLSSNMTTSSCVDESGFLQSSENVDQANTPTGTFVKVHKSGSFGRSLDISKFSSYDELISELARMFGLEGQLEDPKTQRSGWQLVFVDRENDVLLLGDDPWQEFVNNVWYIKILSPLEVQQMGKGLSPSTSAPGNKLSTPANSCDNYVSQQELRSSRNGMASMGSFHY

SEQ ID NO: 191180 - protein, 60 aa, Glycine max
  Clone ID: PAT_MRT3847_14654C.1.pep
YRAVYFVVSNHCRQCLYHRDCLFSCWLSRFHRIILVHQLPLSQILCLPLVTPLLSSSRSR

SEQ ID NO: 191181 - protein, 87 aa, Glycine max
  Clone ID: PAT_MRT3847_14655C.1.pep
SVSPRSRTMSSPIYFTEILVPISHRSSSSSLLNKAGFLSRPTHASLSHFGPVRGISRCTADRELWQVRPSCVGALLCLAVEVFLFTG

SEQ ID NO: 191182 - protein, 160 aa, Glycine max
  Clone ID: PAT_MRT3847_14656C.1.pep
THADISISKSSASYLAKLQLDEVQATIQQVHGIISRCLTAHDKLEMSLHDLSRTGDIQACKATRKSVDSLLKELSKELKQPLAILQSSPQAAQILPKVEELVTKERELQDKLLVKHSTVVDGYEKKSAGREIENRIASQQLKITALRREIDDLMDLIDEI

SEQ ID NO: 191183 - protein, 69 aa, Glycine max
  Clone ID: PAT_MRT3847_14657C.1.pep
RSLKPIYLSIWYRHGALLPKIYPWLLKEPWRIAREGSHPSHSTSHSERMPYLLASLITSQPDHVTPVGT

SEQ ID NO: 191184 - protein, 583 aa, Glycine max
  Clone ID: PAT_MRT3847_14658C.1.pep
MSFILFPILFAFTFLSSPVLSASDLVLAKVDRRIDLTSQIVRITTSLKVQNTGSDVVSEILLSFPENQASNLAYLKATLGDGKGKSKPSSGVGLPVEVVRPKDVPPSLTIYSVSLPKGLGKGDSLTLDVLAVFTHSLQPFPEKINQADIQLLLFQESAHYLSPYAVKVQSLTVKLPDARIESYTKLENAKLQGSELKYGPYENLPPFSYLPIVIHFENNQPFAVAKELVREIEISHWGNVQITEHYSIIHAGSQSKGEFSRLDYQTRQFLRGASAFRRLVAKLPPRAHSVYYRDEIGNISTSSLWGDSKKTELEIEPRYPMFGGWKTAFTIGYGLPLGDFLFGSDGKRFLNISFPIPVKQSEETKLSHLDIVARPVVVLEKNNVVPEHNEHFQVYYKFNSLSMLREPLMLISGFLFLFVACIVYTHADISISKSSASYLAKLQWDEVQATIQQVHGILDRCLTAHDKLEMSLHDLSRTGDTQACKATRKSVDSSLKELSKELKQPLAILQSSPQAAQILPKVEELVTKERELQDKLLVKHSTIVDAYEKKAGREIENRIASQQQKITALRREIDDLMDLIDEI

SEQ ID NO: 191185 - protein, 205 aa, Glycine max
  Clone ID: PAT_MRT3847_1465C.1.pep
TNRWCLKPLFSTHRRAAQKRLHDNIQPKRKNENSMIKVRSAHRLGIELKRWIRQQNGSLQLRSVELLLNHDIATLWNFSLVMSCLTVAALVTYRSNLHGSATSSIRAINGVKNISRVVSQLHVRAFLRVVATLLLIVFLESHVKPCFLQHLFLPYLEISCSCQHWVPTPQQLHVRPFAEKNHPGCCCFRQSKLLISSMVGSLCVF

SEQ ID NO: 191186 - protein, 61 aa, Glycine max
  Clone ID: PAT_MRT3847_14660C.1.pep
YTETGITIKDKLSMCSILMDHFCNHGHDIIYSTRYIIITSMTSKEIQTAVKLVPAAQLDTH

SEQ ID NO: 191187 - protein, 43 aa, Glycine max
  Clone ID: PAT_MRT3847_14661C.1.pep
FLCQINYVQLIQYLSFFFLSSTHFFSCLPPLFFFFVTCLSREY

SEQ ID NO: 191188 - protein, 164 aa, Glycine max
  Clone ID: PAT_MRT3847_14662C.1.pep
GHLAAGSAPRYNSARVLKHFLPILNPGGSSISLTYIASERIIPGYGGGMSSAKAALESDTRVLAFEAGRKRKIRVNTISAGPLRSRAAKAIGFIDMMIDYSSANAPLQKELSAEEVGNTAAFLASPLASAITGTVLYVDNGLNAMGVGVDSPIFKDLDIPKDQH

SEQ ID NO: 191189 - protein, 56 aa, Glycine max
  Clone ID: PAT_MRT3847_14663C.1.pep
VVDGDLLKWTRKFKELLERNLGWEFQQNSAVDGMYFEENDENAPVVEMLDDEAPVV

SEQ ID NO: 191190 - protein, 74 aa, Glycine max
  Clone ID: PAT_MRT3847_14664C.1.pep
KKEPQQEPERKTRNDPRLRLHDRGGGTEQRANAIKETDAAKETKETDGEDPNDKEMNLRGRKKYHNEHRNKGKG

SEQ ID NO: 191191 - protein, 72 aa, Glycine max
  Clone ID: PAT_MRT3847_14665C.1.pep
CSSHTVQTLLNCGQPSVTPLYHHLNKITYSICALSIPLLSFYTPTYYRGVTSSNKTTRWPNAPQFSRTIFVS

SEQ ID NO: 191192 - protein, 128 aa, Glycine max
  unsure (1)..(128): unsure at all Xaa locations
  Clone ID: PAT_MRT3847_14666C.1.pep
HASACKLGELSPAKXFAQIENVEGSSPFDGILQDAXWLLLSRGKMRIEFAPPKVXLFENSVLLXRTTRGTPGATLRVGASMTDSSRPTLARATDVANAALHGSDAIFLGAETLRTLCPIETLSTGGRN

SEQ ID NO: 191193 - protein, 255 aa, Glycine max
  Clone ID: PAT_MRT3847_14667C.1.pep
MGKIMLVLGSLIGLCCFTITTYAFSPSGWTNAHATFYGGSDASGTMGGACGYGNLYATGYGTRTAALSTALFNDGASCGQCYKIICDYKSDSRWCIKGRSVTVTATNFCPPNFALPNNNGGWCNPPLKHFDMAQPAWEKIGIYRGGIVPVLFQRVPCKKHGGVRFSVNGRDYFELVLISNVGGAGSIQSVFIKGSKTGWMAMSRNWGSNWQSNAYLNGQSLSFRVTTTDGETRVFQDIVPASWTFGQTFSSPVQF

SEQ ID NO: 191194 - protein, 486 aa, Glycine max
  unsure (1)..(486): unsure at all Xaa locations
  Clone ID: PAT_MRT3847_14668C.1.pep
MASPRAAENTENSLEKIKRQLASASGRNLLQGPLLKRSETLRKWNERWVILDPTTGRMEYKIRRNEPSVKGTIIFDANSTITISPVNFHGLPKYDGCCFYIGTPQKKDYFLCAETPGAARAWVSTLHATQLVLKAHKEAVNSLSGNGSTKLGTAALECSXRNSTALECSKEIEAAMQISLRNALGMMNNRTTDGPMDDLTIMRVKDEELQNLSRDLRARDSTIKDIADKLSETAEAAEAAASAAYTMDEHRRIACAEIERLNKDSEKQQELFTQKLKESAEKIGGLSKEREQLIRQRDAAIQEANMWRSELAKAREHDVILEAAVVRAEEKVRVAEANAETRIREAVQRESAALKEKEELLAYVNVLKAQLQRQHIDTTQVFEKTESCSDTKHVDPTEENVDKACLSVSRAIPVPAENVVHMATDQVNIQPVGDNEWSDIQATEARIADVREVAPETDGSSLDIPVVNQPGTNHHHEQGANSFHQP

SEQ ID NO: 191195 - protein, 31 aa, Glycine max
  Clone ID: PAT_MRT3847_14669C.1.pep
KRGQFTLVVGGLLVIAYAVPMAQYYAYVSKK

SEQ ID NO: 191196 - protein, 175 aa, Glycine max
  Clone ID: PAT_MRT3847_1466C.1.pep
MGANSMLAEFSHDLDDQISQLMQCKPLSEQQVRGLCEKAKEILTDESNVQPVKSPVTICGDIHGQFHDLAELFRIGGKCPDTNYLFMGDYVDRGYYSVETVSLLVALKVRYPQRITILRGNHESRQITQVYGFYDECLAKYGNANAWMSVGEGGFKQGPDNSSSPKNLCLWFSLS

SEQ ID NO: 191197 - protein, 123 aa, Glycine max
  unsure (1)..(123): unsure at all Xaa locations
  Clone ID: PAT_MRT3847_14670C.1.pep
ICIPDKEDESGPIILHXDSWGLNSSXSVLDYIKSYLIEENNYMDREDIASDVSIADKIWKRLPSXIQSHNIQDHQHKSYYDXGRSVLYFIERLMEEAIQRLRMKELYIVGKRWFKPLEVHNLR

SEQ ID NO: 191198 - protein, 69 aa, Glycine max
  unsure (1)..(69): unsure at all Xaa locations
  Clone ID: PAT_MRT3847_14671C.1.pep
SSXGDRGTRQQLKSVXPIIRHQSPSVLQQFHCXXRGQNAGVSIKNKGYNDTSYVEEHPGGXXIEAPGEY

SEQ ID NO: 191199 - protein, 160 aa, Glycine max
  Clone ID: PAT_MRT3847_14672C.1.pep
MEISSIRGLPDDMTDKASVLGDAIKYLKQLQEKVNALEEEQNMKKNVESVVIVKKCQLSNDVNNSSSEHDGSFDEALPEIEARFCERSVLIRVHCEKSKGVVENTIQGIEKLHLKVINSNTMTFGRCALDITVIAQMDMEFCMGVKDLVRNLRSAFTSFM

SEQ ID NO: 191200 - protein, 52 aa, Glycine max
  Clone ID: PAT_MRT3847_14673C.1.pep
KCKVLLGKKSEIIYYITYTKVYSHHPKMGFGFSTVPSHVVSVPSKSYSFHDF

SEQ ID NO: 191201 - protein, 55 aa, Glycine max
  Clone ID: PAT_MRT3847_14674C.1.pep
GGCVISCIEFCYSPFELAHKFRISLSIPLSHIISHVACSFIQNWRVSIASSLKLK

SEQ ID NO: 191202 - protein, 60 aa, Glycine max
  Clone ID: PAT_MRT3847_14675C.1.pep
AVHAKAPPLEKGRQGYPGPRAPFPSPPKPVSKKIGPLPKKPKTSLFKLPTSPEFRLHNRQ

SEQ ID NO: 191203 - protein, 117 aa, Glycine max
  Clone ID: PAT_MRT3847_14676C.1.pep
AVSPSFISVKVKKSSRVITLYIIFLRASRPSFWRAKTVLPIKNFNRISEKNSSRTCTVTSTAGTKLQPSNKPDCNLPITINEQMLLNPWESEKETLAAANKLERSIECCVCNGFGGG

SEQ ID NO: 191204 - protein, 326 aa, Glycine max
  Clone ID: PAT_MRT3847_14677C.1.pep
MKNVLVRSAARALLGGGGRSYYRQLSTAAIVEQRHQHGGGAFGSFHLRRMSTLPEVKDQHSEEKKNEVNDTSNAVVTSYWGITRPKVRREDGTEWPWNCFMPWDSYHSDVSIDVTKHHTPKSLTDKVAFRAVKFLRVLSDIYFKERYGCHAMMLETIAAVPGMVGGMLLHLKSLRKFQHSGGWIKALLEEAENERMHLMTMVELVKPSWHERLLIFTAQGVFFNAFFVFYLLSPKAAHRFVGYLEEEAVISYTQHLNAIESGKVENVPAPAIAIDYWRLPKDATLKDVVTVIRADEAHHRDVNHFASDIHHQGKELKEAPAPIGYH

SEQ ID NO: 191205 - protein, 141 aa, Glycine max
  Clone ID: PAT_MRT3847_14678C.1.pep
MDEIDVPPFFVCPISLELMKDPVTVSTGITYDRDSIEKWLFAEVKNDTCPVTKQPLLPDLTPNHTLRRLIQAWCTVNASHGVQRIPTPKPPVDKTLIEKLLRNTSASDSPSLQLRSLRTLKSIASESQSNKRCIESAEGRS

SEQ ID NO: 191206 - protein, 114 aa, Glycine max
  unsure (1)..(114): unsure at all Xaa locations
  Clone ID: PAT_MRT3847_14679C.1.pep
GKKNEVNDTSNAVVTSYWXITRPKVRREDGTEWPWNCFMPWDSYHSDVSIDVTKHHTPKSLTDKVXFRAVKFLRVLFDIYFKERYGCHAMMLETISTVPGMVGGMLLHLKSLRK

SEQ ID NO: 191207 - protein, 117 aa, Glycine max
  Clone ID: PAT_MRT3847_1467C.1.pep
MMHVKFSFVITFSCFGTCNNDVAMLHYSKEEAGMKTAKLREEKELLDRKLNADSEAQKNLEENLQQLRNRESELNSQEEQMRARLEKILDNSAKNKVGLENLKKELRVMQDKHRDSK

SEQ ID NO: 191208 - protein, 46 aa, Glycine max
  Clone ID: PAT_MRT3847_14680C.1.pep
KDATLKDVVTVIRADEAHHRDVNHFASDIHHQGKELKEAPAPIGYH

SEQ ID NO: 191209 - protein, 63 aa, Glycine max
  Clone ID: PAT_MRT3847_14681C.1.pep
RANCGGLCKTRCSAHSRPNLCTRACGTCCVRCKCVPPGTSGNRELCGTCYTDMTTHGNKTKCP

SEQ ID NO: 191210 - protein, 86 aa, Glycine max
  Clone ID: PAT_MRT3847_14682C.1.pep
AVSRRRVYALPMRWTSAVRAIRPYRTVCDVYSVGDRVEEWSGRRRRRGRGYSPPRSQKSLPRYLIRPGSRSIIFSRRCKHINQTKG

SEQ ID NO: 191211 - protein, 115 aa, Glycine max
  Clone ID: PAT_MRT3847_14683C.1.pep
MALRELIVMGLLLLVCLAKVSSDVNIEKEQDEEFRFPVDHLIVRGGNRRLMQDIDCGGLCKTRCSAHSRPNVCNRACGTCCVRCKCVPPGTSGNRELCGTCYTDMTTHGNKTKCP

SEQ ID NO: 191212 - protein, 61 aa, Glycine max
  Clone ID: PAT_MRT3847_14684C.1.pep
VKIIGELLPISCISLLFASLTISWRKFKQELPLIYSHFEIITSNVEYIFILKSRLKYRDWK

SEQ ID NO: 191213 - protein, 59 aa, Glycine max
  Clone ID: PAT_MRT3847_14685C.1.pep
NQILRVNIISCLSLSLCSVVHDLLFLLIFLIELPVGPYNLQIFYYFTMCRATRCSSSCS

SEQ ID NO: 191214 - protein, 136 aa, Glycine max
  Clone ID: PAT_MRT3847_14686C.1.pep
MYSIVRNKTINVKYILESEFQTFYHQILLVGEKPPAFFVWVGNDSVVTQKILLVEALVGKTLNLTTLDGRELTIQVTEVVKPKYVLVVPNEGMPISKEPGKKGNLRIKFDVLFPSRLTSQQKYELKRILSNSTADD

SEQ ID NO: 191215 - protein, 110 aa, Glycine max
  Clone ID: PAT_MRT3847_14687C.1.pep
MSRKPKMGDRVDALETQMGNVSTTLQELALQVQQQSLILAELSKQIGKRRETQKEEASAGDSAQSESRLAGKKVKGSVEEFVEAFELLSSQVGRLHEEQYLGYFMSGLKP

SEQ ID NO: 191216 - protein, 117 aa, Glycine max
  Clone ID: PAT_MRT3847_14688C.1.pep
MAPRVFLVLGMLLMVCLVKVSSDPKREEEILEEELHFPDNEPLIVRDGNRRLMQDIDCGGLCKTRCSAHSRPNLCTRACGTCCVRCKCVPPGTSGNRELCGTCYTDMTTHGNKTKCP

SEQ ID NO: 191217 - protein, 136 aa, Glycine max
  unsure (1)..(136): unsure at all Xaa locations
  Clone ID: PAT_MRT3847_14689C.1.pep
TLIQNSTISNLLRVAPWKQGSLMGKIAMSGTATHKKRHWASIEHRCLTNICTTEPSDAXTWTKSEPHSLELIFTIEVWLPNDGCETWRSXSANQTXGPMSLLIDNPIQDTVSDFRSGMTQEFETAGNSLIPAFFVP

SEQ ID NO: 191218 - protein, 71 aa, Glycine max
  Clone ID: PAT_MRT3847_1468C.1.pep
LTAGLSSFFFFFQTSSHHTILIHSRRPYSSVWTMDSSLHADSLLCHTGRRILLISYSSHQLMTISLYTKGA

SEQ ID NO: 191219 - protein, 70 aa, Glycine max
  Clone ID: PAT_MRT3847_14690C.1.pep
WRRLLLRHEVGGGGPLTHVGPCSSCTFYACKWACMRYRSHQKERVVQFKEEGKSRRSSSAEEGSNDRTRG

SEQ ID NO: 191220 - protein, 78 aa, Glycine max
  Clone ID: PAT_MRT3847_14691C.1.pep
FLIYLFGGGVINDYDYADCGGLCKTRCSAHSRPNVCNRACGTCCVRCKCVPPGTSGNRELCGTCYTDMITHGNKTKCP

SEQ ID NO: 191221 - protein, 52 aa, Glycine max
  Clone ID: PAT_MRT3847_14692C.1.pep
NMENINMDKHPKLYNSKPRNSTPYFLYSTSIIFHLTEPNLSKANSIFPIIPA

SEQ ID NO: 191222 - protein, 63 aa, Glycine max
  Clone ID: PAT_MRT3847_14693C.1.pep
MAELSLGILIDIVDEEWMRDTLPDDDLPLPPTLVVRTDDTEDSNQETQQVNLDAWHDLAFGQE

SEQ ID NO: 191223 - protein, 62 aa, Glycine max
  unsure (1)..(62): unsure at all Xaa locations
  Clone ID: PAT_MRT3847_14694C.1.pep
SVSATQLRVAYSMIXAVCDQLRECFSFPSEIVLVEVAGFRPTLXVEEKELLFKDNPPGILCS

SEQ ID NO: 191224 - protein, 254 aa, Glycine max
  Clone ID: PAT_MRT3847_14695C.1.pep
MDAVLQTRGLLSLPANPVNRISLFNPSQGLKHRFFSPKPKNLSGSSLSSNGFPKLSPRPNNVFAQRDQNKNLFLCRAEAAAASFGEPESEKQKFLGIEVATLKKIVPLGMMFFCILFNYTILRDTKDVLVVTARGSSAEIIPFLKTWVNLPMAIGFMLLYTKLANVLSKQALFYSIILPFIAFFGAFGFVLYPLSNYIHPEAFADKLLNILGPRFLGPLAIMRIWSFCLVYVMAELWGSVVISVLFWGVGNQIT

SEQ ID NO: 191225 - protein, 45 aa, Glycine max
  unsure (1)..(45): unsure at all Xaa locations
  Clone ID: PAT_MRT3847_14696C.1.pep
WIEGHFLVLNEVVEGCRPPPRNEPPLYDCLXVENIYDEMNEIMFW

SEQ ID NO: 191226 - protein, 37 aa, Glycine max
  Clone ID: PAT_MRT3847_14697C.1.pep
MADDDDIQPLVCDNGTGLAKASFAGDDAPRAVFPSIL

SEQ ID NO: 191227 - protein, 97 aa, Glycine max
  Clone ID: PAT_MRT3847_14698C.1.pep
ICCPTQPMLFDFSSQPQVKSPSHQTSISRSLRGHTCKIPLVQSQLKSQMCAIMKQPLQYGCGTRVLPQIEGTHSDGLVALSGPLVLSWTQSHGTQPP

SEQ ID NO: 191228 - protein, 96 aa, Glycine max
  Clone ID: PAT_MRT3847_14699C.1.pep
GTPDWGHLLQVQTLTAQQHNHGSEAALAPTTCTIKICRAVHCSTPELQRLSPLTDTRPMNTHKTSRYNKAPEDDVESSACLNMLYGLLVTVQRHPP

SEQ ID NO: 191229 - protein, 58 aa, Glycine max
  unsure (1)..(58): unsure at all Xaa locations
  Clone ID: PAT_MRT3847_1469C.1.pep
XXXXXXXXXEVFXIVPFHTXSFXPRLLLXSLIVIHGXSTXLHWXVKPSXEVWPFGXNX

SEQ ID NO: 191230 - protein, 65 aa, Glycine max
  Clone ID: PAT_MRT3847_146C.1.pep
KCGILCMIWNLCFLSFVRLFNSIKEIRQSILNKRALYDVPLDICSESKSILSVDDLIASIADQCY

SEQ ID NO: 191231 - protein, 57 aa, Glycine max
  Clone ID: PAT_MRT3847_14700C.1.pep
TTELVYETRSGTYQGIEEPKCVNYRCKTKTHVTRVGVTHGDRGGYNTSTLTSCVMRD

SEQ ID NO: 191232 - protein, 230 aa, Glycine max
  Clone ID: PAT_MRT3847_14701C.1.pep
MADNEQPNNEEASPLLHQPHPQPKSEPPTPPETPEFLLGWTADGLPLAHASVVGQPMGRAPWNSSICACLGQNDHFCSSDLEVCLLGSVAPCVLYGSNVERLGSARGTFANHCLPYSGMYIIGNSCFGWNCLAPWFSYPSRTAIRRRFNLEGSCEALNRSCGCCGSILEDEVQREHCESACDLATHVFCHVCALCQEGRELRRRLPHPGFNAQPVLVMIPPGEQTMGREA

SEQ ID NO: 191233 - protein, 110 aa, Glycine max
  Clone ID: PAT_MRT3847_14702C.1.pep
MADNKQPNHEEASPLLHQSQPKFEPPTPPETPEFLLGWTADGLPLGHGSVVGQPMGRAPWNSSICACLGQTDHFCSSDLEVCLLGSVAPCVLYGSNVERLESAPGTFANH

SEQ ID NO: 191234 - protein, 123 aa, Glycine max
  Clone ID: PAT_MRT3847_14703C.1.pep
IYSRIANIALSSLVIIPVHKTHEFPLEKSYIISNLKTNYSVLPMVLKNGLQPQLQLQRQGLLLTATAVAATSTAISPNIKDRDKTATGINLKPWYSLQPKTSQHLRLLASPLTQPIFSTKSIS

SEQ ID NO: 191235 - protein, 55 aa, Glycine max
  Clone ID: PAT_MRT3847_14704C.1.pep
KLGRPEVPVPNLFPGPLSHFAAAPLFYFFCQKNRFRFANSNVFLNIKTKLSNKYL

SEQ ID NO: 191236 - protein, 491 aa, Glycine max
  Clone ID: PAT_MRT3847_14705C.1.pep
LVGRFGPMEDRILEWSPEKRSGTCNRKEDFARLVWSRRFILIFHELSMTGAPLSMMELATELLSCGATVSAVVLSRKGGLMSELARRRIKVLEDKSDLSFKTAMKADLVIAGSAVCASWIEQYIDHFPAGASQVAWWIMENRREYFDRSKDILHRVKMLVFLSESQSKQWQKWCEEESIKLRSLPEIVALSVNEELAFVAGIPSTLNTPSFSTEKMVEKKQLLRESVRKEMGLTDNDMLVISLSSINPGKGQLLLLESVSSVLEQGQLQDDKKMKKVSNIKEGLSSLTRKHRIRKLLPLMSNGKVASNSISSNSLSRRKQVLPNGKGTIQQSLKLLIGSVRSKSNKADYVKSLLSFLEQHPNASTSIFWTPATTRVASLYSAADVYVINSQGLGETFGRVTIEAMAFGLPVLGTDAGGTQEIVEHNVTGLLHPVGHPGNLVLAQNLRFLLKNQLARKQMGVEGRKKVQKMYLKQHMYKNFVEVITRCMRSK

SEQ ID NO: 191237 - protein, 108 aa, Glycine max
  Clone ID: PAT_MRT3847_14706C.1.pep
MNLKRMFYNLRLYSIQFLYIALIMKTDIHRRKQVLPNDKGTIQQSLKLLIGSVRSKSNKADYVKSLLSFLEQHPNTSTSIFWTPATTRVASLYSAADVYVINSQVSLD

SEQ ID NO: 191238 - protein, 59 aa, Glycine max
  Clone ID: PAT_MRT3847_14707C.1.pep
NASLDQQNYLLAKNNIQNDSQIKKKQKLQEIACPSKEAKKYCEASPEPTFNCCESTTKH

SEQ ID NO: 191239 - protein, 43 aa, Glycine max
  Clone ID: PAT_MRT3847_14708C.1.pep
PATVVDPPPQKINLISCEPMVHISDIKLIRTDGTLDLSQNGRE

SEQ ID NO: 191240 - protein, 52 aa, Glycine max
  Clone ID: PAT_MRT3847_14709C.1.pep
VIFLFRLNFASMNKCGQLQQLSKRFPRLPNSRSTSPNLKMGHEVTIPIKEKP

SEQ ID NO: 191241 - protein, 35 aa, Glycine max
  Clone ID: PAT_MRT3847_1470C.1.pep
WPPFQNLFNTSPLRKFLKINYFERGILAIFFLLKI

SEQ ID NO: 191242 - protein, 69 aa, Glycine max
  Clone ID: PAT_MRT3847_14710C.1.pep
MLSVKAEFESFVELYRGVSHGWPLRSNDHDKATVKSAKEAHLSHVDLVCQARQVKIVFSSKRCLSLICS

SEQ ID NO: 191243 - protein, 338 aa, Glycine max
  Clone ID: PAT_MRT3847_14711C.1.pep
CRPRRIPVDPRVRYEGVEEAYYAYRVRDRLRKEVLVPLRKVLELPEVFIGANRWDLIPYNRVASVAMKFYKEKFLKHDKERFEAYLEDVKSGKSTIAAGALLPHQIIGSLNDGDGGDVAELQWKRIVDDLLKKGKMKNCLAVCDVSGSMSGVPMEVSVALGLLVSELCEEPWKGKVVTFSENPQLHLIEGDDLGSKTEFIRNMEWGMNTDFQKVFDLLLEVAVSGNLKPDQMIKRLFVFSDMEFDQASANPWETDYQAITRKFGEKGFGDAVPQIVFWNLRDSKATPVPATQKGVALLSGFSKNLLTLFLDKEGELSPEEAMEAAISGPEYQKLVVLD

SEQ ID NO: 191244 - protein, 87 aa, Glycine max
  Clone ID: PAT_MRT3847_14712C.1.pep
MLPLSTISRGWKRHRGRKLGGACVTVLHKQRESGHEPYLDFGVKLLMRLTTAWTAIILSIERLLTPKLPRKTSILFLCTTWHHIPLC

SEQ ID NO: 191245 - protein, 75 aa, Glycine max
  Clone ID: PAT_MRT3847_14713C.1.pep
RIRYLPFGLSTPWTWPFGMQSPIPFRVPVRSLRVVFGPKRFPSPGFGFQLKGPLVSHKFGWCPFPQGDFFSKLGF

SEQ ID NO: 191246 - protein, 164 aa, Glycine max
  unsure (1)..(164): unsure at all Xaa locations
  Clone ID: PAT_MRT3847_14714C.1.pep
MNNKDGKPVIQPDKSRIVPMAIIFVVLCGSSFYMGIIFCSEKDRFVAMYNQNSIESPKESSISSLQIKYTSFPECSADYQDYTPCTDPRRWRKYGSYRLVLLERHCPPKFERKECLVPPPDGYKPPIRWPKSRDECWYGNXPYDWITKQKXNQHWFEKEGEKFI

SEQ ID NO: 191247 - protein, 200 aa, Glycine max
  Clone ID: PAT_MRT3847_14715C.1.pep
MNNKDGKPVTQPDKSRIVSMAIIFVVLCGFSFYMGIIFCSEKDRFVTMYNQNSIESPKESSISSLQIKYTSFPECSADYQDYTPCTDPRRWRKYGSYRLKLLERHCPPKFERKECLVPPPDGYKPPIRWPKSRDECWYRNVPYDWINKQKSNQHWLKKEGEKFIFPGGGTMFPNGVGKYVNLMEDLIPEMKDGSIRTGID

SEQ ID NO: 191248 - protein, 247 aa, Glycine max
  Clone ID: PAT_MRT3847_14716C.1.pep
MAGIAFGSFNDSVSFASIKAYIAEFISTLLFVFAGVGSAIAYAKLTSDAALDPTGLVAVAICHGFALFVAVSVGANISGGHVNPAVTFGLALGGHITILTGLFYWIAQLLGSIVASLLLKFVTGYDTPIHSVAAGIGAGEGVVTEIIITFGLVYTVYATAADPKKGSLGTIAPIAIGFIVGANILAAGPFSGGSMNPARSFGPAVVSGDFHDNWIYWVGPLIGGGLAGLIYTYAFIPTNHAPLATEF

SEQ ID NO: 191249 - protein, 58 aa, Glycine max
  Clone ID: PAT_MRT3847_14717C.1.pep
HFLSPPEVMFFFFFQHSAYFLVGLKMLQLLSVSFSSNFFRLGILYLPTLIKKKVNHLI

SEQ ID NO: 191250 - protein, 119 aa, Glycine max
  unsure (1)..(119): unsure at all Xaa locations
  Clone ID: PAT_MRT3847_14718C.1.pep
IHSVAAGVGAGXGVVTEIIITFGLVYPVYAPAADPKKGSLGTIAPIAIGFIVGANILAAGPFSGGSMNPARSFGPAVVSGDFHDNWIYWVGPLIGGGLAGLIYTYAFIPTQHAPLATDF

SEQ ID NO: 191251 - protein, 74 aa, Glycine max
  Clone ID: PAT_MRT3847_14719C.1.pep
MARDSCLTRVTAGAAMGGAVGGAVGAVYGTYEAIRYKVPGLLKIRHIGQTTLGSAAIFGLFLGAGSLIHCGKSY

SEQ ID NO: 191252 - protein, 34 aa, Glycine max
  Clone ID: PAT_MRT3847_1471C.1.pep
SIKGHEAPTRLGMLLQLEPILTYGRTCIFHNITR

SEQ ID NO: 191253 - protein, 165 aa, Glycine max
  Clone ID: PAT_MRT3847_14720C.1.pep
LARKLDTCGVWRTWLGDATYANFAPFLSSPSAWDSFITYTTHIPLQLRVRALLFDKATVFLSLNPNPNPNPISYLQRLNPIYLQLHADDVYFTLDADSKNQSKPSSSQQQNTPLTQCASHADFLWQGTVASLVSPPAPLWAALSAAPSVLCMEHMKLLGIRCLDY

SEQ ID NO: 191254 - protein, 256 aa, Glycine max
  Clone ID: PAT_MRT3847_14721C.1.pep
MSSADTVNASSAESVKEPVIGSSLEAKQDDTEIKSQVDAMWEQMNKGVSNKTLNRFTSKPNSAPKKTAKKTSSNWMSYLALAPKATESLGQGASKNGPGILQSSTSDEAKKLAAAALAAVKDDAAMAASSRGKLVITEVRDFAGQEIEVKKLVDSDSKEAMERAKAPPPSAVDTVLEQIKKKQKLSVLDKTKKDWGEFKEEKRLEEELDAYKKSSNQYLDKVSFLQRADYREFERERDARLALQSRKRPDNMQEDD

SEQ ID NO: 191255 - protein, 75 aa, Glycine max
  unsure (1)..(75): unsure at all Xaa locations
  Clone ID: PAT_MRT3847_14722C.1.pep
MSGLDDQIPTAFDPFADANADDSRAGSKEGVHIRVQHRNGGKSLPTVLGSGKEFSYCSIRNDXLNKENCCYGTDG

SEQ ID NO: 191256 - protein, 66 aa, Glycine max
  Clone ID: PAT_MRT3847_14723C.1.pep
KKNLVQKNQPLPPRVITLFYRDHKFPGPNLCPPLLSFWAFFALNQLKPFMGLSTFETPPRDNPPNF

SEQ ID NO: 191257 - protein, 144 aa, Glycine max
  Clone ID: PAT_MRT3847_14724C.1.pep
MSSADTFNASSAESVKEPVIGSSLEVKQDDAEIKAQVDAMWEQMNKGVSNKTLNKFTSKPNSTSKKTAKKSSSNWMSYLGLAPTATESLGQGASKNGPGVLQSSTSDEVKKLAAAALAAVKDDAAIAASSRGKLVITEVRDFAG

SEQ ID NO: 191258 - protein, 48 aa, Glycine max
  Clone ID: PAT_MRT3847_14725C.1.pep
GVSPQRKAITLNRSDPIYAWATSLLSLFHVFSGKLVANRFLPINGPLN

SEQ ID NO: 191259 - protein, 92 aa, Glycine max
  Clone ID: PAT_MRT3847_14726C.1.pep
GNYGILQWCVWNTGKERARRENMNSKAFYFVTERIKMERKGIEKLSFRNKIQGPVYFKRIFNCFIFLFSLLITKILPCFTLFLIFKNLYKNH

SEQ ID NO: 191260 - protein, 91 aa, Glycine max
  Clone ID: PAT_MRT3847_14727C.1.pep
NWASEIHISKGYQIKKTSYHLVDYLMGPPFLGYKLDGKSTKFCLPPWKIQFQKLNFTHEKGQTPGVAFVNELFIFNNFSTKHGINGSFYEA

SEQ ID NO: 191261 - protein, 73 aa, Glycine max
  Clone ID: PAT_MRT3847_14728C.1.pep
LRMINGITHTILATCMGLRTPSLYCKPQKSPTNRVELERDPTKGMNCNSFTYRLQVLTTLTNRGGTDQHPLHI

SEQ ID NO: 191262 - protein, 74 aa, Glycine max
  Clone ID: PAT_MRT3847_14729C.1.pep
DQLNKYTQSPIHQNPKKHPFDSFPMATLKVAFLAAFPCMVLLIQPMENAPTTSGKVTITRPNCTGYLKKEGTPS

SEQ ID NO: 191263 - protein, 32 aa, Glycine max
  Clone ID: PAT_MRT3847_1472C.1.pep
KKLSIRFLFIAFYNLTIGSGANNLVIHLVTSF

SEQ ID NO: 191264 - protein, 165 aa, Glycine max
  Clone ID: PAT_MRT3847_14730C.1.pep
LEPIRLEISFESNSLVAKAKAIVAPPSSLVSVPDLNVMPIADSDLVYGGRSKRVSGTDGDYSGLQLQQPVRMSSVVVVDLNRSPCKGNDSLGSRKEVMGSKKKNVDDGSSRSSAREADGSRGKKEVPNSVKVGNVGSGKLTLKVVKKKKIVKRVVKIGTASSKSS

SEQ ID NO: 191265 - protein, 61 aa, Glycine max
  Clone ID: PAT_MRT3847_14731C.1.pep
QFLVGASIPEYILQLPNEVMSSPMGALICELLHFHVTYLHLHYCIFFIFTLCSFSFIFNKL

SEQ ID NO: 191266 - protein, 75 aa, Glycine max
  Clone ID: PAT_MRT3847_14732C.1.pep
SARGESFAVFVKEEEIPNLRNILLSISEERYLEMHKRAKKVQEHFLWHAEPVKYDLFHMLLHSIWYNRLFHISRT

SEQ ID NO: 191267 - protein, 70 aa, Glycine max
  unsure (1)..(70): unsure at all Xaa locations
  Clone ID: PAT_MRT3847_14733C.1.pep
PIPTLLHHAIDHLIQSKLIPQYKMPNPYIINXFKRTXFSHPFLKPPHFDQPLSTLLISQSTIAFSRIPTS

SEQ ID NO: 191268 - protein, 81 aa, Glycine max
  Clone ID: PAT_MRT3847_14734C.1.pep
GSLLLPEARSKKLLIGIRIAPPFQIIFLAHAISRAHFTFSQEHTGGEPPHAPLLTEKGAYLIIPGGHPGPCDSRGERGLKT

SEQ ID NO: 191269 - protein, 76 aa, Glycine max
  Clone ID: PAT_MRT3847_14735C.1.pep
HASSKGSNGNMELVEHSGSKKKRCPSEQVQANYLSKHFLKGRRSQAFPTYGNRSCSSLSDNVYIFYAQIDQAIFSI

SEQ ID NO: 191270 - protein, 67 aa, Glycine max
  Clone ID: PAT_MRT3847_14736C.1.pep
QERKLNATNLYSGMPIACRSDPRFSKHFSTYFQQEEGLIKSFRLSYNHNLASLGVSLVFYQVGIRIC

SEQ ID NO: 191271 - protein, 32 aa, Glycine max
  Clone ID: PAT_MRT3847_14737C.1.pep
FFFLCKNTRTPKLKIQTTIYVEFHQFASKYPS

SEQ ID NO: 191272 - protein, 112 aa, Glycine max
  Clone ID: PAT_MRT3847_14738C.1.pep
HASGDAYTHMWVRLVFADTTFTVFLVNSTMRDHAQEAPSACTVESPTYHGDTFYTTKRSDLLLLLEGLLRHHLHIQIPITFLHHLLDLDEEAEVATEKVRPAHSVKYGQEMV

SEQ ID NO: 191273 - protein, 43 aa, Glycine max
  Clone ID: PAT_MRT3847_14739C.1.pep
GEILAKYFKRLLPKGFAFSLAEKKKFSIVPSLKKLKVLQKVLL

SEQ ID NO: 191274 - protein, 112 aa, Glycine max
  Clone ID: PAT_MRT3847_1473C.1.pep
WKRCIEDPKEYPRDRKSMTCKGRLNKRRQQYEMPFRKDLKSNGVGSIIAGCKNRVMNLPVFKTSYQPFGGDVIMYQGSLLLGGRQLGSCVNTPVRRQGRIPAFGASVVELGG

SEQ ID NO: 191275 - protein, 197 aa, Glycine max
  Clone ID: PAT_MRT3847_14740C.1.pep
MGTEGYTYMGRSLTELRINDDSSSSAFSDCNSDRSGEFATASSQTRRFLIACATENSDDLIRQLVSDLHSSSIDYQKQAAMEIRLLAKNKPENRIKIAKAGAIKPLISLILSPDPQLQEYGVTAILNLSLCDENKEVIASSGAIKPLVRALGAGTPTAKENAACALLRLSQVEESKAAIGRSGAIPLLESLLESGGF

SEQ ID NO: 191276 - protein, 352 aa, Glycine max
  Clone ID: PAT_MRT3847_14741C.1.pep
MGTEGYTYMGRSLSELRINDDSSSSAFSDCNSDRSGEFATASSQTRRFLIACATENSDDLIRQLVADLHSSSIDDQKQAAMEIRLLAKNKPENRIKIAKAGAIKPLISLISSPDLQLQEYGVTAILNLSLCDENKEVIASSGAIKPLVRALNSGTATAKENAACALLRLSQVEENKAAIGRSGAIPLLVSLLESGGFRAKKDASTALYSLCTVKENKIRAVKAGIMKVLVELMADFESNMVDKSAYVVSVLVAVPEARVALVEEGGVPVLVEIVEVGTQRQKEIAVVILLQVCEDSVTYRTMVAREGAIPPLVALSQSGTNRAKQKAEKLIELLRQPRSGNGAARSTSEVVA

SEQ ID NO: 191277 - protein, 84 aa, Glycine max
  Clone ID: PAT_MRT3847_14742C.1.pep
MIDLSIKRYVKYIHIKLQLFCIKSSCSPTFLHNCIKLLVSKFFKYCGVPPYPRKSLQKDRKSLRTIFRFKASNTFDLSIDWLSS

SEQ ID NO: 191278 - protein, 104 aa, Glycine max
  Clone ID: PAT_MRT3847_14743C.1.pep
IATTQILYTPSYNGRLTLGSAYRRDANGGLGLMVLIFKGRVCIATCLPHLLVGKHMKIEILHILVLCDFYRLSMENVLSVMNCNCRCYTTNKVCVLQHSMPKYK

SEQ ID NO: 191279 - protein, 90 aa, Glycine max
  Clone ID: PAT_MRT3847_14744C.1.pep
PGKIPTSTYVYPLIMLRLLLLLRHPPPPPLTSHLPSTPPHRPPHIIRSTPEPFHRNHPQQDASKHVHSNRLKRGTLLKTHSHILFKEQGL

SEQ ID NO: 191280 - protein, 55 aa, Glycine max
  Clone ID: PAT_MRT3847_14745C.1.pep
GQIALRIIKLSLYCSSGPCRKRTIKKPNNKKTGPPTSQTHINKDKKYSCTMTLIS

SEQ ID NO: 191281 - protein, 64 aa, Glycine max
  unsure (1)..(64): unsure at all Xaa locations
  Clone ID: PAT_MRT3847_14746C.1.pep
PFYLAWTFCTTYCINVFSIHXRGCLFENGGGGLNYYLSSANFFCCLNGIIARALMILLQDYDYL

SEQ ID NO: 191282 - protein, 82 aa, Glycine max
  Clone ID: PAT_MRT3847_14747C.1.pep
YPEFVVSFKVSSDAAGHFYGSEVSECSAGKYPLLPAAGPETHALANCNSWTTAMNHHMLHQLTGIPSDTIPGAHCRYRRAGS

SEQ ID NO: 191283 - protein, 385 aa, Glycine max
  Clone ID: PAT_MRT3847_14748C.1.pep
MFSWLARIVSACLRPVRRYARMSKDGDVDDVSTIGDALVWGKDLEKHSCGEFSYAVVQANEVIEDHSQVETGSDAVFVGVYDGHGGAEASRFINDHLFLNLIRVAQENGSMSEDIIRSAVSATEDGFLTLVRRSYGIKPLIAAMGSCCLVGVVWKGTLYIANLGDSRAVIGSVGRSNKIIAEQLTKEHNASKEEVRRELRSLHPEDSQIVVMKQGTWRIKGIIQVSRSIGDAYLKRPEFSFDPSFPRFHLPEPIRRPVLTAEPSICSRVLKPNDKFIIFASDGLWEHLTNQEAAEIVHNNPRIGIARRLLKAALNEAARKREMRYKDLQKIGKGIRRFFHDDITVVVVFIDHELRGKNVTVPDLSIKGFIDTVGPSNFRNLRGLE

SEQ ID NO: 191284 - protein, 195 aa, Glycine max
  Clone ID: PAT_MRT3847_14749C.1.pep
MAPENPSTPDPESPTSPSVGFNTDQLPHTHTSHASQDDEASVDPDIVRDDIEEQPEEEEEDGEDLYNDNFLDDYKRMDEADQFESFGLDDSLEDDRDFDQIMQDRRAAEVELEARDGRASNRNKLPQLLHDQDTDDDNHRSSKRARADFRPSVASDDDFDGMQSSPGRSQRHSREDILMTDQTEDDRDDDDFDDG

SEQ ID NO: 191285 - protein, 58 aa, Glycine max
  Clone ID: PAT_MRT3847_1474C.1.pep
SPRAPRCCSPPPGAGKGLGCKSCPPNPKGFSRGLLKIIQGEFKRESFKWGKLGPCWRV

SEQ ID NO: 191286 - protein, 54 aa, Glycine max
  Clone ID: PAT_MRT3847_14750C.1.pep
YIYERLPCPYTPHHKSKPLDNSSRARNVPFILRVLVSHSPKKGRHNTSYIILKF

SEQ ID NO: 191287 - protein, 86 aa, Glycine max
  Clone ID: PAT_MRT3847_14751C.1.pep
PLVWSFGGGKQILLKTLRGKNITPSGESFNPIVNVEAKFQAKEGFPPDHQRFFFVGKQLKDERPLSDYNIQKESPLPLVPGSRGGF

SEQ ID NO: 191288 - protein, 110 aa, Glycine max
  unsure (1)..(110): unsure at all Xaa locations
  Clone ID: PAT_MRT3847_14752C.1.pep
RGRPTPRLHSLCAVPWGAWERQIFLKTLTGKTITLEGGSADTIDNVKGKIQDKGGVPPGQQRAHLPRKEXEDXPTLXDYNIQKEATLHLVLRVPGGVRIFXKTLTGETIT

SEQ ID NO: 191289 - protein, 46 aa, Glycine max
  Clone ID: PAT_MRT3847_14753C.1.pep
DYTYYCSKRGKCINSWVGWECHFWQRRVSSSHQSTSDVGRQFTLRT

SEQ ID NO: 191290 - protein, 60 aa, Glycine max
  Clone ID: PAT_MRT3847_14754C.1.pep
PAFRLFFFFPILIYFLWSFVGHMDSLNAFFFSFKLFTCMPIAPIGNNTYQIFLIEFHLSL

SEQ ID NO: 191291 - protein, 194 aa, Glycine max
  Clone ID: PAT_MRT3847_14755C.1.pep
PRRLLSLLSKGVEDNANQLGISDKSINYTNDLKQNRVRLLEMEEEARKEIPLDMYLILGVEPSVSISEIKKAYRKAALRHHPDKAGQSLTKNDNGDDQIWKVIAEEVHGDVDQLFKIIGEAYAVLSDPAKRARYDAEEEMRNSQKRRHGPIGKNSVDAQYYPFEQSNRRQWREVNRSYGNSSFRGYEPGRSSRK

SEQ ID NO: 191292 - protein, 81 aa, Glycine max
  unsure (1)..(81): unsure at all Xaa locations
  Clone ID: PAT_MRT3847_14756C.1.pep
FPRAKSLSMEMHAFEMFPLRMNTGYGARTLEVKCAIWKLAVEAHNIFGFETIPEXCIEPTKEYIHGXQYRLDSKTVYQQAY

SEQ ID NO: 191293 - protein, 98 aa, Glycine max
  Clone ID: PAT_MRT3847_14757C.1.pep
PYCSTCLYSSGSAINPSYLPYNCLLHHHVHHHQICPLHHHLILHHHSHLHLPPHQLQHLPRQQQLQHLTTNHQVAHGLLHLKLHLPFQICLHHVHQPV

SEQ ID NO: 191294 - protein, 45 aa, Glycine max
  Clone ID: PAT_MRT3847_14758C.1.pep
RRVDKLKTAVIKIIELSMLTQINGPDCVMYGFVKELFCKLKSGNN

SEQ ID NO: 191295 - protein, 72 aa, Glycine max
  Clone ID: PAT_MRT3847_14759C.1.pep
MLSHVFYRDATGVFKQTGKEPFSEFMKTAKKFTILADSNHKNSKRVWIPGISKAEHGLETASNKTGPFGKFA

SEQ ID NO: 191296 - protein, 130 aa, Glycine max
  unsure (1)..(130): unsure at all Xaa locations
  Clone ID: PAT_MRT3847_1475C.1.pep
ITSVWTTAGERLHGTEHEGXDPFLGGIEKYAHSHXPLDEEIMSKVAHYMAREWIDCFDHEDSLSEAALRAALTARGATCCMERMRFATSAGCTNVLSRITDARGXRRSVTREGEKMTSVAGTSDGEAYNM

SEQ ID NO: 191297 - protein, 57 aa, Glycine max
  Clone ID: PAT_MRT3847_14760C.1.pep
SPSTCSAQPPFVLFFFFFFFFFFFFWFFFVFKAEKFLFHFLMFGKENGIQVKYPQQA

SEQ ID NO: 191298 - protein, 38 aa, Glycine max
  Clone ID: PAT_MRT3847_14761C.1.pep
TMTNFFHVMLWEGRQRVCWCLSIYKNPRFALRRKMCHD

SEQ ID NO: 191299 - protein, 40 aa, Glycine max
  Clone ID: PAT_MRT3847_14762C.1.pep
RLKHYREWVILVLYKKKLCKYVNNHEKCNLFQRYVYIFVF

SEQ ID NO: 191300 - protein, 93 aa, Glycine max
  Clone ID: PAT_MRT3847_14763C.1.pep
SSQANICDMGIMMNKARVLVVLVILIASSVAEKPSVVEARTLSLTSSHQGYSKFFATLGLVCKCCDGVGGGACTSTWTESCSNLQCSPWKSHS

SEQ ID NO: 191301 - protein, 68 aa, Glycine max
  Clone ID: PAT_MRT3847_14764C.1.pep
YDIRQMRYISRMKLLGLYRLQRGPILNELFQCKCMAAYLTLSNHDHIACHIYQKKEHFRQMGQKRSQI

SEQ ID NO: 191302 - protein, 96 aa, Glycine max
  unsure (1)..(96): unsure at all Xaa locations
  Clone ID: PAT_MRT3847_14765C.1.pep
LASNWLPMTPSLLNGPRTFSPIWPIAPSGLNCFRIAPAELITLGFGLGIALVSLXAPSLSAIPGVLSVMLFGVDWLQVPGPSCFGGARWIWALVFG

SEQ ID NO: 191303 - protein, 49 aa, Glycine max
  unsure (1)..(49): unsure at all Xaa locations
  Clone ID: PAT_MRT3847_14766C.1.pep
SQFSTPGTXVYLSLYLQSWTGGXITXXCGKGYWXHFXVAPPHINIITXW

SEQ ID NO: 191304 - protein, 77 aa, Glycine max
  Clone ID: PAT_MRT3847_14767C.1.pep
VGPVGDVALVLKEVSVEMHTAMVQLPPFRILGPSPPWGANEVFLNPFDNSPSLFVKFGVLDLGLKTGKKPWELDFLN

SEQ ID NO: 191305 - protein, 41 aa, Glycine max
  Clone ID: PAT_MRT3847_14768C.1.pep
FFFFFLSNVHAFLIFLNVKYISLSIIYMLNIRHISRESISA

SEQ ID NO: 191306 - protein, 177 aa, Glycine max
  Clone ID: PAT_MRT3847_14769C.1.pep
MSCFRTAFRRRLRPDTPLLGWQNTFVTRSRCDILRSFATSPARAARPSSALLQPRWLNAKNGHDDPENKESEQEESEEGEDKDNEHTNEPAESSSSSSRSQSASSSTPTQNSSSSSTPPPADSPPSFSQPGSIAKQSVPEVYPQVLALPIARRPLFPGFYKAVVVRNPEVVAAIKEM

SEQ ID NO: 191307 - protein, 41 aa, Glycine max
  unsure (1)..(41): unsure at all Xaa locations
  Clone ID: PAT_MRT3847_1476C.1.pep
LRKXITTPIIFRHSKNNNIYLERVHCHLAPRAGGERGESVS

SEQ ID NO: 191308 - protein, 31 aa, Glycine max
  Clone ID: PAT_MRT3847_14770C.1.pep
MREYWRVIKMGISRDSMHNRRATRGKKKAWR

SEQ ID NO: 191309 - protein, 380 aa, Glycine max
  Clone ID: PAT_MRT3847_14771C.1.pep
MVYWAPFVKELAGIVARGRDNSISCYPVVETIHRDNICHIVKTPPNMKWKTRELASEVALNAVNSLEGAGVFAVELFLTKDGQILLNEVAPRPHNSGHHTIESCYTSQYEQHLRAVVGLPLGDPSLKTPAAIMYNILGEEEGGLGFQLAHQLIKRALTIPGATVHWYDKPEMRKQRKMGHITIVGPSLSNIESNLAVLVEGKELDGKTAVAPHVGIIMGSDSDLPVMKSAAEILEMFGVPHEVRIVSAHRTPELMFSYASSAHERGIQVIIAGAGGAAHLPGMVAALTPLPVIGVPVRASTLDGIDSLLSIVQMPRGVPVATVAVNNATNAGLLAVRMLGVANDNLLSRMSQYQEAQKESVLGKGDKLEKHGWKSYLNNS

SEQ ID NO: 191310 - protein, 88 aa, Glycine max
  unsure (1)..(88): unsure at all Xaa locations
  Clone ID: PAT_MRT3847_14772C.1.pep
MKMKVLVFVAATILAAWNCHTYYMFPHRLSSGYRARTPEVKCADXSLAVGPYIIIGFDTIPEECVEPSVEYINGHQYISDSRTVYQQA

SEQ ID NO: 191311 - protein, 61 aa, Glycine max
  unsure (1)..(61): unsure at all Xaa locations
  Clone ID: PAT_MRT3847_14774C.1.pep
RSLYXSVSXXAAEDSXTXDLXRSRKXXVIMGXGXVHINMSVIGLPNPGXNXPLXXXSQXGG

SEQ ID NO: 191312 - protein, 142 aa, Glycine max
  Clone ID: PAT_MRT3847_14775C.1.pep
MASNSDLVRAVESLLGVSLADSVSDSLLLIATTSAAVIIGLLVFLWKKSSDRSKEVKPVIVPKGLPKDEDDEIDVADGKTKVTIFFGTQTGTAEGFAKALAEEIKARYDKAAVKVVDLDDYAADDDQYEEKLKKETVAFFML

SEQ ID NO: 191313 - protein, 691 aa, Glycine max
  Clone ID: PAT_MRT3847_14776C.1.pep
MPSNSDLVRAVESLLGVSLADSVSDSLLLIATTSAALIIGLLVFLWKKSSDRSKELKPVIVPKGLPKDDDDEVDVADGKTKVTIFFGTQTGTAEGFAKALAEEIKARYDKAAVKVVDLDDYAADDDQYEEKLKKETLAFFMLATYGDGEPTDNAARFYKWFTEGKDERGTWLQHLTYGVFGLGNRQYEHFNKIGKVVDEDLSEQGAKRLVTFGLGDDDQSIEDDFSAWKETLWPELDQLLRDEDDANTVSTPYTAAILEYRVVIHDPTFTSSYDNHVTVANGNAVFDIHHPCRVNVAVQRELHKPESDRSCIHLEFDISGTGLTYETGDHVGVYADNCDETVEETGKLLGQNLDLLFSLHTDKEDGTSLGGSLLPPFPGPCTLRTALARYADLLNPPRKAALVALASHASEPSEAERLKFLSSPQGKDEYSKWVVGSQRSLLEVMAEFPSAKPPLGVFFAAVAPRLQPRYYSISSSPRFAPQRVHVTCALVYGPTPTGRIHKGVCSTWMKNAIPLEKSPDCSWAPIFIRPSNFKLPVDHSIPIIMVGPGTGLAPFRGFLQERFALKEAGVQQGPAILFFGCRNRRMDFIYEDELKNFVEQGSLSELIVAFSREGAEKEYVQHKMMDQAAHLWSLISQGGYLYVCGDAKGMARDVHRTLHTIVQQQENVDSTKAEAIVKKLQMDGRYLRDVW

SEQ ID NO: 191314 - protein, 290 aa, Glycine max
  Clone ID: PAT_MRT3847_14777C.1.pep
MEESPANREGRHCASRPRLLVVFAMDESPANREGKNRAQGNEEQEDDDYMGDLSQFLPSDALFPPKLFSSKKISSKKDPSVNSSKNRLKTHSWQERRKLERERKQQEEDEQTLAKVEAPIAQSNIGFKLLKQMGYTPGSALGKQGSGRAEPVGIEIRRSRAGVGLEDPHKEKRKNEGIMMDRKRRKEEDLMKEFGSRQKSQWQSRRVIINYNKAKAALDQLENRVIVEPQKNDDVAEGEEEEEEEITEEDLHDVLMKLRDEFNYCLFCGCQYESNHALLANCPGTNEDDH

SEQ ID NO: 191315 - protein, 395 aa, Glycine max
  unsure (1)..(395): unsure at all Xaa locations
  Clone ID: PAT_MRT3847_14778C.1.pep
MAARLSGHELSDLCLGKPPLRALSVRDTVADALAALKRIDDTYVSVWNCNHSFIRKQQPQIQSQNQCCCTCIGKVCMLDIICFLSKPQSLSSPSAALHSPISAALQDNSAVLVLHLPPSASLLEAIDVMQEGVQNLVIPIQNQVESLDSNNVHHNNNTTYCWLTQEDVLRYLLNSIGVFSPTPGNPINTLGVIDTKNLFAVCYDDPASSILDLLALSLIYQSSVAIVDPNGKFGGEISPVMLNSYDESVVPAIATLSVGDLTAYIDCGGPPEDLVQLVKERVKEKVEEQNMLELLGDETTRTGLTSWSSFXSSCSSDEEFCSGKNWKLGGYSARVGRRSEAIVCYRWSSLVAVMIQALSHRVSYVWVVEEDGTLTGIVTFQGMLKVFRDHLKSMC

SEQ ID NO: 191316 - protein, 232 aa, Glycine max
  unsure (1)..(232): unsure at all Xaa locations
  Clone ID: PAT_MRT3847_14779C.1.pep
MLLLAMDESPANRESKSEEEEEDDGYMGDLSQFLPSDALEPAKLSSSKKISSKKDPSVNSSKNWLKTLNWQERRKLERERKQQEEDELTLAKVEAPIPQSNIGFKLLKQMGYSPGSALGKQGSGRAEPVGIEIRRSRAGVGLEDPHKEKRKKEEIMMDRKRRKEEDLMKEFGSRQKSQWQSRRVIINYNKAKAALDQLENXVIVEPQKNDDXXRGEEEEEEEITEEDFARMF

SEQ ID NO: 191317 - protein, 46 aa, Glycine max
  Clone ID: PAT_MRT3847_1477C.1.pep
TSFFFFFKRKTHQIGDDVHPLTEIYKGRQFNIKLIMRAIPTWHYCF

SEQ ID NO: 191318 - protein, 158 aa, Glycine max
  Clone ID: PAT_MRT3847_14780C.1.pep
PRKHTEPSLPIHSVRASSGASFAFLVGSDLLYNLIQNSAFARNPQSTATSRPVSLPGASQTAPVTVAEIKPSCHRHNWGKVASWVFFFFLTPPLKNHSCPFSSPPCPPALFAFRTPSTLHYTRSNSLAHGCALCVGPTVQPLCNGTCSRELSYCGAPF

SEQ ID NO: 191319 - protein, 129 aa, Glycine max
  Clone ID: PAT_MRT3847_14781C.1.pep
QNITPNFPFNVTDQCSEADDDGKIKITWLPAPEPPCTELIDCHNWPHSTCRETSEGGSRCRCDSNYKWNNTIMSCTLEEHSTNQLELILIVILSGMAILACTIAFAIVRRKKKAHELGQANARIQESLY

SEQ ID NO: 191320 - protein, 48 aa, Glycine max
  Clone ID: PAT_MRT3847_14782C.1.pep
KKSPPGALFPTPLSLRFCRFFNSVGNTVFPTEKGALKPVLFILEWFAF

SEQ ID NO: 191321 - protein, 110 aa, Glycine max
  Clone ID: PAT_MRT3847_14783C.1.pep
SGRHAIDNTKSGVEQNLVEWSRPYLGDRRKLFRIMDTKLEGQYPQKAAYTIAIIALQCISEAKTRPQMFEVLAALEHLRAIRHSASPSGEEKSMPSPMLKSPLGHNHPEL

SEQ ID NO: 191322 - protein, 72 aa, Glycine max
  Clone ID: PAT_MRT3847_14784C.1.pep
NVNLDVKFLVNPPVQKDVSFWGGTTPFPVKKNSKMSRKKKASFALFRFFVKKFLKVQGKKVTPKTPLFRNVF

SEQ ID NO: 191323 - protein, 78 aa, Glycine max
  unsure (1)..(78): unsure at all Xaa locations
  Clone ID: PAT_MRT3847_14785C.1.pep
SRCRNGLTVVKLSSPPLWSTYAPYRTPSNLALAARSEVKPPHSSVVTIIFPAHVSDGXTPSPKKNPAKLVIPSYKSSS

SEQ ID NO: 191324 - protein, 38 aa, Glycine max
  Clone ID: PAT_MRT3847_14786C.1.pep
MSMIPSGGDTTFGGLDWSPHDGYHPRHRKDSIDYTQLT

SEQ ID NO: 191325 - protein, 56 aa, Glycine max
  Clone ID: PAT_MRT3847_14787C.1.pep
GRDWHMHFNNHNKSNGEEQTQGRNAIILLGCPPSIQRARQGNSLILFNSERAKRSV

SEQ ID NO: 191326 - protein, 148 aa, Glycine max
  unsure (1)..(148): unsure at all Xaa locations
  Clone ID: PAT_MRT3847_14788C.1.pep
WIPGIKEIRLKDLPSFIRTXDPDEFMLDFIQWECGRTRRASAIILNTFDALEHDVLEAFSSILPPVYSIGPLNLLVKHVDDKDLNAIGSNLWKEESECVEWLDTKEPNSVVYVNFGSIAVMTSEQLIEFAWGLANSNKTFLWVIRPDL

SEQ ID NO: 191327 - protein, 112 aa, Glycine max
  unsure (1)..(112): unsure at all Xaa locations
  Clone ID: PAT_MRT3847_14789C.1.pep
MASIIARTPSTWVTRTGHVLKLPVVASYYTALGLPSMAKAVIVMCSMXEKPSSSSYLMMGAYLLAATAFATMSSPAAMALVDXDSSLNELSIPLGLXNNLFGWILFGVFGLI

SEQ ID NO: 191328 - protein, 129 aa, Glycine max
  Clone ID: PAT_MRT3847_1478C.1.pep
MQQVSVLAPNIPAMYEMHFAVPMAGAVLNTINTRLDAKNIATILRHSEAKVFFVDYEYVSKAKDALRLLMDNNNNNNNKGVPKPTTINQQNSTFSLPLVIVIDDINTPTGIRLGELEYEQMVHHGNPNY

SEQ ID NO: 191329 - protein, 68 aa, Glycine max
  Clone ID: PAT_MRT3847_14790C.1.pep
MGTIRSVLLGYHRGTRVRLRSGYHRGANVDRARAPCQCSSGSRLSYRQCRSWHANATCWSGLCGGASP

SEQ ID NO: 191330 - protein, 59 aa, Glycine max
  Clone ID: PAT_MRT3847_14791C.1.pep
PPNPFLPSIDPQLTISRPPMESASRALARKPSSLTPTLYGALVSSSRLFYLFRSSSRAN

SEQ ID NO: 191331 - protein, 166 aa, Glycine max
  unsure (1)..(166): unsure at all Xaa locations
  Clone ID: PAT_MRT3847_14792C.1.pep
PSTHASGCVEKDEAPRSGGGKRRTRGAGGRDNGERKAAGAKGEGKDEEGARKPSQERHQTKHEDPAAAMGGNTLISHSQFLHMDFPEKATLLAXDILNELVXRLLKIKPCAIDFASFYRGAQACMHKVLQRISGNSEAHNTDDYHIVRDXISGYIYDTSPADPTRD

SEQ ID NO: 191332 - protein, 64 aa, Glycine max
  Clone ID: PAT_MRT3847_14793C.1.pep
SLFIYMAFSYRITYASSYKHFVVYFFPRCLHDTHTKCVPNIVHVQDNPQVTPANWVKWYHGSDY

SEQ ID NO: 191333 - protein, 51 aa, Glycine max
  Clone ID: PAT_MRT3847_14794C.1.pep
TPCIIYVIYLKLFFVVLECYDSIQIMIKISSTIHVSRFESQFNCLFGLALE

SEQ ID NO: 191334 - protein, 56 aa, Glycine max
  Clone ID: PAT_MRT3847_14795C.1.pep
FSCSDVISIFTHFVKLHTLVVITALVAINLLRCSELGHWLMISLCSHSVLRTILQH

SEQ ID NO: 191335 - protein, 112 aa, Glycine max
  Clone ID: PAT_MRT3847_14796C.1.pep
HASAHTLYRTVVQSPYLYISSPHPPPPSTSSTAENTIQGHDSPSATPETPSPASPTHGHNGPPPFTIPNGVLNATTTTFTTKSHRVLTRLFSLPKGRRGKTEEGYWQLLRQK

SEQ ID NO: 191336 - protein, 86 aa, Glycine max
  Clone ID: PAT_MRT3847_14797C.1.pep
QRDSLFFSQVIQKSRVVKICCIGAGYVGSPTMAVIALKCPSIEDACGDIYKSQIANWNSDQICIYEPGLEGVVKECQVKNLFFITD

SEQ ID NO: 191337 - protein, 138 aa, Glycine max
  unsure (1)..(138): unsure at all Xaa locations
  Clone ID: PAT_MRT3847_14798C.1.pep
MDLPSLAVILQAALSPNPDERKTAEQSLNQFQYAPQHLVRLLQIIVDNNVDMGVRQVASIHFKNFIAKNWSPLDVDYVIPNXKISQSDKDVVRDHILVFVTHVPPLLRVQLGECLKTDIHSDYPEQGPHLLDWVKHNL

SEQ ID NO: 191338 - protein, 64 aa, Glycine max
  Clone ID: PAT_MRT3847_14799C.1.pep
LKPSRDRCPKGFYPSLPKTPTNYLADLDTSLFSQGLTYRRHLRNPLFLHYLIASRLEADLWKPR

SEQ ID NO: 191339 - protein, 69 aa, Glycine max
  Clone ID: PAT_MRT3847_1479C.1.pep
HFFFKFVYTISCVLTLHKFEGTHIAFKLLYTHRSLCATVCMPQQNALVTEGNCIDTSLITSSQSSFMRK

SEQ ID NO: 191340 - protein, 464 aa, Glycine max
  unsure (1)..(464): unsure at all Xaa locations
  Clone ID: PAT_MRT3847_147C.1.pep
MGDGSGSRWSRAEWVQQYDLLGKIGEGTYGLVFLARTKSPVGTPSKSIAIKKFKQSKDGDGVSPTAIREIMLLREITHENVVKLVNVHINHADMSLYLAFDXAEHDLYEIIRHHRDKLNHSINQYTVKSLLWQLLNGLSYLHSNWMIHRDLKPSNILVMGEGEEHGVVKIADFGLARIYQAPLKPLSDNGVVVTIWYRAPELLLGAKHYTSAVDMWAVGCIFAELLTLKPLFQGAEVKATSNPFQLDQLDKIFKVLGHPTLEKWPSLASLPHWQQDVQHIQGHKYDNAGLYNVVHLSPKSPAYDLLSKMLEYDPRKRLTAAQALEHEYFKIEPLPGRNALVPCQLGEKIVNYPTRPVDTTTDLEGTTNLPPSQTVNAVSGSMPGPHGSNRSVPRPVNVVGMQRMPPQAMAAYNLSSQAAMGDGMNPGGISKQRGVPQAHQPQQLRRKEQMGMPGYPAQQKSRRL

SEQ ID NO: 191341 - protein, 121 aa, Glycine max
  unsure (1)..(121): unsure at all Xaa locations
  Clone ID: PAT_MRT3847_14800C.1.pep
VGYXVGYGFWYWFGVLVKIPTLIGDFGGSRLIRDRLLTALNLRRRQVQITNMLCPFCRIEEEGASHLFFHCSKIQPIWWDTMSWLHIKGAFPLSPKQHFLQHLGVQVDGVRINRWQYWWLA

SEQ ID NO: 191342 - protein, 78 aa, Glycine max
  unsure (1)..(78): unsure at all Xaa locations
  Clone ID: PAT_MRT3847_14801C.1.pep
MYHGYEKPLIGSMSVHASWVLCVXVIPDWPAIATGSSEVLFVYXGLNMRASVQTMSDHSDXVWGFAVRPPVGSHVICG

SEQ ID NO: 191343 - protein, 89 aa, Glycine max
  Clone ID: PAT_MRT3847_14802C.1.pep
CARKKSRCHKQVRGGHVKLTSQVASDKIATGIEAPEIVGAARTVQTLDAIIISEQKAAHMDLIYIGATQCFEFSRTRSSLACPGCSEIW

SEQ ID NO: 191344 - protein, 115 aa, Glycine max
  Clone ID: PAT_MRT3847_14803C.1.pep
KPPPPPGMGPPGGPLKAGAPPAPVFLLGPLQPLFLFPPLGPRGPPTKRTRLRPLKAPAPPKKGFPSPPSKARGPPPQGTKGRPASPPGPPVRGVIFFFFLPRGGGALLKKKRGII

SEQ ID NO: 191345 - protein, 46 aa, Glycine max
  Clone ID: PAT_MRT3847_14804C.1.pep
KEMSLYSDHHCGKTQIPYCDITDIREHSMIVVWYVTIFGYWCLLRY

SEQ ID NO: 191346 - protein, 46 aa, Glycine max
  Clone ID: PAT_MRT3847_14805C.1.pep
RCGFFIRGGPPFLSHIGTSEIYIFSNVCLLQVSRSHFCLWFLPFRP

SEQ ID NO: 191347 - protein, 172 aa, Glycine max
  Clone ID: PAT_MRT3847_14806C.1.pep
MSNISSPQVSNFTPSPMQRPSLNRDHFNPMYQQPSGNQSPSSGKGIEGNINPVHDNVARAPMRSNTLGVSDNRRSSVFWDQEAGRFVSSSSRGPGSSQIPGTELLYTGRSIFFGSPVVNEQPSTGTRSSSSVVAGIPDRDSSTLRDFQQGRSHRGGQLPVFVPGYAQQNKFP

SEQ ID NO: 191348 - protein, 660 aa, Glycine max
  Clone ID: PAT_MRT3847_14807C.1.pep
MARRHGWELPFHTFQVVAITVFFLLSIAYYAFFAPFLGKDIYEYVAIGVYSVLALSVFFLYVRCTAIDPADQGVMVDCDKTSKNRSKLDEELAEPSKMGLKGEGMSDRHNSSWCSKVGCFFCSFLVREDCRSNEDISFFCGFLVREDCCSNEEISLQQQSGEEEALFCTLCNAEVQKFSKHCRSCDKCVDGFDHHCRWLNNCVGKKNYITFVCLMAVSLVWLIVECGVGIAVLVRCFVDKKGTENQIAEKLGAGFSRVPFAIIIAICTAVSFLATVPLGELFFFHMILIRKGITTYEYVVAMRTLSEPPGPSVDGGEQQSLPSSPTSSAVTAMSGRSSVGMSIQYKGAWCTPPRIFMDHPDEIIPHLEPGRLPSTVDPDAVQPPDKGRKMNQRPVRISAWKLAKLDSNEATKAAAKARASSSVLRPISSRPHAYDVDHVSSSNVSGRSSPISNQGFHIKNDTVGTSRLSPSKSSYPPSQASKDDIDASCQHSMSNFSSPRVSNLTPSPMQRPGLNRDHFNPMYQQPSGNQSPSSAKGSEGNINPVHDNVPRVPMRSNTLAVSDNRRSSVFWDQAAGRFVSSSSRGPGTELLYTGRSIFFGSPVVNEQPSTGTRSSSSVVAGIPDRDSSTLRDFQQGRSHRGGQLPVFVPGCGYAQQNKFP

SEQ ID NO: 191349 - protein, 305 aa, Glycine max
  Clone ID: PAT_MRT3847_14808C.1.pep
SSHFRSTPDPTLHLRKTMTEEQVVNVRGEESDSGNDHGSVKANGVAHGVGGDSDLAADNNGAASSGKNCNDAVSNGTAEEGTETATVDVVSREDELKSADSQNGMGSVQNGVVDNDDKSANAVAEELVTDHEEYVVVGDSDVQNGDDVTANGVEECEMLDGAEASGDENGVVVEGEEDVCQSDREFECVDVHDDVTATTDENGGNGNDVQGRSESVSDKDVNKRGESENVVSADVSDEKDIVTDGDHDVEEVVEKNEVPVVVDGGSASTDVKECEPEDAQNSLKKGQVESVSGLAEPVLEPSECT

SEQ ID NO: 191350 - protein, 55 aa, Glycine max
  Clone ID: PAT_MRT3847_14809C.1.pep
GRSDGVRSDNAVGGRFRRLSLTRIEISVDEGTNNLRYYSRNITGLCHERRRKLRR

SEQ ID NO: 191351 - protein, 79 aa, Glycine max
  Clone ID: PAT_MRT3847_1480C.1.pep
SQVEKTSLGSTIDYLLGSNLTYMLDKKFNPWISQLITIKSYKSLHFKNNFNQNQPSKHSPTTLLGASSKSSFQTFTYHF

SEQ ID NO: 191352 - protein, 81 aa, Glycine max
  Clone ID: PAT_MRT3847_14810C.1.pep
SVKSVSLPSRWRRDGDAADGAIETAKLHGSGFLLQRRETLLHLLSLTNFLHIFVFINQAQFNLKFQCQLIFFLNALKESVL

SEQ ID NO: 191353 - protein, 70 aa, Glycine max
  Clone ID: PAT_MRT3847_14811C.1.pep
FKQRFHQSFFRGFCFQGLAPNRVSPWRVLGSFRVSSLKSLHHREIVGVLPVSGAVIFGSFHVPVWSFPVL

SEQ ID NO: 191354 - protein, 39 aa, Glycine max
  Clone ID: PAT_MRT3847_14812C.1.pep
SFALCSYLNALPYKSSFSLILPSSLKFPPPIPPSYSCTI

SEQ ID NO: 191355 - protein, 332 aa, Glycine max
  unsure (1)..(332): unsure at all Xaa locations
  Clone ID: PAT_MRT3847_14813C.1.pep
MIALNICRYVQIGNGNQLIRDPKKRTRKLANEKVRWSLHTASXRLTRKQKYCQFFTRFGKCNKDGGKGPCTQDPSKIAVCTKFLNGLCSTPNCKLTHGXCPYIHDPSKIAVCTKFLNGLCSTPNCKLTHKVIPERMPDCSYFLQGLCSNRNCPYRHVNVNPKASICEGFLKGYCADGNECRKKHSYVCPTFEATGTCTQGTGCKLHHPKKQSKGKKRKRTADQNNSRGRYFGSIPADVSESGMMVAPKRHRQSGELEEELSDYISLDDVNEEVVDVVDQSFEPATFCDNDSLDLQLDDFDELIKPVLLLKTKFTMQSPQSSSLQAFRQVAES

SEQ ID NO: 191356 - protein, 43 aa, Glycine max
  Clone ID: PAT_MRT3847_14814C.1.pep
WPKFSTGNSSEKDLMVVTDTDPCFLLLPFLTLKSAIASILKSI

SEQ ID NO: 191357 - protein, 45 aa, Glycine max
  unsure (1)..(45): unsure at all Xaa locations
  Clone ID: PAT_MRT3847_14815C.1.pep
ALARXXIELYSSRETCXXPXADTSWXPSPXPSKXXXFLFXXXDXR

SEQ ID NO: 191358 - protein, 79 aa, Glycine max
  Clone ID: PAT_MRT3847_14816C.1.pep
ISFYRFLFRAFVIIVIPFNIVLGGVGRATPAPRFFCCFLYSSCTFPSIIYCTPLSYGASLLSLALPPPPPPPKMEDVIQ

SEQ ID NO: 191359 - protein, 64 aa, Glycine max
  Clone ID: PAT_MRT3847_14817C.1.pep
DSMARMFCSFALKGKLPIPYKIKKLYPHVIRHMSQNKKNFIQVTITLQGNKANKNSRRCSYIEL

SEQ ID NO: 191360 - protein, 254 aa, Glycine max
  unsure (1)..(254): unsure at all Xaa locations
  Clone ID: PAT_MRT3847_14818C.1.pep
VSGYAVWGDMESGAELFSQMPKSDSCSWTSLIRGYARNGMGYEAGSRFRQMIRHQVRPDQFTLSTCLFACATIASLKHGRQIHAFLVLNNIKPNNVVVCAIVNMYSKCGSLETAMQVFNFIGNKQDVVLWNTMILALAHYGYGIEAIMMLYNMLKLGVKPNRATFVGILNACCHSGLVQEGLQLFKSMTGGHGVVPDQEHYTRLANLLGQARSFNKSVKDLQMMDCNPXDHGCNSSMGLCRMHGNIDHETEVAA

SEQ ID NO: 191361 - protein, 150 aa, Glycine max
  unsure (1)..(150): unsure at all Xaa locations
  Clone ID: PAT_MRT3847_14819C.1.pep
EFPGGPTPAALENYGEINGAGXSAITQNDILXAALFSGNKNFEGPVHPLTRRNYLAXSPPLXVAYXLAGAVGIEFXTEPIGIGEGGAXIFFXXIWGSRXKXKWGQSSGXAGMGXGTYXRSPGGGWGXLSVATGTLYGWDPTSTYIHEAPY

SEQ ID NO: 191362 - protein, 60 aa, Glycine max
  Clone ID: PAT_MRT3847_1481C.1.pep
VVTIENIIISFAREQSRWKDQCTKVWQQHQKLESFGAVLVLILNSKMLPMRTPEIYNFIH

SEQ ID NO: 191363 - protein, 52 aa, Glycine max
  Clone ID: PAT_MRT3847_14820C.1.pep
IPLKMILYVFGSMIILIIELHHLQNNETLLCKPQVSVQRNKISNLPTWTHTL

SEQ ID NO: 191364 - protein, 33 aa, Glycine max
  Clone ID: PAT_MRT3847_14821C.1.pep
TLGEGLHCFGVIRSQPRQNKDHHSGQCGIAFKT

SEQ ID NO: 191365 - protein, 90 aa, Glycine max
  Clone ID: PAT_MRT3847_14822C.1.pep
LWCESWCGNATKSKAKTIDLCNNPMTKEPKLQGARRIVSEWPDLDFEARRFTARILGDDQESESIQPPNQSKDLNSEGSSNEDRESRAEL

SEQ ID NO: 191366 - protein, 142 aa, Glycine max
  unsure (1)..(142): unsure at all Xaa locations
  Clone ID: PAT_MRT3847_14823C.1.pep
NLLTFSTLHALISSXMQIFVKTLTGKTITLEVESSDTIDNVKSKIQDKEGIPPDQQRLIFAGKQLEDGRTLSDYNIQKESTLHLVLRLRGGMQIFVKTLTGKTITLEVESSDTIDNVKSKIQDKEGIPPDQQRLIFAGKQLE

SEQ ID NO: 191367 - protein, 74 aa, Glycine max
  Clone ID: PAT_MRT3847_14824C.1.pep
HYFHSPMKNDMIVPLGLSQAQFESDIRKDLPLSTRNFLYSERQGSGGAFASRMILSVWNIHWASLYAMDGLTVR

SEQ ID NO: 191368 - protein, 67 aa, Glycine max
  Clone ID: PAT_MRT3847_14825C.1.pep
LSSNHPVHSGLNLRRHCTCILSTPRSFLIPSHLLWTPTPNLSVPPSSKKSLPSASTAMISVCSSTFN

SEQ ID NO: 191369 - protein, 69 aa, Glycine max
  Clone ID: PAT_MRT3847_14826C.1.pep
PVKGYACGERSEILISLCTVYTGFGFLFDLWLVSDLVYSICILDVTWHLAQILHLFTSEILLYCIINYF

SEQ ID NO: 191370 - protein, 411 aa, Glycine max
  unsure (1)..(411): unsure at all Xaa locations
  Clone ID: PAT_MRT3847_14827C.1.pep
GGYLLSKIKCMRCGGKSERQERMMDLTVEIEGEITTLVEALRRFTSTETLDGENKYHCVRCKSYEKAKTDAWVSEAPNVLTVALKRFQSGKFGKLNKPIQFPEILNLAPFMSGTSDKSPIYRLYGVVVHLDIMNAAFSGHYVCYVKNIQNKWFKVDDSVVTAVELDRVLTKGAYMLFYARCSPRAPRLIRNRILSPDSKRKVSGKTLTTKARYISTNSGVSEHANSSISSDDSPALASFYSKFHHLKRILEEDSSSDNSSLISSNSDEGSCSTDSTRDSTNTDDFSQYLFGDSGNGWSSXGRNSDSDTSSSSSSSPLNLRHSPLSDMDRYDSVSPDAEGSRGIDVSRLSSNTTLQHRKLDSRISSNSSSSRETDSCLKLGSNHFNDIDYGVLCRKPRKRTDLYFINREFRS

SEQ ID NO: 191371 - protein, 57 aa, Glycine max
  Clone ID: PAT_MRT3847_14828C.1.pep
LFSLVTSWLKLIGILYYITNKYIFFIYNFPFIRTMPIICSILCYKFPNIRHFDFFSF

SEQ ID NO: 191372 - protein, 62 aa, Glycine max
  Clone ID: PAT_MRT3847_14829C.1.pep
DRRPVLAFFALLYATLNFFSFTLRELIWPSHSLLKSSLTLLTGDYCHSHQPQDLNQGLFLIG

SEQ ID NO: 191373 - protein, 137 aa, Glycine max
  Clone ID: PAT_MRT3847_1482C.1.pep
CLVANVSFGSLFELYGSWFLVFHVNTILLVQLNKSVNSCTAFPPQPTYPASYGYPPYYNAVPPSPPPSAPMPVSTSDQTHNIANVPWASNSLVPPCASSADNQSHSIGNVPRATNPSVPPPASSADSEYEKFMAEMK

SEQ ID NO: 191374 - protein, 162 aa, Glycine max
  Clone ID: PAT_MRT3847_14830C.1.pep
AGTDTTHTALEWTMSELLKHPMVMHKLQDEVRSVVGNRTHVTEDDLGQMNYLKAVIKESLRLHPPLPLIVPRKCMEDIKVKGYDIAAGTQVLVNAWVIARDPSSWNQPLEFKPERFLSSSVDFKGHDFELIPFGAGRRGCPGITFATYIIEVVFSNLVHQFD

SEQ ID NO: 191375 - protein, 81 aa, Glycine max
  unsure (1)..(81): unsure at all Xaa locations
  Clone ID: PAT_MRT3847_14831C.1.pep
PXSGSPRVRGRWVAHASANAWVNHGCETHGNSLGADSWGNSFSHKPDLHEWCKLSTQTSLTTRSKLIPRPIGRTVDRYMLF

SEQ ID NO: 191376 - protein, 50 aa, Glycine max
  unsure (1)..(50): unsure at all Xaa locations
  Clone ID: PAT_MRT3847_14832C.1.pep
MGTLRDSMHKRRATGGKKKAWRKKRKYXELGRQPAXTKLSSNKTVMRMRV

SEQ ID NO: 191377 - protein, 120 aa, Glycine max
  Clone ID: PAT_MRT3847_14833C.1.pep
DIPEVACYNDRVRRKQDTTKCAHDKSQWRILKEKKELQTGSYRHKLDDNVLFHKDLSPTNLERSLSAPASGTSFGRLLLEDRHILTGALIQRKLEAVEAMPVDVKVKKKDGFNTKEKLSN

SEQ ID NO: 191378 - protein, 56 aa, Glycine max
  Clone ID: PAT_MRT3847_14834C.1.pep
GEHSPCCCLELGLSPSPCVSSQDLPLRAGSQAEYWLGFKVGQRLRGADSAPVKEFS

SEQ ID NO: 191379 - protein, 115 aa, Glycine max
  unsure (1)..(115): unsure at all Xaa locations
  Clone ID: PAT_MRT3847_14835C.1.pep
RCRRAVKTVTVLTITFEDDSSDLFDDTRTRXHDKEGIPPDQQHVIWGGHXIKDGRTLDNYDIQKETTLHLVLRMGDCKQHISMTLTDGTIALQEERCDTIGIVEAKMHDRARTAA

SEQ ID NO: 191380 - protein, 57 aa, Glycine max
  Clone ID: PAT_MRT3847_14836C.1.pep
YYYFTHSLSECLTRPILVTYIPMEDPKAAGLTALSMLCNAQTTRSQHPSRSVCEVSN

SEQ ID NO: 191381 - protein, 57 aa, Glycine max
  Clone ID: PAT_MRT3847_14837C.1.pep
KNKSFIVFLVINVVIFSNADIFRPVVVCLRQIIFLRDTSLIDGYFSFSVFTILLLYT

SEQ ID NO: 191382 - protein, 53 aa, Glycine max
  unsure (1)..(53): unsure at all Xaa locations
  Clone ID: PAT_MRT3847_14838C.1.pep
WTSYVCLIXEKSCVTLRFDFSYRMFWYCKWMHKSVYSGVGLITDDLSGNLFCM

SEQ ID NO: 191383 - protein, 103 aa, Glycine max
  Clone ID: PAT_MRT3847_14839C.1.pep
LKFEKVLYKYKKRVSDRNFSRNVKIFGSPMAISADVHNFYNINKGFKKQSMIAISTAKTKVFGSPLQDCLSSITTIVATLTAVNFPRYQAPGRNCNRNLKPLS

SEQ ID NO: 191384 - protein, 61 aa, Glycine max
  Clone ID: PAT_MRT3847_1483C.1.pep
YCLNYFLWHFIDLHSNVWLLMFPMEVCLNFMAAGSWCFMLILFCCHSCFRLLLHSLILTYL

SEQ ID NO: 191385 - protein, 61 aa, Glycine max
  Clone ID: PAT_MRT3847_14840C.1.pep
YLWSRSCLASLTTCVFRLYLSHSNHGSEGANLILFSITMFGIILFGICATRFWCRIMFKLR

SEQ ID NO: 191386 - protein, 91 aa, Glycine max
  Clone ID: PAT_MRT3847_14841C.1.pep
LASGGEDGVVCIWRVTSLDKSSICSTTEDSNSNSKVECDNSSPRNKHSSQPFIFLPNSIFQIEESPLPQFFGHSSDVLDLAWSNSDILLSS

SEQ ID NO: 191387 - protein, 356 aa, Glycine max
  Clone ID: PAT_MRT3847_14842C.1.pep
WTRFPAEGSKITPPHQSVEFRWKDYCPMVFRQLRKLFQVDPADYMLAICGNDALRELSSPGKSGSFFYLTQDDRFMIKTVKKSEVKVLLRMLRSYYQHVSKYENSLVTKFYGVHCVKPIGGQKTRFIVMGNLFCSEYQIHRRFDLKGSSHGRTTDKTKEIDETTTLKDLDLNFVFRLQRNWFQDFIKQIERDCEFLEAEGIMDYSLLVGLHFRDDNTYEKMGLSPFLLRTGKWDSYQSEKFMRGYRFLEAELQDRDRVKSGRKSLIRLGANMPARAERMARRSDFDQYTPCCSGETYDVVIYCGIIDILQDYDISKKLEHAYKSLQVDPSSISAVDPKLYSKRFRDFVGRIFIEDW

SEQ ID NO: 191388 - protein, 60 aa, Glycine max
  Clone ID: PAT_MRT3847_14843C.1.pep
KKTFLKKSLTPLCVKFKNGQTNGLFNSGTFFIFKKKKKKKKKKKKKKKKKKKKKKKKKKK

SEQ ID NO: 191389 - protein, 78 aa, Glycine max
  unsure (1)..(78): unsure at all Xaa locations
  Clone ID: PAT_MRT3847_14844C.1.pep
SCCRCNCVCVSACKCDNVCAGCKMYPDLSYTEXTTTEILVLAVAPTKAQFXSAEMCVSAENYGCTCEANCTCNPCTCK

SEQ ID NO: 191390 - protein, 129 aa, Glycine max
  Clone ID: PAT_MRT3847_14845C.1.pep
MCFWLHKYPLFGICRKMKTVEEVLKIDIKPGWKRGTKITFPGKGNQEAESKTPDDLIFVVDEKPHAFFKRDGNDLVVTQKILLVEALVGKTLNLTTLDGRELTIQVTEVVKPKYVLVVPNEGMPISKDL

SEQ ID NO: 191391 - protein, 58 aa, Glycine max
  Clone ID: PAT_MRT3847_14846C.1.pep
LGPIFLPSLWRNQFIPWNLKLKLKLIFKKKTVGKKWNPKSLILVTLESHPHIKWKEPF

SEQ ID NO: 191392 - protein, 68 aa, Glycine max
  Clone ID: PAT_MRT3847_14847C.1.pep
PRVRLPKLYFIQTLTHTHGSNFPWLASLLHFRLHLLCMVWSVYLLYTHLSQTFYLPAFFYASIPYFNK

SEQ ID NO: 191393 - protein, 43 aa, Glycine max
  unsure (1)..(43): unsure at all Xaa locations
  Clone ID: PAT_MRT3847_14848C.1.pep
SEHIVSHQTSALLHCLIYNSTAQLLRHFIXYEDVSLFCLICGS

SEQ ID NO: 191394 - protein, 58 aa, Glycine max
  Clone ID: PAT_MRT3847_14849C.1.pep
WDRFFCREAPPDKERAWSCFVKKNGVFLLWFHRDHDQDETMNQQSHKRTRFKYYKSIQ

SEQ ID NO: 191395 - protein, 54 aa, Glycine max
  Clone ID: PAT_MRT3847_1484C.1.pep
LLVFGNQVFITLGFYDIGVALNNKACSSSTSTSPDCWPPIWLTTQASLGSISSV

SEQ ID NO: 191396 - protein, 44 aa, Glycine max
  Clone ID: PAT_MRT3847_14850C.1.pep
KFNHLLILKSYLKFLSQAFHFIFSSILPSHIKFYQIKCFYNHTI

SEQ ID NO: 191397 - protein, 79 aa, Glycine max
  Clone ID: PAT_MRT3847_14851C.1.pep
QVLYIFLDYYGSFDWDHNYVSIWGPKPLSSFPEIAETLECDHGEFLLQKEFLRNYRNMCSFPSRATKTMTHEFPVKFMN

SEQ ID NO: 191398 - protein, 40 aa, Glycine max
  unsure (1)..(40): unsure at all Xaa locations
  Clone ID: PAT_MRT3847_14852C.1.pep
RYTDFYHVMTALGPLYVAMILDYGSVXWXKIFFPDQCSGI

SEQ ID NO: 191399 - protein, 69 aa, Glycine max
  Clone ID: PAT_MRT3847_14853C.1.pep
MPIRNISVGRSEEATHPDTLKADLAEFMSTLIYLFARSGCGIGYNKLTDNGAATPVRLMCGFIDHAFPL

SEQ ID NO: 191400 - protein, 63 aa, Glycine max
  Clone ID: PAT_MRT3847_14854C.1.pep
LWYYQINCVNFCPRTRKFRMIRTVGSNLTVTLKRHSKSTDWTTLTDKTTGEPMRAPHNIHMTQ

SEQ ID NO: 191401 - protein, 87 aa, Glycine max
  Clone ID: PAT_MRT3847_14855C.1.pep
LNVFLPHTPKKKVCAFKAKGSWLDRPCVVYPGEPNNMEAQMQKKPPVQSFFIGKTPFRVPVYPPLNKALVGAPIFFLSEISEIKKKV

SEQ ID NO: 191402 - protein, 90 aa, Glycine max
  unsure (1)..(90): unsure at all Xaa locations
  Clone ID: PAT_MRT3847_14856C.1.pep
CNFDLYKELQSVWGQLAFEQLRCFKLGGGGCXLGQKLQTIGAFQKEVKFFXRQKVASKQIAFNAKQRQSSGGVWGWLFGTPPPFQNANEA

SEQ ID NO: 191403 - protein, 83 aa, Glycine max
  Clone ID: PAT_MRT3847_14857C.1.pep
PFQEGFPSSLYDVLLLWGGGGGGDTYVKTGRQKKRDPGFGRGDQPCNRSKKDKKAVQRCREVKWSRLELSYVSRKTKGAPYMF

SEQ ID NO: 191404 - protein, 95 aa, Glycine max
  Clone ID: PAT_MRT3847_14858C.1.pep
SYHIIFFLLYFIHFFIPILIYSLFSSFILSILYYLFLSSLYFIIILYPIYKYSINFLHLISLFIFYIFSYYILIILFPFLIYFYLYFYSYLLFII

SEQ ID NO: 191405 - protein, 81 aa, Glycine max
  Clone ID: PAT_MRT3847_14859C.1.pep
EVNQNRAMKITRRWMPTSCPSLRLINQLALPFPQLRSCTLHNHLPSSTALSPTQFSLSIIASPPTTLRFPLSPFLEYTNHI

SEQ ID NO: 191406 - protein, 45 aa, Glycine max
  Clone ID: PAT_MRT3847_1485C.1.pep
KINVSIFIYFQFGFKHLNLFHTHTEGCDKSLIYKFRLDETKLVEN

SEQ ID NO: 191407 - protein, 58 aa, Glycine max
  unsure (1)..(58): unsure at all Xaa locations
  Clone ID: PAT_MRT3847_14860C.1.pep
QMATVITPLKFDSSMGSYXQWAIDPLGGGILVDNTGDWFTLLQNSPISNLLRVVACMK

SEQ ID NO: 191408 - protein, 35 aa, Glycine max
  Clone ID: PAT_MRT3847_14861C.1.pep
LTCHLITTSTRKVSHFHFSHFTVVPHLTLLLMSWL

SEQ ID NO: 191409 - protein, 106 aa, Glycine max
  unsure (1)..(106): unsure at all Xaa locations
  Clone ID: PAT_MRT3847_14862C.1.pep
MALSHEDVILFVFIVSPFLHYMHIALNFNAFQYKYFXYYFNNNIYLLLKYNPLYKMIPSLPYNXKSISYSLVIFDYIYYTCKNNPILPSHPYHITFSPFFPNFIYY

SEQ ID NO: 191410 - protein, 79 aa, Glycine max
  unsure (1)..(79): unsure at all Xaa locations
  Clone ID: PAT_MRT3847_14863C.1.pep
LEPLEPIRLEHECVELLKDIXQTRLLDMTKVYHAKFFNICKKRKAVKEAFDFIRLIPNPMLSTFNMLMSVCASSQDSEG

SEQ ID NO: 191411 - protein, 111 aa, Glycine max
  Clone ID: PAT_MRT3847_14864C.1.pep
PCLRPTSFITLGTNKIALGIMKNNTLLFLALVACFETATSLPVANENSQSITDRLLKYGDAEKRDNSIADRLLKYGDAYKREESIADRLLNYSDKIQKREESIADRLLKYG

SEQ ID NO: 191412 - protein, 126 aa, Glycine max
  unsure (1)..(126): unsure at all Xaa locations
  Clone ID: PAT_MRT3847_14865C.1.pep
PNNADAREKPGQGKKSTNETEATRRPAPQKTTTGTNPATNRGTTPXKPTPPHRDAGNGGATAGNGATATTTXSAPEAQSRKPNRXEGTQNRKRNGPTKRQSKGGRPEAHRTARPSTHGQTQSPDEK

SEQ ID NO: 191413 - protein, 104 aa, Glycine max
  unsure (1)..(104): unsure at all Xaa locations
  Clone ID: PAT_MRT3847_14866C.1.pep
TASEKYIKKKKKKKWDGRYREVPKLTNGKQCKGRDYFIEKSILNCGGRSFTHFLDWEKPGVSQLSGLTKHTGFAMWRPIEKGRTDSPFXKVGSLKGEWDPICIG

SEQ ID NO: 191414 - protein, 101 aa, Glycine max
  unsure (1)..(101): unsure at all Xaa locations
  Clone ID: PAT_MRT3847_14867C.1.pep
FRSSIPSQLWRAPVFFARFLFCAVSISCLPSAIADFVHLNDCNPLEHGGTYYILSDMIPSGGIRAAPTGTGRCSLTVVXSRVVLQNRIGKIISSPYRNRFI

SEQ ID NO: 191415 - protein, 611 aa, Glycine max
  Clone ID: PAT_MRT3847_14868C.1.pep
ECLCLSLQRGVLGILICIPKTSAHLCSNSLTVASNNFHSVPGGLGRLVLNVRSTSLCRRFRGLKLWVLERLNFQFQPPKQPKNRNHHFKNNLENEKGSVSDSSSNLHVPDDKVTPMESPSLLQTGLSGAPMDVSRKPSLCIAVIGATGELAKRKIFPALFALYYSGFLPENVGIFGYSRKDITDEDLQSIIASTLTCRVDHQENCDDKLNAFLSRTYYINGGYDNKYGMSMLNARMEQIEGGSKTNRIFYLSVPQEALLDVASCLASSAQTQKGWNRIIFEKPFGFDALSSHRLTQYLLSNFQEKQIYRIDHLLGRNLIENLTVLRFSNLVFEPLWSRTYIDNVQVILSEDLAVHPGRYFSGYGIIRDIVHSHVLQTIALLAMEPPISLDGEDIRNEKLKVLRSIRKLEPKDVILGQYKTSGGAKVDACLNGLTPTYFAAALYIDNARWDGVPFLIKTGLGLIKHQMEIRIQFRNVPGNVYHECIGHNMDRAVNELILRDVPDEAILVRVNNKVPGLGLQLDSSELNLLYKDKYNMEVPDSYEHLLLDVIDGDSHLFMRSDELAAAWNILTPILNEIDKDNMSVELYEMGGRGPVGAYYLWAKHGVRWVED

SEQ ID NO: 191416 - protein, 41 aa, Glycine max
  unsure (1)..(41): unsure at all Xaa locations
  Clone ID: PAT_MRT3847_14869C.1.pep
SLPSIYIWIFXYCMMEVLNKKAFIQILLSRISYLXSLFLPL

SEQ ID NO: 191417 - protein, 68 aa, Glycine max
  Clone ID: PAT_MRT3847_1486C.1.pep
TSTALPAATWESNTAMLTLIIPINHSPFLTPSDEPMIQLSLPHSLLNIRRVQEVMKNQLRSTSLSSDY

SEQ ID NO: 191418 - protein, 166 aa, Glycine max
  Clone ID: PAT_MRT3847_14870C.1.pep
MSVSFSSTSFAFQRPAHLCSNSLTVASNNFDSVPGGLGRLVLNVRSTSLCRRFRGLKLWVLERLNFQFQPPKQPKNRNHHFKNNLENEKGSVSDSSSILHVPDDKVTPMESPSLLQTGLSGAPMDVSRKPSLCIAVIGATGELAKRKIFPALFALYYSGFLPELKL

SEQ ID NO: 191419 - protein, 154 aa, Glycine max
  unsure (1)..(154): unsure at all Xaa locations
  Clone ID: PAT_MRT3847_14871C.1.pep
MYRILFHGLLCCVILYIIFRLSLSVLILHRNGTAPQRKHSSIVTLRIIFSILGVVMLGTLVYTLIQIXGSPFRIELITPWLAATLVDFYFNVVALAVWVAYKESSWISAIFWIILLICFGSITTCFYITWQLFQISREDPAYLVLVHHGDRKQI

SEQ ID NO: 191420 - protein, 50 aa, Glycine max
  Clone ID: PAT_MRT3847_14872C.1.pep
DKLCSCTTIRSHMAGVFCVLARGHTNEELKVKIFFLWTSNVCMYCINGAK

SEQ ID NO: 191421 - protein, 56 aa, Glycine max
  Clone ID: PAT_MRT3847_14873C.1.pep
SPDASEEEIWGSRNFLLQQYSGHERSEESIQAEMIIRAPQKLQFCDQKNCKKKKIF

SEQ ID NO: 191422 - protein, 63 aa, Glycine max
  Clone ID: PAT_MRT3847_14874C.1.pep
IIPFLMRLLNTGQLRFLHMNESLAFMYPRINQVVPTSLCPTALGIEKYSPCWSHTYVLHSLFH

SEQ ID NO: 191423 - protein, 210 aa, Glycine max
  Clone ID: PAT_MRT3847_14875C.1.pep
MTKEEDFKLLKIQTCVLKVNIHCDGCKQKVKKLLQRIEGVYQVQIDAEQQKVTVSGSVDSATLIKKLVRAGKHAELWSQKINQNQKQKNNNAKDDKNKGQKQALVKGLEAFKNQQKFPAFSSEEDEYYYDDEDDEEDEDEEMRFLREKANQLQMLKQQTANANNVRKGMGAIAAGANNGKTNNGDNANSGKKGGPNHQNMGMKDSPNGGL

SEQ ID NO: 191424 - protein, 44 aa, Glycine max
  Clone ID: PAT_MRT3847_14876C.1.pep
KTILALTLVNNFFESAGRCYFFLTWSILSIGDPRLFALGGLTLA

SEQ ID NO: 191425 - protein, 100 aa, Glycine max
  unsure (1)..(100): unsure at all Xaa locations
  Clone ID: PAT_MRT3847_14877C.1.pep
GTPAGRGAEVPGGPRGRWISTGERSRGGGGRDYXRLXPSGEPSLSACAXRRALPLFKMEGLPLLALGGLHFGFHXDSYGGGGXXLLHLFHFMGPTGGGGI

SEQ ID NO: 191426 - protein, 46 aa, Glycine max
  Clone ID: PAT_MRT3847_14879C.1.pep
IVLNLISLLLPSDLNVTKLDSNFLLAWFLHYNHILQWPSDRRIQWP

SEQ ID NO: 191427 - protein, 66 aa, Glycine max
  Clone ID: PAT_MRT3847_1487C.1.pep
TRTIENFWLSMIKINRDRETQSDDKRRWLNLSKYEETPAQEQKGKRGTKSENRLLKMSHKVRNLDQ

SEQ ID NO: 191428 - protein, 92 aa, Glycine max
  Clone ID: PAT_MRT3847_14880C.1.pep
PPLFPAVIILPIIRTGGPPGGGGQLLGGPPRRADVPPWCKKATLFLAAEPFWWLISSPPCYSSFRGECWLPGGKHPPPEQAGCHQGCCCPTK

SEQ ID NO: 191429 - protein, 80 aa, Glycine max
  Clone ID: PAT_MRT3847_14881C.1.pep
RQARQNAHYSQQKKKKKKNQTNKEHRNPTSFFSSLVIRVLPTNIFTESPSFIPKAATIYFLFLTPFFSVHHSPKLLNFTV

SEQ ID NO: 191430 - protein, 95 aa, Glycine max
  Clone ID: PAT_MRT3847_14882C.1.pep
MCESQVHMLIHFTRLMTAQRHKIQFSRLVLDAESLDAIRGDLRPKGVDGPGHLRLVVVLVVVAVMVALREPHGTVRDVRRGSARKISADSQDVSG

SEQ ID NO: 191431 - protein, 73 aa, Glycine max
  unsure (1)..(73): unsure at all Xaa locations
  Clone ID: PAT_MRT3847_14883C.1.pep
RSLLLHLLPTCYLYRRQTETSAHSTKQQRKKSNTEIKANDKVERGCFLVRRAVPHQEXGREMRVRXALHKLRS

SEQ ID NO: 191432 - protein, 88 aa, Glycine max
  unsure (1)..(88): unsure at all Xaa locations
  Clone ID: PAT_MRT3847_14884C.1.pep
MHKXXNXTTFTXXRXXGXXXXHXXMAVXAQGXNXXXQCLSFYEGRXXXFMVXGXXDFXXPXVCLLIPALFSXXREPRNSRAXPYRVXR

SEQ ID NO: 191433 - protein, 59 aa, Glycine max
  Clone ID: PAT_MRT3847_14885C.1.pep
KKYCYKGWECKGWSIHCCHLTITDYLQTYHVENHFYKRNSTLAHTAEFWDYRSLIDAAG

SEQ ID NO: 191434 - protein, 77 aa, Glycine max
  unsure (1)..(77): unsure at all Xaa locations
  Clone ID: PAT_MRT3847_14886C.1.pep
QDYQFWTXADENGFFTIKSVRPGDYNLFSXVPGFVGDYKFGDLMKITSGSLAWSKLNLFSVLQNNLFDKLVMQVLTL

SEQ ID NO: 191435 - protein, 45 aa, Glycine max
  Clone ID: PAT_MRT3847_14887C.1.pep
SYPLINLIVRKPFLRHNDNTINNNHDSTLVIRVPLTGLFLSPSVI

SEQ ID NO: 191436 - protein, 55 aa, Glycine max
  Clone ID: PAT_MRT3847_14888C.1.pep
ANPGRGLKVMSSTSVIPGTAGCITCVYSLIHTLKRGPFDCLTFICYESRSVSIGC

SEQ ID NO: 191437 - protein, 70 aa, Glycine max
  unsure (1)..(70): unsure at all Xaa locations
  Clone ID: PAT_MRT3847_14889C.1.pep
MPVVNCGYGPSGHRISIEEHITKDXLIALLRSMREQMSLDNSLTATMDELTLPVAELKDELDDTRPNIVT

SEQ ID NO: 191438 - protein, 170 aa, Glycine max
  Clone ID: PAT_MRT3847_1488C.1.pep
IADARGDDSKLDLEETVSEIMIHEGTRIAPDAVRFSHAKGSELPELPSFSGKNPEGWIFKAEKYFSPHHIGLHFLLLYPFPTPGEFQPSTPQLQYIIVCPCAVAWELKTKSGNQLTTVPSSSIESCCIRYVQYVMFPVVANFQIGFLRQEQQIIYVTPYQNFNSIERLIL

SEQ ID NO: 191439 - protein, 48 aa, Glycine max
  Clone ID: PAT_MRT3847_14890C.1.pep
LFVVQVQLTTLIDNFFSLLNLTFILHLKWKPLLEKHSSHSYFHLQFSQ

SEQ ID NO: 191440 - protein, 48 aa, Glycine max
  Clone ID: PAT_MRT3847_14891C.1.pep
TAYRWSLGVLIGHHGDPVVRLARRTGAAPVVRGGSGWWCWCLSWDGMV

SEQ ID NO: 191441 - protein, 110 aa, Glycine max
  unsure (1)..(110): unsure at all Xaa locations
  Clone ID: PAT_MRT3847_14892C.1.pep
MAIDVEVAERGSLSGKDYQDPATAPLIDAEELTKWSVHRAHIRXVIATLLFLYITVLTAIWYKHQTDHADACGGAGILSIAWAFGGMIFILVYCTAWISGGDIIPGETFG

SEQ ID NO: 191442 - protein, 482 aa, Glycine max
  unsure (1)..(482): unsure at all Xaa locations
  Clone ID: PAT_MRT3847_14893C.1.pep
METEKSNVSKAEEFKLLANEAFNARKFSQAIDLYTQAIELNSQNAVYFSNRAFAHLRLEEYGSAIQDATKAIEIDPKYSKGYYRRGAAHLGLGKFKEALKDFQQVKKMCPNDPDATKKLKECEKAVMKLKFEEAIAAPESERRSIAESIDFRTIDVEPQYSGARIEGDAVTLDFVKKMIEDFKNQKFLHKRYAFQIVLQTKRXLQALPSLVDIHVPDGKHFTVCGDVHGQYYDLLNIFELNGLPSEENPYLFNGDFVDRGSFSLEVILTLFAFKCMSPSAIYLARGNHESKSMNKIYGFEGEVRSKLNETFVELFAEVFCCLPLAHVINEKVFVVHGGLFSVDGVKVSDIRSINRFCEPPEEGLMCELLWSDPQPLPGRGPSKRGVGLSFGADVTKRFLQENNLDLVVRSHEVKDEGYEIEHDGKLITVFSAPNYCDQMGNKGAFIRFEAPDLKPNIVTFSAVPHPDVKPMAYANNFLRMFS

SEQ ID NO: 191443 - protein, 514 aa, Glycine max
  Clone ID: PAT_MRT3847_14894C.1.pep
MLIKENKESRSDEIVKDADEKNESGKVSGVSKPEISSRNNLSIPKRTEEDDLQGTVFICNLPFECDNEEVKQRFSGFGEVEYFVPVLHQVTKRPRGTGFLKFKTVEAANTAISTASAASGMGILLKGRPLKVLKALDKKSAHDKELEKAKNEVHDHRNLYLAKEGLILEGTTAAEGVSASDMLKRQELEKKKKTKLQSPNFHVSRTRLIIYNLPKSMNEKELKKLCIDAVISRATKQKPVIRQIKFLKNEKKGNVAQERYSRGVAFVEFSEHQHALVALRVLNNNPETFGPEHRPIVEFALDNVQTLKLRKAKLQSQQQAPQDDNNAMDNDKPGTVEGCKPVKDRKRKSREHDEPAKESVLNTNGESGVAVANGKSPQGHKSKRQKGNNKSKKALKENREAALSMKPKNNENGHNNGGASLEGQNTATDSNRRKSGNKDDVGFRKRKMQNQEQEAGQKVLKKRLKKNKGSVGKDVVDKLDMLVEQYKSKFSHKGSLENDGEKRHSKQLRKWFQS

SEQ ID NO: 191444 - protein, 89 aa, Glycine max
  unsure (1)..(89): unsure at all Xaa locations
  Clone ID: PAT_MRT3847_14895C.1.pep
MEEKKPPEGGGGGGHNVSFIGRLETPVTSRPXIAGDLPNLPAYRTAGSRLLRGIEAGPAHEHLVESPCXKAGPGRNTESAEQAGSLAGG

SEQ ID NO: 191445 - protein, 85 aa, Glycine max
  Clone ID: PAT_MRT3847_14896C.1.pep
LFPQSSHYPARSTIDSDKHQNAIAFETIVPFSPHRVPYCKDSQYGYQVWLLLATPECWDAYAPANERSRDSRNTTDSESNRNAKP

SEQ ID NO: 191446 - protein, 40 aa, Glycine max
  Clone ID: PAT_MRT3847_14897C.1.pep
FILPSLRDGILVELEISHLGFRVPVYAFIIPLFVKTACLC

SEQ ID NO: 191447 - protein, 48 aa, Glycine max
  unsure (1)..(48): unsure at all Xaa locations
  Clone ID: PAT_MRT3847_14898C.1.pep
TXXXPXWVXSXXDXSLXXRXESXADXMSXCLSEXIIVIINEXSYKXXX

SEQ ID NO: 191448 - protein, 221 aa, Glycine max
  Clone ID: PAT_MRT3847_14899C.1.pep
MAGISSEESGVGKSAEGTFSGQRCQSGEALAEWRSSEQVENGTPSTSPPYWDTDDDDDGPKPSELYGRYTWKIENFSQITKRELRSNAFEVGSYKWYILIYPQGCDVCNHLSLFLCVANHDKLLPGWSHFAQFTIAVVNKDPKKSKYSDTLHRFWKKEHDWGWKKFMELSKVYDGFVDASDNLIIKAQVQVIKEKADRPFRCLDCQYKRELVRIYLTNVEQ

SEQ ID NO: 191449 - protein, 56 aa, Glycine max
  unsure (1)..(56): unsure at all Xaa locations
  Clone ID: PAT_MRT3847_1489C.1.pep
SYCGPLEHHTAPTXLDTPLPEHTGGNXGSTAAGRHTXLITATRPKRTTRGRETSAK

SEQ ID NO: 191450 - protein, 189 aa, Glycine max
  unsure (1)..(189): unsure at all Xaa locations
  Clone ID: PAT_MRT3847_148C.1.pep
GIIKILSSSLIKLPSPKNISLFXNFGSILGICLITQILSGLFLAIHYVPNTEIAFQRVVHICRDVNIGXFIRIIHANGASFFFISIFIHIGRGIYYESFYLIQTXNLGVIIFLLTIASAFLGYVLPXGQISFXGATVITNLLSAIPYLGTTLVYXFXGGFSVDNATLNRFFVFHFICPFIVLALVILHL

SEQ ID NO: 191451 - protein, 133 aa, Glycine max
  Clone ID: PAT_MRT3847_14900C.1.pep
EAIASLKERTGSSQYAISKLMEDKHKAHLPANFKKLLLVQLRKLTAAGKLTKVKNSYKISAKPATAVKPKSAAAAPKAKPKSATAAAKAKLKPKSAAAKLKKAAVKPKRKSSAVKPKSKAAVVKSKAVAPKPK

SEQ ID NO: 191452 - protein, 44 aa, Glycine max
  Clone ID: PAT_MRT3847_14901C.1.pep
ENYSRYILIYISQNFFPFQFLQQIHHCINNHKHVDNYHTFLTSL

SEQ ID NO: 191453 - protein, 63 aa, Glycine max
  Clone ID: PAT_MRT3847_14902C.1.pep
KKKKKKKKFKKKKKREKKREKKKKKKKKKKKKKKKKKKKKKKKRGGRLKGPKLTTAGRQRKSP

SEQ ID NO: 191454 - protein, 322 aa, Glycine max
  unsure (1)..(322): unsure at all Xaa locations
  Clone ID: PAT_MRT3847_14903C.1.pep
MRRTLVRNGSLYTRNLLHHSALALAASSRPQFRLFSSNENPPPVPQIDDVNNKELKAQIETYFKGDEKVLPSIMEAILKRKLSGNHEDTDDELMEELRMRPLDDVDDRDFESDFENIHDTDEEIDDLYNARDVVMKRMVKDEYFNMDDKKWDDIVEDGIKHGLLRDTKECEEILEDMLSWDKLLPDEIKQKVEVKFNELGDMCEKGELEPEEAYEQFKKFEDEIVAEYLDKMEKEEAPQFDDTTVPDKKKDLDDPPGEGPILRWQTRVVFAPGGDAWHPKNRKVKLSVTVKELGLSKYQFRRLRELVGKRYHPRRDELQXLV

SEQ ID NO: 191455 - protein, 69 aa, Glycine max
  Clone ID: PAT_MRT3847_14904C.1.pep
QRPQRFSLEIFSSTTFSELKKPLALWTQPPALGITAIEAHSRFFSPILTRLVRFVTLRCNFDATKLSYN

SEQ ID NO: 191456 - protein, 84 aa, Glycine max
  unsure (1)..(84): unsure at all Xaa locations
  Clone ID: PAT_MRT3847_14905C.1.pep
VSGDSSGETALRMAMQTREQHIRRYMATSSICSAQALRANMAAMYAVXHGPEGLKNTAHRVHGLAGAFALGIQKLGTVDIQDLP

SEQ ID NO: 191457 - protein, 134 aa, Glycine max
  unsure (1)..(134): unsure at all Xaa locations
  Clone ID: PAT_MRT3847_14906C.1.pep
TLTMRKHYVRAYIGTAPGGDTLKSWLAFPVSVPPLGFSTYIVPSSKQSSHSSTISKIYISEGSTNKSIEVGKGNLKLLYSENEGRLTHYVNSRTLVTTSVEQSYSYYSGNDGTDKDPQAXGAYXFRPNXPLYPI

SEQ ID NO: 191458 - protein, 44 aa, Glycine max
  Clone ID: PAT_MRT3847_14907C.1.pep
NEKRCLACDVKETKPSPSKGVNYYSTSTSIVIEYYYGFVINGER

SEQ ID NO: 191459 - protein, 105 aa, Glycine max
  Clone ID: PAT_MRT3847_14908C.1.pep
LSVFAMMKDDGCEPGVITYDLLMGKLGAHNRIDKVNALFNEAKSRGLPVILKEYAVDPRYLKKKKKVVKGVKKRETLPEKMARKRSRLKQIRLSYVKKPKRVMGR

SEQ ID NO: 191460 - protein, 104 aa, Glycine max
  Clone ID: PAT_MRT3847_14909C.1.pep
QARCSFKLVLMGQCSRPTCFLLLSRVEVGGLTAQHHSTATASPVTPQSLENDNDKDDNEDLALYGGLFDNEQKRRFWRLKRNSKSLNKYWSVEDSKSERGIQLF

SEQ ID NO: 191461 - protein, 62 aa, Glycine max
  Clone ID: PAT_MRT3847_1490C.1.pep
SRYICSRFPMLVSGSISCSFLGPLYRLCALHSLPCRFIDTLCMDFMVYEVSGVSGPPAEHVE

SEQ ID NO: 191462 - protein, 39 aa, Glycine max
  Clone ID: PAT_MRT3847_14910C.1.pep
SRNHYTWGRFELVGAKKPPETRPKPCLPAGPPIEGLVLV

SEQ ID NO: 191463 - protein, 80 aa, Glycine max
  Clone ID: PAT_MRT3847_14911C.1.pep
PSSTGWSHRPECGFRSGLGPPGHANAFVVTKAAGLMPGAPHMCVWPRKWAWFSPFHVQSLGGFQFRKPKKVASSRDFVRY

SEQ ID NO: 191464 - protein, 69 aa, Glycine max
  unsure (1)..(69): unsure at all Xaa locations
  Clone ID: PAT_MRT3847_14912C.1.pep
GRGGRGGRGEXAKKXAXRAXXXXXEAXXXXHRAXAXTEXXXKXPKPXXAXXXXQKEXXXXXGAXXSPKR

SEQ ID NO: 191465 - protein, 49 aa, Glycine max
  Clone ID: PAT_MRT3847_14913C.1.pep
CSIRSLQELILYCLNHSYKRLHLHHSSLLLRCFKLLLLLLLSTYHSICY

SEQ ID NO: 191466 - protein, 156 aa, Glycine max
  Clone ID: PAT_MRT3847_14914C.1.pep
MQAFQQISGFYDSRGVMSHGYKRLYDAFQLLQADPTIKRLVVSLSSDKALWDAVMSNVRHQKKLLELPDSVDCRRPQIFELNEFGIQILSWTLDIIKGKILELIESFQSLVNDLFQSPKMGNATTIATERDEKVRSSFLLSILILLIIIAARSQRF

SEQ ID NO: 191467 - protein, 83 aa, Glycine max
  unsure (1)..(83): unsure at all Xaa locations
  Clone ID: PAT_MRT3847_14915C.1.pep
HFYFSIISSESLFPLIIHDRRVFTAFELIMIPTVSEDFAXEYDRAIAELQKLFRVKSVLKVTTAEIVXHITASLGSSSYDGIL

SEQ ID NO: 191468 - protein, 163 aa, Glycine max
  Clone ID: PAT_MRT3847_14916C.1.pep
HFGHSCKKMAETDHHQHPLGQLHSSRPKALVGGVFWFVFSSFCGIFLNRILFFKMKVIYKMIPYYAPLTQPLLYCIVPIICILCNEMDRMVAVECGVPHRTDCFIPPPPPPMEFSFDSNCGPFQCAFTLAVCLNLYSLPPSGRAIKRNTWHFFMFKKKTVFYL

SEQ ID NO: 191469 - protein, 362 aa, Glycine max
  Clone ID: PAT_MRT3847_14917C.1.pep
RCEKTTEGRVIESKYGGWRNLSEARSANNESTWWRDLKIVDQHPQQGQLLNNSIAWKVGRGDKFKFWEDTWIGEDNRLLEKYPRLYSISVQQNYFIQQMGEFKDSGWEWDFKWRRPLFDNEIDMAVSFLQELEGNRIRSHRADQWVWVADSSGQYTVRSAYNVLREDLLQEDQDGEFKELWKVKVPSKVIVFAWRLLKDRLPTRDNLRRKHVELQDFMCPFCRTIEESAGHLFFHCSKVFPIWCEMLSWVNLVGVFPHHPRHHFLQHIYGAFEGIQLDRWKGWWLALTWTIWKHRNSIVFSNSAFNANKVVDDAVFLLWTWLKNFEKDFPTPYNQWSSNLSEGFFRRRGFESRFNNCISLII

SEQ ID NO: 191470 - protein, 44 aa, Glycine max
  Clone ID: PAT_MRT3847_14918C.1.pep
LIKSQSLILRRKKNTSGLLQFWLMMILRALLLLKKNNGGVIHSS

SEQ ID NO: 191471 - protein, 116 aa, Glycine max
  unsure (1)..(116): unsure at all Xaa locations
  Clone ID: PAT_MRT3847_14919C.1.pep
AQVSLLFKIPRTILIKLKALVSSVPKILEQWXCQSLDKFPSRMNTGXGARTPEVKCPNWRRAVEAHNIFGFETIPEKCVEATKEYIHGEQYRLDSKTIYQQAXFYARDLEVHPKDT

SEQ ID NO: 191472 - protein, 89 aa, Glycine max
  unsure (1)..(89): unsure at all Xaa locations
  Clone ID: PAT_MRT3847_1491C.1.pep
PNVLGDLIMAGXWSFPCGFNNLSRIFEVIYVSPPVSXHGNAFRRPICKKKYVLGWKKIGQIVPYRIVPTIILLVVGSPLNGRGVLSPVP

SEQ ID NO: 191473 - protein, 188 aa, Glycine max
  Clone ID: PAT_MRT3847_14920C.1.pep
MRSSSIRSFTIFTLFLIAILPHGHATTPTSKLRLKPLSSPFSTALETLQKQLGYTFKSIDLLRRAMTHASFSEENNKAFAILGASVIETSVSFHLLSRDVDLSSKELNRRLSQITNVDSSCAVDGTRLGLHKVVRVSPKTNSSAPAVVCGAFRAIFGAVAIDTGKSDDAGNVFWNLHGGGDLGVAVAL

SEQ ID NO: 191474 - protein, 67 aa, Glycine max
  Clone ID: PAT_MRT3847_14921C.1.pep
LTKKITSLMSYHAHTYYIHLFNATFLYLLHSLFIFYFPSRLSSSTFYQRSPPLAMRQIGYNVTSVYL

SEQ ID NO: 191475 - protein, 109 aa, Glycine max
  Clone ID: PAT_MRT3847_14922C.1.pep
RVRKKKKKKKKKKKKKKKKKKKKKKKKKKKKKKKSHKRATNSSPYPNTQSFFLCSNIYILSWAPFFRVPTFWPRPFPAFSFFSPPPLFPTWARFLTGPLGGTPRAVPHF

SEQ ID NO: 191476 - protein, 45 aa, Glycine max
  Clone ID: PAT_MRT3847_14923C.1.pep
LFRFDLNSCFTLLIDSLSITRLYIHRLSLTQLEFFIFQSESKASV

SEQ ID NO: 191477 - protein, 191 aa, Glycine max
  unsure (1)..(191): unsure at all Xaa locations
  Clone ID: PAT_MRT3847_14924C.1.pep
MGADMSNNNNPPPTSHAKDLFASPALSLSLAGIFRHAGVAAADEAATSVEEGAGGSGGAADRLEEISSENSGPTRSRSEDDLSGGEADPEDDDDAHGDSEDKKTKKKKKKYHRHTAEQIREMEALFXESPHPDEKQRQQLSNQLGLAPRLVKFWFQNRRTQIKAIQERHEYSLVKTELDRLREENKAMRET

SEQ ID NO: 191478 - protein, 547 aa, Glycine max
  Clone ID: PAT_MRT3847_14925C.1.pep
MLEKIGLPSKPSLRGNNWVVDASHCQGCSSQFTFINRKHHCRRCGGIFCGSCTRQRMVLRGQGDSPVRICEPCKKLEEAARFELRHGRRPGRGSLKSAPRDEDEVLNQILGQTSDKVPSGQRSVGVASSSSNSNFDEDIQKIVSNDKPNVLGIDLGSTTPDELRKQALEEKKKHKILKGEGKSDEALRAFKRGKELERQADALEIQLRKSHKKSLPSGNLSDVLNKGIPAESDRKTKSLSHVGREKNDLTSELRDLGWSDMDLHKEDKKSSNLSLEGELSSIIGEVFTKSGEQKGSKIDKSQVVALKKNALMLKREGKLAEAKEELKRAKILEKQLEEQELLAEAEDSEDELSALIRGMDDGKELPNLHDRGHDFDFERLLAISDDLDGNFEVTEEDMMDPEIAGALESLGWTEPENTSSKSQTFDKEHLLSEIRFLKREALNQKRAGNTEEAMAFLKKAKLLERSLNSSEPEDYNSVSQKSTAIRKSVSSEVAGKGSDSIHERNTSATNNVSSTVAPKSRLMIQRELLSLKKKALTLRREGKMNEA

SEQ ID NO: 191479 - protein, 54 aa, Glycine max
  unsure (1)..(54): unsure at all Xaa locations
  Clone ID: PAT_MRT3847_14926C.1.pep
IYSLWFSDYKYNDXNTVSFVTLNKVVGFLQRIDFTLKYAFRKKPCDMISSTIYC

SEQ ID NO: 191480 - protein, 115 aa, Glycine max
  Clone ID: PAT_MRT3847_14927C.1.pep
PSLFFLSGCHKNKSLHTLGINSPSLLCIQPEQRYLLAPLKPRSLFLATHSNTTFFTESDTDKPLLFLMKGTTLPHKKWLGKTSTFMSCGSSSMLRDLGLKSHPLFLFGFAKGGDI

SEQ ID NO: 191481 - protein, 70 aa, Glycine max
  Clone ID: PAT_MRT3847_14928C.1.pep
TIVFPLLFVSLAPIEPAVVHILVAVVPMIPRVGTMVVGLLPTKVGVVPLPPTNKIRLGFILPLTIKKEPC

SEQ ID NO: 191482 - protein, 471 aa, Glycine max
  Clone ID: PAT_MRT3847_14929C.1.pep
MHIKEAERVVIAKPVASRPTCSTFKSFSELLAGAINASPAIPSSQTTVSAIRPKTVRFKPAMNQPPSGFVFSQADTFGAALDNSSEMSPKLDTKQSLIYKPTAKLVSKTTVSLLANMGNCSTSRQQTQQPMEANFQHSIHEKFRTQPSSNLDQSITPQTEINYQSSEPSKMVQQNIEEDQKVLTSSVNCDRPSYDGYNWRKYGQKQVKGSEYPRSYYKCTHPNCPVKKKVERSFDGNIAEIVYKGEHNHSKPQLHKRNSAAGTQGSGVMSDGMVQDMWSNSHSERNEGNEVRIENTGLSMHSDYYVKVPQPNDSSLNIGATNAGGGSMENSCGLSGEYEEGSKGFEAQEDEHRSKRRKNENQSNEAALSEEGLVEPRIVMQSFTDSEVLGDGFRWRKYGQKVVKGNPYPRSYFRCTNIMCNVRKHVERAIDDPRSFVTTYEGKHNHEMPLKNTGTVASERDSQASLSKDKP

SEQ ID NO: 191483 - protein, 190 aa, Glycine max
  Clone ID: PAT_MRT3847_1492C.1.pep
MAKVGKLRSKAQGQRATPHLLSCARKNLKDVNVRNNSSKASEKKDWEDATCSVCMEVPHNAILLLCSSYYKGCRPYMCATSHRYSNCFEQYKKAYTKATSVQSLQPEANNSNIDLSTGEPKDNTEIPELLCPLCRRQVKGWTVVEAARKSLNAKKRSCMQDDCSFVGNYKELRKHVRSKHPFARPREVDP

SEQ ID NO: 191484 - protein, 60 aa, Glycine max
  Clone ID: PAT_MRT3847_14930C.1.pep
MYAVQTLITLIIQLNQLLVQSKGRMIYLNSVQMCILSTFIQSIKHLNLYMVCLVVHLFCF

SEQ ID NO: 191485 - protein, 100 aa, Glycine max
  Clone ID: PAT_MRT3847_14931C.1.pep
GLVEPRIVMQSFMDSEILGDGFRWRKYGQKVVKGNPYPRSYYRCTNIKCNVRKHVERAIDDPRSFVTTYEGKHNHEMPLKNTGTVASERDSQASLSKDKA

SEQ ID NO: 191486 - protein, 83 aa, Glycine max
  Clone ID: PAT_MRT3847_14932C.1.pep
LNFGQFCFEIKFLGDWSRGYKHFCVESDSLVSTSLLNNECRSYHPCFIMIQDINIKEYALQGGSLKWNHTLRFCFFLLLLVLM

SEQ ID NO: 191487 - protein, 57 aa, Glycine max
  Clone ID: PAT_MRT3847_14933C.1.pep
HKSLIFSLMIETSYFIKRVFHFEGVRSITMLHKHTINCCYDIVFFMKSGMGSEIMEA

SEQ ID NO: 191488 - protein, 75 aa, Glycine max
  Clone ID: PAT_MRT3847_14934C.1.pep
PNFSFKCSFLNTTMDHSSYTTDVHALMQHPCNALSSRERSYLLIAALALAAHLGTVQQETATHAFTQNIAGYTNP

SEQ ID NO: 191489 - protein, 272 aa, Glycine max
  unsure (1)..(272): unsure at all Xaa locations
  Clone ID: PAT_MRT3847_14935C.1.pep
MATLLKILSLLVLLLIPVSCQVDQVLYSGFKDVGASNLTMNGVTTIERNGILKLTNESSRSIGHAFYPSPFQLKNSTSGKALSFSSSFAFAIVPEYPKLGGHGLAFTIATSKDLKALPNQYLGLLNSSDNGNFSNHIFAVEFDTVQDFEFGDINDNHVGIDINSMQSNTSANVSLVGLTLKSGKPILAWVDYDSRLNLISVALSPNSSKPKTPLLTFNVDLSPVFHDTMYVGFSASTGLLASFHYIXGWSFKINGPAPPLDLSSLHSFQSQR

SEQ ID NO: 191490 - protein, 67 aa, Glycine max
  Clone ID: PAT_MRT3847_14936C.1.pep
EILRVGVHSVSTLLLELFQNGVLFLSLKFTSPFEFQSLRIDEQEPSYRKALVQTCGFTISLHTNLIP

SEQ ID NO: 191491 - protein, 50 aa, Glycine max
  Clone ID: PAT_MRT3847_14937C.1.pep
ASTKPHPKRSEGKSPVRERGGNASCLNCSELLWLLFHHRNPWQLTHSSCL

SEQ ID NO: 191492 - protein, 51 aa, Glycine max
  Clone ID: PAT_MRT3847_14938C.1.pep
VKFHIAMHELIRYGLLFYRTEALSSNRCNDLPKRSSRSNQLSIINTRLLYQ

SEQ ID NO: 191493 - protein, 48 aa, Glycine max
  Clone ID: PAT_MRT3847_14939C.1.pep
IITLVKKKPKIYTLSIKRGELYPLPFVMTGALKGNIPFELTMKGNHHS

SEQ ID NO: 191494 - protein, 67 aa, Glycine max
  Clone ID: PAT_MRT3847_1493C.1.pep
PTRPANMSTSTTLFFAYPFPTSGHCIPLLYFTKTLISTFIHITFLFTPYNESLLPKNYSPFLQTLLL

SEQ ID NO: 191495 - protein, 43 aa, Glycine max
  Clone ID: PAT_MRT3847_14940C.1.pep
RVKRNYYFTSLNAHHSTFRFSNGITKFSEVRNSTRGSSICNHA

SEQ ID NO: 191496 - protein, 37 aa, Glycine max
  Clone ID: PAT_MRT3847_14941C.1.pep
PQIYFKIIEGRGHCRGIKLTYACILRHIFSIEIPKFN

SEQ ID NO: 191497 - protein, 81 aa, Glycine max
  Clone ID: PAT_MRT3847_14942C.1.pep
SLSPTCGMNIHKCKLNHELNCCGIYQDSAHASYYIETRSTALYNKHILASAAVKEPSGRKSLLRDKAPRLPRRASHEHEQA

SEQ ID NO: 191498 - protein, 49 aa, Glycine max
  Clone ID: PAT_MRT3847_14943C.1.pep
LESRRVPSQITQQMHENLRSHQRDEILYSSVFSNGYTGDESSFNKSDHE

SEQ ID NO: 191499 - protein, 269 aa, Glycine max
  unsure (1)..(269): unsure at all Xaa locations
  Clone ID: PAT_MRT3847_14944C.1.pep
LRVRLSEEESESESLDDDDDDYETLVNSRRRDMEFFDALIKVKKQDPILKQKDVRLFGSDDSSDDESDEKEKVKSKDKKGEKPMYLKDVVAKHLIEEGADFGDEEEEIDEKEKRKGKKVMPLKDKDFVIKDGKKTYGDEQEELKKAFLQAVEREGLEDGEEEFFSVKEKVGEEDKVDSDDKELEEKLDEYFGGDVESNENSKFLRSYFMNKLWIDKSGKNLNVGEDELQEISEGEIELQRQGGLGFRXQEIPGDRVLGQARKVKGSLRK

SEQ ID NO: 191500 - protein, 99 aa, Glycine max
  Clone ID: PAT_MRT3847_14945C.1.pep
RDKDDGTMSLIPSIRPFHLELMNDLKLLSFCLIVMEPTAHLSLLFYSSLVAAVYDDDDDDNYRMLIHVIHPAGEKHILLQPLATRKYPCPQHKSVSLFF

SEQ ID NO: 191501 - protein, 59 aa, Glycine max
  Clone ID: PAT_MRT3847_14946C.1.pep
WPVCLSSKDNNNNRFDDSSLRCVFPCETNERPSQGLSLSLSSTNPSTIGLQSFELRQSG

SEQ ID NO: 191502 - protein, 102 aa, Glycine max
  unsure (1)..(102): unsure at all Xaa locations
  Clone ID: PAT_MRT3847_14947C.1.pep
FSSTPXIKPILKPLFFIQTLNXXXSXFYRERWRXYIXXFFTFNPNPIIYYKYTNTCCPFRKHFDKSSHYPKSFITTYYWNHNHHVPTTKNIFHYISIPSFSN

SEQ ID NO: 191503 - protein, 64 aa, Glycine max
  Clone ID: PAT_MRT3847_14948C.1.pep
KKHNQCINLYSNANWKTCFPLTISHFNLLSLLNECIVLVFWSWSWNLFNSHPICYYICSQCHIK

SEQ ID NO: 191504 - protein, 148 aa, Glycine max
  Clone ID: PAT_MRT3847_14949C.1.pep
MSKTGATVKDAPTREFIVALAAHFKKSGKIELPAWHDLVKTGVAKELCPQDPDWYYVRAASIARKIYLRGGTGVGGLIKVYGSCYRRGVKPSHHQDAARGLIRHMLQQLEEIDLVAKKKDRKGRFITRNGQRELDTIAAQIVAGSKAH

SEQ ID NO: 191505 - protein, 93 aa, Glycine max
  Clone ID: PAT_MRT3847_1494C.1.pep
YCCEKTTEGGCLSLIKTFRAGEKRARLITTTFFNTNSYRRLNLRSYLSLFLIPQMLSLFGVISLFIHYTKNSSHIFIFRFNPTGFFTLILQST

SEQ ID NO: 191506 - protein, 195 aa, Glycine max
  Clone ID: PAT_MRT3847_14950C.1.pep
MSLRASEIAKKLNLQPHPEGGFYVETFRDHSVQLSTSQLPPEYKVDRPVSTSIYFLVPSGSVSRLHRIPCAETWHHYIGDPLTVVELNEKDGSVKFTCLGSDLTQNQVPQYTVPPNVWFGSFPTKDFTYSADGVFGSAEAEAEAEARDSERNYTLVGCTCAPAFQYQDFELAKPSYLLARFPQFHPLVTALTFPE

SEQ ID NO: 191507 - protein, 210 aa, Glycine max
  Clone ID: PAT_MRT3847_14951C.1.pep
MTHASAHASAHASGKMSLRASEIAKKLNLQPHPEGGFYVETFRDHSVQLSTSQLPPEYKVDRPVSTSIYFLVPSGSVSRLHRIPCAETWHHYIGDPLTVVELNEKDGSVKFTCLGSDLTQNQVPQYTVPPNVWFGSFPTKDFTYSADGVFGSAEAEAEAEARDSERNYTLVGCTCAPAFQYQDFELAKPSYLLARFPQFHPLVTALTFPE

SEQ ID NO: 191508 - protein, 57 aa, Glycine max
  Clone ID: PAT_MRT3847_14952C.1.pep
SLFVTLVNPILIGPSICLRFTRMNIKKIPYYWGELKSIFAFHWIKKGDFPKKYTLKE

SEQ ID NO: 191509 - protein, 68 aa, Glycine max
  unsure (1)..(68): unsure at all Xaa locations
  Clone ID: PAT_MRT3847_14953C.1.pep
FQKEASFHLVIRCRGGIIEPSVMALARTSNQVKMCFREGXGRMHCTPVTCRKKKCGHSTQLRRNNKIK

SEQ ID NO: 191510 - protein, 53 aa, Glycine max
  Clone ID: PAT_MRT3847_14954C.1.pep
LGFFFFFFFLALKQLARLSYLAAKMTSKTEMKSIWGYDLDQSCKTLTSILLST

SEQ ID NO: 191511 - protein, 228 aa, Glycine max
  unsure (1)..(228): unsure at all Xaa locations
  Clone ID: PAT_MRT3847_14955C.1.pep
MASADPYDSALDLLRRLNPKHTTEHLNAIISLVPDLTEDLLSSVDQPLTVKRCRQTGREYLLCDYNRDGDSYRSPWSNEFDPPLDEGGVGGVGADGSEGAGEGAIPSERVRRMEIKANEAFDVYRELYYEGGVSSVYFWNLDDGFAGVVLLKKSATPGGGTEGVWDSIHVFEAIERGRTTHYKLTSTVILALSTAASSLGDMDLSGNMTRQXEQDLPVDNDDXHTANV

SEQ ID NO: 191512 - protein, 65 aa, Glycine max
  Clone ID: PAT_MRT3847_14956C.1.pep
IKALFHARASIADWPLKQRRKKVLYAFENCLFPFANSFVSASFRFHLTHNQIEFNRLPWAEGSIQ

SEQ ID NO: 191513 - protein, 96 aa, Glycine max
  Clone ID: PAT_MRT3847_14957C.1.pep
HLILTTRGLGPLRVYPRVEYHQPRLGNRWGELIPPLSGGFSPFESQKKKKKPPPNPPRGRFFFFNGGTARLYLLPFCPKNKVKGVGQPRNNGFRGA

SEQ ID NO: 191514 - protein, 77 aa, Glycine max
  Clone ID: PAT_MRT3847_14958C.1.pep
GNHFLIKNKFVKYTGHYTITGPHAWSKPIITLLSKWEDISRETIMLDQNVKRWVFYAATDPEAAFLSSIRLVSALSI

SEQ ID NO: 191515 - protein, 284 aa, Glycine max
  Clone ID: PAT_MRT3847_14959C.1.pep
MVVLGTTSPSISCLPSSTQTDYKARRYCSFPQRPRPRPRASRFFCGSPFAPNAIHSPSLSVTNEALNVMISGAPASGKGTQCHLITNKYGLVHIAAGDLLRAEIATGSDNGKRAKQYMEKGQLVPDEIVVMMVKERLLKPDSKENGWLLDGYPRSLSQATALEALGFRPHIFLLLEVSEDVLVERVVGRRLDPVTGKIYHLKYSPPETQEIAARLTQRFDDTEEKVKLRLNTHHQNVESVLSMYKDITVKINGNVSKEEVFAQIDSALTSLIEERKAASGSVAA

SEQ ID NO: 191516 - protein, 182 aa, Glycine max
  Clone ID: PAT_MRT3847_1495C.1.pep
MAKVGKLRSKARGHRASPHLLSCGRKNLKDVNVRKSSSKALEKKDWEDATCSVCMEVPHNAILLLCSSYDKGCRPYMCATSHRHSNCFEQYKKTYTKATSVQSLQLEANNSNIDLSTGEPKDDTEVPELLCPLCRRQVKGWTVVEVARKCLNAKKRSCMQDDCSFVGNYKELRKHVRSKHPF

SEQ ID NO: 191517 - protein, 81 aa, Glycine max
  Clone ID: PAT_MRT3847_14960C.1.pep
SEENALRNSFVKLAFLLAFFIIASDLCMKLEARGPIVRLHCTNDSQCQYSCPTCGCRCVNTWCQCPKQPFVEDIRFQAPPN

SEQ ID NO: 191518 - protein, 174 aa, Glycine max
  unsure (1)..(174): unsure at all Xaa locations
  Clone ID: PAT_MRT3847_14961C.1.pep
ERERERERERERERERERERERERERERERERERERERPRLRSTIFFALFLFCAFTTSYLPLAISDFVLDNEGNPLENGVTFYILLDITVFGGIRAASTXMYXCPLSVVHSRIVLVKGFGSIISSLYLFLFIAVCHALSLKFDSFAVIVLCVGIPTEXSCVDDLPRGPAVIICE

SEQ ID NO: 191519 - protein, 78 aa, Glycine max
  Clone ID: PAT_MRT3847_14962C.1.pep
VFLKARSIPPWVKDLFMLNLFSSFCLAWFGANRCTVCSSWCLTVSKRCIILVVFFRCSAIKMLNGPYMAGLYSQIIFI

SEQ ID NO: 191520 - protein, 62 aa, Glycine max
  Clone ID: PAT_MRT3847_14963C.1.pep
RGKKKNPCGPYFWCPFPPPWGPLLKPPPPPVFPFNKGPWPPPFLCWLAPPLGPPRFSLYLSR

SEQ ID NO: 191521 - protein, 231 aa, Glycine max
  Clone ID: PAT_MRT3847_14964C.1.pep
MAATASASAASLSLRSSPFKLNPPKLNSVTLRFPHLNRRYNSAFRVVAASVSVSNPNVQTGPDDLVASILSKVVQTDGGVLLKEEEHKEVAEVAQELQKYCVSEPVKCPLIFGEWDVAYCSRPTSPGGGYRSAIGRLFFNTKQMVQVVEAPDIVRNKVSLSVLSFLDVEVSLQGKLKALDGEWIQVIFEAPELKVGSWQVQYGGQSEVKLRITYVDEKISGKNNSFWGVPL

SEQ ID NO: 191522 - protein, 76 aa, Glycine max
  unsure (1)..(76): unsure at all Xaa locations
  Clone ID: PAT_MRT3847_14965C.1.pep
RSSHVMSDRVSSESAXISVATTSPSTANRTPTRSRRRAKRGFRARSAVPKETSPRLHRREKKLTLPRLMFRRFAAR

SEQ ID NO: 191523 - protein, 55 aa, Glycine max
  Clone ID: PAT_MRT3847_14966C.1.pep
KALYLYLSTAKLWPDLKTSAGICLIHVKHMTFSRNWTLTPLYIIPGLQHHVEQLP

SEQ ID NO: 191524 - protein, 98 aa, Glycine max
  unsure (1)..(98): unsure at all Xaa locations
  Clone ID: PAT_MRT3847_14967C.1.pep
ERPTLKHQRKWKSYPFFTKXWYNRGGEIFQADECRKGAIENCASITHDSKSCMERPXESXLKSTNTLIATDEKTETFELDYNXKRHIWNGYNASTHFN

SEQ ID NO: 191525 - protein, 334 aa, Glycine max
  Clone ID: PAT_MRT3847_14968C.1.pep
MELSQLGFLDELLAPRKDTTWSNALSTGLNELLLPSGWSFDSFDENQGLATLNPSFAAFSTPLDHRFECPYGSEAAYPFVDGFTLPELDSSYTRNDESAPLLPQEDNPSLEDEEFGFLGSDNQSLEQAKIGCKIEEQVTEIPVFNMGLCGEKKPKSKKLEGHPSKNLMAERRRRKRLNDRLSMLRSIVPKISKMDRTSILGDTIDYMKELLERIGKLQEEEIEEGTNQINLLGISKELKPNEVMVRNSPKFDVERRDQDTRISICCATKPGLLLSTVNTLEALGLEIHQCVISSFNDFSMQASCSGAAEQRNCMNQEEIKQALFRNAGYGGRCL

SEQ ID NO: 191526 - protein, 51 aa, Glycine max
  Clone ID: PAT_MRT3847_14969C.1.pep
LENQKKNPCGFNPNWSGFSLGSSQDIMGVQRKNHNLNTFFHQSQSIFPLCS

SEQ ID NO: 191527 - protein, 64 aa, Glycine max
  Clone ID: PAT_MRT3847_1496C.1.pep
ILFFCPTNRAIFWWGGGLCLPSMGGRAPKKFRQRSRVGFGPKRALFFKRTGALFLRFPPVKGYT

SEQ ID NO: 191528 - protein, 59 aa, Glycine max
  unsure (1)..(59): unsure at all Xaa locations
  Clone ID: PAT_MRT3847_14970C.1.pep
IGYLGEQLVFQGPKLTAXYMKISIGFVIASTNGGDDTINFEAFPYKLVHFGEIQEKVVL

SEQ ID NO: 191529 - protein, 262 aa, Glycine max
  unsure (1)..(262): unsure at all Xaa locations
  Clone ID: PAT_MRT3847_14971C.1.pep
DKVADGFKVVARSGNIVAGIANESKKLYGVQFHPEVGLTENGKVILKNFLYDIAGCSGNFTVQNRELECIREIKEKVGTSKVLVLLSGGVDSTVCTALLNRALNQDQVIAVHIDNGFMRKRESQSVEEALKKLGIQVKVINAAHSFYNGTTTLPISDEDRTPRKRISKTLNMTTSPEEKRKIIGDTFVKIANEVIGEMSLKPEEVFLAQGTXRPDLIESASLVASGKAELIKTHHNDTELIXKLRGEGKVIEPLKDFIKMKS

SEQ ID NO: 191530 - protein, 188 aa, Glycine max
  Clone ID: PAT_MRT3847_14972C.1.pep
TSLTLSLSVTWKLEPPNSTHLSMNSLSLSLAMLLLLLCVSVHACSARSLYPSLTKKDTPHKELDKLKLLEALTASSTVKNYKLEENQPQQQKVANNEINTYESCSGASSTLKETIVEAASVNIIPSDGGEHATGTSFQMDSPSFLATQDERRHARSMLGPAEHNDEETVVTKTSDTEEDIVEMDYAQP

SEQ ID NO: 191531 - protein, 53 aa, Glycine max
  Clone ID: PAT_MRT3847_14973C.1.pep
QIISGDVIYAPFASHYPYGKSGLTAVLVCRHEVKMIIIQNFKYTGSDLHGISI

SEQ ID NO: 191532 - protein, 73 aa, Glycine max
  unsure (1)..(73): unsure at all Xaa locations
  Clone ID: PAT_MRT3847_14974C.1.pep
LKRASINSTYIISYKPYRNNDGINLSHPQTLRXKEIFNSNVFNYMFNTNSILYKPGEHPNHEVHINFAPYSFY

SEQ ID NO: 191533 - protein, 94 aa, Glycine max
  Clone ID: PAT_MRT3847_14975C.1.pep
GKLGGLQERGGNLRADARVRQRWGVVVERDGTCYYILFVWWKKKIIFCFPLKEKFVIGIIQYFVWFKISLGGGFFYYGGCYTPLHFFVFFLSFG

SEQ ID NO: 191534 - protein, 63 aa, Glycine max
  Clone ID: PAT_MRT3847_14976C.1.pep
LILYLILLLLYPVKVETLQLYHKWVNTIFKFQSSPSLAMTPTSSMLIAHPHIPLVRFITKHLL

SEQ ID NO: 191535 - protein, 134 aa, Glycine max
  Clone ID: PAT_MRT3847_14977C.1.pep
GGPPPKEENVFVSATGVCSSESEKKGFFFSAKTPPPGGSKGVFYLMPGAKTRKKKGVFLGKNFFFGGEKNTGLVRKWFLKKPPFWEGLFFVWGLAGGTIWKRLFFDSPDGFPPPSVGKGKPPFLKEKKPLWFPG

SEQ ID NO: 191536 - protein, 321 aa, Glycine max
  Clone ID: PAT_MRT3847_14978C.1.pep
RNVVLEEGHDQSKRTGSKPTLAEEAAQAAKAAAVAAADIAKARLELLSSKIEEKRYFVEVVNLLDKQVQEMKLMTNAIGRLEASGGLSVSKQEDRLVTQTGSKTQQLIVNGKSDYESRSVRSSSPPVSVEPSSAPHPKSYMEIMAMIQRGEKPSNIREIDDSAPNPYQQPSNPRLAPRAKPWEVSQVQNTSTQVLPYQVNGKIQDNGDNTVPWWQTKNVRIKEIDNEIEYNGAPAASSPQPVQRAWVPPQPPPIAMPEAAEAIRRPKQVVQKEVTLDDQSAAHSSDLTNGSKSEDAIEGNVVNSLVSSGEIQNHEVGYEEK

SEQ ID NO: 191537 - protein, 87 aa, Glycine max
  unsure (1)..(87): unsure at all Xaa locations
  Clone ID: PAT_MRT3847_14979C.1.pep
RVQDLALQNGGEKQRKEPPPRWPSNHANPQTKGYEPFEEKIKVETLKHRRQNAGKGTKKGLLGFFFCRGGRPPLPFLSPKKFSXAGS

SEQ ID NO: 191538 - protein, 95 aa, Glycine max
  Clone ID: PAT_MRT3847_1497C.1.pep
MGENVLSQVLFWPIHKDFFPVQSFIHRFFRYSQLVYPDNGDQDHVFPGHKLKNPSSDQRFFLWILKYVHRGGRSENFPGNVRTFGYCLFPLNKRS

SEQ ID NO: 191539 - protein, 255 aa, Glycine max
  Clone ID: PAT_MRT3847_14980C.1.pep
VFVDVLNVSCKLKLLLPSIAALPLLMAYAGHTTIVIPKPLVPHIGIEVLDLGWMYKLYMGLLAVFCTNSINIHAGINGLEVGQTVVIASAILIHNIMQIGASTDPEYKLAHAFSIYLAQPLLATSLALLSYNWYPSSVFVGDTYTYFAGMTMAVIGILGHFSETLLIFFLPQVLNFLLSLPQLSGYIPCPRHRLPRFDPQTGLLTGTNDGTLVNFFLRNLGRKSEKALCIYLLAFQAIACCLCFLLRYFLAGWYK

SEQ ID NO: 191540 - protein, 89 aa, Glycine max
  Clone ID: PAT_MRT3847_14981C.1.pep
YLQSLMEPGRHAHGALFKYIIIPSKMMIHNLLTKITFLPICIICIKLSFDVTGQEAVEFPLHGRVTSFMLYNSSIFTAKRFIVPHQCIP

SEQ ID NO: 191541 - protein, 197 aa, Glycine max
  Clone ID: PAT_MRT3847_14982C.1.pep
MLFATTMRSSSCMTSAQVKSLDYVSSGVSKVALAAFFYKTTFCQKQCCPSFFSFGQPCLTFSFKRMTWSVRSSLNDSSFSPSTSNSTNGRTRIIRVIQEFQTKLGSKIQEVKKNLPLKLFFFLVGFYCATAFATVIGQTGDWDILSAALAVAVVEGIGALMYRASLPLVRKSRSLISLFNYWKAGLTLGLFLDSFKY

SEQ ID NO: 191542 - protein, 33 aa, Glycine max
  Clone ID: PAT_MRT3847_14983C.1.pep
NSVRARIFQESVYKTQQTIWKETRHMVQRQFIA

SEQ ID NO: 191543 - protein, 97 aa, Glycine max
  Clone ID: PAT_MRT3847_14984C.1.pep
AVTPTRRLNIEYNGSDLYDSFEFKQMTLQLNEAIQTSKESSPAYREMTHRHKLKKAIQGSNGSSPSLVFHLNSPFYRRHLKRLYKESTKAPRESLVL

SEQ ID NO: 191544 - protein, 68 aa, Glycine max
  Clone ID: PAT_MRT3847_14985C.1.pep
VSWELGLRFFSSMDSFASWKMYDNGMKKEEREETSLQREDESRRSSSHKRSWIRVWRKKEMNEGRGRE

SEQ ID NO: 191545 - protein, 85 aa, Glycine max
  Clone ID: PAT_MRT3847_14986C.1.pep
EKCAKPGSVIEKKAYFEAHFKRKGMLGFIPSTGHEGSSDRATSENDGSERNAKQEDFESNDGHYVQFDEMSQKDFELDEGDHYIE

SEQ ID NO: 191546 - protein, 36 aa, Glycine max
  Clone ID: PAT_MRT3847_14987C.1.pep
MYQTSGFMLDCVGFSNFLMYPSCVCWFSNKVFSVSK

SEQ ID NO: 191547 - protein, 88 aa, Glycine max
  Clone ID: PAT_MRT3847_14988C.1.pep
VYISNLPNKTCHSPLFSTSTWLTISESFSSNPWKFFLARFDNLMSGVVPIKFKPAIEVIYALFKTEGKQGKCFLFIFLCMGSFYYSPG

SEQ ID NO: 191548 - protein, 35 aa, Glycine max
  Clone ID: PAT_MRT3847_14989C.1.pep
SVQIFSIYITSHQKISCWTWKYNPKARVKFAEPTM

SEQ ID NO: 191549 - protein, 68 aa, Glycine max
  Clone ID: PAT_MRT3847_1498C.1.pep
THASVHASEDYRVDYRRGRKRSKGDCFTSGDVVSVVGFGRIGFDYHSPDTFPLTSRLNEKTDYKQFDC

SEQ ID NO: 191550 - protein, 67 aa, Glycine max
  Clone ID: PAT_MRT3847_14990C.1.pep
GLHYLTQGPGHIQSDNVQPLGRVLMSVWTGYRTKHPTRLNAFSESFCALVIMEAVVKIMYFVRKVIS

SEQ ID NO: 191551 - protein, 85 aa, Glycine max
  Clone ID: PAT_MRT3847_14991C.1.pep
NIIFLKLKQSPIKQIGPHHNNNGKPVYVTSIYTDGSFHDCEAYQALSYLYNLGSPKPTKNGLLPFASLRQFRQGAKAHFSPRKRY

SEQ ID NO: 191552 - protein, 60 aa, Glycine max
  Clone ID: PAT_MRT3847_14992C.1.pep
MNIPLCMLLRYSVKTFKILSHLYCRFSRILYVSEQSSPFFIDRFLCLLHIISSSSNCLRP

SEQ ID NO: 191553 - protein, 286 aa, Glycine max
  Clone ID: PAT_MRT3847_14993C.1.pep
ARNSARAARARAAVTYMSPERIRNESYSYPADIWSLGLALFECGTGEFPYTANEGPVNLMLQILDDPSPSPLKNKFSPEFCSFVDACLQKDPDTRPTAEQLLSHPFITKHDDAKVDLAGFVRSVFDPTQRLKDLADMLTIHYYLLFDGPDDLWQHTKNLYSESSIFSFSGKQHCGPSNIFTSLSSIRTTLVGDWPPEKLVHVVERLQCRAHGEDGVAIRVSGSFIIGNQFLICGDGIQVEGLPNFKDLGIDIPSKRMGIFHEQFIVEPKSLIGCYTIVKQELYINQ

SEQ ID NO: 191554 - protein, 55 aa, Glycine max
  Clone ID: PAT_MRT3847_14994C.1.pep
MIIGKEKSPKLGNNGPGLPPSNGDGHGGNGGGGGNFSGGLILLGILGGVKVLKAI

SEQ ID NO: 191555 - protein, 35 aa, Glycine max
  Clone ID: PAT_MRT3847_14995C.1.pep
LHTKKKKDYVRTLWSYTNSFLKLCFYLTEPSRPDQ

SEQ ID NO: 191556 - protein, 82 aa, Glycine max
  Clone ID: PAT_MRT3847_14996C.1.pep
GPPYSQGPIGGGVSIGGLKYNFGPPAFFRGKNLYTPTFKKTEKTTQPESLPNLEGPRIGVPQWKEVQPYRTPRPKNPSSSGP

SEQ ID NO: 191557 - protein, 85 aa, Glycine max
  unsure (1)..(85): unsure at all Xaa locations
  Clone ID: PAT_MRT3847_14997C.1.pep
GFKVYAGKNAPXMGPHFRPESMGCNRLDLXRKVRVVTTLGTGYAPCGGCFTAVRAFGPRAIFLRDISRFEPFNTGISSLYIPRFQ

SEQ ID NO: 191558 - protein, 40 aa, Glycine max
  Clone ID: PAT_MRT3847_14998C.1.pep
NSHKYAIIKDLKEKHWLHHEMKKNDQHVAPSVVFCSWTDA

SEQ ID NO: 191559 - protein, 83 aa, Glycine max
  Clone ID: PAT_MRT3847_14999C.1.pep
PGGQNAGKKKKKTGGAKRRGTKKKRRAAKWPITQKKPCKKKKRKPGKKGVNPKKKKTRPGGKNTGEKKKKGGKKKKKGPAPRK

SEQ ID NO: 191560 - protein, 256 aa, Glycine max
  unsure (1)..(256): unsure at all Xaa locations
  Clone ID: PAT_MRT3847_149C.1.pep
MGFCDEAILLFQEMLQLGVEADVFTLVSLLSASSKHCNLDLGRFVHLYIVITGVEIDSIVTNALIDMYAKCGHLQFAKHVFDQMLDKDVVSWTTAARRRQKXMVNAYANHGLVENAVQIFIQMPVKNVVSWNSIICCHVQEXSKAVKVFHRMCISGVMPDDVTLVSILSCCSNMGDLALGKQAHIYICDNNITVSVTLCNSLIDMYAKCGALQTAMDILWMPEKNVVSSNVIIGALALHGFGEEAIEMLKRMQASG

SEQ ID NO: 191561 - protein, 110 aa, Glycine max
  Clone ID: PAT_MRT3847_14C.1.pep
TRPAQFSNDGSIFVSENEEFLKKGSKPVLLIESTGHALHAFVNQEYQGYPLTYNKFITLYFINQLSLCDHMRIVDIMNFSICHLFPCLLLVIVLSFPCKGFRIIWNGGSV

SEQ ID NO: 191562 - protein, 38 aa, Glycine max
  Clone ID: PAT_MRT3847_15000C.1.pep
MPIRNIAVRRPVEATHPETLKADFGEFITTFIFMCAGS

SEQ ID NO: 191563 - protein, 95 aa, Glycine max
  Clone ID: PAT_MRT3847_15001C.1.pep
YMLLSPHLTCSSTVVIFLLSFCNPKLSEWARDMSSRDLEKPMHGLIVVNVRRYRPFCLYLRVKYLGSVFNSPSSTKPSPYVFLSLFPVLIRSVLL

SEQ ID NO: 191564 - protein, 57 aa, Glycine max
  Clone ID: PAT_MRT3847_15002C.1.pep
LVSNNAIQPVRIKTSMNNSPRMKLGSDTTQNGFFRHNDYLFKEKRLCVPPSVVFSQP

SEQ ID NO: 191565 - protein, 55 aa, Glycine max
  Clone ID: PAT_MRT3847_15003C.1.pep
LTPFPSPLTHPLTNITICVCACLSYNNLGFKFLQSLPWPNTSLFLHGSCKKLGRV

SEQ ID NO: 191566 - protein, 427 aa, Glycine max
  Clone ID: PAT_MRT3847_15004C.1.pep
MSGKVIISAVSLILVVGVAIGVVVAVNKKGEDPTLQSQQKSVGVICQNTDDQKLCHETLSSVKGMDTADPKAYIAKAVKATMDSVTRAFNMSDRLSTEYGGNDNGTKMALDDCKDLLQSAIESLQLSIDMVHNNNLQAVHNQQADFKNWLSAVISYQQACMEGFDDGKEGEKKIKEQFHTETLDNVQKLTGITLDIVSGLSNILEKFGLKFNLKPASRRLLGKDGLPTWFSAADRKLLGRGWRSRVKPNVVVAQDGTGQFKTVADAIASYPKDNKGRYIIYVKAGVYDEYITVPKSSKNILMYGDGPAKTIITGRKNFVDGVKTMQTATFANTAEGFIAKAMTFQNTAGAEGHQAVAFRNQGDMSALVGCHILGYQDTLYVQTNRQFYRNCVISGTVDFIFGTPSTVIQHSVIVGRKPLDNQFNTVT

SEQ ID NO: 191567 - protein, 134 aa, Glycine max
  Clone ID: PAT_MRT3847_15005C.1.pep
NMATGIVIQGCNIVPEAELFPTRFQVKSYLGRPWKQFSRTVVMESTVGDFLHPEGWCPWAGEHFEDTLYYAEYNNDGPGANVNGRIKWKGYRGLISREEATQFTPAQFLQAGANGGSDWLKALRVPHALSFMKA

SEQ ID NO: 191568 - protein, 166 aa, Glycine max
  Clone ID: PAT_MRT3847_15006C.1.pep
MGNDCVPSTAAAEVMAVVAVELTDASSWWHDIDDSPAWQDRIFYTLAVLYGIVATVALVQLARIQLRVPEYGWTTQKVFHFLNFLVNGVRCVVFIFFRNVQRLKPEIVQHILLDVPSLAFFTTYALLVLFWAEIYYQARAVSTDGLKPRFYTINIGGYGGQNTLWV

SEQ ID NO: 191569 - protein, 89 aa, Glycine max
  Clone ID: PAT_MRT3847_15007C.1.pep
KPMNQWTSLFMNRGCKLAYMVGSIKDCPPGFTRGSNQIRGSEHINSWSACARHRTDVWGARPGKSKVTILCAPRNGVLGIDGGGRGWIF

SEQ ID NO: 191570 - protein, 70 aa, Glycine max
  Clone ID: PAT_MRT3847_15008C.1.pep
YCLEAWPLIIEDWYWFTENDEALYQPLTSACRFLSSPIVRLALLVCEMLEIYSVISSRCLYVGRVGGRVG

SEQ ID NO: 191571 - protein, 97 aa, Glycine max
  unsure (1)..(97): unsure at all Xaa locations
  Clone ID: PAT_MRT3847_15009C.1.pep
GEGFNIXGYEGGXRCNFYYDVXNFGEYGXEKXLRMXXFLLYGSEVEEGGESMFXFENXLXMDGXYGFEXXIGLKVKXXXGDGVVFYXLVNNGEIGVE

SEQ ID NO: 191572 - protein, 66 aa, Glycine max
  unsure (1)..(66): unsure at all Xaa locations
  Clone ID: PAT_MRT3847_1500C.1.pep
LVMLEYVCDYSLNFEVLLIAMEPKHGKRRDYLLYCMIYQKDFHTSIFLFLFPTFXLSXSFQFSLLA

SEQ ID NO: 191573 - protein, 56 aa, Glycine max
  Clone ID: PAT_MRT3847_15010C.1.pep
TLYVTGLSSRVTEIYLNEHFSKEGKVSLCFLVVEPRSRISRGFAFVTMESAEDADR

SEQ ID NO: 191574 - protein, 93 aa, Glycine max
  unsure (1)..(93): unsure at all Xaa locations
  Clone ID: PAT_MRT3847_15011C.1.pep
RACTSPKXXXXXXXXXXXXXXXXXXXXXXXXXXXFFFXXXFXFFWVGFFFYFFFFIFPFFFCLSFPKSIILHAIPKRKNHHQVALALHCLTLL

SEQ ID NO: 191575 - protein, 108 aa, Glycine max
  Clone ID: PAT_MRT3847_15012C.1.pep
MTQILLHGTLQVTIYELDNLKAGSGGNILTKLVHNIEETIGIGKGITKLYATIDLEKARVGRTRIIEKEHTNPKWYESFHIYCAHMASSIIFTVKDDNPIGATLIGRA

SEQ ID NO: 191576 - protein, 33 aa, Glycine max
  unsure (1)..(33): unsure at all Xaa locations
  Clone ID: PAT_MRT3847_15013C.1.pep
CRCRVCTGAETHDLMESSTAXGNQNSLXTHSTV

SEQ ID NO: 191577 - protein, 82 aa, Glycine max
  unsure (1)..(82): unsure at all Xaa locations
  Clone ID: PAT_MRT3847_15014C.1.pep
YDRDTPFSTMYRGSSFYGLDITGISVGGAKLPGSSSTLATGGASIDSGTVITGQPRTVHTELRCXLRQGMSKYPFAGEALIL

SEQ ID NO: 191578 - protein, 102 aa, Glycine max
  unsure (1)..(102): unsure at all Xaa locations
  Clone ID: PAT_MRT3847_15015C.1.pep
PTLLKNKRCVPCNXKDLPPLSEDAGLSLMPPAAEWNLFFXDGVMNLRGAWAEKTLPKGLEFFMXQNGLAESEGHYSDLDPGGWNKDTIYIWTHSAGGVTEKD

SEQ ID NO: 191579 - protein, 110 aa, Glycine max
  unsure (1)..(110): unsure at all Xaa locations
  Clone ID: PAT_MRT3847_15016C.1.pep
VPVXWWCLSXLLXSWXXSVSXXSSGXXLXLXAXFFSWGSFWXXWXCVXSGXVXXXCWALXXXSPCXAXXSLRXGFVWRCGAXXXXPSLVFASXVASSSAXXWXXLLFGLV

SEQ ID NO: 191580 - protein, 92 aa, Glycine max
  Clone ID: PAT_MRT3847_15017C.1.pep
MIPLKRNLSCKIQPRTHDNQLSYVVGDTTILAVDRSVMFPAFLSKLAGEDLDALIFVTNDDDLEHMMLEYERLYRPNLKPIRMRLFLFTLSN

SEQ ID NO: 191581 - protein, 87 aa, Glycine max
  unsure (1)..(87): unsure at all Xaa locations
  Clone ID: PAT_MRT3847_15018C.1.pep
MLQEFTARPYISDDCXLGGGTCIRYXGQLYTPSSVHASLVACSMIGIPGHHRKPSNSILLSSADIFDLAHSSKGHQFIPVRDSRIIP

SEQ ID NO: 191582 - protein, 82 aa, Glycine max
  Clone ID: PAT_MRT3847_15019C.1.pep
SQDFRPLTFVFLNLTIESYYPSRSYWQRANDAYAGSRCPSLALERIEVEFELLSCRIRKVKSHTKSQRTCSRESGLFCSGQT

SEQ ID NO: 191583 - protein, 86 aa, Glycine max
  Clone ID: PAT_MRT3847_1501C.1.pep
FQCINFPNEFFILNFRHISVLEQNQLKSFSSCSLAHLGSCFLSLTSYNIDAILNPFKNLISIQKFPSCDPTCSCSCEKKSLYRHQF

SEQ ID NO: 191584 - protein, 82 aa, Glycine max
  Clone ID: PAT_MRT3847_15020C.1.pep
GKFVAHSLELIVATWVFGTHNACLTEGYYLAKPLPFRLCCPPPVPVKPAGSPSSGKFSGGFCDRRSQKAGIICCLKWRPIFF

SEQ ID NO: 191585 - protein, 88 aa, Glycine max
  Clone ID: PAT_MRT3847_15021C.1.pep
LRLQFEKDGEDPCVVLGGNRKPVLIILSINFKDGCNSNKNSIKKKDSLILVQEHFTRFLFFYAWYLVRPFIVGCIVSVRDVILPRLRG

SEQ ID NO: 191586 - protein, 71 aa, Glycine max
  Clone ID: PAT_MRT3847_15022C.1.pep
LSRTPKHQEALLLWLEEQVGCQAHRFIKLYVERYGEGIVICLQHPRVRSPTGTNGVTGGANGLANPVFMPV

SEQ ID NO: 191587 - protein, 195 aa, Glycine max
  unsure (1)..(195): unsure at all Xaa locations
  Clone ID: PAT_MRT3847_15023C.1.pep
MCVCINAITYDIRTNKMKMVGRQLSTVMILLWCLHFHVQSCLGFEDGISRCQFPEGFLFGTSTSSYQIEGXTWDVFSNTPGKINNDENGVIADDHYHRYLISISFILTCIYYILRLIYDLTAGLDIQQEDTVLMSSLGVNVYRFSISXTRILPRGIYXDINPNGIMFYNKIIDNLLLKGIEPFVTIHHQDLPQEL

SEQ ID NO: 191588 - protein, 186 aa, Glycine max
  Clone ID: PAT_MRT3847_15024C.1.pep
NSSVFTAEKYVDMVVGNLTTVIKGIHKTGGRKFGVLNQSALGCIPLVKALLNGSKGSCVEEASALAKLHNGVLSVELEKLKKQLEGFKYSYVDFFNLSFDLMNNPSKYGLKEGGMACCGSGPYRRYYSCGGKRAVKDYELCENPSDYVFFDSIHPTERFNQIISQLMWSGNQSIAGPYNLKTLFEE

SEQ ID NO: 191589 - protein, 36 aa, Glycine max
  Clone ID: PAT_MRT3847_15025C.1.pep
GVCNEMDGNVSARYKSKQLTESAYDGTLKSYRHLIN

SEQ ID NO: 191590 - protein, 47 aa, Glycine max
  Clone ID: PAT_MRT3847_15026C.1.pep
FKFFLCFFKMHMKTKSDALRHLLSYDKTNEVLYINTGFCHFTLDVCN

SEQ ID NO: 191591 - protein, 74 aa, Glycine max
  Clone ID: PAT_MRT3847_15027C.1.pep
KEKGPWKQIRGWIFNFLAKPPPWYLGSPCKAPGAKKQPLCILWPGPPPCRGWGSPRKIPITPVYFFGKNLLLKN

SEQ ID NO: 191592 - protein, 72 aa, Glycine max
  Clone ID: PAT_MRT3847_15028C.1.pep
MGCVIGVRLASFFTGAAAASFLGLYSLHNDYKLAHLYYIQRMNGLHKSLESRISSLEKLKQTETSEQVEATK

SEQ ID NO: 191593 - protein, 107 aa, Glycine max
  Clone ID: PAT_MRT3847_15029C.1.pep
SLFTTFFLSHIYMLVVNGRIQTTISFLSLLSLPPTQPSFLSLASIQLYNSEFAYNLICRCKPFSATRSYVPMCLIKLPIVSFFFLQKQKKDESSSTTSTPSSKSAPL

SEQ ID NO: 191594 - protein, 79 aa, Glycine max
  unsure (1)..(79): unsure at all Xaa locations
  Clone ID: PAT_MRT3847_1502C.1.pep
VDKTGDWIRRIQNXSPRGDLSRVAAWKKGXLMGKIVMSGNATVKRRDWASLVLVFLTNSNSTEHYDACKRTKSVPRTGA

SEQ ID NO: 191595 - protein, 155 aa, Glycine max
  unsure (1)..(155): unsure at all Xaa locations
  Clone ID: PAT_MRT3847_15030C.1.pep
QKIHLGWPVKETGHTLRTGTIHPKKPSKALFMQVLDGQGEPINGSITEDGLELSERNHIEDATTKQLYILLCSEKAXYVYSLVHAIQGVKKVLYKKKFHSSTCCWASTFCSPSDVGLILIFTSGKVELRWCFSQSALYLRTYDGAKHMKRLNIIC

SEQ ID NO: 191596 - protein, 81 aa, Glycine max
  Clone ID: PAT_MRT3847_15031C.1.pep
YWILYSLNKAYSALHFQLSFIVHISEDPSSETFYLGIPSTVGIESVNFQSLTFSERLSNTLMLGSTYGVTANKSLRKLASN

SEQ ID NO: 191597 - protein, 295 aa, Glycine max
  unsure (1)..(295): unsure at all Xaa locations
  Clone ID: PAT_MRT3847_15032C.1.pep
QALVRGLLVRAPAAASPLGRLAPICPPASPAARKSRGLSGARRAPMRRPHPPGPPWRLSLTERVGSWRPSTAAGLQEFXVSTHTSANFFDGSPKIVEVDTGSGRPKSRSRRSNTSMSDFGDDPSFQALPSPLPFAHLSIPSHRNYHDSEWGLTREECRFSTAQSTPRFTNSCSCGSVVVAPMSMTPKSVCTENNFFYXAVSDNFPNYMASTQSFKAKLRSHSAPKQRPDPAGPKKRLTLNEMMESRCSLSGTRMQRSCSQIQEAINFKNAVMSKLQKSAELGRDTELNFSNQRRW

SEQ ID NO: 191598 - protein, 53 aa, Glycine max
  Clone ID: PAT_MRT3847_15033C.1.pep
LGRAVKTKEIATVNEAISNHHYNITLEIEIVSSTSIFPYNHVCIQITRIRSFT

SEQ ID NO: 191599 - protein, 219 aa, Glycine max
  Clone ID: PAT_MRT3847_15034C.1.pep
QSKTISRAESAREHISEYACSGLRTLLLADRELNEEEYKKFSKDPRVRKNLVSEDQEQIVEGIIQNIEKDLILLGATAVEDKLQDGVPECIDKLAQAGIKLWVLTGDKMETAINIGFACSLLRQGMKQIIISSDTPETKSLEKMEDKSAAEAAIKSSVLRQLRESKALLSTADENYEALALIIDGKSLTYALEDDVKDLFLELAIGCASVICCRSSPKQ

SEQ ID NO: 191600 - protein, 67 aa, Glycine max
  Clone ID: PAT_MRT3847_15035C.1.pep
MSFAKESFVHVPIDLLQASRSKGQCDRLSVIGVMSQSVDLFNASKILATEFRAEHGNIEFSVLHRIN

SEQ ID NO: 191601 - protein, 57 aa, Glycine max
  Clone ID: PAT_MRT3847_15036C.1.pep
CTLLRTDIIKYSKMGVFWILNFLVVVMNFVFANSFSSFQFCVLICDIKDLFVLLNGS

SEQ ID NO: 191602 - protein, 74 aa, Glycine max
  Clone ID: PAT_MRT3847_15037C.1.pep
EKNWVASFLGTGVEIFFFLFGGGVEDSVSPVTNNRFFVIGYVVEKCFVGPRMMFSPPCFWGVNISFVFSPLGSV

SEQ ID NO: 191603 - protein, 43 aa, Glycine max
  Clone ID: PAT_MRT3847_15038C.1.pep
TGQTLILTTHDIACLLDNYCYPIVDESTKDATAGGPVRTRIGY

SEQ ID NO: 191604 - protein, 60 aa, Glycine max
  Clone ID: PAT_MRT3847_15039C.1.pep
YARFHFVGFNVLKCINCVTINKSKTIHIWPMNLRHNVPMHVSIYIKCLLCFTVGRIFLWE

SEQ ID NO: 191605 - protein, 72 aa, Glycine max
  Clone ID: PAT_MRT3847_1503C.1.pep
LETLLPLHLSQIVAPFASICTRLRRSLSAWNKHQFTCLIYHITWYHMQQIDVSTSMPTSHMMRTVLNVVDIS

SEQ ID NO: 191606 - protein, 311 aa, Glycine max
  Clone ID: PAT_MRT3847_15040C.1.pep
MKGEVQLQPPAVMQNPSDSDPLLHNQEEEEEDESPGSSGEIKNEEEDVEAGLLPCCRICLESDSDPEDELISPCMCKGTQQFVHRSCLDHWRSVKEGFAFSHCTTCKAQFHLRVESIEDNTWRKIKFRLFVARDVFLVFLAVQTVIAAIGGFAYIMDKDGSFRNSFDDGWDRILSRHPIPFYYCIGVLAFFVLIGFFGLILHCSSLNSNDPRMAGCQNCCYGWGILDCFPASMEACFALVVVFVVIFAILGIAYGFLAATMAIQRIWQRHYHILTKRELTKEYIVEDLGGCYFPPKLDPEHEGRLKMLKLL

SEQ ID NO: 191607 - protein, 96 aa, Glycine max
  unsure (1)..(96): unsure at all Xaa locations
  Clone ID: PAT_MRT3847_15041C.1.pep
MEAGRGHTLMCLARVLLFLXALTLCADHGSTTVQDMARKSKLVGNVLLSTEKKFKAFMENYWRSYSTKDVYLRRFRILYQIIVTASEHQTLDPIVD

SEQ ID NO: 191608 - protein, 47 aa, Glycine max
  Clone ID: PAT_MRT3847_15042C.1.pep
VTPNLYGNLVANTAAGIAGGTGVMPGGTVVSYYCIVTSVFSSDYLPF

SEQ ID NO: 191609 - protein, 107 aa, Glycine max
  unsure (1)..(107): unsure at all Xaa locations
  Clone ID: PAT_MRT3847_15043C.1.pep
MGPMSPDSVAGSTKNTTLICARTLGXTLEKMGIDVAQNYSAXGASLREILLGSKNTLDTYTDLSAFIQHRSLPLVFTYRHQWQGXGMYDGNHNYSDRCTSGRHGVVS

SEQ ID NO: 191610 - protein, 47 aa, Glycine max
  Clone ID: PAT_MRT3847_15044C.1.pep
SKLGIKLLVKDRIKPQKAQKGRTPPASYRSYMHSSVITSRHNTLGKP

SEQ ID NO: 191611 - protein, 82 aa, Glycine max
  Clone ID: PAT_MRT3847_15045C.1.pep
MVGVVLNDRFVKKVRVKCNDDDTICDLNKLVAAHTGSRAVKIRIQKLYTIYNDHITLKDYEIHDRMCLELYYNSTQQGVPYA

SEQ ID NO: 191612 - protein, 103 aa, Glycine max
  Clone ID: PAT_MRT3847_15046C.1.pep
MEATLLETSGHIISDTCLKKLYVYSCPEMNIPMSRCYDFLESLTICDGCNSLMTFSLDLFPTLRRLRLWECRNLQRISQKHAHNHVMYMTINECPQLELLHIL

SEQ ID NO: 191613 - protein, 51 aa, Glycine max
  Clone ID: PAT_MRT3847_15047C.1.pep
SNCGPTLSSQGSSPDERGYIGLRKNPAVKTWPMKTCGQLAMCPHFYAHRLF

SEQ ID NO: 191614 - protein, 59 aa, Glycine max
  Clone ID: PAT_MRT3847_15048C.1.pep
SSDTIDNVKAKIQDKEGIPPDQQRLIFAGKQLEDGRTLADSTIQKESTLHLVLRFCGGV

SEQ ID NO: 191615 - protein, 80 aa, Glycine max
  Clone ID: PAT_MRT3847_15049C.1.pep
DAGKREAQIMWYTWQDLYCSFSSTVHVYLTLQFFTNGEDPFPLFSLLRVKCFKGYKNMTMSIKYDSIRDISLVKDNSYQS

SEQ ID NO: 191616 - protein, 371 aa, Glycine max
  unsure (1)..(371): unsure at all Xaa locations
  Clone ID: PAT_MRT3847_1504C.1.pep
MREDYMEFGESTKINHKMENVEREEEIDPESNPLNEPLLKRNRTLSSNPLALVGEKVSYIESLDYEINENDLFKHDWRSRSRVQVLQYIFLKWLLAFLVGLLTGIIATLINLAVENIAGYKLLAVLKYIHKERYLTGFLYFTGINFVLTFVAAILCVCFAPTAAGPGIPEIKAYLNGVDTPNMFGATTLIVKIIGSIGAVSAGLDLGKEGPLVHIGSCIASLLGQGGPDNYRTKWHWLRYFNNDRDRRDLITCGSSSGVCAAFRAPVGGVLFALEEVATWWRSALLWRTFFXSTAVVVVVLRAFIEICHTGKCGLFGEGGLIMFDVSNVTVRYHVMDIVLVVVIGIIGGVLGSLYNHVLHKVLRLYNLINQ

SEQ ID NO: 191617 - protein, 76 aa, Glycine max
  unsure (1)..(76): unsure at all Xaa locations
  Clone ID: PAT_MRT3847_15050C.1.pep
APTIDNDLFIRLILXVVXGTQTATKTVRARFIXSSLVIPEXLVSXMXHKFPQLGXKXSXXIEXXWXXXXXXXXXXD

SEQ ID NO: 191618 - protein, 53 aa, Glycine max
  Clone ID: PAT_MRT3847_15051C.1.pep
NAASRYICCAFQRWKAPFGWVHFRLPFIQIEPNMNSRFQLLSTLYQWRFCFKE

SEQ ID NO: 191619 - protein, 49 aa, Glycine max
  unsure (1)..(49): unsure at all Xaa locations
  Clone ID: PAT_MRT3847_15052C.1.pep
VGMNVNTLNIYMLIEKLLSWSEWCPPIYEKRXMGVVLDRGDISHGKNGR

SEQ ID NO: 191620 - protein, 78 aa, Glycine max
  Clone ID: PAT_MRT3847_15053C.1.pep
YYIIMGVELTLKITRAELEAFRQSLMADIGIQRRTDDDGRRTHKIGCYYEHDDGKGTLICVTCGVSYLGLTLVNHLLL

SEQ ID NO: 191621 - protein, 165 aa, Glycine max
  Clone ID: PAT_MRT3847_15054C.1.pep
MARDLESGGGGTKNNRTAEENYSAPESSHVYDSETHWTSWLVPMFVVANIAVFVITMYINNCPRNNLRFQGRCVARFLGRFSFQPMQENPLLGPSSSTLTKMGALRWDNVVNRHQGWRLFTCIWLHAGVIHLLANMLSLVFIGIRIEQQFGFIKIGIIYWVSGFA

SEQ ID NO: 191622 - protein, 200 aa, Glycine max
  Clone ID: PAT_MRT3847_15055C.1.pep
MARDLESGGGGTKNNRTAEENYSAPESSHVYDSETHWTSWLVPMFVVANIAVFVITMYINNCPRNNLRFQGRCVARFLGRFSFQPMQENPLLGPSSSTLTKMGALRWDNVVNRHQGWRLFTCIWLHAGVIHLLANMLSLVFIGIRLEQQFGFIKIGIIYLVSGFGGSVLSSLFIRYHISVGASGALFGLLGAVLTELLTN

SEQ ID NO: 191623 - protein, 65 aa, Glycine max
  Clone ID: PAT_MRT3847_15056C.1.pep
AGVQMKSKYKTHQYVLGVVSLILLIAGLSTALVMLFRGEKGYDHCHWCRYLTCVPTSKWECSNDS

SEQ ID NO: 191624 - protein, 424 aa, Glycine max
  unsure (1)..(424): unsure at all Xaa locations
  Clone ID: PAT_MRT3847_15057C.1.pep
QPIPLEPECEVAVRLDPNYGRAHQRLASLLLRLGQVENARKHLCNPGMDPXPSEMRRWQFVEXVKLQMKGCLGIRGCRXVLLDGYCSVAPGSDSSSQLFICIEESFINLHHIDDAHLIFVTFRNSIIILLAATARGSMTKFSAVYSYYVFIHSEIVSGSIFHQLSLCQYSLVFDFXSSCRRGFLVSPDALWVXKVRRNELVKSERFTDACLAYGGGLRLDPSVSVLLCNRAACWFKLGQWEKSIEDSNQALHIQPNYTKALLRRAASNSKLERWEEAVKDYEILRKELPNDNEVAESLFHAQVALKKSRGEEVTNLKFGGEVEEVSGLEQFRAAISLPGVSVVHFEVASNLQCKQISPFVNTLCGRYPSINFLKVDIQQSPTVATAENVRIVPTFKIYKNGCRLKEIVCPSHDMLEHSVRHYSF

SEQ ID NO: 191625 - protein, 34 aa, Glycine max
  Clone ID: PAT_MRT3847_15058C.1.pep
SQPIHIPKHTFLTTILFLHVLSFNSVPIHLYPNS

SEQ ID NO: 191626 - protein, 42 aa, Glycine max
  Clone ID: PAT_MRT3847_15059C.1.pep
VIARCLCQRKNFSIDHKRRLWSTCSPMFHFGTKTGSLKVRVK

SEQ ID NO: 191627 - protein, 62 aa, Glycine max
  Clone ID: PAT_MRT3847_1505C.1.pep
RVFAPAPILCKNSWCPSCKVRRFYCPVQKNGFFFPIGFSEHLNDLLWAKIILFLKKKKICWP

SEQ ID NO: 191628 - protein, 78 aa, Glycine max
  Clone ID: PAT_MRT3847_15060C.1.pep
LVRETQPLAIYRSQVQKLSRRHHGTQGGFAYRSRGSCATSCIYMTVMKRNEVDLRAECPAERTLQTIEQPSSSSNRQA

SEQ ID NO: 191629 - protein, 136 aa, Glycine max
  unsure (1)..(136): unsure at all Xaa locations
  Clone ID: PAT_MRT3847_15061C.1.pep
XXXXXXXSXXXXXXXXTXXXXXXIXXXXXXXXXXXXXXXXXXXLWXXXXYXXXXXXXXXXXXXXXXRXGXAVXXXXXXNXXXXXXXFXXXXXXXXXXXRXXXXXXXXXXXXXXXRXQXPXHHHXXXXXGLTXDXYM

SEQ ID NO: 191630 - protein, 43 aa, Glycine max
  unsure (1)..(43): unsure at all Xaa locations
  Clone ID: PAT_MRT3847_15062C.1.pep
EVATMGXVQVLVAXXXXGTXXXQDSXTXWXTSXRTHXLXRXRX

SEQ ID NO: 191631 - protein, 49 aa, Glycine max
  Clone ID: PAT_MRT3847_15063C.1.pep
FKKNREKNRVLVFSPISTWGGPFFGDNIYQSTLFISIPLTRAFLNPLFT

SEQ ID NO: 191632 - protein, 175 aa, Glycine max
  Clone ID: PAT_MRT3847_15064C.1.pep
DNEDSFISLEYNNFNGSGESPPIGHFTEWHNATFHNDDGYESGNGLWSDEHGFALGGQDRLRRMNGYLSDLAAAAIVDTREVHKTHLLHGTISGVSVVQLCKRYWMETIVASDLDECSPTAMLKDVSGITRLIQPLDASGVLLQLTDEELVKTLHFVIVVVREGHTIACAVLHPH

SEQ ID NO: 191633 - protein, 112 aa, Glycine max
  unsure (1)..(112): unsure at all Xaa locations
  Clone ID: PAT_MRT3847_15065C.1.pep
GIIHKIGETLHVGGHKKAEEHKGEHHAGEYNGEHHGEHSSEYKGEHDGEHIAVEYHDEHKPEHKEGYLDKGKDKIHGEGGADEGXKKKTMDTKNNEHGHEHGHDKSNMSDSD

SEQ ID NO: 191634 - protein, 67 aa, Glycine max
  unsure (1)..(67): unsure at all Xaa locations
  Clone ID: PAT_MRT3847_15066C.1.pep
ESEKNSGRGRKNXLHXGXXGDIQHHPSKCXIXNLAAXRAYKYYIFFFCTYRYIISASXVYCVIGRXV

SEQ ID NO: 191635 - protein, 237 aa, Glycine max
  unsure (1)..(237): unsure at all Xaa locations
  Clone ID: PAT_MRT3847_15067C.1.pep
MAEFAINNNNNGSHSSINSPHPDYAEIVVVRHGETAWNATAKIQGHLDVELNENGRQQAAVVADRLSREPKASVIYSSDLKRAFETALIVASKCGGIEVVKDSDLRERHLRDLHFIVFHEXSKNVIPHADKEFCDQEIRGGRESPVQLYDRSTSALLKIGLKHKGERVIVVSHGGFIRALYKWACPNGKPGKVLNTCVSVFHLYGEDKWTLKVWGDVSHLNETGFLESGFGGDRNSG

SEQ ID NO: 191636 - protein, 40 aa, Glycine max
  unsure (1)..(40): unsure at all Xaa locations
  Clone ID: PAT_MRT3847_15068C.1.pep
LMEIKFCTEKFLRCSXLNHVIIHLCSFMHGLTGHYSAPIL

SEQ ID NO: 191637 - protein, 111 aa, Glycine max
  unsure (1)..(111): unsure at all Xaa locations
  Clone ID: PAT_MRT3847_15069C.1.pep
ALLNECYSIWGDSGLEEALLSISNHNNFELDRISRELXESIKYIHDLDEHTLQNFGISGEQTTCQLSALPAGFIPGVNLAKRNGKHYIVKLANLGVHLISSDPPKKRHLQI

SEQ ID NO: 191638 - protein, 139 aa, Glycine max
  Clone ID: PAT_MRT3847_1506C.1.pep
TCPKAAKNDEVKPPGIFGLEWSEPLVTFALSCGSWSSPAVRVYTASKVDEELEAAKRDYLHASVGITKTNKLIIPKLLDWYLLDFAKDLESLLDWVCLQLPDELRNQAVECLERRGRDSLSQMVQMMSYDFSFRLLLHQ

SEQ ID NO: 191639 - protein, 204 aa, Glycine max
  Clone ID: PAT_MRT3847_15070C.1.pep
MAFLRSTLATSMVLLAMLAIVSATDYYGYGPTPKLENPKPKTDYKVDKPHPRIPDYYAVPKPKGNDELHLLPTIIGVQGVVLCKSGSNYFPIQGAVARVTCGWENELGYETGPISVLSHVTDSKGYFFATLSLGELGSKLKITECKAYLESSPLETCKVPTDVNYGISGARLSSYRLLENKMKLYTVGPFFCTSQPAKPLPNGY

SEQ ID NO: 191640 - protein, 193 aa, Glycine max
  Clone ID: PAT_MRT3847_15071C.1.pep
VGYSPAKSQNMVLMGGLTKHVPITKTSFLVGTLSLCGIPPFACFWSKDEILNDSWLYSPIFAIIACCTAGLTAFYMFRIYLLVFEGYLNVHFLNFNGKKNSSFYSISLWGKKEVKQKLKNKNFFLALLRMKNNEMTSFFIRKIYPHRINQNVKNITCLFFDINYFGTKKTACLYPNESDNTMRFSIHVLVLFT

SEQ ID NO: 191641 - protein, 73 aa, Glycine max
  Clone ID: PAT_MRT3847_15072C.1.pep
ASQFWKAKKSSGNCEWEKNGSGKINLGREVKGFWVPRVSYQGWSLSIKITFKLGIKSFPEGNLMFIPGPARGF

SEQ ID NO: 191642 - protein, 188 aa, Glycine max
  Clone ID: PAT_MRT3847_15073C.1.pep
CSKDSQNSLTSQGATISAREKTIAKSVNTTIPDINQEPQELLAEESPVVDRETSTSRTHSLDLDHFLSHSDEHARSSSGNSTLRIDPSSRWVKRLKLCTLGSAHGTGSTKIGETSSHEKVNNIYGKIMKDSRTSLEPKMVHHAEGQMDPDLPATVSTNGKSSLTEAKKTVENTLSHPWIQRWSHDRAT

SEQ ID NO: 191643 - protein, 106 aa, Glycine max
  unsure (1)..(106): unsure at all Xaa locations
  Clone ID: PAT_MRT3847_15074C.1.pep
NSRIGRLVRPESPFSPLLMSDPKNERSHSQTFNRPGGHSDDLSLKMSETNDARHLKQPSVRMLSYLNFTKWLYALLXSICAAIFGSFNPLFAYVIGLFVTYYYRIR

SEQ ID NO: 191644 - protein, 104 aa, Glycine max
  Clone ID: PAT_MRT3847_15075C.1.pep
DRDIWGDDAPEFTPKKFAEGVAKAPKGPVGFFPFGWGPKGGLGQNFALLKTKWVWSLLLQRFSFELFPTKAQAPVPGVPFNPKLGGQIILQKGEGHLLIGTRPP

SEQ ID NO: 191645 - protein, 100 aa, Glycine max
  Clone ID: PAT_MRT3847_15076C.1.pep
GQKSVFLIKSLSFFGFHPPLNGEHKPGGSQKYKGGTLTIHKVFLIKLVKKFIFLPSRGLIFKACPPLLGYFPFLKGPLSPPTGFQTFKNFILRIIPPRGT

SEQ ID NO: 191646 - protein, 147 aa, Glycine max
  Clone ID: PAT_MRT3847_15077C.1.pep
GGFPQKETNLFPRIGKGVPPRNQIFPPRKKKKTPPTFFLGGEKPFFEINFFKKRKAVQKRLYSKNFGGKVFFETNRNHPPQKSLEGTRGPVSTRYSLGGPSKSLRKKKQALFKTPRMGFLKLCPLNIKKTGRIPQTFFFLKPNFELG

SEQ ID NO: 191647 - protein, 244 aa, Glycine max
  Clone ID: PAT_MRT3847_15078C.1.pep
IFVWKYIDSNKEEQLQEAKAEIEDKVKRILKLIKEDNLEEDGTPVEHSKKEPLVELIEDFHNQYQSLYAQYDHLTGELRKKIKGKREKGSSSSSSDSDSDSDYSSKDRDNKNGQLENEFQKTIHDLRQELEVVHIEVAELNRKLTITHEEKEDLNSKYLAALSKIQEADKINMDLKTDAEALGTQRLKLLVENAELNKQLDTAGKIEVELSQKLEDLTAEKDSLTMEKETALHRLRRKRKILMA

SEQ ID NO: 191648 - protein, 77 aa, Glycine max
  Clone ID: PAT_MRT3847_15079C.1.pep
YGCEKTTEGYANPFSTIIQIIVADVRSGVLSWKGFHSNFKTTQKGPAFNNRWVNSMVNSSGPWGDFLNSTKKGKKSF

SEQ ID NO: 191649 - protein, 74 aa, Glycine max
  unsure (1)..(74): unsure at all Xaa locations
  Clone ID: PAT_MRT3847_1507C.1.pep
IIILTKSRSVXQHQQAHKAHYTAGSADSRRCVILRCSCQHYMTIIEAGTVDLSHYNGVRGRTNKREYEARGLAS

SEQ ID NO: 191650 - protein, 146 aa, Glycine max
  Clone ID: PAT_MRT3847_15080C.1.pep
MTTRFKKNRKKRGHVSAGHGRIGKHRKHPGGRGNAGGMHHHRILFDKYHPGFFGKVGMRYFHKLRNKFYNPIINIDKLWSLLPQEAKDKATADKAPLLDVTQFGYFKVLGKGVLPQNQPLVVKAKLISKIAEKKIKEAGGAVVLTA

SEQ ID NO: 191651 - protein, 32 aa, Glycine max
  Clone ID: PAT_MRT3847_15081C.1.pep
IISTYIVQLPQPLPHFHEFLQPHLPQQQDIFR

SEQ ID NO: 191652 - protein, 85 aa, Glycine max
  Clone ID: PAT_MRT3847_15082C.1.pep
SINQDKKTSKYKIIKNSSISTKVSNKTSSLTKTSKSTKISNQPNFIKSNNSTIYIKITSSNISNKSTYSSFSSTINKPHKANNLR

SEQ ID NO: 191653 - protein, 52 aa, Glycine max
  Clone ID: PAT_MRT3847_15083C.1.pep
FCCFSGGALFRVPKLAFMGLRSMSTNVDLFLGCQSYPVACSGLMPSVDHFTR

SEQ ID NO: 191654 - protein, 66 aa, Glycine max
  Clone ID: PAT_MRT3847_15084C.1.pep
QMESNKSRAPALMVTMIKFFVQMLELYCSAKQYSQNFIICKNQPCHHLYSLRLHHFSVRWRQYKQP

SEQ ID NO: 191655 - protein, 59 aa, Glycine max
  Clone ID: PAT_MRT3847_15085C.1.pep
NKTTITLISDKITTYRKFISGRDVREIFMLFSIRSLEDSYRINSYSIIIMYHICLSIKT

SEQ ID NO: 191656 - protein, 234 aa, Glycine max
  unsure (1)..(234): unsure at all Xaa locations
  Clone ID: PAT_MRT3847_15086C.1.pep
SYESHLPAGGKKPLSNYLYQSKSPIGAVKSPIFEKVILKKVENKEITTRSTTTMVQRESNVNILNAVKDVSCNTQINQSNPIMSACQGQVPCGNGVNVNFGKDHDLKVVYSEPSQPDKVLKNSSMGVSAKSVGNTGNGNVGLTSCAPSQDTAKDVLDVARLSFFHNGSFIQQGGNITPGWXXSFANEEDASEDMEDAMEESAKGENEVMGDDSSSAAEEMGVPKDLGGGWLPHE

SEQ ID NO: 191657 - protein, 82 aa, Glycine max
  unsure (1)..(82): unsure at all Xaa locations
  Clone ID: PAT_MRT3847_15087C.1.pep
XMAMXKSTPFAFNPXHLXSTNTXTTTXSQRQFXXXXXXXXPXXXIXFXSSTFPGPLSSVPSLXSLXNAXXSYKSXRFRTXQI

SEQ ID NO: 191658 - protein, 78 aa, Glycine max
  unsure (1)..(78): unsure at all Xaa locations
  Clone ID: PAT_MRT3847_15088C.1.pep
KGGXGMWXXXXXAFXXXXXDEXLXXCXXXIAXXHLKFLASGSVPLXGLXSXXRXXXXLXXXLIXQPSXMXXLLRXXIX

SEQ ID NO: 191659 - protein, 63 aa, Glycine max
  Clone ID: PAT_MRT3847_15089C.1.pep
MAANTWVISAISAFPSFLSSSKTRLAPAVPLSSFVGTKASFFPFSMIANGMPAQPRPPYLDGS

SEQ ID NO: 191660 - protein, 107 aa, Glycine max
  Clone ID: PAT_MRT3847_1508C.1.pep
MMDSKIKELETEEGKAKIEKVKKLTKIAEELGSTMSALALAWTLLNENVSTCILGATKPDQILENLKALETYKKLTPEVAKRIEEILDNKPKMLESYGRRSPEGSLI

SEQ ID NO: 191661 - protein, 190 aa, Glycine max
  Clone ID: PAT_MRT3847_15090C.1.pep
AVFPGNMIRNAAIKEFLKKKYLNSRAAIEDTYFSTKDTFERHRVVFTVGTSIASVATAWFGYSLRHLHDIKVDQRLQSIENSMKNNSNLQHSQIKDIVAGSASGAFSIPACVATAGTSLIIGYAPPTRPGIWYATKKFRKEQMKMLGQITPKRWQLLGKIKPRGFQFQFLRRKLTRFKVFDTAPKNLKQV

SEQ ID NO: 191662 - protein, 88 aa, Glycine max
  Clone ID: PAT_MRT3847_15091C.1.pep
SVFFFFFFFFFYLYFLFLWALGISYLLILIYSYDESGAHLRRAIPNNPQRLNPKQTSEKPYNGPKKRAKNLPYGPKHHKNLYKKSEKS

SEQ ID NO: 191663 - protein, 59 aa, Glycine max
  Clone ID: PAT_MRT3847_15092C.1.pep
PHTCHASLFQLPAATPITIPILKQIFTLTHLYRWAQFTTCPKCLFYSYIVLSLLYNSFV

SEQ ID NO: 191664 - protein, 83 aa, Glycine max
  unsure (1)..(83): unsure at all Xaa locations
  Clone ID: PAT_MRT3847_15093C.1.pep
DRVPSDWDTPLTTPLGAARGIGRIHSENGGKLGHGNTKSSNMAPNXSNXGGCRPDLGLATIXSPLALPISHSXGYRAPQVTNI

SEQ ID NO: 191665 - protein, 75 aa, Glycine max
  Clone ID: PAT_MRT3847_15094C.1.pep
VVDSGAEPQRWLFCCRNPAAGCSVQSSVTGVVLDLAYLGCFIFWNCCWCLLCNLNAGGFGKEIESRDSNKTEKRK

SEQ ID NO: 191666 - protein, 57 aa, Glycine max
  unsure (1)..(57): unsure at all Xaa locations
  Clone ID: PAT_MRT3847_15095C.1.pep
FSVPCSVWDTFFPFMIYLVFIIKYFEHSEPSLGVICFYATNNEEXHTPAKYLYLSIT

SEQ ID NO: 191667 - protein, 126 aa, Glycine max
  Clone ID: PAT_MRT3847_15096C.1.pep
FNNVEMLQNPRVVRYSAQPFNPPTRMATPSLSPFQLIPTSPSFPILKQQCRFSRRELTIFSNSCLLLLLGAQARAEENLTLAEEDVGNTSNSDQPEENLTLAEEDVANTSNSDKPEENVAVTPSCT

SEQ ID NO: 191668 - protein, 53 aa, Glycine max
  Clone ID: PAT_MRT3847_15097C.1.pep
FIYQLNSSYIRRYILSLNLFFLLFSLIISAHTENTIFSISKNAQKILKNNPRA

SEQ ID NO: 191669 - protein, 76 aa, Glycine max
  Clone ID: PAT_MRT3847_15098C.1.pep
KKKKKKKKKKKKKKKKKKKKKKKKKKKKVERNMEGRPVNLRGLGVFFPVSWGAINFRFGDRNSFGGPPVFPRGEQT

SEQ ID NO: 191670 - protein, 57 aa, Glycine max
  unsure (1)..(57): unsure at all Xaa locations
  Clone ID: PAT_MRT3847_15099C.1.pep
CKICYFCGYTILIQILDSVKFFSLEISVTRPPEIPRPGSLYXENTPEVIWDFFQFKL

SEQ ID NO: 191671 - protein, 178 aa, Glycine max
  unsure (1)..(178): unsure at all Xaa locations
  Clone ID: PAT_MRT3847_1509C.1.pep
SCQRDNGALFLLCTNDKTIIFWKGHELKVQRVSYMNVDPKLLXNGSIAXSSNFFSYASYLAQGRISTGTXNYLHNEISSPPDGAPSLILPLEITSHETMLMAPYTXVYTHAHEYHINSMSNISDGXTFISPDDXRINLCNLHISNHSSNLVDVKPAHMDDLTVGITLSELHPTHLNTL

SEQ ID NO: 191672 - protein, 311 aa, Glycine max
  Clone ID: PAT_MRT3847_150C.1.pep
MLRLLDAHCHLQDPRILSKAPHLIKTAQDTGVAYFAVNGVSEQDWHSVKQLAETYPSVIPCFGLHPWFVKERSPNWFQTLKEYFDSTPSAAVGEIGVDKGSHGKKIDFSEQIEVLRQQLELAKELNKPASVHCVRAFGDLLELMKFLGPFPAGVILHSYLGSAEMVHEFSKLGAYFSFSGFLMSLKASKAKKMLKMVPPDRILLETDAPDALPMSNIDSLYFVEGDTSLTEELLAQTTTSSTSGSSLGNSSHVLADASMLPKETLNHPANIHNVLDYVASMLEITKEELAELSYQNAVRLLSYEGSKVLQK

SEQ ID NO: 191673 - protein, 50 aa, Glycine max
  Clone ID: PAT_MRT3847_15100C.1.pep
GSSQCHLSCFLLSTKCTHCLKEKRHYQLTIIRNPNSSRSTIKFSYKPFKT

SEQ ID NO: 191674 - protein, 41 aa, Glycine max
  Clone ID: PAT_MRT3847_15101C.1.pep
GDKIYKEETVMVMIYLGVIGFSFEKVVWLKEKVFLFGWVKE

SEQ ID NO: 191675 - protein, 55 aa, Glycine max
  Clone ID: PAT_MRT3847_15102C.1.pep
TLYIQFLETHLCIIIFMTNSRYVVKKYPKHPLTILSYVIARLIIKSDCYEINFNE

SEQ ID NO: 191676 - protein, 57 aa, Glycine max
  Clone ID: PAT_MRT3847_15103C.1.pep
ASVYQCLCHSVKCILVNKIAANLSPLCYLMWLAKNRILVLRFSLGFRKAAGMIPETS

SEQ ID NO: 191677 - protein, 56 aa, Glycine max
  unsure (1)..(56): unsure at all Xaa locations
  Clone ID: PAT_MRT3847_15104C.1.pep
MVVLGGWCIENMDNGSDPCSVXGNTTVHRPGQGSERLXTQSNSLLCNENFRPKQCE

SEQ ID NO: 191678 - protein, 54 aa, Glycine max
  Clone ID: PAT_MRT3847_15105C.1.pep
SGQHLLTTHPYVACLLICIACTAVSSILGVKACIFWFFVNGLRAHYLWIGTPPP

SEQ ID NO: 191679 - protein, 92 aa, Glycine max
  unsure (1)..(92): unsure at all Xaa locations
  Clone ID: PAT_MRT3847_15106C.1.pep
MLDQDHDHDHDCDHQHKHEHDLKHHHXQDHDHHEDRDDHADLAAVSLEELKLKIITAVEYDYRDETLPTDKYLKGFGSRTTKGSGLMRNGLV

SEQ ID NO: 191680 - protein, 49 aa, Glycine max
  Clone ID: PAT_MRT3847_15107C.1.pep
YFFVFYNIIYIYIYIYIYIYIYIYIYIYLVLVTYCLLVWELAFDFVHSF

SEQ ID NO: 191681 - protein, 110 aa, Glycine max
  Clone ID: PAT_MRT3847_15108C.1.pep
TRGSSTIQPHFLFPFILTLKPKHPWPSAPAKLNTLATQRTAHNSFFSNQGSFFCRGGSSDPLLLPTNKSTKKPVYFIASPGPRNSLKWKNKMSHVGKRGPLHCMGQNWRG

SEQ ID NO: 191682 - protein, 96 aa, Glycine max
  unsure (1)..(96): unsure at all Xaa locations
  Clone ID: PAT_MRT3847_15109C.1.pep
GLIACPRAHAYVDYRMLFAGLGXTSDDHALHRAFSQYRYLPVTKIINHCDTGGSRGXRIRTFNSYRTMRDPIGSMNGHRLVRSKIDTVKRTESSDD

SEQ ID NO: 191683 - protein, 67 aa, Glycine max
  Clone ID: PAT_MRT3847_1510C.1.pep
HCSIQRKIGHVLHELKLLGEMQKHLSKPRLTRERKIWCNTHLLVMEEYSLNEMNIQATETQVEASDY

SEQ ID NO: 191684 - protein, 40 aa, Glycine max
  Clone ID: PAT_MRT3847_15110C.1.pep
CGDSRYRHVLPYHLCSALNSWRLMTVPVEGNILLDLAKIA

SEQ ID NO: 191685 - protein, 87 aa, Glycine max
  Clone ID: PAT_MRT3847_15111C.1.pep
RQGDKRLSASSDPTTVELMSFLEIQRRETCLCCVLDPHQRTYVYCRFDYMFKAGGTDGGSWPGSRVVHHSYRQTAPGCAYYEQKLGR

SEQ ID NO: 191686 - protein, 157 aa, Glycine max
  Clone ID: PAT_MRT3847_15112C.1.pep
MINHQTKCAWSIRGPNFITECFRGRRSETQCQNLSSLNSNPKKNDVSFFVFHSPWLWIFPHITSRAETHPSIRRRPTISPFTSKRRRAEPALPFNSALRPRRLPQNDGHVRGFSSSNLDWRRLIVNQKCADANAPVYSSNPSAFISAVFEMENKFEV

SEQ ID NO: 191687 - protein, 76 aa, Glycine max
  Clone ID: PAT_MRT3847_15113C.1.pep
LLFFSLIFPILGRCVPSITPSPMSSSFRLSWFEFLLKLDSLSPVYQMASNVSVKLLQSSNTQCNIFCELLLNEKKI

SEQ ID NO: 191688 - protein, 63 aa, Glycine max
  Clone ID: PAT_MRT3847_15114C.1.pep
IRLQPTYQKFGITHFRTGSLKKFLKRNPKPGMETPFEPPRIKGLGGGERRPRKLLEGKEKGSG

SEQ ID NO: 191689 - protein, 170 aa, Glycine max
  unsure (1)..(170): unsure at all Xaa locations
  Clone ID: PAT_MRT3847_15115C.1.pep
DATNDRVTIESAEATLKYNVAIKCATITPGWTKPICIGRHAFGDQYRATDTVIKGPGKLKLVFAPSGNEGIKELEVYNFTGAGGIALSMYNTDESIRAFAEASMNFAYQKKWPLYLSTKNTILKKYDGXDIFQEVFDTQWNHKFKAAGIWYEHRLIDDMVAYALKVMEVC

SEQ ID NO: 191690 - protein, 121 aa, Glycine max
  Clone ID: PAT_MRT3847_15116C.1.pep
SGIAMRKAKVKILNIQLQIRKNKLIFYQFPNHSGHFIPIHFDDGVANPYLLKPHFVVYLVEVKVGTQRGRNNNFYNTKRKMGRVFVFFIGLNKMCGINQFPMNTLSKVSVRMNCRWILQSR

SEQ ID NO: 191691 - protein, 400 aa, Glycine max
  Clone ID: PAT_MRT3847_15117C.1.pep
MAGICCGVVGEAAETSSPIEPTSRPSARRSLDLLPLKYIAADVSVPPLENSRKRQRLDRRASPARECDNAVHSSKSKVVEVVPNYSSKSPTLDSTSPTVVEEYPRYGVTSVCGRRRDMEDAVSVHPSFCQETLSHDKKLGFHFFAVFDGHGCSHVATMCKERLHEIVKEEIHQAKENLEWESTMKKCFARMDEEVLRWSQNNETPNCRCELQTPHCDAVGSTAVVAVVTPEKIIVANCGDSRAVLCRNNVAVPLSDDHKPDRPDELLRIQVAGGRVIYWDGPRVLGVLAMSRAIGDNYLKPYVISEPEVTVTERSEEDECLILGSDGLWDTVQNDIACKVVRMCLNAQKPPSPPSSPRREMAVDCSDKACSNASILLTKLALVRQSSDNVSVVVVDLRRT

SEQ ID NO: 191692 - protein, 90 aa, Glycine max
  unsure (1)..(90): unsure at all Xaa locations
  Clone ID: PAT_MRT3847_15118C.1.pep
VCSLGTGSFHTFYLSQKTHNFLSGCFFGEKWCPFSEVNFFPSAKYTTKWGSEDKVGQPIVEMDXDEMTRVIXKLIKDKLIXPYLELDIKY

SEQ ID NO: 191693 - protein, 73 aa, Glycine max
  unsure (1)..(73): unsure at all Xaa locations
  Clone ID: PAT_MRT3847_15119C.1.pep
ICPVQAITIEAEEREDGRRRTTSDDIDMTKCMYXGSWQDACPVEAIAEGPNIELATETHDELLYDKEKLLEQA

SEQ ID NO: 191694 - protein, 68 aa, Glycine max
  Clone ID: PAT_MRT3847_1511C.1.pep
QHTLTVVLNFPQREERERMWKLVRYADGFNLARSRRFYAVNPGPRIEHKRGADILHDPGFNKRTSFYF

SEQ ID NO: 191695 - protein, 43 aa, Glycine max
  Clone ID: PAT_MRT3847_15120C.1.pep
HFGQNPDPEIKLNFVHTTHLQGKEANEAVIACGDPPQGPIQAR

SEQ ID NO: 191696 - protein, 119 aa, Glycine max
  Clone ID: PAT_MRT3847_15121C.1.pep
IINVVVFCVLCCAGDNYLKPYVISEPEVTVTERSEEDECLILGSDGLWDTVQNDIACKVVRMCLNAQKPPSPPSSPRREMAVDCSDKACSNASILLTKLALVRQSSDNVSVVVVDLRRT

SEQ ID NO: 191697 - protein, 416 aa, Glycine max
  Clone ID: PAT_MRT3847_15122C.1.pep
MGFQKIRVGNPIVEMDGDEMTRVIWKLIKDKLIFPYLELDIKYFDLGLPHRDATNDRVTIESAEATLKYNVAIKCATITPDEARVKEFNLKQMWRSPNGTIRNILNGTVFREPIICKNIPRLVSGWTKPICIGRHAFGDQYRATDTVIKGPGKLKLVFAPSGNEGIKELEVYNFTGAGGIALSMYNTDESIRAFAEASMNFAYQKKWPLYLSTKNTILKKYDGRFKDIFQEVFDTQWNHKFKAAGIWYEHRLIDDMVAYALKSDGGYVWACKNYDGDVQSDFLAQGFGSLGLMTSVLVCPDGKTIEAEAAHGTVTRHYRVHQKGGETSTNSIASIFAWSRGLAHRAKLDGNARLLDFTEKLEAACIGTVELGKMTKDLALLVHGPKVSRSQYLNTEEFIDAVAEELRTRLSSQSKL

SEQ ID NO: 191698 - protein, 96 aa, Glycine max
  Clone ID: PAT_MRT3847_15123C.1.pep
YTTWRTAQLHLHSASQLPFRKQLDEASCSCIIICNRMQRFIHEPTLRMEFGRPRPNETTTLTFGKRGTCTSVVMTTTLVVVTSGVYVRLLGVCSGL

SEQ ID NO: 191699 - protein, 44 aa, Glycine max
  Clone ID: PAT_MRT3847_15124C.1.pep
RIIVNFNYLDIQVVPYGCEFHTPTYLAIILPNQGEYILNIKCIC

SEQ ID NO: 191700 - protein, 48 aa, Glycine max
  Clone ID: PAT_MRT3847_15125C.1.pep
SPLVVNILIIKCQLTTYINSTDTLQAISYANKNDIVNILIIRFQLTLS

SEQ ID NO: 191701 - protein, 77 aa, Glycine max
  Clone ID: PAT_MRT3847_15126C.1.pep
KKKIINVHLHDVNLFPISHHYRHIHSDGLIWIAILVVACFHIHDVPNMSYVHADKLSTLYYKLIKFCKLNLSIVQYC

SEQ ID NO: 191702 - protein, 66 aa, Glycine max
  Clone ID: PAT_MRT3847_15127C.1.pep
LGEFDRYFIPLSQTLHMLRSKTYSSKKKKDGGRKVSSSMARSLQIANSSYFPRPRLHNMACKCHHG

SEQ ID NO: 191703 - protein, 222 aa, Glycine max
  Clone ID: PAT_MRT3847_15128C.1.pep
MVFSSNPLSLSVPEPAFESWLRDTGFLEVLDHRTSSSAAAASPAPSSAASTLFSRLLTFLSLFTLNAFAKLAADDFAADTPSWSRSFFAFSDSYSFPSSPSQARLRVQENVKRYARNYAYLFIVFFACTLYKMPVALVGLVLCLALWDFFKFCSHRWGLEQYPLTRQILIRVVQCATAVILIFSNVQMALFCAICVSYVGMILHAGFRKLTPVKQPSVSRGR

SEQ ID NO: 191704 - protein, 317 aa, Glycine max
  Clone ID: PAT_MRT3847_15129C.1.pep
MEAQTWFLVIALFLFLLLNRLAKYLKPKPNAGHKLPPGPKKLPLVGNMHQLAAAGPLPHRALRELAHKYGPLMHLQLGEISAVVVSSPNMAKEITKTHDVAFVQRPQIISAQILSYGGLDVVFAPYGDYWRQMRKVFVSELLSAKRVQSFSFIREDEAAKLIDSIRASEGSPINLTRKIFSLVSASVSRAAIGNKSKDQDEFMYWVQKVIGSVGGFDLADLFPSMKSIHFITGSKAKLEKLLNRVDKVLENIVREHLERQIRAKDGRVEVEDEDLVDVLLRIQQADTLDIKMTTRHVKALILDVFAAGIDTSASTLE

SEQ ID NO: 191705 - protein, 85 aa, Glycine max
  Clone ID: PAT_MRT3847_1512C.1.pep
YKQREINFPPFFFNQRGSLEIIILRGKADLHHVFFTAFLFHFPLLNVPFFPFTFYFLQIWRGKFLVRLDVLNCLVLYPCNTETRK

SEQ ID NO: 191706 - protein, 39 aa, Glycine max
  Clone ID: PAT_MRT3847_15130C.1.pep
KKMVLYSVLLLMSSIKKKKVCYCYTQPCIFCRCYSNFIM

SEQ ID NO: 191707 - protein, 117 aa, Glycine max
  unsure (1)..(117): unsure at all Xaa locations
  Clone ID: PAT_MRT3847_15131C.1.pep
XDFXGXXXXEXQXSXLXVXXXXXXXALSRXXXXXXGXXXXARXXXXXCXXPXXASLXXXXGXXXCXCXXXMGXXXXXXXVXXGAXXMXNXXXWXXVCSVEQGLNXSXIPXLRXLREG

SEQ ID NO: 191708 - protein, 102 aa, Glycine max
  unsure (1)..(102): unsure at all Xaa locations
  Clone ID: PAT_MRT3847_15132C.1.pep
FRGKHRTKHEKNMAWTDQGYMEVIRGGRLPADVHDKRAHEXEKHVAHDSLKDHITDADPVYSTKDDRXAKIINLTQRVDGEXKLDTDPKACEGXKHIPVSNI

SEQ ID NO: 191709 - protein, 174 aa, Glycine max
  unsure (1)..(174): unsure at all Xaa locations
  Clone ID: PAT_MRT3847_15133C.1.pep
MAPSNLPALFNATSQDIETLLAAQCHLGSKNLQVHMENYLWKTRADGVNVINVGKTXEKIXLAARIIAAVDNPADICVISARPYGQRAVLKFAAHTGATAIAGRFTPGSFTNYITRSFKEPRLIIVTDPRTDAQAIKEASYVNIPVIALADTDSPPGVRDVAHPTHNKGRHAIG

SEQ ID NO: 191710 - protein, 201 aa, Glycine max
  Clone ID: PAT_MRT3847_15134C.1.pep
MASVPGSRSGGKIVRTRRSAAARSHTPYDRPAPPPEPPSPNWLSRFVISPSRFIASGAGKIFSSVLDLDNSPSDSSSATCSLSSSANDSDAEEVGTFDDENDNPSEGDVALSKPFVRNSKNKHMIEQLLMKESFSREECDRLIKIIRSRVVDPANDDDGDKRPTDMSNKILGSDSPELHDVAIMEAKKWLQEKKSALDTNT

SEQ ID NO: 191711 - protein, 392 aa, Glycine max
  Clone ID: PAT_MRT3847_15135C.1.pep
MALSSPHIQRFLLCKLHSRSTAKNRHRNSFTATTTTRSSCCSAIAIDAPSSLTEVPGIRWGSIALQGLREEMEDDIIVRPEGLQGFTFAAVFDGHGGFSSVEFLSAYYRDELYKECVEALQGGLLLVEKDFKAIKRALQEAFLKADARLLKRLEMNGEEDESGATSTAVFIGDDELLISHIGDSSAVLCRSGKAEVLTSPHRPIGSSKTSLHEIRRVREAGGWINNGRICGDIAVSRAFGDVRFKTKKNEMLQKGVQEGRWSAKFISRVQLNNDLVVAYPDIYQVTLGSDAEFVVLASDGLWDYMSSSEAVSLVRDQLRKHGNIQLASCEALAEAALDRRTQDNVSIIIADFRRTDWKYAPLARHTTLLELVHALATTAILSIGICSCPKPS

SEQ ID NO: 191712 - protein, 82 aa, Glycine max
  unsure (1)..(82): unsure at all Xaa locations
  Clone ID: PAT_MRT3847_15136C.1.pep
SHRPQAEHEAEQNPGRERAKINAXIQEVSARAIDTSPAAAERTKSEPYRNPRETKKLDDETHNEGDRKMNERKRLTRQRRLI

SEQ ID NO: 191713 - protein, 46 aa, Glycine max
  unsure (1)..(46): unsure at all Xaa locations
  Clone ID: PAT_MRT3847_15137C.1.pep
FSSSLSFSNSXXILSLRXLHRLHGSYTAQTKSNLXPLXSSXCWXSE

SEQ ID NO: 191714 - protein, 106 aa, Glycine max
  Clone ID: PAT_MRT3847_15138C.1.pep
ISFMDGVTLSEMEQGCTKWLNLFCLCFNARNHHVPLLCSLSPSLCPHHPPPPLFSFNHPHTPHIPKPTTIITTPHTSLHQKEKKGKENYLEDEQDLNIPSTLMCCC

SEQ ID NO: 191715 - protein, 69 aa, Glycine max
  Clone ID: PAT_MRT3847_15139C.1.pep
PVFNINPILTLLLCLCIGKCKTFIQNQSKRVSKHTLTHFSSLQNVSGKCNEQGLKGITFCKVGLKMKVS

SEQ ID NO: 191716 - protein, 47 aa, Glycine max
  Clone ID: PAT_MRT3847_1513C.1.pep
LSCSSRGATEGVHPSSGKPPLVCEQVSGASSACCQIVTITIAQYNIL

SEQ ID NO: 191717 - protein, 71 aa, Glycine max
  Clone ID: PAT_MRT3847_15140C.1.pep
TRQRPKGCVFIGGSNCKRVLSLNKAVEGLSLCKKWSFSKSGFPLQVVLPKRTVRGVSTALVGQIHQSPVCL

SEQ ID NO: 191718 - protein, 95 aa, Glycine max
  Clone ID: PAT_MRT3847_15141C.1.pep
KPQQITSFIQQTKSSADHSFIPQMEVSDTMYFIPMLPIILLISFLLLRSTVCFRHKFFDVNSCYSYTVELLSAYTNDNKLLFLMWRHVFKIRKKL

SEQ ID NO: 191719 - protein, 252 aa, Glycine max
  Clone ID: PAT_MRT3847_15142C.1.pep
MPISRIAIGNSSELNQSDALKAALAEFISMLIFVFAGEGSGMAYNKLTNNGSATPAGLVAASLSHAFALFVAVSVGANISGGHVNPAVTFGAFVGGHITLFRSILYWIAQLLGSVVACLLLKFATGGLETSAFALSPGVEAGNALVFEIVMTFGLVYTVYATAVDPKKGDLGIIAPIAIGFIVGANILAGGAFDGASMNPAVSFGPAVVSWTWSNHWVYWVGPFAGAAIAAVVYEIFFISPNTHEQLPVTDY

SEQ ID NO: 191720 - protein, 49 aa, Glycine max
  unsure (1)..(49): unsure at all Xaa locations
  Clone ID: PAT_MRT3847_15143C.1.pep
NQEAAQVIKDAXAKGLDHYYPMAERLTIRSEGKLIIERTAEGVELAEAE

SEQ ID NO: 191721 - protein, 80 aa, Glycine max
  unsure (1)..(80): unsure at all Xaa locations
  Clone ID: PAT_MRT3847_15144C.1.pep
MLDWTDKLTNNGSSTPAGLVAASLSHAFCXFLVAVSVGANIFCGHVNPAVTXFGPFVGGHITXLFRSILYWIAQLLGSVV

SEQ ID NO: 191722 - protein, 87 aa, Glycine max
  Clone ID: PAT_MRT3847_15145C.1.pep
HIEPLSVSRYLSTLPRALSEEKTLRSASAKSIKLSSPWTNASLTSPNRFSKEVWGWVNSNSKGVALRRDTLRVVVRAEMSRQVTRGL

SEQ ID NO: 191723 - protein, 133 aa, Glycine max
  unsure (1)..(133): unsure at all Xaa locations
  Clone ID: PAT_MRT3847_15146C.1.pep
WVDSTIXPNKTSVFFTTMSPTHTRSLDWGNKDGIKCFNETKPIGKKNHWGSGSNKGMMSVVEKVVKKMKVPVTFINITQISEYRIDAHSSVYTETGGKLLTEEEKANPRNADCIHWCLPGVPDTWNQIFLTML

SEQ ID NO: 191724 - protein, 122 aa, Glycine max
  Clone ID: PAT_MRT3847_15147C.1.pep
TIRPELLNRLDDIVVFETLGRKELRQIVLLQFDSVINRLKKAQISVNVTTAALDVILDESYEPQYGARPIKRYIEKHVVTDLSKLIISGQLHAKTQVEITEVNGKLTFAISQLMDTDVEMAP

SEQ ID NO: 191725 - protein, 76 aa, Glycine max
  unsure (1)..(76): unsure at all Xaa locations
  Clone ID: PAT_MRT3847_15148C.1.pep
IXNGNFXTYPRAXIQALIGHPXWQFXXPQXAFLXIXXNXQPSLRGAKKXLXXXGPLAXVLTXGFXGXXXXFXPEGX

SEQ ID NO: 191726 - protein, 67 aa, Glycine max
  Clone ID: PAT_MRT3847_15149C.1.pep
YMDFCGPHCYHPPRRGCTCFFPLSYIKRGTSLSIPLKNYPFLFLSPQKKKKKKKKKKKKKPRAAALE

SEQ ID NO: 191727 - protein, 140 aa, Glycine max
  Clone ID: PAT_MRT3847_1514C.1.pep
IQPLCIVLLQRPRIIVPPPSEVNLLDDGYRWRKYGQKVVKGNPYPRSYYKCTTQGCKVRKHVERASMDPKAVITTYEGKPNHDVPAAKTNSHTLANNSASQLKAQKFAIPDVKHSSSSRGVTGNEQRPVASLRLKEEQIT

SEQ ID NO: 191728 - protein, 73 aa, Glycine max
  Clone ID: PAT_MRT3847_15150C.1.pep
STHDGDSNIFVVLISSIAKHKGKRANKEPRCCEEGTRGKRWCRRRRNCCGEPYVIARRRYHHHGKGGASSLGC

SEQ ID NO: 191729 - protein, 80 aa, Glycine max
  unsure (1)..(80): unsure at all Xaa locations
  Clone ID: PAT_MRT3847_15151C.1.pep
RSLXXXXXTQAAXXXXXXETISSFEGGAXMEVVHLXXSCXSTXSISPXIXSFSAWAXEXMXRXIEEERRDDRFGXSDLXX

SEQ ID NO: 191730 - protein, 47 aa, Glycine max
  Clone ID: PAT_MRT3847_15152C.1.pep
LLYSYSIFFHMYPPDIILFKDMFTSENSNHGSLHCGDSNSLASTRPL

SEQ ID NO: 191731 - protein, 80 aa, Glycine max
  Clone ID: PAT_MRT3847_15153C.1.pep
FYGRNCQSKAVPEGKSKTGMDRSYTVFYHITSKNTIMKDDSLILTSTNFCKRYFKILYFINYIYYFYFFCLHIKKSHHEI

SEQ ID NO: 191732 - protein, 75 aa, Glycine max
  unsure (1)..(75): unsure at all Xaa locations
  Clone ID: PAT_MRT3847_15154C.1.pep
TEQDKIRELSQQLATEKKRSAAYKRHLELIFEQIEEQNENLSKKIQXIVDSVKEMEAKEEHSRQWEGDGSQRRTY

SEQ ID NO: 191733 - protein, 67 aa, Glycine max
  Clone ID: PAT_MRT3847_15155C.1.pep
KKVFCLGGKRTLIVRHLFIYLLIPNTCGTQKFFSQSIDSGFNQPKMAGMASKVPPGGPIIHPGKEHE

SEQ ID NO: 191734 - protein, 159 aa, Glycine max
  Clone ID: PAT_MRT3847_15156C.1.pep
GIRHEAIFLYLFLIGIWYYRWRPRHPPHMDTRLSHADSAHPDELDEEFDTFPTSRPNDLVRMRYDRLRSIAGRIQTVVGDLATQGERLQSLLSWRDPRATSLFVIFCLVAATVLYVTPFQVVALFTGIYVLRHPRFRYMLPSVPLNFFRRLPARTDCML

SEQ ID NO: 191735 - protein, 170 aa, Glycine max
  unsure (1)..(170): unsure at all Xaa locations
  Clone ID: PAT_MRT3847_15157C.1.pep
MKLRIAAANRQASIKMGEFTGSGEYVTHGELPSSRPNHSRKVTVLPLVFLIFYEVSGGPFGVEDTVHAAGPLLALIGFLLFPLIWSVPEALITAEMGTMFPENSGYVGWVSSALGPYWGIQQGWMKWLSGVIDNALYPGLFLDYLKSGXPAICGGLPRVIATWGLTMVLT

SEQ ID NO: 191736 - protein, 57 aa, Glycine max
  Clone ID: PAT_MRT3847_15158C.1.pep
KIKQRSEGVVIFGKVRSQGLVELFQFVLLPTHNLVSVFLFCPGHELNMFLNVRHGHS

SEQ ID NO: 191737 - protein, 49 aa, Glycine max
  Clone ID: PAT_MRT3847_15159C.1.pep
QERYIIFNIFRFGGHVKKEEENSVISHKSQTRDGQLGILNQKLTMKLWE

SEQ ID NO: 191738 - protein, 208 aa, Glycine max
  Clone ID: PAT_MRT3847_1515C.1.pep
MTKVHPNANASVCVSETETEKPNKNSDAMAVVLTVWKKSLLPNCNGFTVFDTQRGNLVFRVDNYVARNKDQILLMDAAGTPLLTIRRKRLSLVSDTWLVFEGEGSVKQKLLFTAARKNVNAKCTLAHIFNIKKEVAYEIEGSYAQRCCTFYNNNKIKVAEMKMKETFGADIFRLFVQPHMDTTLAMAFVILLDHMFPSPSRSSFTITF

SEQ ID NO: 191739 - protein, 66 aa, Glycine max
  Clone ID: PAT_MRT3847_15160C.1.pep
DQKPKMKGESLRLAFWHILHRNNNPCKNTRCAQTLSQLMPIILSSPATPLHSIFKKKHNKGPQFLS

SEQ ID NO: 191740 - protein, 52 aa, Glycine max
  unsure (1)..(52): unsure at all Xaa locations
  Clone ID: PAT_MRT3847_15161C.1.pep
KEYVQHKMMDKAXRLWNLISQGGYLYVCGDAXGLARDVHRVFIPFSCCWTMV

SEQ ID NO: 191741 - protein, 134 aa, Glycine max
  unsure (1)..(134): unsure at all Xaa locations
  Clone ID: PAT_MRT3847_15162C.1.pep
PSHLVTRPRKAWAAVGTLCLKRPTSVKTLTGMTITLEVEEPGTIETAXARIQDEGGTPPDRRGALVAGKLLEDCTTLADYYIHEERTCHLVLRVPGGVHILALTLTGPTIDLEDEKMKHHAYDKGNMQDKGGTP

SEQ ID NO: 191742 - protein, 113 aa, Glycine max
  Clone ID: PAT_MRT3847_15163C.1.pep
IYYIYIYIYIKHSGVQSLAFEGETSDQLVVTGEGIDAVFLTNRMRKKFSYATLLSVEEVKEEKDEGGQDGGEEEDETETNENYPPPGPMCGTYHSPMYHHVVYDPYPNSCSIL

SEQ ID NO: 191743 - protein, 92 aa, Glycine max
  unsure (1)..(92): unsure at all Xaa locations
  Clone ID: PAT_MRT3847_15164C.1.pep
APXXKLSVIXFXSTXXIHCVIPGCCXLQDNXHCCCFXQPQLVWXXRRRKLKQHXEXXXXXXTSFVEXEXSGSXSXXGAAMXSGKGFGPGRVH

SEQ ID NO: 191744 - protein, 75 aa, Glycine max
  Clone ID: PAT_MRT3847_15165C.1.pep
MANKVLHREITVQDLLAADINTTGFISKSEYVIFMLKKMGKIQEKDVLQICGQFRKLDPSNCGKITRPHLLGGSL

SEQ ID NO: 191745 - protein, 66 aa, Glycine max
  Clone ID: PAT_MRT3847_15166C.1.pep
ITPQYLLEKPGSSLSLPTVFIKTFTPVLKGRGFPSKLLLHFFFIKNYVFISPKTKNPNLGIFFFAG

SEQ ID NO: 191746 - protein, 41 aa, Glycine max
  Clone ID: PAT_MRT3847_15167C.1.pep
FFFPMMLFKGHKACQIRIQHFRSWLRWIISLRRYMIDSRVV

SEQ ID NO: 191747 - protein, 205 aa, Glycine max
  unsure (1)..(205): unsure at all Xaa locations
  Clone ID: PAT_MRT3847_15168C.1.pep
LEPAIDCYLKLLVRLCYIYDTRGGVKRVKDGASQDQILNETRLQNLQRELVKDLREVNTPRMLARLIWAIAEHIDIEGLDPLLADDPDDPLNVIISNIHKVLFNVDSTAETTNRVQDVQAVLISAQRLGSRHPRAGQLLTKELEEFRNNPLADSVSKHQCRLILQRIKYATSHQDNKWAGVTEARGDYPFSHHXITVQFYEASAA

SEQ ID NO: 191748 - protein, 66 aa, Glycine max
  unsure (1)..(66): unsure at all Xaa locations
  Clone ID: PAT_MRT3847_15169C.1.pep
GGSAGNKFRMSLGLPVAATVNCADNTGGEKTSTSFSVKGIKGRXNRLPSAWVGKLVMATGKRKNPS

SEQ ID NO: 191749 - protein, 246 aa, Glycine max
  unsure (1)..(246): unsure at all Xaa locations
  Clone ID: PAT_MRT3847_1516C.1.pep
GQFGITHQQMLAQISSQAVQTHSEHPFSISAVSATSSCAAQQLIPPSMPDSKVKESLDYSHSEQKLQSSVNVDNKPNNDGYNWRKYGQKHVKGSDFSRSYYKCTRPNCPVKKKLERSLEGHVTAIIYKGEHNHQRPHRSKIVKETQTSNENSVSKMDLGSSQATGEHGSGTRDSEEVHDHETEAVGKFYDSAETQKSGSRXPASLHRTVAETRIIVQTTSEVDLLDDGYRWRKYGQKVVKGNPYPR

SEQ ID NO: 191750 - protein, 1088 aa, Glycine max
  Clone ID: PAT_MRT3847_15170C.1.pep
MPTPVAAARQCLTPDAARALDEAVSVARRRGHAQTTSLHAVSALLSLPSSPLLRDACSRARNCAYSPRLQFKALDLCLSVSLDRAPSSHNHSSADHDPPVSNSLMAAIKRSQANQRRHPDNFHFSQGSYSPLDRGCQKQQQQQQPFSVSSVKVELQHLILSILDDPVVSRVFAEAGFRSSDIKLAILRPLRPRGSPIFLCNLSESPRRFPFFFGCGDEDGGGENFRRIGEVLVRSRGKNPLLLGACANDALRGFAEAVEKRREGALPVELLGLRVVCIAEEVAGGDAEVVGRRVREIGNLAEQCVGPGVVVSFGDLKGFVSDDEEGGGEGQSLRGVVGELAKLLQVHYDKFWLIGAAATYESYLNFVGKFPSIEKDWDLQLLPITSVKPPSESYHRPRSSLMDSFVPFGGFFSSQSDLKAPLNSSFYCVPHCHQCGERCEHEVLAASKERFCASSAADPHQSSLPPWLQIAEFGSTKGLNVKTKDNGVLLDSSESGPLHKNLDKLSQHLLHRDANTFPTVVGFHCGAEKKKEDVDNCRSKSPSEYINLNSHVPVGMQMMPTSQSSSPFPAVFKAKQEKYNSKLAEMFQKVEDHDSGDRRSCNMSNSSVCDGSQMSPTSVTSVTTDLGLGICSSPTCNKLKKPAVQYTMEPPKEIPSRFSPNNNVADGNMLKHPSQSSSCLSFDYCGQVDAKNPKILFEALSKEVSWQDEALRAIVKTIVCSPTKRVKHRGPNQPGDIWMNFVGHDRLGKKKIAVSLAELLYGSRESFIFVDLSSEEMKGCNVKFRGKTTLDFIVGECCKKPLSVVFLENVDKADILAQNSLSQAIKTGKITDSHGREVSVNNTMFVFSFSDYQNSSMPRGEPSNYSEERILRAKGGGIKIKVEHVIGDIRSQSISLTNNSIDAIPNLNFLSKRKLIGDNEFHDPHLLFDTAKRAHTTSNWLLDLNLPAEENEQKQTNDGNSDHVVSTENQKLWLQDLCDLVDETVVFKPYDFDALADRVLKVIRSNFNKILGSKCALQIQTEVMDQFLAAQYVSDRDTEVENWVEEVLCEGFTEIQRRYNLTASSIVKLATCPEQAAGVHLPSRIILD

SEQ ID NO: 191751 - protein, 1059 aa, Glycine max
  Clone ID: PAT_MRT3847_15171C.1.pep
PTPVAAARQCLTPDAARALDEAVSVARRRGHAQTTSLHAVSALLSLPLLRDACSRARNCAYSPRLQFKALDLCLSVSLDRAPSSHNHASSDHDPPISNSLMAAIKRSQANQRRHPDNFHFYPHHQTQQQPFSVSSVKVELQHLILSILDDPVVSRVFAEAGFRSSDIKLAILRPLRPRGPPIFLCNLSEPPRRFPFFFGGGDEDGGGGGENFRRIGEVLVRSRGKNPLLLGACASDALRGFAEAVEKRREGALPVELSGLRVVCIAEEVASGDAEVVGRRVREIGNLAEQCVGPGVVVSFGDLKGFVSDDEEGGGEGQSLRGVVGELAKLLFGGFFSSQSDLKAPLSGSFYCVPHCHQCGGERCEHEVLASSKERFSASSAAMRELRIPMRNTNPIHNDVPENTTFLLFDQPSGEANTTGTLINKINEIAINAKTANWKAFPTRHPCRSFVNVTTKDNGVLLDSSESGSLHKNFDKLSQHLHQRDAITFPTVVGFHCGAEKKKEDTDNCSSKSPSEYINLNSRVPVGMQMMPTSQSSSPFPAVFMAKQEKYNSKLAEMFQKVEDHESGDQRSCNMSNSSVCDGSQMSPTSVTSVTTDLGLGIYSSPTSNKLKKPAVQYTMEPPKEIPSRFSQNFNLADGNILKHSSQSSSCLSFDYCGQVDAKNPKILFEVLSKEVTWQDEALRAIIKTIVCSPTKRVKHRGPNQPGDIWMNFVGSDRLGKKKIAVSLAELLYGSRESFIFVDLSSEEMKGCDVKFRGKTALDFIVGECCKKPLSVVFLENVEKADILAQNSLSLAIKTGKISDSHGREVSVNNTMFVFSFSDYQNSLMPRGEPSNYSEERILRAKGGGIKIKVEHVIGDIRSQSISVTNNSIHAVPNLNILNKRKLIGDDKFHDLHFLSDTAKRAHTTSNWLLDLNLPAEENEQKQTNDGNSDHVSTENQNLWLQDLCDLVDETVVFKPYDFEALADRVLKVIRSNFNKILGSECALQIQTEVMDQFLAAQYVSDRDREVENWVEEVLCEGFTEVQRRYNLTASSIVKLFTCPEQAAGVHLPPRIILD

SEQ ID NO: 191752 - protein, 1143 aa, Glycine max
  Clone ID: PAT_MRT3847_15172C.1.pep
MPTPVAAARQCLTPDAARALDEAVSVARRRGHAQTTSLHAVSALLSLPLLRDACSRARNCAYSPRLQFKALDLCLSVSLDRAPSSHNHASSDHDPPISNSLMAAIKRSQANQRRHPDNFHFYPHHQTQQQPFSVSSVKVELQHLILSILDDPVVSRVFAEAGFRSSDIKLAILRPLRPRGPPIFLCNLSEPPRRFPFFFGGGDEDGGGGGENFRRIGEVLVRSRGKNPLLLGACASDALRGFAEAVEKRREGALPVELSGLRVVCIAEEVASGDAEVVGRRVREIGNLAEQCVGPGVVVSFGDLKGFVSDDEEGGGEGQSLRGVVGELAKLLQVHYDKFWLMGAAASYDNYLNFVGKFPSIEKDWDLQLLPITSVKPLSESYHRPRSRLLEMLVGGFQSANFLPSFHPFPNNWILMDSFVPFGGFFSSQSDLKAPLSGSFYCVPHCHQCGGERCEHEVLASSKERFSASSAADPHQSNLPPWLQIAEFGSTKGLNVKTKDNGVLLDSSESGSLHKNFDKLSQHLHQRDAITFPTVVGFHCGAEKKKEDTDNCSSKSPSEYINLNSRVPVGMQMMPTSQSSSPFPAVFMAKQEKYNSKLAEMFQKVEDHESGDQRSCNMSNSSVCDGSQMSPTSVTSVTTDLGLGIYSSPTSNKLKKPAVQYTMEPPKEIPSRFSQNFNLADGNILKHSSQSSSCLSFDYCGQVDAKNPKILFEVLSKEVTWQDEALRAIIKTIVCSPTKRVKHRGPNQPGDIWMNFVGSDRLGKKKIAVSLAELLYGSRESFIFVDLSSEEMKGCDVKFRGKTALDFIVGECCKKPLSVVFLENVEKADILAQNSLSLAIKTGKISDSHGREVSVNNTMFVFSFSDYQNSLMPRGEPSNYSEERILRAKGGGIKIKVEHVIGDIRSQSISVTNNSIHAVPNLNILNKRKLIGDDKFHDLHFLSDTAKRAHTTSNWLLDLNLPAEENEQKQTNDGNSDHVSTENQNLWLQDLCDLVDETVVFKPYDFEALADRVLKVIRSNFNKILGSECALQIQTEVMDQFLAAQYVSDRDREVENWVEEVLCEGFTEVQRRYNLTASSIVKLFTCPEQAADRKEKRKAAISHPTEVTSKHREHNGAKFRTCRVKIMAFLIGPLHGFRIQSLL

SEQ ID NO: 191753 - protein, 61 aa, Glycine max
  Clone ID: PAT_MRT3847_15173C.1.pep
HERCVLTADSVGLGMGFTSRHVVRVGDLDLFRVHNKRRSTLHAGGGNVGSYRGAAHFSEFQ

SEQ ID NO: 191754 - protein, 48 aa, Glycine max
  Clone ID: PAT_MRT3847_15174C.1.pep
ILLSYLFLGKNYQDILCYVLMYNIYCVHECELSYRFTSQALHGGGAVQ

SEQ ID NO: 191755 - protein, 69 aa, Glycine max
  Clone ID: PAT_MRT3847_15175C.1.pep
NKKGVILSNSTNIIFQKKKIPHILTPIISMRIILMKLLMRDAEYNSKIKKLRDKKSRHLWIVLRPPDAW

SEQ ID NO: 191756 - protein, 79 aa, Glycine max
  Clone ID: PAT_MRT3847_15176C.1.pep
ELLQMAGRAGRRGIDENVHVFLIQTPNEGAEEGCIVLFAGLEPLVSQDTASYGMAMNLLAGVKSIHRSNESDDMIPSTG

SEQ ID NO: 191757 - protein, 126 aa, Glycine max
  unsure (1)..(126): unsure at all Xaa locations
  Clone ID: PAT_MRT3847_15177C.1.pep
DLQQSKFNHLLFFDHTHKATETKYXKNPLYANNLTKXSKALLELSQFQSFPKSKKITQKASSKLEEXLTINPKXHNTLXYLENTHTSQAFLIPDANKTKVYFDKAAKYFQQAINKNPSNKLYHKSL

SEQ ID NO: 191758 - protein, 68 aa, Glycine max
  unsure (1)..(68): unsure at all Xaa locations
  Clone ID: PAT_MRT3847_15178C.1.pep
FGSSGVLKTPDTLAHGKNASQGSLVINLXLPAQPEPYLPRIGRSGTFERKGVAINFVPKYNNKTALNI

SEQ ID NO: 191759 - protein, 24 aa, Glycine max
  Clone ID: PAT_MRT3847_15179C.1.pep
NLQLINYFPNPNSKLRNARIDVKL

SEQ ID NO: 191760 - protein, 87 aa, Glycine max
  Clone ID: PAT_MRT3847_1517C.1.pep
PLIGLPSLKKQINLNKTGKTTLPGTSFFLGSQKTLAFLNQDPTCDGGGDLVFWIEPIPMKLENLYPGVIGGVFNPTRKLIGPKGVKI

SEQ ID NO: 191761 - protein, 192 aa, Glycine max
  unsure (1)..(192): unsure at all Xaa locations
  Clone ID: PAT_MRT3847_15180C.1.pep
MVVSSSARDYINRILPDISGMKILILDSQTVGIVSVVYSQSELFQKEVFLVELVDSISKSNESMSHLKAVYFLRPTSENIQLLRRQLASPRFGEYHLFFSNILKDTQIHLLADSDEQEVVQQVQEFYADLVAIDPLSFTLHVPSHYIYMLPAVVDPFTVQRFSGPGXDGLSALFFALXRRPVIXYPRTSDIA

SEQ ID NO: 191762 - protein, 40 aa, Glycine max
  Clone ID: PAT_MRT3847_15181C.1.pep
KYYSKLNWLLVHLREESLRKRLPLPKNHRKNLKGPNNNYK

SEQ ID NO: 191763 - protein, 79 aa, Glycine max
  unsure (1)..(79): unsure at all Xaa locations
  Clone ID: PAT_MRT3847_15182C.1.pep
ISISSLTDSKNLNSFREXYPTVSADYQKAVEKAKKKLRGFIAEKRCAPLMLRLAWHTAGTYXVSSKTGGCLGTIKHPSE

SEQ ID NO: 191764 - protein, 153 aa, Glycine max
  Clone ID: PAT_MRT3847_15183C.1.pep
MEGITASVCRGVKDYWRRKGYKKLNGSGRRRRNRVELGSTRTGKGRFWRWRIRLAPKIRIRKIPSPKKMLLWVRDAYVRMMLGLANSRVMTVNAASASGFGGALSGVGTSLGTGFGLAPPKEYDEKTIIQIYKSLLMAHGPLVSPDAAAAQIR

SEQ ID NO: 191765 - protein, 68 aa, Glycine max
  Clone ID: PAT_MRT3847_15184C.1.pep
LFFCFCPTNPPPFWGRLGSPRKLGPGPGGPPAFPLRGRLKGRAGTHKEQSLGGKRRALTIYKKIRGGN

SEQ ID NO: 191766 - protein, 67 aa, Glycine max
  Clone ID: PAT_MRT3847_15185C.1.pep
FGLEAIVLGNMNRDLLQCREGTRGEGENQNLILNVLLSMMPQSFYFLFGKPIKTLGGGKILLDGLGA

SEQ ID NO: 191767 - protein, 128 aa, Glycine max
  unsure (1)..(128): unsure at all Xaa locations
  Clone ID: PAT_MRT3847_15186C.1.pep
GSTPAVRCGDYVYVKVYVAVHNXMPYMFLPWSAPARVWHVTXRSCGFEVIKQVGNIIIRKQMHLRVXHAMALLCTDXFRLSKIKIDYLKVEASGQGEKISTXRQPQGPKPGFMAEGATKATSTPIPYD

SEQ ID NO: 191768 - protein, 56 aa, Glycine max
  unsure (1)..(56): unsure at all Xaa locations
  Clone ID: PAT_MRT3847_15187C.1.pep
SRVIVFPVKAKIQDKEGIPPDQQRLIXAGKQLEDGRTLADYNIQKESTHHLVLRLR

SEQ ID NO: 191769 - protein, 65 aa, Glycine max
  Clone ID: PAT_MRT3847_15188C.1.pep
VFRQGRSLAPFAPPLEGYIVFSTQPKPQLGPNSCSVFSPRTKATMLKSFLKKKKKKKKKKKKPPP

SEQ ID NO: 191770 - protein, 90 aa, Glycine max
  unsure (1)..(90): unsure at all Xaa locations
  Clone ID: PAT_MRT3847_15189C.1.pep
XXHKCKLVGXIXKDXXQPXLTIAXLVAXVVVFESXFMSLIHGGNNPPKVEKQPMRAEASNSQGSEENEENIEKEMQKEAASNDAGRRPRR

SEQ ID NO: 191771 - protein, 46 aa, Glycine max
  Clone ID: PAT_MRT3847_1518C.1.pep
LICLEAWKMKDPYIFAKSMVAKFFTFDCHELLSIILFSYLTFNHYN

SEQ ID NO: 191772 - protein, 35 aa, Glycine max
  Clone ID: PAT_MRT3847_15190C.1.pep
KLISVKNDTRITTLVIKYVRLFYGEEDFLVFVYRD

SEQ ID NO: 191773 - protein, 234 aa, Glycine max
  Clone ID: PAT_MRT3847_15191C.1.pep
MSSGATYWCYTCRQPICLARRDHICPYCDEGFLQELDELQGGMEQRGSEPRMGGRYINFGVRRPGSTPLPESWTRGVFIFPNQEVAADREGFFEQHITNDPLGASQSSIDAMPTIKITHEHLYSNPKCSVCIERFEVGSEARKMPCDHIYHSDCIVPWLVHHNSCPVCRGKLPPEGHVSSRGSQIWRGRNVNGNSENDIYRGRENRQFNDGWRNLLSFLNFCGQSFLLIQILNS

SEQ ID NO: 191774 - protein, 83 aa, Glycine max
  unsure (1)..(83): unsure at all Xaa locations
  Clone ID: PAT_MRT3847_15192C.1.pep
SHYLTXAACFLLTRGAPKPXPSPIPTSIVFRRRRRSSARLHIYNKTPCPPPLTTTIGTTKPASTLFNPNLLSENTTTKIIRKR

SEQ ID NO: 191775 - protein, 57 aa, Glycine max
  Clone ID: PAT_MRT3847_15193C.1.pep
PSVIQTHVITKQRYKRNHLTLNNKKLHIHLLITNLRRNLSNKIKYEALEFEARLKKC

SEQ ID NO: 191776 - protein, 68 aa, Glycine max
  Clone ID: PAT_MRT3847_15194C.1.pep
HASAQIKKKKKKKKKKKKKKKKKKKKKKKKKKKKKKKKKKIGKHKKKYTELAVNNKIKGPEKTLLKTK

SEQ ID NO: 191777 - protein, 41 aa, Glycine max
  Clone ID: PAT_MRT3847_15195C.1.pep
ISRKSVHVTSWVPHLWNVPFRDFSVQALITVNGKKEEKTTT

SEQ ID NO: 191778 - protein, 51 aa, Glycine max
  Clone ID: PAT_MRT3847_15196C.1.pep
FSFFFFFFLFCSLFKKNMGYFFCNTFVEKNTMLLNTLHSFKNLSKTTLPQG

SEQ ID NO: 191779 - protein, 84 aa, Glycine max
  unsure (1)..(84): unsure at all Xaa locations
  Clone ID: PAT_MRT3847_15197C.1.pep
ENVGHSVDDDDCTRHRVRPKMTAMIDHREVVHASLSQPAWGTLEFGPGCPVHMIRDAHPXSLASAGAAWGRTREVPDPGTCRAY

SEQ ID NO: 191780 - protein, 128 aa, Glycine max
  Clone ID: PAT_MRT3847_15198C.1.pep
TPSYMATEAHRFPKINNDQGSSSIPHNPIQKDVESSEITEELPSRHAHGRRKNLILEIPTRTLDETREEFFRTNQPPTPSPRSQINEFQGPLSTKNIKFHKISSDVEEASIPALDGSPPEPLQEPMIS

SEQ ID NO: 191781 - protein, 86 aa, Glycine max
  Clone ID: PAT_MRT3847_15199C.1.pep
MQHSCNEEKLPVAKETWDVKSFRQRAEALEKLLELSAKLLQQNRLEELQVVLKPFGKAKVSPRETAIWLAKSLKGMMSEESGGRSS

SEQ ID NO: 191782 - protein, 92 aa, Glycine max
  Clone ID: PAT_MRT3847_1519C.1.pep
PKGALLNSHIKKCSFFEKKTKTSWVSLGRINGFKLPTTDIARPSLTTTRSYNSFLNKLASSLITMCETLRLHIWTLGVQTHIFTCFTTLNLH

SEQ ID NO: 191783 - protein, 33 aa, Glycine max
  Clone ID: PAT_MRT3847_151C.1.pep
LQNKSNSQMKTTSCYISCLSIVQQQFQSFKMIC

SEQ ID NO: 191784 - protein, 81 aa, Glycine max
  Clone ID: PAT_MRT3847_15200C.1.pep
MHHVPSQMVEQSHPDPFEGRLEAFTPEREHSYVASKNEDQWRWERDESKMPNSMTSHMFNEGQSQGGDATRSYFQGQRPNP

SEQ ID NO: 191785 - protein, 86 aa, Glycine max
  Clone ID: PAT_MRT3847_15201C.1.pep
MGRDTETSEATYAVEHLAALNRYKPDIQADLENYVHDHGSTQTYSPDANLCLLLLCQNEPEKMSSQIEARILVKALMAMPAPDFNL

SEQ ID NO: 191786 - protein, 263 aa, Glycine max
  Clone ID: PAT_MRT3847_15202C.1.pep
SDKTIDGRGVDVYLAGGAGITIQFIKNVIIHGVKIFDIQVGNGGLIIDSENHYGLRTMSDGDGISIFGSSNIWIDHVSMRKCKDGLIDAIQGSTAITISNSHFTDHNEVMLFGASDSYDGDTIMQITLAFNHFGKRLVQRMPRCRYGFVHVVNNDYTHWEMYAIGGSKHPTIISEGNRFIAPDNINAKEITKREYSPEQEWKSWQWRSINDEYLNGGFFREGGAQLTDRPYSRHDMMTARPGSYVGRLTRYAGSLKCMVGKPC

SEQ ID NO: 191787 - protein, 48 aa, Glycine max
  Clone ID: PAT_MRT3847_15203C.1.pep
FIQEYEEAIRNRRKQTPLSLSLKSLAPQNNRDSTKKKKKKKKKRHYKA

SEQ ID NO: 191788 - protein, 40 aa, Glycine max
  unsure (1)..(40): unsure at all Xaa locations
  Clone ID: PAT_MRT3847_15204C.1.pep
IHQKGKFHFQVFIPFKKFLKIYLKILKVCFQFYGVSXXHF

SEQ ID NO: 191789 - protein, 70 aa, Glycine max
  Clone ID: PAT_MRT3847_15205C.1.pep
QEGGAGPTNKTHTHHRKGPFKFKSLDFGERNGYLKGVDTEIIHDPGPGAPLAPVAFPHPFRYTKHNELSP

SEQ ID NO: 191790 - protein, 77 aa, Glycine max
  Clone ID: PAT_MRT3847_15206C.1.pep
GPRGFWPSIFRAPVSPTGLPLLQVCSPGAQAFLGSKKSIPPWRKIPEKMARPFRFMGLPPPPGESSLIIGLNMGRGF

SEQ ID NO: 191791 - protein, 63 aa, Glycine max
  Clone ID: PAT_MRT3847_15207C.1.pep
GKVLNLNTAHKALPLARLLEYVERLYELGKVLNLNTALLLSDNFLFIIIFLFIVKIVRMNLCS

SEQ ID NO: 191792 - protein, 149 aa, Glycine max
  Clone ID: PAT_MRT3847_15208C.1.pep
QNHLPSKTKVTTPLQSSNSPFVGPTPSPPLAPSPMPGESEKSIPCVSSISNAANIGLQQTGGAVAPAQSLAIGTPGISASPLLAEFSCPDGAHGNALAATSGKSTVTEQPLERLINAVKSISRKALSAAVMDIGSVVSMNDRIAGSAPG

SEQ ID NO: 191793 - protein, 164 aa, Glycine max
  unsure (1)..(164): unsure at all Xaa locations
  Clone ID: PAT_MRT3847_15209C.1.pep
NHALLEXIREINHQLIDXVVDISNEDVDPTAAVAAAEGAEGIIVKCSFIAVALSPSLKSQYASAQMSPIQPLRLLVPANYPNCSPILLDKFPVESSKENEDLSVKARSKFSTSLRSLSQPMSLGEIARTWDVCARRVISEHAQQSGGGSFSSKYGTWENCLTTN

SEQ ID NO: 191794 - protein, 135 aa, Glycine max
  unsure (1)..(135): unsure at all Xaa locations
  Clone ID: PAT_MRT3847_1520C.1.pep
VDVTEFRRLIGSLRYLCNSRPNICFAVSLISRFMKRPRLSHMQAAKRVLRLIKGTIGSGVLFPFKAKSGKPDLLGYTDSDWKRDPEQEKSTGGYLFMYNDAPVAXSSKKQDVIALSTCEAEYVAASLGACQAVWM

SEQ ID NO: 191795 - protein, 150 aa, Glycine max
  Clone ID: PAT_MRT3847_15210C.1.pep
NAYNHALETAKLKYIESLRYYGAARLELNAINEHDDSVTSSLKNEAHTQFAHTFLRFGMLLARENTTAIYETGSLEGTWVSHTTPHDRKSRKDLRKHEISANEAIREALSVYESLGELRKQEAAYAYFQLACYQRDCCLRFMNSGNKKSI

SEQ ID NO: 191796 - protein, 805 aa, Glycine max
  unsure (1)..(805): unsure at all Xaa locations
  Clone ID: PAT_MRT3847_15211C.1.pep
LLKSHSLSHQIPYPYSQCPLVQSSIPSLNSLAPTAHPSGCSRQEDLYQKDHSMKESYLSAMNEMYHNIASPRQXSMIPFSDSPRHIELTXLKVFKMMLVRIITFLQVCXSTASSNSNEKLKSNEKKIINFINTNXPRKNMPGHLLPPHMHSMPQSHSQVTQVQSHENQMNPQLQTTNMQGSVATMQQNNMAGMQHNSLSGVSTVQQSKMNSMQPSTNLDSGPGNAVNSLQQVPVSSLQQNPVSAPQQTNVNSLSSQAGVNVVQPNLNPLQPGSSMLQHQQLKQQQEQQMLQNQQLKQQYQRQLLQRKQQQIKQQQQQQQLHQTAKQQLPAQLPTHQIQQLHQMNDANDIKMRQGIGVKPGVFQQHLTSSQRSTYPHQQMKGSPFPVSSPQLLQATSSQIPQHSSPQVDQQNHLPSKTKVTTPLQSSNSPFVGPTPSPPLAPSPMPGESEKSIPCVSSISNAANIGLQQTGGAVAPAQSLAIGTPGISASPLLAEFSSPAQSLAIGTPGISASPLLAEFTPLERLINAVKSMSSKALSAAVMDIGSVVSMNDRIAGSAPGNGSRAAVGEDLVSMTNCRLQARNFITQDGSNGIKRMKRYTSATPLNVVSSPGSMNDSIKQLTAEASDLDSTATSRFKMPRIEANHSLLEEIREVNQRLIDTVVDISNEEVDPTAAAAAAEGTEGTIVKCSYNAVALGPSLKSQYASAQMSPIQPLHLLVPTNYPNCSPILLDKFPVESSKENEDLSVKAKSRFSISLRSLSQPMSLGEIARTWDVCARTVISEHAQQSGGGSFSSKYGTWENCLTT

SEQ ID NO: 191797 - protein, 65 aa, Glycine max
  unsure (1)..(65): unsure at all Xaa locations
  Clone ID: PAT_MRT3847_15212C.1.pep
SLALQKMPMKCCQXCTXGEAXVELEKETHFDLXIGFGDGSSTEREKGKDRGKILSLSLRLAEMKY

SEQ ID NO: 191798 - protein, 199 aa, Glycine max
  Clone ID: PAT_MRT3847_15213C.1.pep
LNVQINVMKFACQHFPAPELDFDDYNDYVVIHDLQSGYEECDSYQATYAYPGSTFPKWLEYKTTNDYVVIDLFSGQLSHQLGFIFCFIVPKDSKRDDKLILYITISDCEGEGEKGSTKMYMNKSDSTKSDHVCVMYDQRCSHYLNSMAKNMKRFKINVTAKTGPISFSCEEEEVLKGFGVSLINTSTYHNFIQQMKFFD

SEQ ID NO: 191799 - protein, 155 aa, Glycine max
  Clone ID: PAT_MRT3847_15214C.1.pep
MGLPLVHALFLTLFLLCLQTKAEDFGATRKLAGTCNLFSGKWVYDASNPLYDPSTCPFIDPQFNCQKHGRSDKLYQKYRWMPFSCPLPRFNGLNFLQRYSGKKIMFVGDSLSLNQFNSLACMLHAWVPKSRSTLSQRDALSKVAFEDYGLELYLY

SEQ ID NO: 191800 - protein, 131 aa, Glycine max
  Clone ID: PAT_MRT3847_15215C.1.pep
SKEEIEKMVQEAEKYKSEDEEHKKKVEGKNALENYAYNMRNPIKDEKISSKLSSEDKTKIDNAIEQAIQWLDTNQLAEADEFEDKMKELEGICNPIIAKMYQGGAGTGGDVDDDAPPAGGSGAGPKIEEVD

SEQ ID NO: 191801 - protein, 50 aa, Glycine max
  Clone ID: PAT_MRT3847_15216C.1.pep
GGIIYGEFSSMMKKGNGGFGRGIMKKTLILKDAFGLVENGANRVIEGDFK

SEQ ID NO: 191802 - protein, 46 aa, Glycine max
  Clone ID: PAT_MRT3847_15217C.1.pep
GLQSRLPLSACLVENSSKPLSSRVATNQWYGAVENFINTLFDPLSK

SEQ ID NO: 191803 - protein, 125 aa, Glycine max
  unsure (1)..(125): unsure at all Xaa locations
  Clone ID: PAT_MRT3847_15218C.1.pep
NNKYAGILQGPXDNSLEHXKATTGFLIYIKXKXSIKDPYKEYKLQRRPVYDHLNQPLHIMIETELPANVFNIMLMQAQEIIQELLNPLDESQDYINKHQLRXFPFLKSNFRKKRPLPNIIVPPIN

SEQ ID NO: 191804 - protein, 125 aa, Glycine max
  unsure (1)..(125): unsure at all Xaa locations
  Clone ID: PAT_MRT3847_15219C.1.pep
LEQRCVADGELYEEDVAALARMRVMLCIPQHIVEATNSYICGRLMQRVAXGNPISGRWISSLNSYTXKSNPTHALRTTREDANSIASKAETTNVITYIKRTLTDRDLPRKWKGTSYNVYAEDRKL

SEQ ID NO: 191805 - protein, 48 aa, Glycine max
  unsure (1)..(48): unsure at all Xaa locations
  Clone ID: PAT_MRT3847_1521C.1.pep
XXDSXGXSTAGYXXSCNAYXLKXRXPCXPLPLXSSTLYPFSXTPSLSL

SEQ ID NO: 191806 - protein, 122 aa, Glycine max
  Clone ID: PAT_MRT3847_15220C.1.pep
MASFGPLCCKALVIAVVAMVMGAPSYGQISTPCNASILGTFFTPCMNFLTNSSGNGTSPTTECCSALKSLTSGGMDCLCLIVTGSVPFRIPVNRTLAISLPRACNMAGGPVQCQASGSPLPA

SEQ ID NO: 191807 - protein, 122 aa, Glycine max
  unsure (1)..(122): unsure at all Xaa locations
  Clone ID: PAT_MRT3847_15221C.1.pep
RVPAGEVPGGDLPARPEKEASHDEINNATKEEPEGQPKGTLGHTEDEAVPTAXAGESRPSTXDAKAGTARNKNLGKPVSXEDNERGDSSRVXDLRALAAKKSGWTEKKVARLDTMGGRPAAS

SEQ ID NO: 191808 - protein, 38 aa, Glycine max
  Clone ID: PAT_MRT3847_15222C.1.pep
GLLLFSWLKKKKKKKKKKKKKKKKKKKKKKKKKKGRPP

SEQ ID NO: 191809 - protein, 35 aa, Glycine max
  Clone ID: PAT_MRT3847_15223C.1.pep
RILKKIIFKRRLNFTRIQRTIRRVCLKKKKKDGGS

SEQ ID NO: 191810 - protein, 70 aa, Glycine max
  Clone ID: PAT_MRT3847_15224C.1.pep
RGGGPFFFFFFFFFFFFFFFRNVVKWGLIFFFKKYIYLFIIGANILYYIFMDISHSFQDLHNKSKFPKHC

SEQ ID NO: 191811 - protein, 73 aa, Glycine max
  Clone ID: PAT_MRT3847_15225C.1.pep
KNPSYQNLRHNCWNKTLPIMVVMQRKNLLPEMNENQRSTQTMVSRREFRFRGVHCQLYVGTCFIFLKQASQPP

SEQ ID NO: 191812 - protein, 158 aa, Glycine max
  Clone ID: PAT_MRT3847_15226C.1.pep
SESCDVSLPGDNDPYWLAHIGMGHSVYFTVPENCHMKGMALCVVYLSTPEKTATECLISVLMVNYTKCSILICKRDTVISFNDEDWEGIMSHLGSGDKVEIFVAFGHGLEIKKTAVYLMCDESIDMKMVPSPEPKKVSKKNAFVRIIKKIVTSKIQEQ

SEQ ID NO: 191813 - protein, 154 aa, Glycine max
  unsure (1)..(154): unsure at all Xaa locations
  Clone ID: PAT_MRT3847_15227C.1.pep
KGFLPPYSIFFTVVVTCYCCAKVKKGRTLEEATAKCCWMEVEDKLMRLQSLLFGAXRALENNDFFWGYMLALRLLGFLDVNSHSNVYEAFVQPIRRDALAKLHFVRQSLTPQSDRQAFEQAKKSPGRIFGTTGDIDIEKIRNSEYSQALVKQSI

SEQ ID NO: 191814 - protein, 227 aa, Glycine max
  Clone ID: PAT_MRT3847_15228C.1.pep
RRRTRGADAWAGCEKTTEGDLLHQIDMRDNHYTDWMEYHEEWINIWKNKHNDILDGQWVEGIVTHTPTYMEWYRKNTILFLSVEQQLHDPCTTIIQNDAGSGVEQTHFEIPHPQSMYSTPSPVHQTFGHTGESVTATTHEWMTDLFGIDFNTPNSAASYLATLEQFDAPHSFGEQGQSSSATTTNIENTNIEQQHDHDVEELVILERRNLRRNRRPPPCWTCHRLGH

SEQ ID NO: 191815 - protein, 63 aa, Glycine max
  Clone ID: PAT_MRT3847_15229C.1.pep
PSIFDPKAAFPLRASFVKRVSWYANEWGSPPRVLALLKPMALVGAQNCPPLVYVVFQFLLNRV

SEQ ID NO: 191816 - protein, 72 aa, Glycine max
  Clone ID: PAT_MRT3847_1522C.1.pep
KLIPFFYNKILCTLPNPNWKTKNKNKSLIVREKKCTGYYWTPITPLATIYFIPQSNKTWTKIIILWGDMILK

SEQ ID NO: 191817 - protein, 41 aa, Glycine max
  unsure (1)..(41): unsure at all Xaa locations
  Clone ID: PAT_MRT3847_15230C.1.pep
LFXYLTSSQAEKQAYGMILNHAMGVDTIXCTDPILNFHFLS

SEQ ID NO: 191818 - protein, 73 aa, Glycine max
  Clone ID: PAT_MRT3847_15231C.1.pep
SKMIFCKNVFYIKKIDIVKIFYTFPCINYVYPNANAYLILWYRRKVISRGVQLMQHFFLTILSLIYVLLFIFV

SEQ ID NO: 191819 - protein, 73 aa, Glycine max
  Clone ID: PAT_MRT3847_15232C.1.pep
CTHPLSAHLISAFVFFTRIFTATLSISLSPSPFSFFPFFLSTFSIFSLQSLNLWLPLRFLFKALLYLYPKKTY

SEQ ID NO: 191820 - protein, 52 aa, Glycine max
  Clone ID: PAT_MRT3847_15233C.1.pep
TRNGGGEIYLWGGGKSSIAFPLSFLEKGDAPHGNTFPLIIFLVYLKQSFILI

SEQ ID NO: 191821 - protein, 163 aa, Glycine max
  Clone ID: PAT_MRT3847_15234C.1.pep
CEGITSASMAAIAHSYMLEVLELDNCSLLTSVSLDLPRLQTIRLVHCRKFADLNLRTMMLSSILVSNCPALHRINITSNSLQKLALQKQDSLTTLALQCQSLQEVDLSECESLTNSICDVFSDGGGCPMLKSLVLDNCESLESVRFISTTLVSLSLGGCRAIT

SEQ ID NO: 191822 - protein, 59 aa, Glycine max
  Clone ID: PAT_MRT3847_15235C.1.pep
DPLPNFNSLSLSLSPIYKFFSHSKISLSLAPRSINRSLSLKSLSLSLGSLFSLSLVYWV

SEQ ID NO: 191823 - protein, 55 aa, Glycine max
  Clone ID: PAT_MRT3847_15236C.1.pep
PHGERPASPEAALCMELQTTPYIGVLKLALAAGAHVCQLGDRTLDSSIDIARPCS

SEQ ID NO: 191824 - protein, 497 aa, Glycine max
  Clone ID: PAT_MRT3847_15237C.1.pep
MSNSTTGTTAALPPKPTWVLPYRTENLREVYTLSRKLGQGQFGTTFLCTHNATGRTFACKSIPKRKLLCKEDYDDVWREIQIMHHLSEHPNVVRIHGTYEDAASVHLVMELCEGGELFDRIVQKGHYSERQAAKLIKTIVEVVEACHSLGVMHRDLKPENFLFDTVEEGAKLKTTDFGLSVFYKPGETFCDVVGSPYYVAPEVLRKHYGPEADVWSAGVILYILLSGVPPFWAETEQGIFRQILLGRLDFQSEPWPSISDSAKDLIRKMLDRNPKTRVTAHQVLCHPWIVDDNIAPDKPLDSAVLSRLKQFSAMNKLKKMALRVIAERLSEEEIGGLKELFRMIDADNSGTITFDELKEGLKRVGSELMESEIKDLMDAADIDNSGTIDYGEFIAATVHLNKLEREENLVSAFSYFDKDGSGYITIDEIQQACKEFGLDDVHIDEIVKEIDQDDDGQIDYGEFAAMMRKGNGGIGRRTMRSTLNFRDTLGIKGHGSD

SEQ ID NO: 191825 - protein, 41 aa, Glycine max
  Clone ID: PAT_MRT3847_15238C.1.pep
PLVREQIRGGAIRRQKETLVSNIKVLLTGNDASGDIDYFAG

SEQ ID NO: 191826 - protein, 69 aa, Glycine max
  Clone ID: PAT_MRT3847_15239C.1.pep
PRVRPRVRCFKSVEASNMRSASLVIFCPSVVIGKVFIEYYSLSPIYFSPNVIIKTLGGPWKDLLDWGRD

SEQ ID NO: 191827 - protein, 111 aa, Glycine max
  unsure (1)..(111): unsure at all Xaa locations
  Clone ID: PAT_MRT3847_1523C.1.pep
HHSNNNLELLAWHVEYIAKSKDSTLRGLDCALIRTLDHMYAMSYDAARDNRTCLDATLLYVRDAEAMAGTPADVKEYPNSYVFEIXDMPGVKSVDIHDQVEDHNLLLMKGE

SEQ ID NO: 191828 - protein, 38 aa, Glycine max
  Clone ID: PAT_MRT3847_15240C.1.pep
FILSKLTKFSHLYTFFHNIIIFSITSIHNFLYLFFPKK

SEQ ID NO: 191829 - protein, 77 aa, Glycine max
  Clone ID: PAT_MRT3847_15241C.1.pep
LRVGGRVGLARFSLFHHSFERIFYFIYYHPFPTHNSLMGTSKNIHIFASCLGPIRLYSIGCSLIERPCWFLLVLWIF

SEQ ID NO: 191830 - protein, 79 aa, Glycine max
  Clone ID: PAT_MRT3847_15242C.1.pep
RDPLFGFNCFCAGYIKPLFLPVFFLRATMWVVEFNKFSLLAFHRVFCPLEPKKSSKIAFCWGVTKKKPPPKKKKKKKKK

SEQ ID NO: 191831 - protein, 94 aa, Glycine max
  Clone ID: PAT_MRT3847_15243C.1.pep
KKISFKGGKNGELRPSKKIRPPEKAFLKKKEHQFGKWFPGISHKGNPGDQFFLGGKKNQRLSPKRPPRVIMPNGTRLKRRGGPRKGGKTFLQGG

SEQ ID NO: 191832 - protein, 142 aa, Glycine max
  Clone ID: PAT_MRT3847_15244C.1.pep
APPLRAIRLWPFLWFKNKPPWGAIFKPAFPPGLGDSFFWGGLPVFLFQSGQFAPPPYFWFGPPFGPPGLSLFGFGPFFVLLFCRFLFFPRVRVWPFFRQSFFPPLFREIGLPPGSGPGFSGWPRGPPPGPPPGPPKNKKNNP

SEQ ID NO: 191833 - protein, 660 aa, Glycine max
  Clone ID: PAT_MRT3847_15245C.1.pep
MYSSGGAEAESESESERNRMGDDKEEQGSSFKSWAKQTEESYQLQLALALRLSSHSASSSDHPSSSAQTLTHRFWVDGCLQYSDKIIDGFYLIHGMDVYTWTISTDLQNVGMIPSFESLMSIEPSDDLSILVVAVDKSRDPGLRELQNRVASLSNNWITTKDATDQLANLVCNRMGGGSLTEENLGTRWKECTQLLKSCLHSVILPIGSLPIGLCVHRALLFKVLADLINLPCRIAKGCKYCRKDVGASCIVQFGSDREYMIDLVGRPGATCQPDSSLNSASSMLVPSPLCHPKFKPVETAEYTKTLAQLYFLDSEALHLVFDTTSGPAVNHSGRMDLQKTEALGANYAGGNSHLIALIPGAEEYESFNEANQSIMDYPSHEVDLDKEDLDIPWSELILKENIGTGSFGTVLRADWRGSDVAVKILKVQGFDPGRFEEFLKEVSLMKRLRHPNIVLLMGAVIQPPKLSIVTEYLSRGSLYELLHMPNVGSSLSEKRRLSMAYDVASGMNYLHQMRPPIVHRDLKSPNLLVDDSYTVKVCDFGLSRTKANTFLSSKTAAGTPEWMAPEVIRGELSSEKCDVFSFGVILWELVTLQQPWRQLNPSQVVAAVGFMGKRLEIPGHVNPQVAALIELCWATEHWRRPSFSYVMKCLQQIIADAKG

SEQ ID NO: 191834 - protein, 57 aa, Glycine max
  Clone ID: PAT_MRT3847_15246C.1.pep
VEQSVGFVSYGHWLSVFLCSSDMSSLWGEKYRCVIVSTVLIRTDRTPFLGYERCECH

SEQ ID NO: 191835 - protein, 127 aa, Glycine max
  unsure (1)..(127): unsure at all Xaa locations
  Clone ID: PAT_MRT3847_15247C.1.pep
KSDGVCLLTAAFVGIAFASQFVRELTRLGLNTSACGVLALAFSKELSPVDTTIAVARRIGSAFAPXLGTMQDSDQTDTLRIIVVNPADYLATPILVATCIAFPLLTLGCFTIWMGFNALLAESAYGG

SEQ ID NO: 191836 - protein, 48 aa, Glycine max
  Clone ID: PAT_MRT3847_15248C.1.pep
APQFIMASMRELSIGILSHFKKPHAPPCQLVFLRTTTSNAFVKSLAFS

SEQ ID NO: 191837 - protein, 90 aa, Glycine max
  unsure (1)..(90): unsure at all Xaa locations
  Clone ID: PAT_MRT3847_15249C.1.pep
LWAFGESKPTTPAPTSESALVTRAFNXMVSFPRLKVQPPPLFASGKNPGTIKKGGRKGLPLPFFSIFNALRAFWWGFGGNFRLVGGSFFP

SEQ ID NO: 191838 - protein, 45 aa, Glycine max
  Clone ID: PAT_MRT3847_1524C.1.pep
IDYCCYRLLLVYSLVVARGEMIINTNRHMQCCNYGPCLGVPECQI

SEQ ID NO: 191839 - protein, 91 aa, Glycine max
  Clone ID: PAT_MRT3847_15250C.1.pep
VNLSKGSFRGFQELKEKKPLPARARKGLLPTKAPTGPSKGPGKLVVPGEFLRHQDQGPGFPGFHQVPVGPIKVGPVNPGLGSNPGSPRKMA

SEQ ID NO: 191840 - protein, 100 aa, Glycine max
  unsure (1)..(100): unsure at all Xaa locations
  Clone ID: PAT_MRT3847_15251C.1.pep
LXALVRKXXXSARDYXXXSKXQXXXSMXXXXXXXXXXKQTPXXIKWXXLAXSKXXXXXLVMGXXRXXXXXXXIXXXXKXXXKKKXKKKKKKKKKKKXGXX

SEQ ID NO: 191841 - protein, 65 aa, Glycine max
  Clone ID: PAT_MRT3847_15252C.1.pep
HLSARMAIKPTRRLGVPLRRPSQSQGRDSALNEAPTALHASCGLSSVCRDPPMDSDQHHESPVTV

SEQ ID NO: 191842 - protein, 103 aa, Glycine max
  unsure (1)..(103): unsure at all Xaa locations
  Clone ID: PAT_MRT3847_15253C.1.pep
TTLLGSLETNGAISSEATEAKAGTFKXXLNAPVTSISVSXLARCFNQFSXXXRXAMXIMSVXALACXXXSGXNSGSSNCLXVXFMQAXWWFQNTSPIVKXXHF

SEQ ID NO: 191843 - protein, 81 aa, Glycine max
  unsure (1)..(81): unsure at all Xaa locations
  Clone ID: PAT_MRT3847_15254C.1.pep
XVKXXVXSEPWHFNKSXXRKVVXTLRYLLFWRPHNSLIQLQLVPLKAFDGLWEKEKLEKATKFKEDKLSLPNLGKPGEDAY

SEQ ID NO: 191844 - protein, 120 aa, Glycine max
  unsure (1)..(120): unsure at all Xaa locations
  Clone ID: PAT_MRT3847_15255C.1.pep
VVVLXGWVLVFLSGSVCVFVFGLCLRLCGPSAFGWRCCCFGACFFGFGVXRFCPLLCAVLCCGRVVRGSLWLFLWLPPALPLLVACSFFSPLQSPCLLRLWAGLKGRVGRPGFSGRVPAG

SEQ ID NO: 191845 - protein, 72 aa, Glycine max
  Clone ID: PAT_MRT3847_15256C.1.pep
KKRKMEVLNSPYLFHLIKGGLAPYLLGQKATCSPTPFNFPPPKISPFLFFVTGPSPLQGRALITICPKPPKI

SEQ ID NO: 191846 - protein, 142 aa, Glycine max
  unsure (1)..(142): unsure at all Xaa locations
  Clone ID: PAT_MRT3847_15257C.1.pep
VAFGMGRRACPDGPLAMQSFCYTLGLVIPVFACNRVSERKAXLSENDWFPLSRLIPLEAMCKVRPLASIVGSYYQYFVWYFWVRDLVLIISVCESMLVTINDICRMSPSPFVVLGVGLPIQYLFCLVPGFAWVNLFAILKKR

SEQ ID NO: 191847 - protein, 74 aa, Glycine max
  unsure (1)..(74): unsure at all Xaa locations
  Clone ID: PAT_MRT3847_15258C.1.pep
FPXXXXXPXSXSSSXSXLXXXLXSRLLXXXHXCXTXLXXXXXXXXXXXXXLXSXFXXLXLXSXSXXCXXLSXXX

SEQ ID NO: 191848 - protein, 78 aa, Glycine max
  Clone ID: PAT_MRT3847_15259C.1.pep
VVCPFPSSGLPPMFFRIVFSPVIMPPFILRLAPSFLTLIPPSYSSSPYSCRWWACISRSAIPRSIPRVHFNTRVTLYF

SEQ ID NO: 191849 - protein, 106 aa, Glycine max
  unsure (1)..(106): unsure at all Xaa locations
  Clone ID: PAT_MRT3847_1525C.1.pep
MFLLHLVFGEMVYTLAVVGYGRNVAAAKYSDWVRIRKSLEKLRPPSVTELLLSNDGDQILEGCVTNFFVVCCKERNSNDEKALCDYGNKYSFEVQTVLISDXFKNN

SEQ ID NO: 191850 - protein, 149 aa, Glycine max
  unsure (1)..(149): unsure at all Xaa locations
  Clone ID: PAT_MRT3847_15260C.1.pep
LPIVYVLEKFRSNLLGTRVIIYTDHQLLKYLLKKAESKHRLIRWMLWLQKFNLEIHDRSGAQNIVVDHLSRIERVSEKSPIRDDFPNDHLYILYGIFDSFPTPXFANIVNYLVASVFPPLASKAQNDPLKSDAKHYIWDDPYLWKLCSD

SEQ ID NO: 191851 - protein, 51 aa, Glycine max
  Clone ID: PAT_MRT3847_15261C.1.pep
GPWLRGPIPRPLQDLLKGCQSYFGDLLHVWPCWEPTRGIKEGGFLWGRGGG

SEQ ID NO: 191852 - protein, 200 aa, Glycine max
  Clone ID: PAT_MRT3847_15262C.1.pep
MADQGLEGSQPVDLQKHPSGIVPTLQNIVSTVNLDCKLDLKTIALQARNAEYNPKRFAAVIMRIRDPKTTALIFASGKMVCTGAKSEQQSKLAARKYARIIQKLGFPAKFKDFKIQNIVGSCDVKFPIRLEGLAYSHGAFSSYEPELFPGLIYRMKQPKIVLLIFVSGKIVLTGAKVRDETYTAFENIYPVLTEFRKNQQ

SEQ ID NO: 191853 - protein, 201 aa, Glycine max
  unsure (1)..(201): unsure at all Xaa locations
  Clone ID: PAT_MRT3847_15263C.1.pep
MADQGLEGSQPVDLQKHPSGIVPTLQNIVSTVNLDCKLDLKTIALQARNAEYNPKXRFAAVIMRIRDPKTTALIFASGKMVCTGAKSEQQSKLAARKYARIIQKLGFPAKFKDFKIQNIVGSCDVKFPIRLEGLAYSHGAFSSYEPELFPGLIYRMKQPKIVLLIFVSGKIVLTGAKVRDETYTAFENIYPVLTEFRKNQQ

SEQ ID NO: 191854 - protein, 227 aa, Glycine max
  unsure (1)..(227): unsure at all Xaa locations
  Clone ID: PAT_MRT3847_15264C.1.pep
MGEKEVSVLDRDGCDNKSDTESMYPMYFGVSCAFFALQVLTEEPQVEVEKWSKIRDTMLQGSARLLGLVVWKLQKGMRNGGECKLKIAEGEIENLKKMRHEDAKANEKVVGIFAAQEQSWLSERRRLRQQIGALLSELRVFERKRMXAISELNQKLKDMESLVESRDKEIETEEQKRKELEEKLNNVEKDAEETRESARREAQEHSXSDLRKHXTAFIELCVKTKGS

SEQ ID NO: 191855 - protein, 238 aa, Glycine max
  Clone ID: PAT_MRT3847_15265C.1.pep
LEGTPTTCHHHHNNNNTSDVVGSYFSFQHLNYGTTTNMSLSANPNASLCFVPASTSSDLNNNSTITSSMLPSIFPTQHVKLQSNNNNPSISSDGVQNWETSNLNNSNSTNKNNGSMQLQSCTNFIDNTWGVGESMKVVNINKDADQMPLQAEQEDLKWSEYLNTPFILGNNTAQNHQIHTSQSIYSEVKPETVFITDESCATWHHYQNQTPAFQLSDIYSKDLQRFSVTFGQTLRVCT

SEQ ID NO: 191856 - protein, 253 aa, Glycine max
  Clone ID: PAT_MRT3847_15266C.1.pep
IRLEGMSWAKYLVSLCALKGMTTSLLVGSMGQARYTTQIARSHMIPPFFALVHPKTGTPVNATLLTTISSSVIALFSSLDVLSSVFSISTLFIFMLMAVALLVRRYYVRESTAKSDLVRVLVCLFVIIGSSVVGAALWHSGKLGWIGYTVAACVWFLGTLGMSFLPKQRAPKVVGGSLWFRGLPSLSVATNLFFMGSLSSEAYWRFLICTAVMFVYYFFVAVHATYDVDHQDNGLEGKNDEGVGDNNTNQGVI

SEQ ID NO: 191857 - protein, 49 aa, Glycine max
  Clone ID: PAT_MRT3847_15267C.1.pep
LRLSLVGFAVFSAPLGIVAAAVPPCLLGRYERFMFVSVEILIFVFPAPW

SEQ ID NO: 191858 - protein, 54 aa, Glycine max
  unsure (1)..(54): unsure at all Xaa locations
  Clone ID: PAT_MRT3847_15268C.1.pep
YTLQTPELQNQTSYXDTIHNILKFTTVELFYLCYLHLAPPAFLPIPTYLHLFNE

SEQ ID NO: 191859 - protein, 124 aa, Glycine max
  unsure (1)..(124): unsure at all Xaa locations
  Clone ID: PAT_MRT3847_15269C.1.pep
XXXXXRXXLPXQPXXXXXVPXXXXXTTSAXXXXAPXXXRPXXPDTXXXXXRPPXSXXIXXXPHRPXSNTXXXXPTXRAXXPXXPXTHTHTXHXXNDQXPXRXXXXXXGXXAXXXGAXXXXXXXX

SEQ ID NO: 191860 - protein, 61 aa, Glycine max
  Clone ID: PAT_MRT3847_1526C.1.pep
GSSSSHTIVFSTSNTNRASIAFHTRAGTHCFHSNGWPYYTANNINSITLLNHILDLIRSRD

SEQ ID NO: 191861 - protein, 45 aa, Glycine max
  unsure (1)..(45): unsure at all Xaa locations
  Clone ID: PAT_MRT3847_15270C.1.pep
SFRTIKPHEYGAVMXRSRRNSDYTGGLPGPSYRPMSFSMTPFGSR

SEQ ID NO: 191862 - protein, 735 aa, Glycine max
  unsure (1)..(735): unsure at all Xaa locations
  Clone ID: PAT_MRT3847_15271C.1.pep
DFIDFEQCWDYTKKGITDLKKILERAKETTYSSQGYMMLNTTLSNMCRQKPPNDFIKWTNDKYKDIFVEXILITGLPSRREKHDEFMLRELVQRRLNLKVMVRWLSRFFHYLDRYFISRRSLPGIGAVGLTCFRESAFMEVRVNAREAVIARIDDXREGEQIDGSLLKNVLEILVEIGMGEMGQYEHDFEEHMLEDTNVYYKSKAFQXIEIDSCESDMLKAEDCXEKGERXVSTYIHSNSGKQVGLKVRXLISTDLSIYFRAXILYKFGLSTLCFLSLLCGLDESFVLKYLLKQIMHISQIKTEXTADGXSFVLQAEEASSNQTTSGSGFQEQVLVRKFLELHDKYMAYVNDCFMNHTLFHKALKEAFEIFCNKTVGGSSSAELLSTFCDNILKKGGSEKLSDEAIEDTLEKVVKLLAYISDKDLFAEFYRKKLARRLLFDRSANDDHEKCILTKLKQQCGGQFTSKMEGMVVDLTLARDNQLKFEEYLRDNSHVNPGIDLTVTVLTTGFWPSYKSFDLNLPSEMIRCLEVFKGFYETRTKHRKLTWIYSLGTCHVTGKFDTKNIELIVPTYPAAALLLFNNADRLSYSEILTQLNLGHEDVVRLLHSLSCAKYKILIKEPNNKVISQNDIFEFNHKFTDKMRRIKIPLPPADERKKVIEDVDKDRRYAIDAAIVRIMKSRKILGHQQLVLECVEQLGRMFKPDIKAIKKRIEDLITRDYLERDKDNPNTFRYLA

SEQ ID NO: 191863 - protein, 88 aa, Glycine max
  Clone ID: PAT_MRT3847_15272C.1.pep
KAGSYSWGTTSIFRPTRISSRHSECPFSFPMARQARLALKQWLAGLSLFFASHIQDNLCASRIFKNIIFFRRKCIRFISHFSHRCLLF

SEQ ID NO: 191864 - protein, 283 aa, Glycine max
  Clone ID: PAT_MRT3847_15273C.1.pep
MIKISINLPLSVIPIKNCVLAVQKNYFIMRLIPATLILTKNIQKRWFIERLKSKGPTHASGGGQFTSKMEGMVVDLTLARDNQLKFEEYLRDNSHVNPGIDLTVTVLTTGFWPSYKSFDLNLPSEMIRCLEVFKGFYETRTKHRKLTWIYSLGTCHVTGKFETKNIELIVPTYPAAALLLFNNADRLSYSEIMTQLNLGHEDVARLLHSLSSAKYKILIKEPNNKVISQSDIFEFNYKFTDKMRRIKKPLPPPDELKNVIEDDDKDRRYAIDGSNERGSELHK

SEQ ID NO: 191865 - protein, 123 aa, Glycine max
  unsure (1)..(123): unsure at all Xaa locations
  Clone ID: PAT_MRT3847_15274C.1.pep
LXALYGLGSCPFIAFPNSFNVWGNINWGKHKINMSTIKPNISAWSQSLRIHHRPHMQTISIHLIQSCEKVLCLTKAGNNPNCLLLSVFITAGGMVMNKHSFNNAVSLSSSSCVNAHNFCWKSY

SEQ ID NO: 191866 - protein, 255 aa, Glycine max
  Clone ID: PAT_MRT3847_15275C.1.pep
MGTTLMRCSHANALFRALKPKPRNSSLPLSSMAINKGNSNKAYDALLLDAGGTLLQLAKPVEEIYATIGSKYGVTVDPAMIKQGFKRAFAAPWPEKLRYQGDGRPFWKLVVSEATGCGDEDYFEEVYEYYAKGDAWHLPDGAFETITFLKDAGVKMAVVSNFDNRLRKLLKDLNVLNLFDAVIISSEVGYEKPDPRIFQAALDEVNVEACKALHIGDDQKADKLGANAVGIDCWLWGIDVKTFSDIQIRILNSEA

SEQ ID NO: 191867 - protein, 70 aa, Glycine max
  Clone ID: PAT_MRT3847_15276C.1.pep
TYVTNQPTERVLLTPIIQGATLTINPPKFSFPGPNSYSNAYTDSRDLRANQQQKIRQRLFSQTYQFPLGQ

SEQ ID NO: 191868 - protein, 59 aa, Glycine max
  Clone ID: PAT_MRT3847_15277C.1.pep
ALIIQARCQPFCSVLMDRVITIRLLAFIRRCKRPPKMSSPTPLVFFWLGDTYYAPVKKG

SEQ ID NO: 191869 - protein, 121 aa, Glycine max
  unsure (1)..(121): unsure at all Xaa locations
  Clone ID: PAT_MRT3847_15278C.1.pep
ITLLYFMMEEVKLPVPKVDIGEAHXLINYFLLNKSMLDTVLYTRDRYLDTGVIIFPDKATIFLNVIDDCXPKNXNIRLQDNIWSFDYTPLKKTAMTTXFVDTDYMKAAVTDPSVVFTIDLY

SEQ ID NO: 191870 - protein, 52 aa, Glycine max
  Clone ID: PAT_MRT3847_15279C.1.pep
IPTAFDTFADANADDSGAGSKEYVHIRVQQRNGTKILTTVQGLTKEFSYNKI

SEQ ID NO: 191871 - protein, 151 aa, Glycine max
  Clone ID: PAT_MRT3847_1527C.1.pep
RLFKNRLPTKVNLRRRQVALSSYRCPLCDEEEETVDHILFSCTSTRSLWWEVLSWVSRVGPFPIDPKSHFIQFSHWNSNRHLDKRWEVLWIALSMTIWKHRNSVVFKNHIFSPEKVMDEALFHTWSWLKCMDKDFHIHFNQWSTNLKEELS

SEQ ID NO: 191872 - protein, 113 aa, Glycine max
  Clone ID: PAT_MRT3847_15280C.1.pep
TTQSLIHGGGVAFKKTKLHSLPCCTGLTKFTDIHKLSLNEPGGNHKGKFQPINSGKSQTTLLLINNKFGLLTHNTDSYSNYIFNTITTLNEQPLQIVSCRISEAPSASGDVPL

SEQ ID NO: 191873 - protein, 57 aa, Glycine max
  Clone ID: PAT_MRT3847_15281C.1.pep
LSILVSVIIFFTFLIARFFLTVLCHMGFGLFLFFAFFVLLGSFFPLFLLPYPWAFPL

SEQ ID NO: 191874 - protein, 127 aa, Glycine max
  unsure (1)..(127): unsure at all Xaa locations
  Clone ID: PAT_MRT3847_15282C.1.pep
MAARLAIERSTRWRLSSVLGFNRWIQSVPQSPPLAGSIDLGVRSPQSVLPEFSPPSFSYGSSMELMAVPKXKVSPHKRGIRNGPKALKPIPVIVLCKSCGRARLPHFFCCGGKPNQGNTGEQKGSTS

SEQ ID NO: 191875 - protein, 70 aa, Glycine max
  unsure (1)..(70): unsure at all Xaa locations
  Clone ID: PAT_MRT3847_15283C.1.pep
YVVWRQREGXXWRVECLGNEPRWTELQPSRIQRGLDHCLALEKQTRTPTTNHNDFKLQFIDLTSIFSARA

SEQ ID NO: 191876 - protein, 154 aa, Glycine max
  Clone ID: PAT_MRT3847_15284C.1.pep
EFGRGYDPNKINVKIKIVSGSPCGAVAAEAKKSQANWVVLDKQLKHEEKQCMEELQCNIVVMKHSQPKVLRLNLVGTQKKDFEELCPLPSEQIEMPGKQTKKKHDSLNSIKGPVVTPTSSPELGTPFTTIEAGTSSVSSSDQGTSPFFISEMNG

SEQ ID NO: 191877 - protein, 47 aa, Glycine max
  Clone ID: PAT_MRT3847_15285C.1.pep
TIQSFHFIVFIAIGYIHPRYFLNCIGVANSMVEYSAFKSDSIFYTFL

SEQ ID NO: 191878 - protein, 64 aa, Glycine max
  Clone ID: PAT_MRT3847_15286C.1.pep
IREIFASDEVWTNNTVPPVYTTSSNCRLLTRISQFVVKSHGFHIILFLPREAFPVALAEVMSCQ

SEQ ID NO: 191879 - protein, 63 aa, Glycine max
  Clone ID: PAT_MRT3847_15287C.1.pep
MKTLILVSVCILVYMRLEWCEIPIMSTRASFLWYLEQPFHEDFRAFTIPSILSTRFGFEIVEY

SEQ ID NO: 191880 - protein, 93 aa, Glycine max
  unsure (1)..(93): unsure at all Xaa locations
  Clone ID: PAT_MRT3847_15288C.1.pep
ELTVLAPSKVVPXLFSIYMSILRLGPVXXASLLISSANTQRVYPHIWQIHSQWSCRIFLYGHXXIFCTVLQYVARGLFVWLTAHSLWPIXYVT

SEQ ID NO: 191881 - protein, 219 aa, Glycine max
  unsure (1)..(219): unsure at all Xaa locations
  Clone ID: PAT_MRT3847_15289C.1.pep
XIAXXMGXXNTXGXXKQQAXXLMTXXDQAVYYRCXIDAFQDSLYAHSNRQXXRECNXXGTVDFIFGNSAVVLQNCNIMPRVPMQGQQNPITXXGKTDPNMNTGISIQNCNITPFGDLSSVKTYLGRPWKNYSTPVFMXSPMGIFIHPNGWLPWVGNSAPDTIFYAEFQNVGPGASTKNRXNWKGLRVITRKQASMFTVKAFLSGERWITAFGAPFKFSI

SEQ ID NO: 191882 - protein, 203 aa, Glycine max
  Clone ID: PAT_MRT3847_1528C.1.pep
MLKSGMGIEERKQVKKPAQASSRKGCMRGKGGPENASCTYKGVRQRTWGKWVAEIREPNRGARLWLGTFETSHEAALAYDAAARKLYGSDAKLNLPELSIKSQSQCPPPPSSQVGVGVPIYTSDSIVSLPLDTNPKPVENDGDFRPSWGTMNEGLPVFDDSIWAEAAMSLDFPQIAAETAIYSSGNNLADVGVWDSLQTPWCM

SEQ ID NO: 191883 - protein, 266 aa, Glycine max
  Clone ID: PAT_MRT3847_15290C.1.pep
IRLENKQILIDAVVHAVNEDYAEMANDFTRLGFLTPGTDVTPIIPALEAIWQNSAGKGLSDFNFRSVTGKFNQLVYNYPIRIPERFSLVIRSLLTQEGICFTMKPDFKFLEVAYPYVAKRLLTDPNPALRERLIQVLFKDGLFQWKRLENLIVLAKENVAKMSNNPALQVKNTQSQRDLKVERKLDLTDTIKDGARLFFVDEGIRRQLLLALTEDSKLHIEELVDVYRLVEDQIDIPSVAVEVARDFPTVVRDLLLSWSESVLSDG

SEQ ID NO: 191884 - protein, 85 aa, Glycine max
  unsure (1)..(85): unsure at all Xaa locations
  Clone ID: PAT_MRT3847_15291C.1.pep
XXPXXXXXXXXXSXXXMXXXSXXTXVXXLMXXTXXXXXXXVTXXXLQXXIXXRXXXXXTVXXSXFXXXHXXQXXXXXXXRSXFXP

SEQ ID NO: 191885 - protein, 218 aa, Glycine max
  unsure (1)..(218): unsure at all Xaa locations
  Clone ID: PAT_MRT3847_15292C.1.pep
GWAGLFRKFLVEPGEMWWPSNLVQVSLFSALHEKSKRPKGGTTRTQFFLLVLVSGLAYYVFPGYLFSMLTSFSWMCWLAPKSVLVQQLGSGLRGLGIAAFGIDWSTISAYLGSPLASPWFATANIAVGFFLVMYVMTPIAYWSNAYEAKTFPIFSSKLFMGNGSLYDISTIVNSEFHLDRXAYSIKRPXHLSTFFCMTYXXSIAALSATXCACLLFHG

SEQ ID NO: 191886 - protein, 161 aa, Glycine max
  Clone ID: PAT_MRT3847_15293C.1.pep
GIRSKPSLQTSLKHNSVNPLFSFPRNPLSHRSIGSSTHRDGARAGERSDGVLDGREARALPKLHGSLLRPHNAPKRRQLKLLHHALLSAPRPLSPRHIRIHLGFETKLSLPPHRKAPCTLRFNGSNNQKNKDQDEIISALQFVRGPGGPTSRKRRCSSSMQ

SEQ ID NO: 191887 - protein, 103 aa, Glycine max
  Clone ID: PAT_MRT3847_15294C.1.pep
LGPPGDCPSRVMGKIFVVPCLRLSRPRVWGPFLPPRRILIEDWVLCCRHVSPRQSKYNLRVRRPCPLKMSEENKYGGFRDPLTRLPLKRKNKNLAQKKRAGAA

SEQ ID NO: 191888 - protein, 59 aa, Glycine max
  Clone ID: PAT_MRT3847_15295C.1.pep
QFIPRYIFCHYPIIRRLGCMTAKSMVLFPFLPDCLYCGLPLYSGRGSRKIPYGLFGARE

SEQ ID NO: 191889 - protein, 94 aa, Glycine max
  Clone ID: PAT_MRT3847_15296C.1.pep
TGINFMLYILWANIFNFSYNFLESTPCDLCCLTVQPYIHASDMEQFLVALFLYFYFYKIISAIICIPLFSLYKHYLLFSHLLNLVIPHGTIFMF

SEQ ID NO: 191890 - protein, 84 aa, Glycine max
  Clone ID: PAT_MRT3847_15297C.1.pep
VNSAVRRTLCIFESPLRQSPNFFSRVFFMDKLWAAMWGRHGTYRLEDTGRRGGGDLRGVGVASPSQVCYAAEYGAIILSRPCKH

SEQ ID NO: 191891 - protein, 232 aa, Glycine max
  Clone ID: PAT_MRT3847_15298C.1.pep
INLASVMFFIQNFFNRYPFFVAGCTFIWLVVIPLAEEYLKKCKFVSAIDAFKKLRDDLNAQLLENVRFLKSPNLKMFEKEVAQVEFAEDRNEDEFVNKVLGRFKDAPNTVICVLDSFDSNSLKVAELLFKNGFKEAYAIRGGVRGQQGWMAIQDSLLPPSVHIRKRVKASKKLDTNGNGAIQQNDSNNKSSLSQDISSVENQTTDFGHVKSSVESIPEVKTGSVASSSPYPN

SEQ ID NO: 191892 - protein, 116 aa, Glycine max
  Clone ID: PAT_MRT3847_15299C.1.pep
DNHFFFFFFFFFFSVPSIIFSRPCPSIIFSRPCPSIIFSRPCPSIIFSRPCPSIIFSRPCPSIIFSRPCPSIIFSRPCPSIIFSRPCPSIIFSRPCPSIIFSRPCKTIIYPNPTSP

SEQ ID NO: 191893 - protein, 85 aa, Glycine max
  Clone ID: PAT_MRT3847_1529C.1.pep
ILNKALVKAFFFTILPGYHPIIRPLELLLVPSSHAVSPLVKLFDGIVLILSTRTKYCQQITLKYFSCCSILNTILYGPLSASPSM

SEQ ID NO: 191894 - protein, 272 aa, Glycine max
  unsure (1)..(272): unsure at all Xaa locations
  Clone ID: PAT_MRT3847_152C.1.pep
PRVRFAVNGVSKQDWYSVEQLAETYSSVIPCFGLLXERSPNWFETLREYFDSTPSAAVGEIGVDKGSHGKKIDFSEQKKATXIAVCQCIRTFVQIEVLRQQLELAKELNKPASVHCVCAFGDLLELMKXNIRSMGPFPAGVILHSYLGSAEMVPEFSKLGPFXLLEIDAPDALPMSNIDSLHFVEGDTSLTEEXLPKQQLHQLSGSSLGNASHVLADASMLPKETLNHPANIHNVLDYVASVLEITKEELADLSYQNAVRLLSYKGSKVLQK

SEQ ID NO: 191895 - protein, 54 aa, Glycine max
  Clone ID: PAT_MRT3847_15300C.1.pep
SNLSGEGDSTFFFEARLLEGGKNLNSKNMQRLTLQRFFTFYFHSHLWSWIQKGI

SEQ ID NO: 191896 - protein, 237 aa, Glycine max
  unsure (1)..(237): unsure at all Xaa locations
  Clone ID: PAT_MRT3847_15301C.1.pep
MDYCLRELEGKQAHDSLFLEKMKNSLSQRTTTSERCVWVPGPVIVGAGPSGLATAAYLKEKGVPSLILERSNCIASLWQLKTYDRLHLHLPKNFCELPLMGFPCDFPTYPTKQQFIEYLESYAERFHIRPRFNETVQHAEFDATLGFWRVKSLNKREVATEFVCRWLIVATGENAEAVVPGIEGMXEFGGTIKHTSLYKSGEEFRGKRVLVVGCGESXWEVCLDLCTICYSLGSEIL

SEQ ID NO: 191897 - protein, 426 aa, Glycine max
  Clone ID: PAT_MRT3847_15302C.1.pep
MGKGRSPGKWFKNLLLGKKSSSKSTSSKKNDIFKPSIDKDLLVSSEVPVPDPTMDSLQISTPISGANDYKGVFSEKEVVSRSSHDRDVLSTRVKEAKVQDVANFGSQENLEKLQLTEATIKVQAACRSYLARRTLQKLKGVIQLQAFIRGPLASGHPVSALYCVKGIVKFQALARGYNVRCSDIGLAVQKIRKDTHCSNSVRVVSSTQAEKLSENVFVCKLLASSPYAVPLSLNSDPGEPNMGQKWLDYWTRSHFWASLPEFKKKLESVSDEKNGTSQTVQKGQVKKITRKSPTVKADNVSNLGSNKSKQHLKKDSSHPLPSAQENPPKETEKSSFGKTHAHNASNGSEVVNEKRKSGNKKILDHAVIDVSEQGPNASSAKEKDSTVPKSKESDPEKGDGQEAKDKNDNELHRYPVAVLKTNCDEG

SEQ ID NO: 191898 - protein, 164 aa, Glycine max
  Clone ID: PAT_MRT3847_15303C.1.pep
MGSKMAILILGLLAMLLLISSEVAARNLKEGEAVQETNEVADAKLVAAGEAVQETNEVADTKLVGAGEAVQETNEVADTKLVAAGEAVQETNEVADTKLVGAGGVVKQRNKVGYGKLVGVGDYDYGNWNGGQRSPYGTGAICMRGCCFPSSLGGCLSCCPHEWQ

SEQ ID NO: 191899 - protein, 51 aa, Glycine max
  unsure (1)..(51): unsure at all Xaa locations
  Clone ID: PAT_MRT3847_15304C.1.pep
MHWKASEKLIRHXKVVRTDHVMTNRIKDKGXTGTIKRVICSHNRVIGVGKN

SEQ ID NO: 191900 - protein, 85 aa, Glycine max
  Clone ID: PAT_MRT3847_15305C.1.pep
NERKVETLGHGNMNIAQSPLERPNIINGRTQKERHQKLAIYMNKRNHRNFGRKIKNDCTKALADSHSGIRGKYARTEESACHTRN

SEQ ID NO: 191901 - protein, 90 aa, Glycine max
  Clone ID: PAT_MRT3847_15306C.1.pep
KVYSLIGGFCGSPVNFHAKDGSGYKFLGEVVLQLDKINPQVASRMVSAFSRWRRYDESRQALAKAQLEMIVSANGLSENVYEIASKSLAA

SEQ ID NO: 191902 - protein, 126 aa, Glycine max
  unsure (1)..(126): unsure at all Xaa locations
  Clone ID: PAT_MRT3847_15307C.1.pep
WCVIQEHGTGQLIGEGRESRGLYYLESNFPMSYFATSKPKLLHDRVGLPSLPKLKMMVSSLKNLRLLECESCQLGKHVRSSFSQIVQRCNSAFSTIHSDIWGPSRVTSFGFXYFVTFIDEFSHIVQ

SEQ ID NO: 191903 - protein, 41 aa, Glycine max
  unsure (1)..(41): unsure at all Xaa locations
  Clone ID: PAT_MRT3847_15308C.1.pep
HSCICSREVNSEPQQHRVSINLLCIYDKDICLYYXYAQFVV

SEQ ID NO: 191904 - protein, 310 aa, Glycine max
  Clone ID: PAT_MRT3847_15309C.1.pep
NFEADQMRRCLDGSSGSTYSAMDSSTTQVRHSQFKDVANGQKSSVATLFEQVGLQKILSLLESDDANVRIHAVKVVANLAAEEANQKRIVEAGGLTSLLMLLRRYEDETVRRVAAGAIANLAMNEANQELIMAEGGITLLSMTASDAEDPQTLRMVAGEKTTEGGNDRILMTLRSQGGIKALLGIVRCGHPDVLSQVARGIANFAKCESRASNQGIKSGRSFLIEDGALPWIVQNANNEAAPIRRHIELALCHLAQHEVNAKDLISGGALWELVRISRDCSREDIRNLARRTLSSVSTFKLELRRLRIDF

SEQ ID NO: 191905 - protein, 71 aa, Glycine max
  Clone ID: PAT_MRT3847_1530C.1.pep
ENCASFGTSSKSGTSMATEEAHKLQSLPPYPQVIHINSQNPFFIVRGLSKIIKPWRNFPSKVGRFHTGVID

SEQ ID NO: 191906 - protein, 70 aa, Glycine max
  unsure (1)..(70): unsure at all Xaa locations
  Clone ID: PAT_MRT3847_15310C.1.pep
RILPPYNSIFLRSTLWRSSAXSVHDXNVXDXKXXXXNLGXYXGKVLIXVNXASXCGLTNSNYTXXSQLYE

SEQ ID NO: 191907 - protein, 91 aa, Glycine max
  Clone ID: PAT_MRT3847_15311C.1.pep
NLNRDWGLFFPQGVLFPPGLVFPQRGGGGENFPPPPKGIKGFFLFKVEPQGEFGNLFFFLREPPPGCLCGFFFFWCLWKGGGSWFWCRHSC

SEQ ID NO: 191908 - protein, 55 aa, Glycine max
  Clone ID: PAT_MRT3847_15312C.1.pep
PLKEPSRYYYGQPARRNEISARKANFPPFGLVISRFFFGHRSRTPWLKPIKGKTG

SEQ ID NO: 191909 - protein, 203 aa, Glycine max
  Clone ID: PAT_MRT3847_15313C.1.pep
MNVLDSNVEALAFNYLSFGLLTALNNLWTWLALLTAAFSFWKIRSTGCLKPEPKPEAQVQAQPYIRPDRVADLLTVEKTEPTQQDAVLVPFSPSLLQGENGARKGKLTVYYEKDMDMQCTCGEREGLLTAWEEKEGTETEWWKRWERLLRLRNGENENGWYTWQDLTELNGNVVRFWDCGLSGSFVRESWYNSNSNSSCIHVW

SEQ ID NO: 191910 - protein, 145 aa, Glycine max
  Clone ID: PAT_MRT3847_15314C.1.pep
DESLQPTLDEASIGNEIVVESSQDERQQEEEFTEKFNEKLKTPQNDTEETAETNTNDTEKQGIEDDGKFDQEKAKGIEEATKEQLPEEEVKTALPTAAFVQGDTDQIPQQQTLPDDDSEVIGIAKNIDTPEIEIGGRSTVVEVRH

SEQ ID NO: 191911 - protein, 69 aa, Glycine max
  Clone ID: PAT_MRT3847_15315C.1.pep
NPSISSKSFCLVFARQLPKFPPFGSKSICYKIVTNNITWLTPICKNPILNQCFFSAIRGMITKIIYLFI

SEQ ID NO: 191912 - protein, 289 aa, Glycine max
  Clone ID: PAT_MRT3847_15316C.1.pep
FGSRSEFHVKQDFVTSKDGTKIPMFIVAKKDITLDGSHPCLLYGYGGFNINITPYFSVSRIVLTRHLGVVFSIANIRGGGEYGEEWHKAGSLARKQNCFDDFISAAEYLVSTGYTQPKKLCIEGGSNGGLLVGACINQRPDLFGCALAHVGVMDMLRFHKFTIGHAWTSDYGCSNKEEEFHWLIKYSPLHNVRRPWEQHHDQSFQYPSTMQLNADHDDRVVPLHTLKLLATMQYVLCTSLEKSPQTNAIIGRIDCKSGHGAGRPTQKMIDEAADRYGFMAKVLEVHWIE

SEQ ID NO: 191913 - protein, 84 aa, Glycine max
  Clone ID: PAT_MRT3847_15317C.1.pep
PTRHPTAPGGDYIGTRRVQSMASRVVVVCIRHANLVRPLSESGKPRMARDADDTGLAAGQNLFPVEPLGAPYRALRASDAMMPL

SEQ ID NO: 191914 - protein, 87 aa, Glycine max
  Clone ID: PAT_MRT3847_15318C.1.pep
FLGEDLVDSHKFAVLLWTLPYVGGGVHGRNFFIPAGGAPFPLSKVYEVNKTQIDVNLGNGRTKLGGNSSKIKAAIPMGQKAEKKKDP

SEQ ID NO: 191915 - protein, 276 aa, Glycine max
  Clone ID: PAT_MRT3847_15319C.1.pep
MGAGDYYKILKVKHDATDEEVKKAYKKLAMKWHPDKNLEDPLRKEEFEAKFKQVSEAYDVLSDPKKRQIYDLYGHYPLNSQRFTKEYGYGNMKDAGVVESSLLCTLEELYNGCKKKLKVSRIVPDEFGELRSVEEILKIDIKPGWKKGTKITFPGKGNQEPGFAPSDLIFELDEKPHAIFKRDGNDLVVMHKILLVDALTGKTLNLTTLDGRDLTIKVADIVKPGYELVVPNEGMPISKEPGKKGNLRIMFDVMFPSRLTTQQKYDLKRILSDVDY

SEQ ID NO: 191916 - protein, 146 aa, Glycine max
  Clone ID: PAT_MRT3847_1531C.1.pep
MGVDYYKILQVDRSAKDDDLKKAYRKLAMKWHPDKNPNNKKEAEAKFKQISEAYEVLSDPQKRAIYDQYGEEGLKGQVPPPDAGGAGTGTTFFSTGDIPGSFRFNPRNADDIFAEFFGFSSPFGGMGGRGGGSGGGMRSSSLWDVW

SEQ ID NO: 191917 - protein, 248 aa, Glycine max
  unsure (1)..(248): unsure at all Xaa locations
  Clone ID: PAT_MRT3847_15320C.1.pep
MKDIGRTLGKKNWDFSVDPCSGQSNWTSFVQVKGFENAVTCICLANASICHVVSMILKVKHDATDEELKKAYKKLAMKWHPDKNLEDPLRKEEFEAKFKQVSEVYDVLSDPKKRQIYDLYGHYPLNSQRFTKEYGGGNMKDAGVVESSLLCTLEELYNGCKKKLKVSRIVAPDEFGELKSVEEILKIDIKPGWKKGTKITFPXKGNQEPGFAPADLIFVLDESPHAIXQRXGNDLCGDPEDITCRCSH

SEQ ID NO: 191918 - protein, 54 aa, Glycine max
  Clone ID: PAT_MRT3847_15321C.1.pep
ERMNMVRLTSSSTIAQMKVDVYINSIPMDTLGLPAILIDCLYDYQLGIVDVLRR

SEQ ID NO: 191919 - protein, 75 aa, Glycine max
  Clone ID: PAT_MRT3847_15322C.1.pep
HASGLEGELIYFFILTFPTRQKVQIVDPVEVARAKSNKEVKKFQLKSIKEQLYRGFSCSICKEGMVLPVTTPLCP

SEQ ID NO: 191920 - protein, 62 aa, Glycine max
  unsure (1)..(62): unsure at all Xaa locations
  Clone ID: PAT_MRT3847_15323C.1.pep
RTGGLGGGIGGGIYKGIGIGGGIYKGIGIGXGIDKGIGSGVSAIGGVGGVIGGFKHVEAQKP

SEQ ID NO: 191921 - protein, 161 aa, Glycine max
  Clone ID: PAT_MRT3847_15324C.1.pep
SINSENGKQNNGRLGKMNNGFGTAAHGKKEAEKTTIENELKEKKNGGSVTVEEVEQRVRVSSKNEEEEKKNGGSVTVEEMEKRVGVSSSNNSGNGKQNGRLGKMSNSFRHSESQRKYYGGEASYGYGYGNRGNGHYSKVGVQKTTEKKMVWVKKDEIVGGN

SEQ ID NO: 191922 - protein, 87 aa, Glycine max
  Clone ID: PAT_MRT3847_15325C.1.pep
RRRRGAGVADGRLLQTNLLGIRCDGRCACYDGLRMRWELGGGGGGKGRGEKRNDNDSPFSITALHGMDMESCIRSLRYPTLHSFRQR

SEQ ID NO: 191923 - protein, 170 aa, Glycine max
  Clone ID: PAT_MRT3847_15326C.1.pep
MDLDHLKGPFDDDPSWKERCNKRMEELKNTQFSSQDAASQQELLHKELVGEKIVLIPELYKAVEEGNVNKFLDVLEQECKQRKLNLSVIFEQVTETGDSLLHVAADKGKEKIVELICCHFPELLIRRNVRGGTPLHVAVRSKNSTMVNLILSQYASMKSTHDVMNDTEIS

SEQ ID NO: 191924 - protein, 75 aa, Glycine max
  Clone ID: PAT_MRT3847_15327C.1.pep
TCNRLTHSPRKPLFPSSCQALIYMEIWKAGRPPGTVPGLPVGPVCNCKIKRFKFFSLCWFVSQLRKCPRIMGTFG

SEQ ID NO: 191925 - protein, 44 aa, Glycine max
  Clone ID: PAT_MRT3847_15328C.1.pep
FHNRSMSRGRICLVIIGSMLYNSPTGSRYLEGSFGGNQILDALD

SEQ ID NO: 191926 - protein, 172 aa, Glycine max
  unsure (1)..(172): unsure at all Xaa locations
  Clone ID: PAT_MRT3847_15329C.1.pep
MAGTVSEESGVGKSVESISTGQRCQSGEALAEWRSSEQVENGIASTSPPYWDTDDEDDGPKPSALYGRYTWKIEKFSQITKRELRSSAFEVGGYKWYILIYPQGCDVCNHLSLFLCVANHDKLLPGWSHFAQFTIAVVNKDPKKSKYSDTLHRFWKKEHDWXWKKLWNCLGV

SEQ ID NO: 191927 - protein, 45 aa, Glycine max
  Clone ID: PAT_MRT3847_1532C.1.pep
KHELIKEEEVKNRRKGERVYFLYFILKKTYNDMLSNGIMSIDLMF

SEQ ID NO: 191928 - protein, 39 aa, Glycine max
  Clone ID: PAT_MRT3847_15330C.1.pep
SILYRKPTHSQLHTASLSLSLGNLYINSPKINTPSTFNT

SEQ ID NO: 191929 - protein, 241 aa, Glycine max
  unsure (1)..(241): unsure at all Xaa locations
  Clone ID: PAT_MRT3847_15331C.1.pep
ETPLPWSTRLKIARDAPSGLTYLHXEMDFQIIFRDFKSSNILLHEQWNAKLSDFGLARLGPSYXLTHVLTAVVGTMRYAAPEYVQTGRLTSKNDVWSYGVFLYELITGRRPLDRNRPRREQKLLEWIRPYLSDGKKFQLILDPRLDKKQVFKSAQRLAMIANRCLVKNPKNRPKMSEVLEMVNGMVESISSSSPQLPLRSVATLEASQDTETNNKKRTMDHKPGESNWFVRMWRPKLVRTC

SEQ ID NO: 191930 - protein, 130 aa, Glycine max
  unsure (1)..(130): unsure at all Xaa locations
  Clone ID: PAT_MRT3847_15332C.1.pep
HLDFSFASAWHPDGRIFATGNQDKXTCRVWDVRNLSKSVAVLKGNLGAIRSIRFTSDGQFMAMAEPADFVHVYDTKHGFEKEQEIDFFGEISGVSFSPDTESLFIGVWDRTYGSLLQFNRRRNYMYLDCL

SEQ ID NO: 191931 - protein, 63 aa, Glycine max
  Clone ID: PAT_MRT3847_15333C.1.pep
DVETKACKNMLIIVALSRQACYLGAKLLHDKGRATACFSMSATSSSLLRMCTNLPLHATYQLP

SEQ ID NO: 191932 - protein, 136 aa, Glycine max
  Clone ID: PAT_MRT3847_15334C.1.pep
TVKPLCGHLDYSFASAWHPDGRIFATGNQDKTCRVWDVRNLSKSVAVLKGNLGAIRSIRFTSDGQFMAMAEPADFVHVYDAKHGFEKEQEIDFFGEISGVSFSPDTESLFIGVWDRTYGSLLQLNRRRNYMYLDCL

SEQ ID NO: 191933 - protein, 354 aa, Glycine max
  Clone ID: PAT_MRT3847_15335C.1.pep
MASMNNQKEIELFEGQSLLYMQLYGHLRPMCLKWAVQLGIPDIIQNHAKPISLSDLVSTLQIPPANAAFVQRFMRFLAHNGIFEIHESQEDHELTYALTPASKLLVNSSDHCLSPMVLAFTDPLRNVKYHHLGEWIRGEDPSVFETAHGTSAWGLLEKNPEYFSLFNEAMASDSRIVDLALKNCTSVFEGLDSMVDVGGGTGTTARIICDAFPKLKCVVLDLPHVVENLTGTNNLSFVGGDMFNSIPQADAVLLKWVLHNWTDENCIKILQKCRDSISSKGNSGKVIIIDAVINEKLDDPDMTQTKLSLDIIMLTMNGRERTEKEWKQLFIEAGFKHYKIFPIFGFRSLIEVYP

SEQ ID NO: 191934 - protein, 65 aa, Glycine max
  unsure (1)..(65): unsure at all Xaa locations
  Clone ID: PAT_MRT3847_15336C.1.pep
ITLXGXISNTIHNVKANIQDKEGIPPDHQMLIFAGKQLEDGRTXGCYNIXNESTLNLVLRVRGGG

SEQ ID NO: 191935 - protein, 104 aa, Glycine max
  unsure (1)..(104): unsure at all Xaa locations
  Clone ID: PAT_MRT3847_15337C.1.pep
GVNYVVSIQVWDQHSKLQNTLLDGSPAPPIKITYSGFSKXXALHSQPKSTVGTTAFIDAXELFSQEYYCKLSDVLSCGVTSYLMLVGAYPFEDPNEXNDLRKTI

SEQ ID NO: 191936 - protein, 69 aa, Glycine max
  Clone ID: PAT_MRT3847_15338C.1.pep
RRQKGTVINEKLDDPDMTQTKLSLDIIMLTMNGRERTEKDWKQLFTEAGFNHYKIFPIFGFRSLIEVYP

SEQ ID NO: 191937 - protein, 56 aa, Glycine max
  Clone ID: PAT_MRT3847_15339C.1.pep
LLSIMQISILISFIMNEIYILRLIHITASLPYIHLFQTIELQIIKIICIIFFRMWA

SEQ ID NO: 191938 - protein, 56 aa, Glycine max
  unsure (1)..(56): unsure at all Xaa locations
  Clone ID: PAT_MRT3847_1533C.1.pep
MALSILIMSRRVTPFWWNTRTMGGEGVHIKRPLENWLWGSPMEGDHXLGGNFLGFF

SEQ ID NO: 191939 - protein, 78 aa, Glycine max
  unsure (1)..(78): unsure at all Xaa locations
  Clone ID: PAT_MRT3847_15340C.1.pep
MFCSHNNWGGGRSCMFCIGWRRCNMYPYLSYTGSSTTETLGMGVSPVKGQLWGARMXCPVENDRCXCGPNWYCSQCAS

SEQ ID NO: 191940 - protein, 54 aa, Glycine max
  Clone ID: PAT_MRT3847_15341C.1.pep
EKLRKKKTKILYYNTTRDVIQFGSAFVLATKCHGFKFCQFLHLWHFCNSFIKLN

SEQ ID NO: 191941 - protein, 60 aa, Glycine max
  Clone ID: PAT_MRT3847_15342C.1.pep
GTSSFANSYLVRSLVSCSSSPTFEMRWIFASLISAPTNHLWSQSKLYRVCVDVDTWALGT

SEQ ID NO: 191942 - protein, 61 aa, Glycine max
  Clone ID: PAT_MRT3847_15343C.1.pep
QRRFKKNRKKRGHVSAGHVRIGKHRKHPGGRGNAGGMHHHRILFEKYHPGYFGKDGMRYFH

SEQ ID NO: 191943 - protein, 79 aa, Glycine max
  Clone ID: PAT_MRT3847_15344C.1.pep
MSGIIHKIGDTLHVGRYMNEDEHNGEHHAGDYKREHHGEHSSEYIGEHHGEHKARKYHAEHNSDHSDGFLHLVNDDIHG

SEQ ID NO: 191944 - protein, 51 aa, Glycine max
  Clone ID: PAT_MRT3847_15345C.1.pep
KYNIRKNHYSRLDKQISVKRKIQKFHTDLFPLLTICLIFYQFIKFYYNYIM

SEQ ID NO: 191945 - protein, 85 aa, Glycine max
  unsure (1)..(85): unsure at all Xaa locations
  Clone ID: PAT_MRT3847_15346C.1.pep
KKLXXAERPLRSXXWYGNNXRCVKXLVCAQYMXNIMHAILVFLSSASPCCCYRSIGINENTTGXXVCVGPGVSMNGLLDLYVLWC

SEQ ID NO: 191946 - protein, 46 aa, Glycine max
  Clone ID: PAT_MRT3847_15348C.1.pep
TTLRRVCLGYFGIHEFISLSLYFRIALDFSSFLYDRPDPINCIHFI

SEQ ID NO: 191947 - protein, 397 aa, Glycine max
  unsure (1)..(397): unsure at all Xaa locations
  Clone ID: PAT_MRT3847_15349C.1.pep
FGSRLATMVFQCYIEGPDEYLSRSSSTNRVAPKLDVSQYTSCSNDVVKILLQCTSPLLWSNNSAVVLAAAGVHWIMASKEHITRIVKPLLFVLRSSSASRYVVLCNIQVFAKAIPSLFAPHYQDFFICSSDSYQIKALKLDILSSIATDSSISFIYKEFQDYIRVPSGTLAADSLLALXAALGLCAQRLPKMATSCVEGLLTLVFAEFFCGEIRSLDGEEGVLTQAIISIKSIIKLEPSSYEKVIIQLVCSLDKIKVPAARAMIIWILGEYCSLGDIIPRMLSTVLKYLARCFTSEALEAKLQFLNTTAKVLLCIKGEDILTVRKVWSYVIELAERDLNYDIRDRSRFLKKLLSSNLESQHGEEENSESQKRDQSYILAECIFGGQTKAMTVPSEPI

SEQ ID NO: 191948 - protein, 93 aa, Glycine max
  Clone ID: PAT_MRT3847_1534C.1.pep
KKGAGQKGGSSGGNFSFVSPWLNLWGEESLPSSLFGIGGRFGAGFFCLRTGAPGFGGGCYVGFKEIWVWFFWFFFVWVSFFVFRLVGGYALKI

SEQ ID NO: 191949 - protein, 86 aa, Glycine max
  Clone ID: PAT_MRT3847_15350C.1.pep
LILVSSFSTLHSYEYPNLQLINNNSWCSSIMSMQREKMAKKSIGSLMRKKLSDITNNTNPNYSQQLDTTLSSDNNSIQQLLSERRH

SEQ ID NO: 191950 - protein, 84 aa, Glycine max
  Clone ID: PAT_MRT3847_15351C.1.pep
SKKRFGRPPKKAAKPNAGFSKGGKKNNVNFGKDKRPKKRSKKRFPKLQSKPLLFPPGKLNIIIIIIIIIIIMGKAGVFFFVLNG

SEQ ID NO: 191951 - protein, 61 aa, Glycine max
  Clone ID: PAT_MRT3847_15352C.1.pep
LGVIPRPISPFPHFLWPFFRLKVSPLKKKKKKKKKKVKKKKKKKKKKKKKKKKKKKKKKKK

SEQ ID NO: 191952 - protein, 67 aa, Glycine max
  Clone ID: PAT_MRT3847_15353C.1.pep
LAQLKLSTKIPWYPWYVKNQVGGWTKVYEGVTFAPVRGAGHEVPLFKPRAALQLFKSFLEGKPLPKS

SEQ ID NO: 191953 - protein, 419 aa, Glycine max
  unsure (1)..(419): unsure at all Xaa locations
  Clone ID: PAT_MRT3847_15354C.1.pep
MAKPKMPGFRFQPTDVELIEYFLKRKVRGKKFPSEMIAELDLYXFAPLDLPDMSLLKNGDLNXDFVCPRGKKYSTGGXIGVMHEFRLDDKVLADEGXCRVYQKEGPGPRNGAQYGKPYEEKEWETDEEIDSVQSAPVAAVCAPVPIQPSESHISVANYIHPSTSGCAGLTSVSCVSELMPSCSTHPSAPSNPVGTVSCVSELIPSCSEPHHLPSNNQVGSVSCVSEFMPSCSAHPLAPNNQVDSVPCVSEFMPSCSAHPSAPNSQVGSVSGLIPSFLAHSSASNNQVGSVPCVPELVPSCLAHPSAPNNQADVGILPFLDCSIEDDDTLAVNENNSIENVDDPDQANNAERGPCSDPNAIFEELGDLNSLVGLGEGSFSCGQKNEYTTSEMLYTVDIFGSCDHDFLELIDLETPHALAE

SEQ ID NO: 191954 - protein, 41 aa, Glycine max
  Clone ID: PAT_MRT3847_15355C.1.pep
TEKVFPQVFNLRKLALIKPFKQGKTRRGSKQHEHFYLPQST

SEQ ID NO: 191955 - protein, 123 aa, Glycine max
  Clone ID: PAT_MRT3847_15356C.1.pep
MAKPKMPGYRFQPTDVELIEYFLKRKVRGKKFPSEIIAEVDLYKFAPWDLPAMSLLKNGDLSWYFFCPRGKKYSTGGRLNRATEAGYWKTTGKDRAIEHNNRVVGMIKTLVFHTGRAPKGDRT

SEQ ID NO: 191956 - protein, 128 aa, Glycine max
  Clone ID: PAT_MRT3847_15357C.1.pep
QHILQLPNNQVDNDILSLLDCFFEDDDTLAVKENNRIENIDDPDQANNADGALCSDPNAIFEELGDLNSLVGLGEGSFSCGQKNEYTTSEMLYTVDIFGSCDHDFLELLDLETPQLWLNKHGSGSQDK

SEQ ID NO: 191957 - protein, 205 aa, Glycine max
  Clone ID: PAT_MRT3847_15358C.1.pep
SRDPRFENRDPKTKKELYGEARRDPPNAKSEKDMRVEGREDDNKDVRHDRDSHNDPKGDTKTEKDGYNVVSSHLNWKDSKEYHRGKRYSDAPGGNWDTWHMSRGNTQGSVEVGKESSAAGERDHVEAHEAVSENKVDPKGDDRSKEKDRKRKDVKHREWGDREKERSDRRNSPQVSNSTGDCKESTKEDRDVERLEREKKDLTGE

SEQ ID NO: 191958 - protein, 161 aa, Glycine max
  Clone ID: PAT_MRT3847_15359C.1.pep
QSLLHPLRIYLRSQSITLPLTCCAAVSILLHVPVNYLFVSILNLGIKGVALSAVITNLNLVVLLIIYIVFSGTHKKTWPGISRECFNGWKKLLNLAIPSCVSVCLEWWWYEIMILLCGLLVNPHASVASMGVLIQTTALIYIFPSSLSFGVSTRVGNELGA

SEQ ID NO: 191959 - protein, 33 aa, Glycine max
  Clone ID: PAT_MRT3847_1535C.1.pep
KGIEIEKGWERQRITACFEPQFNRFYTTLCVVF

SEQ ID NO: 191960 - protein, 41 aa, Glycine max
  Clone ID: PAT_MRT3847_15360C.1.pep
FDLLDGENVTRAVETYSCASSILNVIAMIDLDKSLPYDEYT

SEQ ID NO: 191961 - protein, 34 aa, Glycine max
  Clone ID: PAT_MRT3847_15361C.1.pep
NSRGRSFNSLTLIQYQLSYYSKPLSLYSYQCLPK

SEQ ID NO: 191962 - protein, 123 aa, Glycine max
  unsure (1)..(123): unsure at all Xaa locations
  Clone ID: PAT_MRT3847_15362C.1.pep
LFAFVWVLLLLVLCCRWSGPFLVGVCLASGGFFPAPSVGWLSFPAVRGFSVGVLCLFFLVPLFCLGVFFSCGAFRLLWCFLVVXWLGLFPFVWLVGCAPPVFLGPPFVSRAGGFIWGVRPLWW

SEQ ID NO: 191963 - protein, 99 aa, Glycine max
  Clone ID: PAT_MRT3847_15363C.1.pep
LTTCTIYQCTSGIKTPQTVTETLDSNSLVPSPIAVHSKPTSSNNSRNLVSLLSQSFLIFFVRLLLSIFSSPSGRFMRTLACILRHIRILSMCVYLIIDF

SEQ ID NO: 191964 - protein, 75 aa, Glycine max
  unsure (1)..(75): unsure at all Xaa locations
  Clone ID: PAT_MRT3847_15364C.1.pep
TRFTVEKHNKKQNALLXFEKVVHAKQQETYGTLYTITLXANYGRQKKVYESKVCEKACLNLKDVLEFKLVGKAPK

SEQ ID NO: 191965 - protein, 73 aa, Glycine max
  Clone ID: PAT_MRT3847_15365C.1.pep
MGPPKLNSWAAVLQLVDWKNPGVPKLNPFEKNPLFPSWLNTKKARPNRPSKQLPTLNGNWNPPCTGPLSPGVV

SEQ ID NO: 191966 - protein, 108 aa, Glycine max
  Clone ID: PAT_MRT3847_15366C.1.pep
ERTSHSPPPPKHSPPPPYYYKSPPPPPKEPYKYPSPPPPVYKYKSPPPPYKYPSPPPPPYKYPSPPPPVYKYKSPPPPVYKYKSPPPPVHSPPPPVYIYASPPPPYHY

SEQ ID NO: 191967 - protein, 96 aa, Glycine max
  Clone ID: PAT_MRT3847_15367C.1.pep
MGSPMASLTLTIALTIISLTLPSQTLADNYIYSSPPPPKHSPPPPYYYHSPPPPKHSPPPPYYYHSPPPPKHSPPPPYYYHSPPPPKHSPPPPYHY

SEQ ID NO: 191968 - protein, 91 aa, Glycine max
  Clone ID: PAT_MRT3847_15368C.1.pep
MGSPMAPSLTLTIALTIISLTFPSQTLADNYIYSSPPPPKHSPPPPYYYHSPPPPKHSPPPVYKYKSPPPPVHSPPPPVYIYASPPPPYHY

SEQ ID NO: 191969 - protein, 117 aa, Glycine max
  Clone ID: PAT_MRT3847_15369C.1.pep
KHSPPPPYYYKSPPPPPKEPYKYPSPPPPVYKYKSPPPPYKYPSPPPPPYKYPSPPPPVYKYKSPPPPVYKYKSPPPPYKYPSPPPPVYKYKSPPPPVHSPPPPVYIYASPPPPYHY

SEQ ID NO: 191970 - protein, 264 aa, Glycine max
  unsure (1)..(264): unsure at all Xaa locations
  Clone ID: PAT_MRT3847_1536C.1.pep
TILRCFELSSGLKINFAKSQFGTICKSDIWRKEAADYLNSSVLSMPFVYLGIPIGANSRHSDVWEPVVRKCERKLASWKQKYVSFGGRVTLINSVLTALPIYLLGSSRIPDKVVDKADXIQRRFLWGGDLEXRKIAWVNLKTVCLPKDKGGLGIKDLRAFNTALLGKWSWELFQNQGDMWARVLISKYXGGRSIAEERMSSHFPSWWKDLLQINQQQNAILIRNQTECRVGREDLFRFWEDPWVGRGGSFMTKYPRLYHIFNLY

SEQ ID NO: 191971 - protein, 131 aa, Glycine max
  Clone ID: PAT_MRT3847_15370C.1.pep
MANAALRNVKVLPNSANMEEARHRVFEFFRTACRSLPSVMEIYNLYDVVSVSELRSSVASQIRNNIHVTDPKVIDMLLFKGMEELKNVVDHSKQRHHIIGQYVVGRQVQDSATKDPGTSTFLKNFYNTNYF

SEQ ID NO: 191972 - protein, 58 aa, Glycine max
  Clone ID: PAT_MRT3847_15371C.1.pep
GDRLGRPNRFTKTDSKLKKKGKTTMRPPKRKIKPKEPAPQTNSALGKNHGQATSSSKK

SEQ ID NO: 191973 - protein, 196 aa, Glycine max
  Clone ID: PAT_MRT3847_15372C.1.pep
DIDQNLFSVAQLVEKGFKVIFEENWCLIKDVKGKDVFKVKMRAKSYALNLMEEKQIAFSSMATNVELWHKRLGHFHLAGLLYMQKHALVKGVSMLEDKLADCMACQYGKLVRKPFPQSTWRVTQKLQLVHTDVGGPQRVSSLNALVENQSDCRLQTIRSDNGKEYKNDVFDKFCEEAGIEHQLTVPYTPQQNGVSE

SEQ ID NO: 191974 - protein, 49 aa, Glycine max
  Clone ID: PAT_MRT3847_15373C.1.pep
YYKEVTCTLPSPTRKLANKFFSIVSPSPSHAILLITYVNKISVNGSPCM

SEQ ID NO: 191975 - protein, 140 aa, Glycine max
  Clone ID: PAT_MRT3847_15374C.1.pep
PMASLTLTIALTIISLTLPSQTLADNYIYSSPPPPKHSPPPPYYYHSPPPPKHSPPPPYYYHSPPPPKHSPPYKYPSPPPPVYKYKSPPPPYKYPSPPPPPYKYPSPPPPVYKYKSPPPPVHSPPPPHYIYASPPPPYHY

SEQ ID NO: 191976 - protein, 399 aa, Glycine max
  unsure (1)..(399): unsure at all Xaa locations
  Clone ID: PAT_MRT3847_15375C.1.pep
SPMASLTLTIALTIISLTLPSQTLADNYIYSSPPPPKHSPSPPYYYHSPPPPKHSXPPPPYYYHSPPPPKHSPPPPYYYHSPPPPKHSPPPPYYYHSPPPPKHSPPPPYYYHSPPPPKHSPPPPYYYHSPPPPKHSPPPPYYYHSPPPPKHSPPPPYYYHSPPPPKHSPPPPYYYKSPPPPPKKPYKYPSPPPPVYKYKSPPPPYKYPSPPPPPYKYPSPPPPVYKYKSPPPPVYKYKSPPPPYKYPSPPPPPYKYPSPPPPVYKYKSPPPPVYKYKSPPPPYKYPSPPPPPYKYPSPPPPVYKYKSPPPPVYKYKSPPPPYKYPSPPPPPYKYPSPPPPVYKYKSPPPPYKYPSPPPPPYKYPSPPPPVYKYKSPPPPVHSPPPPHYIYASPPPPYHY

SEQ ID NO: 191977 - protein, 94 aa, Glycine max
  unsure (1)..(94): unsure at all Xaa locations
  Clone ID: PAT_MRT3847_15376C.1.pep
ASEQFQREDLGLGXRGIALRTLPLLFRFIPSFIIFQSNNLSLTLTHTHIXGVSPLPWLQSASSXXXXXXQKDPPXLARXXXXXXXXXXXKXLYG

SEQ ID NO: 191978 - protein, 91 aa, Glycine max
  Clone ID: PAT_MRT3847_15377C.1.pep
KLLPVLKTKPTSDSEAHLRHSFPKAKSRTSIYKHYHMISWVTTKEITSIIVFEAFYVVNIFGGGNAAQVTTDDDAFSRWEKHTIKKMDGHR

SEQ ID NO: 191979 - protein, 94 aa, Glycine max
  unsure (1)..(94): unsure at all Xaa locations
  Clone ID: PAT_MRT3847_15378C.1.pep
AVGAAVVCAAAACAAVALEVRGRMNIYGKWRPVLAIVKEIDEHSKTPIGKLIQVDDTMDFDIHTALVFDSVTKLNMLITXFHNLPSGDHKGLFY

SEQ ID NO: 191980 - protein, 102 aa, Glycine max
  unsure (1)..(102): unsure at all Xaa locations
  Clone ID: PAT_MRT3847_15379C.1.pep
AQLSLLIYISRNNVINIKVLAILHVKILVSLKCHPYHTFPHRMNNVYGTRIPEVKCPHXGLLLEHXNIIGIDTIPEQCVDTTKEYIQGDQYTSHSNTVNQQA

SEQ ID NO: 191981 - protein, 105 aa, Glycine max
  Clone ID: PAT_MRT3847_1537C.1.pep
GATRRESTHVHPREGRTNSTTRPPRGWIWFKGGPQHRQKQNRNSQTSPGEINGEDLYFGTRGGFIGGGRGQKPPPALWGFKKNLRPPVGGNKPHKPNPGVGPHQN

SEQ ID NO: 191982 - protein, 44 aa, Glycine max
  Clone ID: PAT_MRT3847_15381C.1.pep
IDLAICFVDRTVQGLSQHIGCFVQVINTAAHIMRARATSGQGHQ

SEQ ID NO: 191983 - protein, 49 aa, Glycine max
  Clone ID: PAT_MRT3847_15382C.1.pep
KGGGPFFFFFFFYYMLGRFIDRDSGYGQKVLYPGVQSTLYVLTVEEPRV

SEQ ID NO: 191984 - protein, 447 aa, Glycine max
  unsure (1)..(447): unsure at all Xaa locations
  Clone ID: PAT_MRT3847_15383C.1.pep
DAWADAWAVPRILAKSFSIVGNPLVCATGKEPNCHGMTLMPMSMNLNNTEDALQSGRPKTHKMAIAFGLSLGCLCLIVIGFGLVLWWRHKHNQQAFFDVKDRHHEEVYLGNLKRFQFRELQIATKNFSSKNILGKGGFGNVYKGILPDGTLVAVKRLKDGNAIGGEIQFQXEVEMISLAVHRNLLKLYGFCMTPTERLLVYPYMSNGSVASRLKGKPVLDWGTRKHIALGAGRGLLYLHEQCDPKIIHRDVKAANILLDDYCEAVVGDFGLAKLLDHQDSHVTTAVRGTVGHIAPEYLSTGQSSEKTDVFGFGILLLELITGQRALEFGKAANQKGAMLDWVRKLHQEKKLELLVDKDLKTNYDRIELEEMVQVALLCTQYLPGHRPKMSEVVRMLEGDGLAEKWEASQRVDTTKCKPQESSSSDRYSDLTDDSLLLVQAMELSGPR

SEQ ID NO: 191985 - protein, 74 aa, Glycine max
  Clone ID: PAT_MRT3847_15384C.1.pep
KNTNNILHDKGYSKLNQKQNFSQNKLGSLLKTNPLKQLFVKRKCKRCLSKIYENNYFFVDMNKLISQFCIVSHS

SEQ ID NO: 191986 - protein, 80 aa, Glycine max
  Clone ID: PAT_MRT3847_15385C.1.pep
NYKIKKLDPFYSKPHNFILTLGKNGNPITATEDPQIVFLHVNELLPSIGPSIEKNKLTSYGVHLPPTESIFLIQIQTPLQ

SEQ ID NO: 191987 - protein, 118 aa, Glycine max
  unsure (1)..(118): unsure at all Xaa locations
  Clone ID: PAT_MRT3847_15386C.1.pep
KEKVCAPXLLPLHPHLAAPRTVPLSLGCPKPLRGVNLAAWTISFWTRSGGVGGTTMMMPSNIAXLGPGGVRPPALGGSDDKANAKQRHVRSGTAVIPEPAEHPKCPRSRCVYYGDPWE

SEQ ID NO: 191988 - protein, 55 aa, Glycine max
  Clone ID: PAT_MRT3847_15387C.1.pep
AYNLQPSNSAIPNTYPPPPNSKTIPSTTHYPYFIPTQTLHHHYQTPHLTSPTFTL

SEQ ID NO: 191989 - protein, 41 aa, Glycine max
  Clone ID: PAT_MRT3847_15388C.1.pep
YRPKLGRVYGVFKSVHTYDTNLGSKAKKDVKIQGIWYAQLE

SEQ ID NO: 191990 - protein, 53 aa, Glycine max
  Clone ID: PAT_MRT3847_15389C.1.pep
MARSSRSHTRVFDANVTKEKKKSKEGDNVVEEALADIPSLPELKRIYYELMIR

SEQ ID NO: 191991 - protein, 295 aa, Glycine max
  unsure (1)..(295): unsure at all Xaa locations
  Clone ID: PAT_MRT3847_1538C.1.pep
FPSPEIDMDGRFENVDGYLFLSLGFSSKQNAWAGPDHWKYRKSKVSEVHPTSEDGSTLKSRQPKSKRQTEVDLNFTNSLEKKMLDTFPPPNXLLLPESRLPCNTKLPEDCHYQPEDLVKLFLLSNVKCLGRKANRFSDGSREQSNEYESFPSWDNGSVCGDDAGDYGGDLHSDMEDSNTLITQPRQVNKIEVQYDKTSKQVDVHALKITLLEPNRLEVKLPLEGQKDTLSFKNILANFPSECNAAATISDISPHLCFICLLHLANEKGLSIQNSSNLDDLAIRFPQVADSIRGTV

SEQ ID NO: 191992 - protein, 55 aa, Glycine max
  unsure (1)..(55): unsure at all Xaa locations
  Clone ID: PAT_MRT3847_15390C.1.pep
NHILNSSAKVTXFYSYLKAVLEIKYIFETPTGLGSTLXHYTLLKHDLQKNLLLII

SEQ ID NO: 191993 - protein, 78 aa, Glycine max
  Clone ID: PAT_MRT3847_15391C.1.pep
QIWILILVKRILAKKQQVHPFGPLKLVSEKWPLFWTYQVYSSEGVMPTYHDRSQFSSYAAESALDQLFFLILDSMVRL

SEQ ID NO: 191994 - protein, 203 aa, Glycine max
  Clone ID: PAT_MRT3847_15392C.1.pep
SLEVASEYFRSGADKISIGSDAVYAAEEYLKAGVKTGKTSLEQISRVYGNQAVVVSIDPRRVYVKDPNDLQLKTIRVSSPGPNGEEYAWYQCTVNGGREGRPIGAYELAKAVEELGAGEILLNCIDCDGQGKGFDVDLIKLISDAVSIPVIASSGAGAPEHFSEVFYKTNASAALAAGIFHRKEVPIQSVKEHLLKEGIEVRI

SEQ ID NO: 191995 - protein, 51 aa, Glycine max
  unsure (1)..(51): unsure at all Xaa locations
  Clone ID: PAT_MRT3847_15393C.1.pep
EXVHELTLLAALSPFFLLNTHIHSFQTIYYIIWSVSYHISYTQHQQLYKHH

SEQ ID NO: 191996 - protein, 76 aa, Glycine max
  unsure (1)..(76): unsure at all Xaa locations
  Clone ID: PAT_MRT3847_15394C.1.pep
DCWMPTGLXTTIFTNKTSPPFHSAVDSASESHVKEVFPLDSKLLRAPTLQVRSLSDXNLSSSVGXFXDFPSPNCXP

SEQ ID NO: 191997 - protein, 75 aa, Glycine max
  Clone ID: PAT_MRT3847_15395C.1.pep
KGKRRRVVQGRRTQSLCDYEARTLQSLVVFGVRHASVTVSDTDTTPVLRSIFWTLQVSTCSCSCRIRCPCRCWCF

SEQ ID NO: 191998 - protein, 100 aa, Glycine max
  Clone ID: PAT_MRT3847_15396C.1.pep
GPPPIKNVHWWGVQKLLRVLALSPVLQKVGAPVLKGPSPWVVPPPRKLIVPPKVPFFGPKRARGFFFLGGGGVPVPPQGPGCPRKTFPGSFGVPGGVPNP

SEQ ID NO: 191999 - protein, 49 aa, Glycine max
  unsure (1)..(49): unsure at all Xaa locations
  Clone ID: PAT_MRT3847_15397C.1.pep
KXTDPRIRFXITTFSLPFFMQHPFKSCPCPYKYTIAFNNFLNYFSKLFP

SEQ ID NO: 192000 - protein, 45 aa, Glycine max
  Clone ID: PAT_MRT3847_15398C.1.pep
HHTAVLKLSITNVSEYQDIAQQMLPNMARDYYASGAEDQCTLPFD

SEQ ID NO: 192001 - protein, 50 aa, Glycine max
  Clone ID: PAT_MRT3847_15399C.1.pep
GRGSQTGSYPPLHRPQPLHLLGALITNQSCVLTDDWIITLHPLALTLPKM

SEQ ID NO: 192002 - protein, 146 aa, Glycine max
  Clone ID: PAT_MRT3847_1539C.1.pep
NADHVAKSLDKEGYRVTTLHGGKSQEQREISLEGFRTKRYNVLVATDVAGRGIDIPDVAHVINYDMPGNIEMYTHRIGRTGRAGKTGVATTFLTLQDSDVFYDLKQMLIQSNSPVPPELARHEASKFKPGTIPDRPPRRNDPVFAH

SEQ ID NO: 192003 - protein, 390 aa, Glycine max
  unsure (1)..(390): unsure at all Xaa locations
  Clone ID: PAT_MRT3847_153C.1.pep
MASHSPKREGPYYLNIVLFLTILISIINPSHQDPSSPLPPINPRLTKAYTALQAWKHKITSDPKNFTLNWCGPNVCNYTGIYCAPALDDPHIYTVAGVDLNHATISGSLPEELGLLTDLSLLHINSNRFCGSLPTSFDKLHLLHELDISNNQFSGPFPEVVLCIPNLKYLDIRFNNFHGNVPSRLFDVKLDALFINNNNFQFSLPNNFGNSTASVVVFANNDLKGCLPSSLVKMKGTLNEIIITNSGLTGCLPSEIGDLDMVTVFDVSFNKLVGELPESLGRMKKLEQLNVANNELSGEIPESVCMLPRLENFTYSYNYFCSESPTCLKLKDKDDTKNCIPYRPLQRSLDECKAFYAHPVHCSAFGCAXPPPPPPPPPPPPPPATYHHYP

SEQ ID NO: 192004 - protein, 129 aa, Glycine max
  Clone ID: PAT_MRT3847_15400C.1.pep
QMTIFYGGQVVVFDDFPADKASEIMSYATKGGIPQSQNNSVYTYTQSQPSFPPTLIRTSADSSAPFIFSVNITNSIHLPIARKASLHRFLEKRKDRIASKAPYQVANGPSNKAAESMPWLGLSASSPQI

SEQ ID NO: 192005 - protein, 157 aa, Glycine max
  Clone ID: PAT_MRT3847_15401C.1.pep
MVCSAIKSVSKGAKTAQMTIFYGGQVVVFDDFPADKASEIMSYATKGGIPQSQNNSVYTYTQSQPSFPPTLIRTSADSSAPIIPSVNITNSIREHPQASSRPVVYLPIARKASLHRFLEKRKDRIASKAPYQVANGPSNKAAESMPWLGLSASSPQI

SEQ ID NO: 192006 - protein, 75 aa, Glycine max
  Clone ID: PAT_MRT3847_15402C.1.pep
SMCAKTAQMTIFYGGQVVVFDDFPADKASEIMSYATKGIPQSQNNSVFTYTPSQPSFPANLVRTSADAWLQLFLV

SEQ ID NO: 192007 - protein, 586 aa, Glycine max
  Clone ID: PAT_MRT3847_15403C.1.pep
MIKEKLKEYGQDLMLVAQKTNGVRELKEAVLNMARLSHIGFEKLMITNNLDAMVVPFSFFASILARGGYPGVTVPAGYEKGAPFGIIFGGLKGSEPKLIQIAYSFEQATLIRKPPPLRKLEPLCWVRLPLLNGERLKIKTYDGRSLFLFFNPSIHFLFSIINKAKGLSIEEATVYDLQLAFRTKQLTSREVVDFYLKQIETQNPVLKGVLELNPDALSQADKADHERKTKAPGSLSPLHGIPILIKDNIATKDKMNTTAGSFALLGSVVPRDAGVVSRLREAGAIILGKASMSEWAFYRSNAAPSGWSARGGQGKNPYTMDGPSGSSSGSAISVAANLVAVSLGTETDGSILSPSNVNSVVGIKPTVGLTSRAGVVPITPRQDTVGTVSDAALVLETIAGIDINDQATIEASKYVPEGGYAQFLKKEGLRGKRLGVVRFFYGFSGDTVMHKTLELHFKTLRQKGAVLVDNLEIENIEEIIDGQSEEIAMAYDFKLSLNALSHNGFEKLMITNELDAVVVPSSTFSSILAIGGYPGVIVPAGYEKGVPFGICFGGLKGSESKLIEIAYSFEQATMIRKPPPLRKLEI

SEQ ID NO: 192008 - protein, 111 aa, Glycine max
  Clone ID: PAT_MRT3847_15404C.1.pep
LIFLWRLIFDGQNPPKNIRGEQILDNRKQPEIASLVFQASLLPFPLFSLQVRSTCQSTNSKSCTHESKYPINSQMDKFQITTRKNHSHRPILKGIAKTEVSIIHLNQFTNT

SEQ ID NO: 192009 - protein, 110 aa, Glycine max
  unsure (1)..(110): unsure at all Xaa locations
  Clone ID: PAT_MRT3847_15405C.1.pep
MASDTAKGLSIEEATVYDLQLAFRTKQLTSREVVDFYLKQIETQNPVLKGVLELNPDALSQADKADHERKTKAPGSLSPLHGIPILIKDNIATNDKMNTTAXSFALLGSV

SEQ ID NO: 192010 - protein, 263 aa, Glycine max
  unsure (1)..(263): unsure at all Xaa locations
  Clone ID: PAT_MRT3847_15406C.1.pep
LLVGWYRPICRTVSDAALVLETIAGIDVNDNATIKASKYLPRGGYAQFLKKDGLRGKRLGVVRTFYGFGNDTFMHDTFELHLRDLVASPVRSLADVIAXSLYMAIRFQVCRLFSYHCYKKRVQRRCFSEFNDGARPSXMRPSRRXSGQSTQVLMLLAQNTNVVRELKKAVLNIGKIVTYXGFEKLMIANNLDAMVVPFSFFASILARGGYPGVTVPAGYEKGAPFGIIFGGLKGSEPKLIQIAYSFEQATLIRKPPPLRKLEV

SEQ ID NO: 192011 - protein, 55 aa, Glycine max
  Clone ID: PAT_MRT3847_15407C.1.pep
VANLIVRLPSHHGNYGMDSCKTILKSTENFTLFIYICTRFFFFFLVSMKRHFFLN

SEQ ID NO: 192012 - protein, 647 aa, Glycine max
  Clone ID: PAT_MRT3847_15408C.1.pep
MHDTFKLHLKTLRQKGAVLVDNLEINNIQEILMIKEKLKEYGQDLMLVAQKTNGVRELKEAVLNMARLSHIGFEKLMITNNLDAMVVPFSFFASILARGGYPGVTVPAGYEKGAPFGIIFGGLKGSEPKLIQIAYSFEQATLIRKPPPLRKLEAEVVFSWLPTRYEAKGLSIEEATVYDLQLAFRTKQLTSREVVDFYLKQIETQNPVLKGVLELNPDALSQADKADHERKTKAPGSLSPLHGIPILIKDNIATKDKMNTTAGSFALLGSVVPRDAGVVSRLREAGAIILGKASMSEWAFYRSNAAPSGWSARGGQGKNPYTMDGPSGSSSGSAISVAANLVAVSLGTETDGSILSPSNVNSVVGIKPTVGLTSRAGVVPITPRQDTVGTVSDAALVLETIAGIDINDQATIEASKYVPEGGYAQFLKKEGLRGKRLGVVRFFYGFSGDTVMHKTLELHFKTLRQKGAVLVDNLEIENIEEIIDGQSEEIAMAYDFKLSLNAYLRDLVNSPVRSLADVIAFNKEHPELEKLEEYGQDLLLLAEETNGVEELNHAVLNMSRLSHNGFEKLMITNELDAVVVPSSTFSSILAIGGYPGVIVPAGYEKGVPFGICFGGLKGSESKLIEIAYSFEQATMIRKPPPLRKLEI

SEQ ID NO: 192013 - protein, 87 aa, Glycine max
  Clone ID: PAT_MRT3847_15409C.1.pep
LPLLICQAHLVYVQYVHPRCTGYLLVIYLQLVNNHLTVLNGFYISRRPAHQSNPVHQQSPPAQPERLPVARAPVLPASRTFNFFLLY

SEQ ID NO: 192014 - protein, 81 aa, Glycine max
  unsure (1)..(81): unsure at all Xaa locations
  Clone ID: PAT_MRT3847_1540C.1.pep
RYXLRSELXNANVSSQPHKLGXFTALHXSSLXLRXLQLECVWXSYXGSXXXEIXTVVGAXLYXXVIMAXXXXXXPXFSCXK

SEQ ID NO: 192015 - protein, 55 aa, Glycine max
  Clone ID: PAT_MRT3847_15410C.1.pep
VNLGHLIRFLMNILIRTEVVGSHANLGPREREMIEPKHSMKVTIDMHGFSFRSES

SEQ ID NO: 192016 - protein, 71 aa, Glycine max
  Clone ID: PAT_MRT3847_15411C.1.pep
ENIQKDLLKKKSKRKLCVEDKLYQSSKTYGLYKPSTLEICCLMTSRCCFYLSSNKERRSLGAFNACLFFIQ

SEQ ID NO: 192017 - protein, 98 aa, Glycine max
  unsure (1)..(98): unsure at all Xaa locations
  Clone ID: PAT_MRT3847_15412C.1.pep
MRVFKRASGAIKDRNSIWVAKFSPKGPFHNPDLETVIIKATSHDDKHIDSKNVQRVFQWLRTSPLYLKPLVWILSMRMQKTRSLVVALKXLMLIHGVF

SEQ ID NO: 192018 - protein, 55 aa, Glycine max
  Clone ID: PAT_MRT3847_15413C.1.pep
VIQVGFQFERSPNVGFKEVLGFKKASKHLAFLIMAYATRCWNHWYRVSKLLAVKA

SEQ ID NO: 192019 - protein, 82 aa, Glycine max
  Clone ID: PAT_MRT3847_15414C.1.pep
SSAHDYDAVFAAIHRRRLNWIPVLQMQKYHSIADVTLELARLADRNHYAAAEDDDAKHETDEKTTPSESVGDGGGGDEHEEL

SEQ ID NO: 192020 - protein, 64 aa, Glycine max
  Clone ID: PAT_MRT3847_15415C.1.pep
CCSSYTTVHGLTPSGPLEEPLVVGLSCSLPLCYFLFYLFPYDSRSYIRGLLFVFISSCYLLLFA

SEQ ID NO: 192021 - protein, 82 aa, Glycine max
  unsure (1)..(82): unsure at all Xaa locations
  Clone ID: PAT_MRT3847_15416C.1.pep
PPCNLSGKGLPCSPDDSVXSRSSGYEFCIYGPACKFDHPIDLQPLMIPGLGQQSYANTDSVKVVGIFGRTGVEPDATVRRSV

SEQ ID NO: 192022 - protein, 55 aa, Glycine max
  Clone ID: PAT_MRT3847_15417C.1.pep
GSNQINFKISLNGFESSNATKATKTVLTSKNALDENSLANPTNVHITSFILFLLL

SEQ ID NO: 192023 - protein, 90 aa, Glycine max
  Clone ID: PAT_MRT3847_15418C.1.pep
SQGPGLYFDIGKKARDVLHKDYAQQSPIHFNYRFLNWNLDLSCQEELVHGLRGLFTCNIPDSGKLEIQHLSRFSGFSASIGLSGEAEKGY

SEQ ID NO: 192024 - protein, 38 aa, Glycine max
  Clone ID: PAT_MRT3847_15419C.1.pep
VFLQVPLILFAASYERNIKSFSFHYKVTLSLGVLLILR

SEQ ID NO: 192025 - protein, 55 aa, Glycine max
  Clone ID: PAT_MRT3847_1541C.1.pep
ISHSHRSCELKLCLSERANSYSCEQVRVSNYNASESDLSCLIADDHLEFLKSFNC

SEQ ID NO: 192026 - protein, 83 aa, Glycine max
  Clone ID: PAT_MRT3847_15420C.1.pep
VQRRQKGPVAAVEVVVVGGGVRWRVGWVHVNCAIGVVVGDVHDHRGDGPICHFPCVVNIRVLAQRNESILGVEGVTLSKFNRS

SEQ ID NO: 192027 - protein, 75 aa, Glycine max
  unsure (1)..(75): unsure at all Xaa locations
  Clone ID: PAT_MRT3847_15421C.1.pep
XSQYLLFPSIYELEPRAIDALKSEFSIPIYTVGPAIPSFXNSLIDDIGYFQWLAQXQPLGSVLYISQGXFLSFSQ

SEQ ID NO: 192028 - protein, 450 aa, Glycine max
  unsure (1)..(450): unsure at all Xaa locations
  Clone ID: PAT_MRT3847_15422C.1.pep
MLNQVQSMKNMEIDPSNRDVKRFKVSDNVMDKQLVDSISNRGQQSYGYNNIVKDVSDNSSSVPPSDPNLLRFSTKPGDARDTSASSQEVVGYGQRNALNVANNNKVTSVRSEHSVINPQMAPSWFEQYGTFKNGKMLQMYDVRTVTPQKDMEQPLIIRNQSGSLHLANSMEQVNSLSDAGQDPMLTSVASEHLPSKLLLPPAAEPXTTQLVQQLLSPPPAAVLVADVKLHHESVVYSVARLALGEACSSISWSRCDTLLPPGNKNLLPEKCKSSXKLITTQLLQPDLIPPPAAVLVADVKLHHESVVYSVARLALGEACSSISWSRCDTLRLPPQEPCQMIXKCKSSDKIDHYILKVTDFVDRARKLEDDHXRLNSKASILDLRVECQDLERYSVINRFAKFHGRGQNDGAEASSSSDANTNAQKSFPLKYVTAVPLPRNLPDRVQCLSL

SEQ ID NO: 192029 - protein, 351 aa, Glycine max
  Clone ID: PAT_MRT3847_15423C.1.pep
MAVQAQYPSNVLLLNSSRNGQEEHEYSSLQPQPGGVVLLNQPHMLYNINDNGSNNNNNNTNSRKRGREDPGVGNNTITAASNVIDQFSLQSQPPQLVHLSQLHNHHQQQNNVVSTGLRLSFDDQHFQQQQRLQLHQNESQQHRSHSSAFLSLLSQGLGSQIKQQRDEIDQLLHAQGEQLRRALAEKRQRHYRALLSAAEEAVARQLREKEAEVEMATRKNAELEARAAKLSVEAQVWQAKARAQEATAVSLQTKLQQTILSHGGEDPAVVGVSSAAVEGQAEDAESAYIDPDRVVAATAARPKCRGCAKRVASVVVLPCRHLCVCTECDAHFRACPVCLTPKNSTVEVFLS

SEQ ID NO: 192030 - protein, 51 aa, Glycine max
  Clone ID: PAT_MRT3847_15424C.1.pep
GSAEPPDVYEGPPYTDDELVETDDELYGPYYELYWPLYNDVYVLDTNVNKE

SEQ ID NO: 192031 - protein, 71 aa, Glycine max
  unsure (1)..(71): unsure at all Xaa locations
  Clone ID: PAT_MRT3847_15425C.1.pep
NRNGRDTPTAXGXREGQPKQTSGDKTEXADRXGTTGDATQAKGQETGEEEATKKAPQDRRKKNRERQXRRT

SEQ ID NO: 192032 - protein, 94 aa, Glycine max
  Clone ID: PAT_MRT3847_15426C.1.pep
TIPPKEPCTSGTYSFIDGDPLTFLVVHPSTLFDKSPPPLSYTTLTTITTHSSVNFTPTTRVLFTDSRRFRSPVPRRFCFPLPRCVSCLPTLYWK

SEQ ID NO: 192033 - protein, 106 aa, Glycine max
  unsure (1)..(106): unsure at all Xaa locations
  Clone ID: PAT_MRT3847_15427C.1.pep
DEMESDRGELFIGGISWVSHQERLXECFGLYGQVIQPVVMRARVTGRAGGLGFMLFVEPAAAERVIMDKLIGDGGTGKPKKPLLRDVQHFVIRHSGRAHVSPGPVR

SEQ ID NO: 192034 - protein, 60 aa, Glycine max
  unsure (1)..(60): unsure at all Xaa locations
  Clone ID: PAT_MRT3847_15428C.1.pep
PIGSSQXXSSLLKAYSXXCNRKLLRNLSKRSVSPKNSHILTIILAFEAIPSHERNPISYH

SEQ ID NO: 192035 - protein, 60 aa, Glycine max
  Clone ID: PAT_MRT3847_15429C.1.pep
QQASSAFNGRRIRMRPVFHCRSLTHNTQRIFRVAQKACLLGPSSAGFAEFKNRVFEPSHT

SEQ ID NO: 192036 - protein, 501 aa, Glycine max
  Clone ID: PAT_MRT3847_1542C.1.pep
KDGLEERPEEADAQRRKEAAADLYDTFDMRVDRHWSEKKLEEMTERDWRIFREDYNISYKGSKIPRPMRSWNESKLTNELLKAVEKAGYKTPSPIQMAAIPLGLQQRDVIGIAETGSGKTAAFVLPMLSYITRLPPISEDNEAEGPYAVVMAPTRELAQQIEDETVKFAQYPDLLYGCRSPEGLGIKVLSIVGGQSIEELGFKIRQGCEIVIATPGRLIDCLERRYAVLNQCNYVVLDEADRMIDMGFEPQVMGVLDAMPSSNLKPENEDEELDEKKIYRTTYMFSATMPPAVERLARKYLRNPVVVTIGTAGKATDLISQHVIMMKEAEKFSKLHRLLDELNDKTAIVFVNTKKNADHVAKNLDKDGYRVTTLHGGKSQEQREISLEGFRTKRYNVLVATDVAGRGIDIPDVAHVINYDMPGNIEMYTHRIGRTGRAGKTGVATTFLTLHDSDVFYDLKQMLIQSNSPVPPELARHEASKFKPGTIPDRPPRRNDTVFAH

SEQ ID NO: 192037 - protein, 115 aa, Glycine max
  Clone ID: PAT_MRT3847_15430C.1.pep
RDPSGFNLICIVLERQMAMLRRYVTASAIALFALLLLLVTCNLNMALASSGGVMGGNFFDSDSESSSSESYTRDSESYRMEHHPHRYYDAPSPDTDAAKGSHSGLVLFLIFASGM

SEQ ID NO: 192038 - protein, 71 aa, Glycine max
  unsure (1)..(71): unsure at all Xaa locations
  Clone ID: PAT_MRT3847_15431C.1.pep
CRGCSCKRGNGWGGRTMLPDLGYTVSTTTDTLAVGVAPVEGQFEVAEMGAHDENDGXERAPNWSCDPCTSR

SEQ ID NO: 192039 - protein, 38 aa, Glycine max
  unsure (1)..(38): unsure at all Xaa locations
  Clone ID: PAT_MRT3847_15432C.1.pep
FHXSHHATXXSGAXXAVAHHQRXXSTRRRXANDRSSDR

SEQ ID NO: 192040 - protein, 88 aa, Glycine max
  unsure (1)..(88): unsure at all Xaa locations
  Clone ID: PAT_MRT3847_15433C.1.pep
MVWKVHGPLVPTFLELWNSDSANHQKFPLPNKTGLGGPYTSNVTCNIWGFRVNAKNVLNWHNAPTICXNYIGNYLLRNQYISDPNTFT

SEQ ID NO: 192041 - protein, 39 aa, Glycine max
  Clone ID: PAT_MRT3847_15434C.1.pep
KCSLVTLFLKIFFHFLFYVKILHYFLSPVKNHLLIFILK

SEQ ID NO: 192042 - protein, 56 aa, Glycine max
  Clone ID: PAT_MRT3847_15435C.1.pep
HRTNIMLRVAFPQKLCQHRGGSITFLQATIFSLTPSVTRTLTMECCHNLTVKLLLH

SEQ ID NO: 192043 - protein, 281 aa, Glycine max
  unsure (1)..(281): unsure at all Xaa locations
  Clone ID: PAT_MRT3847_15436C.1.pep
DNHFNKAKATPQTEPKINKEANKDNGNNIAAQTFTFRELAAVTKNFRQECLIGEGGFGRVYKGRLEKTNQEVAVKQLDRNGLQGNREFLVEVLMLSLLHHQNLVNLIGYCADGDQRLLVYEYMPLGAXEDHLLDLQPQQKPLDWFIRMKIALDAAECLEYVHDNANPPVIYRDLKSSNILLDKEFNAKLSDFGLAKLLPTGDKSHVSSRVMGTYGYCAPEYQRTGQLTVKSDVYSFGVVLLELITGRRAIDNTRPTREQNLVSWAXPVFKDPPRYPELPDP

SEQ ID NO: 192044 - protein, 48 aa, Glycine max
  Clone ID: PAT_MRT3847_15437C.1.pep
VFWSFSSRMPTNNTQLLKNHILIMNYADYQNRHLLFKELHILLLTKYS

SEQ ID NO: 192045 - protein, 106 aa, Glycine max
  unsure (1)..(106): unsure at all Xaa locations
  Clone ID: PAT_MRT3847_15438C.1.pep
ARLACCLERSEDDSVNRLGYQHILTRDQLLADAGRYKEIDNGMQCELDGNCVVKGALDVDIGANPSAEGGGEYDGVDDASVNVVDTVDTFKIQEQPAXDKKHVVTV

SEQ ID NO: 192046 - protein, 57 aa, Glycine max
  Clone ID: PAT_MRT3847_15439C.1.pep
AALIATKNNSTSALDRQLFLSLKPLPTPITTISLYLHHYMILHNLRHFPFHCIHLFT

SEQ ID NO: 192047 - protein, 273 aa, Glycine max
  Clone ID: PAT_MRT3847_1543C.1.pep
MVEPAYTVTSDSETTGEEKSSTFPEIAIGIDIGTSQCSVAVWNGSQVELLKNTRNQKIMKSYVTFKDNIPSGGVSSQLSHEDEMLSGATIFNMKRLIGRVDTDPVVHACKNLPFLVQTLDIGVRPFIAALVNNMWRSTTPEEVLAIFLVELRAMAEAQLKRRIRNVVLTVPVSFSRFQLTRIERACAMAGLHVLRLMPEPTAVALLYGQQQQQTSHENMGSGTEKIALIFSMGAGYCDVAVTATAGGVSQIKALAGSTIGGEDLLQNMMHHLL

SEQ ID NO: 192048 - protein, 70 aa, Glycine max
  Clone ID: PAT_MRT3847_15440C.1.pep
GSSGSGCGFGDGGGARGEHGGGYGGGQGGGVGACGGYGDGGAHGGGYGGDQSGGARGGYSEGDPNGLTTL

SEQ ID NO: 192049 - protein, 65 aa, Glycine max
  unsure (1)..(65): unsure at all Xaa locations
  Clone ID: PAT_MRT3847_15441C.1.pep
AQDFQGGNPTGRFCNGKIPSDLIVEQLGIVEYLPAYLDPNLXSSDLVTGVCFASGASXYDPLTPK

SEQ ID NO: 192050 - protein, 92 aa, Glycine max
  Clone ID: PAT_MRT3847_15442C.1.pep
GRPQVFSGIRRPDRDSTSIQKAWEDKALQINLHQTSPVHVIHTPRKESRIDPPQHLPVVVMLLKGIMEMKSANHQGGGALNHRSGLGTCRHG

SEQ ID NO: 192051 - protein, 42 aa, Glycine max
  Clone ID: PAT_MRT3847_15443C.1.pep
LDRGKIKVELVMGGEAAGQQTPSFEVLENKISIGESLVLFVY

SEQ ID NO: 192052 - protein, 78 aa, Glycine max
  Clone ID: PAT_MRT3847_15444C.1.pep
TTLLATMQGGLDCTGPGDHVIVVKITTLNTKCAYWLTCRLLLYTMVRTITTCIILQTLSKQKATLRTPNYIERGKQRS

SEQ ID NO: 192053 - protein, 134 aa, Glycine max
  Clone ID: PAT_MRT3847_15445C.1.pep
PTRPYGCEKTTEGEYSESVFSIHTPSSLKMSSHSKTVKAQSPVSNGEQVEIGISEEDQLEELEKKDSLSVTSQLCIKPIRNSEKLDKEMVLRRIRHRKRMNKVRSAVGAFLFSTSTADASAQGKKWVDDAFAAL

SEQ ID NO: 192054 - protein, 61 aa, Glycine max
  Clone ID: PAT_MRT3847_15446C.1.pep
IWPTSTRRCSASVQCRKSRSLLCWVASHVSMSHGLDFSHNQCSENRCTHSSLVHHSLFTSV

SEQ ID NO: 192055 - protein, 67 aa, Glycine max
  Clone ID: PAT_MRT3847_15447C.1.pep
IRFSFKESCSVYCLVAFYAMCLLLMHFFFDVFTDAPLDRRKRKNIYSVSLTITVRSWFMLKFHLIGS

SEQ ID NO: 192056 - protein, 89 aa, Glycine max
  Clone ID: PAT_MRT3847_15448C.1.pep
IGIRLGKPQRVIYRLELDSSQARGSDADYSNKRLVLTLHDSLHSGDSYAVVNIVAGDLKWWIHGPTSHQCLMGMLTVNCAVDNCFHFLT

SEQ ID NO: 192057 - protein, 45 aa, Glycine max
  Clone ID: PAT_MRT3847_15449C.1.pep
SKRLSQCILQAKILSAPALFTINIQPARKFEPPFSKVCLISANFL

SEQ ID NO: 192058 - protein, 167 aa, Glycine max
  unsure (1)..(167): unsure at all Xaa locations
  Clone ID: PAT_MRT3847_1544C.1.pep
MEQHKNESHTQTSLPLSPFTQPIRCIVKLGGAAITSKNELEMINEEILQKVSEQLREAMVASSEKPPGMDWSKRPGASEIFCNPEEFGDHSAIDCSPFIVVHGAGSFGHFQASKSGVHKGQLNKPLVKGGFVATRISVTTLNLEIVRALXREGIPSIGMSPFSCGWV

SEQ ID NO: 192059 - protein, 45 aa, Glycine max
  Clone ID: PAT_MRT3847_15450C.1.pep
GGRVPPLHKKKRFFFSFSKKKKKKKKKKKKKKKKKKKKKKKKKNK

SEQ ID NO: 192060 - protein, 63 aa, Glycine max
  Clone ID: PAT_MRT3847_15451C.1.pep
GGFPVFTKVNLKGHKVCPRGKFLNSTKGGPLGEGFKRNFPKFLVYKKGNFFYPYAPPTFPLSI

SEQ ID NO: 192061 - protein, 60 aa, Glycine max
  Clone ID: PAT_MRT3847_15452C.1.pep
LFSYLYIFVYKYLLVTISTFYMIQHPYFFITLSNSHQMIQHLNLYLHISFYISNLINSMI

SEQ ID NO: 192062 - protein, 118 aa, Glycine max
  unsure (1)..(118): unsure at all Xaa locations
  Clone ID: PAT_MRT3847_15453C.1.pep
RKLFLIQCGFCKPQRECGYVYENETVWRPKKGVVVGSNPDCTRWSNDQHLFCYDCDSCKAGVLATLKKSXRKVSVFNIPVMVTLVVLYIIDYAAYKNNRRINNCEPCGLTRMTTLQPK

SEQ ID NO: 192063 - protein, 53 aa, Glycine max
  Clone ID: PAT_MRT3847_15454C.1.pep
LSISLSLRGAHVWFFYKGGLRMNVWIWELMCFVRLHSPSFLYVCAWIFKLLSA

SEQ ID NO: 192064 - protein, 286 aa, Glycine max
  Clone ID: PAT_MRT3847_15455C.1.pep
MRRPCKHSKKKHDLFECLPDDLLVLILSKLSSTASSPSDFINIILTCKRLNRLGLHRLVLSKAASKLFAIKPKNWSEYAHSFLKHCANAGNVDACYTLGMIRFYCLKNRGSGLSLMAKAAMKLHAPALYSLAVIQFNGSGGSKRDKDLRAGVALSARASLLGHIDALRELGHCLQDGYGVRQNVTEGRRLLVQANVRELAYVLRAVAPSRCYETSLLTWRALRCQRNNNNNNAVVACPLLSDYGYNVAVPEVQPANWFLREWFESGKGKLEEGLRLCAHIGCGRPE

SEQ ID NO: 192065 - protein, 98 aa, Glycine max
  Clone ID: PAT_MRT3847_15456C.1.pep
VYFVYLCVGDHMLNSVNMSLTNLVSVPATNMYNVPDMHEEPNILNPNPCVNGFYASEEETCLLVLIMVFLEVNMSQWMRMEMTMKIMKVKTLVTLRKQ

SEQ ID NO: 192066 - protein, 57 aa, Glycine max
  Clone ID: PAT_MRT3847_15457C.1.pep
QRRKVKCILWHKNHHLYDESIILSYYTFILFNYFKMFVLVHFSYFLHKKYTNEIEQT

SEQ ID NO: 192067 - protein, 89 aa, Glycine max
  Clone ID: PAT_MRT3847_15458C.1.pep
MMDRELHWIEPKWETGRDRRKQRRRETGGSTKRKERQELEEDTRKREEEERREETAESEVEGEKKEHGEAGKEGTGEKKTVGGKDTKEE

SEQ ID NO: 192068 - protein, 219 aa, Glycine max
  unsure (1)..(219): unsure at all Xaa locations
  Clone ID: PAT_MRT3847_15459C.1.pep
MLLYRVPLLLFVCFCFANSAAVSANEASTGTEVTIDAKPSDKKLKGTESFPKEKKTFSIPFFKPVPKLVPIVKPIPMPFPKPLPLPIPVFQKPIPKWIPDVKPIPKPIPIPVFRPVPVPVKPIPKPSPTIEKPKPCPIAKKPVPTPVVKKPLPKPIPIVKSIPKPSPTVKKPLPIPSIKPVPKSIPIAKPIPXPVFKPIPKPFPIEPLPISSIKPIPTP

SEQ ID NO: 192069 - protein, 82 aa, Glycine max
  Clone ID: PAT_MRT3847_1545C.1.pep
IRLETAARRRQKGPPSRCPMQSHPMKNQMPHHQICLVPRTDSKQGKAVFLPRFRKPVLLFGSRLQLPRTGFTPSVQIKYISS

SEQ ID NO: 192070 - protein, 59 aa, Glycine max
  Clone ID: PAT_MRT3847_15460C.1.pep
FETCLVLKESGKKDRELGNLNSIKRPIQLLSKKITKNWAKFRPFFLQVYKFIYFVEATI

SEQ ID NO: 192071 - protein, 88 aa, Glycine max
  unsure (1)..(88): unsure at all Xaa locations
  Clone ID: PAT_MRT3847_15461C.1.pep
TTHTTLPLSKPEKEFSIRXLQLIXHPXXPLXKQEITLVQAXVLKEYPXXXNHVFFHYXGLDDPDKXHXXKXAFSGXKXPAQXXXFVXA

SEQ ID NO: 192072 - protein, 67 aa, Glycine max
  Clone ID: PAT_MRT3847_15462C.1.pep
PVYSERSWKCLTLTRSQISYVRVSSIWSHSGNSNHSRSIRSALRSFFRYLKKVVFQYVGKACLQSRV

SEQ ID NO: 192073 - protein, 647 aa, Glycine max
  unsure (1)..(647): unsure at all Xaa locations
  Clone ID: PAT_MRT3847_15463C.1.pep
MSLEDYINLHLGLFVSHLHLHVLVPNHSNFKSFPCELCQLGKHTRISYGSHVNKGDALPFVLVHSNIWGLNXVYSKLDYFYFVTSIQDFSRCTWVFLMKNRYDVFFSIFXSFSTKIQNQFASSIKILRTNNAKEYLSSQFQSFLNSHRILHQTSXAHTPQQNGVAERKNRHLVETACTLLLHYNVPLRFWXDALLTDCHLINCIPSSVLNNQIPYSIXSYTGPXYVPLRVSRSTCFVHDLTPGRNKLCQVSXCIFLGYSCLQKGYRCLXLNFNGTWSMQMLHSLRLLFSFLPPLKMSSSGSTYXPAPLVAHAPSSPPPPLLTYHQQTQALPAAPPTDPPTSXSCSKHLSTTTAYTLISHLHKGVRSTHNPNPLYAFTLNFDYLSPSYYSLISSLDFVSIPKSTREAMANHNWQQPMLAEMAAQDANNTWELVPLPPNKSTVGCHWIYTMKIAPYGTIDRYKARLVAKGYIQIFGLDYCDTLSPVTKMTSIHLFHAMAAIXHWPLHQLDIKNAFLHGQLQEEVYMDQPPGSIVSGDSRLIYKLRRSIYGLKQSPRSWFGHXFSSTLLEFGMTQCEADHSVFFLHSKSRLCLYPIVYVDNIVITGDESAGILPLKSHTFIVTFRLXDLGPLKYFLGIKVAQSSSGIVIS

SEQ ID NO: 192074 - protein, 82 aa, Glycine max
  Clone ID: PAT_MRT3847_15464C.1.pep
NKRKVTLYSNFVTRHLNQSFDMHPKTTKLLGNHVPCSKRFFKDARKTLAYGWIGSISTNSNSLCGDVILHSSPPRYEDIDML

SEQ ID NO: 192075 - protein, 62 aa, Glycine max
  Clone ID: PAT_MRT3847_15465C.1.pep
PPDASRNRRAYVRAKALILSILGAAIPEIKCKRRGTFPSRTLWLLETPQLVWSSSPAVQISR

SEQ ID NO: 192076 - protein, 78 aa, Glycine max
  Clone ID: PAT_MRT3847_15466C.1.pep
SCQVVVEFLHTLVVLGWDCSCILGRFVIRLELELLVLIGNYLFSSHLRCLSYVFPIELLDIGLALWALLTRSLFLVVS

SEQ ID NO: 192077 - protein, 51 aa, Glycine max
  unsure (1)..(51): unsure at all Xaa locations
  Clone ID: PAT_MRT3847_15467C.1.pep
GVFKLKLXLPEEYPXAAPKVTXLTXIYHPNIDKLGRXCLXILKDXWTQHFS

SEQ ID NO: 192078 - protein, 148 aa, Glycine max
  Clone ID: PAT_MRT3847_15468C.1.pep
FVNLTTFYHRRSIRSNHVLLCCLPLMAIFGRLLCPKPTVAILAPLSLRLPLGCYSSRPAAAGKAPNFAAQPGARAGLYVPGQHITCGLFRFLSLVSIIPLCCFSGLCVGYLFLNPVFVIPPRPSGYVPPPPPKEGGRHTVMTGKPSLE

SEQ ID NO: 192079 - protein, 118 aa, Glycine max
  unsure (1)..(118): unsure at all Xaa locations
  Clone ID: PAT_MRT3847_15469C.1.pep
TPEQARGCIGRVFVHALSPDIGSKLQPPRQVAVCFFPRPVSKXXLXXLGXLITFVSSTRSPCCSRSRPPLPLRPASQLPLXGAVLLDEPRRGLPEIEVAGHSRTLARLRHAILRHATV

SEQ ID NO: 192080 - protein, 86 aa, Glycine max
  Clone ID: PAT_MRT3847_1546C.1.pep
KNKNGGIKTVSQSRFPSAQVTYSLLATKHIHLTNTNKSHKFSRFQYIMLEASRHNQLRLKIKEFFMWNNSQTAAAHIGWKEDVAHE

SEQ ID NO: 192081 - protein, 116 aa, Glycine max
  Clone ID: PAT_MRT3847_15470C.1.pep
VGITFKQSPTSHQADWSSVSDEGGKVFYTHQLPRERVFIHRRIPETRRRNPPLGIKKKPFSRFPFLLEKQTRRAMAPWRKEAPLTRAVCFLTPWPGSMVIWTCLGRNSQNPLYHHP

SEQ ID NO: 192082 - protein, 489 aa, Glycine max
  Clone ID: PAT_MRT3847_15471C.1.pep
MIAIPYLTALTTYFSYGLLFAFGQFRDFFRKIFDWCSANNLQGYAPICLGLEDFYIRRLYLRIQDCFGRPIASAPDAWFDVVERHSNDNNKTLKRTDKISRCLNLGSYNYLGFAAADEYCTPRVVDTLKKYSPSTCSTRVDGGTTVLHLELEECVANFVGKPAAIVFGMGYVTNSAILPVLMGKGSLIISDSLNHNSIVNGARGSGATIRVFQHNEPSHLEEVLREQIAEGQPRTHRPWKKIMVIVEGIYSMEGELCKLPEVIAVCKKYKAYTYLDEAHSIGAVGKSGRGVCELLGVDTADVDIMMGTFTKSFGSCGGYIAGSKDLIQHLKYACPAHLYATSISPPAAQQIISSIRVILGEDGSNRGAQKLAQIRENSNFFRSELQKMGFEVLGDNDSPVMPIMLYNPAKIPAFSRECLKQNVAVVTVAFPATPLLLARARICISAAHSREDLIKALQVISRVGDLVGIKYFPAEPTKQQQGGKSVKFD

SEQ ID NO: 192083 - protein, 50 aa, Glycine max
  Clone ID: PAT_MRT3847_15472C.1.pep
SRCLHSFKLIPSFLPEMGQYWQIVKTKNAYMIFPCKEIRLPKCYADFLIL

SEQ ID NO: 192084 - protein, 318 aa, Glycine max
  Clone ID: PAT_MRT3847_15473C.1.pep
LTKVGEFNSQNIANIAGAFAAMQHSAPDLFSVLSERASDIIHTFQEQELAQLLWAFASLYEPADPIFDSLDIVFKDHSQLRGCTGERTSNNHEQIRVDRSGASNGSPVLTLTRDQLGTIAWSYAVFGQMDRSFFSHVWKTLSHYEERRISELYREDIMFASQVHLVNQCLKLEFPHLQLSLCGDLEDKVALARKTKRFNQKITSSFQKEVGRLLLSTGLEWVKEYVVDGYTLDAVIVDKKLALEIDGPTHFSRNTGVPLGHTMLKRRYITAAGWKVASVSSQEWEELQGAFEQVEYLSNLLKNHLDEVYDETTSTEVK

SEQ ID NO: 192085 - protein, 148 aa, Glycine max
  unsure (1)..(148): unsure at all Xaa locations
  Clone ID: PAT_MRT3847_15474C.1.pep
DALVGRVGPVIVKAAYGGGGRGMLKIEIEEEIVDAFNRAFSEALAALGDGXLFVEKFVERPLHMEVQIIGDHYGNLVHLLERDXSVHRRHQKVVELAPAPVLDPAIRQLMMDDALKLTRHVGYQNVXTVESLLDTKGHYYFMVVNARF

SEQ ID NO: 192086 - protein, 73 aa, Glycine max
  Clone ID: PAT_MRT3847_15475C.1.pep
YVVRVKLGSPNQLFFMVLDTSTDKAWVPCTGCTGCSFYYTYYSPNAFTTYGGAGTCYCPALCPCSRCPPLSLQ

SEQ ID NO: 192087 - protein, 40 aa, Glycine max
  Clone ID: PAT_MRT3847_15476C.1.pep
FLFPLLHFISAQVIIERDFIPHTDENIYLSLFLHPTLDEV

SEQ ID NO: 192088 - protein, 159 aa, Glycine max
  unsure (1)..(159): unsure at all Xaa locations
  Clone ID: PAT_MRT3847_15477C.1.pep
CGPPRAPVWCLXWWVXPCVPRPLPAXVXXXGWFCWVWSPPCPPGVLLGPGLVLWWWVVFLLWLFWCLCPVVXXXLSWXXGGFXLXGXFGGLGGSCXVWPPSXCGGPXXVXXKTKFFSFLVFXGXFVCGRXVVXLXFFLSLFPGSPFFGLWALGVXVCGS

SEQ ID NO: 192089 - protein, 44 aa, Glycine max
  Clone ID: PAT_MRT3847_15478C.1.pep
RNSRGDPRVRPLVRSDTKVTSYGSVSAFGRALHSVVDILFYLLF

SEQ ID NO: 192090 - protein, 161 aa, Glycine max
  unsure (1)..(161): unsure at all Xaa locations
  Clone ID: PAT_MRT3847_15479C.1.pep
MGCCHSKIEREETVSRCKARKRYMKQFVQARHAFSAAHVMYIRSLRATGSALFQFANAETTVLHHHLPSRPHPILPPPPPRTPTPMPPPPPPPMSPSSYTWTSDTTSSPALPQPPPPPPPXVASSAWDFWDPFMPVVASRLATEEEWEATTTTGSEVVVMA

SEQ ID NO: 192091 - protein, 41 aa, Glycine max
  Clone ID: PAT_MRT3847_1547C.1.pep
FAVCSAPSIGIFELMGSSQLGASEGCSSLTVSLMYFCCFTQ

SEQ ID NO: 192092 - protein, 218 aa, Glycine max
  unsure (1)..(218): unsure at all Xaa locations
  Clone ID: PAT_MRT3847_15480C.1.pep
LESPTRRPDDVKQTHRLPLPPITAXNHCPFSPTYSASTTPSAPRSPGRAENPSCPGSRWKKGQLLGRGTFGHVYLGFNSECGEMCAMKEVTLFSDDAKSRESAQQLGQEIALLSHLRHPNIVQYYGSETVDDRLYVYLEYVSGGSIYKLLQQYGQLGEIAIRNYTSAILLGXAYLHTKNTVHRDIKGANILVDPSGRIKIADFWMAKHISGCSGPFSF

SEQ ID NO: 192093 - protein, 190 aa, Glycine max
  Clone ID: PAT_MRT3847_15481C.1.pep
THGIIHKLICPHTHHQNGVVERKYRHIVELGLTLLKQASLPLKFWDFAFQTIVYLINRLPTTSLKFQVPCTVFNKLPNYNFLRNFGCSCYPFLRPYNKHKLDFRSHECLFLGYSTPHKGYKCLSPNGKLYVSKDVIFNELKYPYSDLFHLYPTLSLLLRVIFYLLLIFLLFHLLLINPLLLNMLELILLL

SEQ ID NO: 192094 - protein, 37 aa, Glycine max
  Clone ID: PAT_MRT3847_15482C.1.pep
SCIHYSDAYNPVPGLMEGVPSSGDYNGGFASKLMVSN

SEQ ID NO: 192095 - protein, 107 aa, Glycine max
  unsure (1)..(107): unsure at all Xaa locations
  Clone ID: PAT_MRT3847_15483C.1.pep
FWVGLPKAKTVNYSNDSRSKNLYFYLLKATKDLLTSYPXLEFTTRRCITLKNGKPLLMNKLFPSLIIHQCTPWHLKDRLYMYFQNNTCVIVNPKGKIKGSAITSPIG

SEQ ID NO: 192096 - protein, 76 aa, Glycine max
  Clone ID: PAT_MRT3847_15484C.1.pep
RAVRSARRTRVATTSRDIVAENELSVASNSLAQASVHHKYHLEEADEFADENVTRAPKNGCGIPWNWSLSSTLNRI

SEQ ID NO: 192097 - protein, 72 aa, Glycine max
  Clone ID: PAT_MRT3847_15485C.1.pep
SMIGSALHSCLAIYRTGTENGFQYFNSTRSISSLRNSMNPKHLRSNVWTHNPQSSRNQNLDSSNSVLHGLER

SEQ ID NO: 192098 - protein, 163 aa, Glycine max
  Clone ID: PAT_MRT3847_15486C.1.pep
LVTKRNFQSSVCRPTLYMQHQQTKLRNCPFFLLSLSPKKKNQLKNILGYLKYNSAHISALVSFYVSMLNDISIAFFVPYFSIWQPLCVLSNIEPCSPSVSQGKNCRATICIIANSISLLKLQQEILHFGFTFSLLTGMSSSRNDLQLCHFYCTAPSVLRLDLT

SEQ ID NO: 192099 - protein, 238 aa, Glycine max
  Clone ID: PAT_MRT3847_15487C.1.pep
MCTLEKRGSIFILTLTGDGEHRLNPTLLDSIQSSLRRVRQEATASSALVTTAHGKFFSNGYDIAWARSSDEVKERMILMDSLLRSVVSDLLTLPMPTIAAVTGHASAAGYTLALAHDHVLMRSDRGFLYMSELDINLVIPAWFVALLEAKIGSPAARRHVVLNAAKLTAKEALRLGVIDSAHDSAAETVEAALALAADLVKRGWVGHVYAQNRKVFLGRVIRAVEDTSERKSYTTSRL

SEQ ID NO: 192100 - protein, 72 aa, Glycine max
  Clone ID: PAT_MRT3847_15488C.1.pep
TCTHHKPNRIRFPYAELSRAAKNYPREPHNPRVCANLHTGPSGATVGSPRDHPCCSVPEWYPDLEVTISLST

SEQ ID NO: 192101 - protein, 323 aa, Glycine max
  Clone ID: PAT_MRT3847_15489C.1.pep
LSFSHPPTATKRHKTTQHPSSHFISTMDSSPNRTSCCNSPEFEFWMLQNPSFPQPNLLSADELFVDGFLLPLHLLPNKPHPPQASNFITPIHEPEPSPSITESTSTTTFSSSKRWKDIFKKSDKKNAETNNNEEKEKAKKKERKSASGASSAELNINIWPFSRSRSAGNAGTRPKLFAGAPPTRKVNSAPCSRSNSAGESKSRKWPSSPGRAGVHVGRSSPVWQVRRKNSNEPPQKPKARRSKVTAGGGTARVLNLNVPMCIGYRHHLSCRSDENSAAAVTNGNSNNNSTTNNNNSGGNDGGSGGNIFNLRNLFTKKCAVTSH

SEQ ID NO: 192102 - protein, 117 aa, Glycine max
  unsure (1)..(117): unsure at all Xaa locations
  Clone ID: PAT_MRT3847_1548C.1.pep
ITLIQNSAIRNLLRVAVWKKGXTMVKIEMSGNASIKPSDRASLLQVFLTHTIRSKHFDARKWAKSAPHSWESISTIEESGPNNGCEMWRCECSHXTSWHSSLLIDNPKQSTEDDIAL

SEQ ID NO: 192103 - protein, 36 aa, Glycine max
  Clone ID: PAT_MRT3847_15490C.1.pep
DFHIQWIPLPRGTLHILLSPLLYSFSKSNQFFLEND

SEQ ID NO: 192104 - protein, 218 aa, Glycine max
  unsure (1)..(218): unsure at all Xaa locations
  Clone ID: PAT_MRT3847_15491C.1.pep
PRVRKKPIALMEDGXGGVFVRGLEEEVVCTANEIYKILEKGSAKRRTAETLLNKQSSRSHSIFSITIHIKECTPEGEEMIKCGKLNLVDLAGSENISRSGAREGRAREAGEINKSLLTLGRVINALVDHSGHVPYRDSKLTRLLRDSLGGKTKTCIVATISPSIHCLEETLSTLDYAHRAKNIKNKPEINQKMVKSALIKDLYSEIDRLKQEVYAARE

SEQ ID NO: 192105 - protein, 113 aa, Glycine max
  Clone ID: PAT_MRT3847_15492C.1.pep
QDTVQFKAEITRTNYTILLYFFSIYDFIIAFPLITLYAIYNTFIIYFTSKKCIVKVSPRFRTVQKILLQAVGSTHVYCAAATQFRCWISPTLKFHDEFPSLNVDYKFGGSLKL

SEQ ID NO: 192106 - protein, 185 aa, Glycine max
  Clone ID: PAT_MRT3847_15493C.1.pep
MADNIEELSHQQIQPNVEDKWSWKINQSGYYSTKSGYDLIWGEHMAAEQNSDFMDLWKLKIPAKAQVFAWRCIRDRLPTKMNLTRRQVVVNDLMCPLCGEVEEEAAHLFFNCRNILPLWWESLSWMGLTTAVPQSPRDHYLQHVPDFADRKKLISWKCWWIAMTWTTWKLRNRIVFQNAIFADAW

SEQ ID NO: 192107 - protein, 143 aa, Glycine max
  unsure (1)..(143): unsure at all Xaa locations
  Clone ID: PAT_MRT3847_15494C.1.pep
KDQIPAVDKLCSTKVHKLAKLMNLRQSSSADLKLLTRGKLSEGEHIPVSNISAGENHVISNTLXSQEETLSCSARDFXTAMVSKNSLPHATAMRVGAIESIIDSVASADCIIVGAMLTRDTYHTNPETAFRRILAAPFTGGRP

SEQ ID NO: 192108 - protein, 180 aa, Glycine max
  Clone ID: PAT_MRT3847_15495C.1.pep
MATNPIEAGNGDAAPNPNATTKSSVYLQDSEELKRVFSRFDANGDGKISVSELDNVLRSLGSGVPPEELQRVMEDLDTDHDGFINLSEFAAFCRSDTADGGDTELHDAFNLYDQDKNGLISATELCQVLNRLGMKCSVEECHNMIKSVDSDGDGNVNFPEFKRMMSNNRENASNAEEKTD

SEQ ID NO: 192109 - protein, 74 aa, Glycine max
  Clone ID: PAT_MRT3847_15496C.1.pep
VLGCFLGDWSGLYASASVFGVCFCFVSWAARDFRYARLFIQLTRGRDYVDTHMPNANHVSDQIFNYLLCVFRLW

SEQ ID NO: 192110 - protein, 180 aa, Glycine max
  Clone ID: PAT_MRT3847_15497C.1.pep
MATNPIEAGNGDAAPNPNATTKPSVYLQDTEELKRVFSRFDANCDGKISVTELDNVLRSLGSGVPPEDIQRVMDDLDTDHDGFINLSEFAAFCRSDTADGGDAELHDAFNLYDHDKNGHISATELCQVLNRLGMKCSVEECHNMIKSVDSDGDGNVNFPEFKRMMSNNRENASNGEEKTD

SEQ ID NO: 192111 - protein, 187 aa, Glycine max
  Clone ID: PAT_MRT3847_15498C.1.pep
MKTRTSKKISAKWVPIFSVSSFLIGMLITTRMWEPPESNGVLLSNHRHEQELQVVSGDCATKKPVQDEDVMSKVYKTHEAIQSLDKQVSMLQMELAAARSTREPEISDGSNNTLASGVTTEGPPRKKVFVVIGINTAFSSRKRRDSVRETWMPQGEQLLQLEREKGIVIRFMIGHSATSNSILDRAI

SEQ ID NO: 192112 - protein, 126 aa, Glycine max
  Clone ID: PAT_MRT3847_15499C.1.pep
APPLSCLFVHPLVSSGVSLSAPVFVFLRFCVSKPLSLWCHLCPCLRLVVWPAPFRGAASHPLVIEAFSCSPSGGVPTFVSACEFTVLQSAPLVKLVFPFEFVPWLSGARTAIRVPLFKREGVHNGP

SEQ ID NO: 192113 - protein, 112 aa, Glycine max
  unsure (1)..(112): unsure at all Xaa locations
  Clone ID: PAT_MRT3847_1549C.1.pep
SLFVIKGEHTTTPLNTESSERRFXQVAIDLVRGGIIRDKTREWITLIQKSPIXNLLRVTARKNGXXMRNIVMPGTAALKKSDWAXVLQVIVTNIDWTEDVDACHLTTSKRHC

SEQ ID NO: 192114 - protein, 48 aa, Glycine max
  Clone ID: PAT_MRT3847_154C.1.pep
PFLKGEVFTVSIIRGSEYYACPWHCEFGCIWMSQTQSVTPIICVMLYV

SEQ ID NO: 192115 - protein, 99 aa, Glycine max
  Clone ID: PAT_MRT3847_15500C.1.pep
GMNYNTLTGNGAATPAGLISDYIAHAFALYVAGSVGANIYGGHINHAVTYGAFVGGNITFLRGIDYVIGHLLGCIVDCLLLAFGTDFVRPLLPIFILVD

SEQ ID NO: 192116 - protein, 201 aa, Glycine max
  Clone ID: PAT_MRT3847_15501C.1.pep
MATLPLLRPCCFLPTPTLKPSLTRPTPFLPLKSKKNPQNGAVGTRMSNTATPPPTERLISIASYALPFFNSLQYGRYLLAQNPTLAVLFDPIVPLLAFYRSIPYSSFVAFFALYLGIVRNPSFPRYVRFNAMQAVTLDVLLVLPLLFHRIFSPARGGPILVWSSNAIFIFSLICFVYSVASCVLGRTPHLPFVADAASRQI

SEQ ID NO: 192117 - protein, 45 aa, Glycine max
  Clone ID: PAT_MRT3847_15502C.1.pep
LEHSSIFKFFHTNQNQKSKYNYKLSTNCRSTYIKLPLRKVILLVI

SEQ ID NO: 192118 - protein, 61 aa, Glycine max
  Clone ID: PAT_MRT3847_15503C.1.pep
LLYSLRFSAGMGGRCMSNRQCPVQSRIWYTSALDDGALTLTRSTRICLGPSSTALLPRSPS

SEQ ID NO: 192119 - protein, 119 aa, Glycine max
  Clone ID: PAT_MRT3847_15504C.1.pep
EVCGKGAPDASMLRSLKTLTMVIQETLRLYSPAAFVVRTALQDVNLKGILIPKGMNIQIPISVLQQDPQLWGPDAHKFNPERFSNGVFGACKVLQAYIPFRIGARVCVGTTLSPDRTEG

SEQ ID NO: 192120 - protein, 177 aa, Glycine max
  Clone ID: PAT_MRT3847_15505C.1.pep
MKSRPLHIAMYPWLAMGHQIAFLHLCNKLAIRGHKISFITPPKAQAKLEPFNLHPNSITFVTINVPHVEGLPPDAQTTADVTYPLQPQIMTAMDLTKDDIETLLTGLKPDLVFYDFTHWMPALAKRLGIKAVHYCTASSVMVGYTLTPSRFHQGTDLMESDLMEPPEGTLTHQSSFN

SEQ ID NO: 192121 - protein, 86 aa, Glycine max
  unsure (1)..(86): unsure at all Xaa locations
  Clone ID: PAT_MRT3847_15506C.1.pep
RLLCSSPVPWSNQTCRRIRRLLSWRYRQSFYQPGIQXLPLPVVVFEVVMRPRFADGVSSSRPRGRCESAPVYDRPHNIAELNAAGD

SEQ ID NO: 192122 - protein, 122 aa, Glycine max
  unsure (1)..(122): unsure at all Xaa locations
  Clone ID: PAT_MRT3847_15507C.1.pep
MNLFWVVCWVVSCLGVSSVTPFVAAANLSSSRPAFVHIGAIFSMDSVLGKVAKITLEEAVKDVNADKTILHGTQLVLSMQNSNXVGFVGHVQAXRFMETDVIAIIRPQSSVTXHIISHGANE

SEQ ID NO: 192123 - protein, 66 aa, Glycine max
  Clone ID: PAT_MRT3847_15508C.1.pep
SFLPSYLFTPLTMASEAVKKGAFVNVPGTNKTHAKPEEQIVMKENQLATIDLPYLGSYYNHKRLFY

SEQ ID NO: 192124 - protein, 53 aa, Glycine max
  unsure (1)..(53): unsure at all Xaa locations
  Clone ID: PAT_MRT3847_15509C.1.pep
GSLXXXVAFDSNTCEDGLIMMDQIYKKIQSLKYLNFFNCATFVNLYLPQALFI

SEQ ID NO: 192125 - protein, 171 aa, Glycine max
  Clone ID: PAT_MRT3847_1550C.1.pep
MVPVLSWFLCLGCIPCSMCVKARLQIPQLKVLQTTECVLRNLIALEQCHYSDQPFICNYVSLIDSLIHTQEDVELLVDKEIIVHELGCHNELATMINGLCKHVVVNCNYYGKTSRKLNDHYNCCWKHYMGMLRSVYFRDPWRLSSTVVGVVIFLFAIVNFLRVTNLYHPKD

SEQ ID NO: 192126 - protein, 57 aa, Glycine max
  Clone ID: PAT_MRT3847_15510C.1.pep
TEVVLKAKKGGITLHNLMYHIFTGNLSNYYNAKIDSKLYYSILTSDLLNTMLESDLK

SEQ ID NO: 192127 - protein, 235 aa, Glycine max
  Clone ID: PAT_MRT3847_15511C.1.pep
WLVTERAKAQWIKYKSMVESARSKTENTPEGDSSVYQNATVPDCALEDRVMDTVGVICIDNEGHVASGASSGGIALKVSGRIGLAAMYGSGCWASSKGPFGAPFMAGCCVSGAGEHLMKGFAARECCVSLSLSQSGAASACTKILRSVVEDGRQCGTDSSAGILVVQSDASLTDQGKSSRLKAVEIAAAYTSLSFGVGYFGSSMERPKVSILRSTKQQSKTAIDQFGARIDLSNG

SEQ ID NO: 192128 - protein, 81 aa, Glycine max
  Clone ID: PAT_MRT3847_15512C.1.pep
GCERRQRGDDWQKWISIRGGIGVPSNKSWESWWNEEQEHLQHTGFLGRICEIILDLRFFVYQYGIVYHLNVARGDKSILVY

SEQ ID NO: 192129 - protein, 83 aa, Glycine max
  Clone ID: PAT_MRT3847_15513C.1.pep
PIPSPLSDLSLRSVRALFLCFSFPLSGASTLRLLVHLRCFRPEAYPLTPALQRLCCDMAPQMTASICITPAHSFPPSPTPASA

SEQ ID NO: 192130 - protein, 53 aa, Glycine max
  Clone ID: PAT_MRT3847_15514C.1.pep
DEPIITPASSPTICLAPYGKAPDQKFGIIKGTLTTTHSYTGDQRLLNTSHRDL

SEQ ID NO: 192131 - protein, 61 aa, Glycine max
  Clone ID: PAT_MRT3847_15515C.1.pep
RIMSSFHFSSYSLSLKTQSSMHFEISIFIYHIFLHIPSNIYIYIYTYIYIYIYILTTKHRR

SEQ ID NO: 192132 - protein, 139 aa, Glycine max
  Clone ID: PAT_MRT3847_15516C.1.pep
MLCLVNKERVQRGLKPLGPDSRLDNAAQRQSNGQANMGQMTHTGDDGSSPSQRIEQAGYEWQSVAENVAFGYENEEICMEKWMNSPGHRANILNNKVTHFGSAVAYKGSTPYYTQDFGGDGKEHNFPVCPSGGAGNGGA

SEQ ID NO: 192133 - protein, 57 aa, Glycine max
  Clone ID: PAT_MRT3847_15517C.1.pep
HVPVRNSRLDLRITPHIRTIVRQLTEHDRLGVTWFNVYNTVFTIYMTSSYSIILLSN

SEQ ID NO: 192134 - protein, 78 aa, Glycine max
  unsure (1)..(78): unsure at all Xaa locations
  Clone ID: PAT_MRT3847_15518C.1.pep
IVFLTKVDPFPEDXRGVFFGVKNKILSFNPHNLMLTGIFXKCRSLKNLVEKCPFAFVKKKVKFYSFKKRALKCEIRVF

SEQ ID NO: 192135 - protein, 69 aa, Glycine max
  unsure (1)..(69): unsure at all Xaa locations
  Clone ID: PAT_MRT3847_15519C.1.pep
MTTCDHHTHKAPYYCDYIMWSAVSIXISLTLSLHLIPSICRKMLVLLKVNTIAAALCHRAAVGANRLYL

SEQ ID NO: 192136 - protein, 90 aa, Glycine max
  Clone ID: PAT_MRT3847_1551C.1.pep
MEESINRGEYQPNLAKQSSLRLGGSFKSTLSGRSNPRNSPSFRRLNSVRTPRKDLHIGDLIALEFQSNHEGAALLLITLYADLGYFCGCF

SEQ ID NO: 192137 - protein, 190 aa, Glycine max
  unsure (1)..(190): unsure at all Xaa locations
  Clone ID: PAT_MRT3847_15520C.1.pep
GKNSSGAANDFSAYGTGSNVASSDFTNYGKGGAGPKNTFMNYGVNMNNPTVTFKSYAVRTHASTESFANYRDQANIADDSFQSYAKNTKERTKLDFKNYGNSFNPGSDTFKGYAKGAEGDHKVGFTTYNVNTNATFKDYAKQGVSFASYNVSFSSSSESKTIRRSFSPFLIEINWFFRESXFKEGLLCPL

SEQ ID NO: 192138 - protein, 332 aa, Glycine max
  Clone ID: PAT_MRT3847_15521C.1.pep
MVRMRSNSQRVTLGVAMFVVLAMVLRRKPDALISVLPTLRESTKYQGLDKLPVIVWMIAQAAVGDLSVGLYAWARNLLPIVIGKSGNPQSRDLVLQLVEKILSTPKARPVLVNSAVRKGERLIPSSAFEILVRVTFPPSSTRVKATERFEAIYPTLKEVALGGSAGSKAMKQVALQIFSFAIKAAGENNPELSKEAAGIFIWCLSQNTECYKQWEKVYQDNIEASVSVLEKLSDDWKELSTKLSPHDPLRDTIKNLKQKNEKVLDSETDAARHAHFKDADKYCKIILRRVSRSHGCMTWLTFTLALAVEPISLFCTWLADWTYFCWATTYHI

SEQ ID NO: 192139 - protein, 221 aa, Glycine max
  unsure (1)..(221): unsure at all Xaa locations
  Clone ID: PAT_MRT3847_15522C.1.pep
MASELQLPPGFRFHPTDQELVLHYLCRKCASQPIAVPIIAEIDLYKYDPWDLPGLASYGEKEWYFFSPRDRKYPNGSXPNRAAGTGXLWKATGADKPIGHPKPVGIKKALVFYAGKAPKGDKSNWIMHEYRLXADVDRSVRKKNTXKGLDDWXLLCRIYNKKGTIEKHGSNRRSTLYSRNMRSSASEPNGRVGEKPRVSFNSCMPPNTRTASRRSSRAIIR

SEQ ID NO: 192140 - protein, 66 aa, Glycine max
  Clone ID: PAT_MRT3847_15523C.1.pep
RAGAAGAVRLGFEVIRSTKRPNCFLTHSLLLGKIHRETRNVTSHTFYLINLAYNFVNPNNLIEMCL

SEQ ID NO: 192141 - protein, 300 aa, Glycine max
  Clone ID: PAT_MRT3847_15524C.1.pep
MASELQLPPGFRFHPTDQELVLHYLCRKCASQPIAVPIIAEIDLYKYDPWDLPGLASYGEKEWYFFSPRDRKYPNGSRPNRAAGTGYWKATGADKPIGHPKPVGIKKALVFYAGKAPKGDKSNWIMHEYRLADVDRSVRKKNSLRLDDWVLCRIYNKKGTIEKFQPSSDVVVSRKMESSEIEDRKPEILKSGGGCLLPPVPPPQAKAAVKTDYMYFDPSDSIPKLHTDSSCSEHVVSPEFASEVQSEPKWKEWEKSLEFPFNYVDATLNNSNSFTTQFQGNNQMMSPLQDMFMYWPNKPF

SEQ ID NO: 192142 - protein, 54 aa, Glycine max
  unsure (1)..(54): unsure at all Xaa locations
  Clone ID: PAT_MRT3847_15525C.1.pep
XXXXLFQAVRXKDXWEXHXRRXIRXGATKSXASXRRLXXGXLKKFYXXXXXXNH

SEQ ID NO: 192143 - protein, 207 aa, Glycine max
  unsure (1)..(207): unsure at all Xaa locations
  Clone ID: PAT_MRT3847_15526C.1.pep
LLLCYFTGLATYGEKEWYFFSPRDRKYPNGSRPNRAAGTGYWKATGADKPIGQPKPVGIKKALVFYAGKAPKGDKSNWIMHEYRLADVDRSVRKKNTLRLDDWVLCRIYNKKGTIEKLQPSSDLRPVGFNPEAAHGLXSCSEQVVSPEFASEVQSEPKWNEWEKSLEFPFNYVDATLNNSFMAQFQGNNQMLSPLQDMFMYWPNKSF

SEQ ID NO: 192144 - protein, 173 aa, Glycine max
  unsure (1)..(173): unsure at all Xaa locations
  Clone ID: PAT_MRT3847_15527C.1.pep
MASELELPPGFRFHPTDEELVLHYLCRKCASQPIAVPIIAEIDLYKYDPWDLPGLATYGEKEWYFFSPRDRKYPNGSRPNRAAGTGYWKATGADKPIGQPKPVGIKKALVFYAGKAPKGDKXSNWIMHEYRLADVDRSVRKKNTLRLDDWVLCRIYNKKGTIEKLQPSKRCCS

SEQ ID NO: 192145 - protein, 50 aa, Glycine max
  Clone ID: PAT_MRT3847_15528C.1.pep
IPSRLCGVLSISFPVMVANNSRSRMSMYKPQLRYTCLSSILLIYGIKAPN

SEQ ID NO: 192146 - protein, 277 aa, Glycine max
  Clone ID: PAT_MRT3847_15529C.1.pep
MVYGGAMCAHAHKFLLSPRALNLCRQNTTRLQQFQTLTPLHSQSLPFNFKNSATPFKPTLIRLSALSNDGSGGNGPHGGAGGGGGSDGPNSGGAGDGGGKWSFLSWYLALLGKYPVAVKALTSSILNLIGDLICQLVIDQVPSLDFKRTFVFTFLGFALVGPTLHFWYLYLSKLVTLPGASGALLRLVLDQFLFSPIFIGVFLSTLVTLEGNPSRAVPKLKQEWFSAVLANWKLWIPFQFLNFRFVPQQFQVLAANVIALVWNVILSFMAHKEVLPK

SEQ ID NO: 192147 - protein, 57 aa, Glycine max
  Clone ID: PAT_MRT3847_1552C.1.pep
DVSAFHFVDLGATIKKIYVASTVSKLDLIKSRPKKKKKKKKKKKKKKKKKKNYGRVG

SEQ ID NO: 192148 - protein, 88 aa, Glycine max
  Clone ID: PAT_MRT3847_15530C.1.pep
GDYQFFRTKNTKVTRGNPLCQVPTVGKHTSYYYVWIYMHRNEWIFQGNGTLHSYLILMPEMAPCLGKCNCLFRNGTIQRWLHYLLGKL

SEQ ID NO: 192149 - protein, 155 aa, Glycine max
  Clone ID: PAT_MRT3847_15531C.1.pep
FFFFFFFFFFFFFFFFFFFFFFFFLGKGGAGKNRPATGAKTNWENKKKKKKGGPKFLKLKQNLWKPPKKGGPWGRGKKKHPNGILKQKTNKGKVKKPYEGRHILHILGGRMNKKADKGPPELNFLPWRDPQLGGFFTPKQNKRGKKENNVQKYRS

SEQ ID NO: 192150 - protein, 154 aa, Glycine max
  Clone ID: PAT_MRT3847_15532C.1.pep
MAEDPISSFCNALAAFCGHLHSSSDALKQSIDRRPIPLDSASSTFLQCLNRRVSTASADLDMLDSMSFGTVSFEELLGHCNELYKKNHSDLLQLQDRLQSYGYSAVPDIEEADEDEDIQRQDPEDKLDSPSSFYGSLSVADSSFKSFEEDALYP

SEQ ID NO: 192151 - protein, 143 aa, Glycine max
  Clone ID: PAT_MRT3847_15533C.1.pep
MDATRILAQGVFVFLVITCVGAESEPRTILVGDSQGWQAGTNYTQWAIQNSPFHINDTLLFKYPGNSTTLAQSVYLLPNQWSYITCEFRGAKLLGNATEGDGEGFKVELNQLKPYYFASAEGNFYDCIAGLSKFIAVPSTSSG

SEQ ID NO: 192152 - protein, 80 aa, Glycine max
  unsure (1)..(80): unsure at all Xaa locations
  Clone ID: PAT_MRT3847_15534C.1.pep
MTGWQDYLDNPGLIHAQRHSVPIRPPKVSRSGHTEXYRLARGTLDEQTDPMYPRGLVDPLWLADDPDAAAHPDAKELKNG

SEQ ID NO: 192153 - protein, 79 aa, Glycine max
  unsure (1)..(79): unsure at all Xaa locations
  Clone ID: PAT_MRT3847_15535C.1.pep
LRXXXNPIFAFAHNNSSFRIAANVTFHFYPSSSXKXWRTQHLXWPXMXSXIXFLELKAXRTYRYXXXKIXEKXXXXXVE

SEQ ID NO: 192154 - protein, 47 aa, Glycine max
  Clone ID: PAT_MRT3847_15536C.1.pep
LTIQYYYLRYPSWCLMLSFTASSSICMVSFRGSIGKRYFLIELGNSI

SEQ ID NO: 192155 - protein, 80 aa, Glycine max
  Clone ID: PAT_MRT3847_15537C.1.pep
VISNWTAKGVSCRVTRLLKPDYSSDHILSYLLASQSLSKHKSIRSKLIKNRWNSFNYRYRLVMLHESLNNGIISHTHSDT

SEQ ID NO: 192156 - protein, 31 aa, Glycine max
  Clone ID: PAT_MRT3847_15538C.1.pep
GRLSLRIILPPYYDQSPPPPSPTSHPPYYYK

SEQ ID NO: 192157 - protein, 57 aa, Glycine max
  Clone ID: PAT_MRT3847_15539C.1.pep
DMFPCPMDMKNGRAFCSHTRQSFIYSHDDVHPLFSELQPVHSVTDGCAWLPWPCMIY

SEQ ID NO: 192158 - protein, 89 aa, Glycine max
  Clone ID: PAT_MRT3847_1553C.1.pep
GKTMGKHQKKNNLGGKMEGGGGKPKGLKFHPYIGENHHKEQPPIPIFLKGAKKGKKKKGRALKGFGPKAIWGGAPYSHFKGVQVFKNIY

SEQ ID NO: 192159 - protein, 186 aa, Glycine max
  Clone ID: PAT_MRT3847_15540C.1.pep
MEVRSNPASDNSSDHLRPPAVSSKQPLPSPTAVDTSAVSQRLQKELMALMMSGGDLGVSAFPDGESIFTWIGTIEGGKGTQYEGLSYKLSLRFPLDYPFKPPQVKFETMCFHPNVDQFGNICLDILQDKWSSAYDCRTILLSIQSLLEEPNLESPLNSYAAALWNDKEDYRRMVHKQYFSGEALES

SEQ ID NO: 192160 - protein, 95 aa, Glycine max
  Clone ID: PAT_MRT3847_15541C.1.pep
GRPILLFMQLRVRTTKRFIVGLDYLNDPAFLGTSGPSSRRVWFQAKGSSCTPLLPSRVTEDSKWSQSIEQGTKDEERDGSHLNFHCKEQILESRI

SEQ ID NO: 192161 - protein, 86 aa, Glycine max
  Clone ID: PAT_MRT3847_15542C.1.pep
LLALDLAKACSFQPSFLILHLKHCRRSENVVRVIKCTSVEVFERREPQALNICSVVRKAWKTFHSNMKNLIVKGPSTKRQAHSSWT

SEQ ID NO: 192162 - protein, 64 aa, Glycine max
  Clone ID: PAT_MRT3847_15543C.1.pep
HKNILSLDVREFLDWSKAPLTQRKILSIFQSFAFPHLNWICAFACLETINPYSNQSKSQPSFFD

SEQ ID NO: 192163 - protein, 106 aa, Glycine max
  unsure (1)..(106): unsure at all Xaa locations
  Clone ID: PAT_MRT3847_15544C.1.pep
ELVSSTNKXDHDDNLVLANTHEFSDGNFPADSWLPIYVNCLYPVSQSPSEAVVVNVTCGSGRGGPPTTARIIPEANNXPSDINKKXISTTLGKGQKSALPTIADPS

SEQ ID NO: 192164 - protein, 82 aa, Glycine max
  unsure (1)..(82): unsure at all Xaa locations
  Clone ID: PAT_MRT3847_15545C.1.pep
RISEIKEAFSLFDKDLYRCITTNELLTVIPSLYHNPSEAXLHDIMNDAXSYRNVTIYFPXFLNLMSFTIKYTDSDYNLNEAF

SEQ ID NO: 192165 - protein, 72 aa, Glycine max
  Clone ID: PAT_MRT3847_15546C.1.pep
GQASNHSFYGSGVIRPVGSEWGATKGSQRSNWGSQCQDRGCSKPGNACFRAWERTKCGFSTLSVGFPLSLSL

SEQ ID NO: 192166 - protein, 80 aa, Glycine max
  Clone ID: PAT_MRT3847_15547C.1.pep
IQEALIGVANVRNATKKVRVLIQVQNRYEGQILQGIPFLQFEICGSKTAYLFRVIVEKILVWKMKPVLNGVFVWSRSGLV

SEQ ID NO: 192167 - protein, 79 aa, Glycine max
  Clone ID: PAT_MRT3847_15548C.1.pep
QNNKTASGNILFEVSKMGVFNLIKKKATNHPMGKKKNLGQKWVKKKPISNGPKPPQFLKIEGPQKTEELKTPNYGEKQT

SEQ ID NO: 192168 - protein, 124 aa, Glycine max
  unsure (1)..(124): unsure at all Xaa locations
  Clone ID: PAT_MRT3847_15549C.1.pep
NKXGQQPKETXXNKGANTTVFGLLHHYIXLKILKXNRKLNQLLDTLDFNQLFIFTKSLRRAPNLYKLLMECNFPSICIHSNMSHXQTLKHYKHFKEGHTTILIATHXLRRWIYIQHINIRINYD

SEQ ID NO: 192169 - protein, 76 aa, Glycine max
  Clone ID: PAT_MRT3847_1554C.1.pep
ALTAMLCYSCLCPIRYMQKVSSHVLTTPCNITQRLRWLYIVRLHHNSMAIERCPRRRYKWQHSFSGFRSGNNMVIC

SEQ ID NO: 192170 - protein, 36 aa, Glycine max
  Clone ID: PAT_MRT3847_15550C.1.pep
KLMNTINQQISSSVLVPRLQNLDCKDSTFWPCSKAS

SEQ ID NO: 192171 - protein, 110 aa, Glycine max
  unsure (1)..(110): unsure at all Xaa locations
  Clone ID: PAT_MRT3847_15551C.1.pep
MLQHQIVQSPAMLGLANPNSPSIPNPTPPKLPPTQTHHPQDRNSSTPSSALLSLLPPHLRAQALLAQMASLASKLFEVSPNRSLWVTAFRGSLPTFLSXHSSTPLDTSPF

SEQ ID NO: 192172 - protein, 85 aa, Glycine max
  Clone ID: PAT_MRT3847_15552C.1.pep
FKIQTLILITTIICSGYKYTQFCDSPVISFIPAYFTKLHSKSYQYGVGFCGILGYIGMMSFSVIRQKVQIMSLIWLSLGRGCGLE

SEQ ID NO: 192173 - protein, 253 aa, Glycine max
  Clone ID: PAT_MRT3847_15553C.1.pep
MGRHSSSNHSPSSSRRHRSHRSSVSPPLRDKHEHSGCSTAKPVRYGSPDSPLRSPSPSLRTKRLKKGQSEREREPRENERNHGDGSRGRGSEREAGERREKKRTENDESNGRSNKSEKRTEYEDGGGRSSKSDKKMEYEDGGGRSSKSEKRMENDDGGGRSNKSLRSRHERSPERDRNGRSRGRSQSPPRHHASAADAKPRDEMTNAREAEQMDDEDDSIRKMKAAEEALEEKQKQKPSFELSGKLAGETNGV

SEQ ID NO: 192174 - protein, 151 aa, Glycine max
  Clone ID: PAT_MRT3847_15554C.1.pep
GIRHEASLSLNNNNNTNSSFLRLREDDRRGEAGGSGTVTTATTSDHGDKENVPPPQKGSKNKIPPVVPTSFKKKKRSKRKPKRVPLADITSLFDNSATTTTTTTTTTVRPRQESQQQQQQQQQQQQQQQSGVSPLPRRSPRTSKTLRMGFR

SEQ ID NO: 192175 - protein, 125 aa, Glycine max
  Clone ID: PAT_MRT3847_15555C.1.pep
PWFVYFAEVSDKASHKAFSLEDKQKLDRQLHDMALAIERLESSTQKLLMEIDSQSTEIERLFEENSNLSNSYQEAVGAAARWENQVTISIRGLAINIIYGYWVKPLTSHLYDQNLLDFALKNLTI

SEQ ID NO: 192176 - protein, 71 aa, Glycine max
  Clone ID: PAT_MRT3847_15556C.1.pep
EKKRQKGLRAKKRCKNVFNLSATKSRVLPLNTFPGLQFSKKIFSIVSPYNPLPILLAFCVRPNRIYLNPPK

SEQ ID NO: 192177 - protein, 52 aa, Glycine max
  unsure (1)..(52): unsure at all Xaa locations
  Clone ID: PAT_MRT3847_15557C.1.pep
PPVKFGPAVVSWTWTNPWIXWAGPFIGGEITGLVYKVVFISHTQEKFPPAVY

SEQ ID NO: 192178 - protein, 57 aa, Glycine max
  Clone ID: PAT_MRT3847_15558C.1.pep
AASVGFKIAGSLITTGGSKALIETSRLLGLYGYVCNLSNDFPLCLRGRSMFGAGETA

SEQ ID NO: 192179 - protein, 108 aa, Glycine max
  unsure (1)..(108): unsure at all Xaa locations
  Clone ID: PAT_MRT3847_15559C.1.pep
KKPPRTWKGLRVTVNLTVHNRXAKVTVVRYAAALVIKALXESERYRWKTNIIMHNGYITLDDIIEIAMVMRSMSMDNDLICSIKEILVIMRSVACSDDGKDPVDVHRE

SEQ ID NO: 192180 - protein, 24 aa, Glycine max
  Clone ID: PAT_MRT3847_1555C.1.pep
SLCSFGESGRKTGDVALLFLIIIA

SEQ ID NO: 192181 - protein, 97 aa, Glycine max
  Clone ID: PAT_MRT3847_15560C.1.pep
CPQLLLLLISCLLRWLWDHSITLTTCSNRSKKSLTIIIIILITFLLRRSYFSLRSRSNKPIMSRNCPFTSNILITRSVGVLVHLVDFQFCSSTPLCF

SEQ ID NO: 192182 - protein, 97 aa, Glycine max
  Clone ID: PAT_MRT3847_15561C.1.pep
FKIKGGGQLGNCPPGPGLFKLGPKKGFFLVGYQSPLTPGELKKPFPGVGYFLLGQTAILRGGNCPLLKKKAFFLFWGPGKNNQNLKGLPQGGVFVIG

SEQ ID NO: 192183 - protein, 112 aa, Glycine max
  Clone ID: PAT_MRT3847_15562C.1.pep
KGPTRSPKFFTGEAKLKIKGGGQLGNWPPGPGFYKLGPKKGFFLVGYQSSLSPGVLKKPFPGGGYFLLGQTAILRGGNCPFLKKKAFFLFGGPGENNQNLKGLPQGGFFVIG

SEQ ID NO: 192184 - protein, 59 aa, Glycine max
  Clone ID: PAT_MRT3847_15563C.1.pep
TCGIIQGRLFRVCNHLGGVHTHYASRHSNAIAALLFCSLTFQHKKQIHQEELVKKNRRQ

SEQ ID NO: 192185 - protein, 143 aa, Glycine max
  Clone ID: PAT_MRT3847_15564C.1.pep
PRGAGVSPVFPPLFCSFFMQTGPPPRFAVGIPWWALSSGFRNFPFKPPPPGFQVWPFCCVFSFIPKLFNVKSPLPVLDWAPLVFWFFLGGRKRWQNSPPPFLPFFSRFLLVFFWAGPPPPVFGGLILGFPFFFFAFAFLRVFL

SEQ ID NO: 192186 - protein, 48 aa, Glycine max
  Clone ID: PAT_MRT3847_15565C.1.pep
HTHTLMYFQAQILMLPLPRRACWFGRQHLLHSSHHSFLVHDPTALNST

SEQ ID NO: 192187 - protein, 145 aa, Glycine max
  unsure (1)..(145): unsure at all Xaa locations
  Clone ID: PAT_MRT3847_15566C.1.pep
YGCEKTTEGDINKIRDILPHRFPFLLVDRVIEHNPGVSAVAIKNVTINDNFFPGHFPERPIMPGVLMVXAIAQVGGLVMLQPEVGGSRENFFFAGIDKVRFXKPVIAGDTLVMRMTLIKLQKRYGIAKMEGKAYVGGEVVCDDTR

SEQ ID NO: 192188 - protein, 43 aa, Glycine max
  Clone ID: PAT_MRT3847_15567C.1.pep
MQELASLGIAGSDGSEKPKSAANVPGMSNNRDGAADAIYRYAF

SEQ ID NO: 192189 - protein, 82 aa, Glycine max
  unsure (1)..(82): unsure at all Xaa locations
  Clone ID: PAT_MRT3847_15568C.1.pep
FQKGCTMKWVDGQWRKYGKAFLEKWVFGSYNGRNYVYLDKVSLLLGFGLWGLGFLFSLWTSHGHXYGDHESKEVPACVSNWN

SEQ ID NO: 192190 - protein, 249 aa, Glycine max
  Clone ID: PAT_MRT3847_15569C.1.pep
HASGGNGPLTEKIGAGSNSSYLIHPFSGDYEQSSISGTDYIPVVHGDKFRGNDTAYIDGQKTHDVATWSTVLQSTAKLHNDPSLASSPSIPSSSMGDVLEQEHTIFSDLLMSKSGLTEVAESSQSLQSNWQIPFEDNSGGMPMLTQTQTFGLQFRSDYGTGLLGNETRNACSESAAILYSFNGEPKEQPMQQNYLQELEDGQSQHALKSNSANKVPDEETINYGLTVKRTLLDKDESLKKVDSFSSVDY

SEQ ID NO: 192191 - protein, 51 aa, Glycine max
  unsure (1)..(51): unsure at all Xaa locations
  Clone ID: PAT_MRT3847_1556C.1.pep
CCVYIELGTHXTKLXKKQAXCXXPXRTKGKXTXYRSXLXXKLXLXKXMQXX

SEQ ID NO: 192192 - protein, 209 aa, Glycine max
  unsure (1)..(209): unsure at all Xaa locations
  Clone ID: PAT_MRT3847_15570C.1.pep
MKKITSSQFLLFLSLLALWFTSIAFGADTTHPEEVQALKDMGKTLGKKEWDTDIDPCSGQPPWFTSKENNNVTCNCTIPGENFCHVVIILLKSQNLRGMLPRELIRLPYLEEIDLTKNYLNGTIPTQWGSSNLRSISLYGNRLTGPIPKEIANITNLQNLVLEFNQFSGNLPPELGNLPSIXKLHLTSNNFTGELPELWLXLTTLTELR

SEQ ID NO: 192193 - protein, 197 aa, Glycine max
  Clone ID: PAT_MRT3847_15571C.1.pep
EVEPSALNCTRYRKVSSLRLQRIQRHLDNINKPPVLTIESPDGDLIDCVHKRKQPALDHPLLKYLKIQKVPTKMPRGMKKVKRTEIRSARQMWHKNGTRCPKGTIPVRRSTVHDVLRAKSLFDFGKKQRRFPLTRRRSDAPDVVSGNGHEHAIAYTGSSQEVYGAKATINVWEPSIQVVNEFSLSQIWILSGSFDGT

SEQ ID NO: 192194 - protein, 42 aa, Glycine max
  Clone ID: PAT_MRT3847_15572C.1.pep
CCCSCSTHTMIHIFNHIIIITTNVSVSGGHSSYEEHTGHTSY

SEQ ID NO: 192195 - protein, 477 aa, Glycine max
  unsure (1)..(477): unsure at all Xaa locations
  Clone ID: PAT_MRT3847_15573C.1.pep
NAHKRKLDDGGTTYDRPXLNMQQADSAERTVTDFDNNEVMGSQQYSAHPFKRARDTNVLETSQFPLRNSSDVPSHSLDIQIEPDANTTNQLNPGRDHAIGILSTRDSAHASSIIAVNTVYQGSDDESMESVENFPVDVNNNVVNFPSVDLNETSELNQAQQSVCFQPLLERAGGETGVSSSNACGEVLNTEILTAHARDGPSFGISGGXSVGMGASHEAEXHGTDASVHRGDSLGDVEPIAEVIENQGQAGEFEPSHGLTGDFVPAEISREDPQGDSQAVVSQSTARAADSGSKVIASMKVESVESGEKTSSSMQVLGGLENGAHPSLSCNAVVCSAYEVSKEEVNQARKASHIDDGASHESSRLITDAMGTPYRDNSNGGVEFDPIKLHNDYCPWVNGDVAAAGCDNPCSSSGVGSVALCGWQLTLDALDSFQSLGHLPVQTLESESAASMCKGDRFTSSQKLLARNSYVRNHGRN

SEQ ID NO: 192196 - protein, 89 aa, Glycine max
  Clone ID: PAT_MRT3847_15574C.1.pep
MENLISLVNKIQRACTALCDHGENSALPTLWDSLPAIAVVGGQVSPPIPLSYSLLFSSHNDSYRNLYVSLSELKKVLRLGKRCLQRFLN

SEQ ID NO: 192197 - protein, 72 aa, Glycine max
  Clone ID: PAT_MRT3847_15575C.1.pep
YHLNHTMPYVFPISKQVPTLFENIKAPHLFLLKLSNLNQNNQVNHMRLLAKVGPPKSLVAIITYYYHQYDRV

SEQ ID NO: 192198 - protein, 38 aa, Glycine max
  unsure (1)..(38): unsure at all Xaa locations
  Clone ID: PAT_MRT3847_15576C.1.pep
XXFNIKKHPQNLRPRFLWNFYYPMGNLIQYLHKNIKIF

SEQ ID NO: 192199 - protein, 68 aa, Glycine max
  unsure (1)..(68): unsure at all Xaa locations
  Clone ID: PAT_MRT3847_15577C.1.pep
MPNPTVFFDMTIGGQPAGRIVLELYADXTPSTADNFRALCTGAQGAGRSGKPPHYKRSSFPPRDPELH

SEQ ID NO: 192200 - protein, 80 aa, Glycine max
  Clone ID: PAT_MRT3847_15578C.1.pep
RWWVVAGLSLIVVGGYFFEFGGCVWVLIQVRWWRVGRPFTVGADVDHYKTTLTTALAVLPVASSLNNEEEKVWCIATGTR

SEQ ID NO: 192201 - protein, 253 aa, Glycine max
  Clone ID: PAT_MRT3847_15579C.1.pep
MAANFWTSSHYKHLLDQEDVDVVNTLDKEKGITLEDFKLIKMHMANYILKLAQQVKVRQRVVATAVTYMRRVYTRKSMAEYDPRLVAPTCLYLASKAEESTVQARLLVFYIKKLYSDDKYRYEIKDILEMEMKILEALNYYLVVYHPYRSLSPLLQDAGLNDLNMTQLTWGLVNDTYKMDLILVHPPHLIALACIYIASVLREKDTTAWFEELRVDMNVVKNISMEILDFYESNRMFTDERINAALQKLSLRP

SEQ ID NO: 192202 - protein, 125 aa, Glycine max
  Clone ID: PAT_MRT3847_1557C.1.pep
DLKPFNSDEELKKSDHEAFKSVFPRGFAWEVIKVYRGPPEIAFKFRHWGFFEGPFKGHAPTGKMAQFYGLGTVKVDDSLKVEEVEIYYDPAELLGGLLSGNHINHPIEEDGTKTSAPSQGCPFSK

SEQ ID NO: 192203 - protein, 61 aa, Glycine max
  Clone ID: PAT_MRT3847_15580C.1.pep
KIPAVVEYVPGGPRFKKGIPKKTRGIAFSFSGVRSPRRDEPYFDEALALFRRQIMPKDVVI

SEQ ID NO: 192204 - protein, 237 aa, Glycine max
  unsure (1)..(237): unsure at all Xaa locations
  Clone ID: PAT_MRT3847_15581C.1.pep
MIDILLNLQLLAPFFLFLILPVFFFFCFTSSGPTKGTIPIPKPYPIIGHYFALKSVGNRRIQWLSDIVKISPAGTFTLHRPLGRRGVITGNPATVEYILKTRFSNYQKGRTTTSILSDFLGTGIFNADGNTWKFQRQVASHEFNTKSLRKFVEHVVDAELSNRLVPILTSAAAAQDKTLDFQDILQRFAFDNICKIAFGFDPXYLTLSAERSKFAQAFEEXTEISSKRFREPLPLVW

SEQ ID NO: 192205 - protein, 124 aa, Glycine max
  unsure (1)..(124): unsure at all Xaa locations
  Clone ID: PAT_MRT3847_15582C.1.pep
SYKAFGPCPNDWSVAQKLILKGCEPLPRRRCFAKTISKVGLLHPFPTSLWKAPVNNTVNWSGLGCKNFECLKGKKLSRDCIGCFDLVNGYENQRFVKSRSKNDXLIDDVLASGSGGIRIGLDVG

SEQ ID NO: 192206 - protein, 153 aa, Glycine max
  Clone ID: PAT_MRT3847_15583C.1.pep
DACLEVLGRVPRTEAFCDVTQYPMAISTPGIIVIRISSGSLCFANANFVRERILKWVSQDEDDLKETTKGRVQAVILDMTNLMNVDTSGILALEELHKRLLSRGVELAMVNPRWLVIHKLKLAHFVDKIGKEWVFLTVGEAVDACLATKIARA

SEQ ID NO: 192207 - protein, 443 aa, Glycine max
  Clone ID: PAT_MRT3847_15584C.1.pep
MFFSQSFYDLFENPAILGLCSVIGMFFSPLWVTFFFGVIVGWLWKPKWARLGKEKLTTFHAKSLDFASPSSASSPLKSALVSPMKSCSSSPCLNSIKMLPPNLESLLLKKGVDKKASSSSSPVKFASSVSSPKSCEETSDAVTIADLHHLWQLVEEKDGGLPWIQMMDRSTPTMSYKAWRREPKDGPPQYRSSTIFEDATPEMVRDLFWDDEFRPRWDDMLASSSIIEECPTTGTMKVQWIRKFPFFCKDREYIIGRRIWESGRHYYCVTKGVNCPSMPRKDKPRRVDVYYSSWCIRAVESNRGNGQLTACEVLLFHHEEMGIPWEIAKLGVRKGMWGTVQKIEPGLRAYQEARASGAALSHSAFMAQVNTKIGPEYLQSIGGDDNSAENESVVASEKPQGVNIPKMLVIGGAVALACSLDRGLVTKYLLFGVARRFANIGKR

SEQ ID NO: 192208 - protein, 92 aa, Glycine max
  Clone ID: PAT_MRT3847_15585C.1.pep
TFFYMVRMPTSDNIRCLLSDCVLALFKTEFGDLNILCRWREWSRSAHDNKWGGNKKGKPFSQSQDNWAQSRTAYLFTTRHSVFVGIKILSLR

SEQ ID NO: 192209 - protein, 69 aa, Glycine max
  Clone ID: PAT_MRT3847_15586C.1.pep
DLGVLDTVLYVRIFHTPCVEFVVCVQVSGQYSSWSHSGLTAMHSNSCPPVARACTVGHDRSLCFVRPIV

SEQ ID NO: 192210 - protein, 118 aa, Glycine max
  Clone ID: PAT_MRT3847_15587C.1.pep
MLLLERQRILLRAADLLEKHNDELAALETWDNGKPYEQAAKIEVPMLVRLIRYYAGWADKIHGLTVPADGPYHVQTLHEPIGVAGQIIPWNFPFLMFAWKVGPALACGNTIVLKQLSR

SEQ ID NO: 192211 - protein, 189 aa, Glycine max
  Clone ID: PAT_MRT3847_15588C.1.pep
MASSLRISRLISRSFSSTSFFSRGGNGFLGSRQSKFSTSAAIEEEPIKPSIQVEHTQLLIDGKFVDAASGKTFPTLDPRTGEVIAHVAEGHSEDVDRAVSAARKAFDHGPWPKMTAYERQRILLRAADLIEKHNDELAALETWDNGKPYEQAAKIEVPMLVRLIRYYAGWADKIHGLTVPADGPYHVQT

SEQ ID NO: 192212 - protein, 48 aa, Glycine max
  Clone ID: PAT_MRT3847_15589C.1.pep
GFHILLTLATGHTHILCTAGSTYRLTGILIRTGAKCPHDYMIHTYMFN

SEQ ID NO: 192213 - protein, 36 aa, Glycine max
  Clone ID: PAT_MRT3847_1558C.1.pep
IVCSILFQIQYVEKSQYPLRSIALHICTFNSAITSG

SEQ ID NO: 192214 - protein, 160 aa, Glycine max
  Clone ID: PAT_MRT3847_15590C.1.pep
PSPPPPPPPPPPPPPPLFFFFFFFFLKKNFGFFSLGEKNPLLKNFFLTNIPPFPFAKWQIFFFLFSPHPPPENGKFFFSCFKHIPPWGAFSPKNIFPGKPPKTKPQILTRKFFFFPWEGQNCFSLKKKTPRVFFPREKNAGPPGQRGPSLGAIKGEPERP

SEQ ID NO: 192215 - protein, 85 aa, Glycine max
  unsure (1)..(85): unsure at all Xaa locations
  Clone ID: PAT_MRT3847_15591C.1.pep
KKRRKRHYTVEQELERIWEKMRRHEIAKGDRAXLVTEALQTMKGTIPEIAGSHISSRILETCAMHXSQAERDAVYEELQLHIITL

SEQ ID NO: 192216 - protein, 49 aa, Glycine max
  Clone ID: PAT_MRT3847_15592C.1.pep
SSIFGFHLRSSRDDSLSLLESLDSSPSDPTPATILPRTYLSMIHFAPIS

SEQ ID NO: 192217 - protein, 63 aa, Glycine max
  unsure (1)..(63): unsure at all Xaa locations
  Clone ID: PAT_MRT3847_15593C.1.pep
XSVRXSXFGXXRVCEXXLXIYXLSFXXLXXAXXXXSERKKVRXLHFGSVRXRXGRRXXPEVKD

SEQ ID NO: 192218 - protein, 130 aa, Glycine max
  Clone ID: PAT_MRT3847_15594C.1.pep
GVLPFLVSPRLRVRCFLLVGPVEVPGWGWGLGAAAGLLWPFWFPLFARYGFCFCFVLCLQTPPSAAGGAGWCLVLGLASIAGGWLGVHAWWQALACGFDLSRVSSVWPRVVCVPPFLILRARGTPRVFRP

SEQ ID NO: 192219 - protein, 126 aa, Glycine max
  Clone ID: PAT_MRT3847_15595C.1.pep
WPRKNKKVFFFFLKKKTVPPSNWPFLFFPKGTKTLFSQHFFFSREPFACPTKTKDFFFFPFKSFTPKNWERSPFNPPRGGRANLHPPGFLFPLPKDPLRPYKRWEGRGPPLKKPGPKTFETSFLNK

SEQ ID NO: 192220 - protein, 85 aa, Glycine max
  Clone ID: PAT_MRT3847_15596C.1.pep
RKQCSRQWSFLSHAPRYCRTYCHPHIRTPVGPQGPKARQYSASKRRCTVTYVCTDPPASSYHHEPFSAALSYYCRMCYMYGVLEK

SEQ ID NO: 192221 - protein, 72 aa, Glycine max
  Clone ID: PAT_MRT3847_15597C.1.pep
SIYFLFPQHSNTSVPCCFMFVPPWRQFPNQPRHQYHHQARSELLGSSPIYAAVLNTWTRIKLDYLGRLEPLK

SEQ ID NO: 192222 - protein, 166 aa, Glycine max
  Clone ID: PAT_MRT3847_15598C.1.pep
MANSKGSSGFRNFMYPGKHPLLPPKSPFPSVSQAYADYVPNPAVGLKAGNRPRDGNTHHQRTSSESLVIEEQPSWLDDLLNEPETPVRRGGHRRSSSDSFAYIDTVNASNINYANQDEYKYKNMMSIPSWSSQDFDRSKDARHVPVYAEMNSVKQKNRSWDSFSMP

SEQ ID NO: 192223 - protein, 67 aa, Glycine max
  Clone ID: PAT_MRT3847_15599C.1.pep
GNNPTDISPFFEPKIKWFHTNLQFLPPLTMMPMRLPYFTLSIKVEITSTDEHNDALIHSTKQQWELG

SEQ ID NO: 192224 - protein, 103 aa, Glycine max
  unsure (1)..(103): unsure at all Xaa locations
  Clone ID: PAT_MRT3847_1559C.1.pep
PGTNTTAQSTTSPTNTPKTIIISLFXQVINIVIXQMXSLXXMCPFSSXIXPXXXXXXXXXPPPPPPLFFCFFLFCLVNELVLKGFYGSIIADSYLKLYSYMWA

SEQ ID NO: 192225 - protein, 324 aa, Glycine max
  Clone ID: PAT_MRT3847_155C.1.pep
CFLFRSSNHLVSADQQGYVLAAATGFRRYTYSELKQATKGFSEEIGRGAGGTVYKGVLSDKRIAAIKKLHEFADQGESEFLTEVSIIGRLNHMNLIGMWGYCVEGKHRMLVYEFMENGSLAHNLPSNALDWSKRYNIAVGMAKGLAYLHEECLEWILHCDIKPQNILLDSDYQPKVADFGLSKPLNRNNVNNSSFSRIRGTRGYMAPEWVFNLQITSKVDVYSYGIVVLEMITGRSPMIGVQVTELGADQSHNERLATWVRERRRKAREGECWVEQIVDPTLGSDYDVEQMEILTTVALECVEEEKDVRPSMSQVVERLQSHDS

SEQ ID NO: 192226 - protein, 65 aa, Glycine max
  unsure (1)..(65): unsure at all Xaa locations
  Clone ID: PAT_MRT3847_15600C.1.pep
XXLXXDXXEXHSXXXXXRHXXSXSRXSXLXVXXXXXMXSXRNXFXFPFCXPXRXRIPXLTYXXLR

SEQ ID NO: 192227 - protein, 84 aa, Glycine max
  Clone ID: PAT_MRT3847_15601C.1.pep
FKKKGRPRCWSRCFCYCGPSFRRHKFIRCLSWLGIMNVANKKKGIFPRNFFFVCKEILGFGEIFLWCHHCLGGCFSKNKPCFGT

SEQ ID NO: 192228 - protein, 84 aa, Glycine max
  Clone ID: PAT_MRT3847_15602C.1.pep
KQGKGECFGRRLREGKGGFSQERSCESYGKGNEIRWLNRRVIYVAWMGKEGWKLKSGGRFFFFFNYPLLFFFFFFLNIIFFFFF

SEQ ID NO: 192229 - protein, 61 aa, Glycine max
  Clone ID: PAT_MRT3847_15603C.1.pep
ICNKMQLYLRGKTAMGCYKMMCGCVVYLQTHQSPQCRKDFLIVLGNVEEGWWYNVKLVRYL

SEQ ID NO: 192230 - protein, 163 aa, Glycine max
  unsure (1)..(163): unsure at all Xaa locations
  Clone ID: PAT_MRT3847_15604C.1.pep
ARRRQKGALGRLKQISHIHDLYEKMKQDGPQPDIFTYNILISSFGRAGRVDIAVKNSEELENSDCKPDIIXLYNSLINCLGKNGDVDETHMRFKEMQEKGLIPDVVTYSTLIECFGKTDKVEMACRLFDEMLAEECTPNLITYNILLDCLEKSGRTAEAVDLY

SEQ ID NO: 192231 - protein, 56 aa, Glycine max
  unsure (1)..(56): unsure at all Xaa locations
  Clone ID: PAT_MRT3847_15605C.1.pep
RKGCTLEYLAFLGLVYHLLRIMFFYNCLNMNLFIYRCNYKILYVTPSGPXYKQQKK

SEQ ID NO: 192232 - protein, 54 aa, Glycine max
  unsure (1)..(54): unsure at all Xaa locations
  Clone ID: PAT_MRT3847_15606C.1.pep
HHYREMCQFPNKCFKNKVFNIGMTILVSYSXNHLCDEIMYNKSSPLNYIEVKSS

SEQ ID NO: 192233 - protein, 133 aa, Glycine max
  Clone ID: PAT_MRT3847_15607C.1.pep
KMFLVLVKIKCVNLWPRVGFDYIRTYMYHVSPLKIRHVFLFPYLFLFNMKNKIPNLRDGPSSMGDLSPPSPTMTTTTTMITPSPPLLPYLLFSEFPKYSLENRCRRFFPFLVLDVENCFISIICIAFCCCWVW

SEQ ID NO: 192234 - protein, 432 aa, Glycine max
  Clone ID: PAT_MRT3847_15608C.1.pep
MGATVHSPLVTYASVISLLTLCPPFVILLWYTMTLADGSVSETFHYLRQNGLQGLLHIWPTPTPTACKIIAVYAAFEAALQLLLPGKTVYGPISPTGHRPVYKANGLQAYFVTLITYFALWWFGIFNPTIVYHHLGEIYSALIFGSFLFCVFLYIKGHLAPSSTDSGSSGNLIIDFYWGMELYPRIGKHFDIKVFTNCRFGMMSWAVLALTYCIKQYEENGKVADSMLVNTALMLVYVTKFFWWEAGYWSTMDIAHDRAGFYICWGCLVWVPSVYTSPGMYLVNHPVNLGIKLALSILVAGILCIYINYDCDRQRQEFRRTNGKGTVWGKAPSKIEATYTTTSGETKRSLLLTSGWWGLSRHFHYVPEILAAFFWTVPALFEHFLPYFYVIFLTILLFDRAKRDDDRCRSKYGKYWKLYCDKVPYRIIPGIY

SEQ ID NO: 192235 - protein, 210 aa, Glycine max
  Clone ID: PAT_MRT3847_15609C.1.pep
MTFIREDDDDQVDDDHDHDHVDGGGSQNSASNITEIVTTPEGENLGEWLSLGLKGDINMPAEEQNSSSRPLHSNNNKVFSCNFCMRKFYSSQALGGHQNAHKREREAARSYHQSHHHRIGFSYTTSLATRSLGIKPHSLVHRPNRERSAMVARFSSSDAINVGVGSVASSWTPFMLEQAVDFYWPGSFRGDLLPKQESSDVKKIDLDLRL

SEQ ID NO: 192236 - protein, 138 aa, Glycine max
  Clone ID: PAT_MRT3847_1560C.1.pep
MVEVGFYQIPTSTFDPFAEAKKTNAPGAKKFVHIRIPQRNGKKIFPPVQGFKKKFSFEKILKALKKKFFSNGNFVHNKELGKIFQLQGDQRKNVFPFLIHAPLVRKGQIKILGFLPPTPSYPLFFFMKFTLWQRFLNK

SEQ ID NO: 192237 - protein, 114 aa, Glycine max
  Clone ID: PAT_MRT3847_15610C.1.pep
SLQIFLTSSAATPSQSWYPDSGASHHVTNMSQNIQQVAPFEEPIQIIIGNGQGLNINSSGLSTFSSPINPQFSLVLSNLLFVPTITKNLIRVSQFCKDNNVYFEFHSYVCLFKS

SEQ ID NO: 192238 - protein, 172 aa, Glycine max
  Clone ID: PAT_MRT3847_15611C.1.pep
MGRSPCCDKVGLKKGPWTPEEDQKLLAYIEEHGHGSWRALPAKAGLQRCGKSCRLRWTNYLRPDIKRGKFSMQEEQTIIQLHALLGNRWSSIATHLPKRTDNEIKNYWNTHLKKRLDKMGIDPVTHKPKNDALLSTEGPSKIAANISHMAQWESARLEAKARLRRESNLRSS

SEQ ID NO: 192239 - protein, 281 aa, Glycine max
  Clone ID: PAT_MRT3847_15612C.1.pep
QIQEEQIEAKLLGKSSFEIEIHQSLCGDGERVYCDHCATSIIDLHRSCPNCSYELCLSCCQEIRDGSITPRAELKFPYVNRGYDYMHGGDPLPVPCDLETSEGHIEPSTVWNAKSDGSISCAPKELGGCGSAVLELRRILPDGWISDLEAKARNMLKIWEIEHTTLQQKEAVSSFTFLRKEAIREGINDNNIYYPESSNTQKEGLLLFQKHWANGEPIIVRDVLKQGTGLSWEPMVMWRALCENMVSEISSKMSEVKAIDCLANCEVWSRCPFGAEFEHLV

SEQ ID NO: 192240 - protein, 211 aa, Glycine max
  unsure (1)..(211): unsure at all Xaa locations
  Clone ID: PAT_MRT3847_15613C.1.pep
MMKLIIFSFLLLLFVPIFSTTTSAQSPAAAPKPQAKPAPATPAPAPAKPLVPSLPQSPLSDSSSNQDIIRILRKAKSFNTLIRLLKTTQIINQVNAQLVTTKSGGGLTILAPDDGAFSQLKAGYFNSLGDRQQKALIQFHVLPVYVSSSNFDSLSNPVMTLASDSPNGYQINVTAYGNSVNISTGVVNATLTGIVYTXXTLAIYHVDKVLI

SEQ ID NO: 192241 - protein, 50 aa, Glycine max
  Clone ID: PAT_MRT3847_15614C.1.pep
ECISHTVGSVASSIRVAVHPVSTSHITTLSSRPLISLYSVHQNTSMSFII

SEQ ID NO: 192242 - protein, 107 aa, Glycine max
  Clone ID: PAT_MRT3847_15615C.1.pep
PRVRQAFHPFLLLSCLKLYRKVFTNQQGFYDHILSLPTMPNYLAAMILTLFAISILQTDIMPANQHTCHLHHNKTQYSSSSLNTYQCPSQCSMKYFQTQYHKPCMLF

SEQ ID NO: 192243 - protein, 74 aa, Glycine max
  Clone ID: PAT_MRT3847_15616C.1.pep
VQPTVLVPEYSLETTTQMLLGRKLESGCHSWSTGAKSSEISLRGVFTVVRLGIMNKRLQLHESANSSKIPLQDV

SEQ ID NO: 192244 - protein, 41 aa, Glycine max
  Clone ID: PAT_MRT3847_15617C.1.pep
YSDWKTIQTTSNLLYPSFSLKRSLYISVISQSTNHINLRLS

SEQ ID NO: 192245 - protein, 81 aa, Glycine max
  Clone ID: PAT_MRT3847_15618C.1.pep
GRFFLHFILLCKTLVDGDQGGVSNMGESMLADLDSLPEADKQRMTVMIDQLQIRDSFIEPKNIDVAAEIAALDYILKSTKG

SEQ ID NO: 192246 - protein, 43 aa, Glycine max
  Clone ID: PAT_MRT3847_15619C.1.pep
HFMSALTNTLKGKLGVYLKKLFPILNKFNLTHTNYLFCYLIHR

SEQ ID NO: 192247 - protein, 55 aa, Glycine max
  Clone ID: PAT_MRT3847_1561C.1.pep
QLDILPVNWVSNDGVLFDLHKAIVFCYFTPHFNFLISDNTLNIDECSFIVAEFKF

SEQ ID NO: 192248 - protein, 622 aa, Glycine max
  Clone ID: PAT_MRT3847_15620C.1.pep
MSLNLRQKQTECIARMLNLNQPLNAAGTANEEVYKILIYDKFCQNILSPLIHVKDLRKHGVTLYFLIDKDRKPVHDVPAVYFVQPNQPNVQRIVSDASKSLYQSLHLNFSTSIPRPLLEDLAAGTLNSDSIQRVSKVHDQYLEFVTLEDNLFSLAHKPCYVQLNDPSAGDKEIEELVEKIVGGLFCVLATLAVVPVIRCPRGGPAEMVASALDQRIRDHLLSKNNLFTEGGNFVSSFQRPVLCIFDRNFELPVAIQHDSSRIGSSHDVLGLKLNRLSVQGEKGGMRSYELDSADSFWVANGSLEFPEVAVEIETQLNKYKKDVDEVNKRTGGTHGAEFDGTDLIGNTKHLMNAVNSLPELTERKQVIDKHTNIATVLLGEIKERSLDSYAKKENDMMVRGGIERADLLGVLKGKGTKMDKLRFAIIYLISSETINQSEVEAVEAALRESEVDTAAFQYVKKIKSLNVSLASANSASRSNIVDWAEKLYGQSISAVTAGVKNLLSNDRQLALARTVEALIEGRPNPETDSYLSFDPRAPKSGSGASSSHMKGPFKEAIVFMIGGGNYVEYCSLQELAQHQQPAKHIIYGTTEMLTGVDFVEQLTLLGQKMGLGNVGSSSTPAQ

SEQ ID NO: 192249 - protein, 562 aa, Glycine max
  Clone ID: PAT_MRT3847_15621C.1.pep
ILPLLVLFYVAYLFYQSTAREVKRLDSISRSPVYAQFGEALNGLSTIRAYKAYDRMADINGKSMDNNIRFTLVNMSGNRWLAIRLETLGGLMIWLTATFAVMQNGRAENQQEFASTMGLLLSYALNITSLLTGVLRLASLAENSLNAVERIGTYIDLPSEAPSVIDNNRPPPGWPSLGSIRFEDVVLRYRPELPPVLHGLSFTIFPSDKVGIVGRTGAGKSSMLNALFRIVELEQGRILIDDYDVAKFGLADLRKVLGIIPQSPVLFSGTVRFNLDPFNEHNDADLWEALERAHLKDVIRRNSLGLDAEVSEAGENFSVGQRQLLSLSRALLRRSKILVLDEATAAVDVRTDALIQKTIREEFKSCTMLIIAHRLNTIIDCDRILLLDGGKVLEYDTPEELLSNEGSAFSKMVQSTGAANAQYLRSLALGGDKSEREENEHLDGKRKWLASSRWAAAAQFALAVSLTSSHNDLQRLEVEDENSILKKTKDALITLQGVLERKYDKEIEESLNQRQVSPEGWWSSLYKMIEGLAMMSRLAKNRLHQSDFGFEDRSINFDQVDM

SEQ ID NO: 192250 - protein, 862 aa, Glycine max
  Clone ID: PAT_MRT3847_15622C.1.pep
GCVQHPSLIPSHSEEPPGNGVFDKCIKGDLRGKTRVLVTNQLHFLSQVNRIILVHEGMVKEEGTFEELSNHGPLFQKLMENAGKMEEYEEEEKVDTETTDQKPSSKPVANGAINDHAKSGSKPKEGKSVLIKQEERATGVVSLNVLTRYKSALGGFWVVFVLFACYVSTETLRISSSTWLSHWTDQSATKGYNPAFYNMIYAALSFGQVLVTLTNSYWLIISSLYAARRLHEAMLSSILRAPMVFFQTNPLGRVINRFAKDLGDIDRNVAPFVNMFLGQVSQLLSTFILIGIVSTMSLWAILPLLVLFYVAYLYYQSTAREVKRLDSISRSPVYAQFGEALNGLSTIRAYKAYDRMADINGKSMDNNIRFTLVNISGNRWLAIRLETLGGLMIWLTATFAVMQNGRAENQQEFASTMGLLLSYALNITSLLTGVLRLASLAENSLNAVERIGTYIDLPSEAPSIIDDNRPPPGWPSSGSIRFEDVVLRYRAELPPVLHGLSFTIFPSDKVGIVGRTGAGKSSMLNALFRIVELEQGRILIDDYDVAKFGLADLRKVLGIIPQSPVLFSGTVRFNLDPFNEHNDADLWEALERAHLKDVIRRNSLGLDAEVSEAGENFSVGQRQLLSLSRALLRRSKILVLDEATAAVDVRTDALIQKTIREEFKSCTMLIIAHRLNTIIDCDRILLLDGGKVLEYDTPEELLSNEGNAFSKMVQSTGAANSQYLRSLALGGDKSEREENKHLDARRKWLASSRWAAAAQFALAVSLTSSHNDLQRLEVEDENSILKKTKDALITLQGVLERKHDKEIEESLEQRQISPDGWWSSLYKMIEGLAIMSRLTVNRFHQSDFGFEDRSINFDQVDM

SEQ ID NO: 192251 - protein, 146 aa, Glycine max
  Clone ID: PAT_MRT3847_15623C.1.pep
LAGKTITLEVESFDPLDNVKAKIPGKEGVPPAPPRLIFSGKQLEKGRTPAGYKIPKGSPLPLVLRLRGGMPIFVKALPGKALPLGVGSFDSIAHVKAKIPGKEGFPPGQPRVLFSGKPLENGCSLADFHIPKGSPLPLVLRLRGGW

SEQ ID NO: 192252 - protein, 85 aa, Glycine max
  Clone ID: PAT_MRT3847_15624C.1.pep
TRKKAWVLILHAMASLVLLLSLFVRPKIRSQVSTVAASSSDIKEDTSTWHVKWEKQRENNDRDNGLEDIMGEKILQEPRVCIHLI

SEQ ID NO: 192253 - protein, 46 aa, Glycine max
  Clone ID: PAT_MRT3847_15625C.1.pep
VKCFSPSSILVHMQDSQRKYEAYNIRVAMTYSQLSSRVIDRMVIYP

SEQ ID NO: 192254 - protein, 219 aa, Glycine max
  Clone ID: PAT_MRT3847_15626C.1.pep
MAPVDSDTLGRHSLIPSYLYSSPSPQKKKMEASSFAIHSERENRNIEMFSPSFYAACTVGGSLSCGPTHTGITPLDVVKCNIQIDPVKYKNTSTGFGVMFFEQGLRGFFRGWGPTLVGYSAQGAFKYGFYEFFKKYYSDIAGPEYATKYKTLIYLAGSASAELIAGVALCPFEAVKVRVQTQPGFARGLADGLPKLVRTEGVSGLYKGIVPLWGRQVPY

SEQ ID NO: 192255 - protein, 81 aa, Glycine max
  unsure (1)..(81): unsure at all Xaa locations
  Clone ID: PAT_MRT3847_15627C.1.pep
HHPDLXPNRSREHRGQSELQSATLLSLLGASGIFMPITSRACARTAPEWAYRRRVSMKFERACCCCGGHDWAYHNLVRLMK

SEQ ID NO: 192256 - protein, 97 aa, Glycine max
  unsure (1)..(97): unsure at all Xaa locations
  Clone ID: PAT_MRT3847_15628C.1.pep
TPPHPYFAIYTPGGIYAQSFLPPLGNSFITFPIPSSNSITNTLINTSXSYKLIPKPSQVKKKLPIKXHKDLFXSTNIITGKNNKQRKTPYTSVNRIH

SEQ ID NO: 192257 - protein, 48 aa, Glycine max
  unsure (1)..(48): unsure at all Xaa locations
  Clone ID: PAT_MRT3847_15629C.1.pep
GFSNLLMVCCGYGGPPLYFDVRVTWGXPGNQVCDXGARYVTWDGILPP

SEQ ID NO: 192258 - protein, 496 aa, Glycine max
  Clone ID: PAT_MRT3847_1562C.1.pep
MAVDRSLTRCCSLVLWSWMLLRMMMAQGAAARANRKEWDSVIKLPAEPVDADSDHEVGTRWAVLVAGSNGYGNYRHQADVCHAYQLLIKGGLKEENIVVFMYDDIATDELNPRPGVIINHPEGQDVYAGVPKDYTGENVTAQNLFAVILGDKNKVKGGSGKVINSKPEDRIFIYYSDHGGPGVLGMPNMPYLYAMDFIEVLKKKHASGGYKKMVIYVEACESGNHVLKGIMPKDLQIYVTTASNAQENSWGTYCPGMDPSPPPEYITCLGDLYSVAWMEDSETHNLKRESVKQQYKSVKQRTSNFNNYAMGSHVMQYGDTNITAEKLYLYQGFDPAAVNFPPQNGRLETKMEVVNQRDAELFFMWQMYQRSNHQPEKKTDILKQIAETVKHRKHIDGSVELIGVLLYGPGKGSSVLQSMRAPGLALVDDWTCLKSMVRVFETHCGTLTQYGMKHMRAFANICNSGVSEASMEEVCVAACEGYDSGLLHPSNKGYSA

SEQ ID NO: 192259 - protein, 73 aa, Glycine max
  Clone ID: PAT_MRT3847_15630C.1.pep
KTKQVLSKLNFAGPLPNYVIILLIFFHKNSPSTYILDYPSYQYLKILVNFNDMSPQTNNTKFLHLFSTLEMNI

SEQ ID NO: 192260 - protein, 83 aa, Glycine max
  unsure (1)..(83): unsure at all Xaa locations
  Clone ID: PAT_MRT3847_15631C.1.pep
AQSAHSEASQIGGDKLPRKVPLPSVRSGGAKASDATPALTQVPNSARSKAGAEYQTARSTRRIVGRCSRRERRPYHXRHRPTP

SEQ ID NO: 192261 - protein, 160 aa, Glycine max
  unsure (1)..(160): unsure at all Xaa locations
  Clone ID: PAT_MRT3847_15632C.1.pep
MASTTMLLLVVFMILCISHPSFQMVLVPLTHTLSKAQFNSTHHLLKSTSTRSAKRFRRQLSLPLSPGSDYTLSFNLGPQAQAQPITLYMDTGSDLVWFPCAPFKCILCEGKPNEPNASPPTNIXQSVAVSCKSPACSAAHNLAPPSDLCAAARCPLESIE

SEQ ID NO: 192262 - protein, 55 aa, Glycine max
  Clone ID: PAT_MRT3847_15633C.1.pep
VPRAAFAKGRRTSAAAAPDAGTAPLPDVKNATSTNLDVLCTTLTLTVCYIPFSMK

SEQ ID NO: 192263 - protein, 288 aa, Glycine max
  Clone ID: PAT_MRT3847_15634C.1.pep
MNDDPHTKMVLTSISIVSSSSSFLSDSPSTSSPTTRIRPFFFHSSNRAPLFVFPRAHLPSATLRASSSSVSTPHENGSPEQFLKSNSIADFMRFKRRVDGGASAELQTALVSYRKRFPWSLLRPFLQVDLVSTIHIADEEYFLALQKELESYDCVLYEMVASRESLENRRNATNTKRLKSSRTRGFNILGCIQRQMARILTLDFQLDCLNYESSNWYHADLDYETFKLLQLEKGESFFSFAKDMTLKSTKAVLQPASIPEDLDPLRSKLLWASRVLPMSLVRLLIWIR

SEQ ID NO: 192264 - protein, 205 aa, Glycine max
  Clone ID: PAT_MRT3847_15635C.1.pep
MNEKGYMAMDAEPKGLEASLQHLIDLHHHKSLVLAHHTDKAKKDAIRKAERVSDLLVEAVNGGVQDSFINQKRIELEIRTLAATITRFMKQTDQWLAATHALNTALKEIGDFENWMKIMEFDCKSITTAIQNIHQDSKSDITASFHACHNKKTSYPIAQRLFAMRRYGGGILYAALPLHMQRGCFRIRTHDQQVTKAQLYPCMSQ

SEQ ID NO: 192265 - protein, 55 aa, Glycine max
  Clone ID: PAT_MRT3847_15636C.1.pep
SPLLLVAVQHIKFINHKNERSRKSITITFTVPLKSTLTRSVTHWYSHDRQPSRSP

SEQ ID NO: 192266 - protein, 136 aa, Glycine max
  unsure (1)..(136): unsure at all Xaa locations
  Clone ID: PAT_MRT3847_15637C.1.pep
DQIGFISTVVSTAICQPVVSGKDIQKPQAEVXPIHRIRITLTSRNVRSLEKVCADLINGAKKQNLRVKXXVRMPTKILSITARKTPCGEGSKTWDRFQMRIHKRVIDLHSPSEIXXSINSINIEHGVEXEVTXXDA

SEQ ID NO: 192267 - protein, 136 aa, Glycine max
  Clone ID: PAT_MRT3847_15638C.1.pep
MNEKGSVAMETEPKGLEASLEHLIDLHHHKSLVLAHHTDKAKKDAIRKAEHVSDLLVEAVNGGVQDSFINQKRIELEIRTLATTITRFMKQTDQWLAATHALNTALKEIGDFENWMKIMEYDCKSITTAIQNIHQE

SEQ ID NO: 192268 - protein, 63 aa, Glycine max
  Clone ID: PAT_MRT3847_15639C.1.pep
MGPSNWGLVPQILTKLSQKHGGLKLKSIKTNFKSSPIWGAGPELNSPYFYSRTTNYGDKPKRG

SEQ ID NO: 192269 - protein, 37 aa, Glycine max
  Clone ID: PAT_MRT3847_1563C.1.pep
DFLFKLTLHLLSSLLSTTTLITLINKFYYTIYPFILS

SEQ ID NO: 192270 - protein, 47 aa, Glycine max
  Clone ID: PAT_MRT3847_15640C.1.pep
RCGNFQIGRAYSTSGSCATSLIEFNKRTSVRKHQFQIMQSIPHFPRP

SEQ ID NO: 192271 - protein, 53 aa, Glycine max
  Clone ID: PAT_MRT3847_15641C.1.pep
ETCLTFPPSTPSSSCTSHSQPGGFSKFSSSTNIRLNMNVKTLSNFPPTTRTNL

SEQ ID NO: 192272 - protein, 64 aa, Glycine max
  Clone ID: PAT_MRT3847_15642C.1.pep
FHEWRINLPDLYGAFISPIFFGFLIYMVFLYQSTALFIIDPTECYKEQIKIMSINCVTIYLIHR

SEQ ID NO: 192273 - protein, 69 aa, Glycine max
  unsure (1)..(69): unsure at all Xaa locations
  Clone ID: PAT_MRT3847_15643C.1.pep
IETLANFLCAYASXXXXXXXXXXXXXEXMMPSXSTFGVAHDAFNTFFSETGSGKHVPRAVXVXLEPTVI

SEQ ID NO: 192274 - protein, 71 aa, Glycine max
  Clone ID: PAT_MRT3847_15644C.1.pep
VSSPISKAAHGKFFKSERSPVSSSSSSRKEKFERRVEMIGLFFFFSTSSARVQLILSIQRRAGRNLLFYET

SEQ ID NO: 192275 - protein, 483 aa, Glycine max
  unsure (1)..(483): unsure at all Xaa locations
  Clone ID: PAT_MRT3847_15645C.1.pep
QILQLERRLQDQFQVRSTLEKALGFRSSLLFFLFXLQPTSKLIKEIAVLELEVMYLEQYLLSLYRKAFDQQLPSVAPFTKEEKVKSPPSTPRARFVEVSKPEVLTKRGSSAVQSIDHELDTMQKEYNGYEPETLGKEYNVHPHASEHLDSGVYRCHSSLSQCTTFTTRVSAPAAEVLTESLRTCHSQPLSMMEYAQNVDASSRIISLAEHLGTRISDHIPDTPNRLSEDMVKCISAIYCKLADPSMTNPGLSSPSSSLSSTSAFSIGDQGDMWSPGLRNNSSFDVRLDNPFHVEGLKEFSGPYSTMVEVSWIYRENQKLGDTEQLLKNFRSLISQLEEVDPGKLKHEEKLAFWINIHNALVMHAFLAYGIPQNNVKRVFLLLKAAYNIGGHTISADTIQNTILGCRLPRPGQWFRLFFXSKTKFKAGDGRRAYPIERPEPLLLFALCSGNHSDPAVRVYTPKRVLQELEVAKEEYIRATFGVR

SEQ ID NO: 192276 - protein, 98 aa, Glycine max
  Clone ID: PAT_MRT3847_15646C.1.pep
RSCLLDESVCRFHFSSQFLIDNRDLVCFKFVNLFNYSFHFLRFEKRFFFVPFELIVDTQNSLVEGIVSPTAIFLKVLHDCIPSSPFLVAVKIVMLIIA

SEQ ID NO: 192277 - protein, 63 aa, Glycine max
  Clone ID: PAT_MRT3847_15647C.1.pep
RTTAEHSTAGRENLPRTPLPYYTNFVSPPEGKFQTVISNPEDYKNTTGNHDLHYITGDNPPKQ

SEQ ID NO: 192278 - protein, 146 aa, Glycine max
  unsure (1)..(146): unsure at all Xaa locations
  Clone ID: PAT_MRT3847_15648C.1.pep
TQRPPGGERTRQAEXRRRKPEQKRQRHRERQEXRAGTKXXXEDKQKXEXAXSDQERDNTXRPKKRERKKEXGRGGREREQERAGKGXQHPRPGRXQAGKDGEGREERARRQRRKRATQAEXXKPAKERASKGKEQGDXKQAENTKK

SEQ ID NO: 192279 - protein, 525 aa, Glycine max
  unsure (1)..(525): unsure at all Xaa locations
  Clone ID: PAT_MRT3847_15649C.1.pep
RFIDTLQSHVTKKVDLEDTEDDETQRQWNDKEASSRLTHEKFSARTASESEDDNERNDAAEEETDDDDNAFFDTRDXFLSSSSFKSNGSDYRVSSFSSDDEGFYAFESEDDVDPSIRYVGTNYPHVKRRKKLPDPVEKEKGVSLWSMIKDNIGKDLTKVCLPVYFNEPLSSLQKCFEEMEYSYLLDQAYEWGKRGNSLMRILYVAAFAISGYASTEGRVCKPFNPLLGETYEAHYPDKGLHFFSEKVSHHPMIVACHCEGTGWKFWGDSNLKSKFWGRSIQLDPVGILTLEFDDGEVFQWSKVTTSIYNLILGKLYCDHYGTMRIQGNQEHSCKLKFKEQSIIDRNPHQVHGIIQDSNGKTVSTLFGKWDESMHYVNGDYTGKGKGHDTLSDARLLWKRSRAPKFPTRYNFTRFAITLNELTPGLKEKLPPTDSRLRPDQRYLENGEYDMANVEKSRLEQRQRQARKMQESGWKPRWFAKDKASGTYRYVGGYWEARQRGNWDSCPDIFDQIPSDHISDEGQITF

SEQ ID NO: 192280 - protein, 495 aa, Glycine max
  Clone ID: PAT_MRT3847_1564C.1.pep
MALDRSIISKTTWYSVVLWMMVVLVRVHGAAARPNRKEWDSVIKLPTEPVDADSDEVGTRWAVLVAGSNGYGNYRHQADVCHAYQLLIKGGLKEENIVVFMYDDIATNELNPRHGVIINHPEGEDLYAGVPKDYTGDNVTTENLFAVILGDKSKLKGGSGKVINSKPEDRIFIYYSDHGGPGILGMPNMPYLYAMDFIDVLKKKHASGSYKEMVIYVEACESGSVFEGIMPKDLNIYVTTASNAQENSWGTYCPGMDPSPPPEYITCLGDLYSVAWMEDSEAHNLKRESVKQQYKSVKQRTSNFNNYAMGSHVMQYGDTNITAEKLYLYQGFDPATVNFPPQNGRLETKMEVVNQRDAELLFMWQMYQRSNHQSENKTDILKQIAETVKHRKHIDGSVELIGVLLYGPGKGSSVLQSVRAPGSSLVDDWTCLKSMVRVFETHCGTLTQYGMKHMRAFANICNSGVSEASMEEACLAACEGYNAGLLHPSNRGYSA

SEQ ID NO: 192281 - protein, 50 aa, Glycine max
  Clone ID: PAT_MRT3847_15650C.1.pep
GRTFLFFFFMGIPTSRDSLYVFEHIIHDHTQGYNAGYIKVLSPPLFLLTK

SEQ ID NO: 192282 - protein, 60 aa, Glycine max
  unsure (1)..(60): unsure at all Xaa locations
  Clone ID: PAT_MRT3847_15651C.1.pep
RIATHAXPGTSVEEAHNKPTVEPEKRAPTSNGTECPKDEKLPRRKIVDKPKTRCFTILPM

SEQ ID NO: 192283 - protein, 40 aa, Glycine max
  Clone ID: PAT_MRT3847_15652C.1.pep
KKNPHNFINENTLQFQHIFTGLDIILHPLIIFSPKQWSNA

SEQ ID NO: 192284 - protein, 273 aa, Glycine max
  unsure (1)..(273): unsure at all Xaa locations
  Clone ID: PAT_MRT3847_15653C.1.pep
FVPASASPPTRFVFSRVPFGVGNRNYPQSAANDDSXTRADPNGDLAGDGLTALVGLSLGGSNGTNVHTELTQRGYEMGLQSSMSGTTAGGASTGGIPMHMLETPEHTIGIEWDNVNSSXITLDLKTPLSHFPPFRFGVRFEDVHRLGDGQVKHSPEVFYAGSLWKVSVQAFNDEDPQGRRTLGLFLHRRKAEVTDIHRKVHMYVDSREKVTARYQLTVPSKREMTVFGSFKQTGTLLPKAPKGWGWRTALLFDELADLLQNGALRVIAVVQLV

SEQ ID NO: 192285 - protein, 100 aa, Glycine max
  unsure (1)..(100): unsure at all Xaa locations
  Clone ID: PAT_MRT3847_15654C.1.pep
LFITLIXITFIALSTSFAFAFLYFSCKXPLSPSPSSLSLFSSKARPLSKLKRPVVLLVSSDGFRFGYQFKAPTPHISRLIANGTEAESGLIPVFPSLTFP

SEQ ID NO: 192286 - protein, 59 aa, Glycine max
  unsure (1)..(59): unsure at all Xaa locations
  Clone ID: PAT_MRT3847_15655C.1.pep
KTGAXGRGXTXSSRNXXRPGXHAXTPPXXSGGGALCSGAXCDSFXSLDAVQXIGKVLXX

SEQ ID NO: 192287 - protein, 38 aa, Glycine max
  Clone ID: PAT_MRT3847_15656C.1.pep
FAIQNVGSQECQLESSCYLRCVNASCLPRSMTIKFMVI

SEQ ID NO: 192288 - protein, 326 aa, Glycine max
  unsure (1)..(326): unsure at all Xaa locations
  Clone ID: PAT_MRT3847_15657C.1.pep
MKSMVTPLTRVLPFRHPNGHNTLPFSLTRYPSSPNFSFSPLTLTLSMAASPQSSAPTVSPGDVNIDKDGVFQLIQAHQEKAARLPPVEEIRTVLDRSVRGMLSTFSKKFDGYPSGSMVDFACDSNGYPILAVSDLAVHSKDLTANPKCSLLVARDPEDRTDLVITVHGDAISVPENEREAVRAAYLARHPNAFWVDFGDFXFLRIEPKVVRFVSGVATALLGSGEFSGDEYKSAKVDPIAQFSKPVASHMNKDHAEDNKVIVQHWTSVPVDFAFILDLDSLGFNVKAGYQGDTFKLRVPFPRCAEDRKDVKTLIVEMLQAARPKVD

SEQ ID NO: 192289 - protein, 202 aa, Glycine max
  Clone ID: PAT_MRT3847_15658C.1.pep
MGSSGFSWKLADHPKLPKGKTVAVVVLDGWGEATPNEYNCIHKAETPCMDSLKKGAPERWRLVRAHGTAVGLPTEDDMGNSEVGHNALGAGRIFAQGAKLVDLALASGKIFEGEGFKYIKECFENGTLHLIGLLSDGGVHSRLDQLQLLLKGVSERGVKRVRVHILTDGRDVLDGSSVGFVETLENDLANLRAKGVDARIAS

SEQ ID NO: 192290 - protein, 72 aa, Glycine max
  Clone ID: PAT_MRT3847_15659C.1.pep
SIFSKLNTLLLEDNCKMASLKAEKPVESQSSGQVKKEPAKPSGSTPKAPSSKPAPKKTQKRSRPKQKASSNK

SEQ ID NO: 192291 - protein, 52 aa, Glycine max
  Clone ID: PAT_MRT3847_1565C.1.pep
SASIECDMTVGFEREEIAFGVSESYAVSIERDDLTEVLLEECINTLWLSQEH

SEQ ID NO: 192292 - protein, 87 aa, Glycine max
  Clone ID: PAT_MRT3847_15660C.1.pep
MDAIRKQASKLREQVARQQQAVLKQFGGGGYGGSDNVVTDGVELQLHQKLEKLYISTRAGKHYQRDICRGVKSYICTGSKQVEIGTN

SEQ ID NO: 192293 - protein, 103 aa, Glycine max
  Clone ID: PAT_MRT3847_15661C.1.pep
LVVHATAGAAAGGLAAVVTTPLDVVKTQLQCQGVCGCDRFTSGSIGDVIRTIVKKDGYRGLMRGWIPRMLFHAPAAAICWSTYEAGKSLFQDFNQQKDTGTVT

SEQ ID NO: 192294 - protein, 554 aa, Glycine max
  unsure (1)..(554): unsure at all Xaa locations
  Clone ID: PAT_MRT3847_15662C.1.pep
MGSSGFSWKLADHPKLPKGKTVAVVVLDGWGEATPNEYNCIHKAETPCMDSLKKGAPERWRLVRAHGTAVGLSTGDGMGNKNFQRVSLWLARDAILSGKFDQVRVNLPNGDMVGHTGDIEATVVACKAADAAVKMILDAIEQVGGIYVVTADHGNAEDMVKRDKSGIPLLGKDGNIRILTYQTLEPVPIAIGGPGLAPGVRFRNDVPTGGLANVAATVMNXMDARGEAPYKFTNALEAVKKLRAEPKANDQYLPPFVIVDESGKPVGPIVDGDAVVTFNFRADRMTMIAKALEYENFDKFDRVRYPKIRYAGMLEYDGELKLPSHYLVSPPEIDRTSGEYLVYNGIRTFACSETVKFGHVTFFWNGNRSGYFNAELEEYVEIPSDSGITFNEQPLMKALQIAEKARDAILSGKFDQVRVNLPNGDMVGHTGDIEATVVACKAADAAVKMILDAIEQVGGIYVVTADHGNAEDMVKRDKSGKPLLGKDGKIQILTSHTLEPVPIAIGGPGLAPGVRFRNNVPTGGLANVAATVMNLHGFEAPSDYETTLIEVVDN

SEQ ID NO: 192295 - protein, 122 aa, Glycine max
  unsure (1)..(122): unsure at all Xaa locations
  Clone ID: PAT_MRT3847_15663C.1.pep
MSRQTETPFLEEWLSIRCGINAAVAAVVVTITKPTVRAIVQAWTALRDSLQSQQQQHLQTLVNSQSSLHVAEPQAKLLLTLLQSCPTSYFARVXRLLYTWLRESPNPNSNIIDSAVEILSHF

SEQ ID NO: 192296 - protein, 120 aa, Glycine max
  unsure (1)..(120): unsure at all Xaa locations
  Clone ID: PAT_MRT3847_15664C.1.pep
SLLSSSKSRFATAVPLSSFGVTNASSSRFSMSADXMPGQPKPPYLDGSAPRGLGYNPLHAGENXPENLERFRESELIHCKWAMRAXAGILYPEAGGLSNXMKAEESTTLPGGQSTCLYEP

SEQ ID NO: 192297 - protein, 120 aa, Glycine max
  unsure (1)..(120): unsure at all Xaa locations
  Clone ID: PAT_MRT3847_15665C.1.pep
GPXITRGSQTLQQTTATLIMGPTSMAAGRVTRFLARHYPLEHHRDNADVEFDFLDDIGEALLAQSASSDECGHPNEMEEQFDQDEDHRDTVEENRTFWDKQHQLLQVTIHYLIHPIPSSI

SEQ ID NO: 192298 - protein, 36 aa, Glycine max
  Clone ID: PAT_MRT3847_15666C.1.pep
RIQVKGRGQATRYLFYRDTKIKSPGPRCTTWKKGKP

SEQ ID NO: 192299 - protein, 47 aa, Glycine max
  Clone ID: PAT_MRT3847_15667C.1.pep
KFKLPNCFVKKLVYIRMTVSAYIIISGIDMMAKEDLERAVRSFYKMM

SEQ ID NO: 192300 - protein, 54 aa, Glycine max
  Clone ID: PAT_MRT3847_15668C.1.pep
KSYGEFPTINKDESTKEALFSFLKLCPTLEQLFVTNDPEKLFGWRVQFMRSERD

SEQ ID NO: 192301 - protein, 154 aa, Glycine max
  Clone ID: PAT_MRT3847_15669C.1.pep
HLLYDINMGGYGPGLLCAWPVHVFRSVGVLVHGFGSSDTRVLPGVAWSRCRILPGDVLDAPVHSKKVLFCRNFLFSLTDVQNDPESYLAGGSNSCVVKGTKCTGMEHLKVIKFMGFSSRRDEVSLAKCLIHLIKGKPPKIKTSDGNCLDAVFVQ

SEQ ID NO: 192302 - protein, 99 aa, Glycine max
  Clone ID: PAT_MRT3847_1566C.1.pep
LSMSCFLLSTVALMVARHLLEMTTRIELKKKVGRLLFQLGRLDVQLPQTRQVRRLDLVHAETRGPVTREFRVPKLLTEVANGLSHGKGKLINLELRLVT

SEQ ID NO: 192303 - protein, 63 aa, Glycine max
  Clone ID: PAT_MRT3847_15670C.1.pep
SNSYVVKGTKCTGMEHLKLIKFMGFSSRRDEISLAKCLIHLIKGKPPKIKTSDGNSLDAMFVE

SEQ ID NO: 192304 - protein, 85 aa, Glycine max
  unsure (1)..(85): unsure at all Xaa locations
  Clone ID: PAT_MRT3847_15671C.1.pep
HTKGVQGSGDTQDSHPICVFIIKMTVPNRSDILVVWAILVDXAEDSVDLCRRLQVLDIATAGGDHWGQLLAHLLLXVHGCLVMLE

SEQ ID NO: 192305 - protein, 59 aa, Glycine max
  unsure (1)..(59): unsure at all Xaa locations
  Clone ID: PAT_MRT3847_15672C.1.pep
MSMAKLVFSLWFLVFNGFWFPFKSKKPPXANQLQNPKLNGLKPDYPIESERRLIGKLEP

SEQ ID NO: 192306 - protein, 90 aa, Glycine max
  Clone ID: PAT_MRT3847_15673C.1.pep
QNLPPNENSWESVAKLQEVFPTYHLEDKVSLLGRGIDKHKHKPHIITVYTCKQRAREVITMDYQQQGGQHPRVANHPTVTTHPNGVNHPI

SEQ ID NO: 192307 - protein, 50 aa, Glycine max
  Clone ID: PAT_MRT3847_15674C.1.pep
KLGKYFCEFQCMFSHFNTHKEEKICCFNSKSTVESSQLKSKHILWCPLKK

SEQ ID NO: 192308 - protein, 61 aa, Glycine max
  Clone ID: PAT_MRT3847_15675C.1.pep
GPGKRPLPKFKFSQGSGIGTSGRGFLRNSFAYGDNKWFFGDHFLKGAFKNQPYCLPQGTRF

SEQ ID NO: 192309 - protein, 119 aa, Glycine max
  unsure (1)..(119): unsure at all Xaa locations
  Clone ID: PAT_MRT3847_15676C.1.pep
YDPTPSPPSGGGGSYNPSPSTPPSGGSYDPTPSPGLGGGGSYNPTPSSSTAGGSHDPTPSPPSGGGGRDNATPSTPPGGGSYDTTPSPRTACGXVNPTPSPPSGSNCGTPRHETSTSTP

SEQ ID NO: 192310 - protein, 74 aa, Glycine max
  Clone ID: PAT_MRT3847_15677C.1.pep
SHQAQMNFFVGLINREISGNIHLPNPSVFMVSNKVGFSQKIIEFLQVTFPTQTYSFSTQDSISKHLLSNDPPSQ

SEQ ID NO: 192311 - protein, 207 aa, Glycine max
  Clone ID: PAT_MRT3847_15678C.1.pep
LKPWYWWSWPVLPLGLQWHEQRRQTLGYGAELAVILIQSAIYVGVIAMTRLARPSFSKLCYRRSDKSITLVHNSLKLVALWCILAAYVTPFFIIPHTVHPLLGWILYLLATFALCSIAINIFMLPMLPVLVPWLGIVGVLMVMAFPWYPDGVVRALFVFAYAFCSAPFLWASMVRIVQGLQLSLEREAFLPARLGEFSPNSWFNKLY

SEQ ID NO: 192312 - protein, 46 aa, Glycine max
  Clone ID: PAT_MRT3847_15679C.1.pep
LLLRRLRPNRYELIVWISARLALSTYVAPSNDYQQSAMLSSNANIT

SEQ ID NO: 192313 - protein, 80 aa, Glycine max
  unsure (1)..(80): unsure at all Xaa locations
  Clone ID: PAT_MRT3847_1567C.1.pep
NKFVQTGTGQLNGIPVSIGIMDXQLRGDSMGSTEGDKLTRLVEYATNQLSHFILVCPSAGARMQKETLSLSQMVKISFAS

SEQ ID NO: 192314 - protein, 87 aa, Glycine max
  Clone ID: PAT_MRT3847_15680C.1.pep
TDNGSGMLNVSSLSVCDHDSAPHLIAVPSHSDNIYKTKSCSYKSYHTIFMTEDIVNLPQTIHHDPGLQIRCYLNSPDTITKRDIHRA

SEQ ID NO: 192315 - protein, 54 aa, Glycine max
  unsure (1)..(54): unsure at all Xaa locations
  Clone ID: PAT_MRT3847_15681C.1.pep
MASKRQTMKPGKIXGRTEEKKNQTIGNNXKKGQAAKEKTQEMAQAAKEKTPEKT

SEQ ID NO: 192316 - protein, 96 aa, Glycine max
  Clone ID: PAT_MRT3847_15682C.1.pep
FFSFESFGNGNRFRRIMCLYYLLLLLLDDGVPLVFAILVDCGGADHCGADEGNKTEELGAGGAGNLFSGHVYPPPVTATNSLLFTSCLVRSLSSHF

SEQ ID NO: 192317 - protein, 208 aa, Glycine max
  Clone ID: PAT_MRT3847_15683C.1.pep
MKMIHVLFLFALVSFTSHASVNDFCVADLKGPDSPSGYQCKPPNTVTVDDFVFSGFVAGNTTNTFNAALTSAFVTDFPGVNGLGVSVARLDIAKGGSIPMHTHPAATELLIMVEGQITAGFMTPTALYTKTLKPGDIMVFPQGQLHFQVNSGNGKATAFLAFSSANPGAQLLDLLLFGNTLPSDLVAQTTFLDVAQVKKVKARFGGRG

SEQ ID NO: 192318 - protein, 759 aa, Glycine max
  unsure (1)..(759): unsure at all Xaa locations
  Clone ID: PAT_MRT3847_15684C.1.pep
MRRTGRALKKKKTALVFSLNFGVMEFPSPTMRVWTLFLFLLLLKSDVVQSASDSLIGLGSYDITGPAADVNMMGYANTEQIASGVHFRLRARAFIVAQPNGNRVVFVNLDACMASQLVVIKLIERLKARYGDLYTEKNVAISGIHTHAGPGGYLQYVVYIVTSLGFVRQSFDVIGDGIEKTIVQAHENLRPGSIFVNKGELLDAGVNRSPSAYLNNPAXEDAXYLNDANKLMTXGDNKGAAARFMEDWFERKGSVRMDSVGFENDGIPRRISNIIPSLHDNHHELLELAASFQSPPGKPATKTSSVARRVRGVLRQVDKPRFVSAFCQTNCGDVSPNVLGAFCIDTELPCDFNHSTCGGKNELCYGRGPGYPDEFESTRIIGERQFKKAVELFNGAFEQIKGKVDFLHAFIDFSQLVVNTYKVGASEGVKTCPAAMGFAFAAGTTDGPGAFDFKQGDDQGNPFWMLVRNLLKTPGKEQVDCHHPKPILLDTGEMKLPYDWAPSILPIQILRVGQLVILSVPGEFTTMAGRRLRDAVKTVLSGSKGFGSNIHVVIAGLTNTYSQYVTTYEEYQVQRYEGASTLYGPHTLSAYIQEFTKLARALISGQPVEPGPQPPDLLDKQISLLTPVVMDATPIGVKFGDCSSDVPKNSTFKRADMVSVTFWSACPRNDLMTEGTFSLVEFLQGKDMWVPAYDDDDFCLRFKWSRPFKLSSHSKATIEWRIPKDVTPGVYRIKHFGAAKGLLGSIHHFTGSSSAFVVA

SEQ ID NO: 192319 - protein, 98 aa, Glycine max
  unsure (1)..(98): unsure at all Xaa locations
  Clone ID: PAT_MRT3847_15685C.1.pep
WCQRCLQLNGLNYLQLSTGDLTSSCSTSFSFFNGGGDGGRFGKAGISNSKMSGKDPFNGRKWTEILLAANVXINSLIEKGQLWRLAMSSFLHANTGHL

SEQ ID NO: 192320 - protein, 86 aa, Glycine max
  Clone ID: PAT_MRT3847_15686C.1.pep
FSAHGKVRYLAIVIESEEAYQISRVVKLLQWLDIIGVKNVCLYDMNGVLKKSKETIFKELKNAKSIEEVNEVVALHDPDHMTLEFL

SEQ ID NO: 192321 - protein, 480 aa, Glycine max
  Clone ID: PAT_MRT3847_15687C.1.pep
MGSELEAPIHVLMVSYPAQGHINPLLRLGKCLAAKGLFVTFTTSETAGKNMRTANNITDKSVIPVGDGFLKFDFFEDGMADDDDGPKKINLGDFSAQLELFGKQYVSQMVKKHAEENHPFSCIINNPFVPWVCDVAAEHGIPSAMLWIQSSAVFTAYYSYFHKLVSFPSDSDPYVDVQLPSVVLKHNEVPDFLHPFSPYPFLGTLILEQFKNLSKPFCVLVDSFEELEHDYINYLTKFVPIRPIGPLFKTPIATGTSEIRGDFMKSDDCIEWPLFKTPASVVYISFGSIVYLPQEQVTEIAHGFTNSHASFLWVLKPPPKNFGVPPHVLPDGFFEETRDKGKVVQWSPQEEVLAHPSVACFLTHCGWNSSMEALTLGVPMLTFPAWGDQVTNAKFLVDVFGVGIKLGYGKAEKKVVSREEVKKCLLEATEGPKADELKQNALKWKKDAETAVAVGGSSARNLDAFVKEIKKRGAVGVSGR

SEQ ID NO: 192322 - protein, 141 aa, Glycine max
  Clone ID: PAT_MRT3847_15688C.1.pep
MCLSHFCHQFASRHLTHLISSPPPRPSTSATFSAAARPTTVRLGVLLHSCFKKLASLTHIFRLNDKWCQRCFQLNGLKSLFNFHLSIPLNCKIWNLGLVHIFKLFFFSSFILWELIEMEVTSTMSFKKGLLFCRISLVMIM

SEQ ID NO: 192323 - protein, 69 aa, Glycine max
  Clone ID: PAT_MRT3847_15689C.1.pep
QGLALYHLKKQMLMSFSHSSADITYHQFPKKKKIKLKNCHGYSCYAIHTSHPTYKKLNIITIHRCINKT

SEQ ID NO: 192324 - protein, 63 aa, Glycine max
  Clone ID: PAT_MRT3847_1568C.1.pep
AFIFCYISTNSPQYSDIYKTLLCSFLTRHFQSSIDILFGPTALPLPILFDASFASACKFYLEP

SEQ ID NO: 192325 - protein, 188 aa, Glycine max
  Clone ID: PAT_MRT3847_15690C.1.pep
MLNDGGANHVSIEKSFRIKEDDRFFSRLMSKETSMANSSSRVFYYGETSIAVPFMWEAQPGTPKHPSSETCLPPLTPPPSYYSNSKSKNKRRNSKSNIFSCFMPKFIVARKGHVSPTSSRSSSSSSSSSWSSVYPAYSYSMRDTDQGSISFSRSTNVCSFLKHKASNGFRGCYSFGNIKNAIVSHGAI

SEQ ID NO: 192326 - protein, 127 aa, Glycine max
  unsure (1)..(127): unsure at all Xaa locations
  Clone ID: PAT_MRT3847_15691C.1.pep
IEKPATLLWLASFTWFFLLICDSYYQELEAENAKLLSQLADCRCHEMEKKLHIPDEKGRESKIGNRKSEEKIEKMPGYNTWFMSHHSKRYVALKVTYFGKRFYGFAYXAQMEPTAESELFKSFEKTR

SEQ ID NO: 192327 - protein, 39 aa, Glycine max
  Clone ID: PAT_MRT3847_15692C.1.pep
HAPRSPYAPPAAPDSLFTCVCGLTDRRLNDFLQDHNSDP

SEQ ID NO: 192328 - protein, 74 aa, Glycine max
  Clone ID: PAT_MRT3847_15693C.1.pep
TELHRLLDVVQAYVHSTEQVPHFMELCQGQCALKPLNSLHSSSENTLFKCVQPLHCHHYSTLPASLSILYRKDG

SEQ ID NO: 192329 - protein, 55 aa, Glycine max
  Clone ID: PAT_MRT3847_15694C.1.pep
SLHCRMALYFSMICFLTIITLGKAIERLPGDPNLPHTNTTCTLITRPLRDHYSVL

SEQ ID NO: 192330 - protein, 35 aa, Glycine max
  unsure (1)..(35): unsure at all Xaa locations
  Clone ID: PAT_MRT3847_15695C.1.pep
SITQLYPSXESXHVEIIICKVKSYVPMSHLSRAYL

SEQ ID NO: 192331 - protein, 51 aa, Glycine max
  Clone ID: PAT_MRT3847_15696C.1.pep
SLTGKKYNAFNSIWFDGFVIFSKTRKSLHHLIDIQSRREFPKVSKWEAKVK

SEQ ID NO: 192332 - protein, 66 aa, Glycine max
  Clone ID: PAT_MRT3847_15697C.1.pep
LNQPLQLMSHSTVSLIHRSECPSVRTSYLFRHLPKCACCPKRLYFGSPMILAVPGFYQSGHCIAFS

SEQ ID NO: 192333 - protein, 790 aa, Glycine max
  unsure (1)..(790): unsure at all Xaa locations
  Clone ID: PAT_MRT3847_15698C.1.pep
MAASVDNRQYGTHINAVVRACGPDFNTPLPSDFDLDSSSDDEDQNDDASYLKELIQKANAETEASLLDPRDEGTADQWIPRNASMVRLTGKHPFNSEAPLXPLRHVLKRCGILARMKGAMYVSFEGAEDLPGGGGSKYGTSVKREMAMDPSRDIILAFMQNGEPLAPDHGFPVRMIIPGFIGGRMVKWLKRIVVTEHECDSHYHYKDNRVLPSHVDAELANDEGWWYKPEYIINELNINSVITTPCHEEILPINSWTTQRPYVIRGYAYSGGGRKVTRVEVTLDGGETWHVCTLDHTEKPNKYGKYWCWCFWSLEVEVLDLLGAKEIAVRAWDEGLNTQPEHLIWNVMGMMNNCWFRVKTNVCKPHKGEIGIVFEHPTQPGNQPGGWMAKEKHLEKSQKPKPTLKKSVSTPFMNTSSKMFSISEVKKHSNPDSAWIIVHGHVYDCTRFLKDHPGGTDSILINAGTDCTEEFDAIHSDKAKKLLEDYRIGELITTGYTSDSSPNNSVHGNSEFTHLAPIKESTTPPSRSVALNPREKIPCKLVSKTSISHDARLFRFALPSEDQLLGLSVGKHIFLCATIDGKLCMRAYTPTSSVDEVGFFDLLIKVYFKGVHPKFPNGGLMSQHLDSLPIGSMLDVKGPLGHIEYTGRGNFMVHGKPRFAKRLAMLAGGTGITPIYQVAQAILKDPEDHTEMHVVYANRTEDDILLREELDEWAKIHNDRFKLWYVVEIAKEGWKYSVGFITESITREHLPKASRDSLALTCGPPPMIQFAVQPNLEKMGYDIKNDLLVF

SEQ ID NO: 192334 - protein, 887 aa, Glycine max
  unsure (1)..(887): unsure at all Xaa locations
  Clone ID: PAT_MRT3847_15699C.1.pep
MAASVDNRQYGTHINAVVRACGPDFNTPLPSDFDLDSSSDDEDQNDDASYLKELIQKANAETEASLLDPRDEGTADQWIPRNASMVRLTGKHPFNAEGPLPRLMHHGFITPSPLRYVRNHGXPVPKIKWDEWTVEVTGLVKRSTHFTMEKLMREFPHREFPATLVCAGNRRKEHNMVKQSIGFNWGAAGGSTSVWRGVPLRHVLKRCGILARMKGAMYVSFEGAEDLPGGGGSKYGTSVKREMAMDPSRDIILAFMQNGEPLAPDHGFPVRMIIPGFIGGRMVKWLKRIVVTEHECDSHYHYKDNRVLPSHVDAELANDEGWWYKPEYIINELNINSVITTPCHEEILPINSWTTQMPYFIRGYAYSGGGRKVTRVEVTLDGGGTWQVCTLDCPEKPNKYGKYWCWCFWSVEVEVLDLLGAREIAVRAWDEALNTQPEKLIWNVMGMMNNCWFRVKTNVCRPHKGEIGIVFEHPTQPGNQSGGWMAKEKHLEKSSESNPTLKKSVSSPFMNTTSKTYTMSEVRRHNNADSAWIIVHGHVYDWTRFLKDHPGGTDRILINAGTDCTEEFEAIHSDKAKQMLEDYRIGELTTTCYNSDSSSSNPSVHGRSDTIPLTPIKEVITPMRSVALIPREKIPCKLISKTSISHDVRLFRFGLPSDGLLMGLAVGKHIFLCVTVDEKLCMRAYTPTSSVHEVGYFDLVVKVYFKGVHPKFPNGGIMSQHLDSLPIGSVLDVKGPLGHIEYTGRGNFLVHGKPRFATRLAMLAGGTGITPIYQVVQAILKDPEDCTEMHVVYANRTEDDILLKEELDEWAKKYDRLKVWYVIQESIREGWEYSVGFITESILTEHIPNASPDTLALTCGPPPMIQFAVQPNLEKLGYDTQNNLLVF

SEQ ID NO: 192335 - protein, 79 aa, Glycine max
  unsure (1)..(79): unsure at all Xaa locations
  Clone ID: PAT_MRT3847_1569C.1.pep
KPHWWELIFPKKVGGPNNGFKNGSXKWANKNWGDLSFLVENPKQSPPFYVFLGISQNFEIVGNTLKQAFFVPKGKARFF

SEQ ID NO: 192336 - protein, 64 aa, Glycine max
  Clone ID: PAT_MRT3847_156C.1.pep
QEERHPNYKNISTTFQSKGDHHVNNNENMQKNKIPKLEEISHEAQKCPQSNPKSRKKYSGQGVM

SEQ ID NO: 192337 - protein, 65 aa, Glycine max
  Clone ID: PAT_MRT3847_15700C.1.pep
LVQCFRKILIIPLLVNALSIIFEEPFICGRPILVETFSYTFLHNEPNIIPWDSATESPLPNVIWF

SEQ ID NO: 192338 - protein, 890 aa, Glycine max
  Clone ID: PAT_MRT3847_15701C.1.pep
MAASVDQRPYPGLHNGVVRPLKPGPDIPRPKKLPQPPPPLSDSSSDEEEDTTLNLKDLIRKGTTEVESSIFDPRDDGTSDHWIQRNSSLVRLTGKHPFNSEPPLPRLMHHGFITPVPLHYVRNHGPVPRARWEDWTVEVTGLVTRPTCFTMEQLLHDFPSREFPATLVCAGNRRKEQNMVKQSIGFNWGAAAISTSVWRGVPLRTLLKSCGIYTRTKGALHVCFEGAEDLPGGGGSKYGTSILREVALDPSRDIILAYMQNGEPLSPDHGFPVRMIIPGFIGGRMVKWLKRIIVTTDQSQNYYHYKDNRVLPSHVDAELANAQAWWYKPDYIINELNINSVITTPCHEEILPINSWTTQMPYFIRGYAYSGGGRKVTRVEVTLDGGETWQVCTLDCPEKPNKYGKYWCWCFWSVEVEVLDLLGAREIAVRAWDEALNTQPEKLIWNVMGMMNNCWFRVKTNVCRPHKGEIGIVFEHPTQPGNQSGGWMAKEKHLEKSSESNPTLKKSVSSPFMNTTSKTYTMSEVRRHNNADSAWIIVHGHVYDCTRFLKDHPGGTDSILINAGTDCTEEFEAIHSDKAKQMLEDYRIGELTTTCYNSDSSSSNPSVHGSSDTIPLTPIKEVITPMRSVALNPREKIPCKLISKTSISHDVRLFRFALPSDDLLMGLPVGKHIFLCATVDEKLCMRAYTPTSSVHEVGYFDLVVKVYFKGVHPKFPNGGIMSQHLDSLPIGSVLDVKGPLGHIEYTGRGNFLVHGKPRFATRLAMLAGGTGITPIYQVVQAILKDPEDCTEMHVVYANRTEDDILLKEELDEWAKKYDRLKVWYVIQESIREGWEYSVGFITESILTEHIPNASPDTLALTCGPPPMIQFAVQPNLEKLGYDTQNNLLVF

SEQ ID NO: 192339 - protein, 69 aa, Glycine max
  Clone ID: PAT_MRT3847_15702C.1.pep
ACDDSRRRKALVPILHFILQCTAWQHVTSTIPRALGHHLLDYHTWMAITLMHTIITPSTWLNVTSMPLI

SEQ ID NO: 192340 - protein, 886 aa, Glycine max
  Clone ID: PAT_MRT3847_15703C.1.pep
MAASVDNRQYGTHINAVVRACGPDFNTPLPSDFDLDSSSDDEDQNDDASYLKELIQKANAETEASLLDPRDEGTADQWIPRNASMVRLTGKHPFNAEAPLPRLMHHGFITPSPLHYVRNHGPVPKIKWDEWTVEVTGLVKRSTHFTMEKLMREFPHREFPATLVCAGNRRKEHNMVKQSIGFNWGAAGASTSVWRGVPLRHVLKRCGILARMKGAMYVSFEGAEDLPGGGGSKYGTSVKREMAMDPSRDIILAFMQNGEPLAPDHGFPVRMIIPGFIGGRMVKWLKRIVVTEHECDSHYHYKDNRVLPSHVDAELANDEGWWYKPEYIINELNINSVITTPCHEEILPINSWTTQRPYVIRGYAYSGGGRKVTRVEVTLDGGETWHVCTLDHTEKPNKYGKYWCWCFWSLEVEVLDLLGAKEIAVRAWDEGLNTQPEHLIWNVMGMMNNCWFRVKTNVCKPHKGEIGIVFEHPTQPGNQPGGWMAKEKHLEKSQKPKPTLKKSVSTPFMNTSSKMFSISEVKKHSNPDSAWIIVHGHVYDCTRFLKDHPGGTDSILINAGTDCTEEFDAIHSDKAKKLLEDYRIGELITTGYTSDSSPNNSVHGNSEFTHLAPIKETTTPPSRSVALNPREKIPCKLVSKTSISHDARLFRFALPSEDQLLGLSVGKHIFLCATIDGKLCMRAYTPTSSVDEVGFFDLLIKVYFKGVHPKFPNGGLMSQHLDSLPIGSMLDVKGPLGHIEYTGRGNFMVHGKPRFAKRLAMLAGGTGITPIYQVAQAILKDPEDHTEMHVVYANRTEDDILLREELDEWAKIHNDRFKLWYVVEIAKEGWKYSVGFITESITREHLPKASRDSLALTCGPPPMIQFAVQPNLEKMGYDIKNDLLVF

SEQ ID NO: 192341 - protein, 445 aa, Glycine max
  Clone ID: PAT_MRT3847_15704C.1.pep
HVQGMMNNCWFRVKTNVCRPHKGEIGIVFEHPTQPGNQSGGWMAKEKHLEKSSESNPTLKKSVSSPFMNTTSKTYTMSEVRRHNNADSAWIIVHGHVYDCTRFLKDHPGGTDSILINAGTDCTEEFEAIHSDKAKQMLEDYRIGELTTTCYNSDSSSSNPSVHGSSDTIPLTPIKEVITPMRSVALNPREKIPCKLISKTSISHDVRLFRFALPSDDLLMGLPVGKHIFLCATVDEKLCMRAYTPTSSVHEVGYFDLVVKVYFKGVHPKFPNGGIMSQHLDSLPIGSVLDVKGPLGHIEYTGRGNFLVHGKPRFATRLAMLAGGTGITPIYQVVQAILKDPEDCTEMHVVYANRTEDDILLKEELDEWAKKYDRLKVWYVIQESIREGWEYSVGFITESILTEHIPNASPDTLALTCGPPPMIQFAVQPNLEKLGYDTQNNLLVF

SEQ ID NO: 192342 - protein, 57 aa, Glycine max
  unsure (1)..(57): unsure at all Xaa locations
  Clone ID: PAT_MRT3847_15705C.1.pep
GGTKDRQRMIGLCTANEIHPNIKVIPIEXANEALKRLINRNVKFRFVINVQNSLKEK

SEQ ID NO: 192343 - protein, 69 aa, Glycine max
  Clone ID: PAT_MRT3847_15706C.1.pep
EPAQSALFLPWLLFSPHFESEDILSIQGSFLEVFFKGGFPTQLLSSQHYSNHHHLNNSLFSFSFSHTPP

SEQ ID NO: 192344 - protein, 120 aa, Glycine max
  unsure (1)..(120): unsure at all Xaa locations
  Clone ID: PAT_MRT3847_15707C.1.pep
MGRTLTTAATCLLLSLLLVSLCVTTTTNALMPYTRSSTLWDTMLSSEDPFRILEHTPFSDIPTTTRGVDTLALARADWKETPTAHVIALDLPGMKKEDVKIEVEENRVXRIXGERKGEEE

SEQ ID NO: 192345 - protein, 74 aa, Glycine max
  Clone ID: PAT_MRT3847_15708C.1.pep
MGPSASPSLVERQKGYAMHGQGKEAIEFFQRTVLEGMKPDHVTFALLSACSHSGLVKEGKYYFQIMSDIYGVKP

SEQ ID NO: 192346 - protein, 38 aa, Glycine max
  unsure (1)..(38): unsure at all Xaa locations
  Clone ID: PAT_MRT3847_15709C.1.pep
HNECSXLPLXQGXXXPFFIGSRGYNHLFFQGHRTHKVR

SEQ ID NO: 192347 - protein, 79 aa, Glycine max
  Clone ID: PAT_MRT3847_1570C.1.pep
PLLRPPKGGNFVFFLNPGTILSNVSKNPLLSLTQDPFFFSGRGGDTFASLRWGPGALPQFVAARVFFFWFPKRVLSPGL

SEQ ID NO: 192348 - protein, 29 aa, Glycine max
  Clone ID: PAT_MRT3847_15710C.1.pep
LACALSASDHYRTAIFISHPMSFLLNQYL

SEQ ID NO: 192349 - protein, 66 aa, Glycine max
  unsure (1)..(66): unsure at all Xaa locations
  Clone ID: PAT_MRT3847_15711C.1.pep
TFLSMLCHFRSGIFFFFGGWVVVMTTFVYYFLPETKSVPXVQMEKAWQEHWFCNTLVGEVSDTQHK

SEQ ID NO: 192350 - protein, 113 aa, Glycine max
  unsure (1)..(113): unsure at all Xaa locations
  Clone ID: PAT_MRT3847_15712C.1.pep
FFCEKTTEGEPELVYNPTLCPLEAVIVQHSLTNPDMGLLSCCRTTDLRKXSKGSPGTTRYLYTNNIQRNWRSPGGNETQQGXVNRRTNTPLXMGTGTXGGITRARSRGPNAGC

SEQ ID NO: 192351 - protein, 82 aa, Glycine max
  unsure (1)..(82): unsure at all Xaa locations
  Clone ID: PAT_MRT3847_15713C.1.pep
MEGETVPSEGKLLPPKPNFEXHLKPHEXNNGHVQFRKVYDPPNRLSPLKKARMDIYRAIYAQEKIDVRLNSNAQREKLKTPP

SEQ ID NO: 192352 - protein, 71 aa, Glycine max
  Clone ID: PAT_MRT3847_15715C.1.pep
FVNKMQSRVLTLEEGKERINQSNKPLRPVRVLGLFFALCVLVSVISIYTGKHFGIERVGTTMRSSFQPCYY

SEQ ID NO: 192353 - protein, 150 aa, Glycine max
  unsure (1)..(150): unsure at all Xaa locations
  Clone ID: PAT_MRT3847_15716C.1.pep
SIGWSVGATLXYAQAVPEKRVISCIGDGSFQVTAQDVSTMLRNEQKSIIFLINNGGYTIEVEIHDGPYNVIKNWNYTGLVDAIHNGEGKCWTTKVTCEEELVEAIQTATGVKKDCLCFIEVIVHKDDTSKELLEWGSRVCAANGRPPNPQ

SEQ ID NO: 192354 - protein, 111 aa, Glycine max
  unsure (1)..(111): unsure at all Xaa locations
  Clone ID: PAT_MRT3847_15717C.1.pep
MLSCXYIYLGLFNSEIXTARAYNKAXIXCNGREAVTNFXPSTYKSKMKPKAINESGXHNLNLSLGIATPRHGPKKNGHLQFSIPYNIHPRKSSMIETNINSVIDNPSLKRL

SEQ ID NO: 192355 - protein, 78 aa, Glycine max
  Clone ID: PAT_MRT3847_15718C.1.pep
IRASKAKEIVGLFIFFFFKMGPTNLLKNKRGETKRKKDPGGEKVPIQNPKPLRAKRGKPTNTPVRKMKKAAPPQKQPG

SEQ ID NO: 192356 - protein, 43 aa, Glycine max
  Clone ID: PAT_MRT3847_15719C.1.pep
TPTRPPTRSPTRSVQKRFTDKYNYDFVKDMPLEGQYEWVKLKS

SEQ ID NO: 192357 - protein, 79 aa, Glycine max
  unsure (1)..(79): unsure at all Xaa locations
  Clone ID: PAT_MRT3847_1571C.1.pep
GMXWVLPISLASNXYXFCLVXRXQFXYARVKKEREKRESLVCLFCWCEXEXPAXXXNKNQVSLVQXDXXXPMMVXIAHG

SEQ ID NO: 192358 - protein, 83 aa, Glycine max
  unsure (1)..(83): unsure at all Xaa locations
  Clone ID: PAT_MRT3847_15720C.1.pep
VFVIFLGNPGGFPCLWMAPLMYGTHGIFRVPLGFYGVVTQPRSITIGRSHRSVPVCIRSPQAVMCSPVSIXXQHPGAPYNFIL

SEQ ID NO: 192359 - protein, 69 aa, Glycine max
  Clone ID: PAT_MRT3847_15721C.1.pep
PLTIFLRLSFTFYFAYLLNIPFFYRIPALTLLLNLRILIPLPSLSALYSFFSPPPPPKARRTSYSDDHT

SEQ ID NO: 192360 - protein, 97 aa, Glycine max
  Clone ID: PAT_MRT3847_15722C.1.pep
NIFHTITFCLPSLLKLLIHNPGGPPEKSEPKPRRPPTLPKKKTKKNREKKRQKRPPREKGDTQKIPKKKQPETKKGKPRGPKRRAQPTKRGGAQMPR

SEQ ID NO: 192361 - protein, 393 aa, Glycine max
  Clone ID: PAT_MRT3847_15723C.1.pep
MEGDGYCGSFFQRCKPYIAMISLQFGFAGMNIITKVSLNRGMSHYVLVVYRHAFATAAIAPFAIVLERKVRPKITFLMFMQIFVLGLLGPVIDQNLYYAGLKFTSPTYSCAISNMLPAMTFVMAAIFRMEKLNVRKVRCQAKVIGTVVTVAGAMLMTLYKGQVISFLGSKYMHHPRNYVPENNTDSGEKDWFKGSVLLVLATLSWASFFILQAVTLRKYPAQLSLTALVCALGTLQSIAVTFVMEHKPSVWTIGWDMNLLAAAYAGIISSGITYYVQGIVMQKKGPVFVTAFSPLMMIIVAIMGTFILAEKIYLGGVIGAILIVMGLYSVLWGKHKENKEKEAEITIEVLKCCSENGMRLETVVEDAETNNDIEMQKGEASRELRVAIGVPKV

SEQ ID NO: 192362 - protein, 161 aa, Glycine max
  Clone ID: PAT_MRT3847_15724C.1.pep
MEDAEAANTLRILVATDCHLGYMEKDEVRRHDSFHAFEEICAVAERHRVDFVLLGGDLFHENKPSRSTLVKAIEILRRYCLNDRPVPFQVVSDQTLNFQNAFGHVNYEDPHFNVGLPVFTIHGNHDDPAAVDNLSDVDILSACNLVNYFGKTVLGGSGEGQ

SEQ ID NO: 192363 - protein, 97 aa, Glycine max
  Clone ID: PAT_MRT3847_15725C.1.pep
DVRNYRVPLCVLNGHGYAVRKVKFSPHVRNLMVSCSYDMTVCVWDFMVEDALVSRYDHHTEFAVGVDMSVLVEGLMASTGWDELVYVWQHGTDPRAP

SEQ ID NO: 192364 - protein, 80 aa, Glycine max
  Clone ID: PAT_MRT3847_15726C.1.pep
AQIMIIPVLGYLVGLEKQLCGPKSSRVKGILIARFPRDPHVALTTGRTRRKAEAWHTAAPQERGREKDSERVCWWSLRLE

SEQ ID NO: 192365 - protein, 110 aa, Glycine max
  Clone ID: PAT_MRT3847_15727C.1.pep
MCGGAMISDFMLLFETSNILRVFWENWLKNGSTTAKSVAFQVRAEKFANRKRKNQYRGIRQRPWGKWAAEIRDPRKGVRVWLGTFNTAEEAARAYDAEARRIRGKKAKVN

SEQ ID NO: 192366 - protein, 119 aa, Glycine max
  Clone ID: PAT_MRT3847_15728C.1.pep
DWNKYDECVNATASVDKSVKVWDVRNYRVPLCVLNGHGYAVRKVKFSPHVRNLMVSCSYDMTVCVWDFMVEDALVSRYDHHTEFAVGVDMSVLVEGLMASTGWDELVYVWQHGTDPRAP

SEQ ID NO: 192367 - protein, 80 aa, Glycine max
  unsure (1)..(80): unsure at all Xaa locations
  Clone ID: PAT_MRT3847_15729C.1.pep
GGGGXXXYLTNHFNSNISSTFHSISFQPNNLSFHPISTLFLFFFILFFSHLPTGGASISSLPTKQPKSEPGISPIACSAG

SEQ ID NO: 192368 - protein, 130 aa, Glycine max
  unsure (1)..(130): unsure at all Xaa locations
  Clone ID: PAT_MRT3847_1572C.1.pep
YKFWTKHXKNLALTEEETMEVIRNRGIPADVLAERAHEFEKHVAHESLKDQIPADDTADSTKDNTFANIMNLRQSVDGDLKLLTDGKTXRGKHIAVSNTSAGDNHVDQIALMAQEETLAASAXDIRTAMV

SEQ ID NO: 192369 - protein, 90 aa, Glycine max
  Clone ID: PAT_MRT3847_15730C.1.pep
LSHGWYIQEHVVHHVVKLLASSVPPSHSGSQSPLVNIILMLCAVLRGTSSIDTIHILSLYGVVPAVAASLLPLCETFGSIKPTSNSTGDE

SEQ ID NO: 192370 - protein, 409 aa, Glycine max
  unsure (1)..(409): unsure at all Xaa locations
  Clone ID: PAT_MRT3847_15731C.1.pep
MSLFLLRFLHCSNYIKGSAKTKALLLHRLAEDRLFLFSYSSIFPPLGTDAFVILRVLLCFSSEMCGGAIISDFIPAAAIAGSRRLTADYLWPDLKKRKSDLDVDFEADFRDFKDDSDIDDDDDDHQVKPFAFAASSRLSTAAKSVAFQGRAEISANRKRKNQYRGIRQRPWGKWAAEIRDPRKGVRVWLGTFNTAEEAARAYDAEARRIRGKKAKVNFPEAPGTSSVKRSKVNPQENLKTVQPNLGHQSSVLATITWXLVEQKPLVXQYANMASFPGSGNGLRSLPSSDDATLYFSSDQGSNSFDYAPEISSMLSAPLDCESHFVQNANQQQPNSQNVVSIEDDSAKTLSEELVDIESELKFFQMPYLEGSWGDTSLESLLSGDTTQDGGNLMNLWCFDDIPSMAGGVF

SEQ ID NO: 192371 - protein, 45 aa, Glycine max
  Clone ID: PAT_MRT3847_15732C.1.pep
LKWMQRTKVDPVGKDWTQIPQRRGFKSYCRCEDPFCRLLAAVSSR

SEQ ID NO: 192372 - protein, 40 aa, Glycine max
  Clone ID: PAT_MRT3847_15733C.1.pep
YPLQSPIGLWNDAVQCRNRSYGRLVFLYCVVMRFIQKHVS

SEQ ID NO: 192373 - protein, 27 aa, Glycine max
  Clone ID: PAT_MRT3847_15734C.1.pep
LNYLKYSKNAGNYFASLARCFYLFLEP

SEQ ID NO: 192374 - protein, 117 aa, Glycine max
  Clone ID: PAT_MRT3847_15735C.1.pep
HQRGVVDKLFKSMSVGLGLEENELKEGANEDDMHYLLKINYYPPCPCPDLVLGVPPHTDMSYLTILVPNEVQGLQACRDGHWYDVKYVPNALVIHIGDQMEVHILLRCYSYIWINLN

SEQ ID NO: 192375 - protein, 56 aa, Glycine max
  Clone ID: PAT_MRT3847_15736C.1.pep
LLSSTPLALRFPSDMTKSWYPAPGATTQKIISIVACHLSTNSSASGVIPQTKSYTL

SEQ ID NO: 192376 - protein, 52 aa, Glycine max
  Clone ID: PAT_MRT3847_15737C.1.pep
SSRLDGIILDGAPVKVRRPTHYSPSLAATLGSSQPSPSLNLGAAGSRLRQVT

SEQ ID NO: 192377 - protein, 56 aa, Glycine max
  Clone ID: PAT_MRT3847_15738C.1.pep
TAGLRINHQHLSSHCTYNDWTLSGELDGLQRLLRDNPALLNERNPAYGETPLHMED

SEQ ID NO: 192378 - protein, 53 aa, Glycine max
  Clone ID: PAT_MRT3847_15739C.1.pep
YRPLLTIFFMEDRDSTSNYLLHADRLNLLHYIFNTKCNKHQHLKVVSNVTTLL

SEQ ID NO: 192379 - protein, 270 aa, Glycine max
  Clone ID: PAT_MRT3847_1573C.1.pep
LACLQELEFREEDKNRNKQIQASIAKVVQRQSEALVKRRRDTPGSFVTRSQRNQRNNNECWGLFCTYIQEEENDNNEKDSSSTDERCTELRQRRRKRRTRGRPSQPSSSTASPDGGCIESDMDIRISSRLVSKPQKLTWGRGGFRSHTRHGSGNGSNSKSSRSSRLAKLVDYLHSLNENTDELDHLCEYVAHQTPLLVEEVEILAVKGCCSTVCDKSFDETSSSDELTTLVIDPSKDELETLQGHESLAGIKSKCISKREHLILAYRRKE

SEQ ID NO: 192380 - protein, 61 aa, Glycine max
  unsure (1)..(61): unsure at all Xaa locations
  Clone ID: PAT_MRT3847_15740C.1.pep
SAPCSTVVLGLSAGAPPTIKNRHPRFLTTTQTHVTLITWQXXVXSPKKKKKKRPPALENPS

SEQ ID NO: 192381 - protein, 83 aa, Glycine max
  Clone ID: PAT_MRT3847_15741C.1.pep
FQIRRGSKKQSSTKAIYINQLKENTSYSDRKVKSDNEEIKYENLIKISQLQMHIETNKRKKDKHGLKMRYEMSCFLSATLGLV

SEQ ID NO: 192382 - protein, 161 aa, Glycine max
  unsure (1)..(161): unsure at all Xaa locations
  Clone ID: PAT_MRT3847_15742C.1.pep
LYSARAAARRQQKGHSNGHAMARKLLRAGYYWMSMETDCCKHARXCHKCQIYADRIHVPPTTLNVLSSPWPFSMWGIDMIGRIEPKASNGHRFILVAIDYFTKWVEAASYANVTKQVVVRFIKNQIICRYGVPNRIITDNGTNLNNKMMKELGEEFKIEHH

SEQ ID NO: 192383 - protein, 177 aa, Glycine max
  Clone ID: PAT_MRT3847_15743C.1.pep
MNQIGGTKDPEAEPVSPSLPQPQDTPKSSDKTDSATAVVVVAAASEEQEVGEEEKPPPPPVPMEEDPVNPATVFSIRLKQPRSNLLHKMSVPELCRNFSAVSWCGKLNAIACAAETCARIPSSTANPPFWIPIHIVIPERPTECAVFNVIADLDRDASQLIECCSSSCPRALLIANF

SEQ ID NO: 192384 - protein, 47 aa, Glycine max
  Clone ID: PAT_MRT3847_15744C.1.pep
MSCRELLHIQTHELQFPFELGKPISRSMQLGNKTDDYVAVKVETTNA

SEQ ID NO: 192385 - protein, 37 aa, Glycine max
  Clone ID: PAT_MRT3847_15745C.1.pep
AATSVLQDLEDLVMRNLHDWQNFAIVGFLGIHNIVFQ

SEQ ID NO: 192386 - protein, 50 aa, Glycine max
  Clone ID: PAT_MRT3847_15746C.1.pep
KSLFLKSFCMVAFKSPSHCHLDSFSPSKANTFCNFGAVVRFSVNVSIMGH

SEQ ID NO: 192387 - protein, 52 aa, Glycine max
  Clone ID: PAT_MRT3847_15747C.1.pep
HRLTIPISFTFYLDYSLLRTSVIIMSTGTIIFLISIYIKHYLISSINIYIRS

SEQ ID NO: 192388 - protein, 81 aa, Glycine max
  Clone ID: PAT_MRT3847_15748C.1.pep
MAFDTLFLNARFDGGTRHHIAVKDGRIAAITSVDQPPAGAETIDLKDALVVPGFVEGHIHLDTSFYGDAWRPHKPCADGFN

SEQ ID NO: 192389 - protein, 56 aa, Glycine max
  Clone ID: PAT_MRT3847_15749C.1.pep
IQDSDSAYASMLDIFFLRYPDHSVSVSCINQERSFLLTLAKRAFFISLDIYAGVSA

SEQ ID NO: 192390 - protein, 453 aa, Glycine max
  Clone ID: PAT_MRT3847_1574C.1.pep
MAAQKRSFPDAPNDNNRHAKHHHEEAKTEEEEEEEEEEAQQQQQHDEEEEEEDNNYKSDDSPPEDKSEYVFVELLEIRKEVQCPICLGIIKKTRTVMECLHRVCRECIDKSMRLGNNECPACRTHCASRRSLRDDPNYDALIAALYPNIEKYEQEELEFREEDKNRNKQASIAKVVQRQSEALVKRRRDTPGSFVTRSQRNQRNVLSRRQNQGMDNQGSEDNEEENDNNEKDSSSTDERCTELRQRRRKRRTRGRPSQPSSSTASPDGGCIESDMDIRISSRLVSKPQKLTWGRGGFRSHTRHGSGNGSNSKSSRSSRLAKLVDYLHSLNENTDELDVHLILLSLDKQITPSLQQPHLCCRPTLSVKHLCEYVAHQTPLLLEEVEILAVKGCCSTVCDKSFDETSSSDELTTLVIDPSKDELETLQGHESLAGIKSKCISKREHLILAYRRKE

SEQ ID NO: 192391 - protein, 51 aa, Glycine max
  Clone ID: PAT_MRT3847_15750C.1.pep
MVLPGHQRCGNESMRNDEPEARLEPLSEQRNQRCGLTGTKEELRLGVAKLY

SEQ ID NO: 192392 - protein, 63 aa, Glycine max
  Clone ID: PAT_MRT3847_15751C.1.pep
MVSETSLSSSKRSPATPKFCNSFTTRIFADVAGDITIVVDGESFLLHKFPLVTLSGKIRKDGG

SEQ ID NO: 192393 - protein, 334 aa, Glycine max
  unsure (1)..(334): unsure at all Xaa locations
  Clone ID: PAT_MRT3847_15752C.1.pep
MLSKASSAMPTFPSSMVRSGLCVWPNVRQLCFRKGILYGFMRLFSTPLKTLRGASRSLRVAQFCSVANMSSSLLIELVPCLNDNYAYLLHDVDNGYLVVVCXDPFLKSVLFHMMPLSREKSKFDIHTVHTHPFIMIRTRVGMCYELKARYGAKVIGSETDKXRIPGIDIYLNDGDKWMFAGHEVRVMDTPGHTLGHISFYFPGSGAIFTGDTLFSLSCGKLISICPKQMLSSLKKIMSLPDDTNIYCGHVYTLNNTKFALSIEPENEELQSYAAQVAYLRSKGLPTIPTTLKMEKACNPFLRTSSAAIRQSLNIAATANDAEALGGIRQAKDNF

SEQ ID NO: 192394 - protein, 82 aa, Glycine max
  Clone ID: PAT_MRT3847_15753C.1.pep
KKEPEPNFQLLDNPARVMPAQLKVLSMTETCRYQPFKPLSIGGIIILKDTSEDIEELVEPVASHGPKIEEEEQEPEPPEPFE

SEQ ID NO: 192395 - protein, 69 aa, Glycine max
  Clone ID: PAT_MRT3847_15754C.1.pep
MVSKVEEAMKRNKQMQPQAQNQQQQLQKQIQCNKGKAGKFKKSSSNLEEDGASSAILFLACIAYAPSYA

SEQ ID NO: 192396 - protein, 381 aa, Glycine max
  unsure (1)..(381): unsure at all Xaa locations
  Clone ID: PAT_MRT3847_15755C.1.pep
MLHMFSKASSAMATFPCSRVKSGLCVWPDVRQLCFRKGMLYGFMRLFSTPLKTLRGASRSLRVTQFCRAPNMSSSLQIELVPCLKDNYAYLLHDVDTGTVGVVDPSEAVPIIDALSRKNRNLTYILNTHHHHDHTGGNVELKARYGAKVIGSGTDKERIPGIDIHLNDGDKWMFAGHEVRVMDTPGHTRGHISFYFPGSGAIFTGDTFFASCXQMLSSLKRIMSLPDDTSIYCGHEYTLNNSKFALSIEPENKELQSYATHVSNLRNKGLPTVIFRTWLLXWMVSSALCRGSSFTRNTCLSQLIVIEACIALLVVGMLEFCVFAFSKLFLFSQIPTTLKVEKACNPFLRTWSIEIRQKLNIAATADDAEALGVIRQAKDNF

SEQ ID NO: 192397 - protein, 115 aa, Glycine max
  unsure (1)..(115): unsure at all Xaa locations
  Clone ID: PAT_MRT3847_15756C.1.pep
MLQLIISPQMLSSLKRIMSLPDDTSIYCGHEYTXSNSKFALSIEPENKELQSYATHVSNLRNKGLPTIPTTLKVEKACNPFLRTWSIEIRQKLNIAATADDAEALGVIRQAKDNF

SEQ ID NO: 192398 - protein, 89 aa, Glycine max
  Clone ID: PAT_MRT3847_15757C.1.pep
LFCFGVWQNNTKFALSIEPENEELQSYAAQVAYLRSKGLPTIPTTLKMEKACNPFLRTSSAAIRQSLNIAATANDAEALGVIRQAKDNF

SEQ ID NO: 192399 - protein, 160 aa, Glycine max
  Clone ID: PAT_MRT3847_15758C.1.pep
YGCEKTTEGAELKERYGAKVMGSEIDKERIPGIDIYLSDGDNWMFAGHEVHILATPGHTEGHVSFYFPGSGAIFTGDTLFSLSCGKLLEGTPEQMLSSLKRIMSLPDDTSIYCGHEYTLNNSKFALSIEPENKELQSYAAHVANLRNKGLPTVIFRTELC

SEQ ID NO: 192400 - protein, 97 aa, Glycine max
  unsure (1)..(97): unsure at all Xaa locations
  Clone ID: PAT_MRT3847_15759C.1.pep
KVKNYDGDISSLGSAKRFLKAVIEIAFAFKELKLWEVEANLMHXVKYLRQSWQTMEAEREELWISRLLGILIDTVLTRGNMMNVGTTRRDANAFKLV

SEQ ID NO: 192401 - protein, 137 aa, Glycine max
  unsure (1)..(137): unsure at all Xaa locations
  Clone ID: PAT_MRT3847_1575C.1.pep
MAALAKCDPTSGGIECPKDEKLARGEILDKPRTRCFTILPMENNLADRQKMLRCARDIMKKRDKRTXKSELDPYFMEWTGXANRLLSKGSDIVGRDNARWDGLMTTQAMTKMAKVPNRIXGVMKKLTRDRTHLGDGY

SEQ ID NO: 192402 - protein, 118 aa, Glycine max
  Clone ID: PAT_MRT3847_15760C.1.pep
MPRDLSRSRSPPYRRRHSPSPVGHRYSRRSRRDRSRSPYSSYSYNRRKSRSISPRGHRSPSTTPRRRRSRTPSAKRYRRHRSRSSSLSPTRKSSSPSLGSVEHKSATEKLKKEEEKKR

SEQ ID NO: 192403 - protein, 337 aa, Glycine max
  Clone ID: PAT_MRT3847_15761C.1.pep
MSDAKERSGFCVWPDARQLCLRKGLLYGFMRLFSIPLKTLRGASRSLRVDQFCSVVNLSSSLQIELVPCLRDNYAYLLHDVDTGRLGVVDPSEAAPIIDALSKKDLNLTYIMNTNHHPDHTGGNAELKERYGAKVIGSEIDKERIPGIDIYLSDGDNWMFAGHEVHILATPGHTEAGHVSFYFPGSGAIFTGDTLFSLSCGKLLEGTPEQMLSSLKRIMSLPDDTSIYCGHEYTLNNSKFALPIEPENKELQSYATHVANLRNKGLPTHGMRLLKYKSHFPCTNHASAHIPTTLKVEKACNPFLRTWSIEIRQKLNIAATADDAEALGVIRQAKDNF

SEQ ID NO: 192404 - protein, 309 aa, Glycine max
  Clone ID: PAT_MRT3847_15762C.1.pep
MKCKKHTSDLSSTVGVCASCLRERLISLAAAQAQAQAHHPQAQLTRVISRASDDYSRNSDPNPPPPLIFPRSVSPYVSRRKSDYPADWLDDRRERLFYSTPQLGPTFCAGDSEYHADAKSFKKRFNKFRIFAKIFRTRSEKFQSDPSCEQASHASPSWFSAFFPTRRRNKDRSGTTKEYSSAAARRRYRPSDRGMSPVTTEDFGDECDQSPSGSGYVSEASPWWRRTPAVAPSARRSRLGHTKSASGSGMALCLSPLVRASPNRRWNHKGLPPEMAEVRAAAAKPHLSAAASFCANRSRKLADFGRVNP

SEQ ID NO: 192405 - protein, 82 aa, Glycine max
  Clone ID: PAT_MRT3847_15763C.1.pep
PTSGPAPDHAELAERGPAAAGVQPSPLGGGEASVAQEPQQDQQEDIPEATEPAPPAPVTDQPLSQDPSSAPALDLNEHAQDH

SEQ ID NO: 192406 - protein, 111 aa, Glycine max
  Clone ID: PAT_MRT3847_15764C.1.pep
MRLSTRVRSPVVNCYSKETGLSMASGKGAVLPFVASVLSAPYYMPSLLADHVTLLALFNGERLPARYTQSKAVAEFRRTHADTWNVHKELFTDEQLVILADTSYSSSYFYL

SEQ ID NO: 192407 - protein, 37 aa, Glycine max
  Clone ID: PAT_MRT3847_15765C.1.pep
RILRSFTIKIQCKRKQEEALIIGKLVHLSSDTQEARS

SEQ ID NO: 192408 - protein, 54 aa, Glycine max
  Clone ID: PAT_MRT3847_15766C.1.pep
EWGRASRWLIYIVGALPAEPAITLSKLSQKGHSDDLLRAQTGPTPGTYAWKETP

SEQ ID NO: 192409 - protein, 42 aa, Glycine max
  Clone ID: PAT_MRT3847_15767C.1.pep
SRFPTKGKRNPRDPNLFCVMGDPFRLSYPTGTRGVDPGIQYR

SEQ ID NO: 192410 - protein, 65 aa, Glycine max
  unsure (1)..(65): unsure at all Xaa locations
  Clone ID: PAT_MRT3847_15768C.1.pep
DNEGSWSIGVFXYXDIPXXXNCIKFANVSGDETSAWPVPNPVVTCASISDVGYPNNFVAYPFFFI

SEQ ID NO: 192411 - protein, 36 aa, Glycine max
  Clone ID: PAT_MRT3847_15769C.1.pep
GPFWFLVPPIGLFRINNQYSTFLGRTKVQKKSLTCF

SEQ ID NO: 192412 - protein, 60 aa, Glycine max
  Clone ID: PAT_MRT3847_1576C.1.pep
HNYKIELPYNQNHHQLWLIITSTTMHQGRNVHEYGQRCRLQTCRILATRLHATSVHLRSH

SEQ ID NO: 192413 - protein, 45 aa, Glycine max
  Clone ID: PAT_MRT3847_15770C.1.pep
TLLGLQQASEYLHFSTRTNYKNMIQFNTRLITINERTRPPNYLNN

SEQ ID NO: 192414 - protein, 76 aa, Glycine max
  Clone ID: PAT_MRT3847_15771C.1.pep
ANRPNPIESACHPQICLSPAIFMTNKANGHRVYPKPSQCKPDSENPYLLLRESTCHHSVMHLTYLELQHSLPCEVH

SEQ ID NO: 192415 - protein, 100 aa, Glycine max
  Clone ID: PAT_MRT3847_15772C.1.pep
RRIFGWIGPPGSQLSSKDFAPLIKAIFMYFGSSMRWYLFRWCKGMRGRSRRHRSVNLLNLINLSKVLCKSFELPGFSAIYRSVVVNCNYNSIRNLSDTFT

SEQ ID NO: 192416 - protein, 124 aa, Glycine max
  Clone ID: PAT_MRT3847_15773C.1.pep
ARAGPNIKAYADDHDLQKGQEIWPSLCQAIQDSHFAIVVFSENYAESKWCLKELVQILHCRKTQGLVVIPVFYQVDPSHIRKCTGTYGEAIAKHKDNQSVQDWKAALTEAANISGWDTRSRDNK

SEQ ID NO: 192417 - protein, 53 aa, Glycine max
  Clone ID: PAT_MRT3847_15774C.1.pep
RGLNYPSSQSENCCVPCYLSTSPTGRPNTANVNPRLIQDRVKCIILGAIRCHQ

SEQ ID NO: 192418 - protein, 242 aa, Glycine max
  Clone ID: PAT_MRT3847_15775C.1.pep
WQLALIILALVPLLGLNGYLQFKFLKGFSADTKKLYEEASQVANDAVGSIRTVASFCAEEKVMELYQEKCEGPIKTGKRQGIISGISFGVSFFVLYSVYATSFYAGARLVEDRKATFTDVFRVFFALSMAAIGISQSGSLVPDSTKAKGAAASIFAILDRKSEIDPSDDTGMTLEEFKGEIELKHVSFKYPTRPDVQIFRDLSLTIHSGKTVALVGESGSGKSTVISLLQRIYDPDSGHITL

SEQ ID NO: 192419 - protein, 59 aa, Glycine max
  unsure (1)..(59): unsure at all Xaa locations
  Clone ID: PAT_MRT3847_15776C.1.pep
LHXLMGTXFLVLGYLPSKGVRVDXLRKEIKLPRAGVIQKGKKIIYVFWNLLLIYLFIYF

SEQ ID NO: 192420 - protein, 129 aa, Glycine max
  Clone ID: PAT_MRT3847_15777C.1.pep
MQGASSWLYVYPRGLRELLLYIKMKYNNPVIYITENGMDESNDPTLSLEEALMDTCRIDYFYRHLYYILIAIKDGVKVQGYFAWSLLDNFEWSAGYTLRFGINFVDYKDNLKRHQKLSAHWFRNFLQKY

SEQ ID NO: 192421 - protein, 90 aa, Glycine max
  Clone ID: PAT_MRT3847_15778C.1.pep
KKILRIASKRLSLLYYTFTDDSKKPASVFFSQNESSNDDHRSVPSCNHLFPYQGIATESLIHPIEYRRIAHILPTVTAENNTTTKIVYDD

SEQ ID NO: 192422 - protein, 49 aa, Glycine max
  Clone ID: PAT_MRT3847_15779C.1.pep
QSDPRGYAQLSVAITCMNSVTTVSTRAALVVLSPLHYESNHLHDDRTRG

SEQ ID NO: 192423 - protein, 132 aa, Glycine max
  Clone ID: PAT_MRT3847_1577C.1.pep
KTLEQQNYLSKLLGYDYTIQYKFGKTNVVTDALSRIPPPTSGQCMILSTPHFIFIDAMHKHFTTSSSFQDKLQQICTNPTSHPGIEYHDGLLFFNHKVWLELENPFIVLLIEEFHSTPIGGHLGFAKTLHRV

SEQ ID NO: 192424 - protein, 141 aa, Glycine max
  unsure (1)..(141): unsure at all Xaa locations
  Clone ID: PAT_MRT3847_15780C.1.pep
MGSIPDPGELSELTQPVPPXXXSXXSFDEFQRQTSLMTSCTLLWKELSDHFSSLEQDLNHKSEALKRKIRTLDNTTSDTSLDATLQIALRTLDTRRTGALCALLTGADDMMNSCPGGEGDGRHRTSAETEGLVTAGRRVEG

SEQ ID NO: 192425 - protein, 35 aa, Glycine max
  Clone ID: PAT_MRT3847_15781C.1.pep
QSLRSQILNGHVLDSEIQLNTLNIPTIMFVLLSHS

SEQ ID NO: 192426 - protein, 53 aa, Glycine max
  unsure (1)..(53): unsure at all Xaa locations
  Clone ID: PAT_MRT3847_15782C.1.pep
KLADCEDIQPLNCNYGTRMVKARFAGDXDAPRAVLPSIVRHPRHTGVMVVMGQ

SEQ ID NO: 192427 - protein, 172 aa, Glycine max
  unsure (1)..(172): unsure at all Xaa locations
  Clone ID: PAT_MRT3847_15783C.1.pep
MGSIPDPGELSELTQPSFDEFQRQTSLMTSCTLLWKELSDHFSSLEQDLNHXSEALKRKIHTLHDADDTSPDGEVDDTAGLVLKLKSFCLRMDAFGFFAFVSAKKKELDGLRAEMPVALAECVDPAKFVLEAISEVFPVDKRGEKAGHDLGWACVLVLESLIPVVVDPVIGK

SEQ ID NO: 192428 - protein, 530 aa, Glycine max
  Clone ID: PAT_MRT3847_15784C.1.pep
MGSIPDPGELSELTQPSFDEFQRQTSLMTSCTLLWKELSDHFSSLEQDLNHKSEALKRKIRTLDNTTSDSLRLLDRRETSLDATLQIALRTLDTRRTAALSALLTDADDIINSSPDGEVDDTTGLILKLKSFCLRMDAFGFFAFVSAKKKELDGLRAEMPVALAECVDPAKFVLEAISEVFPVDKRGDKAGHDLGWACVLVLESLIPVVVDPVIGKSRLLVTPIVKEQATEIAETWKTSLEERGGVENVKTPDVHTFLQHVVTFGIVKNEDSDLYRKLVIASAWRKQMPKLALSLGLAQQMPDMIEELISKGQQLDAVHFTYEVGLVEKFPPVPLLKSFLKDAKKVAASILEDPNNAGRAAYLAARKEQSALRAVIKCIEEYKLEDEFPPENLKKRLDQLEKVKTVKTEKRKPVAVPANKRTRASNSNGGPMPPAKAGRLTNAYVSSFPAAPTFVRSPSHGQYPAALPPYPSPPHMYGSRSPPTNPYAAYSPEPAPAIAGSYPAAPMNYPPAYGGYGNVLAPTYQQAYYR

SEQ ID NO: 192429 - protein, 55 aa, Glycine max
  Clone ID: PAT_MRT3847_15785C.1.pep
RMARTRLKIRPRQWIELSILQSWSCLVRYLMYEICIRCSEISFTRQAKQISNYPA

SEQ ID NO: 192430 - protein, 98 aa, Glycine max
  Clone ID: PAT_MRT3847_15786C.1.pep
MDSDQGKLFIGGISWDTTEDKLKEHFGNYGDALSTSIMREKNTGKPRGFGFVVFADPNILDRVLEDKHVIDGRTVTLLSFFLSFLYFMFRLKILYCTF

SEQ ID NO: 192431 - protein, 69 aa, Glycine max
  unsure (1)..(69): unsure at all Xaa locations
  Clone ID: PAT_MRT3847_15787C.1.pep
TQYFFSANVAAKEAPSGFFLPLRDVKASMGPGFIFPXVGPMSTMPGLPTRPCFYNIGFDPPPEKVIGFF

SEQ ID NO: 192432 - protein, 74 aa, Glycine max
  Clone ID: PAT_MRT3847_15788C.1.pep
TARPFFFFLFFLNVQENAYGKRNHSFVQIMLVKPLLITTRGEGPFIKENQNDISSVLKRVCLPKKRMVFYLKHY

SEQ ID NO: 192433 - protein, 70 aa, Glycine max
  Clone ID: PAT_MRT3847_15789C.1.pep
NDRVVVCQKVGNASVRSDYQGRRLSELMYLKFRLFVFWYLSFWKKMINVVSLFKVIWVGFGENLNFMFKG

SEQ ID NO: 192434 - protein, 46 aa, Glycine max
  unsure (1)..(46): unsure at all Xaa locations
  Clone ID: PAT_MRT3847_1578C.1.pep
FADRLMSKKNNHNLLYTVIHLFHXFCNIIFQLMLMXMCXVSXLFFK

SEQ ID NO: 192435 - protein, 187 aa, Glycine max
  unsure (1)..(187): unsure at all Xaa locations
  Clone ID: PAT_MRT3847_15790C.1.pep
MASFCAARTFNIPAMNAGVLRRRASWAAGIVGASVAGAALLRSCSSKRSAPFACMSLSTDTRLKEAVQTEKAPAALGPYSQAIKANNLLFVSGVLGLIPETGKFISDNVEDQTEQVLKNMGEILKSGGASYSSVVKTTIXLADLKDFKKVNEIYAKYFPSPPPARSTYQVAGLPMDAKIEIECIAAL

SEQ ID NO: 192436 - protein, 66 aa, Glycine max
  Clone ID: PAT_MRT3847_15791C.1.pep
VIGIRNGAIQDYAGDLIIYLEKNLDARERELEREDKVDRKALKVKAKSKMSKVTKKARKKQKMQAF

SEQ ID NO: 192437 - protein, 527 aa, Glycine max
  Clone ID: PAT_MRT3847_15792C.1.pep
MGSIPDPGELSELTQPSFDEFQRQTSLMTSCTLLWKELSDHFSSLEQDLNHKSEALKRKIHTLDNSTSDSLRLLDHRETSLDATLQIALRTLDTRRTAALSALLHDADDTSPDGEVDDTAGLVLKLKSFCLRMDAFGFFAFVSAKKKELDGLRAEMPVALAECVDPAKFVLEAISEVFPVDKRGEKAGHDLGWACVLVLESLIPVVVDPVIGKSRLLVTPTVKEHATEIAETWKSSLEDRGGVENLKTPDVHTFLQHVVTFGIVKNDDSDLYRKLVIASAWRKQMPKLALSLGLAQQMPDMIEELISKGQQLDAVHFTYEVGLVEKFPPVPLLKSFLKDAKKVAASILEDPNNAGRAAYLAARKEQSALRAVIKCIEEYKLEDEFPPENLKKRLDQLEKVKMVKTEKRKPVAVPANKRTRASNGNGGPMPPAKAGRLTNAYVSSFPAAPTFVRSPSHGQYPAALPPYPSPPHMYGSRSPPANPYAAYSPEPAPAIAGSYPAAPMNYPHAYGGYGNVLAPTYQQAYYR

SEQ ID NO: 192438 - protein, 97 aa, Glycine max
  Clone ID: PAT_MRT3847_15793C.1.pep
QDLLLPLHPFLAPTDTPKVYGFYIPTLRILPIVYEPFHYTRHAPAAKNRPRLQRSPHLNKNHKPFLTPPPNRRTPRKPPPSATRTRKTQYYSNHQPP

SEQ ID NO: 192439 - protein, 50 aa, Glycine max
  unsure (1)..(50): unsure at all Xaa locations
  Clone ID: PAT_MRT3847_15794C.1.pep
NIHDLSVSPPTAFSLQRQINILKIXXSFTINISFNIITYKNLTIFIYXYI

SEQ ID NO: 192440 - protein, 46 aa, Glycine max
  Clone ID: PAT_MRT3847_15795C.1.pep
GINNIGMDPLEPASVDTPAYVSSIVEINIRNILDSSSTGNPSGRTR

SEQ ID NO: 192441 - protein, 158 aa, Glycine max
  unsure (1)..(158): unsure at all Xaa locations
  Clone ID: PAT_MRT3847_15796C.1.pep
RVPKSVEDKLVRLQCRFLXEKGPDQHKIAWVSWESVCLPKEKGGLGIKDINSFNMALLGKWEWNLMQHKGELWAKVLESKYKGWXGLAEVDRVDHKSIWWRDLQKALFSSHKGQFIQKGLKWKVGSGDQIKFWEDKWTGEEESLAEKYPRLYLISLQQ

SEQ ID NO: 192442 - protein, 65 aa, Glycine max
  Clone ID: PAT_MRT3847_15797C.1.pep
AFSSFLLPGNQSIEWKGSVGGWVLWILQLFFSLYLLISTVSIHQGALRCVLSHFLKRHPSNGSNK

SEQ ID NO: 192443 - protein, 99 aa, Glycine max
  unsure (1)..(99): unsure at all Xaa locations
  Clone ID: PAT_MRT3847_15798C.1.pep
MFFHIVLERNMQLHPRYFGRNLRDNLVSKLMKDVEGTCSGRHGFVVAVTGIENIGKGLIRDGTRFVTFSVKYQCVVFRPFKGEIXEAVVTMVNXMGFFA

SEQ ID NO: 192444 - protein, 176 aa, Glycine max
  Clone ID: PAT_MRT3847_15799C.1.pep
MFFHIVLERNMQLHPRYFGRNLRDNLVSKLMKDVEGTCSGRHGFVVAVTGIENIGKGLIRDGTGFVTFPVKYQCVVFRPFKGEILEAVVTMVNKMGFFAEAGPVQIFVSNHLIPDDMEFQSGDMPNYTTSDGSVKIQKDSEVRLKIIGTRVDATEIFCIGTIKDDFLGVINDPATV

SEQ ID NO: 192445 - protein, 71 aa, Glycine max
  Clone ID: PAT_MRT3847_1579C.1.pep
PRVRKYHIAMATLFCGSNPISYPSAFASLRAPPFFFNSPSEAGRWRLVRAPAPAASSLPLCYRPFSSASPF

SEQ ID NO: 192446 - protein, 130 aa, Glycine max
  Clone ID: PAT_MRT3847_157C.1.pep
CHGYLEALNSLISLGLYKIDSFYIQSPRVRLAARSRQQSILLNSYNLLSFSKNSSNFFSLFLFSFIAMASPARTFFAFILAVVALFFAAANAQDLSPAPSPDAGAAGSVSSSVAMIGASVVLSLMAILKH

SEQ ID NO: 192447 - protein, 65 aa, Glycine max
  Clone ID: PAT_MRT3847_15800C.1.pep
RPPSLGGGGGGGGGGKRWVLGANYLRKVTSKFRGKRASGVVIARQHATYLVAIGQATIVGAIALR

SEQ ID NO: 192448 - protein, 53 aa, Glycine max
  Clone ID: PAT_MRT3847_15801C.1.pep
ICNQSHARPCIVLLDKPLGVIKGLFLMKFLDKKLEQMGLNQLGHKDVPEPTST

SEQ ID NO: 192449 - protein, 92 aa, Glycine max
  Clone ID: PAT_MRT3847_15802C.1.pep
FVVAVFIHKDFALSRVIQYGSFVLSKVGDMGLRVIGWRPQNGVFVDALSFLNYIIVRCRVLMDGSDSACPVVRIGFISEGGRLILNIKILMV

SEQ ID NO: 192450 - protein, 58 aa, Glycine max
  Clone ID: PAT_MRT3847_15803C.1.pep
KKPNDYPSSIFNNTVYLLKSFFIIYMSGTPYYYKHEWFYTLIFNNSNTINFDQFHNFF

SEQ ID NO: 192451 - protein, 67 aa, Glycine max
  Clone ID: PAT_MRT3847_15804C.1.pep
QIHLHLLFQGFYPSECTGNLSICSIILHMILYINLVDEYINLFESIYITSTQILSIFGNARHFYFLY

SEQ ID NO: 192452 - protein, 73 aa, Glycine max
  unsure (1)..(73): unsure at all Xaa locations
  Clone ID: PAT_MRT3847_15805C.1.pep
NXRIGXXNVELINXLPXFEGEXXLMFIGADLXHPASRDIKXPSIAXVVATXNWPXANRXAAXVXXXXXXVXKX

SEQ ID NO: 192453 - protein, 97 aa, Glycine max
  unsure (1)..(97): unsure at all Xaa locations
  Clone ID: PAT_MRT3847_15806C.1.pep
MADLPEWPKQDMKRMSYVPYRVGDLDCTINDIHRMFMXKPFECLENFPQEKYANAFLGFGPDKSHLACRIYKYIIGLPRMTSATAFDILQLLTQTII

SEQ ID NO: 192454 - protein, 95 aa, Glycine max
  Clone ID: PAT_MRT3847_15807C.1.pep
GLLKLGQSLKGTTTAACRNAFDGSGGDLRCSTRPRAAFDGAWWSCDSATAVRPHWVLHIHEQNSHLHCAQFDKVAPRSNKASFAILNVQPSGPSG

SEQ ID NO: 192455 - protein, 88 aa, Glycine max
  unsure (1)..(88): unsure at all Xaa locations
  Clone ID: PAT_MRT3847_15808C.1.pep
QSEASQKTXNSXIKMPLLLXLILXIPXPHLLSFXXXXXXXXXQLLASLEFSPPCSLVLELRQALFIILKTCFPPSLIFGFXQLFLSSC

SEQ ID NO: 192456 - protein, 149 aa, Glycine max
  Clone ID: PAT_MRT3847_15809C.1.pep
IRLEYGCEKTTEGQFPYVIKHKKGKGNIVADALSWRHALLSMLETKLIGLECLKSMYENDENFGEIFKNCEKFSENGFFRHEGFLFKENKLCVPKCSTRNLLVCEAHEGGLMGHFGVQKTLETLQEHFYWPYMKKDVQKFCEHCIVCKK

SEQ ID NO: 192457 - protein, 56 aa, Glycine max
  unsure (1)..(56): unsure at all Xaa locations
  Clone ID: PAT_MRT3847_1580C.1.pep
FLKKFFXIHYETICCHFCKVETTHITNGMLLSLDHKLRHTFIKGGLNLTILFTIQW

SEQ ID NO: 192458 - protein, 65 aa, Glycine max
  Clone ID: PAT_MRT3847_15810C.1.pep
TGMHKKRSMTTSHNTIWPNEENRHWQLFLKERRKYMLQIIKAWEFTINWQKLACKILNSCHSYTP

SEQ ID NO: 192459 - protein, 44 aa, Glycine max
  Clone ID: PAT_MRT3847_15811C.1.pep
ICGRRVFKEGRMSSKGKGYVGHEGLICDSKKCDSGAEAPAMRQG

SEQ ID NO: 192460 - protein, 56 aa, Glycine max
  Clone ID: PAT_MRT3847_15812C.1.pep
DQPHLSLIKKTLIKVKIFLLSYAYVDNYRGCSRIGFGQIQDPTQLNLIGLVFIIFF

SEQ ID NO: 192461 - protein, 182 aa, Glycine max
  Clone ID: PAT_MRT3847_15813C.1.pep
NFRSYSMSSLPQTMSTPSAPVKAVSSKPNFDLKDWDQISSQKYFWKKMGFEGLLSFRGVSLEQERFHVCCGLEGLYTPGRRWRRKLKIIQPLDIHSFAADVNSDDLLCVQIKNVAPIHAPDIVIFIDTITIVLEEFTKNGSLSSLPISCIEAGNDHSLPNLALRRGEEHSFILKPATSIWKG

SEQ ID NO: 192462 - protein, 168 aa, Glycine max
  Clone ID: PAT_MRT3847_15814C.1.pep
MAAESSLRVATPTLCNLNGSQRRPTTTTLSPLRFMGFRPRPSSHSLTSSSLSHFFGSTRIHSNSSSSYSSISRQHAPRRNFSVFAMSADDAKRSVPLKDYRNIGIMAHIDAGKTTTTERILFYTGRNYKIGEVHEGTATMDCMEQEQERGITITSAATTTFWNKHRIN

SEQ ID NO: 192463 - protein, 780 aa, Glycine max
  Clone ID: PAT_MRT3847_15815C.1.pep
MAAESSLRVATPTICNLNGSQRRPTTLSPLRFMGFSPRPSHSLTSSSLSHFFGSTRINSNSSSISRQHAPRRNFSVFAMSGDDAKRSVPLKDYRNIGIMAHIDAGKTTTTERILYYTGRNYKIGEVHEGTATMDWMEQEQERGITITSAATTTFWNKHRINIIDTPGHVDFTLEVERALRVLDGAICLFDSVAGVEPQSETVWRQADKYGVPRICFVNKMDRLGANFYRTRDMIVTNLGAKPLVIQLPIGSEDNFKGVIDLVRNKAIVWSGEELGAKFDIVDVPEDLQEQAQEYRAQMIETIVEFDDQAMENYLEGIEPDEETIKKLIRKGTISASFVPVMCGSAFKNKGVQPLLDAVVDYLPSPLDLPAMKGSDPENPEETIERVASDDEPFAGLAFKIMSDPFVGSLTFVRVYAGKLSAGSYVLNANKGKKERIGRLLEMHANSREDVKVALAGDIIALAGLKDTITGETLCDPDNPIVLERMDFPDPVIKVAIEPKTKADVDKMATGLIKLAQEDPSFHFSRDEEINQTVIEGMGELHLEIIVDRLKREFKVEANVGAPQVNYRESISKTAEVKYVHKKQSGGQGQFADITVRFEPMDPGSGYEFKSEIKGGAVPKEYIPGVMKGLEECMSNGVLAGFPVVDVRAVLTDGSYHDVDSSVLAFQLAARGAFREGIRKAGPRMLEPIMKVEVVTPEEHLGDVIGDLNSRRGQINSFGDKPGGLKVVDALVPLAEMFQYVSTLRGMTKGRASYTMQLAMFDVVPQHIQNQLATKEQEVAA

SEQ ID NO: 192464 - protein, 151 aa, Glycine max
  unsure (1)..(151): unsure at all Xaa locations
  Clone ID: PAT_MRT3847_15816C.1.pep
EKNNKRGLLCLIDSISVAGRVLAQRFLDERKIGKEIVHIKIEAIGHVDSTKSTPTGRLIYKLGSIDKRAIVRYQNEAAQMNKRYFTYAWMLDKIKAERERGITIYIALWKFENTKYYCTRIDAPGHRDLIKNMISGTYQADXAGFIICSTT

SEQ ID NO: 192465 - protein, 66 aa, Glycine max
  unsure (1)..(66): unsure at all Xaa locations
  Clone ID: PAT_MRT3847_15817C.1.pep
RILNDLKDLQNDPPTSCCAGPMAEDMSHWQATIMGPADHPXSCGVFLVSIHFPPDHPFKPTKVAFP

SEQ ID NO: 192466 - protein, 50 aa, Glycine max
  Clone ID: PAT_MRT3847_15818C.1.pep
DYPICTCIYIFKEKIIPNKSLKQYRFDHITRIFIIKWDDHLSCVYNTYYS

SEQ ID NO: 192467 - protein, 63 aa, Glycine max
  Clone ID: PAT_MRT3847_15819C.1.pep
FLRGMCSNRLYAVYDMPQYLANTMRVVQSQILAPVNITHSLASVFIDFAHYDTNTIHFNYTRY

SEQ ID NO: 192468 - protein, 69 aa, Glycine max
  Clone ID: PAT_MRT3847_1581C.1.pep
DPKSSEIYRVMIKSQVVGALRSIVSCSCGVPTLRRAKCDSASQFSCVGSSPDYVCIAEFARSYVYCHGA

SEQ ID NO: 192469 - protein, 117 aa, Glycine max
  Clone ID: PAT_MRT3847_15820C.1.pep
MWNPRDHEDQDESWEVRAFAEDTSNMMGTTWPPRFYYCSFCRREFRSAQALGGHMNVHRRDRARLHQASVVPHNNNNSNNSNINPISSFSNTPSFLNISHRPLLSYFLLFIPVSTLQ

SEQ ID NO: 192470 - protein, 111 aa, Glycine max
  unsure (1)..(111): unsure at all Xaa locations
  Clone ID: PAT_MRT3847_15821C.1.pep
XTARVTLNFFKNDQSSCYDDDEYSKPCXDLCMCTPXMPTACSCENVRPNTCHSNCKSCLCTRSHAGQYRCLDTNDFXYIPCKSTDDLNNQQLSQNVEAPLGSVCYVPGALH

SEQ ID NO: 192471 - protein, 51 aa, Glycine max
  Clone ID: PAT_MRT3847_15822C.1.pep
LLNIKIHFVQNKIVRTILKHLAIIERGAYTFVTSIYYLVAGKEKKTTIPMY

SEQ ID NO: 192472 - protein, 116 aa, Glycine max
  Clone ID: PAT_MRT3847_15823C.1.pep
TSCVDIHSIPRSSKSFILPYFPSFQILKLRASTSLHNNVSANTFGNSVMCRKLVMSVYLAFHYSLMFLYYLAEEIRRSEGIHLLETRALLPNTRPRFEVPAGLSGLEAFTGEDLGV

SEQ ID NO: 192473 - protein, 72 aa, Glycine max
  unsure (1)..(72): unsure at all Xaa locations
  Clone ID: PAT_MRT3847_15824C.1.pep
SGXNGVKLWVDEKXKYXYNXXXXVGGEWRXXXXVVWKNXVXXGCGKVRCXNGXXXIXXXYVFFXXYVXXRXX

SEQ ID NO: 192474 - protein, 178 aa, Glycine max
  unsure (1)..(178): unsure at all Xaa locations
  Clone ID: PAT_MRT3847_15825C.1.pep
MEQVNALKDKGNAALQQGNYTEAIKFYSDAIALDPTNHVLFSNRSAAYAKYEQFELTYADSEKTVTLKPDWGKGYSRKGSALAYLGRTDEAIEAYEDRLIIDPTNAQLAEGLKEVNAKNPPLPDAXFKCRPMXSPDLFAKLQSNPQTRALLYDPEYLKICTKLHTDPAAQLDMYDDPR

SEQ ID NO: 192475 - protein, 119 aa, Glycine max
  unsure (1)..(119): unsure at all Xaa locations
  Clone ID: PAT_MRT3847_15826C.1.pep
PNELNEEFYTFPTSKAQDVIRMRYDRLRSVAGRIQTVVGDIKRXGGWFHALLSWKDPRATSLFVIFCLVVAGALYVKPFKVVASVAGIFWLRHPRFRSKLPSMPSNFFKRLPSCVDGML

SEQ ID NO: 192476 - protein, 104 aa, Glycine max
  Clone ID: PAT_MRT3847_15827C.1.pep
TRFVQFGFGVSTMLARCLRLFPPHLSLLTLCCAAPLSPVLLFICCVVCCLISLSPGFDLVKNPTLGHLLILLSSNCFLVFVLEAIAVPRVQSGQEPLLLKKKGH

SEQ ID NO: 192477 - protein, 50 aa, Glycine max
  unsure (1)..(50): unsure at all Xaa locations
  Clone ID: PAT_MRT3847_15828C.1.pep
KRVIYSKARAPKAGLFNPPPPXLFPPPFFFSSFFFFFFFFSPPPLKKKIS

SEQ ID NO: 192478 - protein, 82 aa, Glycine max
  unsure (1)..(82): unsure at all Xaa locations
  Clone ID: PAT_MRT3847_15829C.1.pep
KLYGDSALNQFFREIFPDADEGSRRAIKKSFVXFNGAVLFSNWKKVGTKKVKGSPPYGMEFKKWEFLNLFWISVAYIFMWEY

SEQ ID NO: 192479 - protein, 81 aa, Glycine max
  Clone ID: PAT_MRT3847_1582C.1.pep
STCPTTAKRLQHMHHKRRRGGGYISAQASPRLSQLSTLAFNFNGDPPLALIKALYFAMYLTCFLRNHQYCMYTMAPPNHTP

SEQ ID NO: 192480 - protein, 151 aa, Glycine max
  Clone ID: PAT_MRT3847_15830C.1.pep
MDIPKQTLGSLAMVILLFAGIILVYHWNSSFSNEFVLTVKEPLCKQSNLTTPNIEANGDGLDTALAKASMGNKTVIIAVVNKAYVDQDVESDTTMLDIFLGSFWLGEGTRSLIDHLLLVAVDQTAYDRCQFLKLNCFKLETDGVDFKSEKI

SEQ ID NO: 192481 - protein, 57 aa, Glycine max
  Clone ID: PAT_MRT3847_15831C.1.pep
FYSTIFYCIKPCLLHAFTSWTTLFVFLLAIAQCSCNYIWKLLPTQREFLSEHDCIVL

SEQ ID NO: 192482 - protein, 57 aa, Glycine max
  Clone ID: PAT_MRT3847_15832C.1.pep
LMLESCYISARRAWSYLVYKTTSGHHYYVKDLSHYYFGSFKIELAVIQIDDLTDLPT

SEQ ID NO: 192483 - protein, 101 aa, Glycine max
  unsure (1)..(101): unsure at all Xaa locations
  Clone ID: PAT_MRT3847_15833C.1.pep
PNKPYYYHSFSPPSPSSPRRPYYNHSPPPPLPSPPYXKPYYYHSPPLXTPPSPILFYYHSPPLPPLYNIPYYSPSPSFYDSILVPNHLHYQFTPSTLFIYF

SEQ ID NO: 192484 - protein, 64 aa, Glycine max
  Clone ID: PAT_MRT3847_15834C.1.pep
IVMSIVRHSIKISLYRVHCAPLKTLYGRQNPIAWCQYQLTNILFRLAKKGYIPSVVFSQPSRPE

SEQ ID NO: 192485 - protein, 56 aa, Glycine max
  Clone ID: PAT_MRT3847_15835C.1.pep
DALILKQRWEKPCITHGIEMEQTTCNDETCADYSHGTKQSMDRPSSALSSTMGGLL

SEQ ID NO: 192486 - protein, 54 aa, Glycine max
  Clone ID: PAT_MRT3847_15836C.1.pep
IDFCFKLAQEQSVITLRGTSVGLIDCLNITFANVPFACVKDLRLDTTPPYNSPL

SEQ ID NO: 192487 - protein, 73 aa, Glycine max
  Clone ID: PAT_MRT3847_15837C.1.pep
VFFFFFLHPTKNNIILLPKINRDMQTLQATKLCFPCIINSNKKTYIYSIASSDRRVASSNHYNLNRNNIIRIN

SEQ ID NO: 192488 - protein, 124 aa, Glycine max
  unsure (1)..(124): unsure at all Xaa locations
  Clone ID: PAT_MRT3847_15838C.1.pep
QGKEGIPPAQHRLIFSGKQLKDGRTLASFNIQKGESFPLVLGFRGGREIFVXIFRVGQITPQGGGCFPPFQNVEPKIRAKEGFPPGHQRVIFFGKQLXDGRALSCFNIQKESTLPLVLRFRGGF

SEQ ID NO: 192489 - protein, 601 aa, Glycine max
  unsure (1)..(601): unsure at all Xaa locations
  Clone ID: PAT_MRT3847_15839C.1.pep
ARGELPESKQKNSQRRSFMGFRRKSQSNDESMDNELIEDVSSESEDDKGPNSLELDDKEKQREKRKGLDLATTLERIEKNFVITDPRLPDNPIIFASDSFLELTEYSREEILGRNCRFLQGPETDPATVRKIREAIDNQTEVTVQLINYTKSXKFWNLFHLQPMRDQKGEVQYFIGVQLDGSQHVEPLHNCIAEDTAKEGEQLVKQTAENVDEAVRDFPDANKKPDDLWTNHSKAVHPKPHRKDDPAWKAIQKVLESGEQIGLKHFRPIKPLGSGDTGSVHLVELRGTGQYFAMKAMDKGVMLNRNKVHRACAEREILDKLDHPFLPALYASFQTKTHVCLITDYCPGGELFLLLDRQPTKVLKEDAVRFYAAEVVIVLEYLHCQGIIYRDLKPENVLLQSNGHVSLTDFDLSCLTSSKPQLIIPATNSKKKKKKKQKSQEVPMFMAEPMRASNSFVGTEEYIAPEIITGSGHTSAVDWWALGILIYEMLYGYTPFRGKTRQKTFANILHKDLKFPKSKPVSLQGKQLIYWLLQRDPKDRLGSREGANEIKRHPFFRGVNWALVRCMKPPELDAPLLPETEEEKEAKDIHPGLEDLQTNIF

SEQ ID NO: 192490 - protein, 59 aa, Glycine max
  Clone ID: PAT_MRT3847_1583C.1.pep
LELELLNARLLFLLNLMIIYLGRGHGARISAAALHRETHKAQSTLRSCCHRSLQDSHRH

SEQ ID NO: 192491 - protein, 87 aa, Glycine max
  unsure (1)..(87): unsure at all Xaa locations
  Clone ID: PAT_MRT3847_15840C.1.pep
MCPGQVFHILQDGTPGSAHSGNTQILGNGFYTYFAFIQAVNFFAGFGTVSSTDELNMRELAVFFGQTSHXTTVGTTGAVDQFQWGYC

SEQ ID NO: 192492 - protein, 89 aa, Glycine max
  Clone ID: PAT_MRT3847_15841C.1.pep
LRTPKIKRAGKQNGQTNQKGEAILQLWPHPKKNPHQLRGSKCSKKGQMPFLGTPPLGPQGVVRPWGSTPQGVYPKPSPLLGRILCGRPD

SEQ ID NO: 192493 - protein, 34 aa, Glycine max
  Clone ID: PAT_MRT3847_15842C.1.pep
LQNSNFITPANDAYNGTTLFFMWGGHNPNSNLIS

SEQ ID NO: 192494 - protein, 116 aa, Glycine max
  Clone ID: PAT_MRT3847_15843C.1.pep
TGLNFLQIFGLLYIFSVYLYYGPKTRGGKKNSWQRGKGIPPLSKKGEQGGLPPTIKTPNWGTKSCPMGGMTAGFEKKMGTYDPTPRGEKRHFFWPPKKAIPGGTKAAKFLVSGGNS

SEQ ID NO: 192495 - protein, 96 aa, Glycine max
  unsure (1)..(96): unsure at all Xaa locations
  Clone ID: PAT_MRT3847_15844C.1.pep
VSDSIELLKTKFFNFGLTVKDLVLVSGAHTVGTSLCFFMTRRLFNSFFCGEGSHPSLIHYFLHWLMAIWLLIXNVISRLAIVVGSELNFDINIFDL

SEQ ID NO: 192496 - protein, 57 aa, Glycine max
  Clone ID: PAT_MRT3847_15845C.1.pep
KTTDGQAAHLNGGTSLLGNGRDSLILWGKDRKLYCYSWNVHTEDAVSCCIWAYFAQD

SEQ ID NO: 192497 - protein, 47 aa, Glycine max
  Clone ID: PAT_MRT3847_15846C.1.pep
NTNFLVVFISIIENKFLFNFKKRVYRYDIFLTFLKISGFISIFSEIL

SEQ ID NO: 192498 - protein, 80 aa, Glycine max
  Clone ID: PAT_MRT3847_15847C.1.pep
RDHPLCLVADDSVFLPLLVAQLSEASHVMSLLPGLKERGLQYLQAAAHANGLSRNCIEVLEKRVKQLTMHDIHQKKVVFS

SEQ ID NO: 192499 - protein, 34 aa, Glycine max
  Clone ID: PAT_MRT3847_15848C.1.pep
SPPASSPAAAPKYMYKSPPPPGYIYACPPTPIYK

SEQ ID NO: 192500 - protein, 133 aa, Glycine max
  Clone ID: PAT_MRT3847_15849C.1.pep
MVGLSVVLEAQKSCINKKTPQVINKTTMLMLSSIHNKPSPQPSSLFQPPTFLDQCFLCGKRLLPGKDIYMYKGDRAFCSVDCRCKQIFSDEEEAIQKEKCSLAAMRPTSSSSSTSTARHHRKGTRNRGGGAYF

SEQ ID NO: 192501 - protein, 45 aa, Glycine max
  Clone ID: PAT_MRT3847_1584C.1.pep
VSVAVPIQGMFIVLKSNEGLGINKTGPFVFCPFLRLNKPVIFATF

SEQ ID NO: 192502 - protein, 136 aa, Glycine max
  Clone ID: PAT_MRT3847_15850C.1.pep
WSGTPLWNAGTGAVSIGSNACLSPTSSTNNSCCSGNGSPTLGKHTRDTVCTDEEKSEKCVLVPKTIRIDAPNEALKSPIIRATLAIKLDKQQFVSNGDILKKIEPKEGKDRMLGASQILEANPPAISRAHAFQEGL

SEQ ID NO: 192503 - protein, 61 aa, Glycine max
  Clone ID: PAT_MRT3847_15852C.1.pep
HPWRSNWASSHGPCYRIRQRRRQTTRHRLQSRPRQCGSISTVSVITSSSCSRSSDSVAAVA

SEQ ID NO: 192504 - protein, 67 aa, Glycine max
  Clone ID: PAT_MRT3847_15853C.1.pep
MARWDAILSLPVQNPPTLEISSAELVWSKVEGWHDKLDRVALIPYARVDDFVRGESNNKECPTRFHV

SEQ ID NO: 192505 - protein, 107 aa, Glycine max
  Clone ID: PAT_MRT3847_15854C.1.pep
GKGGLNFFLILLERGEKSFSFLPGGFFFFWGAFFGTSPNGLANEAAPFFICQKNIGQGLGFPPEGELGNPGPHLVCFRGFFLTRKTLYKKSWVQNFPASIKRFSWIP

SEQ ID NO: 192506 - protein, 70 aa, Glycine max
  unsure (1)..(70): unsure at all Xaa locations
  Clone ID: PAT_MRT3847_15855C.1.pep
SACPCPVRPSAPPVPLVSAAPASVRRWRWLLFFSFFGLFSAGVCVWGGKPASFGDNGLPSVEVVSGXRMG

SEQ ID NO: 192507 - protein, 332 aa, Glycine max
  Clone ID: PAT_MRT3847_15856C.1.pep
ARGTAMILRVSPSCISNLEKRIGMQLDQATLEGRLMPNFSYSMETLYNVDCVLGILDHFLAMDQVTGCASPCSIDDGQLIGSPSLTPITMVAKLIDGYLAEVAPDINLKLPKFQALAAAVPEYARPLDDGLYRAIDIYLKSHPWLVESEREQLCRLMDCQKLSLEACTHAAQNERLPIRIIVQVLFFEQLQLRTSIAGCFLVSDNLDGSRQLRSGFVGSTEGGWASAVKENQVLKVGMDNMRMRVSELEKECSNMRQEIEKLGRTKGSSAWGTVSKKLGFKLKSQMCSAQEGSVSNQNNANNNVEKLKERHVKHKKGSSISDKASVSSIVHS

SEQ ID NO: 192508 - protein, 43 aa, Glycine max
  Clone ID: PAT_MRT3847_15857C.1.pep
NYVQYHIKGPITPLFFTRYIIVFERNEQNTAANNHLCIQSLYF

SEQ ID NO: 192509 - protein, 91 aa, Glycine max
  Clone ID: PAT_MRT3847_15858C.1.pep
FVETVTPRNKPKYDALLIVLKEAEETSLKESERLEKEIVGVQKLKTKFRTMTADGYFEKHPDLRKKSDDEVRNDSLGVLVFQLPSCPGDGG

SEQ ID NO: 192510 - protein, 53 aa, Glycine max
  Clone ID: PAT_MRT3847_15859C.1.pep
GPSAFSVILPSDLICICTVKVTSGFFLCQLNAEAELVSIWLFIIFSLHPVPTT

SEQ ID NO: 192511 - protein, 87 aa, Glycine max
  unsure (1)..(87): unsure at all Xaa locations
  Clone ID: PAT_MRT3847_1585C.1.pep
WLLSKAPRSISHTLPPSLPLPTLSQQPPSSLNPPPFLLPSPTLTPPXSLPFLLPPNPNPSPXPSPPLPKPPIPXPALPPLWVPPSYL

SEQ ID NO: 192512 - protein, 61 aa, Glycine max
  Clone ID: PAT_MRT3847_15860C.1.pep
PHSMLISLTDQRNQSLKNIYLVVAHSRVEYDKIIASLGLLTPHILLQVSWGMGKRLLMDTA

SEQ ID NO: 192513 - protein, 84 aa, Glycine max
  Clone ID: PAT_MRT3847_15861C.1.pep
GPIQTSYTKLTSSFFFMQPNHLTLCHSARQAKMTRPNSFTTTLPHSLTPKPTPPIVPHSVKHKCWDKADRVKRHDPNRYHKNAL

SEQ ID NO: 192514 - protein, 44 aa, Glycine max
  unsure (1)..(44): unsure at all Xaa locations
  Clone ID: PAT_MRT3847_15862C.1.pep
ESVRXWXKRREVEASXXFXXSCGXAWXCGEPXYHXNQVPEGKKC

SEQ ID NO: 192515 - protein, 52 aa, Glycine max
  Clone ID: PAT_MRT3847_15863C.1.pep
QRRKAGKTKPRLLWGSVSKVIQLMYRAIRPVIRLLVSTYPTDQLHGLHAATR

SEQ ID NO: 192516 - protein, 43 aa, Glycine max
  Clone ID: PAT_MRT3847_15864C.1.pep
ASQHIIKELEDLQKDPATSCNAGPVAKDMIHWHATIIGPTDNP

SEQ ID NO: 192517 - protein, 225 aa, Glycine max
  unsure (1)..(225): unsure at all Xaa locations
  Clone ID: PAT_MRT3847_15865C.1.pep
MEKQNEEEEEQKKKKKSSVVIRIPSYQEVVESSQAKSTPSSLFVPSQTFSEAFAFVKSSDFYSPPPKSRETGQSDAPSSTSTPSPATAAASSTIPSSQNRNSILVSHRQKGNPLLKHIRNVRWAFADVVCDYMLGQSSCALYLSLRYHLLHPDYLYYRIRELQKNFKLRVVLCHVDVEDVIKPLLEVTKTAMLHDCTLLCGWSLEECGRYLETIXVYENKPADII

SEQ ID NO: 192518 - protein, 86 aa, Glycine max
  unsure (1)..(86): unsure at all Xaa locations
  Clone ID: PAT_MRT3847_15866C.1.pep
AESGRLKSNAESYAPLEDAHLINRAGXSALAAIDDMRAEGYEPSKEMLEQVRQPCTREMDYARDAREHSLNNALNIQQGADNRRDI

SEQ ID NO: 192519 - protein, 79 aa, Glycine max
  Clone ID: PAT_MRT3847_15867C.1.pep
REISGFFLPANNRAYVRYALPPLLTVRMVSLLIFLIKGPTVSLEPIGKTAVPTPTQLAIMATKRRVVRRTVYFSFLTSA

SEQ ID NO: 192520 - protein, 117 aa, Glycine max
  Clone ID: PAT_MRT3847_15868C.1.pep
TAARRRQKGEYHAEWINIWKNKHNDVLAGQWVEGIVTHTPVYMEWYRKNTTLFLSVAQQLHDPRTTFTQNVAGSRGEQKHFEIPHPQQCILLLHLLIKLLTTLASHSPQTPHDGLTV

SEQ ID NO: 192521 - protein, 135 aa, Glycine max
  unsure (1)..(135): unsure at all Xaa locations
  Clone ID: PAT_MRT3847_15869C.1.pep
LLVGAHTLGIGHCXNIVGRLYDPRLGDKMDFALEASLRLACPTEIPLTNXTFVPNDXTPVIFDNXYYRDIMMGRGLFGIDSSISRDPRTAPFVMRFAMDQNYFFKAFSSAFVKLSSTNVLTDVQGDVRRQCNQVN

SEQ ID NO: 192522 - protein, 88 aa, Glycine max
  Clone ID: PAT_MRT3847_1586C.1.pep
MGNCQAVDGAVLVIQHPCGKIERLYWPVSASEVMRTNTGHYVSLIIPSPVPPQDQIQEKKTVRFTRVKLLRPNETLNLGHAYMLITTH

SEQ ID NO: 192523 - protein, 341 aa, Glycine max
  Clone ID: PAT_MRT3847_15870C.1.pep
MRKPYMMEKDKMNNNIKSKLRKGLWSPEEDEKLLRYMITKGQGCWSDIARNAGLQRCGKSCRLRWINYLRPDLKRGAFSPQEEELIIHLHSILGNRWSQIAARLPGRTDNEIKNFWNSTLKKRLKMNNNINATSSPNNSYSSSEPRDVNVMGGIMPMNEHDLMTMCMDSSSSTSSSCMQSMHTTNRAVTDQFDPFPLLSNNRYDMTGATDFLDNMAACLTQVGMVDHDHGVVHDGYGTLEPNKTGLESDFSLPPLESRSIDDNSSTPIDHVKSHNNNNHFKNSCFNNTDHHHHIQCSNNVVVEDLFGFGNHGHGESFRMEEWDFEGLIQDIPYFSSLDFQV

SEQ ID NO: 192524 - protein, 152 aa, Glycine max
  unsure (1)..(152): unsure at all Xaa locations
  Clone ID: PAT_MRT3847_15871C.1.pep
MACEEVAHSRPLFLTIYTIVIVGIVFSSLYVFSAIRHPSAIPSTWSLSNEDVRLTEQTLNGSQSETVHIVPSVPQEARKMRTRPILSVPPRNKKMPSLNAFRLTKELVQQRVKDNIIIXTFGNYAFMDSILTWVEQLNDXGVSNYLVGAMDI

SEQ ID NO: 192525 - protein, 150 aa, Glycine max
  Clone ID: PAT_MRT3847_15872C.1.pep
MFSTATADGVPTPYNSTVATMLGRRRIPIHTTFYWGHKVDILFRCWPGDSAAMYAVALLLVFFMAVLVEWLSFTNIVKLKPGGSNDVVGGLLKTGLYGVRSGLSYMVMLAVMSFNGGVFVVAICGHVIGFLIFGTRAIRKKSDGLDSSKP

SEQ ID NO: 192526 - protein, 63 aa, Glycine max
  unsure (1)..(63): unsure at all Xaa locations
  Clone ID: PAT_MRT3847_15873C.1.pep
XGVGGXRRTEGXXGXWSSDXGLALXAWRRWRRRXXSXREQXDXKLXVTEGSXAVGLHVLGFCS

SEQ ID NO: 192527 - protein, 50 aa, Glycine max
  Clone ID: PAT_MRT3847_15874C.1.pep
LAKGKQIRLRLDLICNKPKKLFSRFNSLIWYNLHNILYTRSSDLLDQHFF

SEQ ID NO: 192528 - protein, 55 aa, Glycine max
  Clone ID: PAT_MRT3847_15875C.1.pep
ELRYILENYRKSRIRTDNTRFEKKKTIERKFRKRKDVGEESSFALVAESTPQTFS

SEQ ID NO: 192529 - protein, 170 aa, Glycine max
  Clone ID: PAT_MRT3847_15876C.1.pep
MSQCVPSWDVEDNPPPSRVSLRSNSNSTAPDVPMLDYEVAELTWENGQLSMHGLGLPRVPVKPPTAVTNKYTWEKPRASGTLESIVNQVTSFPHRGKPTPLNGGGGGGVYGNFRVPWFDPHATATTTNTVTMDALVPCSNREQSKQGIGVGPRRHVHWAPRPCGVMLRGG

SEQ ID NO: 192530 - protein, 37 aa, Glycine max
  Clone ID: PAT_MRT3847_15877C.1.pep
NCNSGKQWEKLVYYNQYHLPITIFNDSLELVEFGTPY

SEQ ID NO: 192531 - protein, 60 aa, Glycine max
  unsure (1)..(60): unsure at all Xaa locations
  Clone ID: PAT_MRT3847_15878C.1.pep
MAASTVALSSSSVAGQAIKLXPSNPELCVGRVSMRKTASKTVSSGSPWYGRDRVTYLGPC

SEQ ID NO: 192532 - protein, 135 aa, Glycine max
  unsure (1)..(135): unsure at all Xaa locations
  Clone ID: PAT_MRT3847_15879C.1.pep
MGKQGNVVACLKCPKDVYVEAYTCPCVSRHQFDSIFVSQSNGNYVVIFTTTPPYRLNKYKQYEGHVVSGFPIKCNFSLDGKKLASGSSDCSIYIYDYQLXENQAHDQACIDVAFHPVIPNVIASCSWDGSILVFE

SEQ ID NO: 192533 - protein, 318 aa, Glycine max
  unsure (1)..(318): unsure at all Xaa locations
  Clone ID: PAT_MRT3847_1587C.1.pep
MLEASYAFSFTAARGKRATDGRSLLTYIELMGSLFSMANTKANQSESSATSPNETSKRQRMSPASVEECPRLIPNIPDELSLQIIARLPRICYYHVRLVSRRWKTTITSLELYKVRKELGTTEEWLYLLVRIGQNKLLWHALDPRSRIWQRLPIMPRVVDEEDSQKVSSRLWMWNMVEGIRIAEIIRGLLGQKDVLDDMPFCGCAFGAVDGCLYILGGFSKASTMKCVWRFDPIQNSWKKVNSMSTGRAYCKTGVLNTXLYVVGGVSQGQAGLIPLQSAEVYDPFSDTWSDVPXLPFSRAGVLPTALLADMLXPIATW

SEQ ID NO: 192534 - protein, 62 aa, Glycine max
  unsure (1)..(62): unsure at all Xaa locations
  Clone ID: PAT_MRT3847_15880C.1.pep
GNGEGERKSXDRIYDXDVYNDLGDPDSNINLKRPVXXGSKQYPYPRRCRTGREHTDSGHFCS

SEQ ID NO: 192535 - protein, 47 aa, Glycine max
  Clone ID: PAT_MRT3847_15881C.1.pep
IDNAFAAEFCAINYTLETLLTIFILINTCKICISPFILPAWLHQKSI

SEQ ID NO: 192536 - protein, 91 aa, Glycine max
  Clone ID: PAT_MRT3847_15882C.1.pep
MDTLNIVKVTMTTTHSYTGNHMLLDSLHLYLIRSISSALNIVPTITVSSNAVSLVVPHLKVKLNLISLLVPTPNVSFYYLFLNLDNKDLTA

SEQ ID NO: 192537 - protein, 66 aa, Glycine max
  Clone ID: PAT_MRT3847_15883C.1.pep
SWFSLAPSLSLCLSFTHTHTEGCRSSEVSLFLKRRVYRSLIYVKVDGELIQLKFEGGYTLNCLLYI

SEQ ID NO: 192538 - protein, 141 aa, Glycine max
  Clone ID: PAT_MRT3847_15884C.1.pep
VDHFRFYLLVSFGAGPKPAPIYRPQPKGPQFKTRGHRWDPYTRKGGFYKKGSATPKYGCTPGEPGDAGQNPQTRKGGRLPSKGGRRILLRWGNVHEKGGRERERLGETTRTPLMKRGHAQKDWGGGGETNPRRYGLRGGGG

SEQ ID NO: 192539 - protein, 58 aa, Glycine max
  Clone ID: PAT_MRT3847_15885C.1.pep
AKKIIITLLKGTSQIFMQTYLILGVILSHNPRNQVFTALYVLIVLYWHPPFNYLFQMK

SEQ ID NO: 192540 - protein, 90 aa, Glycine max
  Clone ID: PAT_MRT3847_15886C.1.pep
NVVFFGPLGRLTFEGRLFFKKKILAFVFETIQIKVGPFPPPKARLGKKETKDPSPKVPFFIGFYVEKEITFSPAPSGGTPFWCGAPWVKK

SEQ ID NO: 192541 - protein, 52 aa, Glycine max
  unsure (1)..(52): unsure at all Xaa locations
  Clone ID: PAT_MRT3847_15887C.1.pep
PAATHAXRXTXAGAXXVRAYYXRHGFFLVGCDDHHHRHXHAQEEEMPPLRPP

SEQ ID NO: 192542 - protein, 63 aa, Glycine max
  Clone ID: PAT_MRT3847_15888C.1.pep
FRYEAGIVIRNMCLKNHALGDVLQILNMLITIKKWIVHQQSGWQPLNITLTEVNSDSEDIACP

SEQ ID NO: 192543 - protein, 142 aa, Glycine max
  unsure (1)..(142): unsure at all Xaa locations
  Clone ID: PAT_MRT3847_15889C.1.pep
ILXXGCXXXXXSXXXXLXXXXSXXDXXGPXXXXPXXXCXVXXXXXXCXXXXDXYXXXXLXXXITPVXFSXXXXXXXRXHXSVXVDXXXXXXSXCXLCRRCXXCTXXLXXMRXLXLLGXXLYVVXVCXAGGHSXLRLXXXXXX

SEQ ID NO: 192544 - protein, 78 aa, Glycine max
  Clone ID: PAT_MRT3847_1588C.1.pep
LTRANEKKKKSNFPSPKKKKRAMADQLTVDQIYKVKEAFGLFDKDGDGAFYVSLSQVMRIRADLIYSVEVFADRRSFL

SEQ ID NO: 192545 - protein, 100 aa, Glycine max
  Clone ID: PAT_MRT3847_15890C.1.pep
RTLGRTLGRTLGFTLKTPPGPPGGPPLGLPRKLEPGPGGEPLFPVGKGGPTGGPQGGKPPKPGGLTNRPPPKEKNLAARAQKGTPPPPGKGALFFGPQGV

SEQ ID NO: 192546 - protein, 44 aa, Glycine max
  unsure (1)..(44): unsure at all Xaa locations
  Clone ID: PAT_MRT3847_15891C.1.pep
NXIEPFFCYLIDPPTPPPXSFFXGXXRXXXXPPPEKNRLGFVRK

SEQ ID NO: 192547 - protein, 53 aa, Glycine max
  Clone ID: PAT_MRT3847_15892C.1.pep
VNEIQWNTQQLIRNATLLSTVYDSSRKTEEGVRVSPENKMLGMLLSSQIKTLF

SEQ ID NO: 192548 - protein, 78 aa, Glycine max
  Clone ID: PAT_MRT3847_15893C.1.pep
YIDNLHISLALQERCNDIGIAPDKAVYLLVVHNQISQDYGLSMYDYSFRFKAKAKRCNNNITGSCESPSVPLVESKNT

SEQ ID NO: 192549 - protein, 78 aa, Glycine max
  unsure (1)..(78): unsure at all Xaa locations
  Clone ID: PAT_MRT3847_15894C.1.pep
FVAGADAGADAWYFLGSWKRYILKTEAEHMDGCDPSGLIILQKERSWLAQGCEVGERVGPLAXNFNHIGTESGDTYME

SEQ ID NO: 192550 - protein, 77 aa, Glycine max
  unsure (1)..(77): unsure at all Xaa locations
  Clone ID: PAT_MRT3847_15895C.1.pep
GLLYHLRDDTVTGPRAYDGLGKVXKHHSFTFRPSSCNETDDGSXMRSNGDQSPDEATRVTHTIMIVKPPGHQSGSPP

SEQ ID NO: 192551 - protein, 87 aa, Glycine max
  unsure (1)..(87): unsure at all Xaa locations
  Clone ID: PAT_MRT3847_15896C.1.pep
DDSYPLYDSSTCPHIRKEFDCLKYGRPDQQYLKYRWQPNECDLPRFXGKDFLTKLKGKQIMFIGDSVSLNQWQSLICLLRSSVPSTE

SEQ ID NO: 192552 - protein, 124 aa, Glycine max
  Clone ID: PAT_MRT3847_15897C.1.pep
GSRAVNTFVTLICQQLSLRKDDRFGMGGTFFNANLYPQRSMGGVPDPLRPKPDQLSLSQQRVYDDFVQLPWQSQSIPSSHSMSPDVVAQSCTVLTDTNDSVSRHSYPVYPFTTSYEGVSRPLYD

SEQ ID NO: 192553 - protein, 36 aa, Glycine max
  Clone ID: PAT_MRT3847_15898C.1.pep
RYSTHKNAFFTGHSAEMHADIFLHCFSTTFIALEDE

SEQ ID NO: 192554 - protein, 65 aa, Glycine max
  Clone ID: PAT_MRT3847_15899C.1.pep
GIKCMKKDDSLYMSLSLQLNINNYINQKRKEEQVPSYTGRRSFLWKPTERSFQGGLLLVRSKRKS

SEQ ID NO: 192555 - protein, 62 aa, Glycine max
  unsure (1)..(62): unsure at all Xaa locations
  Clone ID: PAT_MRT3847_1589C.1.pep
QFVDQWGANVAGYSPIYHLKVWSPTGYVYTVGSTGLAIWAVSXLGHHSGGALLVTNPSALAQ

SEQ ID NO: 192556 - protein, 59 aa, Glycine max
  Clone ID: PAT_MRT3847_158C.1.pep
PPSHKKGLGLDSRSTVETPVFLSHSRGWWGGECRGPKPQRWCRFIEASAQSNPSYDAAG

SEQ ID NO: 192557 - protein, 200 aa, Glycine max
  unsure (1)..(200): unsure at all Xaa locations
  Clone ID: PAT_MRT3847_15900C.1.pep
WVLGILGGKQAHLPTSKLFPLQQHLAQSSDGVKLRTRVFKPQXEADGNLGIVLLHPYSILGGCQALLNGYTAFTFDMRGVAKSTGFSQVKDVVAVCNCLSNTFSLPRILLLGSSAGAPIAGSAVDQIEQVIGYPSYSHQNHFIMGTQDGFTSVKQLRNKLNSAAGRVETHLIDGVGHFQMEGPGYDAEMVDLIIKFIASL

SEQ ID NO: 192558 - protein, 144 aa, Glycine max
  unsure (1)..(144): unsure at all Xaa locations
  Clone ID: PAT_MRT3847_15901C.1.pep
RELTLESFTVEGSDGVKLRTRVFKPDAGTEADGKLGIVLVHPYSILGGCQGLLKGIASGLALMXLHRPPFDMRGVGKSTGRASLTGSSEVKDVVAVCNWLSNTFSLPRILLLGSSAGLSLHGLVVLIHMLLVCDSFPQFIHELL

SEQ ID NO: 192559 - protein, 194 aa, Glycine max
  Clone ID: PAT_MRT3847_15902C.1.pep
SFSWHYTELDDRDLEIRGRTLFFVIVLFSIILLVTVLFIYTRWVCRYQGRLPTTAFTAAAAHAPPLAQPQGMDPASIKKLPIILHHAPSDREESAWDETECCICLGEFRDGEKVKVLPACDHYFHCDCVDKWLTHHSSCPLCRASLKVESSFPGVRKGHIIFLNATCWIKVLKDVALLSHPCVWSTNWICGPAS

SEQ ID NO: 192560 - protein, 136 aa, Glycine max
  Clone ID: PAT_MRT3847_15903C.1.pep
MSENYTLESFTVEGSDGVKLRTRVFKPDAGTEADGKLGIVLVHPYSILGGCQGLLKGIASGLALNGYTAVTFDMRGVGKSTGRASLTGFSEVKDVVAVCNWLSNTFSLPRILLLGSSAGILHSQIYHFSCLNLFTV

SEQ ID NO: 192561 - protein, 175 aa, Glycine max
  Clone ID: PAT_MRT3847_15904C.1.pep
MSSPDSRSFSWHYTELDDRDLEIRGRTLFFVIVLFSIILLVTVLFIYTRWVCRYQGRLPTTAFTAAAAHAPPLAQPQGMDPASIKKLPIILHHAPSDREESAWDETECCICLGEFRDGEKVKVLPACDHYFHCDCVDKWLTHHSSCPLCRASLKVESSFPKILIQEPPLRIDFQF

SEQ ID NO: 192562 - protein, 256 aa, Glycine max
  unsure (1)..(256): unsure at all Xaa locations
  Clone ID: PAT_MRT3847_15905C.1.pep
MAGYLRAVSSLCRASGSARTWAPAALTVPSWPEQPRRHYAEKRIKVEKPVVEMDGDEMTRIIWQFIKEKLILPHVDVQLKYFDLGLPNRDQTNDQVTIDSALATQKYSVAVKCATITPDEARVEEFKLKKMWKSPNGTIRNILGGTVFREPIICKNIPRLVPGWTKPITIGRHAHGDQYKATDFVVDRAGTFKLVFTPKDGSSAKEWEVYNFPAGGVGMGXMYNTDESISGFAHSCFQYSIQKKWPLYLSTKNTIL

SEQ ID NO: 192563 - protein, 42 aa, Glycine max
  Clone ID: PAT_MRT3847_15906C.1.pep
VDGENEGKQGYRCRYHGNSATAKPRYGIVSVLKSSSVAANFA

SEQ ID NO: 192564 - protein, 63 aa, Glycine max
  unsure (1)..(63): unsure at all Xaa locations
  Clone ID: PAT_MRT3847_15907C.1.pep
SYSYFIQKKKADWAVXKATSKQLRNLRAPIFLNNLFGVSISNKKILIKSNYRVEPKKQDHISN

SEQ ID NO: 192565 - protein, 175 aa, Glycine max
  Clone ID: PAT_MRT3847_15908C.1.pep
MSNPDTRSFNWHYTELDDRDLEIRGRTLFFVIVLFSIILLVTVLFIYTRWVCRYQGRLPTTAFSAAAVHAPPLAPPQGLDPASIKKLPIILHHAPADRDESVWDETECCICLGEFRDGEKVKVLPACDHYFHCDCVDKWLTHHSSCPLCRASLKVESSFPKILIQEPPLRIDFQF

SEQ ID NO: 192566 - protein, 83 aa, Glycine max
  Clone ID: PAT_MRT3847_15909C.1.pep
RFMLNQVGSNIVNINQANVCGLWFPFINRISQCFLFLLETTVIGFCMKKCKPFTSRWSMCGVMDLCHPLFLCGEWPNSCVMYI

SEQ ID NO: 192567 - protein, 101 aa, Glycine max
  unsure (1)..(101): unsure at all Xaa locations
  Clone ID: PAT_MRT3847_1590C.1.pep
PLWGLCGVLXXXGFLRRGLWXGPPLLPFCASWVGSSLSXRGFPWPVGXASVSXRXRRXRRLPLPWXRVGPPCPPCRWSCRGLRRPRSPALARAPAWAXNSV

SEQ ID NO: 192568 - protein, 41 aa, Glycine max
  Clone ID: PAT_MRT3847_15910C.1.pep
YERDLSMSEGKSGVLFMIVLIICKFKSFFVSCLLEIRKGAL

SEQ ID NO: 192569 - protein, 43 aa, Glycine max
  Clone ID: PAT_MRT3847_15911C.1.pep
TRTSISLRMTPDPSQLPSSPRRNFARYETMKTHWLSEGVINRL

SEQ ID NO: 192570 - protein, 62 aa, Glycine max
  Clone ID: PAT_MRT3847_15912C.1.pep
VETTCGNLNAESTPQQRKSEITLVREEVESTPQQRKSEITLVKEEVDIVDASKGESVASPHT

SEQ ID NO: 192571 - protein, 68 aa, Glycine max
  unsure (1)..(68): unsure at all Xaa locations
  Clone ID: PAT_MRT3847_15913C.1.pep
MEANSGASEPNSNATITINVKFSGVSIPISISPNSTIKDLKSLLLPSTNVXPXGQKLIFKGKVLEDPM

SEQ ID NO: 192572 - protein, 178 aa, Glycine max
  Clone ID: PAT_MRT3847_15914C.1.pep
MVTFRFHQYQVVGRALPTEADQHPKIYRMKLWATNEVRAKSKFWYFLRKLKKVKKSNGQVLAINEIFEKNPTKIKNYGIWLRYQSRTGYHNMYKEYRDTTLNGSVEAMYNEMASRHRVRSPCIQIIKTATIPAKLCKRESTKQFHNSKIKFPLVFQKVRPPTRKLKTTYKAKKPNLFM

SEQ ID NO: 192573 - protein, 78 aa, Glycine max
  Clone ID: PAT_MRT3847_15915C.1.pep
WLECFLELNVLEGEGFVDVRIQIQLLWDHMHPQGVLLSVCMLVTMINVAFSHPLPWFLPNTPKLNAFLISIHVFHLHC

SEQ ID NO: 192574 - protein, 178 aa, Glycine max
  Clone ID: PAT_MRT3847_15916C.1.pep
MVTFRFHQYQVVGRALPTEADQHPKIYRMKLWATNEVRAKSKFWYFLRKLKKVKKSNGQVLAINEIFEKNPTKIKNYGIWLRYQSRTGYHNMYKEYRDTTLNGAVEAMYNEMASRHRVRSPCIQIIKTATIPAKLCKRESTKQFHNSKIKFPLVYKKVRPPTRKLKTTYKAKKPNLFM

SEQ ID NO: 192575 - protein, 54 aa, Glycine max
  Clone ID: PAT_MRT3847_15917C.1.pep
KFTSQVLRSKLSAAYIPLSPAAYLKLPYPDINTTPYPTGVPVSHLVIHIIPWRF

SEQ ID NO: 192576 - protein, 158 aa, Glycine max
  Clone ID: PAT_MRT3847_15918C.1.pep
PSLTTYNSLMYMYSRSENFQKSEEILREVLEKGMKPDRISYNTVIYAYCRNGRMKEASRIFSEMKDSALVPDVVTYNTFIATYAADSMFAEAIDVVRYMIKQGCKPDQNTYNSIVDWYCKLDQRHEANSFVKNLSNLDPHVSKEEESRLLERIAKMWS

SEQ ID NO: 192577 - protein, 92 aa, Glycine max
  Clone ID: PAT_MRT3847_15919C.1.pep
LFGLCVDFDSIRFDSVEVLSSSKMSGRGKGGKGLGKGGAKRHRKVLRDNIQGITKPAIRRLARRGGVKRISGLIYEETRGVLKIFLENVNRD

SEQ ID NO: 192578 - protein, 74 aa, Glycine max
  unsure (1)..(74): unsure at all Xaa locations
  Clone ID: PAT_MRT3847_1591C.1.pep
LKFFYLFNKRFFLVTFNYFMLFAVRFFKMITFSFKFFIFILFLFLNIFFXFFLFKVKLYYFYHLCNLYFLTIIR

SEQ ID NO: 192579 - protein, 56 aa, Glycine max
  Clone ID: PAT_MRT3847_15921C.1.pep
NPSFTQIYSLSLHSPIFSLRYLILPRTYTPFLHLNLLNILLNTSFLIPLYPNAFIH

SEQ ID NO: 192580 - protein, 124 aa, Glycine max
  Clone ID: PAT_MRT3847_15922C.1.pep
MTPYRFLLSFFIFLLQFIAFASSSTHSNLTHILQDVLKAVSAKQKWDSSNNDDVRVTKFDVGKVMFGTSLSYEFRIRFGTDNNDNFTLKFVDQVATWNKFRTPFTDLPPLVHRARSFPLLHTLK

SEQ ID NO: 192581 - protein, 139 aa, Glycine max
  Clone ID: PAT_MRT3847_15923C.1.pep
AFVITLFLLLNWRKPKPSGFGPSLGVRGFTNEPRPRALLFFFFYPKAGNKIFKTPPPKGPKRLGGFLGGAPPKKKGGKGKRPPLPKIGPLGGPKPPPPFFWLGGGGGPKKPPPPVEKPIFVGKTPPLGAPKGPPPFWKG

SEQ ID NO: 192582 - protein, 53 aa, Glycine max
  unsure (1)..(53): unsure at all Xaa locations
  Clone ID: PAT_MRT3847_15924C.1.pep
CSHSLSATLLGQQFGEFASTRKRRLSRTNIKPGRKKGKKSKXSAHMARKGNPI

SEQ ID NO: 192583 - protein, 73 aa, Glycine max
  unsure (1)..(73): unsure at all Xaa locations
  Clone ID: PAT_MRT3847_15925C.1.pep
MKFEIEDITVYFPYDNIYPGQYSYMGELKRALXAKGHWLLXMPTGTGKTIGLLSLITSYGLSKPHSPLKVLYW

SEQ ID NO: 192584 - protein, 40 aa, Glycine max
  Clone ID: PAT_MRT3847_15926C.1.pep
FITHIGTGENGVALRTYANTIVEAFYDLERPLNGLTISLA

SEQ ID NO: 192585 - protein, 47 aa, Glycine max
  Clone ID: PAT_MRT3847_15927C.1.pep
QTMVFKKYGRDPKKTHFIATKEWESQKIYTGHVNGKLGSHLKKKNAN

SEQ ID NO: 192586 - protein, 115 aa, Glycine max
  Clone ID: PAT_MRT3847_15928C.1.pep
MATILRSSGGRLGSVLGFFNRLIHSLPQSPPLSATIDFSSPTFSSSFGGSMELMAVPKRKVSPHKRGIRNGPKALKPIPVIVLCKSCGRARLPHFFCCGGKPNQGNTGEQKGSTS

SEQ ID NO: 192587 - protein, 158 aa, Glycine max
  unsure (1)..(158): unsure at all Xaa locations
  Clone ID: PAT_MRT3847_15929C.1.pep
KENSISAIQMHGTIVVGAVVVTVRPISVFYATTGAGLALDIVLIYGPLITLCPLNXHSQKHPAIYXLLGGITEPLGYAGGWRCALTSEKAIREAAILTSVGGIGLTLYTSWAARRGHEINFRGAYMSGAALGPMALEPIQGPATLWKLNERNYGCLAS

SEQ ID NO: 192588 - protein, 78 aa, Glycine max
  Clone ID: PAT_MRT3847_1592C.1.pep
GSTHTQTYSNIPNSHKCLDPQHIQGWLLTKNEDSHGFLPSTLYLINLLILLFYHALYQDSTKINLKDIYFRCICKRLS

SEQ ID NO: 192589 - protein, 92 aa, Glycine max
  Clone ID: PAT_MRT3847_15930C.1.pep
PRPPDSPDDDFTNQWPLELSEYLNFDDDQWPDDYPESFVSGHVFSHNNQANEVGNFGGSSTHFEESSSRDVGNEREKKEVRDRVAFKTKSEV

SEQ ID NO: 192590 - protein, 149 aa, Glycine max
  Clone ID: PAT_MRT3847_15931C.1.pep
MAKVMFGLVCSFLVLCCFTINTSAFSPSGWTNAHATFYGGSDASGTMGGACGYGNLYSTGYGTDTAALSTAIFNDGASCGECYKIICDYQTDPRWCLKGASVTITATNFCPPNFALPNNNGGWCNPPLKHFDMAQPAWEKIGIYRGGIV

SEQ ID NO: 192591 - protein, 40 aa, Glycine max
  Clone ID: PAT_MRT3847_15932C.1.pep
IIMDLPMPNSIIKFIDNPSLYHIYTIFTLREKASLLQMEH

SEQ ID NO: 192592 - protein, 47 aa, Glycine max
  unsure (1)..(47): unsure at all Xaa locations
  Clone ID: PAT_MRT3847_15933C.1.pep
KCISNLQHINCNRYFIQFLLLSIXXMELELYRHQQLKEAGFNTWPNI

SEQ ID NO: 192593 - protein, 120 aa, Glycine max
  Clone ID: PAT_MRT3847_15934C.1.pep
VLILILLLFCFKKKKRGRFPPGPFFLVPRKNKKKHWPFNGENERFPHPPQNGKNRGLCRKPKKKGGIFWGGGGPLKKKKGGGFLWGPCLKVKKQWPFLKSYPGFYIFFWPPRGPPPQKFS

SEQ ID NO: 192594 - protein, 89 aa, Glycine max
  Clone ID: PAT_MRT3847_15935C.1.pep
FYHQLLKEFFETVDPSSSEKAFYALKRMHPKKRKIVDRRASKSRKIRYNVPEKIVNFMAPLPANVPPMAPKLFENLFGLKTQRSSAAAS

SEQ ID NO: 192595 - protein, 398 aa, Glycine max
  Clone ID: PAT_MRT3847_15936C.1.pep
MGLSAKKSRKRGKRDSDSDEYDNMEYEEVEDDYDDDGEEEDEEEEHGEEVTDDEDGTGEHGEWKNDEMEQLEKEYRDLHHQELDTLKNLKHHKDEDLHKGQAVKSQKALWYKILELRFLLQKPFSSSNSLPQESIKSLFCETDETVRVVYSDLLTSSKETLDSILELQEALFAKNPSITQATVGSEGLSKDLEVSEHLDDNLDQEWSQISQMHKSIASFRDKSINKWQRMTQVTTGAAAIKGKFHAFNQDISNQVAAYMRDPNRMIKQMRLRRSAVNIFGSVPEVDDKHKEAETRTDGDPELLDDSEFYQQLLKEFFETVDPSSSEKAFYALKRMQPKKRKIVDRRASKSRKIRYNVHEKIVNFMAPLPANIPPMAPKLFENLFGLKTERLSSSAAAS

SEQ ID NO: 192596 - protein, 97 aa, Glycine max
  Clone ID: PAT_MRT3847_15937C.1.pep
HILNYLMQHNFIPELGFTNGCCRYIYCHLSHHTKFTYVPSRTSIITPWRDAHKKAIVQYNNVLHNERNVAIINHDNTAASAKDEKESKKQDPCLDHN

SEQ ID NO: 192597 - protein, 54 aa, Glycine max
  Clone ID: PAT_MRT3847_15938C.1.pep
PPSLAWNFASAAGKRPQKGERKKRLNQGGEITGKRWDLRHFPRSYFKGRLLKVV

SEQ ID NO: 192598 - protein, 182 aa, Glycine max
  unsure (1)..(182): unsure at all Xaa locations
  Clone ID: PAT_MRT3847_15939C.1.pep
WKLVGQFFPRLYFISNQKEDVVCEMGCWRLDRWVWKLNWRRETXEWELLEQLQILLNSVQILSNELDSWVWQNCNSGKYSTNWAYKLLLEDDGMVIPSDIFSLAWRLRRIPNKVAFLLWRAFKDRLPTKDNLLWLQCHSWMLPSMSTILSASLESHFNQFSGLGRSKSATEFGQGFICRGYW

SEQ ID NO: 192599 - protein, 111 aa, Glycine max
  Clone ID: PAT_MRT3847_1593C.1.pep
FRMYPLLPLHKEMFSIMVSFSFYGAKQKQYPIEHEGNYIQELRMNNANLWEFVVFSAICTWEKMICIYSRQGPIGCTIHYPAHFSATRERFTTRGQRSLYTFTRVRLPPAS

SEQ ID NO: 192600 - protein, 78 aa, Glycine max
  Clone ID: PAT_MRT3847_15940C.1.pep
TEFVELFKNGWCQHASSSQYKRASCNILPASACAFGSSSIMTDLSSLVSVMAFSVGGCSSPLSEMYKSSLLGCSYNQL

SEQ ID NO: 192601 - protein, 39 aa, Glycine max
  Clone ID: PAT_MRT3847_15941C.1.pep
RLEKGVKAYGQRKNFSILEAREKPLMISKNMQRDRIAAR

SEQ ID NO: 192602 - protein, 47 aa, Glycine max
  Clone ID: PAT_MRT3847_15942C.1.pep
LFKILKNSLRKQEHKLILKIINIMNVSYQNILNNICEKQKLQFFFFF

SEQ ID NO: 192603 - protein, 108 aa, Glycine max
  unsure (1)..(108): unsure at all Xaa locations
  Clone ID: PAT_MRT3847_15943C.1.pep
LEKSKYSFTSGQTIVRLRLAGKGQGPALGSDAATTHSCFGVXRHDRVDIMDPDQGWRPTSAYGAVTGTKQLIRRSANNHLCCEPSNSVFDAKXWIGRLLSDASVRRDM

SEQ ID NO: 192604 - protein, 98 aa, Glycine max
  Clone ID: PAT_MRT3847_15944C.1.pep
RADREKLRTLFVFLGECLKLVVADNEVGSLKQALEGKYVEPGPGGDPIRNPKVLPTGKNIHALDPQAIPTTAAMQSAKIVVDRLIERQKAENGGNFRR

SEQ ID NO: 192605 - protein, 75 aa, Glycine max
  unsure (1)..(75): unsure at all Xaa locations
  Clone ID: PAT_MRT3847_15945C.1.pep
RGNCGCGSACKSGNGCGGCKMCPDLSYTXSTTTETLIMTLAPVKAQFKSDEMSAPAENDGCKCGSNCTCNRCTCK

SEQ ID NO: 192606 - protein, 129 aa, Glycine max
  Clone ID: PAT_MRT3847_15946C.1.pep
KDTGRGAQIVSSIISTAKQCNLDKDVTLPNEGEEIPLKERDLVVGKVYSKIMEIESRLLPCGLHVIGEPPSALEAVATLVNIALVLWGTDNIKTYGESLAQVLWMIGVEPVADTFGRVNRVEPVSLEEL

SEQ ID NO: 192607 - protein, 434 aa, Glycine max
  Clone ID: PAT_MRT3847_15947C.1.pep
MSSKERPTLGGTRIKTRKRNIAAPLDPAAFSDAVVQIYLDNAGDLELIAKSIESSDLNFSRYGDTFFEVAFTGGRTQPGTTKPDEGDRHPYSIIECEPKREVILPSVIYIQKILRRRPFLIKNLENVMRKFLQSLELFEENERKKLAIFTALAFSQKLSGLPPETVFQPLLKDNLVAKGLVLSFMTDFFKEYLIDNSLDDLISILKRGKVEEDLLDIFPPTKRSIEAFSEHFTKEGLVALVEYNEKKIFEVKLKEMKSSLTAQITEEADTSEVIETVKLRVRDAKLPEIEVVRILWDVLMDAVQWSGKNQQQNANAALRQVKTWAELLNTFCTSGKLELELMYKVQMQCYEDAKLMKLFPEIIRSLYDQDVLAEDTILHWFRKGTNSKGRYEIFSRHLSYYNKTSSPWGVWNLSFHYTYVTYCCLFGTGTGKPL

SEQ ID NO: 192608 - protein, 1384 aa, Glycine max
  Clone ID: PAT_MRT3847_15948C.1.pep
MASLVSSQFTLPSSKPDQLHSLAQKHLFLHSFLPKKANYNGSSSKSSLRVKCAAIGNGLFTQTTQEVRRIVPENDQNLPTVKIVYVVLEAQYQSSLTAAVIALNSKRKHASYEVVGYLVEELRDAATYKTFCKDLEDANIFIGSLIFVEELALKIKVAVEKERERLDAVLVFPSMPEVMRLNKLGSFSMSQLGQSKSPFFQLFKRKKPQSAGFADSMLKLVRTLPKVLKYLPSDKAQDARLYILSLQFWLGGSPDNLENFLKMVSGSYIPALKETKIEYSEPVLYLDVGIWHPLAPCMYDDVKEYLNWYGTRRDANEKLKSPNAPVIGLVLQRSHIVTGDDGHYVAVIMELEARGAKVIPIFAGGLDSSGPAEKFFIDPITKKPFVNSVVSLTGFALVGGPARQDHPRAVEALMKLDVPYIVALPLVFQTTEEWLNSTLGLHPIQVALQVALPELDGGMEPIVFAGRDPKTGKSHALHKRVEQLCIRAIRWAELKRKSKEEKKLAITVFSFPPDKGNVGTAAYLNVFASIYSVMKELKKDGYNVDGLPETSEALIEDVLHDKEAQFSSPNLNIAYKMNVREYQNLTPYATALEENWGKPPGNLNADGENLLVYGKQYGNVFIGVQPTFGYEGDPMRLLFSKSASPHHGFAAYYSFVEKIFKADAVLHFGTHGSLEFMPGKQVGMSDVCYPDSLIGNIPNVYYYAANNPSEATIAKRRSYANTISYLTPPAENAGLYKGLKQLSELISSYQSLKDTGRGAQIVSSIISTAKQCNLDKDVTLPDEGEEIPPKERDLVVGQVYSKIMEIESRLLPCGLHIIGEPPSALEAVATLVNIAALDRPEDGISSLPSILADTVGRDIEDVYRGSNKGILKDVELLRQITEASRGAITAFVERTTNNKGQVVDVADKLSSILGFGINEPWIQYLSNTKFYRADREKLRTLFVFLGECLKLIVADNEVGSLKQALEGKYVEPGPGGDPIRNPKVLPTGKNIHALDPQSIPTTAAMQSAKIVVDRLIERQKAENGGKYPETIALVLWGTDNIKTYGESLAQVLWMIGVEPVADTFGRVNRVEPVSLEELGRPRIDVVVNCSGVFRDLFINQMNLLDRAVKMVAELDEPAEQNYVKKHASEQAQALGVEVREAATRIFSNASGSYSSNINLAVENSSWNDEKQLQDMYLSRKSFAFDSDAPGAGMTEKRKVFEMALSTADATFQNLDSSEISLTDVSHYFDSDPTNLVQNLRKDGKKPSAYIADTTTANAQVRTLSETVRLDARTKLLNPKWYEGMLSTGYEGVREIEKRLTNTVGWSATSGQVDNWVYEEANTTFIQDEQMLNKLMSTNPNSFRKLVQTFLEANGRGYWETSEDNIEKLRQLYSEVEDKIEGIDR

SEQ ID NO: 192609 - protein, 97 aa, Glycine max
  Clone ID: PAT_MRT3847_15949C.1.pep
GKSQCQDFLFFNATKSRLGKTKKPHPRVRKIKKDSPFSPGRVCKKNRLTVFFSTSALGSFLFPPPFPFPTGLELFGFVWDLMNIVNFPPPSPWVCHF

SEQ ID NO: 192610 - protein, 105 aa, Glycine max
  unsure (1)..(105): unsure at all Xaa locations
  Clone ID: PAT_MRT3847_1594C.1.pep
GWNEMVYDEKNWIGLNTGSFLLRNCQWSLDILDAWAPMGPKGKIRDEAGKVLTRELKNRPVFEADDQSAMVYLLATGKEKWGDXVYLENHYYLHGXWGFGDRMRR

SEQ ID NO: 192611 - protein, 204 aa, Glycine max
  Clone ID: PAT_MRT3847_15950C.1.pep
AGIKSATIEVEGRYAYGYLSGEKGTHRIVRQSPFNAKGLRQTSFSGVEVMPLLPDESMNVEIPEEDLEISFSRAGGKGGQNVNKVETAVRITHIPTGVTVRCTEERSQLANKIRALSRLKAKLLVIAEEQRASEIKQIRGDAVKAEWGQQIRNYVFHPYKLVKDVRTGHETTDITSVMDGELDPFIKSYLKHKYNMSLSTSGVN

SEQ ID NO: 192612 - protein, 57 aa, Glycine max
  Clone ID: PAT_MRT3847_15951C.1.pep
DCCNRGTRSVHRRKLCHLGFPIEVPTDVSSRWRGRRYCSHSLSLKLGRSPIAMSYEK

SEQ ID NO: 192613 - protein, 344 aa, Glycine max
  Clone ID: PAT_MRT3847_15952C.1.pep
KNYPRIKTIVNKVGTITNEFRVPEFEILAGEHNMITEVKQYGATFRLDYRLVYWNSRLEHEHKRLVSMFQAGQTICDMFTGIGPFAIPAAQKGCIVYANDLNPDSIHYLRINAKINKVDDRIYAYNMDARKFISQMMEVPNNEVTLETSHEVPILDTRDNAESNSENELLTVDTKDLGDSNNSGLEDVKGSTRHTATSVIAGKRSSTSYHEGNGEAHGTDILEGGRRKGSANKRMRGSEISVTKTWEHVDHVIMNLPASAVQFLDAFRGLIQKKYWKGCLPWIHCYCFIRATETPETIIAVAESALDAHIQDSTFHRVRDVAPNKAMYCLSFRLPEACLKEDSQ

SEQ ID NO: 192614 - protein, 92 aa, Glycine max
  Clone ID: PAT_MRT3847_15953C.1.pep
SSGCLARPDTCTMYPSASVDLLDDAGAAVYPLRVSGGLFVWCSLVSVRCHLLSQLPKLAPGVASTAFKLCIVRSSRVLIPVGFVCVEFARAE

SEQ ID NO: 192615 - protein, 112 aa, Glycine max
  Clone ID: PAT_MRT3847_15954C.1.pep
FLFSTDDRGCPQIGRGHCTRSPKKKPPPPGEAKNPQTTGLQIRGGKRIPWGKENRPKNPPQKKQGLKGFREIPGRGKKKRERVYCKKIFILKREGKWPEKTRGHPTPHRGRG

SEQ ID NO: 192616 - protein, 43 aa, Glycine max
  unsure (1)..(43): unsure at all Xaa locations
  Clone ID: PAT_MRT3847_15955C.1.pep
XRFSWTTRSATTLSTSXEDLFXSLXEGXXXKXXVFNXSILRSX

SEQ ID NO: 192617 - protein, 94 aa, Glycine max
  Clone ID: PAT_MRT3847_15956C.1.pep
LGPNQHDRDHVHRLAPTPRATKAANRRRGQNRRRPTLRRRRRPKRRLLRRHTSRGRKRRGHDRRCGRQRQRRELPYSDVGGEQSSGDDDVSGGA

SEQ ID NO: 192618 - protein, 89 aa, Glycine max
  Clone ID: PAT_MRT3847_15957C.1.pep
LGAFLLGGRSGGGGPFVLPGPLCSVRWFLRLSPVWLAPFCLCGCGAFGWGPLLPFVLFRCGVAGSCVCLRCGVRSFVALFPCCALVPGG

SEQ ID NO: 192619 - protein, 103 aa, Glycine max
  unsure (1)..(103): unsure at all Xaa locations
  Clone ID: PAT_MRT3847_15958C.1.pep
LELNPVDCFPPKGNAHTKFFPNKTIVKLLTRFPPPNIRINISILHFHPGETPPQGQWQLLHKNIGIFAIHIQLLHNDRVIIFQRTDFXLFNLTLPDGRCRNNP

SEQ ID NO: 192620 - protein, 42 aa, Glycine max
  Clone ID: PAT_MRT3847_15959C.1.pep
GQHFSVTFFGHYYTRLANNSKSILFLGKLHLPFFSDPWADPW

SEQ ID NO: 192621 - protein, 54 aa, Glycine max
  Clone ID: PAT_MRT3847_1595C.1.pep
SDMARLVCVLFSLHFMVIMSGSFPANSESVYKRASYVCIHTTLRMTDPTSLLFT

SEQ ID NO: 192622 - protein, 68 aa, Glycine max
  unsure (1)..(68): unsure at all Xaa locations
  Clone ID: PAT_MRT3847_15960C.1.pep
PRSDPRGPNNTLIIAQRGGGGGASXTTIXWGAGLXTGGGGDXXKKNKPQTGSIHSLAAGKKVIIFXGP

SEQ ID NO: 192623 - protein, 67 aa, Glycine max
  Clone ID: PAT_MRT3847_15961C.1.pep
RTPPHLFHSGPSNSYTILHAPFKPRKDYQKRCQSHFVLEKKQWLLRKQKQTYTQPKKKLLDSVLSWV

SEQ ID NO: 192624 - protein, 71 aa, Glycine max
  Clone ID: PAT_MRT3847_15962C.1.pep
FPSGPTHPKNQIKYSFLFLKLNNFFMSVSSIISQHHTNKLLISYNNISHSLSQAKHILLLITQSISLIPFH

SEQ ID NO: 192625 - protein, 199 aa, Glycine max
  Clone ID: PAT_MRT3847_15963C.1.pep
MMVKPSSEKPEEHRDSKYYKGVRKRKWGKWVSEIRLPNSRQRIWLGSFDTPEKAARAFDAAMFCLRGRNAKFNFPDNPPDIAGGESMTPSQIQVAAAQFANAGPHEGHSGRPEHSPMQSLSPSVSEGTVLTDSDVTTLNGSLTDLFTPVGSSGYASDYGIFPGVDDFSGGFYVPEMLNFNYGEENGEGFIVDESFLWNF

SEQ ID NO: 192626 - protein, 198 aa, Glycine max
  Clone ID: PAT_MRT3847_15964C.1.pep
MAKPSSEKPEEHSDSKYYKGVRKRKWGKWVSEIRLPNSRQRIWLGSYDTPEKAARAFDAAMFCLRGRNAKFNFPDNPPDIAGGTSMTPSQIQIAAAQFANAGPHEGHSGRPEHPPMESPSPSVSEGTIQTDSDVPTLNGSVTDLFTPVGSSGYASDYGIFPGFDDFSGDFYVPEMPNVNYGEENGEGFIVDESFLWNF

SEQ ID NO: 192627 - protein, 36 aa, Glycine max
  Clone ID: PAT_MRT3847_15965C.1.pep
IAVDYARIAVYYKSSCVISSDVSVIKVRAARPGRAV

SEQ ID NO: 192628 - protein, 395 aa, Glycine max
  Clone ID: PAT_MRT3847_15966C.1.pep
MSPMEFHSITKFHNIPLVSSSLVILCIATTILNNPAMATKQYYCDFPAIFNFGASNADTGGLAASFFVAAPKSPNGETYFHRPAGRFSDGRLIIDFLAQSFGLPYLSPYLDSLGTNFSRGASFATAGSTIIPQQSFRSSPFSLGVQYSQFQRFKPTTQFIREQGGVFATLMPKEEYFHEALYTFDIGQNDLTAGFFGNMTLQQFNATIPDIIKSFTSNIKNIYNMGARSFWIHNTGPIGCLPLILANFPSAERDSYDCAKAYNEVAQSFNHNLKEALAQLRTELPLAAITYVDIYSAKYLLFKNPKKYGFELPHVACCGYGGTYNFSQSVGCGGTIQVNGTNIVVGSCERPSVRVVWDGTHYTEAANKVVFDLISSGAFTDPPIPLKRACKRNFT

SEQ ID NO: 192629 - protein, 177 aa, Glycine max
  unsure (1)..(177): unsure at all Xaa locations
  Clone ID: PAT_MRT3847_15967C.1.pep
MQLGWEGASKKESHNNRINTHTETRQEQDRATDMKKQQQQEKHKKQMVNEESKKKERHIVTWTQEEDDILREQIGVHGTENWAIIASKFKDKTTRQCRRRWYTYLNSDFKKGGWSPEEDMLLCEAQKIFGNRWTEINRVVSGRTDNAVXNCFSTLCKKRAKYEXLSKREQHFIHQFK

SEQ ID NO: 192630 - protein, 157 aa, Glycine max
  Clone ID: PAT_MRT3847_15968C.1.pep
GLQEDDILREQIGVHGTENWAIIASKFKDKTTRQCRRRWYTYLNSDFKKGGWSPEEDMLLCEAQKIFGNRWTEIAKVVSGRTDNAVKNRFCTLCKKRAKYEALVKENSTSYINSNNKRIFLQHGCDTNVASETAIKKMRRSHIPDAAEKINFGRQIT

SEQ ID NO: 192631 - protein, 73 aa, Glycine max
  Clone ID: PAT_MRT3847_15969C.1.pep
KTAGIPFGGENLTYSLYFIRSLGKMLCHFFTVENWQIKSQFISLEYVHFCMSRKFSSDDILICNYVRKPYLAN

SEQ ID NO: 192632 - protein, 107 aa, Glycine max
  Clone ID: PAT_MRT3847_1596C.1.pep
MTVKYFCMVMRINIDCNGCYRKVKRALLDMPELDTHLLEKNQTRVIVCGRFIPRDVAIMIRKKTNRRVEILDIQDLSESNAEMEDQKPMTNNWTLLTTHNQMETCLA

SEQ ID NO: 192633 - protein, 35 aa, Glycine max
  Clone ID: PAT_MRT3847_15970C.1.pep
ISRRCISQGTEPSAALARTLEYSDVPVACFHLDLP

SEQ ID NO: 192634 - protein, 343 aa, Glycine max
  unsure (1)..(343): unsure at all Xaa locations
  Clone ID: PAT_MRT3847_15971C.1.pep
RADTPPRVLCIVIDVELVKYNTLEPILRQGSCVLKTTGEDTVKYTDNGAPIKRHRRKIVTVHSKKIASKRFWNEHTVLLKDLGGFVEEINNVTPXYVRSFEFDSKLMPCTXIGVLIDRCHFHRFSEKQGSVKTDDXGIGYLVEFVSKPVXLEKFRDDIVFAYGVSVEWRLXLRKKLNLFLRRANTIISAIVSFFTSTYVMRWKDFFPQSELKYPPSFDGRAVCYPSTEILRDYLSWRQVDCHINNQYNSCFWKLVASGKSKREAQNSLKGGQLQKKIEELAIDYNKLPVMYRQGSSIYRDKVDNVLIHQENGESPENYGKVIVGHFDIIGPTFWLEHPNILDE

SEQ ID NO: 192635 - protein, 48 aa, Glycine max
  Clone ID: PAT_MRT3847_15972C.1.pep
MLLLHSVKQLYYTSSKKKKKKKKKKKKKKKKKKKKKKKKKKKKKKKKK

SEQ ID NO: 192636 - protein, 41 aa, Glycine max
  Clone ID: PAT_MRT3847_15973C.1.pep
HASGGYQITNVDLKNPCCYGYRKKKWLGLCVASCRWCCTNS

SEQ ID NO: 192637 - protein, 55 aa, Glycine max
  Clone ID: PAT_MRT3847_15974C.1.pep
TIIILHYKSALFLVIKTSITVYNILNNSEIWFNTSIAGHGSSYSLFKISFAIFLN

SEQ ID NO: 192638 - protein, 37 aa, Glycine max
  Clone ID: PAT_MRT3847_15975C.1.pep
KLKVVCWKYVTRRVCELHVSGPSVGLHAVVFGVAYAH

SEQ ID NO: 192639 - protein, 41 aa, Glycine max
  Clone ID: PAT_MRT3847_15976C.1.pep
DLPLLLVGYGFGASFVALLAQLGGGIYTKAADVGANLGGKV

SEQ ID NO: 192640 - protein, 191 aa, Glycine max
  unsure (1)..(191): unsure at all Xaa locations
  Clone ID: PAT_MRT3847_15977C.1.pep
MGETGKRYHSQRDHDGDRKHQKRRMTDRDDRGNDELIVYRILCPDEVIGSVIGKNGKVINSIRQETRAKVKVVDPFPGSKDRVITIYCYVKEKEDVEIDDEFAGKEPLCAAQDALLKVHVAIANSIAAIGDSEKKRKDRDECQILVPSSQSANIIGKAGATIKKLRSKTRANIKGSAKDAIDPTXTCAMEF

SEQ ID NO: 192641 - protein, 71 aa, Glycine max
  Clone ID: PAT_MRT3847_15978C.1.pep
RESQAGNMRMQTRARINHHWTGFQTFIHTSTTTTRELPTRPNKKVIINTCVTSHLTKRQCISNAIRLNTVE

SEQ ID NO: 192642 - protein, 22 aa, Glycine max
  Clone ID: PAT_MRT3847_15979C.1.pep
ECDGVTCGTISGHVIRLDLSGE

SEQ ID NO: 192643 - protein, 77 aa, Glycine max
  unsure (1)..(77): unsure at all Xaa locations
  Clone ID: PAT_MRT3847_1597C.1.pep
GRARPYGCEKTTEGVIKMPSNGDXRLGHANVGLXXRDFGYKPTTDLSTGLSKVGKGDLGYYGLQPSLKKGNHLHNIG

SEQ ID NO: 192644 - protein, 67 aa, Glycine max
  Clone ID: PAT_MRT3847_15980C.1.pep
SITYKGPFFFFYHSSTTLNSRNGMLINNISCYRQLDTTTIRFQNIFLDPVQPLFLRSQIIFSFSFYN

SEQ ID NO: 192645 - protein, 763 aa, Glycine max
  Clone ID: PAT_MRT3847_15981C.1.pep
MASHIVGYPRMGPKRELKFALESFWDGKSSAEDLQKVAADLRSSIWKQMAGAGIKYIPSNTFSFYDQLLDATATLGAVPPRYGWTGGEIGFDTYFSMARGNATVPAMEMTKWFDTNYHFIVPELGPDVNFTYASHKAVDEYKEAKALGVDTIPVLVGPVTYLLLSKPAKGVEKSFSLLSLLPKVLAVYKEVIADLKAAGASWIQFDEPTLVLDLESHKLQAFTDAYAELAPALSDLNVLVETYFADIPAEAYKTLTSLNGVTAYGFDLVRGTHTLDLIKGGFPSGKYLFAGVVDGRNIWANDLAASLTTLQGLEGIVGKDKLVVSTSSSLLHTAVDLVNETKLDDEIKSWLAFAAQKIVEVNALAKALSGNKDVAFFSANAAAQASRKSSPRVTNEAVQKAAAALKGSDHRRATNVSARLDAQQKKLNLPILPTTTIGSFPQTVELRRVRREFKANKISEEEYVKSIKEEIRKVVELQEELDIDVLVHGEPERNDMVEYFGEQLSGFAFTVNGWVQSYGSRCVKPPIIYGDVSRPKPMTVFWSSLAQSFTKRPMKGMLTGPVTILNWSFVRNDQPRSETTYQIALAIKDEVEDLEKAGITVIQIDEAALREGLPLRKSEQAHYLDWAVHAFRITNVGVQDTTQIHTHMCYSNFNDIIHSIIDMDADVITIENSRSDEKLLSVFREGVKYGAGIGPGVYDIHSPRIPPTEEIADRINKMLAVLEKNILWVNPDCGLKTRKYTEVKPALTNMVAAAKLIRNELAK

SEQ ID NO: 192646 - protein, 206 aa, Glycine max
  Clone ID: PAT_MRT3847_15982C.1.pep
MLIYVTQNIPNKRSFGCLPQPRVGRAFRHVVPITTTLSNCLVSTNSPTQPTLFYLFPPILFFFLFFILLHRISIRHHLIHMMRGRRRHQDEQSRALYDLSSLVLNLLRSPLTFSDEVPPASRRPGQAQISPAGFASLLLGISLALMLCGSVTFFIGFVLMPWVLGLVMLFYVAGILSTLSVFGRSILCYATSPPSPRKDIPAWKLM

SEQ ID NO: 192647 - protein, 763 aa, Glycine max
  Clone ID: PAT_MRT3847_15983C.1.pep
MASHIVGYPRMGPKRELKFALESFWDGKSSAEDLQKVSSDLRASIWKQMADAGIKYIPSNTFSHYDQVLDATATLGAVPPRYGWTGGEIGFDTYFSMARGNATVPAMEMTKWFDTNYHFIVPELGPDVNFTYASHKAVDEYKEAKALGVDTVPVLVGPVTYLLLSKPAKGVEKSFSLLSLLPKVLAVYKEVIADLKAAGASWIQFDEPTLVLDLESHKLQAFTDAYAELAPALSGLNVLVETYFADIPAEAYKTLTSLNGVTAYGFDLVRGTNTLDLIKGGFPSGKYLFAGVVDGRNIWANDLAASLTTLQGLEGIVGKDKLVVSTSSSLLHTAVDLVNETKLDDEIKSWLAFAAQKIVEVNALAKALSGHKDEAFFSGNAAALASRKSSPRVTNEAVQKAAAALKGSDHRRATNVSARLDSQQKKLNLPILPTTTIGSFPQTVELRRVRREFKANKISEEEYVKSIKEEIRKVVELQEELDIDVLVHGEPERNDMVEYFGEQLSGFAFTVNGWVQSYGSRCVKPPIIYGDVSRPKPMTVFWSSLAQSFTKRPMKGMLTGPVTILNWSFVRNDQPRSETTYQIALSIKDEVEDLEKAGITVIQIDEAALREGLPLRKSEQAHYLDWAVHAFRITNVGVQDTTQIHTHMCYSNFNDIIHSIIDMDADVITIENSRSDEKLLSVFREGVKYGAGIGPGVYDIHSPRIPPTEEIADRINKMLAVLEKNILWVNPDCGLKTRKYTEVKPALTNMVAAAKLIRNELAK

SEQ ID NO: 192648 - protein, 101 aa, Glycine max
  Clone ID: PAT_MRT3847_15984C.1.pep
ERAFTFTFYSFPNRFCSRTPGHSMNSIIMGIGGCCRVIIVGISSVGWLPGVMMVKSGSGSPSSTKPHSHLRILRRFGQMKIRVLMMMMLMMMIEATEVRRA

SEQ ID NO: 192649 - protein, 276 aa, Glycine max
  unsure (1)..(276): unsure at all Xaa locations
  Clone ID: PAT_MRT3847_15985C.1.pep
LERFRGRIKLPENGDGDHPEREDGGRFRNRLPSGRLPATHHLSPREGRVHDRIRGRLQDDERRNSKDRLMGRELPGDRSDFAAPKSLSELKNGRNTENREQQSLGRRRSLRDDHPQSDDDFLFEGPKPLSEILKEKRGAGADSDSGNGKSSDNKNVEVTHGSDPMSVANTQNGVLSETKEDDKNLLLNNEESKLEVTDAAGGDNDGEYEEGIVYNESGEDQYXEGDDQRDADYEYEQGEEGYYEYEQGEEGENQEEDYMEEEDGDDFAKKIGVVHS

SEQ ID NO: 192650 - protein, 74 aa, Glycine max
  Clone ID: PAT_MRT3847_15986C.1.pep
MSKKRGLSLEEKREKMLQIFYESQDFYLLKELEKMGPRKGVISQSVKDVVQSLVDDDLVSKDKIGTSVCFWSLP

SEQ ID NO: 192651 - protein, 89 aa, Glycine max
  Clone ID: PAT_MRT3847_15987C.1.pep
AEIILIMLPHPGPLPKSKKRDNFYFVWCSKGRKLVPGLGGVIFGRDEKTPSLSGFKGNGLNNGYELPWAEIQNYLPGPGKKIFFFWGPQ

SEQ ID NO: 192652 - protein, 173 aa, Glycine max
  Clone ID: PAT_MRT3847_15988C.1.pep
ARETNVFTGGKGDREQRIFLWFDPTKAYHRYSVLWNMYQIVFLVDNIPIRVFKNLKGLGVKFPFDQPMKVYNSLWNADDWATRGGLEKTDWSKAPFIAEYKGFHVDGCEASVNAKFCATQGKRWWDQAQYHDLDASQWRWLRWVRRKYTIYNYCTDRSRYPQLPPECRRNRDI

SEQ ID NO: 192653 - protein, 218 aa, Glycine max
  Clone ID: PAT_MRT3847_15989C.1.pep
MNDLLTESFEIPRGQGHGGGGDIELGEYARNSGDLGLDSFFKKVQELDKQYAKLDKLLKKLQDAHEESKAVTKAPSMKAIKQRMEKDVDEVKKTAHYLKTKIEELDKENLANRQKPGCGKGSGVDRSRTATTISLKKKLKDKMAELNHPHLLLPCNLPHDFHPLHLARTHSIPHHLHLVHTHSPHLSDHHLHNTDPHLLHRTPFPPHIHHHCLLQLHQ

SEQ ID NO: 192654 - protein, 114 aa, Glycine max
  unsure (1)..(114): unsure at all Xaa locations
  Clone ID: PAT_MRT3847_1598C.1.pep
FSRPATHAILMNMPNAALSMRXFDGYHNCQGPKMTSPYMNCTAYCFFACAYEGEDTINCAAPPHKLAHAGQIHDNGVLKWSQEEFVTGWTTYVRTTSTLMCGGCPYLYALEHDN

SEQ ID NO: 192655 - protein, 37 aa, Glycine max
  Clone ID: PAT_MRT3847_15990C.1.pep
MGRIHHRGKGISSSTLPYKRTPPSWLKISSQDVGDHI

SEQ ID NO: 192656 - protein, 147 aa, Glycine max
  unsure (1)..(147): unsure at all Xaa locations
  Clone ID: PAT_MRT3847_15991C.1.pep
RVHASEVLRFFILAQALRHPRPTLFFSLLGVSHASCTHIYWGXGRNDGCLLKTCAXRMYSDLVIAILSEFGNGPTPXTNRAGHWDPTVNSCTMYSSEFEDCYCECIKVLLSLGGRIGCYTLASLQYAXVVSMLLWNTFLGGKSSTSP

SEQ ID NO: 192657 - protein, 64 aa, Glycine max
  Clone ID: PAT_MRT3847_15992C.1.pep
GKVNLWLFIGNMPYFLSFILPLVQHLGGIKQEREGLPKLLVTGQNFWWSPYKKKNVFLIYFAFV

SEQ ID NO: 192658 - protein, 72 aa, Glycine max
  unsure (1)..(72): unsure at all Xaa locations
  Clone ID: PAT_MRT3847_15993C.1.pep
WKVFKERARLYYLKNQKKLAVASKREVKKKSEEAKPVVPARVQPQFXAQKGQGKGKGKPKWEVCQPFFEFGK

SEQ ID NO: 192659 - protein, 326 aa, Glycine max
  Clone ID: PAT_MRT3847_15994C.1.pep
MSDGTLQVLDGTHLRGVDLSLGDDGPFTGANILDIAHSRASSSLFGLSLPDSLKASALTRLRTPDADAFRSAEYTADKASEILRDYISAIANELKDNPLVVSILDGSTLRLLSEDEDDFAMLAENLFTDLDVEDKGKISKSEIRNALVQMGVEMGVPPFSEFPQLNDLLKKHGADGEEKLGQAQFAQLLQSVLQDLEEELSKQNVVSIQNIRIINGCKLRQLLANEQELNTIVEKALLEKPEAKDGLVGNTEIIRSFLERNAKELGLPPAQADNAVVLLYDAVFAEITKEKDGAELDKEELAKLVKNILEKFAEQLEVNPVYQDLA

SEQ ID NO: 192660 - protein, 72 aa, Glycine max
  Clone ID: PAT_MRT3847_15995C.1.pep
HEGESTSRTISIECGMQSSAFGFLLAQKHFTNPLVAVPSAVSVVCMALGGSALAVFWMNRPIPLDDKDDFKE

SEQ ID NO: 192661 - protein, 142 aa, Glycine max
  Clone ID: PAT_MRT3847_15996C.1.pep
MMIKNGEDKLGILFKENEQLKVQYLFLGILALSFPFILFDIAPAFFCNIAGFAYPAYATLKAIEHDHDQIKSQWLIYWVIFSVLCIIDSASFLIYWIPYYYVYRFFFMAYLYLPISLGAKKVFAMVERHMNFVGSKLEEAAE

SEQ ID NO: 192662 - protein, 267 aa, Glycine max
  Clone ID: PAT_MRT3847_15997C.1.pep
FINIIKDLTSGEQLKDRDAAQTSLTLLSSFARQGRIFLGLSVSGPEIHEEFFKGLNITADQKKVLRKACYSFYDAAAELLQSEHSSLRLMEHENSKILNAKGELSDENIASYEKLRKSYDHLYRNISSLAEALDMQPPVMPEDGHTTRVTSGEDGISSASGKDSSVVEPIWDDEDARTFYECLPDLRAFVPAVLLGETEPKSSEQSAKNQDQTTEILPESDKGQQTTHESGEVSTESSALPEAESTERVKDKEEKDKSKELDREKEK

SEQ ID NO: 192663 - protein, 95 aa, Glycine max
  Clone ID: PAT_MRT3847_15998C.1.pep
VGFVSTIVGLVCYGLSSSFNYLFGEWSLLKIFLYSGFSLFICLGNLFAKVCRPSTSTSLRFKAHSSFLVLTITSVYSYFADKAMNGKPDVYSLIS

SEQ ID NO: 192664 - protein, 60 aa, Glycine max
  Clone ID: PAT_MRT3847_15999C.1.pep
HEIIFNYKAVYFIGNSNFLIVLSVTLTFFSILLTNAHLTYSISFNFNKLNPIHPNINLPK

SEQ ID NO: 192665 - protein, 150 aa, Glycine max
  Clone ID: PAT_MRT3847_1599C.1.pep
MMEMNILASSFSGYAKPFVRVNPSLLTLRASSLRHDYPLASKIVVKNLPYSTGETTLQKEFSNFGKIAEVKMVKDMNTKRSKGIAFIQYTCQDDAMLALETMDQKDFYGRTIGVEIARLGWDDFGASPRASGPPKKWDLPEQGEVVDCWY

SEQ ID NO: 192666 - protein, 75 aa, Glycine max
  unsure (1)..(75): unsure at all Xaa locations
  Clone ID: PAT_MRT3847_159C.1.pep
GIPKPAISRDARPGSVKRVSSTINHEALXVSNILTXNATLDPTLYTLHARPKIACAMDTPYTLKTRPSTLYGVRE

SEQ ID NO: 192667 - protein, 63 aa, Glycine max
  unsure (1)..(63): unsure at all Xaa locations
  Clone ID: PAT_MRT3847_15C.1.pep
TCTFHPLAEAKETAAPGAKEYGHIRIQQRNGTKSVTTAQGLEKEFSYXRILKDLTKEFCCNGN

SEQ ID NO: 192668 - protein, 55 aa, Glycine max
  Clone ID: PAT_MRT3847_16000C.1.pep
FLIFLSCKSLSKQSLTKTLQTQNPKQTKLQNSNCNYRNQKHKQEAFHTSSTPSVV

SEQ ID NO: 192669 - protein, 34 aa, Glycine max
  Clone ID: PAT_MRT3847_16001C.1.pep
CLTQSTHIPNIVEPRSQLIWSEIEAKEVTTCGTY

SEQ ID NO: 192670 - protein, 37 aa, Glycine max
  unsure (1)..(37): unsure at all Xaa locations
  Clone ID: PAT_MRT3847_16002C.1.pep
GGXLYQTRLKAEINFHRAMLSSSWSEQPFWECVKPRA

SEQ ID NO: 192671 - protein, 561 aa, Glycine max
  Clone ID: PAT_MRT3847_16003C.1.pep
MNKVGWSFKSFKTLLVVASITFPILLTLTLVHQNNNSVSDLFQGFHVLSGRTLNTNATAILSKDHDIIRESTLGPKNHSFEDGKNALSLSTTTIANDKLLDGLLISSFDDASYIGRYQSYLYRKASSHKPSKYLIFKLRNYEHLHQSCGPSTKSYNKVMRKGTKFSKNDASTKCKYLVWTASNGLGNRIVTLVAAFLYAILTDRVLLVKFGTDMHGLFCEPFPGTSWLLPRNFPYWKDQKHIETYESMLKNNKVNTSHELLPAFIILNLQHTHDGHNNFFHCDQSQDLLQRIPVLILWSDQYFVPSLFMIPSFRQDLSKMFPEKDTVFHHLGRYLLHPSNEAWEIIRKFYEAHLAKANERIGLQVRVFNTHRAPHQTIINEIIACTLQHKLLPDFDMQKSATSPLKKPSKAVLVASLFSEYGQKLRTMYQANTTVTREVIRVYQPSHEERQKSNNDMHNIKAWTEIYLLSLCDALVTSPKSTFGYVAHSLGGLKPWILQRAYGETIPDPPCRRAKSMEPCFHYPPKYDCRANSTVDFTSIFHHMKHCEDVSSGLRLVNVKH

SEQ ID NO: 192672 - protein, 87 aa, Glycine max
  unsure (1)..(87): unsure at all Xaa locations
  Clone ID: PAT_MRT3847_16004C.1.pep
MVPKDFFTDTFVLPLVLTQTALNPCHWQVNCGSPAVECNCGNAVPPTTLAEFTXDASRLNFFDXVNLVDSYNLFMIVEPQGETGAEN

SEQ ID NO: 192673 - protein, 74 aa, Glycine max
  Clone ID: PAT_MRT3847_16005C.1.pep
SRQYQTLVLNINQPQTTRYIFTMLHMMKNGIKSTVLFALQSYFGGYWKQGSMDFSSTTRWIWDRFPIRPLQNPW

SEQ ID NO: 192674 - protein, 59 aa, Glycine max
  Clone ID: PAT_MRT3847_16006C.1.pep
TKQSYHSSLLHQFVTSKRLDQNITKLNIGHFIWFYNKIACSTCKLSQLTLFRLRKCFLF

SEQ ID NO: 192675 - protein, 64 aa, Glycine max
  Clone ID: PAT_MRT3847_16007C.1.pep
AIYCMAFLITLLMLILTLIYYIFKGIYIAISSTLISSKTLFQEVHLVWEDLHSSYIMLIFQDLL

SEQ ID NO: 192676 - protein, 74 aa, Glycine max
  Clone ID: PAT_MRT3847_16008C.1.pep
CQSVLLNTSAKFFRGYTRISTRGAPFFFFFFYFFKTIFWCYFLGWRGVNNPSIKMGLYTYLRVHMLKDHSSFHY

SEQ ID NO: 192677 - protein, 66 aa, Glycine max
  Clone ID: PAT_MRT3847_16009C.1.pep
LDNPLCGGPDPPLDLVYQEVSGNMISNSRHFGFKSLVGSAAGGLIVHSATEKVPPRVAPIGLPDPF

SEQ ID NO: 192678 - protein, 65 aa, Glycine max
  Clone ID: PAT_MRT3847_1600C.1.pep
LLCVLSNLHSVSPLSNHRKGTKGKLSIQGCLPYCKGLESKQRRFPQFQKLEPQLRQPVRFDEEQQ

SEQ ID NO: 192679 - protein, 82 aa, Glycine max
  Clone ID: PAT_MRT3847_16010C.1.pep
PTHTLPALCFIINCSNMILSWDITLNMTTNFLGISFNQLDKLELSMLDETLSIFQMMTMVERRMNLITTSIIICQLILTLTP

SEQ ID NO: 192680 - protein, 86 aa, Glycine max
  unsure (1)..(86): unsure at all Xaa locations
  Clone ID: PAT_MRT3847_16011C.1.pep
PQLXVAQDAEALQHGLKGWGADDNVIVGILGHRNVHQSXEIKXAYWVVYPEDLRKLLAIANSGDFERAMCRRMLQTGDHDAHMENV

SEQ ID NO: 192681 - protein, 94 aa, Glycine max
  unsure (1)..(94): unsure at all Xaa locations
  Clone ID: PAT_MRT3847_16012C.1.pep
APTRPPTRPRNLDKGLNESDAVQYPKVYFMHDEGPIHPGLGITRVRTEYTFVEIFYLPTQADNLGTAADLNITKYNAKGXPYNSDDNAYGPGDF

SEQ ID NO: 192682 - protein, 54 aa, Glycine max
  Clone ID: PAT_MRT3847_16013C.1.pep
TVQNQISGEDFETKSLWLNDFELDSITATVLDSFPFVVQFSSRPLLRTYSTQLI

SEQ ID NO: 192683 - protein, 103 aa, Glycine max
  Clone ID: PAT_MRT3847_16014C.1.pep
MEKSKRLFMKSKRSFRRRLPPIQSGDRIDYKNMGLISRFISEQGKILSRRVNRLTLKQQRLITIAIKQARILSLLPFLNNEKQFEKSESTARTTTLRKKKYRN

SEQ ID NO: 192684 - protein, 73 aa, Glycine max
  Clone ID: PAT_MRT3847_16015C.1.pep
FSIPMVGFQSDHMPGNKCNGNSNSFPVPDRHERLMRGRELRKSSRASPDSNSISNVGSEIFEHDLRLREDITL

SEQ ID NO: 192685 - protein, 48 aa, Glycine max
  unsure (1)..(48): unsure at all Xaa locations
  Clone ID: PAT_MRT3847_16016C.1.pep
RLYXXIFYTLGTTCVFSLLXRLYRREGNTXGTXLMVYSFYALYNLQTN

SEQ ID NO: 192686 - protein, 61 aa, Glycine max
  Clone ID: PAT_MRT3847_16017C.1.pep
GFSFTPVTADTISPFHSVQLQTPKAPLLSAPSRSSCSRPPFSRSSCPLPRTRVTCPSRSNF

SEQ ID NO: 192687 - protein, 313 aa, Glycine max
  Clone ID: PAT_MRT3847_16018C.1.pep
MESEDLVKQELEELQKQLGKKQKFEASVSSLKTLLQRTYPSASPALRKSFYSVLCRVATVLKTRYTAPGFWNAGLGLFEQAHLLVSDPSEKEHLKACIAQAREHLHLEDNPSQTLRPADNQANRGYLFEGHLTVDPEPPQPQWLVQSNLLTTAATLFAAESSQASEANETTQDDATNMLEDLLNRLEEVVPLMVDVGPVAPKAPPASKEVVANLPVITLTEEILANLGKDAECAICRENLVLNDKMQELPCKHTFHPPCLKPWLDEHNSCPICRHELQTDDHAYESWKEREKEAEEERKGAENAIRGGEYMYV

SEQ ID NO: 192688 - protein, 106 aa, Glycine max
  unsure (1)..(106): unsure at all Xaa locations
  Clone ID: PAT_MRT3847_16019C.1.pep
VRSVLSWPFELAPVIFTILLSLRIRWTAPTSRVFLYTTXALLVLYSISINVTISDTLVIPICIYKLMNVKMISNSTAHPVDPFLLPSVISWILFSPLLSIFHFNFQ

SEQ ID NO: 192689 - protein, 57 aa, Glycine max
  Clone ID: PAT_MRT3847_1601C.1.pep
GDFFLQHNTKHSVCCLSNQYFLKHPPTSTSDSMFNSQKNTFNDPISAQHLSYTKKIY

SEQ ID NO: 192690 - protein, 49 aa, Glycine max
  Clone ID: PAT_MRT3847_16020C.1.pep
FIIINSIVSECEFGLCKSGGVFFLGYDLYSGKYTGLIIISAKSQIELIP

SEQ ID NO: 192691 - protein, 108 aa, Glycine max
  unsure (1)..(108): unsure at all Xaa locations
  Clone ID: PAT_MRT3847_16021C.1.pep
LIXFFFGPGNAKDFLHTFSHWVQQEHGHFGMGVTEACCPTFAFKKKIGENQLSEMDIMHAEPELRLRLLSTSKHKRNPIRSCHLNIGPHYHEACERGTTATNPLLRAL

SEQ ID NO: 192692 - protein, 72 aa, Glycine max
  Clone ID: PAT_MRT3847_16022C.1.pep
MWAGSGSADPGTVLATADSQALGRGQTGEPGDTASLSESIRRVIEIERMRTYRIWDVGNGSMGTESSASVFK

SEQ ID NO: 192693 - protein, 70 aa, Glycine max
  unsure (1)..(70): unsure at all Xaa locations
  Clone ID: PAT_MRT3847_16023C.1.pep
KPLYFMETPALEGTNVENAFVXVLAQIYRLVSKKTVEGAXNGTASVPAKEKKIVLKKKVSAFKKVGSCPS

SEQ ID NO: 192694 - protein, 148 aa, Glycine max
  unsure (1)..(148): unsure at all Xaa locations
  Clone ID: PAT_MRT3847_16024C.1.pep
FVGGGFATGIIDLGGGLLVSQISTFNKVWTTYEGGPNNLGATFFEPTGLSEGFFMLGCYCQPNNKPLHGCVLVGKDNSSTSNGALAEPVDYKLVWNTKSQKIKQDGHGYIWLPISXDGYNPVGHVVTTSPEKPSLDKIKCVRSDLTDE

SEQ ID NO: 192695 - protein, 137 aa, Glycine max
  unsure (1)..(137): unsure at all Xaa locations
  Clone ID: PAT_MRT3847_16025C.1.pep
DHYLHIYGLLYDRGYICWTNHDKDAAGPEEALMDAIRIRGIPASVVAKRAHEYDLPAAHDSLXDQIPAVDKMDYTKVTKAAKCMNPILTVLGDLKLLTDGKWSETKLIAVSNIMAGEIHVGHIPLMAQEETLSPRAC

SEQ ID NO: 192696 - protein, 70 aa, Glycine max
  Clone ID: PAT_MRT3847_16026C.1.pep
PNVGVKIGSKMQIHLTQCMCLPNQKSSRGCLVRASLFFLTRQFNHVVASNCSPIKWSFFLYSASHVNCQA

SEQ ID NO: 192697 - protein, 71 aa, Glycine max
  Clone ID: PAT_MRT3847_16027C.1.pep
MGDYARTWSDWSWTWLLCRNLIFPSYLEMNDQETTLLGYHNRGTCRHVGYKLPSEISKHIDACARTTLTLT

SEQ ID NO: 192698 - protein, 91 aa, Glycine max
  unsure (1)..(91): unsure at all Xaa locations
  Clone ID: PAT_MRT3847_16028C.1.pep
KDLKPNYVRIELEEIVQVALLCTQYLPGHRPKMPEVVRMLKGNGLAKKWQPSQRXDPSNCKPQELFSSDRYSAPPDDSSLLVQAMELSGPR

SEQ ID NO: 192699 - protein, 53 aa, Glycine max
  Clone ID: PAT_MRT3847_16029C.1.pep
QAKKNGQLKKQLKPLPYKGHSNKKSFPLELAILEKFSKTYLMQNPPTNIKFRS

SEQ ID NO: 192700 - protein, 33 aa, Glycine max
  Clone ID: PAT_MRT3847_1602C.1.pep
MLSEGSFVCPAIDESLFPHGINGWPALGIEEDE

SEQ ID NO: 192701 - protein, 52 aa, Glycine max
  Clone ID: PAT_MRT3847_16030C.1.pep
MRLSCGWLRDLIVQLSSSPTRSEMKVTVSRFQSTLLTTCYLLFIFKPCFSIY

SEQ ID NO: 192702 - protein, 87 aa, Glycine max
  unsure (1)..(87): unsure at all Xaa locations
  Clone ID: PAT_MRT3847_16031C.1.pep
SYTCSNFKDSFCTCSLGDNSQGPDECACLTWLRSWTSKGSLVKTTKNQLKQMMMMKSYNGNQSAIAGEDRDWKHSISSXPSLVAKVV

SEQ ID NO: 192703 - protein, 78 aa, Glycine max
  Clone ID: PAT_MRT3847_16032C.1.pep
AVALACAPALAWSSGRGKSDLDLVLIADLYHRGVFVCACELLGRKQMENDCHIATWIEAIFPCTAPSTRAINNVPLHA

SEQ ID NO: 192704 - protein, 59 aa, Glycine max
  unsure (1)..(59): unsure at all Xaa locations
  Clone ID: PAT_MRT3847_16033C.1.pep
KKGNLGIIVPIAIGFIVGVNIFLGGAFFETAINPTVTIGHTVVNWNWTNHWIXWAGPFI

SEQ ID NO: 192705 - protein, 47 aa, Glycine max
  unsure (1)..(47): unsure at all Xaa locations
  Clone ID: PAT_MRT3847_16034C.1.pep
SVCTEAGMYAIRARRRTVTEKDFLDAVNKVIKGYQKFSATPXYMVYN

SEQ ID NO: 192706 - protein, 104 aa, Glycine max
  Clone ID: PAT_MRT3847_16035C.1.pep
QALPYLQITMQIPERENFIVKKKFEWADKKKPWQLNATKRSMKPPIKKPGEKKEKSFFKKHSILFKILFSYIPDESKLCFCTGATHLGNPGHIRHNVTSSWAQN

SEQ ID NO: 192707 - protein, 98 aa, Glycine max
  unsure (1)..(98): unsure at all Xaa locations
  Clone ID: PAT_MRT3847_16036C.1.pep
AELPLHARYQPLNESGYSTVEFGAPDMLVRCGQKERXENHYCFFKLEKDDANLYGPHTVWRIPSGIKAHADLVSAATFIAALLSTLAIVVASLYYSNS

SEQ ID NO: 192708 - protein, 70 aa, Glycine max
  Clone ID: PAT_MRT3847_16037C.1.pep
WGREGRPIGAYELAKAVEELGVCEILLNCIDCHGKYNSVSFNYISLYFLFIKSSLVFSLNRTSNDIVQFM

SEQ ID NO: 192709 - protein, 126 aa, Glycine max
  unsure (1)..(126): unsure at all Xaa locations
  Clone ID: PAT_MRT3847_16038C.1.pep
IPQICFXFFLWGPSAFSVAGSTWXSGLFAPTGLVANNLSHMAFLVHFKVDDDYDAAPVGGGRGGELSGVAICKCQMHKVWVLLKVCHSCISRFNPFELARGVNFVEGVHFLKVSNKFLLPLQNYRL

SEQ ID NO: 192710 - protein, 58 aa, Glycine max
  unsure (1)..(58): unsure at all Xaa locations
  Clone ID: PAT_MRT3847_16039C.1.pep
MLRPPPPPTPPPPPTPTPXPAPAPTPTPTPPPPPPPKPPPPPRPPPFPAPPPTPPPKP

SEQ ID NO: 192711 - protein, 62 aa, Glycine max
  Clone ID: PAT_MRT3847_1603C.1.pep
TLRFSATFIIGEILFNYHENDNLGGTSSRNLLLLVARLDRGTVKARTRTVSKLYYTYLPNLT

SEQ ID NO: 192712 - protein, 90 aa, Glycine max
  unsure (1)..(90): unsure at all Xaa locations
  Clone ID: PAT_MRT3847_16040C.1.pep
FVFPPPNKFEYYGYATVFSRFLFSKIKSSIIEISIVKTNKMGFDPNHKIDFYIDRYFEPKSIKIWKRSSRGAFLSLPRDRFLFLLVCVXI

SEQ ID NO: 192713 - protein, 27 aa, Glycine max
  Clone ID: PAT_MRT3847_16041C.1.pep
RFKPNLSLNASSNPFNMVTKFHFIGLR

SEQ ID NO: 192714 - protein, 368 aa, Glycine max
  unsure (1)..(368): unsure at all Xaa locations
  Clone ID: PAT_MRT3847_16042C.1.pep
MALLLDNCESILLSLDTHKSVPAPFLTKTYQLVDDPSTDHIVSWGEDDTTFVVWRPPEFARDLLPNYFKHNNFSSFVRQLNTYGFRKIVPDRWEFANEFFKKGEKNLLCEIHRRKTHHQHHQQVPMNNHHHHHKFGLNVNVPTIFPFHNNRLSVSPSHDSDEVIIPNWCDSPPRGACRCKQQQPTTTRLTATLTAARPNFLGCRCSPRKGCTRIMDLXRDQQGSQNHVKPVAPSNNNNFPSFLLCSDNSNINNNTSPQTQTQAQASPMSKVSTVQRQLKQFVGCYSNNTKQARAVNSPTNSSITIVEEEASSNSCKTKLFGVSLQSKKRVHPEYGSNNVLQSSETNKARLALENDELLGLNLMPPSTC

SEQ ID NO: 192715 - protein, 48 aa, Glycine max
  Clone ID: PAT_MRT3847_16043C.1.pep
GKFPPFPPVGPTLSSLPKAPLVPPGPPVVNRLSNPRFMLETPLRACFG

SEQ ID NO: 192716 - protein, 100 aa, Glycine max
  unsure (1)..(100): unsure at all Xaa locations
  Clone ID: PAT_MRT3847_16044C.1.pep
MQQHQSYELVPLNKAYAYVHLNTANEAAVQVMVAARIALXDQHDHASSNEEALHMTMPLQHMMDAKTAGAKXASLDKQRQIHELDAQLNETGDLITDLTA

SEQ ID NO: 192717 - protein, 212 aa, Glycine max
  Clone ID: PAT_MRT3847_16045C.1.pep
MMEVTKDEAATPGSGGAQPPNPISNGNPNPNPNPNPNMPHTPRGSKGKSCKGCTYYTSLHKAKSKNPTCVGFSRALQQVPPFVVGETELEASKEGRSLANFKYACIGYSVYLDNKDSSAGSQDKTAKLPFCVGLEVVLVEKASNSDAGRLSATISLEDEHAAPQPRRYIPPNHTTEFLNRFQRNAGLVASGVAKNLNRVGNYVKDLLNDILN

SEQ ID NO: 192718 - protein, 212 aa, Glycine max
  unsure (1)..(212): unsure at all Xaa locations
  Clone ID: PAT_MRT3847_16046C.1.pep
MMEVTKDEAATPGAGGAQPRNPNPNPNPTPNPNPNPNPPHTTRGSKGKSCKGCTYYSSLHKAKSKNPTCVGFSRTLQQVPPFVVGESELEASKEGRSLTNFKYACVGYSVYLDNKDSLLXSEDKKTKLPFCLGLEVVVEEEASNSHAGHGHATHNPEDDHDAPQPQTQISPNHTTEFLNRFQRNAGLVASGVAKNLNRVGNYVKDLLNDILN

SEQ ID NO: 192719 - protein, 240 aa, Glycine max
  Clone ID: PAT_MRT3847_16047C.1.pep
HKATNSSPTNGAAYSTPNLHRPLTRSHSLPPWPPLHSPPPPSPPSVSAATPPPHSNQTATLISTRKPSALTVRASAASITPAPAPVQPWQGAAIKPLIASIATGVILWFSPVPAGVNRNAWQLLAIFLGTIVGIITQPLPLGAVAILGLGVSVLTKTLPFAAAFSGFGDPIPWLIALAFFFAKGFIKTGSLVFSEALLAPAIPSVSARAGGIFLPLVKALCVACGSNAGDGTEHRLGAWL

SEQ ID NO: 192720 - protein, 221 aa, Glycine max
  Clone ID: PAT_MRT3847_16048C.1.pep
LLLPHSLSRIRTIMACGSKSGKSEISEGGANDSVAVGDVIFVKLRGSSWWPVQVVDENSVNKSVKPSKRTKRLPGDILVRHYGSYTYSYADPIKCRDEFKRILERNDGSLKKVLLQTLEQDLPSTKSRRSKGSSSKPKGTSSKDAAGKRKSNWEDKEQNKNKQKETLNVDDPACQSWETSSLGKSPELSSRRIRVMENLGLVAPAGSPFEKKDAHKYKKAS

SEQ ID NO: 192721 - protein, 435 aa, Glycine max
  unsure (1)..(435): unsure at all Xaa locations
  Clone ID: PAT_MRT3847_16049C.1.pep
MASVALTTTALPSLRLRRNTTATLKPNRHASISLKPNLHASISSFPNFSLKKPHLISTRKPSALTVRASAASITPAPAPVQPWQGAAIKPLIASIATGVILWFSPVPAGVNRNAWQLLAIFLGTIVGIITQPLPLGAVAILPKPXVLGLVGDVLTAMAANPLCATLTQNSINQTIGWLDWAKAAIVPGLASLVLVPLILYVIYPPTLKSSPDAPKLAKEKLEKMGPMTTNEKIMTATLFLTVGLWVFGGLLNIDAVSAAILGLSVLLVTGVVTWKECLAEGVAWDTLTWFAALIAMAGYLNKYGLISWFSQTVVKFVGGLGLSWQLSFGILVLLYFYSHYFFASGAAHIGAMFTAFLSVATALGTPPFFGAIVLSFLSNLMGGLTHYGIGSAPVFFGANYVPLAKWWGYGFLISIVNIIIWLGLGGVWWKFIGLW

SEQ ID NO: 192722 - protein, 45 aa, Glycine max
  Clone ID: PAT_MRT3847_1604C.1.pep
VVPVVVEVIIYLVIYGLSEGYGGCVILKYHTPLILVGVCIYRKSG

SEQ ID NO: 192723 - protein, 52 aa, Glycine max
  Clone ID: PAT_MRT3847_16050C.1.pep
HQTWLWNGSETLYPTLQWLEKVENVKQIVLMVEMEDEIGIPVLSTGRSGSDL

SEQ ID NO: 192724 - protein, 129 aa, Glycine max
  Clone ID: PAT_MRT3847_16051C.1.pep
PEWLISLENLVKLSLHQDIQNPHGCKLEYLLEQDNQLPKLKILKLENLVHLEYSEKTTEGGENFCKSLEEMTIINCPKLNSWWKPGTEARPSFEKISKLHLHRCPLHTMPLYPRLEEMVLHSCTLKLLR

SEQ ID NO: 192725 - protein, 158 aa, Glycine max
  unsure (1)..(158): unsure at all Xaa locations
  Clone ID: PAT_MRT3847_16052C.1.pep
MYFRIYGVTILLFLLPTLTFSLSQGQINSNSILVALLDSHYTEVAELVEKAMLLQTLENTVMNNNITIFAPRNEALERDLDPDFKRFLLEPRNLQSLQTLLLSHIVPKRIIKPEYLTGTGNPGRSNNPTRHRTLAXNHHLTLQSLKLTHWNVDSSRVM

SEQ ID NO: 192726 - protein, 66 aa, Glycine max
  Clone ID: PAT_MRT3847_16053C.1.pep
KLKKKYQTKKIENLHKAYMYSCKERIGNNGNVREKLFTISGISHMHSATTELIVDHEASFYIILYI

SEQ ID NO: 192727 - protein, 64 aa, Glycine max
  Clone ID: PAT_MRT3847_16054C.1.pep
SDFLSHNHSLFPLCLCQILPRPCFFSPHLCSSSSTSTSTSSAYRYTLAPPPLLSRSVLRLGQVK

SEQ ID NO: 192728 - protein, 55 aa, Glycine max
  Clone ID: PAT_MRT3847_16055C.1.pep
WLITSPIFLQNFFAVSGGELILRCISHLLDHASYLYNMSLEEGLIEEDYAGRTVM

SEQ ID NO: 192729 - protein, 165 aa, Glycine max
  unsure (1)..(165): unsure at all Xaa locations
  Clone ID: PAT_MRT3847_16056C.1.pep
TKDFASCSGENADHAAYSSSSSASKTAQSLDICRYQCRIWCMSCFITITWTKSLLRQGLNEWIDDYSSNQGLSKAYIKPWMISKRRRCKNPEANSWKSDVYCDLSNARSGAGPEPFEGVYVGGHVDRQMGLLLGDATKKAFKKSIAIPLPSNAXFDAKKEHVFGK

SEQ ID NO: 192730 - protein, 112 aa, Glycine max
  unsure (1)..(112): unsure at all Xaa locations
  Clone ID: PAT_MRT3847_16057C.1.pep
EEDERHKEXGPQXEDXXKEQXKAXYKRHKNXXGGGXRNRRQDXXGQEGEAAPGRDRTRRSXAGKETEGSGGGGKGRGGETGKEXGEREXPGGGPRRRARGGPPGAAPPRREG

SEQ ID NO: 192731 - protein, 77 aa, Glycine max
  Clone ID: PAT_MRT3847_16058C.1.pep
KRSKKTYPWQGTCLLNPFESIQHCNRMALLLGEWGEESRVYCCHEIPNNTTRPDTNVVVVVVSLRSCVAIERKNRGR

SEQ ID NO: 192732 - protein, 64 aa, Glycine max
  Clone ID: PAT_MRT3847_16059C.1.pep
SSSQPLVLGKREMNHIYHSSYTTHNKNLNKTRAQQGSPIMSIIYHTPLSNFDIHFLSTNLPNYI

SEQ ID NO: 192733 - protein, 65 aa, Glycine max
  Clone ID: PAT_MRT3847_1605C.1.pep
CDRRIIIHHSYRGLLRPLLVTRKNKNKFSSQDVLRSLLLKTHRLRLSLRSGLPSPSCNEGAAIPS

SEQ ID NO: 192734 - protein, 125 aa, Glycine max
  unsure (1)..(125): unsure at all Xaa locations
  Clone ID: PAT_MRT3847_16060C.1.pep
MEMQMTVMGLILLLLLFASDVSAWTGEIHGMSDRDVCGDSSLGPEDHVLEGAEVADLCLTKSGEDLNYHAFTDAQGIYTAAETLPDSDRWDACIARPITRXHEQCTPLGERSIGGKFIYDDTSGH

SEQ ID NO: 192735 - protein, 44 aa, Glycine max
  Clone ID: PAT_MRT3847_16061C.1.pep
RFVGAEDFKEECCKLWGMDLQLTVRLGQNGNLMSYVDVKTTVYT

SEQ ID NO: 192736 - protein, 61 aa, Glycine max
  Clone ID: PAT_MRT3847_16062C.1.pep
HKMHLRSDQNTKNQNRAKFLHACARILQNQHATTYIITCIHGFEHQPSNNLKLFQAASRGA

SEQ ID NO: 192737 - protein, 68 aa, Glycine max
  Clone ID: PAT_MRT3847_16063C.1.pep
SSSFMVFIELVGGFFSVIALLVDHIHNVEPKMTIQHPSFSILPLLVYPLHYYAHHSRSCNVSFLVTSF

SEQ ID NO: 192738 - protein, 84 aa, Glycine max
  Clone ID: PAT_MRT3847_16064C.1.pep
QPALSWPTKSMLKTFSYSLRNCITPGLLYSSFTKKDILSMSNLLTTSLIQGRRLCLRIMGRTLTTFLDTLKHPSVRPSSLKQVF

SEQ ID NO: 192739 - protein, 115 aa, Glycine max
  unsure (1)..(115): unsure at all Xaa locations
  Clone ID: PAT_MRT3847_16065C.1.pep
GAFGGPHGQKQKKMFGGXPINRLVLVECFPIGFGKGAKMITAGINAYLEGFPRWIINGQVLTGKVESLNMAQVSGSKKSVHPTGLFSVHCSIVEFVVAQSLLCRLYMSRLSSVGV

SEQ ID NO: 192740 - protein, 76 aa, Glycine max
  Clone ID: PAT_MRT3847_16066C.1.pep
LKRLIYQFCTFQCKQERVSHRQFIFYIFDSLDLNQIQLSQFSDFMQKLHSLRTDHLGSFLTIHKTTANFIKNCRKN

SEQ ID NO: 192741 - protein, 63 aa, Glycine max
  Clone ID: PAT_MRT3847_16067C.1.pep
VFVIMIFTLIYFIQIINGIKTCLNRCLRLKLANKHIQVWVDLILKKYSRINLRNPLFYCEFYL

SEQ ID NO: 192742 - protein, 65 aa, Glycine max
  Clone ID: PAT_MRT3847_16068C.1.pep
NFQNSFLSPLFDFVNYFNNARVVSILISIYFFALISISVYHARIKRMLKYVFHFKNISKFEFFPL

SEQ ID NO: 192743 - protein, 85 aa, Glycine max
  Clone ID: PAT_MRT3847_16069C.1.pep
CRLLQHGHLLLVPLESVDTHPAVCHSLFMTKVVHRGLCPASDGSSILSDLETSTEQFVCPSASLLVTHIVLVCRDDIGGEVYKCR

SEQ ID NO: 192744 - protein, 72 aa, Glycine max
  unsure (1)..(72): unsure at all Xaa locations
  Clone ID: PAT_MRT3847_1606C.1.pep
ASLPLQEVPRGRALMCLAPVLLFLCALTPSDGLGAPRLFFLSGTXRLGDDVLMPSVPKFLGSLVNHGRGCSA

SEQ ID NO: 192745 - protein, 73 aa, Glycine max
  Clone ID: PAT_MRT3847_16070C.1.pep
IRPIGLVAGPRWLCQMEKTVNPFLGKHSPDSVGSLNKISLSRAGFPGPKGRRENRVFLKENVNLVPIHGHKEG

SEQ ID NO: 192746 - protein, 73 aa, Glycine max
  Clone ID: PAT_MRT3847_16071C.1.pep
RNKHKCIQNDRTYSMHSLEHIIVFLHASARAIEQSWRWWRLLPLQAKPTSFILYHPNLTEPVIVSPGLPQTTG

SEQ ID NO: 192747 - protein, 60 aa, Glycine max
  Clone ID: PAT_MRT3847_16072C.1.pep
VGNLPCALFIGAVSPLRFKNDLISYLQSSKMLSFSIPKSRKDGILTHGLMKFNQDLGSVC

SEQ ID NO: 192748 - protein, 72 aa, Glycine max
  unsure (1)..(72): unsure at all Xaa locations
  Clone ID: PAT_MRT3847_16073C.1.pep
XXTHTXPAXXLXNGHRPHFXWMXXEXXSEXVRSFXAQXXXWEWXAXPXTLNLRXNVIVEHXFLFVGENSKLG

SEQ ID NO: 192749 - protein, 74 aa, Glycine max
  unsure (1)..(74): unsure at all Xaa locations
  Clone ID: PAT_MRT3847_16074C.1.pep
GXXMXLSRSVQLLTYLCARTSSLNWGRALTSDFLHAFFFSTTHSHFKLAGFVYYPLAPNDHEALGFTDGDGAAQ

SEQ ID NO: 192750 - protein, 455 aa, Glycine max
  Clone ID: PAT_MRT3847_16075C.1.pep
MFGRGTVWSVLRRGKEACGGFHKLRGTPFSYSSSSTPFKFLSPPVSTHCFHAFRSQLIPKGHHVHVPQMRNFSKMVSAEQKEEGLKLLVSGGSRAQKLVGIWLFGSAAWVFSMVVLGGLTRLTRSGLSMTDWKFTGTLPPFSDEEWLQEFDKYKQSPEFKRVNRGMKIEEFKFIYWMEYAHRMWGRALGVMFALPYSYFLHKGYITLRLGLRLSALFALGAGQGLIGWSTRPPTRPPTRPEYSQPRVSPYRLAAHLTSAFAIYCGLFWTALSVVMPEPPAESLTWVRGAAKVRRLALPISILVGLTAVSGAFVAGNDAGHAFNTFPKMGDTWIPGDIFEMKPLIRNFFENTATVQLDHRILATATLISVSILWWSTRKLEIHPAVRSVIGGAVGMATLQVTLGISTLLSYVPVSLGTAHQAGALTLLTFMLLLNHTVRRPSLSLLKSLPQVGKAH

SEQ ID NO: 192751 - protein, 64 aa, Glycine max
  Clone ID: PAT_MRT3847_16076C.1.pep
QLCPLYPHNPQVLLTELRSPSELLDFGEFSDLMDSATGSGSLHVVNPAFDYVPPNLVSLFITDT

SEQ ID NO: 192752 - protein, 81 aa, Glycine max
  Clone ID: PAT_MRT3847_16077C.1.pep
VGTNLWADESISWWLFPPAPPPPPPPPPPPPPPVGGTIANIQHQKRGYGNSSIYGSLPIGTLMNIRYILVNLLIIFEALNQ

SEQ ID NO: 192753 - protein, 79 aa, Glycine max
  Clone ID: PAT_MRT3847_16078C.1.pep
IKGKYRTHFLDDFKHLWYETSEWYTEPKQLSNGNAVEFDGYMRVAVDTKVFLRGKRKLETFSDLTRDCKNGVNTCPGSS

SEQ ID NO: 192754 - protein, 60 aa, Glycine max
  unsure (1)..(60): unsure at all Xaa locations
  Clone ID: PAT_MRT3847_16079C.1.pep
NXRQXDFQFXEIXXRDVLHXVXPXTXCFLNQQRHXDSIDRSLXLSLSPRAEFRAXVRVHE

SEQ ID NO: 192755 - protein, 96 aa, Glycine max
  Clone ID: PAT_MRT3847_1607C.1.pep
HIVDCALQYGKKYNVVQLVLISSDVSLKIKSMAKGLLCETVQQFRQSLVNPFSERFMWPKSSPRGLTWSCQDDLVLREKYCGLPSKAGLKLITFHD

SEQ ID NO: 192756 - protein, 64 aa, Glycine max
  Clone ID: PAT_MRT3847_16080C.1.pep
GSRLNGVSSSHATLARNSIGGIAYVAPNTSHGVLSHTPHHNKARITRVRLPYQLHLTPILKHYH

SEQ ID NO: 192757 - protein, 93 aa, Glycine max
  Clone ID: PAT_MRT3847_16081C.1.pep
ARDRKSLYLTRSPISNRTVFSKSTKSVKDNYSQSLWPAHRVVFFPLKSGTLFSRKNLTHSCNQVLIAFVSGFKVRHPVISVDRHPRTRGRTRG

SEQ ID NO: 192758 - protein, 76 aa, Glycine max
  Clone ID: PAT_MRT3847_16082C.1.pep
WVGMNEGHGVIAPPWTKCCYPTPTNYCCLMYVGGHTLSLISGNRCLTIGNQGPGECYRNGLLPTVQKPTKMDLCFC

SEQ ID NO: 192759 - protein, 53 aa, Glycine max
  Clone ID: PAT_MRT3847_16083C.1.pep
CGPIAGGHLVGCLSVHDKLVHTLVGQVFLTRENQRQSVCGSRCYAPTRPRTKE

SEQ ID NO: 192760 - protein, 84 aa, Glycine max
  Clone ID: PAT_MRT3847_16084C.1.pep
TFVDMATTALSTTSVLCRRKPQHMHIILPSSQTLQNGTLRTDVTASASKDNISIESEKCCSSLLVNRRTVLASGVSLLGFPGES

SEQ ID NO: 192761 - protein, 103 aa, Glycine max
  Clone ID: PAT_MRT3847_16085C.1.pep
KILARGGKKIKTSQPYGIKGGLAFKEGVYAFCRKRKGKGVFPFVNKNGGKVDGYRPIFGPQGWFSTGDVFPGGSTGLAIWAVALLGFFAGGAPFVFHPRGLGP

SEQ ID NO: 192762 - protein, 26 aa, Glycine max
  Clone ID: PAT_MRT3847_16086C.1.pep
HNKICILILSRINLKCQKRKSSIFIL

SEQ ID NO: 192763 - protein, 96 aa, Glycine max
  Clone ID: PAT_MRT3847_16087C.1.pep
TPSLISPSRCVIGLHSEQPSTQVSIFRACSPCPTEQSQLSNPLYNQSAPDCTSCAFIRFLKREGAWYTKVHPHPEVEKEVVVLVKWLMGIDEYGSS

SEQ ID NO: 192764 - protein, 33 aa, Glycine max
  Clone ID: PAT_MRT3847_16088C.1.pep
LELNEPHDPLNIYLYLELVKAATRNALISKSIP

SEQ ID NO: 192765 - protein, 102 aa, Glycine max
  Clone ID: PAT_MRT3847_16089C.1.pep
LPWSLRLSQLASVISTVNLSSVSSQVTSPSFKSSSMCASVISNVTSLSVFSTATFSSIISATILASVTSCAIAASVFSTASFTSMISSTVCPSVFPAEKTPK

SEQ ID NO: 192766 - protein, 93 aa, Glycine max
  Clone ID: PAT_MRT3847_1608C.1.pep
WYTWFVEIKYIYYYPIVLAHTYMYACYKSNFKFSTLIVLALILKNDANISNISATEQFCGIGNYFPLGMVDDFMVFLGYILHHQDIQDKQAGI

SEQ ID NO: 192767 - protein, 64 aa, Glycine max
  Clone ID: PAT_MRT3847_16090C.1.pep
VHQIISFLINEILELEELGAYDPASRWVLIAMAIAIAYARTTHVGKTQTLICLGGNGNRKGKGF

SEQ ID NO: 192768 - protein, 53 aa, Glycine max
  unsure (1)..(53): unsure at all Xaa locations
  Clone ID: PAT_MRT3847_16091C.1.pep
VVFPXANGCXQXIXXXXXPCRXXSXXXXXKXTCPSXTPFPXSIRKEMSSFFXF

SEQ ID NO: 192769 - protein, 146 aa, Glycine max
  Clone ID: PAT_MRT3847_16092C.1.pep
TYCRRFKNEIVRAYAQDHFFDVITNSIGLATAVLAIKFYWWLDPVGAILIALYTISNWAKTVMENVWSLIGKTAPAEYLAKLTYLCWNHHKEIKHIDTVRAYTFGSNYFVEVDIVVSEEMSLSQAHDIGETLQDKLEKLPEIERAF

SEQ ID NO: 192770 - protein, 66 aa, Glycine max
  Clone ID: PAT_MRT3847_16093C.1.pep
IEYMLDIYTSNCECRISRHAKSHEIYYITIDTGNSLAKNLSTPSPNSIAPFIGLNHATNLLIEEQA

SEQ ID NO: 192771 - protein, 91 aa, Glycine max
  Clone ID: PAT_MRT3847_16094C.1.pep
RQSASRIFTRSSVNSVTMAAWFEIFLPNTELVCTSLRCKINNRRRRALPALLVFGCRTILRSRLEVLLLVAFLAARTCEWWWACDIEHKMY

SEQ ID NO: 192772 - protein, 62 aa, Glycine max
  Clone ID: PAT_MRT3847_16095C.1.pep
LVQQALHSRHRYITCHCFFSQEGIHKGMYRLLEHHYQPRIIHMSTYIRVGWFNRILDVLEKR

SEQ ID NO: 192773 - protein, 101 aa, Glycine max
  Clone ID: PAT_MRT3847_16096C.1.pep
MATTTVIMTTLPQFSGLRPQFSAAPVKNLVAVQQPMRPKGKGALGARCDYIGSSTNLIMVASTTLMLFAGRFGLAPSANRKATAGLKLEVRDLGLQTGDPA

SEQ ID NO: 192774 - protein, 79 aa, Glycine max
  Clone ID: PAT_MRT3847_16097C.1.pep
GIFSSSYLSFSHSPSTIFSSGDNISDMGTISKKTSNKTTPLAFFEPPSKSQTKFSLFLLGDTKKDNIEGTQILCEQTKG

SEQ ID NO: 192775 - protein, 90 aa, Glycine max
  Clone ID: PAT_MRT3847_16098C.1.pep
LTSHGDNLQRGLLGRIISLAYRYYIHRAPRLDTKDVEAIALVEGYRHRGSDVAIGSRHATAQGQADIGASGVDQGRNQATFFLSGHKGRG

SEQ ID NO: 192776 - protein, 48 aa, Glycine max
  Clone ID: PAT_MRT3847_16099C.1.pep
PTFITRYSARTAYVGPSTRYDPKTVLVWQALRTIFYYFLFSNIMSPWI

SEQ ID NO: 192777 - protein, 46 aa, Glycine max
  Clone ID: PAT_MRT3847_1609C.1.pep
SLMGSAPSATHGIGMSWNIVVPSSPRTNRDLPGLINPSTQEAPFDS

SEQ ID NO: 192778 - protein, 80 aa, Glycine max
  Clone ID: PAT_MRT3847_160C.1.pep
YLYPPKARSQGEVKGAEHQTRPEPREMTKNKHFPETKPTEDRTEKGRPPNTQPQEKTPTQAESREETNSSKPERKENQPE

SEQ ID NO: 192779 - protein, 80 aa, Glycine max
  unsure (1)..(80): unsure at all Xaa locations
  Clone ID: PAT_MRT3847_16100C.1.pep
KTTLAKEVGKKAEELKLFEKVVMATVSQTPNIRSIQLQIVDNLGLKFGGRSEECRAQRLSERLXQVTTLLILDDVWENLD

SEQ ID NO: 192780 - protein, 105 aa, Glycine max
  unsure (1)..(105): unsure at all Xaa locations
  Clone ID: PAT_MRT3847_16101C.1.pep
EFRCSVISFTILFSLALAGESHVHASLPEEDYWEAVWPNTPIPTALRELLKPLXXGGLKINELPKXFDDTPVPKTFFXKERPFSPQNMEKVPLPKRPFAPLXGVL

SEQ ID NO: 192781 - protein, 119 aa, Glycine max
  Clone ID: PAT_MRT3847_16102C.1.pep
MIEILLNLQLLAPFFLFFIFPVFFFFFLTSSCPTKRSITIPKPYPLIGHYLDLKGIGNRRIQWLSDIVKISPATTFTLHRPLGRRQVITGNPATVAHILKTRFSNYQKGYTFIHTLSDF

SEQ ID NO: 192782 - protein, 45 aa, Glycine max
  Clone ID: PAT_MRT3847_16103C.1.pep
GASLNCCFLEDDTHGKKNDRERIIRKYYKFSVNTHCSIDKCLVQK

SEQ ID NO: 192783 - protein, 100 aa, Glycine max
  Clone ID: PAT_MRT3847_16104C.1.pep
LGSGSPPHFLGYRYKNPNLEAPNVGGPLRNFPIKKRVLVWFLGLIFWRNQGLAGFFIRGRETIYRWKDSEGPKGIFFCTLFCQGNQNPVYQKVNPPRFWY

SEQ ID NO: 192784 - protein, 76 aa, Glycine max
  Clone ID: PAT_MRT3847_16105C.1.pep
LNKPANNFIWNGKPWPNHPWTGNSYFSLAYRGFPNWNNLTTRFFFFGTINPMPLFYRPNFDILPTGSPLRAREGNP

SEQ ID NO: 192785 - protein, 160 aa, Glycine max
  unsure (1)..(160): unsure at all Xaa locations
  Clone ID: PAT_MRT3847_16106C.1.pep
YSVIYGNLHLCFLLWVSNSYVSFVDAYSRYTWIYFLKQKSETLSVFKQFKSLVELQLNQKMKSIQTDWGXEYRPFTQYLDQIGIHHRLICPHTHHQNGVVERKHKHIVEMGLTLLSQASMPLSYWDHAFHTEVYLINRLPSPSVVYSQPSRAARAARAAR

SEQ ID NO: 192786 - protein, 101 aa, Glycine max
  Clone ID: PAT_MRT3847_16107C.1.pep
SVIGYSVVILIMERYKILRELGDGSCGHVYKARDMRTYEIVAVKRLKRKFYFWEEYTNLREVMVLRKMNHSNIIKLKESCRENNELFFIFGYMESDLYGSH

SEQ ID NO: 192787 - protein, 149 aa, Glycine max
  Clone ID: PAT_MRT3847_16108C.1.pep
KKEGGDNKEFINKEGGAGGGAEGAQKVEVNKMEHYGYAYPAPHMYWHGPGGYAPGESSSSSSSSNISYEVEVQSGYSYSNQGYDGNYVNYPYQHGYNDNYMAMAQPPPPLYLNPHHPPPQMFSDENPNACNRGMRQRLVSQYSIIDFDV

SEQ ID NO: 192788 - protein, 113 aa, Glycine max
  Clone ID: PAT_MRT3847_16109C.1.pep
GDCFLGLTLCVKPSVSNLDVVQNVSQGVRENVLFCSDFNDHSDQSVFWTLLSPDQNGVHNSAETSLSLSFSSVQHPPIGVPESAGFSFQPLQPNILTAPFLALSSPFQREHCL

SEQ ID NO: 192789 - protein, 62 aa, Glycine max
  Clone ID: PAT_MRT3847_1610C.1.pep
MVLNPEIPEIVSLKKRYRNDLSVSKMLISLTCDVLYIWCWSLYFHKEKKFAFLCLTKLLIYW

SEQ ID NO: 192790 - protein, 435 aa, Glycine max
  unsure (1)..(435): unsure at all Xaa locations
  Clone ID: PAT_MRT3847_16110C.1.pep
MERYKILRELGDGSCCHVYKARDXEHXQIVAVKRLKRKFCFWEEYTNLREVMILRIMNHPNIIKSKEVVKENIELFFIFEYMDCNLYQLIKEREKPFSEEEIRCFMRQVLQGLSHMHKKGFFHRDLKPENMLVTNDVLKIADFGLAREVSSMPPYTQYVSTRWYRAPEVLLRAPCYTPAVDMWAVGAILAELFTLTPIFPGESEIDQLYKIYGILGMPDSTAFTIGENNSQLLDVVAHEVVPPVKLSNIIPNASLEAIDLITQLLHWDPSRRPDADQSLQHPFFHVDAWVPCPPSDPLELKLSSKRAKPNLELKLQDFGPDPDDCFLGLTLGVKPSVSNSDVVQNVSQGVRENVLFCSDFNDHSDQSVFWTLLSPDQNGIHNSAETSLSLSFSPVQHPPIGVPQSVGFSFQPLQPNILTSPFLALSSPFQRGHCL

SEQ ID NO: 192791 - protein, 73 aa, Glycine max
  Clone ID: PAT_MRT3847_16111C.1.pep
LIWLLRKSEFSVSKLFSLLSLSLSLPTNSVFSFLFRESSLTLPICACVSVDSALILSNSHTRLSLVLQYMGSV

SEQ ID NO: 192792 - protein, 103 aa, Glycine max
  unsure (1)..(103): unsure at all Xaa locations
  Clone ID: PAT_MRT3847_16112C.1.pep
SGPNSFSSLTCHNRSITCGVDKTQTTLQFIKLAHGDTFNINYKHIYNVEKEAPEDKASLXSQPHYGXCNDLXTQEAYVSNITNVLHVLDLHCPQEDHQSEMKA

SEQ ID NO: 192793 - protein, 289 aa, Glycine max
  Clone ID: PAT_MRT3847_16113C.1.pep
MGAGEYYKILKVNRNATDEELKRAYKRLAMKWHPDKNHQHHHVTKEEAEAKFKQVSEAYDVLSDPKKRQIYDFYGHYPLNSMKVNEENSDGDVNRVPKGKGEKNVGVVESKLVCTLEELYKGCKKKLKISRTVPHEFGKMKTVEEVLKIDIKPGWKRGTKITFPGKGNQEAESKTPDDLIFVVDEKPHAFFKRDGNDLVVTQKILLVEALVGKTLNLTTLDGRELTIQVTEVVKPKYVLVVPNEGMPISKEPGKKGNLRIKFDVLFPSRLTSQQKYELKRILSNSTADD

SEQ ID NO: 192794 - protein, 82 aa, Glycine max
  Clone ID: PAT_MRT3847_16114C.1.pep
GNKKHIRSVSKTEVNTPWAQKKIVKQTPPFVFFKKNCTLLYGRQTPTIFIQKTLFVKVPHPPKGGGRIKAHPYLFYPSGNNA

SEQ ID NO: 192795 - protein, 44 aa, Glycine max
  Clone ID: PAT_MRT3847_16115C.1.pep
IRTHRRVRHWVVSSAPGHVAGASTVTRRNTCMKRLASTASQERV

SEQ ID NO: 192796 - protein, 67 aa, Glycine max
  Clone ID: PAT_MRT3847_16116C.1.pep
VAVRARARSRGLERMSNSCCIQNQGMRIKLRVNLMVGWMSTNTSCSNSEEDAHGQGSFSSFSFRTTT

SEQ ID NO: 192797 - protein, 59 aa, Glycine max
  Clone ID: PAT_MRT3847_16117C.1.pep
GAGGSPNLGGFHPSRGGFDGLNHRGSNQPPFNPNPWWQQKELWGRFGLGKKKKKKGGRR

SEQ ID NO: 192798 - protein, 106 aa, Glycine max
  Clone ID: PAT_MRT3847_16118C.1.pep
YIHFPLHKLGTYTNVHMKEAILEGQHTTLLEWRHRYNDLGWFDWNSYYLARISLNINMYVAGNISSHDVENSEAPRFNAVKAGMDDSRWAHLIQTLLGDKQTAELL

SEQ ID NO: 192799 - protein, 89 aa, Glycine max
  Clone ID: PAT_MRT3847_16119C.1.pep
MEVRIGQRVSRGMLPILALHTFSEYYRSDHKPPVTAALIAANTLIYLRPSFLDPLIPPIEQVWFNPHLILKNKDLKRFLLSPFYHIGEP

SEQ ID NO: 192800 - protein, 48 aa, Glycine max
  Clone ID: PAT_MRT3847_1611C.1.pep
NTFGTAFKFTSAAEQDYQKKVHCEHNSLVSGSSAATFDYVDGEVTVIE

SEQ ID NO: 192801 - protein, 205 aa, Glycine max
  Clone ID: PAT_MRT3847_16120C.1.pep
MSSSTTSSSSSNNNMSDVDRLFASFKCGLTPPKSATRERKRSKRRLEQVSSNHETPSESPVGEELRTPLSRIRKTNIESSIEKLKSAVTRAQSIGCGKQFSPIVFYGSPCGIPPKKPTRMLWRMLREICPNVSQQNILSIRKEVWMTFPRQDEAMKFAKGQEDVHVFSYQDHFNGQRKFLVSTYTEFWRRYNNMNPKFRHHYEVI

SEQ ID NO: 192802 - protein, 158 aa, Glycine max
  unsure (1)..(158): unsure at all Xaa locations
  Clone ID: PAT_MRT3847_16121C.1.pep
TGKTIVPEISNYANVIIMALFIYIALTGILHKQTGGVDIHDCCMNEHVIIIGSPYKHLYDITNGQLNPFARVNTERPHTYTALNDRETSYLSIXRWTSLLSPALTLLVINIVGVIVAVSDALDNGYDAWSPLAGRLIVPLWVIVHVYPPLNGVIEKHD

SEQ ID NO: 192803 - protein, 105 aa, Glycine max
  Clone ID: PAT_MRT3847_16122C.1.pep
KISNTHSLFLSLYTTQAPEIMNCDAADFFLHTSLTPYSLLLLLLLLHLRILSHTHHTHTLIKNIYHFSDPNVLQSAITLHVQTHFPNSPSALTVALATISYTFFL

SEQ ID NO: 192804 - protein, 84 aa, Glycine max
  Clone ID: PAT_MRT3847_16123C.1.pep
LIPYLFIYNTLIYAFYILFFISFFYYFLFYIIIFILFIFLILLFLFFISFIIYFLIIYFFSFLLFIFFLLFSILFLIYLFYIFF

SEQ ID NO: 192805 - protein, 38 aa, Glycine max
  Clone ID: PAT_MRT3847_16124C.1.pep
CLKFRIFSALLFPYLYDKCGGFAGIPNCRLLAAVRTRG

SEQ ID NO: 192806 - protein, 48 aa, Glycine max
  Clone ID: PAT_MRT3847_16125C.1.pep
ALLLPIRSDATVLRRLDDCLVFRSCPPLTLQHFHRSRLLRLYEDNTIY

SEQ ID NO: 192807 - protein, 224 aa, Glycine max
  Clone ID: PAT_MRT3847_16126C.1.pep
MAVTFSNLHTESGLKSLDDFLSGKVYVSGDQFTKDDIKVYGAVLEKPGDSFPNAAKWYEVVSSQLAASFPGNAQGVRFSGKASAPAEAAPAKPDASAAEDDDDLDLFGDETEEDKKAAEEREAAKKSTKKKESGKSSVLLDVKPWDDETDMKKLEEAVRSVEMPGLLWGASKLVPVGYGIKKLQIMLTIVDDLVSVDTLVEETLTVEPINEYVQSCDIVAFNKI

SEQ ID NO: 192808 - protein, 79 aa, Glycine max
  Clone ID: PAT_MRT3847_16127C.1.pep
RSPPHRVSYTGPSSDIHFLRACSREFQTLYKYASLRTSIPGVWYGTQQVCVVAVKSAIMILCLVHMHPGPEYDVRALWF

SEQ ID NO: 192809 - protein, 82 aa, Glycine max
  unsure (1)..(82): unsure at all Xaa locations
  Clone ID: PAT_MRT3847_16128C.1.pep
NKDFAITWGDGRSKILNHGGLLTFXLAKAFGXGFQSKKEFLFGRMDMHLRLVPGNFAGTVIAYYYSSKGSTCGELXFEFFGN

SEQ ID NO: 192810 - protein, 114 aa, Glycine max
  unsure (1)..(114): unsure at all Xaa locations
  Clone ID: PAT_MRT3847_16129C.1.pep
WAYSTNSIVCMGSTRFIVEIIYRLIVDDGNQVTIFTRSIAHVCLQYAGESDXDHAXMRLANLAFDGNKVDYDXVLSSLSADGCDAMYHITVRNAYEDERTLDALPILEQFVYCS

SEQ ID NO: 192811 - protein, 49 aa, Glycine max
  Clone ID: PAT_MRT3847_1612C.1.pep
IYWIPPSTTYFSLCDLASYLKHASHDFRFACALTRVHPTINKLIYTPVH

SEQ ID NO: 192812 - protein, 72 aa, Glycine max
  Clone ID: PAT_MRT3847_16130C.1.pep
ALFMRDICLVLLKLGLEITSIQWILHSHKCETILQVHVNNTQPDIYRKAPHLSLAVHYINLTTWIILYVYII

SEQ ID NO: 192813 - protein, 129 aa, Glycine max
  Clone ID: PAT_MRT3847_16131C.1.pep
AAGSQDRTITVWTTASPRPLFVAKHFCTQSVVDLSWSPDGYSLFACSLDGSVATFHFEVKELGQRLRDAELDELKRSRYGDVKGRKANLAESPAQLLLEAASAKQTPSKKVVSDVQQNQSKANAYVDVA

SEQ ID NO: 192814 - protein, 35 aa, Glycine max
  Clone ID: PAT_MRT3847_16132C.1.pep
TKNMCLFFTLFLLQHAPAQEDLILRTPACDVIPLL

SEQ ID NO: 192815 - protein, 407 aa, Glycine max
  Clone ID: PAT_MRT3847_16133C.1.pep
MWKFNEPTKQTDFSPERTATKSEFPSIQSFSSEMAEGKPEIQSSSVPGSGYFDYTSASQSVREQKRTEDGFNWRKYGQKQVKGSENPRSYYKCTHPNCSVKKKAENFSTGHITEIVYKGQHSHPKPQSTRRTNSQSIHQPSSSCTNSGITDHSVVTLGNPQMDHFSIQEDSSASVGEEEFEQTPQTSYSGGDGDNLGPDAKRWKGDNENDGYSVSASRSVREPRVVVETTSEIDILDDGFRWRKYGQKVVKGNSNARSYYKCTAPGCSVRKHVERAAHDIKAVITTYEGKHNHDVPAARGSGKYNSNRNSQNSNISAPIRPSAVNCYSNSSSFTNSLYNNTRLPATGNQESFSLDKFKNPGSFGYSDLNRPMGSHTNHAQYTDAAYSRAKDERKDDSFLQSFLSKDF

SEQ ID NO: 192816 - protein, 51 aa, Glycine max
  Clone ID: PAT_MRT3847_16134C.1.pep
VTHPTLIKPNAAFKIDGGFFKQNARYGALALGTASRTYNIHGTEHTGSFRT

SEQ ID NO: 192817 - protein, 79 aa, Glycine max
  Clone ID: PAT_MRT3847_16135C.1.pep
ANEDVSLGAWFIGLEVEHIDDRSMCCGTPPDCEWKAQAGNICVASFDWSCSGICKSVEKIKYVHSKCGEGDGAVWSALV

SEQ ID NO: 192818 - protein, 73 aa, Glycine max
  Clone ID: PAT_MRT3847_16136C.1.pep
QNTSSAPSSALASKWESMMHGFKSLRSNIDSKGFLPLSNAQGSTLNSKSSSESLDDIFERLKRPPSEYRDSGD

SEQ ID NO: 192819 - protein, 63 aa, Glycine max
  Clone ID: PAT_MRT3847_16137C.1.pep
GQVRHQTLKEKGPSLDGKHSLSITKLADTYETIETKKDFCCHNNAGGQNFLTSTLKQIAEAKF

SEQ ID NO: 192820 - protein, 81 aa, Glycine max
  unsure (1)..(81): unsure at all Xaa locations
  Clone ID: PAT_MRT3847_16138C.1.pep
PPAFVASVAVPVLAPVGLPLXVPVSASLALPCACPVVVSPCVLLAAPLGGRLVSCXSXXGVRVRCFLRTPSXYGLLXAKKE

SEQ ID NO: 192821 - protein, 115 aa, Glycine max
  Clone ID: PAT_MRT3847_16139C.1.pep
LGLHAQHLQNVLPKEPQAVSSRSEVDASLTHSTPAVPVSAIHEMLLSFLNIFFIFSFSSISHFFLLLFSQFDLFFLLYNVFSFLSFFLFINLVFFSSIFLSLFSDAWSYVWTDAW

SEQ ID NO: 192822 - protein, 73 aa, Glycine max
  Clone ID: PAT_MRT3847_1613C.1.pep
SNNKFLFSTPNYFSFKNPKFYNPQTLSNKKNPKKNTKYSIPSKANPKLIFSKIHVFYFIPKLIFPQKFNLYSP

SEQ ID NO: 192823 - protein, 65 aa, Glycine max
  Clone ID: PAT_MRT3847_16140C.1.pep
SVQKYSKYIDILAYTDTCNQWFTSLTVTYPPLLIKTPQIDKPYFKPNHCKLIQPVRQNICSFLLF

SEQ ID NO: 192824 - protein, 46 aa, Glycine max
  Clone ID: PAT_MRT3847_16141C.1.pep
FLFKFDFNFLKGVSVCVCLFSSSFMIIVCEKWEFCFQHVCLVGKKT

SEQ ID NO: 192825 - protein, 52 aa, Glycine max
  Clone ID: PAT_MRT3847_16142C.1.pep
KETSPEFAIKKNDYLGGTILSNHTNEDSEGAPLRDLKLVSVLAWFHSCRVII

SEQ ID NO: 192826 - protein, 97 aa, Glycine max
  unsure (1)..(97): unsure at all Xaa locations
  Clone ID: PAT_MRT3847_16143C.1.pep
MTHSHVRKIWTSSGHQRESDIIDYRHTLHLLKEXLRDNTYYGGDSLSFVDIALVPIHTWFNTHXTFGNLNKHSECHNSIAWANMRHHTNCVANSLPD

SEQ ID NO: 192827 - protein, 99 aa, Glycine max
  unsure (1)..(99): unsure at all Xaa locations
  Clone ID: PAT_MRT3847_16144C.1.pep
IVWHEVPKYPISKGVLXNIXTPLDNSIRVCSSHFVIMDVRILSHPCLSLSTXTLSPSACSFNVSQLDLINISFKASIFILLDKDNQLNNYAIYPKYNFH

SEQ ID NO: 192828 - protein, 36 aa, Glycine max
  unsure (1)..(36): unsure at all Xaa locations
  Clone ID: PAT_MRT3847_16145C.1.pep
PNLWTIKTIRTVALXARNLTDPAFQNLLWDDINTHG

SEQ ID NO: 192829 - protein, 89 aa, Glycine max
  Clone ID: PAT_MRT3847_16146C.1.pep
ELPRKLNLGDNYLLRTAYEEVVLMVNYRRSPPPNDDYSRRLGIYPQNMERLGDLYALDPTVVHRFLASYERAWDNSDELYTEISGGSPS

SEQ ID NO: 192830 - protein, 84 aa, Glycine max
  unsure (1)..(84): unsure at all Xaa locations
  Clone ID: PAT_MRT3847_16147C.1.pep
SSCWRILKKLLHENVIKLKEMGTDARTDRDEHGKPDGAKYMDHVHQEXAYMDHDSTGVADTPGMRCTVIQIKCYMTQIGAEFCL

SEQ ID NO: 192831 - protein, 123 aa, Glycine max
  Clone ID: PAT_MRT3847_16148C.1.pep
SLSLSQRDGTNYLGFFFNTFNAPHPTAIIMPSPSLPFSLIVHNHHHHYPLKAPTPYSFITNIIIPQPFAPDAADDDHHLHHHKHHTAQAQEEDDEHNQGRSKVAAAAASLMRMRKTLSSHLAS

SEQ ID NO: 192832 - protein, 211 aa, Glycine max
  Clone ID: PAT_MRT3847_16149C.1.pep
RAEKMKDLKKYREMWEHQNVGFYDGFREHKKKEDFKANVTRLELASVWDEIMEKLRSYQLPDEFEGNKEWVDLGSRFRQLMEPLDIANYYRHARHYEDGSSSYMLRGRPKRYRYTQKWLEHAERRPQEPSSTSCFWAEVEDLRYKTSYSNSSSFEDVKERVEQLEAQLQAWSEKGELANDVFLEGSTLVKWWKTLPLQHKQQSCIRNLINE

SEQ ID NO: 192833 - protein, 145 aa, Glycine max
  unsure (1)..(145): unsure at all Xaa locations
  Clone ID: PAT_MRT3847_1614C.1.pep
DPCFWAVEEADLSIVLNSKIPDAYLXRKGPGSMKLDEDDTVMADLKEGASLISDNSWTAASIEECDKLIAEEYYTIPIIEEKTIPHDATIKDVQGQDDLTKIATVAETIPKXRIEYYPRRAHHVVTISAERIPDESLNCDWSEQI

SEQ ID NO: 192834 - protein, 51 aa, Glycine max
  Clone ID: PAT_MRT3847_16150C.1.pep
ALNLSVAREVLKGQLFGPKSLKITGFANKKNTFFSFKKLAHGVLRQPLKKT

SEQ ID NO: 192835 - protein, 71 aa, Glycine max
  Clone ID: PAT_MRT3847_16151C.1.pep
FLLHFRQELLQAREKPKEEQVMALKHSMQTGMAQAMKEQTQLREEMAYQYKLGNFEAAAAIQRRLDPDAAI

SEQ ID NO: 192836 - protein, 200 aa, Glycine max
  Clone ID: PAT_MRT3847_16152C.1.pep
GVGELHLADFDTVELTNLQRQIIHDTASIGTTKVDSALRRLAAINPEVTLVAHRHALDADSLGVAVAAVDLVLDCCDNFATREAVNAACVAASKPLVSGAAIRLEGQLSVFDPRRPESPCYHCLYGHGSEAELTCSEAGVIGPLVGLVGSLQALEALKLLAGFGEPLVGRLLLIDALGTKFRELRVKRDPQCSVCGGGDA

SEQ ID NO: 192837 - protein, 165 aa, Glycine max
  Clone ID: PAT_MRT3847_16153C.1.pep
SNLVWCLRLLSYACPLSKKGMDIVVREMRDAKVNWNVTVANIIMLAYVKMKDFRHLKILLSQLPIYRVQPDIITIGILFDATRIGFDGSGALETWRRMGYLYRVVEIKTDSLVLTAFGKGHFLKSCEEVYSSLHPEDRKRKTWTYHDLIALLSKHTGTIDCIKPR

SEQ ID NO: 192838 - protein, 66 aa, Glycine max
  Clone ID: PAT_MRT3847_16154C.1.pep
EKPPNGPTRFRSRSGLYIFANDVYTAQPNMHHGGGEVTDLYKPKKCSSTPTFITANDHASVHINIA

SEQ ID NO: 192839 - protein, 54 aa, Glycine max
  Clone ID: PAT_MRT3847_16155C.1.pep
KQVSIFYLCFVSDPFMEVPSSWDALRKQGFFILSVMGNSWDQGWDSTTLLLSVL

SEQ ID NO: 192840 - protein, 94 aa, Glycine max
  Clone ID: PAT_MRT3847_16156C.1.pep
IAESQCERVFICCQGQGNMKVAMSALPLVFRQICGVRSYQIGTYVLAFPHQMYVDWVKAIIHNVQDANAKDNMGHGCMPSIRTSVLLAVIYVGA

SEQ ID NO: 192841 - protein, 67 aa, Glycine max
  Clone ID: PAT_MRT3847_16157C.1.pep
SPPTTIPKPLTCLWLQLISNKVVIVVPVLIYLPVVIYKIKGQPVVIYRLVSKLHLVMYQVFKFLILK

SEQ ID NO: 192842 - protein, 89 aa, Glycine max
  Clone ID: PAT_MRT3847_16158C.1.pep
MEQLKPSAVNSSPLTPLTFLDRAATVYGDVPSVVYNDTTFTWSQTRRRCLQLASALASLGIGRGHVVFVVAPNIPAMYELHFFVPFAGA

SEQ ID NO: 192843 - protein, 561 aa, Glycine max
  unsure (1)..(561): unsure at all Xaa locations
  Clone ID: PAT_MRT3847_16159C.1.pep
MYSYLVLIMEQLKPSAANSSPLTPLGFLDRAATVHGDVPSVVYNNTTFTWSQTRRPCLQLASALSSLGIRRGSVVSVVAPNIPAMYELHFAVPFAGAILNNINTRLDARTVSVILRHANSTLVFVERRSRDLVLEALSLFPENQSQRPTLILITDETIEKASPTVESVTTRGDFVSKGDQRALWVLPNXAEWEPIVLNYTSDVVSLYVDIDLGGIQRNQLINCAITNVTLSXSKKKNLISMFHANGWSFPKEYGIVAVTNICVRKFDAEIVYSLIKRHHVTHMCGAPVVLNMLSQRERTPPLRKPVQILTAGAPPPAAVLFRTXALGFVVTSGRHLTETGGLVVSCAWKGEWNKLPATFRTRSEARLKARXGVRTVAETWLKWVPPGRACYVLRRSCDELMRGGVMLGYLKDPSGTASCFKNGWFYTGDVXGVMHEDGYLEIKDRSKDVIISGGENLSSVEVESILYGHPAVNEAAVVARPHEYWGETPCAFVSLKKGIKEKEKPTEKDIIEYCRDNMPHYMVPKTVVFKDELPKTSTGKIQKFVLRQIAKEMGSFTQSRM

SEQ ID NO: 192844 - protein, 157 aa, Glycine max
  unsure (1)..(157): unsure at all Xaa locations
  Clone ID: PAT_MRT3847_1615C.1.pep
KAATIVLEICSIALVPTLYIASRGKICCAVDISDNVKRFNANAVMNFNNDLRMLESFADEKFHCSGLAEFYSGASFKSCMIEARQLMNLLSSSQPENFMNPVIREKNYYALDYKMVGSICDKFKDSPDGIFGXSLLNKNTKQSAKKKSMDMLQKRLK

SEQ ID NO: 192845 - protein, 160 aa, Glycine max
  Clone ID: PAT_MRT3847_16160C.1.pep
MASSSGTSSGSSLLQNSGSEEDLQAVMDQRKRKRMISNRESARRSRMRKQKHLDDLVSQVAQLRKENQQILTSVNITTQQYLSVEAENSVLRAQVGELSHRLESLNEIVDVLNATTVAGFGAAATSSTFVEPINNNSFFNPLNMGYLNHPIMASADILQY

SEQ ID NO: 192846 - protein, 151 aa, Glycine max
  Clone ID: PAT_MRT3847_16161C.1.pep
IVKLTRQCTVAFLIMKLNQGININIKLELKKKGVPDWRDVIIFIYVDWKDHIGIQTPIFSSIFSWALTKYSLLMWSQMATPHLIPATPVSKNSVTNKNSSVIFRKPLIFFLLLSLVGFIPVFLFNLFIYTIWQGPFCRLLADSSRSSRFGS

SEQ ID NO: 192847 - protein, 175 aa, Glycine max
  Clone ID: PAT_MRT3847_16162C.1.pep
MVSCIESYIYHINMACSSGTSSGSLSLLQNSGSEEDLQAVMEDQRKRKRMISNRESARRSRMRKQKHLDDLVSQVAQLRKENQQILTSVNITTQQYLSVEAENSVLRAQVGEFSHRLESLNEIVDVLNATTVAGFGAAATSSTFVEPINNNSFFNPLNMGYLNHPIMASADILQY

SEQ ID NO: 192848 - protein, 92 aa, Glycine max
  unsure (1)..(92): unsure at all Xaa locations
  Clone ID: PAT_MRT3847_16163C.1.pep
AXATPXQDVQVXIXWFISXQECXXXTYXXLNXQNPFVLNRWMGXLTFPQGXSRSVXIMPXSIGGGAGXKNAILXNMPNXVXXMWRXXAXXLV

SEQ ID NO: 192849 - protein, 76 aa, Glycine max
  Clone ID: PAT_MRT3847_16164C.1.pep
RVRTTVKGAVDDLDLVIKKLEEAGFSHDRFYIHCDGALFGLMMPFVKRVCANVTINCLTCIRYNDEIFICYLHLFY

SEQ ID NO: 192850 - protein, 295 aa, Glycine max
  Clone ID: PAT_MRT3847_16165C.1.pep
WTLNQQIYTSLFHGYIKAKMTAARRRQKGEMNKKNLKPDLLLYGTKIWGLCRQNEIEDSMAVIREMMDCGLTANSYIYTTLIDAYFKVGKTTEAVNLLQEMQDLGIKITVVTYGVLIDGLCKIGLVQQAVRYFDHMTRNGLQPNIMIYTALIDGLCKNDCLEEAKNLFNEMLDKGISPDKLVYTSLIDGNMKHGNPGEALSLRNRMVEIGMELDLCAYTSLIWGFSRYGQVQLAKSLLDEMLRKGIIPDQVLCICLLRKYYELGDINEALALHDDMARRGLISGTIDITVPSVHT

SEQ ID NO: 192851 - protein, 123 aa, Glycine max
  unsure (1)..(123): unsure at all Xaa locations
  Clone ID: PAT_MRT3847_16166C.1.pep
MHIFYKTLTGRTITLEVESYDTIDNLXANIHDKEGIPPDQLRLVFTGMQLEDGRTLADYNIHNESTLHLVLRLRGDMQIFGYTLTDQTITLEVESSDTIDDGNAKIQDTEGIPPDHHQLMFAG

SEQ ID NO: 192852 - protein, 85 aa, Glycine max
  Clone ID: PAT_MRT3847_16167C.1.pep
YRKQKRRRNYQQMASSWTPRQNKLFEQALALYDRETPDRWQNVANVVGRSVEDVKRHYEILKEDVKRIEHGQVPFPRYKTNTSNN

SEQ ID NO: 192853 - protein, 27 aa, Glycine max
  Clone ID: PAT_MRT3847_16168C.1.pep
ENMSKHLLSLPRIIKLTRPRMVTFFYF

SEQ ID NO: 192854 - protein, 42 aa, Glycine max
  Clone ID: PAT_MRT3847_16169C.1.pep
TFKRRNGGRNKHGRGQRQIYPGAPYCGKMLSPRNKAIKKVSW

SEQ ID NO: 192855 - protein, 77 aa, Glycine max
  unsure (1)..(77): unsure at all Xaa locations
  Clone ID: PAT_MRT3847_1616C.1.pep
XSPSAPXCPSSSKXVPTXLDYHLVFACPPHXFLXCVTXLQCLXAIIXXVXSPWXNXSVVAPYIFXAIXDAFXXFAXH

SEQ ID NO: 192856 - protein, 62 aa, Glycine max
  Clone ID: PAT_MRT3847_16170C.1.pep
EFMNDTFINIMQTIKHPMINRRLTNSHIQLSVHLPLFLIHGCILHGTPKLTKSDIPVPRAHP

SEQ ID NO: 192857 - protein, 49 aa, Glycine max
  Clone ID: PAT_MRT3847_16171C.1.pep
CSCEFWQKGGPYLAIYLWVFTFGLSIVMMTLYPVLIAPLFNKFTPVRIS

SEQ ID NO: 192858 - protein, 52 aa, Glycine max
  Clone ID: PAT_MRT3847_16172C.1.pep
GVRTPPIGRHNIVTCIIAPAALFLKLSLAAINTRHMNMDFTHYHLPLIMNVL

SEQ ID NO: 192859 - protein, 139 aa, Glycine max
  Clone ID: PAT_MRT3847_16173C.1.pep
MKFEDYLMEKSQQEPHNRQNLEKEVVQLQAHLKCEEALNRVLRCALHGPVFSLPLIPPLFPPQVRGLLEELAMVEEEIIKLEKKVKELELRIVPGEIPNIDLEIHHRRQSKLYKHFRGSSRYGSLITEQKSSSLHYEVI

SEQ ID NO: 192860 - protein, 71 aa, Glycine max
  Clone ID: PAT_MRT3847_16174C.1.pep
QQENIQSNLLVSETKGSASITVVGIYATKAISHNNRHNFPSEAKIPATVLLARHRTVGERKLRIWVAAKGG

SEQ ID NO: 192861 - protein, 65 aa, Glycine max
  Clone ID: PAT_MRT3847_16175C.1.pep
NTHLLVKVKIHSHWRRQRCVATSINIRSGFKRPFVLRRSTSSHLTLVRMKGQKRVKGSLKAHATE

SEQ ID NO: 192862 - protein, 335 aa, Glycine max
  Clone ID: PAT_MRT3847_16176C.1.pep
LKWIAETKVGIVTQCCLSGIANEGKDQYLTNLALKINAKIGGSNVELINRLPHFEGEGHVMFIGADVNHPASRDINSPSIAAVVATVNWPAANRYAARVCAQGHRVEKILNFGRICYELVSYYDRLNKVRPEKIVVFRDGVSESQFHMVLTEELQDLKSVFSDANYFPTITIIVAQKRHQTRFFPVGPKDGIQNGNVFPGTVVDTKVVHPFEFDFYLCSHYGSLGTSKPTHYHVLWDEHKFNSDDLQKLIYDMCFTFARCTKPVSLVPPVYYADLTAYRGRLYYEAMNQMQSPGSAVSSSSSQITSLSISSTGSSLNDPGYYKLHADVENIMFFV

SEQ ID NO: 192863 - protein, 97 aa, Glycine max
  unsure (1)..(97): unsure at all Xaa locations
  Clone ID: PAT_MRT3847_16177C.1.pep
RAIWNGVSLIPLLSLPPLILRRLFAEVLIKYSIGDYSSRLKXPSVFLQPVKKMVYLCVYGDGNLISVYEYIXPYFSCSYLXSVLASYNITVTDGIDK

SEQ ID NO: 192864 - protein, 146 aa, Glycine max
  Clone ID: PAT_MRT3847_16178C.1.pep
AGSLSAAFFFFFFFFFFFFFFFFFFFFFFFFFFFFFFFFFFFFKGNQRGGENSNPNSTILKKRGGGKRGKTLTLPPLFWEKTPNQPKRVQSPPTQKPGLPTNEHLRGGSKTPQKKWGKKKRQGPPPSLLTPQNLGPSPTPFFGGSL

SEQ ID NO: 192865 - protein, 53 aa, Glycine max
  Clone ID: PAT_MRT3847_16179C.1.pep
TRLLSFSDMAKAISKKTSQRIVPCNHYLNFIINKKIKYINFKIIFFCSINNDK

SEQ ID NO: 192866 - protein, 95 aa, Glycine max
  Clone ID: PAT_MRT3847_1617C.1.pep
AGHRLWLQHGDSCWWWLLCVVASAPNQDKIVILSLVTVVALVTVVAMLVFDFFFLSFLHSINYLSPFRHRSLFFFSGGIVHLVRVCIFDVYSRLI

SEQ ID NO: 192867 - protein, 65 aa, Glycine max
  Clone ID: PAT_MRT3847_16180C.1.pep
CVRYGKPSIHLYELRHFPLFEQQLQFISLFSYTRGTDVKACIKGERCKFGVVLYIEHNIVPNELQ

SEQ ID NO: 192868 - protein, 68 aa, Glycine max
  Clone ID: PAT_MRT3847_16181C.1.pep
VHLRPPSAVHVHRHSSTASFRSPTASPISSDHAVFAGTEPAPGPCCGPNRTLWPISGPFYNSALSHVY

SEQ ID NO: 192869 - protein, 39 aa, Glycine max
  Clone ID: PAT_MRT3847_16182C.1.pep
LHSQSPNILQSNTMTSYTLDITEHHPHVQTLARSLPCAA

SEQ ID NO: 192870 - protein, 75 aa, Glycine max
  Clone ID: PAT_MRT3847_16183C.1.pep
SCMHPLTINSRTHVFLLDRFGCPTKLTTLYVPFLFLLYSFSAPYILPFGHSSPLSFSLFLAHSPPPPPKKEDVIQ

SEQ ID NO: 192871 - protein, 102 aa, Glycine max
  Clone ID: PAT_MRT3847_16184C.1.pep
SANQGTRVFYLSKSQDSGIACDFTGLKKQCHFLLMYIYRLPAFIEFPSPNLWFRSLYRTKLRAAVRIIQRLLMLTNLTCPLQVIHLPTVSYGTSKETVTEQL

SEQ ID NO: 192872 - protein, 529 aa, Glycine max
  unsure (1)..(529): unsure at all Xaa locations
  Clone ID: PAT_MRT3847_16185C.1.pep
DVLPRRSSDSLGPYGARKGLGKTVQAITYLTLLKHLHNDSGPHLIVCPASVLENWERELKRWCPSFSVLQYHGAGRAAYCKELNSLSKAGLPPPFNVLLVCYSLFERHSAQQKDDRKILKRWRWSCVIMDEAHALKDKNSFRWKNLMSVARNANQRLMLTGTPLQNDLHELWSLLEFMLPDIFASEDVDLKKLLNAEDRDLIGRMKSILGPFILRRLKSDVMQQLVPKIQQVEYVIMEKQQETAYKEAIEEYRAVSQARMEKCSNLNSKSVLEVLPRRQINNYFVQFRKIANHPLLIRRIYNDEDVIRFARKLHPIGAFGFECTLDRVIEELKNYNDFCIHRRWHDYMLRLSYSMDNXALAELLPSLKEGGHRALIFSQWTSMLDILEWTLDVIGLTYKRLDGSTQVAERQTIVDTFNNDTSIFACLLSTRAGGQGLNLTGADTVVIHDMDFNPQIDRQAEDRCHRIGQTKPVTIYRLVTKGTVDENVYEIAKRKLVLDAAVLESMEEINEGDMPEKTMGEILSAILLS

SEQ ID NO: 192873 - protein, 110 aa, Glycine max
  Clone ID: PAT_MRT3847_16186C.1.pep
GICAKVHNFSETIEPEWRLFVPVLLNKSWIQNKPFSFWQLWAKKAAIKLTGRFGIRGLVHHQWNGCVVCLNVLQRRLFGQFQSLRRSRAGTDDLGVDVLLYSHWNVDEKK

SEQ ID NO: 192874 - protein, 136 aa, Glycine max
  Clone ID: PAT_MRT3847_16187C.1.pep
IGRTRGRLDGSTQVAERQTIVDTFNNDTSIFACLLSTRAGGQGLNLTGADTVVIHDMDFNPQIDRQAEDRCHRIGQTKPVTIHRLVTKGTVDENVYEIAKRKLVLDAAVLESMEEINEGELPEKTMGEILSAILLS

SEQ ID NO: 192875 - protein, 558 aa, Glycine max
  unsure (1)..(558): unsure at all Xaa locations
  Clone ID: PAT_MRT3847_16188C.1.pep
EDSGFKPLLKPYQLVGVNFLLLLYRKGIGGAILADEMGLGKTVQAITYLTLLKHLHNDSGPHLIVCPASVLENWERELKRWCPSFSVLQYHGAGRAAYCKELNSLSKAGLPPPFNVLLVCYSLFERHSAQQKDDRKILKRWRWSCVKKAGIRXLLFSSPWRRXNLMSVRENDGRGLMLQXIELKMRSXEKQFKLESLHSYIFNLEDVDLKKLQNAEDGDLCGRMKSILGPFILRRLKSDVMQQLVPKIQQVEYVIMEKQQETAYKEAIEEYRAVSQARMEKCSNLNSKSVLEVLPRRQINNYFVQFRKIANHPLLIRRIYNDEDVIRFARKLEKTTEGGFECTLDRVIEELKNYNDFCIHRLLLHYGVNDRKGILPDKHVMLSAKCRALAELLPSLKEGGHRALIFSQWTSMLDILEWTLDVIGLTYKRLDGSTQVAERQTIVDTFNNDTSIFACLLSTRAGGQGLNLTGADTVVIHDMDFNPQIDRQAEDRCHRIGQTKPVTIYRLVTKGTVDENVYEIAKRKLVLDAAVLESMEEINEGDMPEKTMGEILSAILLS

SEQ ID NO: 192876 - protein, 74 aa, Glycine max
  Clone ID: PAT_MRT3847_16189C.1.pep
PLVFLYSNKAFQKRILIGNEALVQIPLLVWRTQFGDNSFLEIATASFPLPMCSCERDQQFSISNSFVCSQNSEM

SEQ ID NO: 192877 - protein, 88 aa, Glycine max
  Clone ID: PAT_MRT3847_1618C.1.pep
MGQNSVVLKFVCILLLALISYWLIFIPFYRRQKPEAFLLGSMENEMISDGVLAQDINQASSFWLLREVHIFHSMIIFFRKKYFISFQN

SEQ ID NO: 192878 - protein, 129 aa, Glycine max
  Clone ID: PAT_MRT3847_16190C.1.pep
MDSFQQQPHGYMRPPQPPPLPPHTADPHHHPHHFHQIPPPPPQVPWFSSQFQYRPSQTPSPPPQWQQPPPAPPSNAYSYHPNQFPPPRAHVPPPQFTPHSHVPPQPYPQEWGNPNWPPNQGYPANKNED

SEQ ID NO: 192879 - protein, 40 aa, Glycine max
  Clone ID: PAT_MRT3847_16191C.1.pep
KLSLYIFTLYIATLRLCDINYTVKYLYSSLTIIAWIQHVY

SEQ ID NO: 192880 - protein, 268 aa, Glycine max
  unsure (1)..(268): unsure at all Xaa locations
  Clone ID: PAT_MRT3847_16192C.1.pep
MAEIVVVFDFDKTIVDCDSDNWVVDELGFNELFNRLLPTMPWNTLMDKMVMELHSHGKTIEDIVXVLQRIPIHPRIIHAIKAAHALGCDLRIVSDANTFFIETILKHLKIKECFSEINTNPGYINGEERLRILPYHDFNNSPHGCTLCPPNMCKGEIIEKIQDSISSGEKKRVIYLGDGSGDYCPSLRLKDKDFVMPRKNFPVWELICKDPLLIKAEIHEWSDGEELERISLQLINKISLGESAQNISADCKLETIREPFPQVLLAHR

SEQ ID NO: 192881 - protein, 46 aa, Glycine max
  Clone ID: PAT_MRT3847_16193C.1.pep
YTGYNSRQPYKYAQLMPKNKMFLILALVCPSSETTCLALSLTKCPT

SEQ ID NO: 192882 - protein, 198 aa, Glycine max
  unsure (1)..(198): unsure at all Xaa locations
  Clone ID: PAT_MRT3847_16194C.1.pep
MANTDALSFFKDFMAGGISAAVSKTAVAPIERVKLLLQVQAASTQIAADKQYKGIVDCFVRIPKEQGFASFWRGNLANVIRYFPTQALNFAFKDIYKQIFLGGVDKNTQFWRYFAGNLASGGAAGASSLCIVYPLDFARTRLAADIGKGDGRQFNGLADCLKKTFKSDGLIGMYRGFGXVSSQGIIIYRAGYFGFFDT

SEQ ID NO: 192883 - protein, 111 aa, Glycine max
  Clone ID: PAT_MRT3847_16195C.1.pep
WFMTDPRSKLWAPTLCSIFHQKLLLQWGFLSKKRKETIAILFLIPELVAPARKIPFTFIAFSQKRFLSIPPYLHGVHLVYCKNRFFFFACGLVCYNYYNYLDLSALQNTKN

SEQ ID NO: 192884 - protein, 83 aa, Glycine max
  Clone ID: PAT_MRT3847_16196C.1.pep
VVDGICIPDNKHPMWLHKVERGIKEFRDFKAGGRWKLTMFQWGMCFIHENNVAWWFSDLKIFYWCKEGASFLLTRTTLDFFFF

SEQ ID NO: 192885 - protein, 349 aa, Glycine max
  Clone ID: PAT_MRT3847_16197C.1.pep
ESNLGAPLVFSSVGDFNLDSKWLVDPKQLFIGPKIGEGAHAKVYEGKYKNQNVAVKIINKGETLEEISRREARFAREVAMLSRVQHKNLVKFIGACKEPVMVIVTELLLGGTLRKYLLNMRPKCLDMTVAVGFALDIARAMECLHSHGIIHRDLKPDNLILTDDHKAVKLADFGLAREESLTEMMTAETGTYRWMAPELYSTVTLRQGEKKHYNHKVDAYSFAIVLWELIHNKLPFEGMSNLQAAYAAAFKNTRPSAEDLPEDLALIVTSCWKEDPNDRPNFSQIIQMLLRYLSTVSPPEPVVPLRITSSENAVLPPESPGTSALMLGRDGSRETTTAKGFFFCFNQCY

SEQ ID NO: 192886 - protein, 134 aa, Glycine max
  Clone ID: PAT_MRT3847_16198C.1.pep
STPTIHFLLPTFTIPHYVSTDNRSATEPTRHSFMSLASLVTSLLPFPHNYSLPSTHAPPFHPFAAPNPPSTLSHCFLSDTHGTTDGRVLLALVAAEAATATATPAAPEYGHRLWDPTMLCLSLNKYPCEAKGFQ

SEQ ID NO: 192887 - protein, 78 aa, Glycine max
  Clone ID: PAT_MRT3847_16199C.1.pep
KFKNHSHHQYGLVSSSMKLEYEREEEEDNKRENQLLDWTTMKIGNAFGKKWISMTNENGVADFMVDNIDETLVFNQSQ

SEQ ID NO: 192888 - protein, 106 aa, Glycine max
  Clone ID: PAT_MRT3847_1619C.1.pep
EDDSRGRSRRSRAAASSRGRTRELKQAPSLSEPRRLRQPSTSKYKPQSLKFQVTQISSPTLRPKLSASVVRIQESAQTIGNRLSCAPSRNPHRTPQILGLKPRKKK

SEQ ID NO: 192889 - protein, 75 aa, Glycine max
  Clone ID: PAT_MRT3847_161C.1.pep
LLAENCTVSVGVTPFSLDIFPYHVFHKEKWNTGITRSHAISPPRDYVLHILISCIKSICSVFTEPFLVGSIVAID

SEQ ID NO: 192890 - protein, 55 aa, Glycine max
  Clone ID: PAT_MRT3847_16200C.1.pep
MERKQGFFSALKDEVVRGLSPARSRAKSPARSASPMSSLLRRRKKHHAPPPELFI

SEQ ID NO: 192891 - protein, 49 aa, Glycine max
  Clone ID: PAT_MRT3847_16201C.1.pep
RYSAVEAKHIQTKANVRNIAEKSTKPRPPRNGSFGSVEVQRAWRSKIAS

SEQ ID NO: 192892 - protein, 30 aa, Glycine max
  Clone ID: PAT_MRT3847_16202C.1.pep
YLSCALKQLPNYSHFKFVDHTFSNFPTLFS

SEQ ID NO: 192893 - protein, 97 aa, Glycine max
  Clone ID: PAT_MRT3847_16203C.1.pep
TIIFMYSAFYIKHGQIPRAKSVCDFTILVKYPLILSPQFLDGGEYKLVNIFFQKISQTSSIIHHKLSIMLFAPLVKSPHQWKGLPSVVFLRGSSSSE

SEQ ID NO: 192894 - protein, 144 aa, Glycine max
  Clone ID: PAT_MRT3847_16204C.1.pep
RFMGSGPPAPSGLDRGFTTGSSGRVFFKKKNSFVARPSCFFPEDFVCSRRFQMTHDGAPGPPPPPRGKFFSAGSLRVQGKNGVFKVMVYKKKVGGPSDPFFFLPHPLESRQRFKPQKTPQRFKTQKTPQRFKTEGAPQRNFPFF

SEQ ID NO: 192895 - protein, 82 aa, Glycine max
  unsure (1)..(82): unsure at all Xaa locations
  Clone ID: PAT_MRT3847_16205C.1.pep
LKKIPIRNIVIGRPEKATHPDTLNAWLAEFMCTLILVFCGSRSGIXYDMLTVNGAXTAAGLMYDFIVHAFALFVAVFVGANI

SEQ ID NO: 192896 - protein, 144 aa, Glycine max
  unsure (1)..(144): unsure at all Xaa locations
  Clone ID: PAT_MRT3847_16206C.1.pep
SGLLVGLYWKGATILFVLKGCPYGSAGIHQKPLFIHRHKPVAIISEAGSSGVSLHADXKPXHQKRRVHLTLDLPWSAHPAIHQFERTYQSHQASTPXYSILFTNLAGERRFASIGAKRLXLLGALTQRDPRAAPSIIAYNYDSA

SEQ ID NO: 192897 - protein, 135 aa, Glycine max
  Clone ID: PAT_MRT3847_16207C.1.pep
MDFTYPSLLSIFLLLLLPSLISSQICQKNCGKETVKYPFGSGPGCGDPRFQPHVTCSNQKLTFTTHTGSYPVTSIDYTNQVIYISDPTMSTCSCTVPSKGFGLNWDAPFTFADSTIFALVDCSMNSSSICQSNGY

SEQ ID NO: 192898 - protein, 35 aa, Glycine max
  Clone ID: PAT_MRT3847_16208C.1.pep
PPPPPPPPPKKVLNITFLGIHFTILLTCDFEVKAR

SEQ ID NO: 192899 - protein, 66 aa, Glycine max
  Clone ID: PAT_MRT3847_16209C.1.pep
NWVWGSLGPLNIQGSLVGASSFPKKKVLFFFLNTFSAFFVFMMVTPPAFFLSLSLQMFFFPHSFFF

SEQ ID NO: 192900 - protein, 112 aa, Glycine max
  unsure (1)..(112): unsure at all Xaa locations
  Clone ID: PAT_MRT3847_1620C.1.pep
TQTPTHAQLVTQQKNPQTKAPKRNKNKTPSKIHTQHKSQITKTKSNSNHKTTTHTVASSSDTPCSRIIHPRILFILIQNQRKQRLLKKQLKEKIKREREGLXDTIRKGAEHG

SEQ ID NO: 192901 - protein, 57 aa, Glycine max
  Clone ID: PAT_MRT3847_16210C.1.pep
RFLLNSVITENGMLYMMMHMWIKYEFNFHDERYVLSKSQAMVGDTATNDLLDPIINA

SEQ ID NO: 192902 - protein, 143 aa, Glycine max
  unsure (1)..(143): unsure at all Xaa locations
  Clone ID: PAT_MRT3847_16211C.1.pep
QKKVGVGVSVSTAMVATLFLEVGLNTLIKAPNTNGKSNFDFIVYSXLLGSLXLLIPSTLLYHTKRAPAPIPSSILWRIFLLWCLSTAEHTLTYTGIAYSSPTLNSAMSDLVPAFTFISAIISRMENPNLKLRSSHAKIIGTVI

SEQ ID NO: 192903 - protein, 95 aa, Glycine max
  Clone ID: PAT_MRT3847_16212C.1.pep
KQTHLHTFFQFANIISHKLILIQPFFLSNHSCNHLLPTIYNKCNPYDLTLFLRLVLTALVNKITHYYNQRPKHYFYINKIFSSIRKKCFYEYDTF

SEQ ID NO: 192904 - protein, 38 aa, Glycine max
  unsure (1)..(38): unsure at all Xaa locations
  Clone ID: PAT_MRT3847_16213C.1.pep
GKRXKRKVETKGLDNHKTCALTILFSVTTHNPIILELL

SEQ ID NO: 192905 - protein, 65 aa, Glycine max
  Clone ID: PAT_MRT3847_16214C.1.pep
SSIAAAFFFFFFFFFLAKNCPSHRLFNPRATAPYQQWMGPFLVKHWLYRITFVINSTMPPGWVVL

SEQ ID NO: 192906 - protein, 298 aa, Glycine max
  unsure (1)..(298): unsure at all Xaa locations
  Clone ID: PAT_MRT3847_16215C.1.pep
MALLRLVCLTSTNQLSTQSTSFSFLRKTPHSQSIHIDPSSFHFPRLSLITTTLTHAQQANPVVAEEEFSRTRLLAQNVPWTSTPEDIRSLFEKHGKVLQVELSMYKKNRNRGLAFVEMGSPEEALEALNNLESYEFEGRVIKVNYARPKKEKTPPPVKPVVVTFNLFVANLSYEASAKDLKEXFFDSGTGKVVSAEVVYRDNPRRPSGYGFVSYKSKKEAEAALAEFQGKIFMGRPIRVDRGRRFVQQPGDGSAKSEDTPSDLSVNGAEAQQPAEGSAKSEDTPSELSVNGEEADKVD

SEQ ID NO: 192907 - protein, 71 aa, Glycine max
  Clone ID: PAT_MRT3847_16216C.1.pep
CNKEMVHSIPCLGKLNTFGLLFCCLKGQHLLILPCLFFNLILQKPKQRNEFTSSLENMQYCLMLTLNILWI

SEQ ID NO: 192908 - protein, 166 aa, Glycine max
  Clone ID: PAT_MRT3847_16217C.1.pep
MALLRLVCLPSTNQLSTQPHSHSQSTSFSFLRKTPHSQPINFSLSSFHFPRLSLITTKQTLNLTPTHASTSEQQTEEPLVSEEEFSRTRLLAQNVPWTSTPEDIRTLFEKHGKVLEVELSMYKKNRNRGLAFVEMGSPEEALEALNNLESYEFEGRVIKVNYARPK

SEQ ID NO: 192909 - protein, 32 aa, Glycine max
  unsure (1)..(32): unsure at all Xaa locations
  Clone ID: PAT_MRT3847_16218C.1.pep
QTNHNSRIRXTSHFHPGIASSFDEPLLASXFE

SEQ ID NO: 192910 - protein, 122 aa, Glycine max
  Clone ID: PAT_MRT3847_16219C.1.pep
MSQSGYINEKSGLSLRQNSHRKSNRNGQVKSCMFRIPWQSESSPIELVKDLAERVTNALRLISPKRSLHQGSSSLSRSKSTGSSIDSHRTAAVEDCIEFIHSSFSRSNSSTEAPRQDSIQAP

SEQ ID NO: 192911 - protein, 60 aa, Glycine max
  Clone ID: PAT_MRT3847_1621C.1.pep
RTYGLDSNAAVMFTECLRGYNALIAYKPIWVCAECDLSSEKALIPLVIQLVHEIISHYGT

SEQ ID NO: 192912 - protein, 94 aa, Glycine max
  Clone ID: PAT_MRT3847_16220C.1.pep
KKKKKKKKKKKKKKKKKKKKKKKKKKKKGARKLKRKKNKKRGKGKKKHIIWGHLNKMHWPKFPTVTTGKTLGLTNLFLLEAISIRPGAEIEKRP

SEQ ID NO: 192913 - protein, 94 aa, Glycine max
  Clone ID: PAT_MRT3847_16221C.1.pep
GSTAAFASLFRGELVPLGDRCICIFMARARGSSLSRLGLSRLPVLLCFARLLYINGCFPQRGAFPCLWIFLVIPFYRALYLARSSYKSENSLSN

SEQ ID NO: 192914 - protein, 54 aa, Glycine max
  unsure (1)..(54): unsure at all Xaa locations
  Clone ID: PAT_MRT3847_16222C.1.pep
KVWLLLRKPQGMNIPKMLVIGGXAVALACSLDRGLVTKYLLFGVARRFANIGKR

SEQ ID NO: 192915 - protein, 78 aa, Glycine max
  Clone ID: PAT_MRT3847_16223C.1.pep
PWRTITEPPPITHKRQQRNTRHKENQGGHHPERGKTKAQTQDLNTTIATKMPKEKTHSNMAGESLDIEVDETNKKNPR

SEQ ID NO: 192916 - protein, 83 aa, Glycine max
  unsure (1)..(83): unsure at all Xaa locations
  Clone ID: PAT_MRT3847_16224C.1.pep
SVFANEGPKGGGALEGFAPAPNIFFFGSPGRAYSPKEGVRPLVLGLSLPRGANISAVGGPDXKLGSRLDWANPGALPLKPVPP

SEQ ID NO: 192917 - protein, 545 aa, Glycine max
  Clone ID: PAT_MRT3847_16225C.1.pep
MGVIKDGTISGVLPEPQGFMVHYPAYPSSISRAVDTLGGIQAIQKARCSKSNKLELRFRPEDPYSHPAFGELRPTNSLLLKISKTKPPPPVHDAEASSSSTNGEQDQEGSLCADIVARFPEAYFFYGMADYQHVIPVHADVARRKKRNWSELEELHFGGFMDLDHEDVMIIVPPIFAPKDVPENLVLRPATMSSSKKKPEEVVQPHFEMDMEPVLAIDFDIKEIPKKVNWEEYIPQGSDQWELQMVVSRMFDERPIWSKNSLTELLLDKGLSFSHSMLRRLLSRISYYFSSGPFLRFWIKKGYDPRKDPNSRIYQRIDYRVPVPLRSYCDAHSANKSKHRWKDICAFRVFPYKFQTSLQFFDLVDDYIQSEINKPPFRPTNSAGTGWFSQHMINCIRQRLMVRYLSVFPKPGAENLLRAATLKFEKLKRECYRHAMKLDGEECQQANLGLEENEELDNGEDEEEAAEGNDSDEEWEEEHDLAGDNEMPLPSDSYINFENLSRTHLQDLFVNFPPNEIDCDNVQANGSEEEYQIYGEDSEDNYSDE

SEQ ID NO: 192918 - protein, 145 aa, Glycine max
  Clone ID: PAT_MRT3847_16226C.1.pep
MVRYLSVFPKPGAENLLRAATLKFEKLKRECYRHAMKLDGEECQQANLGLEENEELDNGEDEEEAAEGNDSDEEWEEEHDLAGDNEMPLPSDSYINFENLSRTHLQDLFVNFPPNEIDCDNVQANGSEEEYQIYGEDSEDNYSDE

SEQ ID NO: 192919 - protein, 151 aa, Glycine max
  unsure (1)..(151): unsure at all Xaa locations
  Clone ID: PAT_MRT3847_16227C.1.pep
PRVRKDGTISGVLPEPQGFMVHYPAYPSSISRAVDTLGGIQAIQKVKPSQISFYSFISLPISVHFXARCSKSNKLELRFRPEDPYSHPAFGELRPTNSLLLKISKTKPPPPVHDAEASSSSTNGEQDQEGSLCADIVARFPEAYFFYGLTL

SEQ ID NO: 192920 - protein, 50 aa, Glycine max
  Clone ID: PAT_MRT3847_16228C.1.pep
VNNIPHDQVLFLKNKIKNLLPPFSFAEFIKSFRLCIIENCSMALFSSLGL

SEQ ID NO: 192921 - protein, 183 aa, Glycine max
  Clone ID: PAT_MRT3847_16229C.1.pep
NFTFLWCFLRRSHSLCFFALPHSQMAANFGNILFTSSQSSSQVHGATDSVQVAVCSLCQKALSPDNEMASDLASSGVCGDCKFLLLEDFGNHTLTQSSRWRLRGRFRHNSSACSENNFSQQIPHVEDTGNHTVTQSSRRRLRGRFRHNSSESVENTFSQQIPHVVNTVRQHQSAVSGEDDQLV

SEQ ID NO: 192922 - protein, 70 aa, Glycine max
  Clone ID: PAT_MRT3847_1622C.1.pep
STLSCDWSSHICCPWLFSRAGLVKVGWCCSLCNAFILVSHGYQRFNYGFQSIRRHVSDCCYCGPAMRFFL

SEQ ID NO: 192923 - protein, 183 aa, Glycine max
  Clone ID: PAT_MRT3847_16230C.1.pep
LECAVCLNEFRDDETLRLIPKCCHVFHSDCIDAWLANHSTCPVCRANLAPKPEDAPSSVEIQLSDPARPIGPNEPGHDPNYINPVEEREGEQNRIVTEPPRVLDDPNRARPVRSKSTGFGIARLFPRSHSTGHSLVRPGEDCERFTLRLPEEVRDRLVRSATLNRTKSCGMTWQLESSERRGY

SEQ ID NO: 192924 - protein, 189 aa, Glycine max
  Clone ID: PAT_MRT3847_16231C.1.pep
NSPPEKKMNYSLALALGLILISCSPLLANARGHHHAGGHHLGLVGQICTELIQNQTTCTDLVKAADPKIAQAKTFQELAQAVLEFAVNKGIEGQTFLKGLALIEQSPAIKECANFFYDGVVGSFRSALRELKEDAQTASYDAKAAYDGPDGCNRALAAENINNPAITALNSEIALLSQIAFEAICKYSN

SEQ ID NO: 192925 - protein, 131 aa, Glycine max
  Clone ID: PAT_MRT3847_16232C.1.pep
TETEEQVLKRLRNAQAEIEQGKSSGIFDHILYNGKLEECYENLKKLLGLDGYVTPPKSAPKKMNLPRDHSVSKIDDKIIIGCISSGLEKESKNLIMLDVSSLKGGAPGRTRGLDFQVIDSFSDGFNGNEPF

SEQ ID NO: 192926 - protein, 47 aa, Glycine max
  Clone ID: PAT_MRT3847_16233C.1.pep
RNKKAFLNLEKKRSKKFLVLCYIIIKKNFFEVKNFQFSLYLVILEKN

SEQ ID NO: 192927 - protein, 289 aa, Glycine max
  unsure (1)..(289): unsure at all Xaa locations
  Clone ID: PAT_MRT3847_16234C.1.pep
SDEFIDTGLARAANVKSLDLSANNFTILPSCIQECRLLRKLYLDYCTHLQEIRGIPPNLETLSAIRCTSLKDLDLAVPLESTKAGCCLRELILDDCENLQEIRGIPPSIEFLSATNCRSLTASCRRMLLKQELHEAGNKRYSLPGTRIPEWFEHCSRGQSISFWFRNKFPVISLCLAGLMHKHPFGLKPIVSINGKKMKPESQRGRGYFEFPVLTGPILTFGEGQIKFEDNVDEVVSEKGXDHVGVFVDVDFKWNPTEPLVVRTGLHVIKPKSRVEDIRFTDPYKPTIL

SEQ ID NO: 192928 - protein, 75 aa, Glycine max
  Clone ID: PAT_MRT3847_16235C.1.pep
SLKKKRGFLTQKKQPFFGKPQGPNPFLGRTKKPGCPPKTLGLWGGRPIPQKKKTFKPKLFGGGKKKTTGGERLTL

SEQ ID NO: 192929 - protein, 46 aa, Glycine max
  unsure (1)..(46): unsure at all Xaa locations
  Clone ID: PAT_MRT3847_16236C.1.pep
LNTTDVKDETSAELLFRKKADXDSIKRNFEQQYKEGGMAPDDNKSL

SEQ ID NO: 192930 - protein, 259 aa, Glycine max
  unsure (1)..(259): unsure at all Xaa locations
  Clone ID: PAT_MRT3847_16237C.1.pep
MAERRRHKKRIQEVGEPSKEEKAVAKYLRFNCPTKSTNMMGHRVDYFIASKAVECLLDSKWAKAKKGEDALFTTRESVVDYCNRLLKKQFFHRALKVMKMKYDKDVKKEKDKGKSESGKEDDKKSKKESVKEEKXTKKEKEKKKDGEKEDSKKEETPGTPKKKETKKKFKLEPHDDQVFLDGNEVFVWIYDPVHIKTFVMGLILVIAVIAATLFPLWPAEMRVGVYYLSVGAGCFVASILLLAIARCILFLIIWLITGG

SEQ ID NO: 192931 - protein, 438 aa, Glycine max
  Clone ID: PAT_MRT3847_16238C.1.pep
MPVAASAIYFLNLRGDVLINRLYRDDVGGNMVDAFRTHVMQTKELGTCPVRQIGGCSFFYMRISNVYIVIVVSNNANVACAFKFVVEAVALFRSYFGGVFDEDAIRNNFVLIYELLDEIMDFGYPQNLSPEILKLYITQEGVRSPFSSKPTDRPVPNATLQVTGAVGWRREGLVYKKNEVFLDIVESVNLLMSSKGSVLRCDVTGKILMKCFLSGMPDLKLGLNDKIGLEKEAQLKSRPTKSGKSIELDDVTFHQCVNLTRFNSEKTVSFVPPDGEFELMKYRITEGVNLPFKVLPTIKELGRSRIEVNVKVKSVFGAKMFALGVVVKIPVPKQTAKTNFTVTSGRAKYNASIDCLVWKIRKFPGQTESTLSAEVELISTTTEKKSWTRPPIQMEFQVPMFTASGLRVRFLKVWEKSGYNTVEWVRYITKAGSYEIRC

SEQ ID NO: 192932 - protein, 81 aa, Glycine max
  Clone ID: PAT_MRT3847_16239C.1.pep
TTKGADHLAFHHFPSGEHNQNLTSKLPHLNFSDVTTTVSDNVSKAQAHSFSLTGNTCQDVYKESPPKSKSIPTQGDILTDI

SEQ ID NO: 192933 - protein, 49 aa, Glycine max
  Clone ID: PAT_MRT3847_1623C.1.pep
RTSLPLGPLPRALALDCCGSLPSAFCSFWPSCPSLGTSALSPTSPLPLT

SEQ ID NO: 192934 - protein, 330 aa, Glycine max
  Clone ID: PAT_MRT3847_16240C.1.pep
TRPPNWGECSALAKVAVNLSEWTDLGAGLDCGAQPCALGDNLPHPYGHFYVISGFYVVYRFFNLTSEATLDDVLAKGKGFCEKRWDVAKRSVAPQPFIEQYCFRAPYIASLLREGLHINDNQITVGSGNITWTLGVALLEAGKAFSTRFGLRDLEFFQMKINPLVLVPILLLSFILLLCALSCVGNWMPRFFRRQYLPISRHNSVTGASVLNIPSPFRFQRWSPMYSGDGRLKMPLSPKIASSQQSQFGLGHSLDDNSGGIELMESSLYPSANNVSHSYSSNNLGQMQFDSGNMGAFWSPHRSQMRLQSRRSQSREDLNSSLAEVHLMKP

SEQ ID NO: 192935 - protein, 44 aa, Glycine max
  Clone ID: PAT_MRT3847_16241C.1.pep
ILEEPPFVSINCLVNTYSPNDLYYALWFIKKKEKKLIKGGRGVV

SEQ ID NO: 192936 - protein, 88 aa, Glycine max
  Clone ID: PAT_MRT3847_16242C.1.pep
PLSLHSDLPSFHCFQKQIRKNLHLHIAHPSFIYPYLLPSPFHWISSLLLLSPSNCVQNQTRFFSCFSYKILSYPSLVPKLKNKTHTHT

SEQ ID NO: 192937 - protein, 78 aa, Glycine max
  unsure (1)..(78): unsure at all Xaa locations
  Clone ID: PAT_MRT3847_16243C.1.pep
KKKTPYPGARKRYFIFKLNTPTSGKWPEKSQRVTTNPFFXKKKKKKKKKXXVIIMHKKKIQVLLGLSDTWFVITKLKS

SEQ ID NO: 192938 - protein, 95 aa, Glycine max
  Clone ID: PAT_MRT3847_16244C.1.pep
HIVEHGKPHERTTIISKLAGQIVKMSQQKFASNVIEKCLAFGSPEERQILVNEMLGTSDENEPLQVWLLSSLVQSFSFSKAGDDLLLKLFSCHLI

SEQ ID NO: 192939 - protein, 58 aa, Glycine max
  unsure (1)..(58): unsure at all Xaa locations
  Clone ID: PAT_MRT3847_16245C.1.pep
SKLNNKKKKLNGLLKSSVLKTWPQLKLSLQATSIINQSLRXXXPXIKLLXAHASADAW

SEQ ID NO: 192940 - protein, 46 aa, Glycine max
  Clone ID: PAT_MRT3847_16246C.1.pep
RHSLRYPHVRAKTILLPESLITPTLLPFATRAECIQAWRWTLAATA

SEQ ID NO: 192941 - protein, 122 aa, Glycine max
  unsure (1)..(122): unsure at all Xaa locations
  Clone ID: PAT_MRT3847_16247C.1.pep
SKNKELKHLGFSRIAAIHTFVIGSNLYDIPKHNSAPLRSXIEXVENTVTTSLAPVCNIYKDFPDDVLLYVDKNVDEASHKFDEHAPICCKHLADQANGVDSQVTREAPKSCSEASFGGSRAA

SEQ ID NO: 192942 - protein, 68 aa, Glycine max
  Clone ID: PAT_MRT3847_16248C.1.pep
HAVRKKKKKKKKKKKKKKKKKKKKKKKKKKKKKKKKKKKKKKKKKKKGGAVLKNQSLLTRACNEKVFL

SEQ ID NO: 192943 - protein, 71 aa, Glycine max
  Clone ID: PAT_MRT3847_16249C.1.pep
KKKKKKKKKKKKKKKKKKKKKKKKKKKKKKKKKKKKKKRGRPFKKTKFNNPVHAKKNFFYRAPKIKFTARL

SEQ ID NO: 192944 - protein, 294 aa, Glycine max
  Clone ID: PAT_MRT3847_1624C.1.pep
MASNKESKFPAQSQKTQPGKEHVMNPLPQATNPDHKAANKLQGKVALVTGGDSGIGRAVCLCFAKEGATVAFTYVKGHEDRDKDDTLKMLLEAKTSGADNPLAIAADIGFDENCKQVIDLVVKEYGRLDVLVNNAAEQHLTNSVEEITQQQLERVFGTNIFSQFFLVKHALKHMKEGSCIINSTSVNAYNGNPEALDYTATKGAIVAFTRGLSQQLASRGIRVNGVAPGPVWTPIQPASKPAEMIQNLGCEVPMNRVAQPCEIAPCYLFLATCQDSSYFTGQVLHPNGGMVVNA

SEQ ID NO: 192945 - protein, 501 aa, Glycine max
  unsure (1)..(501): unsure at all Xaa locations
  Clone ID: PAT_MRT3847_16250C.1.pep
KLVSPAVSASSNSASVKRQSWSPIQCSVTNVSEEVEQSQSVSSSERHEANDTDGAKPKLKALHWDKVRATSDRATVWDQIKSSSLISFQLNEDMMESLFGCKATNFTPKEPPRKKSVLPSVDQENRVLDPKKSQNIAILLRALNVTRDEVSEALLDGNPEGLGTELLETLVKMAPTKEEEIKLKNYDGDLSKLGAAERFLKAVLDIPFAFKRVEAMLYRANFDAEVNYLRQSFQTMEAASEEIKNSRLFLKLLEAVLRTGNRMNVGTNRGDAKAFKLDTLLKLVDIKGTDGKTTLLHFCXVKKIIKSEGAGAESANDNVKMDSKFNEDEFKKQGLRVVAGLSRDLSDGQEAAGMDSDVLSSYLSKLETGLDKVRLVLQYEKPDMQGNFFNSTKLFLKYAEDEIVRIKADERKALYLVKEVTEYFHGNATKEEAHPLRIFMIVRDFLNILDLVCKEVEKMHDRIVGGSGRSFRIPPNASLPVLNRYNHPKQDRSSDEESSSP

SEQ ID NO: 192946 - protein, 87 aa, Glycine max
  unsure (1)..(87): unsure at all Xaa locations
  Clone ID: PAT_MRT3847_16251C.1.pep
SVRSNLCLXFKKKKKKKKKKKKKKKKKKKKKKKKKKKKKKKKKKKKKKKKKKKKGGAAFKEPNFTTGGLQLKIFFLGPPKLNSLAGF

SEQ ID NO: 192947 - protein, 109 aa, Glycine max
  unsure (1)..(109): unsure at all Xaa locations
  Clone ID: PAT_MRT3847_16252C.1.pep
KRGNWKNLGLPKLNPFEKNPLFPSWVKKKKARTNPLSKNLPTLNGKGNPPLTGXINPGGWGVSPQXTFNFASPLAPALFVFFLSFFANFAGFPRKVLNGGLLLGFQLKV

SEQ ID NO: 192948 - protein, 46 aa, Glycine max
  unsure (1)..(46): unsure at all Xaa locations
  Clone ID: PAT_MRT3847_16253C.1.pep
LRRVRKTRXKDVKXXXLIQKKTEEDQGXQQHYISDVEKMKSSSNAR

SEQ ID NO: 192949 - protein, 70 aa, Glycine max
  Clone ID: PAT_MRT3847_16254C.1.pep
GAGGGGGRPGVRSAHGGGFGAGGGVGGGGVAGAGARGGGGGIGIGIGVGVGVGAGAGHGSGVGGGVGGKH

SEQ ID NO: 192950 - protein, 92 aa, Glycine max
  unsure (1)..(92): unsure at all Xaa locations
  Clone ID: PAT_MRT3847_16255C.1.pep
KKKKKKKKRGGRFKGSKFTNPGMQRKSFFIGPPKLNSWAGVXKRGNGKNPGVTKLNRFEKNPLFPSWGKNKKAPTDRLSKNLPTLNGKGNPP

SEQ ID NO: 192951 - protein, 91 aa, Glycine max
  unsure (1)..(91): unsure at all Xaa locations
  Clone ID: PAT_MRT3847_16256C.1.pep
XXIHFGNXYPFCLGXIXXXPETXPGHVQXXAHXSLXGQIXXVRXSXFPRSXRRLXXVMPQXPXXGXFXXAXVXHXFAKPXAKKKXEXXTVP

SEQ ID NO: 192952 - protein, 93 aa, Glycine max
  unsure (1)..(93): unsure at all Xaa locations
  Clone ID: PAT_MRT3847_16257C.1.pep
TXXXXXXXLXPXIKITHTYDXSTXVXNSGPRLGFFXXWXFGPXXQEADRFAVQSLRRTSLKLPPRPXGMQQAHXSLTMXXHAWSNXLSSYXHK

SEQ ID NO: 192953 - protein, 341 aa, Glycine max
  Clone ID: PAT_MRT3847_16258C.1.pep
MGTSDTHLFLSLMQIFILCFICFIAKVEASNKKLSGFYVFGDSTVDPGNNNYIKTPFRSNFPPYGRDFPNQVPTGRFTNGRLATDYIASHVGLKKDVLPPYLDPNLRIEELMTGVSFASAGSGFDPLTPSMTNVIPIEKQLEYFRECRKRMEDALGKRRIENHVKNAAFFISAGTNDFVLNYFALPVRRKSHSILAYQQFLIQHVKQFIQDLLVEGARKIAITGVPPMGCLPLMITLNSPNAFFQRGCIDKYSSIARDYNLLLQHELHGMQLQLNMSTPDAKIYYVDTYKPIADMIQARKRFGFDEVDSGCLRCGFFVASNLCNKLSRSRLDLSLFVFVRL

SEQ ID NO: 192954 - protein, 50 aa, Glycine max
  Clone ID: PAT_MRT3847_16259C.1.pep
GFVYVLSLSIRMVYGTKTPTSYAFSTAASCNLLCICHSFSFAPMPNYVAT

SEQ ID NO: 192955 - protein, 343 aa, Glycine max
  Clone ID: PAT_MRT3847_1625C.1.pep
MKMKLLGLLVLVLGSTISANGAVSEVSWRVCSSLDGLGPSGGRAVPAAVELCPLLPSPCSAPLIWFPSLDFAGKHFRIGVLEKKRVIVVMTFLSMLNAGISTQLLLTLFDIEGVVHYGIAGNANPKLQIGDVTIPQYWAHTGLWNWQRFGDGPKDALALEASGDYSRRFGYLKFADYNNNTKHSKSATNLLNNVWFQAEEIFPVNGTAEVRQHAFWVSVDNTYFEIARELKNVKLSNCVNTTCLPRRPIVVRVEKGVSANVFVDNKAYREFLHSKFDVTAIDMESAAVALICLQQKKPFIAIRSLSDLAGDSSTLSNEVDVFASLASQNALDVVVRFISFLNQ

SEQ ID NO: 192956 - protein, 86 aa, Glycine max
  unsure (1)..(86): unsure at all Xaa locations
  Clone ID: PAT_MRT3847_16260C.1.pep
MPGKSDDTVIEEFNEYVNMSVKELEEWLETEDSQGAGWGDGDESVXHQSGRKIVDILQRNPKKDPSKYTDEDLAHMRKVASYCKRH

SEQ ID NO: 192957 - protein, 141 aa, Glycine max
  Clone ID: PAT_MRT3847_16261C.1.pep
TKSPFNGIFLGPPRGLLSPKKKPSQRFLREQIGGKGFLDAPTSNRPFLGGAGNLTFLNNGFFLAHRFGGVLPLVQKKGIGCPPPFGSPAWVWGPKISLLNLPKYLGAFFFSRGFCSPLCLKGEGFLKWQIPRGKGGFFFPP

SEQ ID NO: 192958 - protein, 35 aa, Glycine max
  unsure (1)..(35): unsure at all Xaa locations
  Clone ID: PAT_MRT3847_16262C.1.pep
MMFLFIQVPETLPQEVLGKMGAPXKSDVPIITPNE

SEQ ID NO: 192959 - protein, 77 aa, Glycine max
  unsure (1)..(77): unsure at all Xaa locations
  Clone ID: PAT_MRT3847_16263C.1.pep
KKLGYAGKAWAGXXGAGSRXXRLLLSYAPVKXXEKRTGGGXKTGPGGXXRXMASLGMGXXKXAAWLXGDRNXRXPPP

SEQ ID NO: 192960 - protein, 116 aa, Glycine max
  Clone ID: PAT_MRT3847_16264C.1.pep
IMGEDLHMRLDKQLSLTVLSRTVVVRSRGRSPSWWSRDRGGPCNRGSKRELAHIQLTSLRWCKRGTHGTTKVVFSSIGHLYLKEKLGFFAISIVWASFSTTSMFLFHGVENRDDIC

SEQ ID NO: 192961 - protein, 259 aa, Glycine max
  Clone ID: PAT_MRT3847_16265C.1.pep
DRLGGIPKGPIRLEALAPARCMSLNLAVKYANVIHSIVLQDDFLPRTATPLEDIFKSIFCLPCLLFLVCLRDTFIPEGRKLRDPRRLYAPGRMYHIVERKFCRCGRFPPEVRTAIPVDGRFEHIVLSCNATSDHGIIWIEREAEKALQLMKAQSSETVTDPPTVQKFQRLKTIEKEHRDALERAVSLNVPHAVDTAEKETSENNEGDDDASASANNNVSSNQSKSSGGRSNWDEVVEKLLKKKSETGEQNLERDTNVTQ

SEQ ID NO: 192962 - protein, 364 aa, Glycine max
  unsure (1)..(364): unsure at all Xaa locations
  Clone ID: PAT_MRT3847_16266C.1.pep
MMGCGGAFSVWLPVFVSCFTAIALAGTGCDKAPVVFVFGDSNSDTGGLASGLGFPINLPNGRNFFHRSTGRLSDGRLVIDLLCQSLNASLLVPYLDALSGTSFTNGANFAVVGSSTLPKYVPFSLNIQVMQFRRFKARSLELVTTGTRNLINDEGFHGALYLIDIGQNDLADSFAKNLSYVPVIKRIPVVITEIENAVRXLYNESAQKXWVHNTGPLGCLPKVLALAQKKDLDSLGCLSSYNSAARLFNEALLHSSQKLRSELKDATLVYVDIYAIKYDLITNAAKYGFSNPLMVCCGYGGPPYNFDVXVTCGQPGYQVCDEGARYVSWDGIHQTEAANTLIASKILSMAYSTPRIPFDFFCHH

SEQ ID NO: 192963 - protein, 291 aa, Glycine max
  Clone ID: PAT_MRT3847_16267C.1.pep
HSLIQNTFAGLSLNASLLVPYLDALSGTSFTNGANFAVVGSSTLPKYVPFSLNIQVMQFRRFKARSLELVTAGARNLINDEGFRDALYLIDIGQNDLADSFAKNLSYAQVIKKIPAVITEIENAVKNLYNDGARKFWVHNTGPLGCLPKILALAQKKDLDSLGCLSSYNSAARLFNEELLHSTQKLRSELKDATLVYVDIYTIKYDLITNAAKYGFSNPLMVCCGYGGPPYNFDVRVTCGQPGYRVCDEGARYVSWDGIHQTEAANTLIASKILSMAYSTPRTPFDFFCHQ

SEQ ID NO: 192964 - protein, 87 aa, Glycine max
  Clone ID: PAT_MRT3847_16268C.1.pep
MRKDAVEKLQKKHLNFHKQFNTRIKMDSQNMSYNAGQAKGQTQEKANTMMDKASNAAQSAEESLQEVGQQMQAKAQGAADAVKNATG

SEQ ID NO: 192965 - protein, 131 aa, Glycine max
  unsure (1)..(131): unsure at all Xaa locations
  Clone ID: PAT_MRT3847_16269C.1.pep
LEQRGEDKANLLVPIREPCDLWVTXHFPAMIIGTMRPATILTAXDDWEPEHLGLVMDAADCRDXPLNIYRDMSRRSVNLLGMQKDMDNKTLELCFEIDENKEDCDKCYEAYYKNMELCLPEASHIKGMIAE

SEQ ID NO: 192966 - protein, 177 aa, Glycine max
  unsure (1)..(177): unsure at all Xaa locations
  Clone ID: PAT_MRT3847_1626C.1.pep
MAASTTSQVYIDVIEDVMVKVRDEFVNNGGPGEEVLKELQAMWESKMMQAGAVLGPIERSTAAKPTPGGPITPVHDLNVPYEGTDEYETPTADMLFPPTPLQTPIQTPLPGTGDNSTYNIPTGPSDYPSSGNDPGGNADGKGARPAPYMASPSPWVNQRPPLXVNVAYVGSRDEADR

SEQ ID NO: 192967 - protein, 65 aa, Glycine max
  unsure (1)..(65): unsure at all Xaa locations
  Clone ID: PAT_MRT3847_16270C.1.pep
SLIPTTIPSFNSINHSXFLLQNRSLNLPNNIVSFIDQASKPPIVMEISNVHPQFKPPFFVFTNTP

SEQ ID NO: 192968 - protein, 78 aa, Glycine max
  unsure (1)..(78): unsure at all Xaa locations
  Clone ID: PAT_MRT3847_16271C.1.pep
MYATVCLVLREECNKGYMARPCWQGFDTYQDQCHPTVFVAKDLXRAGLLYFISNVPKNGRPPLVXSLIFEASARTVLP

SEQ ID NO: 192969 - protein, 98 aa, Glycine max
  Clone ID: PAT_MRT3847_16272C.1.pep
HLLILLLRRSKRRRIVFLVPGHSSYIVKVFFFFVGFGLYLIIFYVAGLVGLVKNLCREIGEAERKCFCLVLRGLLRMGVVARGGEGGTAGGGAGGGGI

SEQ ID NO: 192970 - protein, 80 aa, Glycine max
  Clone ID: PAT_MRT3847_16273C.1.pep
SKSMHEIFNSQFVLKLEIQFRITLRKSPFENMQLYCFLICNIQNKTKCLYRVDREVGNSLFSLQSAKFLQDRYIPLTFNV

SEQ ID NO: 192971 - protein, 100 aa, Glycine max
  Clone ID: PAT_MRT3847_16274C.1.pep
TAVAAVEEAMALAVLEVVVKAAEAAVIMQIFSAKFASNWVTQQQCHFCNDSDFQPNASLMQMEPVFQSNSSNTFGSEQNQGTNPHKDSQPSAMLVDSKNQ

SEQ ID NO: 192972 - protein, 97 aa, Glycine max
  Clone ID: PAT_MRT3847_16275C.1.pep
AFAGCSESHSYLFDNESSRAGDRTSVGSHAGAISLLNAWPQVVIQHSFCVRPHQACQVENIHLVSFLVPHQESHRTAAAYLRPLSKVWLACVLLGSS

SEQ ID NO: 192973 - protein, 159 aa, Glycine max
  unsure (1)..(159): unsure at all Xaa locations
  Clone ID: PAT_MRT3847_16276C.1.pep
ARGERPPWLGTPCSYFSASTNALDTGAMAVAGHHADDGPIRQVLPEAGEAAQEDNLLDAXHQSGSCKVVVAMTXPTKRSTDDPPSVFNTTHAERSLNAKLGPSHEHGVTKLCALTPGDLSRPNVGREPIGFPKDAQNAHMQPTQDRAMEPDRRDKGAVP

SEQ ID NO: 192974 - protein, 332 aa, Glycine max
  Clone ID: PAT_MRT3847_16277C.1.pep
MASRQQKEDRAEAAAKVAAKELEQLNREKDRDFSVGVADQHQQEEHQLDQQKRGVIGSMFKAVQDTYENAKEAVVGKKEPSTTTNSYSTREVIHDVDIQPDDAAAAREVRDKSASKSPGIYNSATADNKTGSKVGEYADYGSQKAKETKDATKEKAGEYTDYASQKAKETKDKTMEKAGEYTDYASQKAKETKDKTMEKAGEYTDYASQKAKEAKDKKTGSKVGEYADYGSQKAKETKDATKEKAGEYTDYASQKAKETKDKTMEKAGEYTDYASQKAKETKDKTMEKAGEYTDYASQKAKEAKDKTMEKGGEYKDYAAKKPNEGTQIYIRS

SEQ ID NO: 192975 - protein, 432 aa, Glycine max
  Clone ID: PAT_MRT3847_16278C.1.pep
MSFTATKFAPSPLPLNSTTPRSNDKPLSFSFDHSKPNPSSSFLGSTRKLLRFNALARPHAHTRASSSPAAAVLLERTSNLLVTKEEGLELYEDMILGRFFEDKCAEMYYRGKMFGFVHLYNGQEAVSTGFIKLLKKEDSVVSTYRDHVHALSKGVPSREVMSELFGKATGCCRGQGGSMHMFSKEHNLLGGFAFIGEGIPVATGAAFSSKYRREVLKQADCDHVTLAFFGDGTCNNGQFYECLNMAALWKLPIVFVVENNLWAIGMSHLRATSDPQIWKKGPAFGMPGVHVDGMDVLKVREVAKEAVGRARRGEGPTLVECETYRFRGHSLADPDELRDPAEKEHYAGRDPITALKKYLFENNLANEQELKTIEKKIDEILEDAVEFADKSPLPPRSQLLENVFADPKGFGIGPDGSYRCEDPKFTQGTAHV

SEQ ID NO: 192976 - protein, 144 aa, Glycine max
  Clone ID: PAT_MRT3847_16279C.1.pep
VHVDGMDVLKVREVAKEAVERARRGDGPTLVECETYRFRGHSLADPDELRDPAEKEHYAGRDPITALKQYLIENNLANEQELKAIEKKIDEILEDAVEFADSSPLPPRSQLLENVFADPKGFGIGPDGRYRCEDPKFTEGTAHV

SEQ ID NO: 192977 - protein, 52 aa, Glycine max
  Clone ID: PAT_MRT3847_1627C.1.pep
KEKLEIDNENSMQKSDKSSNLFLLSIKLEMSRVLRSLLAIITIINHFPCQFS

SEQ ID NO: 192978 - protein, 80 aa, Glycine max
  Clone ID: PAT_MRT3847_16280C.1.pep
LNAVNNNTQEFINVQSLLVSSCFYCLEFFADLGALGNYPGSPFLPSDSDILLESPDQQDIVDDFFVNSEPPCSQSDEEKS

SEQ ID NO: 192979 - protein, 168 aa, Glycine max
  Clone ID: PAT_MRT3847_16281C.1.pep
RKSAEARKTEESPKRSSKEAAAAAALTEELEVRVDREPKSKLREEVLLLEETLEAAIGADLPWGLNPKSVAKRPSKSFIVRERDMVCGGILRRTVDPPRESTVRGEQRTSEDTKNGRIESHFFIFSVLKNFCFDETRVPQILILAILGSNHVMDSCPGLQELLITHSL

SEQ ID NO: 192980 - protein, 187 aa, Glycine max
  unsure (1)..(187): unsure at all Xaa locations
  Clone ID: PAT_MRT3847_16282C.1.pep
ESLLCMLSTASVPDLGYRNGEDNXFRKWHFPSHNVSVSLYWSPFLVQGVEKSNSGPNHNKLYLDHVDERWARDMDQMDLIVLSIGHWFLHPAVYYEGGSVLGCHYCPGLNYTEIGFYDVLRKGLRTTLNSIIDRRVGKGYGIDVIVTTFSPAHFEGEWDKAGACPKTKPYRNGEKQLEGMDADMRKI

SEQ ID NO: 192981 - protein, 59 aa, Glycine max
  Clone ID: PAT_MRT3847_16283C.1.pep
LPINKNFFNSVSGEVNFDLLKRPPPFYFFHFNVSSFFILFYAFFFIFSIDFFCILIHFY

SEQ ID NO: 192982 - protein, 117 aa, Glycine max
  unsure (1)..(117): unsure at all Xaa locations
  Clone ID: PAT_MRT3847_16284C.1.pep
QNHHYIQGMLDKQENTVFVLQKCLIKADTDLVPFKDTIKNYFGRPWKEYSRTIIMEXHIDDLIYSDGFFYWEGNFALSTLYYGEYNNYVVGSNTTARVNWSGRNVINKDEVSMYMVE

SEQ ID NO: 192983 - protein, 177 aa, Glycine max
  unsure (1)..(177): unsure at all Xaa locations
  Clone ID: PAT_MRT3847_16285C.1.pep
YVPPERPDPHTDYMRAQVSRRFMIYVHAKMMIVDDEYIIIGSANINQRSMDGARDSEVAMAAYQPYHLATKQPARGQIHGFRMSLWYEHLGLLHDSFLHPESEECIEKVNQIADKYWDLYTTEXTLEQDLPGHLLRYPVAISSQGNVTQLQAFEFFPDTKAPILGAKSDYIPPILTT

SEQ ID NO: 192984 - protein, 217 aa, Glycine max
  Clone ID: PAT_MRT3847_16286C.1.pep
HQSSSNKDKRWVSTYGLFSLAFLFVFAATNFIVNWVDQSRITSTTILKTIIVFNNQQPQFPLNCTNGKSASTCPSYYPTKLEFDDDSSNTSCPEYFRWIHEDLKPWESTGITRDMVERGKHISHFRLVIVNGKAYIEKFAKSYQTRDVFTIWGILQLLRLYPGKIPDLELMFQCGDRTVVFKKDFQVPKMSPPPVFHYCGEENSYDIVFPDWTFWGW

SEQ ID NO: 192985 - protein, 86 aa, Glycine max
  Clone ID: PAT_MRT3847_16287C.1.pep
AREPTHWTFSLKMRGDANKQSVCANHLHWSFIMCSMRQQGLHEVMLGHNIEDIQDHTLVLKVTTTTTSAMSNGIIREDTTMTVTTS

SEQ ID NO: 192986 - protein, 208 aa, Glycine max
  Clone ID: PAT_MRT3847_16288C.1.pep
TPSEKKKKKKKKKKKKKKKKKKKKKKKKKKKKKKKKKKKKKKKKKKKKKKKRGGPFKRTKFYAPGLGRLNFFFGAPKINFRGRVLKPGGGENPGGPQIKSLGKKSPFPKWGKKKKGPPQSPFQKLAHPKGKRDPPFNGPLNRGGGGGVPRKGTRYFCKALRPRFFGFFPFFFAPFGGFSPKSLNWGVPFGVPIKGFTAPSPKKIFLGG

SEQ ID NO: 192987 - protein, 52 aa, Glycine max
  Clone ID: PAT_MRT3847_16289C.1.pep
NFRCITHFFHFFFSYWLEQQVKIFWFVSKAIGIITRNLMPQKSGLEATSNNN

SEQ ID NO: 192988 - protein, 51 aa, Glycine max
  Clone ID: PAT_MRT3847_1628C.1.pep
LTFDLQFQYLNFFSNEISVQPPLLLSYKKNEEIIDLKNKRMPVTHIMFLLW

SEQ ID NO: 192989 - protein, 139 aa, Glycine max
  Clone ID: PAT_MRT3847_16290C.1.pep
DGANQPQNKLPHFKKPGHKKTGGRGQEIPKAKKHWKNRRGPPLFIIKKPKTLLFFPPKGFYKTTQKSPDQNQRGGGTNKGKFLARKTGVKKCECGPPKKKPTGSPGALVLKPGAKNLGRKGAKFPHKREKPQDPSQILF

SEQ ID NO: 192990 - protein, 137 aa, Glycine max
  Clone ID: PAT_MRT3847_16291C.1.pep
MSVEILDGATIVNFLQDEEAFSASVLNRFAYLDTDNDGLLSYAEMLKELQSLRVLETHFGIDVEPDPDELARVYESLFVQFDHNLNGTIDLDEFKKETKQMMLAMANGLGFLPVQMVLEEDSILKKAVEREFPKVAS

SEQ ID NO: 192991 - protein, 169 aa, Glycine max
  unsure (1)..(169): unsure at all Xaa locations
  Clone ID: PAT_MRT3847_16292C.1.pep
FDPTPNEQMRDRVKKDIIEAVERRQNANSLANRDEEVDTIKNHLSKMAPDPNLNKLIGSRKPFFYTPKEFGDWRSVISSVLRKQYVLQLFEALCPEFTGSNVVDLAVKNPSRADFIQKSLNFVFDAENELFGSXTFRDSYFMAIAEKIFTLREAKDRQNLEKSCQNGTT

SEQ ID NO: 192992 - protein, 64 aa, Glycine max
  Clone ID: PAT_MRT3847_16293C.1.pep
FILKKKKKKKKKKKKKKKKKKKKKKKKKKKKKKEKKKRGGHFRGAPLLKVQFSRPRPCNGLPFF

SEQ ID NO: 192993 - protein, 72 aa, Glycine max
  Clone ID: PAT_MRT3847_16294C.1.pep
PTPCNVTTSIYNLILGKLYCEHYGTMHTQGNQEYSCKLKFKKQSIIDRNPHQVLYIYCNDNIFSHLIYYYFH

SEQ ID NO: 192994 - protein, 34 aa, Glycine max
  Clone ID: PAT_MRT3847_16295C.1.pep
MAAMKIIAICQSGGKFVTGKDGCLSYKRGDAHAI

SEQ ID NO: 192995 - protein, 136 aa, Glycine max
  Clone ID: PAT_MRT3847_16296C.1.pep
QCHTKELITNPLSHGAQKIREAIELLNDEYIRSQLDFIRCHEQLDRIRASYLDQGEPKNAPFYGNPNLTIVSWMSMPVYEADFGWGKPGYFGPGAVYPDGKAYIIRSSDEDGSLVVSAHLQTAHKELFKKFFYEDI

SEQ ID NO: 192996 - protein, 69 aa, Glycine max
  unsure (1)..(69): unsure at all Xaa locations
  Clone ID: PAT_MRT3847_16297C.1.pep
MKSKCNIIISIXKKKKKKKXXXKKKKKKKKKKKKKKKKKKKKGGGRFKGSKFTYPCMRTNSFFLGAPKL

SEQ ID NO: 192997 - protein, 199 aa, Glycine max
  Clone ID: PAT_MRT3847_16298C.1.pep
MSLREKESLELRIHSESYSDSSDSGCEDSIAKKDNIDVTVEQNSCLVVEKNAMNSSTSEVLSSQSLDGEESIKVSLFSESSDAVDEDTHDILAEVSPDASVSSERPIITMTEPLCSRNFITSDSLYSKSLGSYPLEIESCKNNSGDATLCISDSSMMHICCESSPHVARQIMESQDGLAFSGYCQSLGSNDKSTVNSVE

SEQ ID NO: 192998 - protein, 44 aa, Glycine max
  unsure (1)..(44): unsure at all Xaa locations
  Clone ID: PAT_MRT3847_16299C.1.pep
IETCLDEMQIVFSIMFQSYENADQMLYNSLSVLXRLFNSEGGIR

SEQ ID NO: 192999 - protein, 111 aa, Glycine max
  Clone ID: PAT_MRT3847_1629C.1.pep
LLGQQSAGRERLPERGPFRDKGPLAGSPVLWPGKGSFRKSPLVFGIRTPKFLQLESRECSMFSKTLGIISPSLGVFHSFHPVQGAQVNVYFKIRGPGMGKGIFSFCRRSFF

SEQ ID NO: 193000 - protein, 58 aa, Glycine max
  Clone ID: PAT_MRT3847_162C.1.pep
LTIFPYIRPTRAGPKNSKAEPGGKPLSPKNGTQQTSRKNKEKAWGAKKGSEQKLIAKR

SEQ ID NO: 193001 - protein, 92 aa, Glycine max
  Clone ID: PAT_MRT3847_16300C.1.pep
LISKNCSETQESNQNWVSFLSFSPTVELLARLGYFKPSLLFFTFLFCDFCPLIPTLNKNWSKFICICNIWFNSKKVFKFYLYYSIRVASEEL

SEQ ID NO: 193002 - protein, 103 aa, Glycine max
  Clone ID: PAT_MRT3847_16301C.1.pep
YFVEWIPNNVKSSVCDIPPKGLKMSSTFIGNSPSIQEMFRRVSEQFTAMFRRKAFLHLYTGEGMDEMEFTEAESNMNDLVAEYQQYQDATADEEEYEDEEEEA

SEQ ID NO: 193003 - protein, 443 aa, Glycine max
  Clone ID: PAT_MRT3847_16302C.1.pep
MREILHIQGGQCGNQIGAKFWEVICDEHGIDHTGKYSGDSELQLERINVYYNEASGGRYVPRAVLMDLEPGTMDSVRSGPFGQIFRPDNFVFGQSGAGNNWAKGHYTEGAELIDSVLDVVRKEAENCDCLQGFQVCHSLGGGTGSGMGTLLISKIREEYPDRMMLTFSVFPSPKVSDTVVEPYNATLSVHQLVENADECMVLDNEALYDICFRTLKLATPTFGDLNHLISATMSGVTCCLRFPGQLNSDLRKLAVNLIPFPRLHFFMVGFAPLTSRGSQQYRNLTVPELTQQMWDSKNMMCAADPRHGRYLTASAMFRGKMSTKEVDEQMINVQNKNSSYFVEWIPNNVKSSVCDIPPKGLKMSSTFIGNSTSIQEMFRRVSEQFTAMFRRKAFLHWYTGEGMDEMEFTEAESNMNDLVAEYQQYQDATVDEEEYEDEEEEEA

SEQ ID NO: 193004 - protein, 253 aa, Glycine max
  unsure (1)..(253): unsure at all Xaa locations
  Clone ID: PAT_MRT3847_16303C.1.pep
MREILHIQGGQCGNQIGAKFWEVICDEHGIDHTGKYSGDSELQLERINVYYNEASGGRYVPRAVLMDLEPGTMDSVRSGPFGQIFRPDNFVFGQSGAGNNWAKGHYTEGAELIDSVLDVVRKEAENCDCMQGFQVCHSLGGGTGSGMGTLLISKIREEYPDRMMLTFSVFPSPKVSDTVVERXNATLSVHQLVENADECMVLDNEALYDIXFRTLKLATPTFGDLNHLISATMSGVTCWLRFPGQLNSDLRSL

SEQ ID NO: 193005 - protein, 663 aa, Glycine max
  unsure (1)..(663): unsure at all Xaa locations
  Clone ID: PAT_MRT3847_16304C.1.pep
LEDEEETVSTSEDAIYGEKVEPEFDLMKTMLRKSYTPKKHXAEEKNVELEVGNSSKDTLVNEERKEVKGSSSGSVSNRKDGPRFKDLGGMKEVLEELKMEVIVPLFHPQLPRQLGVRPMAGILLHGPPGCGKTKLAHAIAHETGLPFYQISATEVVSGVSGASEENIRELFAKAYRSAPAIVFIDEIDAIASKRENLQREMEKRIVTQLMTCMDQSNRLLQPADDVESSGDDHHPGYVLVIGATNRPDAVDPALRRPGRFDREIIIGNPDESAREEILSVLTCDLRLEGLFDLRKIARATSGFVGADLAALVDKLEPNRLERRRQKRKRELSQDLTSEHAEDWWREPWSVEEINKLAIKMSDFEEAANKVQPSLRREGFSSIPNVKWDDVGGLDLLRKEFERYIVRRIKYPEDYEELGVDLETGFLLYGPPGCGKTLIAKAVANEAGATFIHIKGPELLNKYVGESELAVRTMFSRARTCAPCILFFDEIDALTTKRGKEGGWVVERLLNQLLVELDGAEQRKGVFVIGATNRPEVMDRAVLRPGRFGKLLYVPLPSPDERVLILKALARKKAVDASVDLSAIAKMEACENLSGADLAALMNEAAMAALEERLTSIETTCDTLTIKRTIKRHHFEVALSKVSPSVSDRQKQYYQHLSEGFKAA

SEQ ID NO: 193006 - protein, 74 aa, Glycine max
  Clone ID: PAT_MRT3847_16305C.1.pep
DKGTKRTRCVPFKHCHAYSLNVMYAFAVCFAFARLHHVVTHALYVGLVFCHGKPEGPYHLLNCTHGALRPQMRK

SEQ ID NO: 193007 - protein, 53 aa, Glycine max
  Clone ID: PAT_MRT3847_16306C.1.pep
LCCTKSLGGRKVSQSSTFVGVEFMLLAQPSSHLTVFLFYDVLGVTTPGSIIAL

SEQ ID NO: 193008 - protein, 147 aa, Glycine max
  Clone ID: PAT_MRT3847_16307C.1.pep
MKNSRCMGESLHSYLSSAINLSTEFLASLIIIISNTNIIITIINIRIRDIQTFLFNCFFSFLHTQIQLANFITQYLHTSITHRTITTLLCLLIFSIQTLINLKHHVASLVFFTLLPIMMMITHNIRSGVIFINLQTNAALRHRILLL

SEQ ID NO: 193009 - protein, 254 aa, Glycine max
  Clone ID: PAT_MRT3847_16308C.1.pep
MPFLIFKFGVNLETGFLLYGPPGCGKTLIAKAVVNEAGANFIHIKGPELLNKYVGESELQVCKMFSRARTCAPCILFFSEIDTLTTKRGKEGGWVIERLLNQLLVGLDGAEERRDVFVVGATNRPEVMDRAVLLRPGRFGKLLYVPLPSPDERVLILKALARKEAVDASVDLSDIAKMEACENLSGADLAALVCLCSLLMLSVSSLYHCCMLCMYVYGCLILGGYKVLQLQRLDYRKSGSQFERDTDFMDYTDE

SEQ ID NO: 193010 - protein, 69 aa, Glycine max
  unsure (1)..(69): unsure at all Xaa locations
  Clone ID: PAT_MRT3847_16309C.1.pep
ERASASEHLXSMRVKALSFTPSHTDSMFRVFXCHNSRVVRAPQTRVNYAPWSPLHPSALASIPSNSRCE

SEQ ID NO: 193011 - protein, 74 aa, Glycine max
  unsure (1)..(74): unsure at all Xaa locations
  Clone ID: PAT_MRT3847_1630C.1.pep
MESSKIYAYLFLCMLFLSSATPILGCGYCGKPPKKXKXXKXXKXTXXTGXXXTXTIPPIXNPXXXIPSGNQGRL

SEQ ID NO: 193012 - protein, 70 aa, Glycine max
  Clone ID: PAT_MRT3847_16310C.1.pep
TPKVKLRYPVRVSISISGEVTTHTLTKNDSIYRIYAFLHYHTTSLNVYTCIYMKFIVTIDKLNALCTLSH

SEQ ID NO: 193013 - protein, 70 aa, Glycine max
  unsure (1)..(70): unsure at all Xaa locations
  Clone ID: PAT_MRT3847_16311C.1.pep
TSPTPPHSRTHAPVSPCTSPPPRPAFAYKPPPFFTAPPELQYNVLFRXHPMRRMSSTFRISTSEYDQRLR

SEQ ID NO: 193014 - protein, 48 aa, Glycine max
  Clone ID: PAT_MRT3847_16312C.1.pep
RSNRGHLYTRAVLTLMAYRRPRLLHKCATIPEKDVLWHDKLLLQTEPS

SEQ ID NO: 193015 - protein, 62 aa, Glycine max
  Clone ID: PAT_MRT3847_16313C.1.pep
KKKSWGGGGNLERGEITPLEKLAGNKRQKGHFIKAHVTLGEQKGLWGPGVSPNIIFFLFGAK

SEQ ID NO: 193016 - protein, 76 aa, Glycine max
  Clone ID: PAT_MRT3847_16314C.1.pep
ADVWAQPYYRDGFMRPAHHTPCHVQVCSPPKSWTCRIARVATACKMIAARGVSGTTNTIINLLMNSTLHRTHVTLY

SEQ ID NO: 193017 - protein, 51 aa, Glycine max
  Clone ID: PAT_MRT3847_16315C.1.pep
LYVKCSKEYIAPVYIFKLWHIWLTLENISGAQTRMSVTRMITSLSGSHWLP

SEQ ID NO: 193018 - protein, 499 aa, Glycine max
  unsure (1)..(499): unsure at all Xaa locations
  Clone ID: PAT_MRT3847_16316C.1.pep
PKGDADGYDLVVVDAMHMANYASRICHSCRPNCEAKVTAVDGQYQIGIYSLREIQHGEEITFDYNSVTESKEEYEASVCLCGSQVCRGSYLNLTGEGAFQKVLKDSHGILDRHCLMLEACELNSVSEEDYNDLGRAGLGSCLLGGLPDWLVAYAARLVRFINFERTKLPEEILKHNLEEKRKYFSDIILEVERSDAEVQAEGVYNQRLQNLAVTLDKKLHXVRYVMRCIFGDPRKAPPPLEKLSPEATVSFLWKGEGSFVEELVQCITPHVEEGILNDLKFKIHAHDPSNSGDIQKELRKSLLWLRDEVRNLPCTYKCRHDAAADLIHIYAYTKYFFRIRNYQTITSPPVYISPLDLGPKYTNKLGAEFQEYRKIYGENYCLGQLIFWHNQSNADPDRSLARASRGCLSLPDTNSFYAKAQKPSRHCVYGPRTVRSMLARMEKLPQRSWPKDRIWSFKSSPKFFGSPMLDAVVNNSPLDREMVHWFKHRPAIFQAMWDR

SEQ ID NO: 193019 - protein, 845 aa, Glycine max
  Clone ID: PAT_MRT3847_16317C.1.pep
SKENRLLSERKHRNNETHGGLDNGDYASDRESRRRLSKLNKKYFNSESETSDDCDRSSVDGKSDSDTTTTDIESDQDVYSENGIGDSRGDVYFTPDDGLDFITDEREWGARMTKASLVPPVTRKYDVIDQYIIVADEEDVRRKMRVSLPDGYAEKLSVQKNGIDESDMELPEVKDYKPRKQLENEVVEQEVYGIDPYTHNLLLDSMPKELDWSLQEKHLFVEDKLLRMLNKQVNHFTGTGNTPMSYPLQPAIEEIERYAEEQCDVRTVRMCQGILKAIASRPDDKYVAYRKGLGVVCNKEEGFAEDDFVVEFLGEVYPVWKWFEKQDGIRSLQKDSKDPAPEFYNIYLERPKGDADGYDLVVVDAMHMANYASRICHSCRPNCEAKVTAVDGQYQIGIYSLREIQHGEEITFDYNSVTESKEEYEASVCLCGSQVCRGSYLNLTGEGAFEKVLKEWHGILDRHYLMLEACELNSVSEEDYNDLGRAGLGSCLLGGLPDWLVSYAARLVRFINFERTKLPEEILKHNLEEKRKYFSDIILEVERSDAEVQAEGVYNQRLQNLAVTLDKVRYVMRCIFGDPRKAPPPLEKLSPEATVSFLWKGEGSFVEELLQCITPHVEEGILNDLKFKIHAHDPSNSGDIQKELRKSLLWLRDEVRNLPCTYKCRHDAAADLIHIYAYTKYFFRIQDYQTITSPPVYISPLDLGPKYADKLGAGFQEYRKIYGENYCLGQLVFWHNQSNAEPDCTLARISRGCLSLPDISSFYAKAQKPSRHRVYGPRTVRSMLARMEKQPQKPWPKDRIWSFKNSPKFFGSPMLDAVINNSPLDREMVHWLKHRPAIFQAMWDQ

SEQ ID NO: 193020 - protein, 269 aa, Glycine max
  Clone ID: PAT_MRT3847_16318C.1.pep
MAEEAILGYLEKNDEIRDSGEFAAERGIDHNEIVNVIKSLHGFRYVDAQDIKRETWVLTDEGKTYATVGSPEVQLFLAIPQEGISKEELQKKLDPSVFKIGCAQAAKNKWVEMGKQLISRKVQHVDDKVKDLLLQIQQGLNIGSDEIKALKVRKLILPQTWKGYSLKRGPNYAPKRKKVVTDLTRDNFQSGEWKELEFKEYNYSAKGAPLEGGNLHPLLKVRAQLKQIFLCMGFEEMPTNNFVESRLLLFGSCSFLSSSSPFTCGCSSQ

SEQ ID NO: 193021 - protein, 35 aa, Glycine max
  Clone ID: PAT_MRT3847_16319C.1.pep
RYVVWHCGDDVAFGNSRRKCEVGSDQHGVNIGEEI

SEQ ID NO: 193022 - protein, 100 aa, Glycine max
  unsure (1)..(100): unsure at all Xaa locations
  Clone ID: PAT_MRT3847_1631C.1.pep
QXCSHSHLLGIQSEKHQYLLLFNLNNLAGNKEKKTRRGVPFQIGGGQKGRFPKAFFIKLSQTGNGGDLSNLLLGTLLMGGIIHASRLFTLPQYHPWALVF

SEQ ID NO: 193023 - protein, 94 aa, Glycine max
  unsure (1)..(94): unsure at all Xaa locations
  Clone ID: PAT_MRT3847_16320C.1.pep
PQAPTPPPPTNPPHPPPHHPPPPPTPHPPPHPHPPPPPPPPHPTKHNPHPPTIIPNHPNPKYXAYKPPQPHPNSTPNNNQIHPQTPTSVFLTHK

SEQ ID NO: 193024 - protein, 50 aa, Glycine max
  Clone ID: PAT_MRT3847_16321C.1.pep
VNCNQTLQNFYPIYIYIYIYIYIYLILLFSKKKICYVYLHYLIRIILYID

SEQ ID NO: 193025 - protein, 27 aa, Glycine max
  Clone ID: PAT_MRT3847_16322C.1.pep
FFFFFFFFFFFFFFFFFFFFFFKIGAQ

SEQ ID NO: 193026 - protein, 58 aa, Glycine max
  Clone ID: PAT_MRT3847_16323C.1.pep
VTNIVHVKNKHVLLRGLVHRPCERIRPEYRRKYHTITTSTWSQRCLAQKSCTCLAIRI

SEQ ID NO: 193027 - protein, 45 aa, Glycine max
  Clone ID: PAT_MRT3847_16324C.1.pep
CYWGIPPPLKASRFQSFRAPLTRRQSMSMPIMSGSENGFKPVYAI

SEQ ID NO: 193028 - protein, 151 aa, Glycine max
  unsure (1)..(151): unsure at all Xaa locations
  Clone ID: PAT_MRT3847_16325C.1.pep
TLPSSLFSSGCTSAPVSVSISSTSSLLSRTFPSSSLFSPDCASSSVSIPSTTISSPSXTGFLRAAALESAPTRASPSSSLFSSVCPSVSVCISSTSSSLSRTLPSTSSLFSSASVSFPSTSFSLSSTIPSSSLFSSDCSSVSVSSMSSSLS

SEQ ID NO: 193029 - protein, 62 aa, Glycine max
  Clone ID: PAT_MRT3847_16326C.1.pep
VLPPEKIDDQKSVDTTLLKAIENVPDLESYLGARFSLQAGVKRHELGSWSESSLHINLYCYE

SEQ ID NO: 193030 - protein, 81 aa, Glycine max
  unsure (1)..(81): unsure at all Xaa locations
  Clone ID: PAT_MRT3847_16327C.1.pep
XXXFLDKXKXXLPGXKKXXGATATXPPPPXPVASLEXGXGAHHEGEAXEXTXILEXLXEXLPGYXSKXXDEXXKXKXXGAH

SEQ ID NO: 193031 - protein, 56 aa, Glycine max
  Clone ID: PAT_MRT3847_16328C.1.pep
ARALSFMRPTGCLCRTLMRSRLPSGGTLCRIGSPMTWPLREASVLLAAHSSWLAMT

SEQ ID NO: 193032 - protein, 79 aa, Glycine max
  unsure (1)..(79): unsure at all Xaa locations
  Clone ID: PAT_MRT3847_16329C.1.pep
MPMILGYWDIRGLAHAIRLLLEYTDSSYEEKKYTMGDAPDYDRSQWLNEKFKLGXDFPNLPYLIDGAHKITQSNAILCY

SEQ ID NO: 193033 - protein, 120 aa, Glycine max
  Clone ID: PAT_MRT3847_1632C.1.pep
SRVDPRVRTAARRRQKGPAARRRQKGTAARRRQKGTAARRRQKGTAARRRHKGEPGRDKNVAFPWYVPLALTNCVQWSSFIFRLLVVVSRDVVEFPWAISQRFSTHRSSFVLRRSPVFNR

SEQ ID NO: 193034 - protein, 283 aa, Glycine max
  Clone ID: PAT_MRT3847_16330C.1.pep
MSQRSVPAPFLTKTYQLVEDQGTDQVISWGESGNTFVVWKHADFAKDLLPKYFKHNNFSSFVRQLNTYGFRKIVPDKWEFANEHFKRGQKELLSEIKRRKTVPQSSAHPPEAGKSGGDGNSPLNSGSDDAGSTSTSSSSSGSKNQGSVETNTTPSHQLSSENEKLKKDNETLSCELARARKQCDELVAFLRDRLMVGPDQIDRIMRQGSCGSENAVGEGGGGGHCLKLFGVWLKGDTLTDKRNNHKRGREDQMGFGGPRLKESKPVVDFSRNRMMMINEKGKG

SEQ ID NO: 193035 - protein, 64 aa, Glycine max
  Clone ID: PAT_MRT3847_16331C.1.pep
MAGPRIAHATLKGPSVVKEICIGMVLGLAAGSVWKMHHWNEQRKTRAFYDLLEKDEISVVADEE

SEQ ID NO: 193036 - protein, 154 aa, Glycine max
  unsure (1)..(154): unsure at all Xaa locations
  Clone ID: PAT_MRT3847_16332C.1.pep
GLFWIYLAHNAYSGTVMVLQHAVCALPDLKFQKGDEGLQLHYAYGTRKKVIEAYEVRARCTVIQKPLRFPDTSNDYVINEFRXPLRGATCLRNKIRLAVMDHVTYMPSVDILIKDLVNTCTXDYVEPVYMDAGHSIVCTRADMHEIGADLYTIN

SEQ ID NO: 193037 - protein, 157 aa, Glycine max
  unsure (1)..(157): unsure at all Xaa locations
  Clone ID: PAT_MRT3847_16333C.1.pep
CSSRFSLSLCLFLSICVRMEKSMACLVGAIVILWCCISHVTSDASDHRYMKXLTVPFYANKVGPFHNPSETYRYLDLAFCSPANVEEKREDLGEVLNGDXRLVAAPYKLDFQIDIEPESYCKKRLTIQEVAQFTHAVLKDYFYQMYYDDLPIWAFLV

SEQ ID NO: 193038 - protein, 56 aa, Glycine max
  unsure (1)..(56): unsure at all Xaa locations
  Clone ID: PAT_MRT3847_16334C.1.pep
XKLXXXXXXXAXCTNXLRXVXLYLILVPVSHNNLLLMTIRISQSELVHXXHAWLNL

SEQ ID NO: 193039 - protein, 97 aa, Glycine max
  Clone ID: PAT_MRT3847_16335C.1.pep
MGTGGINSHASNLLKELEEMGFKQVDLNKEILRKNEYDLDQSLDALCGVDVCGVSEWDHMLEELQEMGFRDKEMNKRLLEKNNGSLKRVVMDLINGE

SEQ ID NO: 193040 - protein, 52 aa, Glycine max
  Clone ID: PAT_MRT3847_16336C.1.pep
FYLAIYLDPSSWTINSRHDDQNQEMTCHYCTTGLDARTRGTRFQKIDPFLQP

SEQ ID NO: 193041 - protein, 102 aa, Glycine max
  Clone ID: PAT_MRT3847_16337C.1.pep
ELGTTEECGSHFLWIQARLNKKSPDANSYMNIFASVYRENVELEFPDEFRSHVLWLHDRPTKKTNNANPYMNIFASIPLESVELEFPEESRSHFLWLQDRPT

SEQ ID NO: 193042 - protein, 98 aa, Glycine max
  unsure (1)..(98): unsure at all Xaa locations
  Clone ID: PAT_MRT3847_16338C.1.pep
GCDPIYGGIHXLAPTMMPLEEEIDSKGAQHVTEEWTECVYEEACFVEISLRDILKGRGRSGLYSMDHFRPHDCGCHALINTNGNEGVRTNIDDYGDHD

SEQ ID NO: 193043 - protein, 81 aa, Glycine max
  Clone ID: PAT_MRT3847_16339C.1.pep
ERPIERPVGSFWSTLKFKTEPTNLPFFILLVLIANPHLYSCCNPHCATSRLTLILVFSDFQLLFFFLITFLFNIQFICDAA

SEQ ID NO: 193044 - protein, 63 aa, Glycine max
  unsure (1)..(63): unsure at all Xaa locations
  Clone ID: PAT_MRT3847_1633C.1.pep
DSVDCTLCEKKQREYICFFFCFLKKILNFFFIYLHNXXXIFPLVHGPVREPKINGCARPFRNS

SEQ ID NO: 193045 - protein, 153 aa, Glycine max
  Clone ID: PAT_MRT3847_16340C.1.pep
AQAATDAGMLLPSLRTVALCFFSFVAGILMTAAVIRPTTARHTKIETIQPTLPLTTMPPLPECPQKTCPQTPRPLCATTRLPAVPCACNFSLGLDLMRNGRPLQTPNKKMAMIVPFRNREAHLQVFSQYMHSYLKDYHLPHVCHRASREAALQ

SEQ ID NO: 193046 - protein, 132 aa, Glycine max
  Clone ID: PAT_MRT3847_16341C.1.pep
ISVFCNMASDEAWRTSEEQNESNIIGTSISPNNVESGITDDTEVVGQQQPDRPMRDNYLRIFSMLDDYRRQTQRLPMERHTRYTPNDVQWRWMGMFLRWMEMAMMYVTVPPGNPSSLMSFMAYSCVHSCEFN

SEQ ID NO: 193047 - protein, 55 aa, Glycine max
  Clone ID: PAT_MRT3847_16342C.1.pep
WCYAHCDILYISSVIRLWISGTMVRVGYFREKSRGSCRFLEPCNGAQIKCLARIQ

SEQ ID NO: 193048 - protein, 378 aa, Glycine max
  Clone ID: PAT_MRT3847_16343C.1.pep
MARVVALQQNQLSFSPLASSLFDFSGTRLQTQLQFKRKLCHPKGSFYVSASSTKKILIMGGTRFIGVFLSRLLVKEGHQVTLFTRGKAPVTQQLPGESDNDYADFSSKILHLKGDRKDFDFVKSSLSAEGFDVVYDINGREADEVEPILDALPNLEQFIYCSSAGVYLKSDLLPHAETDAVDPKSRHKGKLETESLLQARGVNWTSIRPVYIYGPLNYNPVEEWFFHRLKAGRPIPIPSSGLQITQLGHVKDLATAFIQVLGNEKASKEVFNISGEKYVTFDGLARACAKAGGFPEPEIIHYNPKDFDFGKKKSFPFRDQHFFASIEKAKRVLGWEPEFGLVEGLADSYNLDFGRGTYRKEADFLTDDIILGKSLVSV

SEQ ID NO: 193049 - protein, 94 aa, Glycine max
  Clone ID: PAT_MRT3847_16344C.1.pep
CSAFHKSRHVSIISARYTDIEIRIISTLMPNITCRCIISHPLSFCFSSRCDTNHPFSFSDCIQSTCYHSVVMAVISLALGVFSVGYCTSVILSS

SEQ ID NO: 193050 - protein, 57 aa, Glycine max
  Clone ID: PAT_MRT3847_16345C.1.pep
DAGGRIKKGAGGVKGGGPQKKPGSRPVIAGLQFPVGRFGRYLSEGRLAQRVATGLPI

SEQ ID NO: 193051 - protein, 117 aa, Glycine max
  unsure (1)..(117): unsure at all Xaa locations
  Clone ID: PAT_MRT3847_16346C.1.pep
LSASXAXVPSSFAALPRFFSAASXFFRVARWAPGLXGSLXPAPSAPSLVXGGAFXSLLRVGPLPPFAALPLFLXXCPXFCRXXVPPPLLSLXPXVSFVRPXAFXXCXSGSFPSRRLP

SEQ ID NO: 193052 - protein, 65 aa, Glycine max
  unsure (1)..(65): unsure at all Xaa locations
  Clone ID: PAT_MRT3847_16347C.1.pep
ISLPQGGSHFXTITLFNLFPHNEYLFFNCTEDHFIVKPNTIFCERFPERCYSSCDKGCYLCKHIP

SEQ ID NO: 193053 - protein, 60 aa, Glycine max
  Clone ID: PAT_MRT3847_16348C.1.pep
TFPDPQPKLQTSSLKLMDFSRCFRLSRSHHIPAFHLKICEVSEMLPKNCLAYEKISHQSV

SEQ ID NO: 193054 - protein, 84 aa, Glycine max
  Clone ID: PAT_MRT3847_16349C.1.pep
FTQTLTLDSYLATIYMYASLLIRVAASNTGQIHELPSFIREPSLFETAMLVKTLAEVLQVVLVIMNANRILPFHRRRKPRSCGG

SEQ ID NO: 193055 - protein, 54 aa, Glycine max
  unsure (1)..(54): unsure at all Xaa locations
  Clone ID: PAT_MRT3847_1634C.1.pep
MAHQVLLIXLASTIVFEYILWRKQRKKNLSPSSFVLPIIXHLYLVFPNPHHDFY

SEQ ID NO: 193056 - protein, 94 aa, Glycine max
  Clone ID: PAT_MRT3847_16350C.1.pep
LVVYESSNLGIHDQGFLLALSAHLVAGIDSYKRSLIFAPARLRSEVKLSWQPDQQRSPSNLSSLCRIQALRCGVQIDISVSTYAYVKLFTYSNN

SEQ ID NO: 193057 - protein, 160 aa, Glycine max
  Clone ID: PAT_MRT3847_16351C.1.pep
MLILVLGLASATFLVFVAVYVFYCKRRVSKYNESKDIESSEHKEDDEMAQKEDLMIFQGGEDLTICDILDAPGEVIGKSNYGTLYKALLQRSNKVSLLRFLRPVCTARGEELDEMIHFLGRIRHPNLVPLLGFYTGPRGEKLLVHPFYRHGSLTQFIRGK

SEQ ID NO: 193058 - protein, 138 aa, Glycine max
  unsure (1)..(138): unsure at all Xaa locations
  Clone ID: PAT_MRT3847_16352C.1.pep
TKMKVLVLFHDTFLVAWEWDACDIFHLRMNTGYECRTTEVKCARXRLAVEAHNIFGSETIPDQCVEATYEYIHDXQYTSDFKTADQLAYFHARDLEVHSKDTFVCSIHGPVLYNIPYYRKHGYGLXKLNSTLYDEWVN

SEQ ID NO: 193059 - protein, 58 aa, Glycine max
  Clone ID: PAT_MRT3847_16353C.1.pep
RGQRHRQKDDLWHRDRKHTLGDVLKIGVTVAVLLFYRYGLNGRLTSQLRWQSSSTLRE

SEQ ID NO: 193060 - protein, 386 aa, Glycine max
  Clone ID: PAT_MRT3847_16354C.1.pep
MDSIMSKLRNLDAYPKINEDFYSRTLSGGVITLASSSLVLLLLLSALLLYLHAVTESTHVVIKVVPTAYTDVIGDTIQSLPCSIIRLVAMDNIGEQHFLPRHYIFYDLSPTHVNLIETRQEGIGAPKIEKPLQRHGGRLEHNETYCGSCYGAEESDDDCCNSCEDVREAYRKKGWALSNPDLIDQCKREGFLQRIKDEEGEGCNVYGFLEVNKVAGNFHFAPGKSFQQSGVHVHDLLAFQKDSFNLSHHINRLAFGEYFPGVVNPLDNVHWTQETPSGMYQYFIKVVPTVYTDVSGHTIQSNQFSVTEHFRTGDVGRLQSLPGVFFFYDLSPIKVTFTEENVSFLHFLTNVCAIVGGIFTVSGILDSFIYHGQRAIKKKMELGKFN

SEQ ID NO: 193061 - protein, 43 aa, Glycine max
  Clone ID: PAT_MRT3847_16355C.1.pep
IASPQASKVLVICFQGIKLKEEKKVKKVTRYKANHVMQGDSKA

SEQ ID NO: 193062 - protein, 108 aa, Glycine max
  unsure (1)..(108): unsure at all Xaa locations
  Clone ID: PAT_MRT3847_16356C.1.pep
KKTKYLNAYPTAPPKRGGRRPNNPKVPYQXGTPVSQQRPRGGPQKNPKAPHKSPKGSATHDMGRTQETPNPVDPSRAVQFTTTLSRRKPKRQPLPNKPPFQKSKPQVK

SEQ ID NO: 193063 - protein, 189 aa, Glycine max
  Clone ID: PAT_MRT3847_16357C.1.pep
MENQTSSMQFLILEQVQFLKVNDDSLLQWELVDVVDAEEEIDGFGSSSDSSSVSWFESDSSPIDASIEEIRQLLLHPDVGLQDPRESEQESGLENHHYRYHQHHYHHDDVDDDDVGGDNDDGEDDDGYGLDDELVPWNVSNKFERQRMRKLGKRAFSKMHNSKKSPYLFVRPGCVRGKHGLGLKHITDS

SEQ ID NO: 193064 - protein, 184 aa, Glycine max
  Clone ID: PAT_MRT3847_16359C.1.pep
MENQASSSMQFLILEQVQFLKVNDDSLLQWELVDVVDAEEEIDGFGSSDSSVSWFESDSSPCDAPIEEIRHLLLHPDVGLQDRHDGVDESEQDSGLENHHHYHYHHDDDDMGGDDNDEDDDGYGLDDELVPWNVSNKFGRQRMRKLGKRAFSKMHGSKKSPYLFVRPGCVRGKHGLGLKHITDS

SEQ ID NO: 193065 - protein, 183 aa, Glycine max
  Clone ID: PAT_MRT3847_1635C.1.pep
MSQLKPMSHIDSAPSTPGKFKMEKASYFNRVRWHTSLAKLAVWSFVFLGAILIFFLRSPASSPVPADLSRRSLRTYNWGGPVWEKRVRASAQIRSRNGFAVLVTGAAGFVGTHVSAALKRRGDGVLGLDNFNDYYDPSLKRARQGLLERSGVYIVEGDINDEALLRKLFEVGPFTHVMHLAAQ

SEQ ID NO: 193066 - protein, 375 aa, Glycine max
  Clone ID: PAT_MRT3847_16360C.1.pep
MATGVNRKISAASARAHTRRAKKTNSLSLPSGILGTALAVLFIGFLAWAYQVIQPPAPKICGTSDGPPITAPRIKLRDGRHLAYKEHGVPKDAAKYKIISVHAFDCCRHDTVVANTLSPDVVEELGLYIVSFDRPGYGESDPDPNRTLKSLALDIEELADHLGLGSKFYVVGVSMGGQVVWNCLKYIPNRLAGAVLISPVVNYWWPGLPANLTTEAFSKKKLEDRWALRVAHYIPWLTYWWNTQRWFPASTAIAHSPDNLSHQDKELVPKMSNRKSYVAQVRQQGDYETLHRDLNIGFGNWEYSPLDLENPFPNNEGSVHLWHGDEDLMVPVTLQRYIAQKLPWIHYHELQGSGHMFAHADGMSDTIIKSLLRAK

SEQ ID NO: 193067 - protein, 91 aa, Glycine max
  unsure (1)..(91): unsure at all Xaa locations
  Clone ID: PAT_MRT3847_16361C.1.pep
LKIVREIIKVENDTPIDILNYIKXIDSFCNAFIAYKIMLAISISVTSMXKKFFKTKLIKSYLRSTISQERLNELILILIEKXMLREIDYNK

SEQ ID NO: 193068 - protein, 59 aa, Glycine max
  Clone ID: PAT_MRT3847_16362C.1.pep
HYELLEQCGARYQCGTGYESPTRALTNMVWHHGPICPYTRQFGRPLQQALNTRGRMRRH

SEQ ID NO: 193069 - protein, 75 aa, Glycine max
  Clone ID: PAT_MRT3847_16363C.1.pep
MVDKMSVLVFKSLQVCLVLVFSIRNTTAEKKTHHTKHTYVVRLDKFNMPESFDDHVVWFGSSVESVSDSAEMSAH

SEQ ID NO: 193070 - protein, 47 aa, Glycine max
  unsure (1)..(47): unsure at all Xaa locations
  Clone ID: PAT_MRT3847_16364C.1.pep
RLKENVVRVKNLPAFLPEEFFFMKKECLLNIRTQXLKPIYSQHMEFS

SEQ ID NO: 193071 - protein, 40 aa, Glycine max
  Clone ID: PAT_MRT3847_16365C.1.pep
DQIRLVHSLYCALTLHATYELAHYTSATNATKSSCSTTQK

SEQ ID NO: 193072 - protein, 156 aa, Glycine max
  Clone ID: PAT_MRT3847_16366C.1.pep
PTAPTAARRRQKGDVDNFVKGTKDSRVCNAFPAKGHFPFPTQAALSSGVNAVPDPLKTFEGLSKTLIKSPKPDVGTIVSAIHVLSELLVQTSMDGVDSNSEHGHDEIMIQQIINNLNDFSTKRCGLRIPTLDSTPTDKPSGPDRTLEGSKGLEKTG

SEQ ID NO: 193073 - protein, 92 aa, Glycine max
  unsure (1)..(92): unsure at all Xaa locations
  Clone ID: PAT_MRT3847_16367C.1.pep
TDARVRQHDRQPQVCSKEHAQEXQGELKEKPGGQKMHTCEEMIEASATLIWIAXGLHAPVNFGQNPYGGLILNRPTISRRFMPEKGSAEYAA

SEQ ID NO: 193074 - protein, 252 aa, Glycine max
  Clone ID: PAT_MRT3847_16368C.1.pep
VKRDAESEDNKARDIDNSGGDFVDVLLDLEKEDRLNHSDMVAVLWEMIFRGTDTVAILLEWILARMVLHPEIQAKAQCEIDSVVGSGCSVTDDDLPNLPYVRAIVKETLRMHPPGPLLSWARLSIHETQIGNHFVPAGTTAMVNLWAITHDQQVWSEPEQFKPERFLKDEDVPIMGSDLRLAPFGAGRRVCPGKAMGLATVELWLAVFLQKFKWMPCDDSGVDLSECLKLSMEMKHSLITKAVARPTSSLAM

SEQ ID NO: 193075 - protein, 151 aa, Glycine max
  Clone ID: PAT_MRT3847_16369C.1.pep
FRSELCQIQQGVLGWAKHFKIIGGIARGLLHLRQDSRLKIIHRDLKTSNVLLDSNMNPKISYFGMARTFGLDQDETNTNRVMGTYGYMPPEYAVHGSFSVKSDVFGFGVIVLEIISGKKIRAFYDPHHLLNLLGHVCLKKLAIYIGIVTSP

SEQ ID NO: 193076 - protein, 111 aa, Glycine max
  unsure (1)..(111): unsure at all Xaa locations
  Clone ID: PAT_MRT3847_1636C.1.pep
TNEXKNEVTXXVKLQXRNLXRLLGCCFEKEXRMLVCEYXEYLPNKSLDVXIXGQXDKNRSSSLTWNKRFEIILGIAQGVLYXHQDSRLKIIHRDLKASNVLLDAAMNPKIS

SEQ ID NO: 193077 - protein, 47 aa, Glycine max
  Clone ID: PAT_MRT3847_16370C.1.pep
HVNGWKLIHLYLMSYVSLPLSPLIAYVTIRCVVFVVFCRTGVVGPGI

SEQ ID NO: 193078 - protein, 87 aa, Glycine max
  Clone ID: PAT_MRT3847_16371C.1.pep
AVTKSCSVKNNGCLILAPPQNQKEKIKAFANLVFPKKIVLVPPKKSFQVGSEPMEKEILPSFPQGVMSVNNYFPPLKKRRPACPSFF

SEQ ID NO: 193079 - protein, 35 aa, Glycine max
  Clone ID: PAT_MRT3847_16372C.1.pep
HLSSSSGIMQRYVSDPHCFSTKALNLLCIVYPLRS

SEQ ID NO: 193080 - protein, 89 aa, Glycine max
  unsure (1)..(89): unsure at all Xaa locations
  Clone ID: PAT_MRT3847_16373C.1.pep
PAGPPLLTARPPPVLTLAGLTARDGLTESAGGKLDGXGQVKNILNTAAPGGAGPYXAVQLAKLGNTHVTATCGARHIDSVKGLRAKEDF

SEQ ID NO: 193081 - protein, 76 aa, Glycine max
  Clone ID: PAT_MRT3847_16374C.1.pep
SKRLLTIRGNRNTDIEQTTRNVPDACHYRAIQCSATVPSCDCYNDTDRRCSANSQGDHVPLLPIRTHAIYTDVSLR

SEQ ID NO: 193082 - protein, 75 aa, Glycine max
  Clone ID: PAT_MRT3847_16375C.1.pep
TLEALKLLRWLCIYILRLLGYGNLFVRVFWKMGFGSNAVQAGSLDVDKSNERKKVEGAGKERKLGFRFSFFGSCI

SEQ ID NO: 193083 - protein, 37 aa, Glycine max
  Clone ID: PAT_MRT3847_16376C.1.pep
CLIYAISIGSTLDIKNPVIFYKLKRVTYIIMISKTQV

SEQ ID NO: 193084 - protein, 131 aa, Glycine max
  unsure (1)..(131): unsure at all Xaa locations
  Clone ID: PAT_MRT3847_16377C.1.pep
MLSAWALFSKTWVGVFGFFARDGAQPLKGPPMVXAGPRGFNFPKKVDRYLSPPPAFGGLCFGALPVLADFFGALGSGTGIFLSVTLLFPVFLPFLKEKANQLGFFGFLVLPMSFSPPPVLGVVLLFGCFTS

SEQ ID NO: 193085 - protein, 83 aa, Glycine max
  Clone ID: PAT_MRT3847_16378C.1.pep
GGRLGTSCPSASSLIPYRAPKSLHWPPFYNALTGKTLTSPSLTPWRSLPFSPAGTIPIRPEPIALKNTCPSPLAKGTHPEAPH

SEQ ID NO: 193086 - protein, 137 aa, Glycine max
  Clone ID: PAT_MRT3847_16379C.1.pep
MDPSGIKTAENANGSSRNLDWMQDDLWQGSDNKTTDTVPTAEDKDSFDEWNDFTGSGSTQDPSSTISNSKTTAQTGNVGYSVDFNDTKTSQDANSSSNKDFDWMQDQWQDNNNKTTNAISGNEAADAFDAWNNFTGS

SEQ ID NO: 193087 - protein, 61 aa, Glycine max
  unsure (1)..(61): unsure at all Xaa locations
  Clone ID: PAT_MRT3847_1637C.1.pep
LLTLNINNLIQPNIMLQKDSIISCSGEIQLTXVEQNGVPTFRSVRRDLYSAPIQKCDHEIG

SEQ ID NO: 193088 - protein, 111 aa, Glycine max
  unsure (1)..(111): unsure at all Xaa locations
  Clone ID: PAT_MRT3847_16380C.1.pep
GGSLWDLMSNGDVIDVVASGFSAILHFWSYMSQAFKHIDQLLYHLYDDMPNALFYMVEAKEQLLIFEAFFVYDVSLFVFCQDRKTFDSLXGADPTSLSYMAAVVALLINPE

SEQ ID NO: 193089 - protein, 39 aa, Glycine max
  Clone ID: PAT_MRT3847_16381C.1.pep
LLRSCVVKASEAKVSKKPVEVYKELPYIKSSTGEILDAW

SEQ ID NO: 193090 - protein, 51 aa, Glycine max
  Clone ID: PAT_MRT3847_16382C.1.pep
PGFLFIYRANIIFPREQLWPLFPPAFIGPPLGKIGYPPGSRPVFLGQTPGP

SEQ ID NO: 193091 - protein, 44 aa, Glycine max
  Clone ID: PAT_MRT3847_16383C.1.pep
YIIKHLCRECFIVLLEYNERYFWMKCLIVFSTLSFSYIYIYIYI

SEQ ID NO: 193092 - protein, 74 aa, Glycine max
  Clone ID: PAT_MRT3847_16384C.1.pep
FKNLDFGWGNPLYGGKPVAGAGAFPPGNFHGPSQNPKGEKGILVLICLPNQIKKTFVKKLDQNKHVSKATSLIN

SEQ ID NO: 193093 - protein, 45 aa, Glycine max
  Clone ID: PAT_MRT3847_16385C.1.pep
MAKAPEKNPPAKKAPAEKNPKAEKKVPKEGTAGKKKKKRSKKTLK

SEQ ID NO: 193094 - protein, 134 aa, Glycine max
  Clone ID: PAT_MRT3847_16386C.1.pep
SSYVNIPTIAFCHTDSPINYVDIVIPCNNKSPQAIGLMWWLLAREVNYLRNTITRGSPWDVMVDLFLFRNPEEQAEQEKAAEITAAGEATESEPIYGTYNAEDWNTPAHEGEWAAEGAPSAGANWEAAEATAQQ

SEQ ID NO: 193095 - protein, 76 aa, Glycine max
  Clone ID: PAT_MRT3847_16387C.1.pep
GGVKKRGKFLNQVRGPKKSLGGAPICDKNIFDPQKPFPKNGRPIKGGLFVGGKWWGPPPPQVLNEGFKNRGFCRVP

SEQ ID NO: 193096 - protein, 63 aa, Glycine max
  Clone ID: PAT_MRT3847_16388C.1.pep
PEEGGQLTRKALSRIEWLQKAYVPTIAHIEEFHSIHKMMNASDLNYNIYLLVSIESVGITMSM

SEQ ID NO: 193097 - protein, 229 aa, Glycine max
  Clone ID: PAT_MRT3847_16389C.1.pep
MGDEQPSTTAVSGLRRVITLISSLISLSLSIRVFAGKWQLIRSRLEELHSALVAGDATSLSGELPAITGTAEECHELARRCLDLSYSGKLLMQSDLDVTLGKLEAHVKKLSEIFKKNVSMHGYAVVVSRPGFGACKDDMRFYLRDLLTRMKVGDLGMKKQALVNLHEVVVEDEKYVKLVAEVSEFVHVLVDFLGSNEVEGVEEAAKVVSLVAGFDSYKGVLVSAGVIAP

SEQ ID NO: 193098 - protein, 55 aa, Glycine max
  Clone ID: PAT_MRT3847_1638C.1.pep
VHFYNEFHQTWPDSLYVQLNHKISGSINTIYVSRAQIRCWLLYYKYISRKKCVDV

SEQ ID NO: 193099 - protein, 62 aa, Glycine max
  Clone ID: PAT_MRT3847_16390C.1.pep
EIFFSPINSIYILIQTVRKPTKISNMVHGLLIKIKLKNPGPPFIKSKPGSTTSNYIKARPPL

SEQ ID NO: 193100 - protein, 154 aa, Glycine max
  Clone ID: PAT_MRT3847_16391C.1.pep
MEMISSKFFFFFFSTLCLLYGFSNATDIHYCDKKADYDVEVKGVEISPDPIARGQPATFSIAATTGKALSGGKLVIDVSYFGWHIHSETHDLCGETTCPVSAGDFVIAHSQVLPGFTPPGSYTLKMKMFDGNKHELTCITFGFDIGFGSSVADS

SEQ ID NO: 193101 - protein, 138 aa, Glycine max
  unsure (1)..(138): unsure at all Xaa locations
  Clone ID: PAT_MRT3847_16392C.1.pep
GDACGGLLYDGRYKFWTNHAKNFALTEEEKTDVIRNRGIPAXDVLAKRAHEYEKHDGHESLNDQITDADRXYYTNDSKTADIMNLTQRGAGELKRLYXMGKLDEDKHMTDXISAREYHVVQILLMAQEEIMSYSARDF

SEQ ID NO: 193102 - protein, 584 aa, Glycine max
  Clone ID: PAT_MRT3847_16393C.1.pep
EEKKKVQNPIHFSFRKIVIAMSLSTVRQRRSEPSDPSPSEPYTKLDKPEKAEEKDEGLGWVFPFVALGLLRYMSATSNIIHDCDEVFNYWEPLHFLLYKSGFQTWEYSSQFALRSYLYLLFHEIVGRPASWLFSEDKVRVFYAVRFFLGLLSVLTDTVLVVALSRKYGKRLATYALAMLCLTSGCFFASTSFLPSSFSMYAISLASGLFLLDKLAAAISVAVIGVILGWPFSILAFLPVTLYSLSRKFKQAFIAAAVTSILLLALSIVMDFYYYGKWTSSVLNLLIYNVAGGGESHLYGTEGPLYYLRNGFNNFNFCFVLALLFLGILPIAKKKYAPDLLIVISPIYIWLGFMSLQPHKEERFLYPVYPLICVAASAVIESFPDLFRSKYNPYDRSIIVTVAKVMRPVVLSLILYASHARTFSLINGYSAPLEVYKILEHHDAENNSVLCVGSEWHRFPSSFFIPDYVGQVRWIDDGFRGLLPIPFNSTLGGTASAPPYFNNKNMASDKQYLHDVDACTFLVELQLERPYLTRGSDLSTWEPIAALPYLDRELSPALYRSFFIPYLWQEKNVFGMYKLLKRRTT

SEQ ID NO: 193103 - protein, 47 aa, Glycine max
  Clone ID: PAT_MRT3847_16394C.1.pep
LNYLDPFLVLDEFSLTATAEFPDHSHIIFYTVTYLLHLSCISLIFLM

SEQ ID NO: 193104 - protein, 29 aa, Glycine max
  unsure (1)..(29): unsure at all Xaa locations
  Clone ID: PAT_MRT3847_16395C.1.pep
LPIKDERPPNEIQQRNFKCRHNRDKNKNX

SEQ ID NO: 193105 - protein, 51 aa, Glycine max
  Clone ID: PAT_MRT3847_16396C.1.pep
FSSRFNCISTIVNLGVLAQSILFPRADVASREPSVTCHVGTRLAVSPISPL

SEQ ID NO: 193106 - protein, 102 aa, Glycine max
  unsure (1)..(102): unsure at all Xaa locations
  Clone ID: PAT_MRT3847_16397C.1.pep
PASGHGRWYTLWVRGVSGGGVSLGAGGTVFDEEHHFQSEADAGASKTYSXQAGSILTTATYVVKGGPCXDDEIATFKTGLAGTAKGDFVGKESVNANMVDDI

SEQ ID NO: 193107 - protein, 72 aa, Glycine max
  Clone ID: PAT_MRT3847_16398C.1.pep
MKCKKHTSDLSSTVGVCASCLRERLIALVAARVISRASDEYSRNSDPNPPPPLIFPRSVSPYVSRRKPDYAA

SEQ ID NO: 193108 - protein, 125 aa, Glycine max
  unsure (1)..(125): unsure at all Xaa locations
  Clone ID: PAT_MRT3847_16399C.1.pep
MITDLDRSDHRGMLSWHYRAYKTDPIRTNTSLEARTTEVXRTPRTAAAETHTKLSSHTMPERRPIPTKDYILGEEFRSDSHTVRPLTNLQARDPVAHAKDTFMLNIEGTALANVPYYNTHVSDVE

SEQ ID NO: 193109 - protein, 45 aa, Glycine max
  unsure (1)..(45): unsure at all Xaa locations
  Clone ID: PAT_MRT3847_1639C.1.pep
PXPGXGWLLTILFADLVXCXXSGTQAGIRIXHPDXEPEPDRXXSX

SEQ ID NO: 193110 - protein, 141 aa, Glycine max
  Clone ID: PAT_MRT3847_163C.1.pep
YGCEKTTEGDERQFAFIGGRHLLHSAIITNEVVKEVHRSQKSCLMFKVDYEKAYDSVSWDFLIYMLRRIGFCSKWIQWIDGCLRSASISVLENGSPSAEFIPQRGLRHPLVSLLFNIVVEALNGLMRVAVEKNLFRRFLVG

SEQ ID NO: 193111 - protein, 99 aa, Glycine max
  Clone ID: PAT_MRT3847_16400C.1.pep
FGSSGKSCQHLSELAGLYLQRIGDAGLLLVGQGCKFLQALHLVDCSNIGNEAMCGIAIGCRNLKKLYIRLCYKVLSAFHVWFSVRKRHSVCVIPFLASN

SEQ ID NO: 193112 - protein, 104 aa, Glycine max
  Clone ID: PAT_MRT3847_16401C.1.pep
YRTLSKILRVLKIEHKEAWALGIQHHITDCQPLYELRRFLIWHKEMAFRVNLHERKYTTHQTYQGYQGSFRWSWTSYGQRVRLAAKRCIMCVLSLTVFCFKVCS

SEQ ID NO: 193113 - protein, 49 aa, Glycine max
  Clone ID: PAT_MRT3847_16402C.1.pep
NRPHYKDSWEASRHRYGILFWFNMFHIKRQPCLQFHMNLYHVTSCIHLA

SEQ ID NO: 193114 - protein, 133 aa, Glycine max
  Clone ID: PAT_MRT3847_16404C.1.pep
HPGGEHTGEKDRTFETSFIREQWALQQLRRNEQQSWRPQRGLPEKSVSVLRAWMFQNFLHPYPKDNEKHLLAIQSGLTRSQVSNWFINARVRLWKPLIEEMYSEVNKKNRPIEGSGCDSRNYASIGNQRIQMN

SEQ ID NO: 193115 - protein, 42 aa, Glycine max
  unsure (1)..(42): unsure at all Xaa locations
  Clone ID: PAT_MRT3847_16405C.1.pep
LLHPGGGGTGIHLITCIIYLLSLVYGRRGHSYTSHLXQKTRS

SEQ ID NO: 193116 - protein, 73 aa, Glycine max
  Clone ID: PAT_MRT3847_16406C.1.pep
FQVFKNFWGGDLFILVFPKFCPNFLGGPFFPTPDFVPLKTCNFKRSPPLPPNVCFFGFSKRSFQKLFFCPLGA

SEQ ID NO: 193117 - protein, 56 aa, Glycine max
  Clone ID: PAT_MRT3847_16407C.1.pep
SLRLKLFKVAVLILRLPPISPSTLRLKKQTNKSNLIFWKHFNAENKYISLFKLTDG

SEQ ID NO: 193118 - protein, 56 aa, Glycine max
  Clone ID: PAT_MRT3847_16408C.1.pep
HNDTSLTSILVSWLQCHLPPHKLMHAPSSQHRTTTSFLCVLPSMGLGFWCGTINLK

SEQ ID NO: 193119 - protein, 61 aa, Glycine max
  Clone ID: PAT_MRT3847_16409C.1.pep
LCPEVIRMRGRTMQAETSWCMTPAVMRGAREWTPTNCACGGQRERSFVGGFPGRWVARDSG

SEQ ID NO: 193120 - protein, 111 aa, Glycine max
  Clone ID: PAT_MRT3847_1640C.1.pep
FKFVGGPLCEGFYPIYPGGAFVPLGLGDNPDAFSDFKVKDIQNVGLVMFSMVGFFVQGTFTGKGPFFNLFFPVFVSFSNNAWVFIPKFFLCQCRMSKRKAIFCPLLQVPFF

SEQ ID NO: 193121 - protein, 159 aa, Glycine max
  unsure (1)..(159): unsure at all Xaa locations
  Clone ID: PAT_MRT3847_16410C.1.pep
RREYDRIYYYDVYSDSGNPYKSADLACLAXGGFSAYAYSHRELIDIKPTAIVPKRESLLIKPYIPRDENFGYLKALYFXTYGDRFHRLKPFIPTXQYAFEERAEFDKFDKRRELFEGGIHASTEALDIISRVPVVMEILRTDVEQVLKXPPSHVIKDSK

SEQ ID NO: 193122 - protein, 57 aa, Glycine max
  Clone ID: PAT_MRT3847_16411C.1.pep
GSRRDLDLFILTTGPRISATTGLLTQKLLSDTKAPREPPTGKDYRGSPPAGETRNGR

SEQ ID NO: 193123 - protein, 110 aa, Glycine max
  Clone ID: PAT_MRT3847_16412C.1.pep
KTTLTQNQFFSKPIGPRGGPNGFPFRKPLYGALKGKANHTFPRYHRGGYKKEFKGLAFRGGGLSRGGIYSGRPWGPPESSRGPFRAPGNGWGSPFPSWGPKPDPGWGPGW

SEQ ID NO: 193124 - protein, 68 aa, Glycine max
  Clone ID: PAT_MRT3847_16413C.1.pep
TENGIAPQNRYRYRNIEIVVMIKCLSTKDKNHRLPALLSPCVGMRSRLYLKSLSSLEGLPLLSSSRNC

SEQ ID NO: 193125 - protein, 371 aa, Glycine max
  Clone ID: PAT_MRT3847_16415C.1.pep
FPSPKPHKNSVKLHLKHRSGSKGAEPKNSVIDSTVRDLTRIQNLHRRVIENRNQNTISRLQRLQKEQPKQSFKPVFAPAASSTSPVSGQLVATLESGVSLGSGEYFMDVFVGTPPKHFSLILDTGSDLNWIQCVPCIACFEQSGPYYDPKDSSSFRNISCHDPRCQLVSSPDPPNPCKAENQSCPYFYWYGDGSNTTGDFALETFTVNLTTPNGKSELKHVENVMFGCGHWNRGLFHGAAGLLGLGKGPLSFASQMQSLYGQSFSYCLVDRNSNASVSSKLIFGEDKELLSHPNLNFTSFGGGKDGSVDTFYYVQINSVMVDDEVLKIPEETWHLSSEGAGGTIIDSGTTLTYFAEPAYENIKEAFVKENK

SEQ ID NO: 193126 - protein, 70 aa, Glycine max
  Clone ID: PAT_MRT3847_16416C.1.pep
GRIKLSLYLKTYVKPKKKGTVKMEKKPQSSRLYGNSNHKSLAFELHSLEKKKKLTVVLYFSSFFQLERET

SEQ ID NO: 193127 - protein, 188 aa, Glycine max
  Clone ID: PAT_MRT3847_16417C.1.pep
MASWCSVRSFQVPAMEGSALRNRASLAARVGCLSVAGTSFWRSSSSPKHSLPFTCLSISSETRIKENVQTEGAPAALGPYSQAIKSNNLLFVSGVLGLVPETGKFVSDDVEDQTEQLLKNMGEILKAGGASYSSVVKTTIMLADLKDFKKVNEIYAKYFPSPFPARSTYQVAALPLDAKIEIECIATL

SEQ ID NO: 193128 - protein, 77 aa, Glycine max
  Clone ID: PAT_MRT3847_16418C.1.pep
SILAMQSFILFKTIGIAEQLLEIFSFSNFSILAVSGSSGADELSSLEMFCSDAPVQYKPDQRVKYSDKKKRRKHIAP

SEQ ID NO: 193129 - protein, 54 aa, Glycine max
  Clone ID: PAT_MRT3847_16419C.1.pep
PIHIFLTIYTFLFITFSNNQYLSISHLLYFINIIHITISIIKFNNIYHNTHQIF

SEQ ID NO: 193130 - protein, 92 aa, Glycine max
  unsure (1)..(92): unsure at all Xaa locations
  Clone ID: PAT_MRT3847_1641C.1.pep
KLRAXKIYGXLNQRVKQPISPGSRIASFLSSIFNSQNVKKAKMCYVGAVEDVSFEHKSKSPCFSSXPSSFSRRSCMSKTPSSAKKPNNNGVK

SEQ ID NO: 193131 - protein, 63 aa, Glycine max
  unsure (1)..(63): unsure at all Xaa locations
  Clone ID: PAT_MRT3847_16420C.1.pep
TXNEFKIHILVTSQNCSSILNVNHNLTYALLTPTKDCLKDIISLSFKYQFIFLSFFTFTTTFS

SEQ ID NO: 193132 - protein, 85 aa, Glycine max
  Clone ID: PAT_MRT3847_16421C.1.pep
TPSNDSVMQSKKNNATQSSGDLDQTSLTPPSLNLPSLTFELDGDVEVQSPDSSMWESFFADHNLDGDFMISSPVRTPQASSYNCN

SEQ ID NO: 193133 - protein, 217 aa, Glycine max
  unsure (1)..(217): unsure at all Xaa locations
  Clone ID: PAT_MRT3847_16422C.1.pep
MDISVSFSKTRPPPFSPSLCRQLSLRPNAPQLLRFSRNNGTFRRKPPPTISRPNKLAVTAIQISNLSENEDDFVLEDVPHLTDFLPNLPSYPNPLQKSQGYSIVKKTFVSPEDVVAENVVIQKGSPRGVHFRRTGPREKVYFKPEEVRACIVTCGGLCPGINTVIREIVCGLNNMYNVEDILGIEGGYKGFYSKNTMMLTPKGXNPIHKCGGTLSSY

SEQ ID NO: 193134 - protein, 61 aa, Glycine max
  Clone ID: PAT_MRT3847_16423C.1.pep
GKSQGETMSGFPPKGEPPLETTRKPALKPCPALPFYSGPKSPPHLGKNQCRVLNLYYQNLI

SEQ ID NO: 193135 - protein, 67 aa, Glycine max
  Clone ID: PAT_MRT3847_16424C.1.pep
EREREREALILMGYIHHGRTGLRHILRFITATGVVSNFGRSQSRAAFPSHFPILGNVLFFFNRRLIP

SEQ ID NO: 193136 - protein, 97 aa, Glycine max
  Clone ID: PAT_MRT3847_16425C.1.pep
SLMLQYGSPKRYHQMMLYPMARLRLLPQQMSRHHSVSSPRLYGNGHGHILGCLRHHSPLEYQSTPQASPQISQQKPSWCARDHRRKPQQAENDTNRT

SEQ ID NO: 193137 - protein, 61 aa, Glycine max
  Clone ID: PAT_MRT3847_16426C.1.pep
EYMRLTKFCPTLLNTYIYITQLHTYTIMYRLKRNYFTTLISSIFLKCHSDPLSFSLQLYVP

SEQ ID NO: 193138 - protein, 57 aa, Glycine max
  Clone ID: PAT_MRT3847_16427C.1.pep
HSSTVSIYIAYLFYRLTYILSGRALLKVIGSLPHTFWGLFNHSILLFISYMYLNLCY

SEQ ID NO: 193139 - protein, 142 aa, Glycine max
  unsure (1)..(142): unsure at all Xaa locations
  Clone ID: PAT_MRT3847_16428C.1.pep
LRKHLNIYDSVTINFMVCEHIWNFDLHFSPSLEQQTCGRPLLAFRMHVWTIELTQALLGDPKPLIHPPIAAIHLPSCGFHMTILRKFRPPLQWXXVPVGPGFHGKYFAEPWYWFLSKDDFVRGDELLFYYRSREDIWEMVIR

SEQ ID NO: 193140 - protein, 90 aa, Glycine max
  Clone ID: PAT_MRT3847_16429C.1.pep
EFSSGQALGGHMRKHRNFLSAPIIGAINIANGGDGSPKVPEAKKHKDVLNLDLNLPAPEDDHLRESNLFPFQAKEKVIVFSATSLVDCHY

SEQ ID NO: 193141 - protein, 57 aa, Glycine max
  Clone ID: PAT_MRT3847_1642C.1.pep
PTRPPTRFFKKKKKKKKKGKIKKKKKKKKKKKKKKKKKKKKKKKKKKKKKKKKGRPF

SEQ ID NO: 193142 - protein, 135 aa, Glycine max
  unsure (1)..(135): unsure at all Xaa locations
  Clone ID: PAT_MRT3847_16430C.1.pep
DNHNHDYCDTTSTXFXXXXSXXLYNNNNSSSNXRMSTINAKCKVHECSICGAEFSSGQXLGGHMRRHRNFGSAPTCGAINANRESKKHNKDVLNLDLNLPAPEDDHHRESKLFPFQAKEKVIVFSATSSLVDCHY

SEQ ID NO: 193143 - protein, 148 aa, Glycine max
  unsure (1)..(148): unsure at all Xaa locations
  Clone ID: PAT_MRT3847_16431C.1.pep
MTTQMQHLLNRNNEELYGRIEGLENQLNQNVGRPNGGNRGGNDGLRQNRIKGVKLNVPPFKDKSNPDTYLDWEMKIEHVFSCSDYLKNXKVKLAVVEFSNYALVWWNKNQREMLREEGREIDAWTEMKRVMRKRYVPTSYRRTMRQKL

SEQ ID NO: 193144 - protein, 67 aa, Glycine max
  Clone ID: PAT_MRT3847_16432C.1.pep
RPRLLPALLSLIPHLPYHIRQQQHLIRYTTWTHLTQWFQSTNSPTMGHSEPLKPYQHLWLIHAKSLQ

SEQ ID NO: 193145 - protein, 51 aa, Glycine max
  Clone ID: PAT_MRT3847_16433C.1.pep
QASYQGNNEVLVNVRSQKLHTLPDLSTNLRSNISSNYLSTSKLVSTPVMTF

SEQ ID NO: 193146 - protein, 101 aa, Glycine max
  unsure (1)..(101): unsure at all Xaa locations
  Clone ID: PAT_MRT3847_16434C.1.pep
MTHDYIVRGLAYXGEIRAYXLHHTESVQEAQTRHYTWXTASAAMGRTMTATVMMGAMLKGNQKLTVTGDGKGPIGRIIADADAQRNVRAYVDHPQTHFPLK

SEQ ID NO: 193147 - protein, 43 aa, Glycine max
  Clone ID: PAT_MRT3847_16435C.1.pep
VFDSSCKHSSPRVSRDVTKHCLLNVNITDQMENVRSIMVAGSG

SEQ ID NO: 193148 - protein, 77 aa, Glycine max
  Clone ID: PAT_MRT3847_16436C.1.pep
MYALNFGALATVKSIILASGYVGIAFGPLLAGYFSITGRHSVFYKLILQILSAGFLPIRIASASIKYQFSEKLFFLF

SEQ ID NO: 193149 - protein, 181 aa, Glycine max
  unsure (1)..(181): unsure at all Xaa locations
  Clone ID: PAT_MRT3847_16437C.1.pep
PNVDMMTFDNEVELYKIKLYHPYAKLIIRIKTDDSNSTLKFSSKFGCSVEDAKTFLEKAKSLELDVIVVXFHVGSRCNDPNTYISSIRDAKEVFKMGESLGMKMTVLDVGGGFPGTKGETVVQFEDMAKAINEGIDLHFNDVEDLRVIAEPGRYFATSSHTLVFNVIGKRKITESNGEPHF

SEQ ID NO: 193150 - protein, 45 aa, Glycine max
  Clone ID: PAT_MRT3847_16438C.1.pep
LGIRLEISLLFKVIGAYKRDHIQVRVDGELYDSDTILQCRTTFSF

SEQ ID NO: 193151 - protein, 111 aa, Glycine max
  unsure (1)..(111): unsure at all Xaa locations
  Clone ID: PAT_MRT3847_16439C.1.pep
GGGGGXXXXXXXXXXPHFIFFPPPPKKKIPGGLKLFILGGKFPSNNIKKKRNLLYFFLSPRKAFGKEKAKPNFHSFKGGAGPLSLXXTRGWNFWXXXTLDSIYITWEISQW

SEQ ID NO: 193152 - protein, 183 aa, Glycine max
  Clone ID: PAT_MRT3847_1643C.1.pep
TEDNSGVAKPQKKLKKKSHESFDPSPLDVNDGTSAKILKKKKKNNAALVEPTNGNGSDSDDAPTSVSFAAGKESALAELSAAAESIQKQKELKKQKLKIKQERMREEKLAKLEKLKKKQKRKAKHLEGREVNSSTGISVDGSSYKIYFDGENNASTSKLPKRLPEEFLESLSEQPPTKLVRRA

SEQ ID NO: 193153 - protein, 42 aa, Glycine max
  Clone ID: PAT_MRT3847_16440C.1.pep
IPLFSLSCHTYLSILPSHFSMRERLHIQGGQWGVHIGAMFPE

SEQ ID NO: 193154 - protein, 60 aa, Glycine max
  Clone ID: PAT_MRT3847_16441C.1.pep
LGRLGTLTTNAQGYLRIPIGVGLSVVLLGESVPSNLALGLLLVMAGVAAMTVPAERLKLR

SEQ ID NO: 193155 - protein, 50 aa, Glycine max
  Clone ID: PAT_MRT3847_16442C.1.pep
NKRNAKAPYFKHKKPGKGLWLYFSSEWVLKKFPPPLKPKQSVDTERPLVS

SEQ ID NO: 193156 - protein, 106 aa, Glycine max
  unsure (1)..(106): unsure at all Xaa locations
  Clone ID: PAT_MRT3847_16443C.1.pep
MSLCGIGSVQRTLRPLKSTSSGSKGAEVXLHIDATLGWGNLREALKLPGGEDINEWLAVNTVEFSNPANQVYGTLTEFCTTENCLTVSDXPKYEYRWPDSVQIKKP

SEQ ID NO: 193157 - protein, 76 aa, Glycine max
  Clone ID: PAT_MRT3847_16444C.1.pep
NNPVSERQFVVESLQKRLEQEIESHQKHCIQVREKSLQSLITRLPELFRALSDYAHACAEAYENLKLITQSRGGGA

SEQ ID NO: 193158 - protein, 63 aa, Glycine max
  Clone ID: PAT_MRT3847_16445C.1.pep
ITLGLVYTVNATAAFPISVSLGIIALIAIGFDVGAIILAAGPFSAGSMNSARSFGPDVVSGDF

SEQ ID NO: 193159 - protein, 139 aa, Glycine max
  Clone ID: PAT_MRT3847_16446C.1.pep
PTARLPLSLLAPLPPSSVSACRSYVPKRYSNAVGLALLTQFSLTSFVTRKIQFTIFSMAQYYPGVARSGPHSAMAKCALPSRRVNSRLCTTLPRVTILNTTAFRVAPFKAGLYNPIITAYSLVFFIVLGLLANLGRPIS

SEQ ID NO: 193160 - protein, 317 aa, Glycine max
  Clone ID: PAT_MRT3847_16447C.1.pep
MDYTYDTKHRTMEPHGIRGVMDLEHQIHYLETEAYSSILKAFIAQSDLLTWGKEGLMTELRKELNVTDIEHGEILLKINSDQLIKQIREQRKLASQAKDYIKPSAPDCVCASMGNSVIRMKTPSSAAFYTQKKMSHCQASLISTPIPSPMPPKFNDDPLNAEFAHGNVQQSMEMLNCNVQLPPVGGGRGLKGKYPLQKDLHRSHLVRLKKRSDLIQLRATDRVIHDVKKMLFSRGKPDPVDIERAKRTLTEQEIAITEALGKVANVLERGDAPNQMQRYELSKNTPGGQEMMIHANFRELIGNGRLNKHGVHSDLCS

SEQ ID NO: 193161 - protein, 321 aa, Glycine max
  unsure (1)..(321): unsure at all Xaa locations
  Clone ID: PAT_MRT3847_16448C.1.pep
SSRIGSRFRESLRKYAIAHQFAFKYKKNDSHRVTVKCKAEGCPWRIHASRLSTTQLICIKKMNSTHNCEGAFATTGHQATRSWVASIIKEKLKDFPDYKPKDIVNDIKQEYGIQLNYFQAWRGKEIAKEQLQGSYKEAYSQLPFFCEKLMEANPGSLAMCTTKEDSSFDRLFISLHALLHGFQQGCRPLIFLDSIPLKSKYQGTLLAATSVDADEGVFPVAFSIVDDAESDDSWHWFLLQLKSVLSTSCPITFVADREKGLKTSIAEIFEGSFHAYCLRYLTEQLXRDLKGQFSHEVMRLMIXDLYAAAYATXPEXFQNSM

SEQ ID NO: 193162 - protein, 77 aa, Glycine max
  Clone ID: PAT_MRT3847_16449C.1.pep
FVETRWGSPREGFQSLVLVFRPGIQAFLLVFVPNIRFLGMSQAHEIPLSKNLVIFLIQPGHETQNSYSIRYFKTIFL

SEQ ID NO: 193163 - protein, 94 aa, Glycine max
  Clone ID: PAT_MRT3847_1644C.1.pep
SCHGLPARLSAEYVNMQDPEMDMKSVTDRAARTLLWTELFRGLGMTLSYLFREPTTINYPFEKGPLSPGFRGEHALRRYPSGEERCIACKLCEA

SEQ ID NO: 193164 - protein, 57 aa, Glycine max
  Clone ID: PAT_MRT3847_16450C.1.pep
TFNLYIVMTAPSKTKFVRFHLPLVLHHDQLHHAHTVQSMLCKTVANSTFLDTVTVTR

SEQ ID NO: 193165 - protein, 66 aa, Glycine max
  Clone ID: PAT_MRT3847_16451C.1.pep
MGTRVCAVAEPDRPLWSSMAGELEYFTDTTSLFFIGAWFQYIYTATCPIDNLFAHLADPSYTNHFN

SEQ ID NO: 193166 - protein, 138 aa, Glycine max
  unsure (1)..(138): unsure at all Xaa locations
  Clone ID: PAT_MRT3847_16452C.1.pep
LSPLSLPXGSXRLSVLGWVCLVLPLRVFAAPLCFLRRVLPAPRVAFLPFRLSFFLPLPAVLWFFXGLLLRGCCFALPXALGFLFGVLPPALXLVFXXAQPPGFGAQPGXQKXXGHIIDVVKPNHVTKNEPVPVLAPAV

SEQ ID NO: 193167 - protein, 208 aa, Glycine max
  Clone ID: PAT_MRT3847_16453C.1.pep
MEMVEKVALPLLLPNPPPPSPSPSSSSKPNSVGMTSIPPIPPINTLIHDLNSNSSSRHRISLGKSLDPNRGKPWSPHRLSPTGQQILHTLSHSNSLHLDLELDLDHVLRPLLLSDHPHPASDILGIIKALGFSNKCDLALAVFHWVRTNNSNTNLFSSSAIPVIIKILGKAGRVSSAASLLLALQNDGVHIDVYAYTCLINAYSSSGR

SEQ ID NO: 193168 - protein, 73 aa, Glycine max
  Clone ID: PAT_MRT3847_16454C.1.pep
YCFLRFHHPAFVDSVHRLQWKSMVVNLWSIIIYKDGDNNTSTSYSNNKQPKTQPRNRQNPTYRLRPRSTKART

SEQ ID NO: 193169 - protein, 126 aa, Glycine max
  Clone ID: PAT_MRT3847_16455C.1.pep
SICHTAIPEVDEDTGNVSYETESPDEAAFVIAAREIGFEFYKRTQTSLSMYELDPVSGDKIERMYKLLNVLEFNSSRKRMSVIVKDEKGRIFLLCKSADSVMFERLAKDGREFEEKTLEHVHEYAD

SEQ ID NO: 193170 - protein, 70 aa, Glycine max
  Clone ID: PAT_MRT3847_16456C.1.pep
SPAHSTSPLLSACFAPGFRGSHHAYSRLRICRRRRLSWLATNFEYPPAARTRGRTRGRTRARTRRWMRAS

SEQ ID NO: 193171 - protein, 142 aa, Glycine max
  Clone ID: PAT_MRT3847_16457C.1.pep
MENKPDKMLHDNEECIDSTSTNTNHPEIGVGKGVLKNFTRSSGDVAETKIAADWKGGENCPKGTRPEEIDASGDVNMEASITPDDVIRAGGFGARDDISSFLPVASDSTDFEASIRDARDYEEPQGQVSRPGLGWTGATKGE

SEQ ID NO: 193172 - protein, 45 aa, Glycine max
  Clone ID: PAT_MRT3847_16458C.1.pep
LGMLLLWPKRHTLKCRWAPSLVNECRGLRKETTGSYSHEVFGVCA

SEQ ID NO: 193173 - protein, 87 aa, Glycine max
  Clone ID: PAT_MRT3847_16459C.1.pep
GYCSLSPGHFSPPSRFFNTPGAGTRRIHLSILLFVPTFCEGPRKNPPIMSDQNFTLLGPMFTLEHTTSTSNMRVVMSKCGSFLEIEK

SEQ ID NO: 193174 - protein, 148 aa, Glycine max
  unsure (1)..(148): unsure at all Xaa locations
  Clone ID: PAT_MRT3847_1645C.1.pep
VNKITLKRSDGDAFEELGEEMLHSQTIKHMIXDDCNNYAFPLPNMTTMTLEKIIKHCEKHIQVVNPYNPPSKDDLNACDDEFDXAHQATLIHLLLGATYXNIHSLLELTCLTDNDMIWGYTPEEIRQHFTIENDFTPDEKEEVRREDH

SEQ ID NO: 193175 - protein, 103 aa, Glycine max
  Clone ID: PAT_MRT3847_16460C.1.pep
AKRPPFFLITGVFLGPLGLFCWFVAPKALQFKPLSPGFLKGNQTFFQNPVLPLKKRFLKPLFLPEFFRANFFFFFFSKGIRVPLFVFGIFGSLFLPLGNFFFF

SEQ ID NO: 193176 - protein, 129 aa, Glycine max
  unsure (1)..(129): unsure at all Xaa locations
  Clone ID: PAT_MRT3847_16461C.1.pep
TPAGTGGQGPGGRHGSNGAYWRRGGGGGGESFFTSYNXRWGEHXXWXMRAYXKXAEECKMRCIYSHIASTGXXGGAVGGXXRSXSHXNYPELRVINEGAIPNNKSAEPKITENKSAPTTKNKGARAEHH

SEQ ID NO: 193177 - protein, 156 aa, Glycine max
  Clone ID: PAT_MRT3847_16462C.1.pep
GGILLDPVKVVAQVLMYPFFIGSVPTRSEIKLANSYFYDKAMCTLAWKLFLPEEEFSLDHPAANPLVPGRGPPLKLMPPTLTVVAEHDWMRDRAIAYSEELRKVNVDAPVLEYKDAVHEFATLDVLLKSPQAQVCAEDIAIWAKKYISLRGHEFSY

SEQ ID NO: 193178 - protein, 58 aa, Glycine max
  Clone ID: PAT_MRT3847_16463C.1.pep
IFGASCRSRTSLGLGEGRSNGVRDRGDKARGWIDSPSARVFVAGLRRLSYLSESGKGR

SEQ ID NO: 193179 - protein, 34 aa, Glycine max
  Clone ID: PAT_MRT3847_16464C.1.pep
AGEYGICWPLLILSHGLVLVRWCRDLCHRFSSVS

SEQ ID NO: 193180 - protein, 169 aa, Glycine max
  unsure (1)..(169): unsure at all Xaa locations
  Clone ID: PAT_MRT3847_16465C.1.pep
SIKLLSTLTHQTKPTKPPPSRCVSPPLPPLSSPPALPTPRSTPSSPVSPLPXAVSPLTSAPSSAPSPLTLAPVLHPSPATPPLVLHLSPLPSRATPPLSSAALHLRPPPLLARAPLRSHLLPALSPAVLALLSLLPALPPPALLVPPTTTTSPPWVPSLVVSSPSLVSW

SEQ ID NO: 193181 - protein, 68 aa, Glycine max
  Clone ID: PAT_MRT3847_16466C.1.pep
PCFVIGLYVKMSPGLQFQITLHGFLLRASMGFLMPGGILAIRLSNREESPKRHRVLFYVHSILQATIS

SEQ ID NO: 193182 - protein, 36 aa, Glycine max
  unsure (1)..(36): unsure at all Xaa locations
  Clone ID: PAT_MRT3847_16467C.1.pep
SSASXTXLLSLPSTGISLQNKETIFINXSXXLHPSX

SEQ ID NO: 193183 - protein, 50 aa, Glycine max
  Clone ID: PAT_MRT3847_16468C.1.pep
CSLRPVRNYMIRWFFSGRPSMGLNPSCFFFSPMEAVKMIFNVRHAINYPA

SEQ ID NO: 193184 - protein, 75 aa, Glycine max
  unsure (1)..(75): unsure at all Xaa locations
  Clone ID: PAT_MRT3847_16469C.1.pep
IRREHEHHNNIFLYIPSFLSTLPNTXFAGTFHDRRGESXLPQNXXTSFISYALQNILKFIPIQSPISQIHNIXKP

SEQ ID NO: 193185 - protein, 154 aa, Glycine max
  unsure (1)..(154): unsure at all Xaa locations
  Clone ID: PAT_MRT3847_1646C.1.pep
METCTALLFLTAITAYLIWFTFISRSLKGPRVWALLGSLPGLIDNCDRMHDWICDNLRACGGTYQTCICAIPFLAKKQGLVTVTCDPRNLEHILKTRFDNYPXGPTWHAVFHDLLGDGIFNTDGDTWXLFQRKTAALEFTTRTLRQAMARWGES

SEQ ID NO: 193186 - protein, 53 aa, Glycine max
  Clone ID: PAT_MRT3847_16470C.1.pep
LTDEKPKGKSSISTQLAEGQDMSNRKIHWRCFQNLRTILSSQKAPVGGPLREV

SEQ ID NO: 193187 - protein, 136 aa, Glycine max
  unsure (1)..(136): unsure at all Xaa locations
  Clone ID: PAT_MRT3847_16471C.1.pep
GXPPPGXRARXXPGVXPRGPARXXXXPKRGLXSFSPNPXFPCLSKSKSILPLIWNXXXKXFCPXXVNXVSHPLXXXXCNXXINXGXVXXXXLVFXCFITPXXXFMFYXSIYVPXIXXQFFLISVLCLICXXMCXVY

SEQ ID NO: 193188 - protein, 91 aa, Glycine max
  Clone ID: PAT_MRT3847_16472C.1.pep
MPRKDVHRSLELLEEYHAELFRPSDAELKMAIERVINVFKHSLFNSLCDIHEFYENVLLNERVPLGDKFVKRWERSPVGTSLAIPHIPMAV

SEQ ID NO: 193189 - protein, 47 aa, Glycine max
  Clone ID: PAT_MRT3847_16473C.1.pep
CNLLYISFHCGSSIIFYTYFIFHTFFLVEQKYCTNKICQAKCYDCDT

SEQ ID NO: 193190 - protein, 48 aa, Glycine max
  Clone ID: PAT_MRT3847_16474C.1.pep
IIVPLLMMHHLCFRNYDTTWAMGLFMTRHRFSVSDASCYQSNGGTEPP

SEQ ID NO: 193191 - protein, 52 aa, Glycine max
  Clone ID: PAT_MRT3847_16475C.1.pep
ILVKFIIWHGHDMIIALFKSVLGGRVTPFHIPRRVIFECTKETYFIKLLLTL

SEQ ID NO: 193192 - protein, 64 aa, Glycine max
  Clone ID: PAT_MRT3847_16476C.1.pep
QPFAEIKKSFLSSTHPESTSGLAVSILTMIPQTPEYMLWFREGMLHGYIKISFFNKAYIASVEQ

SEQ ID NO: 193193 - protein, 54 aa, Glycine max
  Clone ID: PAT_MRT3847_16477C.1.pep
SFSAKSQEMLIRKSVKSFFTPRSILISPVLKRLQIYYKLECKVATSTCMHHARS

SEQ ID NO: 193194 - protein, 79 aa, Glycine max
  unsure (1)..(79): unsure at all Xaa locations
  Clone ID: PAT_MRT3847_16478C.1.pep
KIRNQASHSRRPVKSANERSHYHAXVPGALNRPLLGGSQLRWRRREGAFRCSSAGRALDQRGPQVFLLAVLQLKSYIRS

SEQ ID NO: 193195 - protein, 140 aa, Glycine max
  unsure (1)..(140): unsure at all Xaa locations
  Clone ID: PAT_MRT3847_16479C.1.pep
GFFVSGLAGGGGRVGXCFLAAGPAXGLSAGFLSLICAYSNGWXLRWFVLFXVTGLLGCAIFRGGETLFAVCLLLDDCVLXYVAGDYVPASICLYDKKSIGPASGVGNLASFFSSXVPCVSVLIAHSAVVLYAGSAAALIV

SEQ ID NO: 193196 - protein, 49 aa, Glycine max
  Clone ID: PAT_MRT3847_1647C.1.pep
HPMLVLAHKPQQNRGKQDPDPWSIKYSNSADVCPSHIMHGIIYSISHHV

SEQ ID NO: 193197 - protein, 60 aa, Glycine max
  Clone ID: PAT_MRT3847_16480C.1.pep
ENLAFSPYLGRFPPCHIFKILLRLVFLYGILRSGLFLGKRNPHHNNFLSVLWPKKKKSIR

SEQ ID NO: 193198 - protein, 191 aa, Glycine max
  Clone ID: PAT_MRT3847_16481C.1.pep
MLSIKLLLWFLFLSWYHFAIPCEANQQGEYLYKFIQTKRAQKRSYGEASSMATNLGGDEHFSKVYVVKEQSGLMEGDKVKALPGQPSQGVDFDQYAGYVTVDAKAGRALFYYFVESPHNASNKPFVLWLNGGKFSIIYLYSKLQELGPYRVISDGKTLYTNQYAWNNVANVIFLESSAGVGFSYQTFFSLH

SEQ ID NO: 193199 - protein, 76 aa, Glycine max
  unsure (1)..(76): unsure at all Xaa locations
  Clone ID: PAT_MRT3847_16482C.1.pep
MQIKALPTYKTRIQVRHGQGIHNVEGDKDYNAYMKPEYFDAHLTPLXWQEVDSLRKDVHDSGLMKRIDLVIASPLL

SEQ ID NO: 193200 - protein, 237 aa, Glycine max
  unsure (1)..(237): unsure at all Xaa locations
  Clone ID: PAT_MRT3847_16483C.1.pep
ESCWHLPLTLCSLKSTSQQPYHRPVIRADEDYDXLFKVVLIGDSGVGKSNLLSRTKRNEFSLESKSTIGVEFATRSIRVDDKVIKAQIWDTAGQERYRAITSAYYRGAVGALLVYDVTRHVTFENVERWLKELRDHTDANIVVMLVGNKADLRHLRAVSTEDATTFAERENTFFMETSALESLNVENAFTEVLTQIYHVVSKKALEFGDDPAAFPKGQTINLGSRDDVVAVKEPGCC

SEQ ID NO: 193201 - protein, 217 aa, Glycine max
  Clone ID: PAT_MRT3847_16484C.1.pep
MGAYRADEDYDYLFKVVLIGDSGVGKSNLLSRFTKNEFSLESKSTIGVEFATRSIRVDDKVLKAQIWDAAGQERYRAITSAYYRGAVGALLVYDVTRHVTFENVERWLKELRDHTDANIVVMLVGNKADLRHLRAVSTEDARTFAERENTFFMETSALESLNVENAFTEVLTQIYHVVSKKALEIGDDPAALPKGQTINVGSRDDVSAVKKSGCCSA

SEQ ID NO: 193202 - protein, 148 aa, Glycine max
  Clone ID: PAT_MRT3847_16485C.1.pep
VENDSQEFSGLRRSSPFLPFSRKSSKNFNSAITFQTNPARNAAGYQNAVTHATMKVTLNRFGTIPRKFLTCLHGSKYSPLHVIDINDTDRLKLISHLLNYHSILITFYADATAAGIKDIALYVNDIYDILTSNLTSFLKRTWAIHSVI

SEQ ID NO: 193203 - protein, 98 aa, Glycine max
  unsure (1)..(98): unsure at all Xaa locations
  Clone ID: PAT_MRT3847_16486C.1.pep
CLRRARQHCGSRTSAAAGKXPREPDXPTKXGKARGXDXRXQXKNXREXAXAXRKXPPXKXKRXXEXXXAHKQXXXXRRXXXXXGRTAQXKNRHXXGQG

SEQ ID NO: 193204 - protein, 45 aa, Glycine max
  Clone ID: PAT_MRT3847_16487C.1.pep
NNSDKFWRALITAKVRGPIISYLLFNVKKYDSNNLIRERQPGSLL

SEQ ID NO: 193205 - protein, 82 aa, Glycine max
  Clone ID: PAT_MRT3847_16488C.1.pep
MGRPPSTGGPALRFNQPEVSEVAAIRHEHRNAMPSRDVLKGLAEKFSEAQDRKGRISVQMKQVWHWFHNKRYARRAQSSKTP

SEQ ID NO: 193206 - protein, 193 aa, Glycine max
  unsure (1)..(193): unsure at all Xaa locations
  Clone ID: PAT_MRT3847_16489C.1.pep
CSRIKXNAXHSISCAKERVLSIDSDKTXEVELQNAVKNGANHXLTLFGASLTEYTSFADTSTIPGHYVLYWEISMNKNNNIDQNQNPIPSSVFEECCFAVEGSLNSVYRQGRVSESIGPLEIKIVENGTFDKLMDFALSQGASINQYKTPRCVKYAPIVELLDSKTVSNYFSPKCPLWVPGHKKWCMYPLDNK

SEQ ID NO: 193207 - protein, 101 aa, Glycine max
  unsure (1)..(101): unsure at all Xaa locations
  Clone ID: PAT_MRT3847_1648C.1.pep
SILRAFGADLXLSYPAFVLAGAVQIADXIFDKTPDSYLLHLFEDPACPRVHYVPAVPEIWRVSSGKVAALVSVIGTVGTRPRALSSLIQLNPDIMLLSLNP

SEQ ID NO: 193208 - protein, 56 aa, Glycine max
  Clone ID: PAT_MRT3847_16490C.1.pep
HKDLNKIPLYLWIKTFFTTTPYTWVTWNLKTPCQAWAINPPLFYYLTNNNYLVLDR

SEQ ID NO: 193209 - protein, 59 aa, Glycine max
  Clone ID: PAT_MRT3847_16491C.1.pep
FPFDHASDSIHSKQLFSFTQTTLSIRIRAVLIAVHRRGRSDIDMMVTKTYMAELYTAIK

SEQ ID NO: 193210 - protein, 63 aa, Glycine max
  unsure (1)..(63): unsure at all Xaa locations
  Clone ID: PAT_MRT3847_16492C.1.pep
GVDLLLMCMTPVERCLHNANLVQTSEHDVGLERGSTRIAKDXHVAPDLFNRKELMLNMNPNET

SEQ ID NO: 193211 - protein, 127 aa, Glycine max
  Clone ID: PAT_MRT3847_16493C.1.pep
VAPPARISVNYYFFIKLLLIGDKRVGKSCQLLRVSDGSFTTRSMTTIVIDYKIKTIELDGKHINVIIWDTTDHELLPTITTAYYRGAMSILIVHDDTDETSFNNIINWIHNIEQHASDKENKIIVVN

SEQ ID NO: 193212 - protein, 62 aa, Glycine max
  Clone ID: PAT_MRT3847_16494C.1.pep
NMASAIAIISIYHTLYWPTTVQHIDTTLPYSILWTTCSYLVLRNVDIMFTSYTGTLHHCVMS

SEQ ID NO: 193213 - protein, 46 aa, Glycine max
  unsure (1)..(46): unsure at all Xaa locations
  Clone ID: PAT_MRT3847_16495C.1.pep
MPLLLVGKRTAGARVACRPGSDLXAFSHNPSHGSFSPLVFQPSEMT

SEQ ID NO: 193214 - protein, 69 aa, Glycine max
  Clone ID: PAT_MRT3847_16496C.1.pep
LGVSRQGNSYRGLHKNPASCCNKGLFFWGGGFHSLSFGRITSGSPSPREVSTTSLSSFFPFPQTQKQVR

SEQ ID NO: 193215 - protein, 109 aa, Glycine max
  Clone ID: PAT_MRT3847_16497C.1.pep
ARVPSRSSASVNKSPVMTSLDDLSLMFGGSPSSEFQEVEGETDERRKARLGRHQRAQERALKAVNDMNHRDLETKMEQEERRKIADAADVQIKRWAAGEEGNMRALLST

SEQ ID NO: 193216 - protein, 79 aa, Glycine max
  Clone ID: PAT_MRT3847_16498C.1.pep
MAEQKNRWSWDVAGFDPWKSSPPPPQPAAEHGDRKPSAPLVRRYSISATSVLPQPKHAVAFKLQRLKDKVKVMRFRLHL

SEQ ID NO: 193217 - protein, 55 aa, Glycine max
  Clone ID: PAT_MRT3847_16499C.1.pep
MKMELRNVVKDKKFWMASFLIAWAAALQGHMMWLQRQDSFKHKFGNPDDHPHNSN

SEQ ID NO: 193218 - protein, 54 aa, Glycine max
  Clone ID: PAT_MRT3847_1649C.1.pep
PRISPLVLPHILLYDQQSSNNGMLLPFHSQTMPLPYNDSTNYSTINYYLISYTF

SEQ ID NO: 193219 - protein, 64 aa, Glycine max
  Clone ID: PAT_MRT3847_164C.1.pep
QIFPIPYGSHKRGHYQTISSSNNSQTAHEPLTLLYNPHTNHHSLTHSVITRATGTLQLNASPEM

SEQ ID NO: 193220 - protein, 114 aa, Glycine max
  Clone ID: PAT_MRT3847_16500C.1.pep
KEGIPGFFPGWAAHLLRTPPSAVFPFPSYEMNPRFLERVVPQAKGYPHGRFKANAVSKPPPKARGSASDPNRRPPPFQFNPKASSIPPENKEPLKSPCRKRFFFFFFWSFPPLI

SEQ ID NO: 193221 - protein, 78 aa, Glycine max
  Clone ID: PAT_MRT3847_16501C.1.pep
RPTVSESGPEMIKIGNTFLILWRSCTVETLLGLSQSRLEDGLKRRVHHHYMSDGGKHAEDQPWGSSYDPGRTTEYSGG

SEQ ID NO: 193222 - protein, 51 aa, Glycine max
  Clone ID: PAT_MRT3847_16502C.1.pep
MNGHGQPALLYLVPCTLGVTVVLGCKRGELKYLWSYDADSSSSSSKEPSRV

SEQ ID NO: 193223 - protein, 151 aa, Glycine max
  Clone ID: PAT_MRT3847_16503C.1.pep
IAQYHQHLAEKLDLEMSALQYMIKEYPGNEEERMRAAIGKFGLSGKAQVMPMKNLSDGQRSRVIFAWLAYRQPHLLLLDEPTNHLDIETIDSLAEALNEWDGGMVLVSHDFRLINQVAHEIWVCADQAVTRWEGDIMDFKEHLRSKAGLSD

SEQ ID NO: 193224 - protein, 74 aa, Glycine max
  unsure (1)..(74): unsure at all Xaa locations
  Clone ID: PAT_MRT3847_16504C.1.pep
CSRKFSAETWLRATLSVAKPALQANGKGFSEFSGPPKLHQASXXXLENLRGFPFXXGFPEXRXXXXIGRIQEGC

SEQ ID NO: 193225 - protein, 60 aa, Glycine max
  unsure (1)..(60): unsure at all Xaa locations
  Clone ID: PAT_MRT3847_16505C.1.pep
XTLLQFLGFWYCFASVPPFXQKXXXFSSPSYLFFXXRFXXXXGIXSVIXXCIXIDFSXQX

SEQ ID NO: 193226 - protein, 82 aa, Glycine max
  unsure (1)..(82): unsure at all Xaa locations
  Clone ID: PAT_MRT3847_16506C.1.pep
TXNNIPPPSFFIPLSKADQWILLMHLPVQFCYKKKILIRTFSCHFLTKLTRKPSNIIILSTCLVFSWDPPSKSKTEKASILP

SEQ ID NO: 193227 - protein, 62 aa, Glycine max
  Clone ID: PAT_MRT3847_16507C.1.pep
KKKNEFEHYTMICGMCRLTHQHTLIAGNLTYMCLRLGKSYKWIASRRNHPFYSELAVYVHEQ

SEQ ID NO: 193228 - protein, 190 aa, Glycine max
  unsure (1)..(190): unsure at all Xaa locations
  Clone ID: PAT_MRT3847_16508C.1.pep
GSRTSPRLDEKTVYSIGPRLKAFSDWLLKTMVLGKLDAIFPAATREYAPLIEELWNDAAIKATYERRSELEMLPSVAGYFLERAVKILRTDYELSDLDILYAEGVTSSNGVACVEFSFPQSVSEETVDTTDRYDSLVRYQLIRVHARGLGENCKWLEMFEDVEMVIFXVSLTDYDQVFVDGNGCLTNKMF

SEQ ID NO: 193229 - protein, 361 aa, Glycine max
  unsure (1)..(361): unsure at all Xaa locations
  Clone ID: PAT_MRT3847_16509C.1.pep
SSLYDEEFFVNTLKNDVRVVDKIPEYLMERFGSNMTNVHNFRIKAWSSIQYYRDVVLPKLLEEKVIRISPFANRLSFDAPSVVQHLRCLANYEALRFSSPILTIGESLVERMRKHSAINGGKYVSVHLRFEEDMVAFSCCVFDGGKQEREDMIAARERGWKGKFTKXGRVIRPGAIGXNWKCALTPLEVCLMLRGMGFTKNTSIFLASGKIYNAEKTMAPLLQMFPNLHTKETLASEELILNKFDLFEEKIEQVPLTKCEWFSDFHPIISRNRPNGNSNSINNNPSLGQLASHYIAVKFKRLYSSLTGRKLYVSPVKGLEPGSVDASLKYAKEILKWSEERPNFSLSEYSMYSTEASSFSH

SEQ ID NO: 193230 - protein, 86 aa, Glycine max
  Clone ID: PAT_MRT3847_1650C.1.pep
FYIPVWWRWYYWACPVACSLYGLVASQFGDVTSAVELNETVKEFFRRYFGYRDDFVGVAAGVVVGFALLFATIFAFSVKVFNFERR

SEQ ID NO: 193231 - protein, 89 aa, Glycine max
  Clone ID: PAT_MRT3847_16510C.1.pep
MMAATATTVPVRWQPPNTRFRIQPQPQMKRLMTVKAFGNGKGGRDMDRVWREAWRSANDGFERFVFEAKKTAERIDRRYSLSRRLSVEA

SEQ ID NO: 193232 - protein, 182 aa, Glycine max
  Clone ID: PAT_MRT3847_16511C.1.pep
MASDRGVFLNKSWGVGGREMKDRDFDEEDVWSVANDDSGKETTRACKESCGSSSSSSAWRLPAAPRKIPRANNNANPLPAASDAPLVKGSSSAPMDIPDWSKIYGKSCKKGSTADDGASNKGGDDDDDDDDDMVPPHEWIARKLARSQISSFSVCEGMGRTLKGRDLSKVRNAILTKTGFIE

SEQ ID NO: 193233 - protein, 342 aa, Glycine max
  Clone ID: PAT_MRT3847_16512C.1.pep
MADVTTYLRHHRDPDPDPDDDDQTLIPFPYWDLDFDFDPEFPTNTFSFTDRENQINFVMDLFHQRVEQSQLTDPLSNDAVFGVIDGIDLGFPAADDFFIGRRFSVGSDESDGGHSHSHAGIDDGVLGFCAHSDEDYNENDDVASIPLCWDALQLEDNNNNYDDFEWEEVIDERDVLSMLDDTVSVNLGIEEETAAAAAEEEEAESEVSILEWQVLLNSNNLEGPNSEPYFGDNEDFVYTADYEMMLGQFNDDAFNGKPPASASVVRNLPSVVVTEADVVCAVCKDEFGVGEGVKVLPCSHRYHEDCIVPWLGIRNTCPVCRYEFPTDDADYERRKAQRSVVM

SEQ ID NO: 193234 - protein, 43 aa, Glycine max
  Clone ID: PAT_MRT3847_16513C.1.pep
ISLFAIGVVLQAQTAALFTRSSKMYPEKKIMPKQNNLSRRKIS

SEQ ID NO: 193235 - protein, 275 aa, Glycine max
  unsure (1)..(275): unsure at all Xaa locations
  Clone ID: PAT_MRT3847_16514C.1.pep
MYLFLNPPVTFFCFRVRFLFLGLALLRIASYVGELSTKKMGRGRVQLKRIENKTSQQVTFFKRRSGLLKKASEISVLCDAQVALIIFSTKGKLFEYSSERSMEDLLERYERCSHTALAGANNVESPGFWSFEHIKLTAKVEVLERNIMNFFGNDLDPLSLKELHSLEQQIETSLKRIRTRKNQVMNQSVSDLHKKARTLQVQNRWLGKMKEKAKTVTEGPHNGPETLGFDSSTLNLSSPQLPPPPSPXRLVPSLTLSETMQGRNTSWKKRVKAQT

SEQ ID NO: 193236 - protein, 92 aa, Glycine max
  unsure (1)..(92): unsure at all Xaa locations
  Clone ID: PAT_MRT3847_16515C.1.pep
QCRRRYNAVTLSRRSHADRVYVMAKEAHSNKDSTXIDKLQSGGNKLAHLVAVTLGSKGRDGDLESYYGLANIVNDGVTDTKEAELHDPDENI

SEQ ID NO: 193237 - protein, 139 aa, Glycine max
  unsure (1)..(139): unsure at all Xaa locations
  Clone ID: PAT_MRT3847_16516C.1.pep
FVNGFYPVSQFPSKPVVVNVPWGRGRGGFPPPPWISFPVNNRSSDINKRFSPPLGKGKKIFFFPKVGPFPEAFLGVFFGVKKKILGFNPPTPLLTGFFXNCKSFKNLVEEGPFPFLNKKGKFFSLKKSPFLWPKRGFFF

SEQ ID NO: 193238 - protein, 27 aa, Glycine max
  Clone ID: PAT_MRT3847_16517C.1.pep
RLREKEIWVNESVYDSLAGTQLTNVGI

SEQ ID NO: 193239 - protein, 88 aa, Glycine max
  Clone ID: PAT_MRT3847_16518C.1.pep
VSFSSALNVSTVSFLRNMVQSRIFKIFGTFSQNFVLVAAITLSYANCIQVCVILAMRMQRLISKEFCATFFFSYICEFIKGLCFSIDQ

SEQ ID NO: 193240 - protein, 125 aa, Glycine max
  unsure (1)..(125): unsure at all Xaa locations
  Clone ID: PAT_MRT3847_16519C.1.pep
XXXXXDGRXRVKXXXXIAXXRRXAXXXXXXCXXXPXQXXTXXTHXXXXQKXKKXXXRXDXXXXXXXXXXXXXXEIXXEXXXENXXNPXXXIXXXXNTXSVXXXWXKXXRXXAXXXVXKXXXXXQG

SEQ ID NO: 193241 - protein, 108 aa, Glycine max
  Clone ID: PAT_MRT3847_1651C.1.pep
IIKSLLRDVEAPFEVSVNFGLSVKQTPGPLLRWHSFISGKRELICFWIETSWGIGFSSIIEYGMGYGYIAVSGQAECLWKNSHGLSFLRPGASAATDTLTATPTLWWG

SEQ ID NO: 193242 - protein, 138 aa, Glycine max
  unsure (1)..(138): unsure at all Xaa locations
  Clone ID: PAT_MRT3847_16520C.1.pep
VFISTPCNILYHPPMKKMAPSLSTPMKFLALSMFFISIIYQDNAQFPTPNPNQTTMVFYLQDLAAGPNATVVAPVAGINGRVWSFTTFGSIXVVDFPVTLNISPASELVGQAQGLLIASALDGASVNVALSIVFNNLQ

SEQ ID NO: 193243 - protein, 49 aa, Glycine max
  Clone ID: PAT_MRT3847_16521C.1.pep
GKSLALERLITNLFNTAIFDADILALPYTQVVIIPIRSTVPQQTYILTL

SEQ ID NO: 193244 - protein, 109 aa, Glycine max
  unsure (1)..(109): unsure at all Xaa locations
  Clone ID: PAT_MRT3847_16522C.1.pep
CRWIIHMIGDTLHVGGHKKDEEHDGEHHAGEYKGEHHGEHSSEYNGEHHGEDXLDSSXGEHNPEHIEGFLDHVNDKIHGEGGAADGEKKNIEKKKNEHGHEHGHDSFSI

SEQ ID NO: 193245 - protein, 186 aa, Glycine max
  Clone ID: PAT_MRT3847_16523C.1.pep
EFWENPVHAVKKACKATDDEILENIADSRGGSTAVAAILINGVKLLVANIGDSRAISCKNGRAKPLTVDHEPEKEKDLIESRGGFVSKKPGNVPRVDGQLEMTRAFGDGKLKEHITAEPDVTIRKIDEDTEFIILASDGLWKVMTNQEACDCIRDEDDAQKASKKLVKEAKSQGSYDDISCIVIIF

SEQ ID NO: 193246 - protein, 338 aa, Glycine max
  unsure (1)..(338): unsure at all Xaa locations
  Clone ID: PAT_MRT3847_16524C.1.pep
HLTSTGAGPVGDHLYEAWEHILTCLSRIEHLQLLGEGAPSDATFFTSTNLEMEEKALKTLGFSSFKKGTLQNPAMVAVVRGSSYDSTSIGVNASAILTTEQINNFISNLNLLDQIGNFELNHVFAHSQRLNGEAIVAFVKALCKVSISELQSPTDPRVFGLTKIVEIAHYNMNRIRLVWSRIWNVLSDFFVSVGLSENLSVAIFAMDSLRQLAMKFLEREELANYNFQNEFLRPFVIVMQKSNTTEIRELIVRCISQMVLSRVSNVKSGWKSVFMVFTAAAADERKNIVLLAFETMEKIVREFFPYITETETMTFTDCVRCLXTFTNSRFNSDVSLNA

SEQ ID NO: 193247 - protein, 104 aa, Glycine max
  Clone ID: PAT_MRT3847_16525C.1.pep
MIDRPKWCLPCLSSFHKQTLPHTSDTPRQLLDLWSPTLDSLKNNSEQPQLPSIWNYKPRYHTALSEKAKGPNSSVWKGVRWIPWEKKSRIMLRNKWCIRRRLSV

SEQ ID NO: 193248 - protein, 94 aa, Glycine max
  Clone ID: PAT_MRT3847_16526C.1.pep
FGFLSLSLSLGTSATERAQPNLLMLRRTTSSLLTGASRRRLSYDVPATPAEENAFAEACNESEPQHQAAKDSAGGHEEPNHPLPGVYLSSAQKT

SEQ ID NO: 193249 - protein, 104 aa, Glycine max
  Clone ID: PAT_MRT3847_16527C.1.pep
GGALKMLGARRTTGGLLSIFPPRVQCSFHGGKVWSSPPTRGSFSPPGGGGCDNPQVIVSFFLGEPAAPLKEGGPQACILFFFTRKKNKDDITGYTTTKKNIPPT

SEQ ID NO: 193250 - protein, 74 aa, Glycine max
  Clone ID: PAT_MRT3847_16528C.1.pep
SFNILLVTYSLSFFLGGGGGPMLNESPPKLEIQDMQWKCPLRSSTMKVELTIVTKLSTSMSTRMIILKHGNEYE

SEQ ID NO: 193251 - protein, 61 aa, Glycine max
  Clone ID: PAT_MRT3847_16529C.1.pep
FLGRLFKIFTSVSLRFVIFIHDTYLQFLLIVVTIPITLSLLYLFALVLLSPITSFTRLILP

SEQ ID NO: 193252 - protein, 96 aa, Glycine max
  Clone ID: PAT_MRT3847_1652C.1.pep
TCVLERENKTKQTNKSESLLFSFSIVTLLSALRSFKTLLSFITKFTTLYTLFLCQLLRLHFLHLSYILSHRFKENFSHQILNLTGIQCYYQCLVPF

SEQ ID NO: 193253 - protein, 164 aa, Glycine max
  Clone ID: PAT_MRT3847_16530C.1.pep
SGSTARQIEGGHDRIMSEDELDKLKGEVDALQTFVNKRLEKALQLQAESKRIFETIRPSINSFNEDYLHFLRVDLDSQSTVLSSDFLKKMETLNERLKDHHDLWAKQVVFRYDELLVKLDELSAKCFQPSTEFPAKPNSKNLSEKELLNWEEEVRIRQQMYERA

SEQ ID NO: 193254 - protein, 69 aa, Glycine max
  Clone ID: PAT_MRT3847_16531C.1.pep
YKNRGHETSILYKYSPKVMGHLPLEIVMGGYSNSWDKHYRTNFGMGYTYQLGSQECWEALFLRSRATIL

SEQ ID NO: 193255 - protein, 85 aa, Glycine max
  Clone ID: PAT_MRT3847_16532C.1.pep
FLSRIQSIDLQQVTQNQPMQSGRTLACVLSRACSFWELSHSFHLLCLSNPIFDNRSLAATTLLVFSCTKEMGLDGLCLFVGPYQF

SEQ ID NO: 193256 - protein, 90 aa, Glycine max
  Clone ID: PAT_MRT3847_16533C.1.pep
ARRRQKGIPDGYRDETINLNPSVIGYEYEDMLESRDKGLRRQYPYSSRPIAMSIFVSISQFFISFALNSNKKEWLSILFFFSTFFFPNVS

SEQ ID NO: 193257 - protein, 125 aa, Glycine max
  unsure (1)..(125): unsure at all Xaa locations
  Clone ID: PAT_MRT3847_16534C.1.pep
VYGPTYGSPKRVLVRLIETEIELVTVHGYLSMVENNAPDPLNVITFESLPVIXDGDYTLYQSIAVIEYLAVXYMVHGSDFSGMTLDKYGLKNQWLEGQALXLNLPLCIMVIDVAKEPLSCASSGQ

SEQ ID NO: 193258 - protein, 102 aa, Glycine max
  Clone ID: PAT_MRT3847_16535C.1.pep
GSGGTILFVGDLHWWTTDAELETELSKYGPVKEVKFFDEKASGKSKGYCQVEFFDPSAATACKEGMNGHVFNGRPCVVAFASPFTVKKMGEAQINRNQQMNP

SEQ ID NO: 193259 - protein, 144 aa, Glycine max
  Clone ID: PAT_MRT3847_16536C.1.pep
PRVRGSGGTILFVGDLHWWTTDAELETELSRYGPVKEVKFFDEKASGKSKGYCQVEFFDPSAATACKEGMNGHVFNGRPCVVAFASPFTVKKMGEAQINRNQQMNQSAVPQGRRGPADAGAKPGGSNISTGGNYQGGEGNRGYG

SEQ ID NO: 193260 - protein, 99 aa, Glycine max
  Clone ID: PAT_MRT3847_16537C.1.pep
VSSSPSIEVIKNIVMKKARPIELHGTDLSNIVSSSLRKSTSTNTSRPPVPVRSNVKTLTLELNVVDITINIMINKTMIMIRNMIAVTTMQVRVMSLTMI

SEQ ID NO: 193261 - protein, 59 aa, Glycine max
  unsure (1)..(59): unsure at all Xaa locations
  Clone ID: PAT_MRT3847_16538C.1.pep
LIAXLVLFXTPAGFALFKVLXXGKLSKVAVLWQXFSSADTARQVVXLTXFSXFENTSXA

SEQ ID NO: 193262 - protein, 110 aa, Glycine max
  unsure (1)..(110): unsure at all Xaa locations
  Clone ID: PAT_MRT3847_16539C.1.pep
IXDSXXERPRDAHQTPKRRAHVILNGVDEDGFREDLELGKEFRTKIGIPSNAIFFFGVAGRLEKDKGNPLLHEAYSMLRTKYPNVYLIAAGSGTWQNRYRDLWRPALVLG

SEQ ID NO: 193263 - protein, 499 aa, Glycine max
  Clone ID: PAT_MRT3847_1653C.1.pep
MLSPLLLFLCLTLPLFLLSFFKYRKTFKNPPLPPGPRGLPIIGNLHQLDSPSLHEQLWHLSKKYGPLFSLQFGLRPAIVVSSPKLAKEVMKDNDLECCGRPKLLGQQKLTYNGLDMGFSSYDSYWREIRKICVVHVLSSKRVQSFTSIRHFEVKQMIKKISRHASSSKVTNLNEVLISLISTIVCRIVLGRRYEEEGSEGSRFHKLFNECEAMLGNFFVSDYIPFMGWIDKLRGLDARLERNFKEMDKFYQEAIDEHMNSKKKTPEEEDLVDVLLQLKENNTFPIDLTNDNIKAVLLNLLVGATGTTEVTTIWAMTELIKNPSIMKKVQEEIRGLSGKKDFLDEDDIQKFSYLRAVIKETLRLHLPAPLLIPRETNKKCMLDGYEIPAKTLLYVNAWAIHRDPKAWKDPEEFIPERFLNCDIDLYGQDFEFIPFGAGRRLCPGMNMAFAALDLILANLLYSFDWELPQGMKKEDIDTEVLPGVTQHKKNPLCVVAKCYM

SEQ ID NO: 193264 - protein, 56 aa, Glycine max
  Clone ID: PAT_MRT3847_16540C.1.pep
RTKMPRVEKTIRPRERPQRSRFMPLKLHSETSRPRPIRNQLSRLVIYLLSIINCDL

SEQ ID NO: 193265 - protein, 38 aa, Glycine max
  Clone ID: PAT_MRT3847_16541C.1.pep
ALGRHSGISIHYVRRFCVMSLDVYVMENSGFYSQCVFQ

SEQ ID NO: 193266 - protein, 81 aa, Glycine max
  unsure (1)..(81): unsure at all Xaa locations
  Clone ID: PAT_MRT3847_16542C.1.pep
TSIATAVANSSSPSYLRAVGTDHIHTCSGDGXNLQENMSYPLDDLSRSIAILAELESGGSQMNHAHSGRERKIQRTLLDLL

SEQ ID NO: 193267 - protein, 71 aa, Glycine max
  unsure (1)..(71): unsure at all Xaa locations
  Clone ID: PAT_MRT3847_16543C.1.pep
GSRGDCEPTILFLVLSILGTTGLLVQIPVRCRLIQFGSFQTRALXISIHAVLYLTVECIFMLGIGIHMYMG

SEQ ID NO: 193268 - protein, 40 aa, Glycine max
  Clone ID: PAT_MRT3847_16544C.1.pep
QFDNLYGCRHSLPDGLMRATDVMIAGKVAVVAGYGDVGKG

SEQ ID NO: 193269 - protein, 130 aa, Glycine max
  Clone ID: PAT_MRT3847_16545C.1.pep
MGDGCAVESTTGISNSNNNNNKKKNKKKKSRGGSKKKMTHEQVLAFKLVSEWVFLDHPSASSSSSSSCVVDDFGVQKPLGRGGEKLLFELHSHSKFSDGFFSPSKVVERAHLNGVKVLALTVMIQYSLFY

SEQ ID NO: 193270 - protein, 458 aa, Glycine max
  Clone ID: PAT_MRT3847_16546C.1.pep
MGDGCAVEGTTGNSNSNNNNNNKKKNKKKKNRGGSKKKMTHEQVLAFKLVSEWVFLDHPSASSSSSSAASCVVDDFGVQKPLGRGGEKLLFELHSHSKFSDGFFSPSKVVERAHINGVKVLALTDHDTMSGIPEAVESARKYGIKIIPGVEISTIFSPRGDSEVEEPVHILAYYSSIGPSRFEELDKFLSNIRDGRFLRAQNIVLKLNKLKLPLKWEHVCRIAGKGVAPGRLHVARAMLEAGYVENLRQAFARYLFDGGPAYSTGSEPLAEEAIKMISHTGGVAVLAHPWALKNPIPIIRRLKEAGLHGMEVYKSDGRLAAYSDLADAYGLLKIGGSDYHGRGGHNESELGSVNLPVIVLHDFLKVARPIWCNAIREILECYAEEPSDSNLATITRFGRTWSFKGGSPFSCGQDLIDHCLPLWLSSQEMENAEFEAIKLKLSNVSVSQGGIQVLIETK

SEQ ID NO: 193271 - protein, 43 aa, Glycine max
  Clone ID: PAT_MRT3847_16547C.1.pep
YRADIGSRDRLWQKKSVEVKQTVDTHDRLLRRYGLISSLARDI

SEQ ID NO: 193272 - protein, 123 aa, Glycine max
  Clone ID: PAT_MRT3847_16548C.1.pep
MAGKGEGPAIGIDLGTTYSCVGVWQHDRVEIIANDQGNRTTPSYVGFTDTERLIGDAAKNQVAMNPINTVFDAKRLIGRRFSDASVQSDIKLWPFKVLSGPAEKPMIQVSYKGEDKQFAAEEI

SEQ ID NO: 193273 - protein, 186 aa, Glycine max
  Clone ID: PAT_MRT3847_16549C.1.pep
MDSGPPANDLCSVCHGNFHIPCQANCSHWFCGNCIMLVWQHGSVGCSCKCPLCRRAISLLVPTEESLRQQQDPEVSQILSKIHAYNRFFGGQPTTLYQRLRDLPFLLHRLLREFLHPHRSLPLLIRARVFVVMIASVIYLFSPIDIIPEGILGVVGFLDDLLIVLICFLHVAALYRSVLYLRHGGS

SEQ ID NO: 193274 - protein, 92 aa, Glycine max
  Clone ID: PAT_MRT3847_1654C.1.pep
WPGPGGRLVCIFKIAVFLYLLKLILSELFTKMIGIGLAVAFMAFFVYEQYESEIDGLVDFLFTSLKEFMIHLMRISPVSISRLLHYQENFQP

SEQ ID NO: 193275 - protein, 43 aa, Glycine max
  Clone ID: PAT_MRT3847_16550C.1.pep
CLDRCRIWIVGIILSFSKLNYFVFYVHRQVQFQIVELVMEITM

SEQ ID NO: 193276 - protein, 109 aa, Glycine max
  Clone ID: PAT_MRT3847_16551C.1.pep
MDSGPPANDLCSVCHGNFHIPCQANCSHWFCGNCIMLVWQHGSVGCSCKCPLCRRAISLLVPTEESLRQQQDPEVSQILSKIHAYNRFFGGQPTTLYQRLRDLPFLLHR

SEQ ID NO: 193277 - protein, 320 aa, Glycine max
  Clone ID: PAT_MRT3847_16552C.1.pep
LFCLPCSSLNAVANDGGWIYLGTNKTMAKSSSTGYSQWSLSKDHLQVGDTVRSRKLSNSCNPQNMEVPEGNVVGLERNVDHGFVLVRLHGVHDPVRIRASTLERVTNGLGAGDWVRLKEEDDKHSPVGILHSINRDGRVTVGFIGLQTLWNGNCSDLGLEEPYCVGQFIRLKANVLSPRFEWPRKRGGAWATGKISWILPNGCLVVKFPGMLNFWDAPRTVLADPSEVDVVNFKNCPKMIEKYQHVEDHHWAVRPVLIAFGFLTAVKLGMSIGKKLGRNMNANAMDSESHYTDNQNASPTWTSSVANIFSREGVNLANGR

SEQ ID NO: 193278 - protein, 200 aa, Glycine max
  Clone ID: PAT_MRT3847_16553C.1.pep
MTRFEVVFIATPALGNLVPIVEFADLLTKHNPQLSATVLTVTTPQRPLISTYVQSRASSATNLKLLHLPTVDPPTPDQYQSFIAFVSLHIQNHKHQVKNALLNLKKNESNSFDSVRLVALFVDMFSTTLIDVAAELAVPCYLFFASPASFLGFTLHLDRVDPVESESELAVPSFENPLPRSVLPNLVLDANDAFSWVAYH

SEQ ID NO: 193279 - protein, 108 aa, Glycine max
  Clone ID: PAT_MRT3847_16554C.1.pep
TRTSSKTFFIVFSSSLHIHSIIIFFIHNGISSNLFQVLCHCSYCGAFLRRRHRSRFVSGACAGTRCRSCQIRFEFGGRDWSFGRVVNARHLQALNLMILNFHFLVDFA

SEQ ID NO: 193280 - protein, 71 aa, Glycine max
  Clone ID: PAT_MRT3847_16555C.1.pep
FGNYMGRLKTISLLESKAFTESRFNSRGFSPLGGGRPLDTLTLPLAILNSFWRLELEILLGIFFCFGAKGG

SEQ ID NO: 193281 - protein, 48 aa, Glycine max
  Clone ID: PAT_MRT3847_16556C.1.pep
KQKSPSPTNSDYISKCTGQAKSTIIVQVQQTTKVECGRIKMPYRYSGT

SEQ ID NO: 193282 - protein, 57 aa, Glycine max
  unsure (1)..(57): unsure at all Xaa locations
  Clone ID: PAT_MRT3847_16557C.1.pep
VVENGRILSIKALYLIHSLVYYLSFSYLCKITWEKSSSVSYSTFKEPSTNLKMKXSE

SEQ ID NO: 193283 - protein, 60 aa, Glycine max
  Clone ID: PAT_MRT3847_16558C.1.pep
CCVEDVCAVAVVRARIRKRVETKARQTVEACVKRKERRHLAGSRRKREGRPHEAKDGTVA

SEQ ID NO: 193284 - protein, 61 aa, Glycine max
  Clone ID: PAT_MRT3847_16559C.1.pep
KQKCIWNGRNSNPIKFTFHWEGGWDPLNIWLKNHFRLKKKGLVFGRNKQAQRFHILPIHLA

SEQ ID NO: 193285 - protein, 54 aa, Glycine max
  Clone ID: PAT_MRT3847_1655C.1.pep
GKGLIHSFRMKKLEFMQVPRKLFILGFILYSRPRPPINLSLCFFFLDKNYIFFS

SEQ ID NO: 193286 - protein, 62 aa, Glycine max
  Clone ID: PAT_MRT3847_16560C.1.pep
DLVKGEKIRKGMEGMNDSHCLLLLLLVIVFYKKLYYVGISVCLLLFLPSSPFFFYRCKLVSF

SEQ ID NO: 193287 - protein, 50 aa, Glycine max
  unsure (1)..(50): unsure at all Xaa locations
  Clone ID: PAT_MRT3847_16561C.1.pep
RGVTTEYAEHSKTYRMKHLSTNKDXAKSKVSLFCRENCIRLRKAFSKCLP

SEQ ID NO: 193288 - protein, 93 aa, Glycine max
  unsure (1)..(93): unsure at all Xaa locations
  Clone ID: PAT_MRT3847_16562C.1.pep
MAMKLKYLASIADDVIKRCSHKLDTSLDKLVEDFXKRLNPEMGNYCIKLLEFFTGKGANEMCHNIXGNINDFSFTXLTYNMMLAFNTPIYYNE

SEQ ID NO: 193289 - protein, 72 aa, Glycine max
  Clone ID: PAT_MRT3847_16563C.1.pep
SSNNKSQLKWPLQFFASVALKPAPFTVEKSSVRGLSSISRNPSSFRVVASVMTIKTDKPYGIKGGMVFRDGT

SEQ ID NO: 193290 - protein, 65 aa, Glycine max
  unsure (1)..(65): unsure at all Xaa locations
  Clone ID: PAT_MRT3847_16564C.1.pep
MGKDKXHXSIXXXXHXDSGXSTTXGXLXYKLGCIXXRVIEXFQNEXAXXNXRSFNYAXVLDKLKA

SEQ ID NO: 193291 - protein, 104 aa, Glycine max
  Clone ID: PAT_MRT3847_16565C.1.pep
GGGPPPRGGGGKKNTLFFFFGGGGAPNIFFFFKGQGPPGGGFFSGPKRENFYFLFSHLGKIPPFHSPPLGARLSPTNNSFFNQKQKRLRQLFCYIGGVKELIIN

SEQ ID NO: 193292 - protein, 122 aa, Glycine max
  Clone ID: PAT_MRT3847_16566C.1.pep
MASKLQKLQATASQASQFVSSRGTNYYKQLLEQNKQHIQEPPTVEKCNLLAKQLFYTRLASIPSRNESFWKELDYAKNLWKNRKELKVEDAGIAALFGLECFAWFCAGEIVGRGFTFTGYYV

SEQ ID NO: 193293 - protein, 69 aa, Glycine max
  Clone ID: PAT_MRT3847_16567C.1.pep
LHCIRSYFTSIHSESAIHHFITSLILDTSRYIYLLLHKLSQFIYLPLAATNHDIICGPLILIRSLQPLN

SEQ ID NO: 193294 - protein, 52 aa, Glycine max
  Clone ID: PAT_MRT3847_16568C.1.pep
HVPIAFGGGDATPNLLKGTAMCCSLYSVVKEKLLMLSRAFHIISIFILGQSP

SEQ ID NO: 193295 - protein, 36 aa, Glycine max
  Clone ID: PAT_MRT3847_16569C.1.pep
IMIMINSLIALRHIQLWHASSTMLIYYYNVVFQHVT

SEQ ID NO: 193296 - protein, 57 aa, Glycine max
  Clone ID: PAT_MRT3847_1656C.1.pep
QEMEENNRKISILETQVEKYNGKNSHVPISLSPLTKSTSATQTERIRTYIYIPQMIW

SEQ ID NO: 193297 - protein, 109 aa, Glycine max
  Clone ID: PAT_MRT3847_16570C.1.pep
AWGGFCCTPFERGPLSPPQGAVDAKGPLLGGGFGFSIGAVSPWAVLADYPIGSPIFFKGPVLGPIFGAWGDPDSLLYETLLQKKGFREIFFPQGDGDFRNFTRPRGGVF

SEQ ID NO: 193298 - protein, 73 aa, Glycine max
  Clone ID: PAT_MRT3847_16571C.1.pep
EKKKKKKKKRNKKKKKKKKIKGTPSYNTVTYLTNSCMLTLLSCISSPKLIQLPVSIQLLDSQFPYLTQLIPLS

SEQ ID NO: 193299 - protein, 150 aa, Glycine max
  unsure (1)..(150): unsure at all Xaa locations
  Clone ID: PAT_MRT3847_16572C.1.pep
RSHTGTSTRDCQYCGRTFSRNDVLQRHLKTHVGHQVGDGRPRASPSPSIAPEVPDSRSIIHQTPQIQQDQIYPQDPLSANTNLTVQAGPSTGDSAITGPVYTTQQDEAWRILHGLVQATQPVSAPSYSLKQDVINPFPDMFSNQAAXSWD

SEQ ID NO: 193300 - protein, 82 aa, Glycine max
  Clone ID: PAT_MRT3847_16573C.1.pep
MAAWILSECGLKPLAPVIPRPRTGAAMRCNLMERNWGLKGSAPLRVAFIEEEHKSVDLTKGTNWDEHEKLPEFDPGAPPPFN

SEQ ID NO: 193301 - protein, 656 aa, Glycine max
  unsure (1)..(656): unsure at all Xaa locations
  Clone ID: PAT_MRT3847_16574C.1.pep
MNLWTDENSSVMEAFMSSSDLSSIWPSPAPPQSTAVFNQDTLQHRLQALIEGARETWTYAIFWQSSYDYSGSTLLGWGDGYYKGDDDKAKAKAKAKVKVTSAAEQDHRKKVLRELNSLISGSSSSSAASDDVDEEVTDTEWFFLVSMTQSFVNGGGLPXRPSSTPLRCGSPXRPSLCLGLREGXQGHVFGLQTLVCIPSANGVVELGSTELIFQNPDLMNKVKVLFNFSNNNFDMGSSWPATSADQGENDPSSLWLSDPEVRDSINTVAATPSVTVPAQTQGISISKTMQLESSIQTPGSSTLTETPSSIHAIPQNQSVFSRELNFSEYGFDPKTGNNQNHHSLKPESGEILSFGESKRTSYGGVNGNSNSNSHFFSGQSPFVAAADENTNKNNINNNGKTKSPNSRGSNDDGMLSFTSGVILPASNLKSGGGGDSDHSDLEASVVKDPVVEPEKRPRKRGRKPANGREEPLNHVEAERQRREKLNQRFYALRAVVPNVSKMDKASLLGDAISYITELKSKLQTLESDKDGMQKQLEGVKKELEKTTENVSSNHAGNSSSCNNNNKLSNQKLIDVLEMDVKILGWDAMIRIHCSKKNHPGARLLTALMELDLDVHHANVNLVNDMTMLQATVKMGSRFYTQEQLRAALAAKVGDAR

SEQ ID NO: 193302 - protein, 200 aa, Glycine max
  Clone ID: PAT_MRT3847_16576C.1.pep
MDIDDDFTFCQVSAPVDVETNKLASDIADISIKEESSNASNTAQDNALPNQKEATVGSLSFTVTSTASSRPNESTTKLKNSVKKPTVRAKVPFEKGYSQMDWLKLTQTHPDLAGLKGQSNKRLISMDEVRKHQTEGQMWTVLKGRVYNISPYMKFHPGGVDMLMKAVGKDCTSLFNKYHAWVNAEFLLEKCFVGTLDEGQ

SEQ ID NO: 193303 - protein, 166 aa, Glycine max
  unsure (1)..(166): unsure at all Xaa locations
  Clone ID: PAT_MRT3847_16578C.1.pep
RGXEVYWENSGWLXXGCXFRRQRWCPKLFRNTLQKNTPDEIFFILSGMALKKDGFHPIFWDSKPFFFFKNNPPRMRLLGEGGLKFGTPGIFLEKKNFWGKKLWNNFPLGGGPHTPQKRGPPPRGGWEHLGENERIFGPPPKKNFPPGGVPPLFYKRGAGCCFFYKK

SEQ ID NO: 193304 - protein, 132 aa, Glycine max
  Clone ID: PAT_MRT3847_16579C.1.pep
FQIPPGPFDPFSGAKKTNAPRAKKFVPFPPPPRNGKKSFPPVPGLKKKFPFQKIPQAPQKKFFSHGHFVPAQGLGQIFPPPGGPPQNVFPFPLHAPPVRKGPLQILGFLPPPPSSPLFFFLEFTPWPRFLNK

SEQ ID NO: 193305 - protein, 563 aa, Glycine max
  unsure (1)..(563): unsure at all Xaa locations
  Clone ID: PAT_MRT3847_1657C.1.pep
GGGCINKITTFFLSLFSSKEKLAKPQPCDLLIKIDGQQIFLLKEKVISKYCGGLKKLLNHQKRRCHVKELGIRINDFPGGPEGFELVSRFCYSNAKIQITVANVSLLHCCAVYLGMTEESFSNNLLQQTETFLERIYHWKWNDILASLKSCQLFYAYADGYGLLEKIISVLAKFVQNSDSNLLTSSPSASSSSSSPESSFAQRFSFSSKKTTPEKIKSSLPRKAWWFDDLATLPPKIIEKLFQTIGAYKTDNKDLILTRFLLHYLKNIATQSKVVNCRNSNEYAALAETAAYGVISVGKEIFSCRGLLWVLRIVSKFGLSRDCRTELEKLIGGMLEQLHSMRDSLMTXMGVYYDVNLVIRCVRLFVDINGLDGVQKVKRVGRLIDTYLREICPDQNLKISKFLGVAECLPDTARDCYDGVYKAIDIYLESHPTITFEERSRLCRCLNYSKLSFEACKDLAKNPRIPPRVAMQALISQQPKISTSDRVTESPRMKHSQLVLSNEASRESFSQERRDMRLNIEKMQWGVIELAKLRKQTNGQEPQLFTHNVLLNPARASSSPRFC

SEQ ID NO: 193306 - protein, 164 aa, Glycine max
  Clone ID: PAT_MRT3847_16580C.1.pep
MDIDDDFTFCQVSAPVDVETNKLASDIADISIEEESSNATNTTQDSALPNQKEATVGSLSFTVTSTASSRPSESTTKLVPAQANNSSLKSPAQKNSVKKPTVRAKVPFEKGYSQMDWLKLTQTHPDLAGSHTQFFYYAIAIIIFVGSSFKISSNCLELCKRNTY

SEQ ID NO: 193307 - protein, 165 aa, Glycine max
  Clone ID: PAT_MRT3847_16581C.1.pep
ECLCSYAPHLTEETILEIWGAVRANYLSAIYAFFHTNVWYNVNAYNLVYIFILLRVEQEWSYLRGGLTTLDRDYGLINNIHHDIGTHVIHHLFPQIPHYHLVEATEAAKPVFGKYYREPKKSSPLPFHLIGELIKSFKTDHFVSDKGDVVYYQTDSEINGSSKSE

SEQ ID NO: 193308 - protein, 153 aa, Glycine max
  Clone ID: PAT_MRT3847_16582C.1.pep
IWHADMEDHVSNMYEVVNMPIDGAANKSDDCSDAFNTTEVFPFREAMLNWARDVAKENGFVLIILRSETSTRSTKYTRSTRCNQRKTFVIMGCDRSGKYRGPYKNALSRKVSGTRKCECPFKLKGKALKKAEGWICTHDLNISGSSICWSVEC

SEQ ID NO: 193309 - protein, 162 aa, Glycine max
  unsure (1)..(162): unsure at all Xaa locations
  Clone ID: PAT_MRT3847_16583C.1.pep
HEGNPCSCLEKLFRSLDTVTRMLRFTAPFPLLAFPVYLFSRSPGKTGSHFDPSSDLFVPNERKDVITSTACWAAMLGLLVGLGFVMGPIQLLKLYGVPYVVSFFLFSIISMVLFESRMNEVLIXNFLELKIFVMWLDLVTYLHHHGHEDKLPWYRGKVSFIL

SEQ ID NO: 193310 - protein, 72 aa, Glycine max
  unsure (1)..(72): unsure at all Xaa locations
  Clone ID: PAT_MRT3847_16584C.1.pep
KKKTLANTTIMATSXXQXSSIHWSNCXEAXPMSSXARPVAPEKVXLTXXXPVKSDXQXIXXLXLXSXSTISX

SEQ ID NO: 193311 - protein, 98 aa, Glycine max
  Clone ID: PAT_MRT3847_16585C.1.pep
NIVVLSPLVELRKFKDRNRGTGRRRAENLAVIVEVRGEARSAELDRSGEDTVVRRSSGDAVATAVGELLRESSGGSCEFHGSHNGGEVLLLLAYVCFL

SEQ ID NO: 193312 - protein, 53 aa, Glycine max
  Clone ID: PAT_MRT3847_16586C.1.pep
VVMMCEVCAIFNKRETKHQIWQRITNHPLGKRVTSTMTTLDVSTLGSPPPLVT

SEQ ID NO: 193313 - protein, 59 aa, Glycine max
  Clone ID: PAT_MRT3847_16587C.1.pep
MGSALTIGFTVFLVHLATIPIPDTGISPARSFSATVIHNNSKFWDDHVRNYVSLNLISS

SEQ ID NO: 193314 - protein, 86 aa, Glycine max
  Clone ID: PAT_MRT3847_16588C.1.pep
MVKCEKWIRDDEDHLEGSKATWWLNRLIGRTKKVTVDWPFPFSEGKLFVLTVSAGLEGYRVSVDGRHVTSFSYGTGFTLEDATRLS

SEQ ID NO: 193315 - protein, 65 aa, Glycine max
  unsure (1)..(65): unsure at all Xaa locations
  Clone ID: PAT_MRT3847_16589C.1.pep
ENGKTLYAVVQELKNTNPDMLFDAIQNGAGSPLTQKNFXIWKASFQAATREVQGIYGKDKVVIPS

SEQ ID NO: 193316 - protein, 84 aa, Glycine max
  Clone ID: PAT_MRT3847_1658C.1.pep
KLGVIREIAFSWGKWFSVQISKKNPTGKFKFKNRGALRGGLLPFIGLGLIALFPVGKLAGPFDLINGPPPGEGGFAFWPPGGFF

SEQ ID NO: 193317 - protein, 124 aa, Glycine max
  Clone ID: PAT_MRT3847_16590C.1.pep
MLFHSFPSLLIPHTLHRANQRKNKKGKRIPKKHPSIHQRNRKMASATKQQQEGEKPAKRKPVFTKVDQLKPGTNGHTLVAKVLSSNTVLQKGRPSSSHNIRPTLIAECLIGDDTGTIIFTARNE

SEQ ID NO: 193318 - protein, 62 aa, Glycine max
  Clone ID: PAT_MRT3847_16591C.1.pep
RKERLIKCKHIVLVDERVMSLRCLITIQRIPTQAFCYSTDANPSILHVLLSLPLVTIFTILL

SEQ ID NO: 193319 - protein, 93 aa, Glycine max
  unsure (1)..(93): unsure at all Xaa locations
  Clone ID: PAT_MRT3847_16592C.1.pep
ADVPTIAQIEELHSMQRLMNAPDLTDNTDLLLSIELLGLHGSGNALTNKIXLNDKLESAYTQEFFDGNYAGDCWVPIFDNCLYPRRYLPLEAC

SEQ ID NO: 193320 - protein, 69 aa, Glycine max
  Clone ID: PAT_MRT3847_16593C.1.pep
SNGEPLCWTAALRPQKGTTTCIIKGISRNLATKHNQNTLLVKGCTIPECLTEEAAHICLMWSLGCHNCA

SEQ ID NO: 193321 - protein, 312 aa, Glycine max
  unsure (1)..(312): unsure at all Xaa locations
  Clone ID: PAT_MRT3847_16594C.1.pep
MNKKEIEKWIGGDESASEMLSRVSSMRPFLFPPPLHRVPLRVGNVVELVGPSPSAKTHILIHAAITSVLPKCYGGLDHLVLFLDLDCRFDIARFSQLLIHRITQHGTDSYDKTLYALCMARFLYVRCYDSFEFLHTLRTLHCRLEKEKEVHGVGVHLLMIDSIGAFHWMDRASMFLSXEKTAKKKLFLQTVSEAVVQNIKKLFXVHPMLIIATKSVIFGNRYSTASNEVKGNMEEGFSKNVTRNHQNYLYREYMPSVWQSFVTHRILVRSSDEHPVTTNNQNSSFYLLEWLLPRLSFPDKIVVKDAGVFVDS

SEQ ID NO: 193322 - protein, 245 aa, Glycine max
  Clone ID: PAT_MRT3847_16595C.1.pep
MNKTEKWIEGDESGAEMLSRVSSVRPFLFPPPLHRVPLRVGNVLELVGPSPSAKTHILIHAAITSVLPKRHGGLDHLVLFLDLDSRFDVTRFSQLLIHRITLHGTDSYDKTLYDLCMARFLYVRCYDSFEFLHTLRTLHCRLEKEKEVHGVGVHLLMIDSIGAFHWMDRASMFLSQRENSKNMEEGCSKNVARNHQNFQYREYMPSVWQSFVTHRILVRSSGLDSIATGYNCQLFLSPAMISAYS

SEQ ID NO: 193323 - protein, 52 aa, Glycine max
  Clone ID: PAT_MRT3847_16596C.1.pep
NGFSQPVPFCSLGCVTSLKIVLKKKPIISSLATPKVENRIEERPPYFISGLF

SEQ ID NO: 193324 - protein, 74 aa, Glycine max
  Clone ID: PAT_MRT3847_16597C.1.pep
IDRDDTVIVSQSEARSRNQWILDWIISLILRHQLLPTNITKKKRKVRQFFGEGNKPLCAAIPPLRHGRVAVCVG

SEQ ID NO: 193325 - protein, 102 aa, Glycine max
  unsure (1)..(102): unsure at all Xaa locations
  Clone ID: PAT_MRT3847_16598C.1.pep
MSHRKDNNNYSSLPISSYLELQPQNDSSKSLQRPTFDESEVYLGSKVDDDDDDDLEIDIDNYPLIVMGPNHGSGIPXAVFNLTTTVIGAGIMALPATMKVLG

SEQ ID NO: 193326 - protein, 73 aa, Glycine max
  Clone ID: PAT_MRT3847_16599C.1.pep
RLRTNTPQGHILAFLRSTFISNLVPTGVDLNCLLSQAEDLVIGCLVTISICIFEHGSAVLVYRMLAPIPFNWV

SEQ ID NO: 193327 - protein, 62 aa, Glycine max
  Clone ID: PAT_MRT3847_1659C.1.pep
KSASCFLLQIKGPPSPGQVQGPCFFNFLGPEGRDKAFWDESPFKKEREILNLGFSKTGFPRP

SEQ ID NO: 193328 - protein, 70 aa, Glycine max
  Clone ID: PAT_MRT3847_165C.1.pep
LEHSACECVCVQVCLVQTKDTLSSLRTKNYYLDTTTIAICDTVIFRLLRAADTYTRVQKKKTLPWRHSTY

SEQ ID NO: 193329 - protein, 96 aa, Glycine max
  Clone ID: PAT_MRT3847_16600C.1.pep
ASMDRMASNKKNPFIMAKKKKPTQEMMTTMRVSHFLDPYQEYWTYGMLGLEILEQFVQPPDPCLKLRTGQSMRNSLVSQRRKHLVCFTLVLLVPNS

SEQ ID NO: 193330 - protein, 187 aa, Glycine max
  unsure (1)..(187): unsure at all Xaa locations
  Clone ID: PAT_MRT3847_16601C.1.pep
RACWDGNXFHCLQSYSEHKLGIRPVMSVAETRVLFVENYSLHELLSLIEDFLIEGKVIVNNRVYAETLSCDLRVNDFLDCVNQVSSDVASSEQLAAASIILASVCAATDYVGFICDASYHILQSCKWDSLMVLTILHIFAYLGGEKFFNMDNFGLMVTVLKSLVMFLEDESPSVASAWLPSINQLHA

SEQ ID NO: 193331 - protein, 146 aa, Glycine max
  Clone ID: PAT_MRT3847_16602C.1.pep
MAYRRRQGISKSSTFKEEFHDPSLEDDNASPSIFSSSSTPPPSSLAAQAIKAAASRREPSLSFAFAPAEFDHQRSKSFGAYGNGNSKSGGFWGVIAQKAKSILDDDKPTPQHDTMPQTQTLKSHSFNTLSDSSAVHNSPSQFKPGY

SEQ ID NO: 193332 - protein, 116 aa, Glycine max
  Clone ID: PAT_MRT3847_16603C.1.pep
RPGRDSCITPQLLDAVAFGETIYMVIGFILLGLSFGQSSGAIASNFKQAYRYTASALTSDMAWLFGAGFAPLVALLLATNLGVIASGAYLLSGAFWTLLALWLSGQREAGDMDAGA

SEQ ID NO: 193333 - protein, 192 aa, Glycine max
  unsure (1)..(192): unsure at all Xaa locations
  Clone ID: PAT_MRT3847_16604C.1.pep
ERDDCLCVWAAKLGPPRQPTLRERTWLEFLVRAGVVREDVKPNDGVFVDLSRVGNNNSDLGLGFHHMNKVAAAAATGLMGNRLNDDPLVGLLSSAYLPLNVNGVGASNQLPQMLSPLHQRSXQQLQHPQLHQLQRHPQICPKQSTMTFAAAPMPQGMVRGGVVGLGGGVLCGSGRGGGVGGWGGRAPEYVXV

SEQ ID NO: 193334 - protein, 92 aa, Glycine max
  Clone ID: PAT_MRT3847_16605C.1.pep
NDSISAKKKKKKKKKKKKKKKKKKKKKKKKKKGGPPPGGFFTPEFIPGRALEGFQVSLLGGVLKLGGILGNAFFLGKFVFRYHSPPPSNPKP

SEQ ID NO: 193335 - protein, 102 aa, Glycine max
  Clone ID: PAT_MRT3847_16606C.1.pep
MANRWWTGNVGMIREQELMENSNNNNATTTPTNSSNSNTNANTNTTEEEVSRDNGEDLQNQNLGSHEGSEPGSSGRRPRGRPPGSKNKPKPPIVITKESPNA

SEQ ID NO: 193336 - protein, 302 aa, Glycine max
  Clone ID: PAT_MRT3847_16607C.1.pep
MANRWWAGNVGMIREQELMENSNNNNNNNNATTTTPTNSSNSNTNANTNTNTTEEEVSRDNGEDQNQNLGSHEGSEPGSSGRRPRGRPAGSKNKPKPPIVITKESPNALRSHVLEIASGSDVAESIAAFANRRHRGVSVLSGSGIVANVTLRQPAAPAGVITLHGRFEILSLSGAFLPSPSPSGATGLTVYLAGGQGQVVGGNVAGSLVASGPVMVIAATFANATYERLPLEDDQGEEEMQVQQQQQQQQQQQQQQQQQQSQGLGEQVSMPMYNLPPNLLHNGQNMPHDVFWGAPPRPPPSF

SEQ ID NO: 193337 - protein, 48 aa, Glycine max
  Clone ID: PAT_MRT3847_16608C.1.pep
HRHSPSNDNAIKDPDWRSERASYSIRELRLMSPITTTHALPLLHQVFP

SEQ ID NO: 193338 - protein, 35 aa, Glycine max
  Clone ID: PAT_MRT3847_16609C.1.pep
NHKRGLCLWAHILAFLTVSPLFMGLPISLRSHLQQ

SEQ ID NO: 193339 - protein, 122 aa, Glycine max
  Clone ID: PAT_MRT3847_1660C.1.pep
MDYRPYNGDDTAADLPPTHYKGRCRRGGGHGTANGRSAADPRTYRKMDGETDMETQEHEVDREAFRAVLGDAEAQAGDKAREKARLITELRKELGVHKEELRQLIGGDDAHEVMQRIKAWRQ

SEQ ID NO: 193340 - protein, 46 aa, Glycine max
  Clone ID: PAT_MRT3847_16610C.1.pep
FIKDDSVLVKDLVKQTVAALGENIKVRRFVRFTLGETSEKETTVPA

SEQ ID NO: 193341 - protein, 603 aa, Glycine max
  Clone ID: PAT_MRT3847_16611C.1.pep
MEEFAAAVLTDSDVVEPSPDKNDAITESDITSSAPAPQESAGDDVGAITENIDSDTSLSGQSDELSPEGSLTTDATEETDQVPSPESSATEVVKTSIDDPEEEAQKQTPATENENSFTSQVEDKEVAIASDKNSSLSNSDGQTGATSGESLSKATISPALVKQLREETGAGMMDCKNALSETGGDIIKAQEYLRKKGLSSADKKASRVTAEGRIGSYIHDSRIGVLVEVNCETDFVSRGEIFKELVDDIAMQVAACPQVEFLVTEDVPEEIVNKEKEIEMQKEDLLSKPEQIRSKIVEGRIRKRLEELALLEQSYIKDDKVAVKDFVKQTIATIGENIKVKRFVRFNLGEGLEKKSQDFAAEVAAQTAAKPAPILVKEEPAVADAEAKETEPKQITVAVSASLVKQLREETGAGMMDCKKALAETGGDLEKAQEYLRNYVLSSADKKSSRLAAEGRIGSYIHDSRIGVLIEVNCETDFVGSGEKFKELVDDLAMQVVACPQVQFVSIEDIPETIVNKEKELEMQREDLLSKPENIREKIVEGRISKRLGELALLEQPFIKDDSVLVKDLVKQTVAALGENIKVRRFVRFTLGETSEKETTVPA

SEQ ID NO: 193342 - protein, 211 aa, Glycine max
  Clone ID: PAT_MRT3847_16612C.1.pep
SLVKQLREETGAGMMDCKKALAETGGDLEKAQEYLRKKGLSSADKKSSRLAAEGRIGSYIHDSRIGVLIEVNCETDFVGRGEKFKELVDDLAMQVVACPQVQFVSIEDIPETIVNKEKELEMQREDLLSKPENIREKIVEGRILKRLGELALLEQPFIKDDSVLVKDLVKQTVAALGENIKVRRFVRFTLGETSEKETTVTQESWDSKCID

SEQ ID NO: 193343 - protein, 38 aa, Glycine max
  Clone ID: PAT_MRT3847_16613C.1.pep
GSINRRARVNKRGSPSQGRIIHISSPVHTPCIACTNTW

SEQ ID NO: 193344 - protein, 160 aa, Glycine max
  Clone ID: PAT_MRT3847_16614C.1.pep
MGSSLWTCLILLSLASASFAANPRAPIDVPFGRNYVPTWAFDHIKYLNGGSEIQLHLDKYTGTGFQSKGSYLFGHFSMYIKLVAGDSAGTVTAFYLSSTNSEHDEIDFEFLGNRTGQPYILQTNVFTGGKGDREQRIYLWFDPTKEYHRYSILWNLYQIV

SEQ ID NO: 193345 - protein, 191 aa, Glycine max
  Clone ID: PAT_MRT3847_16615C.1.pep
MLDPATELVPPPSSPTISSISSSDLDTESTGSFFHDRSTTLGTLMGVNFPTIAFRVPSQHRNPNSAAEAASGARRTAAATKKKKKANSAATTAERRRRWWQLCRDGDARPASLGEFLEVERRFGDGAFYGTAAELEGMVAGNQQRNGSRVLFSDGRVLPPQADVDDGAPPPESLCNRFPVSLAGICSGGAA

SEQ ID NO: 193346 - protein, 53 aa, Glycine max
  Clone ID: PAT_MRT3847_16616C.1.pep
RNILLYPFFTFFPTPQHIAGGVLTHRGAYKTFLINLMMKKDWTNFEMMISVLL

SEQ ID NO: 193347 - protein, 131 aa, Glycine max
  unsure (1)..(131): unsure at all Xaa locations
  Clone ID: PAT_MRT3847_16617C.1.pep
MGSSLWTCLILLSLASASFAANPRTPIDVPFGRNYVPTWAFDHIKYLNGGSEIQLHLDKYTGTGFQSKGSYLFGHFSMYIKLVPGDSAGTVTAFYLSSTNSEHDEIDFEFLGNRTGQPYILQTXNVFTGWQ

SEQ ID NO: 193348 - protein, 196 aa, Glycine max
  Clone ID: PAT_MRT3847_16618C.1.pep
ITSNSEHDEIDFEFLGNRTGQPYILQTNVFTGGKGDREQRIYLWFDPTREYHRYSVLWNMYQIVFYVDDYPIRVFKNSNDLGVKFPFNQPMKIYNSLWNADDWATRGGLEKTDWSKAPFIASYKGFHIDGCEASVNAKFCDTQGKRWWDQPEFRDLDAAQWQKLSWVRQKYTIYNYCADRKRYPQVSPECARDRDI

SEQ ID NO: 193349 - protein, 67 aa, Glycine max
  Clone ID: PAT_MRT3847_16619C.1.pep
LCPERDDQQKPRGVEVLVIGKLIKAVHHLLITFIFYVPADTTNMYNIVVFFFPLSLNSLNWIRITVC

SEQ ID NO: 193350 - protein, 66 aa, Glycine max
  Clone ID: PAT_MRT3847_1661C.1.pep
PQSLFLRNPPATLKIFKKPYLPQGVRGIPLGMETPSFISPLPNIDRGKKVWKKCFFLFAPRNPDSI

SEQ ID NO: 193351 - protein, 65 aa, Glycine max
  Clone ID: PAT_MRT3847_16620C.1.pep
SSDSARAQSAPLFPFHPYIVTTTLNAEHNHPHSNNCHRQPQHAATLLRQQVNHLSLSPYIVVPTP

SEQ ID NO: 193352 - protein, 111 aa, Glycine max
  unsure (1)..(111): unsure at all Xaa locations
  Clone ID: PAT_MRT3847_16621C.1.pep
MKSSTLFALFLLSAIFTSYLPSATADVVLDXDGGVLQNGGQYSVLPVMRGSGGGLVVRATGNERCPLTVAHTRNELDKGIGTIMSYSLRVAVIAEGHPLSISFGCCPDMPA

SEQ ID NO: 193353 - protein, 81 aa, Glycine max
  Clone ID: PAT_MRT3847_16622C.1.pep
AREHRDHLPSYNHRPPTTQKEPFNVCNKENTHVEADRERYHHYPAMHTSELLPHRAHLRTRRARADTLDLRTRSILLQYIN

SEQ ID NO: 193354 - protein, 66 aa, Glycine max
  unsure (1)..(66): unsure at all Xaa locations
  Clone ID: PAT_MRT3847_16623C.1.pep
MGKEKTHIKIVVIGHVDSGKSTTNGHLIXKAXGIEKRLIERFEKEAAEMNKRSFKYAWVLDKLKAE

SEQ ID NO: 193355 - protein, 47 aa, Glycine max
  Clone ID: PAT_MRT3847_16624C.1.pep
CSIKYHTSIQTINLILNLISAYVPIVSHTGSRACPLALPSSQNPLPI

SEQ ID NO: 193356 - protein, 75 aa, Glycine max
  Clone ID: PAT_MRT3847_16625C.1.pep
ISLYGPGPYGITSPIPSFPLLSLLPNGPKNTFSPPPPPPPPTPPTPALPPPPPSPPPKHSERASISRDRSGNASL

SEQ ID NO: 193357 - protein, 74 aa, Glycine max
  unsure (1)..(74): unsure at all Xaa locations
  Clone ID: PAT_MRT3847_16626C.1.pep
LEPIRLEGERRWASSPRRGGTTVLGKVPVPKPINLPSQRLENXWLNPNVEIVPKGTLSWGSRSSSSTSNAWGSS

SEQ ID NO: 193358 - protein, 77 aa, Glycine max
  unsure (1)..(77): unsure at all Xaa locations
  Clone ID: PAT_MRT3847_16627C.1.pep
TVAIAATIISLFPATTIFRFSXPDXCSLAYEPSLAQRCHSCMSLLXLLFVQVPGLCLRTHSAMLCRSTLKKERAISX

SEQ ID NO: 193359 - protein, 102 aa, Glycine max
  unsure (1)..(102): unsure at all Xaa locations
  Clone ID: PAT_MRT3847_16628C.1.pep
PSXRXICXXSXXTXXSXLXVASHXXXXTXTXXHXXGXXXMXXXARISXXXXXTXXXXXXSXXLXXXXVXVXXXKYXXIXQXSTYEXXXTSSRIPSLRTRAXT

SEQ ID NO: 193360 - protein, 77 aa, Glycine max
  Clone ID: PAT_MRT3847_16629C.1.pep
LRESFIDILRCGRRGNRVCSFTFTNPSTFRRTTEDPAIYKGFSHKIEIRGRSKISMLTFLSIRRCYSYIVSPRPNSD

SEQ ID NO: 193361 - protein, 492 aa, Glycine max
  Clone ID: PAT_MRT3847_1662C.1.pep
MEQEMEKRNVVRIEENEEKWVHDASVDYKGRVPLRASTGVWKASLFVLRIKPADYVSIHPKFKTMQQWGMPSAKEADQFDDDHLEERKKKMSFFNWWNFAMCFALLLGATVVVYVQDFVSWGVATLIVTILMTLTVIAFCMGKRFYRYRRTEGNPLTPILQVLIAAMRKRNLSCRSNPALLHEVPESERSQGRLLSHTNRLRFLDKAAIIEEKRIEQKYNPWRLATVTRVEETKLVLNIIPIWLTSLTVGVTVGQGQTLFVKQAAATNLKISHSFKIPPASMASVTAVGTLIAVPIYDRITVPIMRKFTGNERGISILRRISIGMALSVIVMVVAALVEGKRLRMATHEVLTVGETRHETMSVVWLIPQYLILGVGDSFSLVGLQEYFYSQVPDSMRSLGMALYLSVLGVGFFLSSFLIIIVDRVTGKTGNSWIGKDINSSRLDRFYWMLAVINALVLCVFLLVIKRYTYKAVQRRAIETDCCKSDGVEMVA

SEQ ID NO: 193362 - protein, 80 aa, Glycine max
  unsure (1)..(80): unsure at all Xaa locations
  Clone ID: PAT_MRT3847_16630C.1.pep
PSVPLLVASSFKNKHNKKKEEGISAAXXPSXTECALSPFSPQQTTTTTSLCXXIFNNNYYNLTKQXCFSXFLXFLPWNWL

SEQ ID NO: 193363 - protein, 72 aa, Glycine max
  Clone ID: PAT_MRT3847_16631C.1.pep
QYLCDEVCATICSLIVHRFNIIFLRLCLKQRRTEGFNIEDQQIKHQTRKCENQETRYPLKKCSAYISLKALS

SEQ ID NO: 193364 - protein, 85 aa, Glycine max
  unsure (1)..(85): unsure at all Xaa locations
  Clone ID: PAT_MRT3847_16632C.1.pep
ENTGIALADAMASSFRGRARSDMXTSCSQDCEWWNPACRAAMTIAFNPNPCSDAWSLEFLXKRTGFQWDIIWVTGWTATPMQDVQ

SEQ ID NO: 193365 - protein, 191 aa, Glycine max
  Clone ID: PAT_MRT3847_16633C.1.pep
MYTSRKKIHKDKDAEPTEFEETVGQYLFDLENTNQDLKSDLKDLYINQAIQMDVAGNRKAVVIYVPFRLRKAFRKIHLRLVRELEKKFSGKDVVLIATRRIVRPPKKGSAVQRPRTRTLTAVHDAMLEDVVYPAEIVGKRARYRIDGSKIMKVFLDPKERNNTEYKLETFSGVYRKLTGKDVVFEYPISEA

SEQ ID NO: 193366 - protein, 40 aa, Glycine max
  Clone ID: PAT_MRT3847_16634C.1.pep
HPSIFFFLRKHWLASAFIFLATLQTSSLLGGKIFYIDNHC

SEQ ID NO: 193367 - protein, 104 aa, Glycine max
  Clone ID: PAT_MRT3847_16635C.1.pep
FSGKDVVFIAQGGSVRPPKKGSAVQRPRTRTLTAVHDAMLEDVVYPAEIVGKRVRYRIDGSKIMKVSTRPKERNNTEYKLETFSGVYRKLTGKDVVFEYPISEA

SEQ ID NO: 193368 - protein, 77 aa, Glycine max
  Clone ID: PAT_MRT3847_16636C.1.pep
ILITLLTKVHEAAFIGSEYSSANVHQSEVGICSRISLNFLLLQSKKGTNAVLWGWTSFKALGLAEPCRGHLLAPPLA

SEQ ID NO: 193369 - protein, 73 aa, Glycine max
  unsure (1)..(73): unsure at all Xaa locations
  Clone ID: PAT_MRT3847_16637C.1.pep
QXLKEDKDKSITFTEKKEVIKKFPGTFSIQNLATLENPPSRTDIKMGGGLVGCGTIRQILPRIQRFYLVVYPF

SEQ ID NO: 193370 - protein, 70 aa, Glycine max
  Clone ID: PAT_MRT3847_16638C.1.pep
LALCSPVPVHGASCHMIFLNVESAFPGHSLPHNGGVFGFLRMPQHPRAALALFLLVSVASPRLRFFRASI

SEQ ID NO: 193371 - protein, 71 aa, Glycine max
  Clone ID: PAT_MRT3847_16639C.1.pep
KEKGKGMQTSYDVECVVEQTAKLVRGAIKVCAGNEHSIRSEHPQKQAQPCTPMQHHKKPPSCPLPPPPPRA

SEQ ID NO: 193372 - protein, 54 aa, Glycine max
  Clone ID: PAT_MRT3847_1663C.1.pep
QVMSQQMELIEEMNSRQEQLDERLRAGPGRPQSPLIGRPILYKAYRGAGADSYQ

SEQ ID NO: 193373 - protein, 82 aa, Glycine max
  Clone ID: PAT_MRT3847_16640C.1.pep
ASGIPAAARGVSSFVVEALVGPVGPGLVELGVMEVKHTGGGASSSSIRGVVVVFLRLLVLAHAGLFAPPSGRALSARSKPNA

SEQ ID NO: 193374 - protein, 65 aa, Glycine max
  Clone ID: PAT_MRT3847_16641C.1.pep
NSTLTRKSLVESKEHVMFQIPILGLFLASVFFSLLAITSLNSYKTKVFSYFVGLALWIKPCYCVL

SEQ ID NO: 193375 - protein, 46 aa, Glycine max
  Clone ID: PAT_MRT3847_16642C.1.pep
NVLIHNNEFITIYLLAIHYIECLLTRTGLYITLMHTWTCKSALYCY

SEQ ID NO: 193376 - protein, 52 aa, Glycine max
  Clone ID: PAT_MRT3847_16643C.1.pep
RFSRAPLPAYWVPKSVAFGTWLWKVTAWACKPVIRIRAKWCDPGKFNRLGAC

SEQ ID NO: 193377 - protein, 360 aa, Glycine max
  unsure (1)..(360): unsure at all Xaa locations
  Clone ID: PAT_MRT3847_16644C.1.pep
MPTSIMAPFSTSPHFTAFTFLILFLKTQAFDPLSFFSFTDFEKDPNFKSSVGLYGNAKVVNNGSEVLLSGNGGGRVMYKKPFKLVHGEARELVSFSTYFGFSMSLDSEKNGLAFVMVPSGIEGEVFGNSSYGFSFGLKEREFKVIGVQFSAYGRNGGSGSCIVSINVGSSVPVKTIKXSSVIMGLKSEGKLHAWIDYEASSKRLEVRLNQYGQSRPVDPLLWHSMDLSNVWGTEEMFAGFSTVKENNTSQTCFLYSWSFIVRHFPHWMHFEPLNPKVLAKKTETPAVKYYRSFCLLRVLAAMIFGAGCGALTAFIVLYLWTIFGNKRPVVPEEYAMQPVDFDYKKVNIVVDKTTIIDAKE

SEQ ID NO: 193378 - protein, 246 aa, Glycine max
  unsure (1)..(246): unsure at all Xaa locations
  Clone ID: PAT_MRT3847_16645C.1.pep
MASLLRFNGVSLFPLPSQPTRDPILPKPSRLVTVRAEVKETSAPAAATSSDEKIREILRNRDYDKKFGFSVEIESLTIPKGLSKETIGLISSLKEEPHWMLEFRLKALDKFLSMKEPTWSDNTYPPIDLQNICYYSAPKNKPSLQSLDDADPELLRYFEKLGVPLNEQKRLANVAVDAVLDSVSIATTHRKTLEKAXVIFCSISEAIKEYPDLVKKYLGKVVPSDDNYYAALNAAVFXDGSFCYIP

SEQ ID NO: 193379 - protein, 176 aa, Glycine max
  Clone ID: PAT_MRT3847_16646C.1.pep
MLKQKLFIGRNRRKKSSEGDRQLEYNIRISTVATTPSPKSHISSSGIKNEGVVPSHKTSTIEKGIKRKAVAKRLESLRIPTGVEYPAIASLREWLPASGIYSPESYVTPKFGSYSIMDIRNANESSEDSVFSPELVSAFEQCMQKLEADEENILKQIVENVEEESEASSPKKEHHA

SEQ ID NO: 193380 - protein, 64 aa, Glycine max
  unsure (1)..(64): unsure at all Xaa locations
  Clone ID: PAT_MRT3847_16647C.1.pep
RVRTKTVKKFSLQVIERHYSRMTLDFHTNKKLFEEVAIIPSKXLRNKSRGVXTHLIKHLSEGPV

SEQ ID NO: 193381 - protein, 70 aa, Glycine max
  Clone ID: PAT_MRT3847_16648C.1.pep
TRTLPHGVCSSSISGNTRLMKMVIGTAEHLCLLIVYTHDHPFESLPFLMFISAYHPFLDFLCLPLVLSAQ

SEQ ID NO: 193382 - protein, 111 aa, Glycine max
  Clone ID: PAT_MRT3847_16649C.1.pep
AKTLQQVAQETLWIEITRASVRKMKDLILFFSTTIIPQKCHAYKILPIRMNTIYGPRTPEVKYARWMLAVEEHNMFRFETIPEKCVEATDDYMHDQQYRSDSKTVYQHAYF

SEQ ID NO: 193383 - protein, 521 aa, Glycine max
  Clone ID: PAT_MRT3847_1664C.1.pep
MEKRNGGRIEENKEKWVHDASVDYKGRVPLRASTASNLISYLTKVMHEDLSTASKNVNYWSGTTTLMPLVGGFVADAYTVVFLLALYCISFGTGGYKPCLESFGADQFDDDHLEERKKKMSFFNWWSFALCFALLLGATVVVYVQDFVSWGVATLILAILMALTVIAFCVGKPFYRYRRAEGNPLTPILQVLIAAIRKRNLTCPSNPALLHEVPESERSQGRLLSHTNRLRFLDKAAIIEEKHFEQKYNPWRLATVTRVEETKLVLNIIPIWLTSLTVGVCVGQGQTLFVKQAAATNLKISDSFKIPPASMASVAAVGTLIAVPIYDRVVVPILRKVTGNERGISILRRISIGMTLSVLLMVVAALVESKKLRMAAHEVLTVGETRHETMSVMWLIPQYLILGIGDSFSLVGLQEYFYDQVPDSMRSIGMALYLSVLGVGFFLCSFLIIIVEHITGKTGNSWIGKDINSSRLDKFYWMLAVINALVLCVFLLVSKRYTYKAVQRRAMETDCCKSDEVDMVA

SEQ ID NO: 193384 - protein, 153 aa, Glycine max
  unsure (1)..(153): unsure at all Xaa locations
  Clone ID: PAT_MRT3847_16650C.1.pep
KTPKGPPAFPKKGAPPPIKPQKPRNRGGPPRGTPPPTARGKKKHPQHRTLTGETPNKKFPPLKPFFKGGPXRPPKKFSPGGKEPHGPKRTFPFSFPPQHSKEQKPPGXPGGKFGGEGRENPPPPGGGGDHAPRPLNPGKTPPGTTGGGWGLAP

SEQ ID NO: 193385 - protein, 38 aa, Glycine max
  Clone ID: PAT_MRT3847_16651C.1.pep
RGFSFPPPPPPPPPLPPPPPPAPQRRRTSYSDDGKPSW

SEQ ID NO: 193386 - protein, 67 aa, Glycine max
  unsure (1)..(67): unsure at all Xaa locations
  Clone ID: PAT_MRT3847_16652C.1.pep
XXFYFFFFSXXKKKTLGGLRKRFYMARKRKSPDFKWKTWPRKNNPWGGKTFPASKGQKGGTWVSRLR

SEQ ID NO: 193387 - protein, 49 aa, Glycine max
  unsure (1)..(49): unsure at all Xaa locations
  Clone ID: PAT_MRT3847_16653C.1.pep
LXFSLSFLHVYVTNKFXQKLIKYISLLLFIYISIIPIFFLITLIFLSSL

SEQ ID NO: 193388 - protein, 211 aa, Glycine max
  Clone ID: PAT_MRT3847_16654C.1.pep
MDEDSDRPIRIMNFVSEDQLVEAKKTRGERVEDGTAQRDRPLYEILKENKDKKDAEFNERFKHRPPKALDEDETEFLDTYETTRREYERQVADEEAQQIRSFQAAVEAQSNIVHEVKEKTPLPVVQEQKSAGKKNPASRPLGMIIKVKPQAKKAKVDQGNAEEISKAGNTPVNDKSKSLEPVQALNGEADKSQVVALTGLVSYSDESDDDL

SEQ ID NO: 193389 - protein, 254 aa, Glycine max
  unsure (1)..(254): unsure at all Xaa locations
  Clone ID: PAT_MRT3847_16655C.1.pep
GADKSKRYFYYLNRFLSQKLSKTEFDKLCFRVLGRENLPLHNHFIKSILKNACQAKTPPPIHPPDPLKSGEHASDMSPGREDGHEHSVASFQNQSQKAPVWSNGFLPASPKVRSGVRERKLRDRPSPLGPNGKVDSVSHQIMGTEDCGSKVDMENGIRSPCDYQRPIQHLQAVAELPENERGDVVQKPAEKPRIHGKGPAEMSIVEDGEEVDQLSRLGFSRSPLIAPLGIPYCSASVGGXRKTLPVSSAGDFDS

SEQ ID NO: 193390 - protein, 71 aa, Glycine max
  Clone ID: PAT_MRT3847_16656C.1.pep
LDSPGKHQGIDQILGFGMWKQTPMLTTGRYHYPNHQAQNLLVPKAGWKSSFFFPQTFFAPKLFYLVKGGAF

SEQ ID NO: 193391 - protein, 63 aa, Glycine max
  Clone ID: PAT_MRT3847_16657C.1.pep
DNFEPLGIRGIGANALFSNMCRSFVMSNQFGGAKKKSNFKVFFSSNYRTFGDRKHVRKKKLYI

SEQ ID NO: 193392 - protein, 171 aa, Glycine max
  Clone ID: PAT_MRT3847_16658C.1.pep
MASSMTENWKNAETVYEFEATDLDGAPVSMDKYKDKVLIVVNVATYCGLTRANYAQLNDIYNEYKDRGLEIAGFPCNQFGNQEPGCSVDIKEFLLKNKVTWDVYDKVDVNGKDAHPLWKWLQHKKGGFITNGIKWNFTKFLIDRKGNPVKRYAPTDEPKTFVTDIEAELAK

SEQ ID NO: 193393 - protein, 452 aa, Glycine max
  Clone ID: PAT_MRT3847_16659C.1.pep
MSNRVCKFYARGACLKGDQCDFAHEKKDDICSYYKKGSCAYGSRCRYKHVKASQASSSANGRHSPVLDPVVNHTIKGTSSWVPKAVKSSSSDKRARSSQQKNLPSLENDVGQSSTSSVIPSEHLFCAFAAANCPLEDKCSRIHGNQCLYCRKFCLHPTDRKEKENHLRTCEKKEKYLQALKDSQEVECNVCLERVLSKPKPADCRFGLLPECDHAFCLSCIRNWRNSAPTSGMDISNAGTANTVRTCPVCRKLSYFVIPSGIWYSTKEEKQEIIDNYKANCKLIDCKHFNFGNGNCPFGASCFYKHTVKPGSYTWIHHRPPPQRRQNHFDVHDMLNMLQDVDLTSAEYFSIMRDSDLYDDMDPFEMMVSDRLAGDSGPCLGPFDSDEEDLDIFQMAALSEVLASGVDDFGPEDFGDEDFNPMEAALLSMMMHSNMEDEDDDDDEEEYSDEDY

SEQ ID NO: 193394 - protein, 1096 aa, Glycine max
  unsure (1)..(1096): unsure at all Xaa locations
  Clone ID: PAT_MRT3847_1665C.1.pep
RNGGRIEENKEKWVHDASVDYKGRVPLRASTGVWKASLFVLTIEFSERVSYFGIASNLISYLTKVMHEDLSTASKNVNYWSGTTTLMPLVGGFVADAYTGRFYMVLFSSFVYLMGLSLLTMSQFIPSLMPCNTKMCQQPRKVHKVVFLLALYCISFGTGGYKPCLESFGADQFDDDHLEERKKKMSFFNWWSFALCFALLLGATVVVYVQDFVSWGVATLILAILMALTVIAFCVGKPFYRYRRAEGNPLTPILQVLIAAIRKRNLTCPSNPALLHEVPESERSQGFLDKAAIIEEKHFEQKYNPWRLATVTRVEETKLVLNIIPIWLTSLTVGVCVGQGQTLFVKQAAATNLKISDSFKIPPASMASVAAVGTLIAVPIYDRVVVPILRKVTGNERGISILRRISIGMTLSVLLMVVAALVEAKRLRMAAHEVLTVGETRHETMSVMWLIPQYLILGIGDSFSLVGLQEYFYDQVPDSMRSIGMALYLSVLGVGFFLCSFLIIIVEHVTGKTGNSWIGKDINSSRLDKFYWMLAVKRNVVRIEENEEKWVHDASVDYKGRVPLRASTGVWKASLFVLTIELSERVSYFGIATNLISYLTKVMHEDLQTAAKSVNYWSGTTTLMPLVGGFVADAYTGRFYMILFSSFVYLMGLSLLTMSQFIPSLKPCNNGVCHRPRKVHEVVFFLALYCISFGTGGYKPCLESFGADQFDDDHLEERKKKMSFFNWWNFAMCFALLLGATVVVYVQDFVSWGVATLIVTILMTLTVIAFCMGKRFYRYRRTEGNPLTPILQVLIAAMRKRNLSSKSTCVLNXLMQINSMNRFLDKAAIIEEKRIEQKYNPWRLATVTRVEETKLVLNIIPIWLTSLTVGVTVGQGQTLFVKQAAATNLKISHSFKIPPASMASVTAVGTLIAVPIYDRITVPIMRKFTGNERGISILRRISIGMALSVIVMVVAALVEGKRLRMATHEVLTVGETRHETMSVVWLIPQYLILGVGDSFSLVGLQEYFYSQVPDSMRSLGMALYLSVLGVGFFLSSFLIIIVDRVTGKTGNSWIGKDINSSRLDRFYWMLAVINALVLCVFLLVIKRYTYKTVQRR

SEQ ID NO: 193395 - protein, 135 aa, Glycine max
  unsure (1)..(135): unsure at all Xaa locations
  Clone ID: PAT_MRT3847_16660C.1.pep
LHRIYVPLTIENTTGLYHAIFKPHXDQLFSPNHAYXFPPIFNHQQTPNILITTCLLHSTMLPSFISDLLSLIPNAHYFNISTYYLKNIIEYANNNYFTSIIIVHTNLMXPYSLLIISLPDCPTPHFKLSKLFFHN

SEQ ID NO: 193396 - protein, 80 aa, Glycine max
  Clone ID: PAT_MRT3847_16661C.1.pep
LNLTYNYGRKDPMLQGCLRIHCEGSQQSAVEPQCLWSWSYTFNLSLFCDQVEEGYWLLASQRHSDQGGLYHCCRGDVLRS

SEQ ID NO: 193397 - protein, 53 aa, Glycine max
  Clone ID: PAT_MRT3847_16662C.1.pep
NHFWFLYRETPIYKRLFFKEKTRLGNIILGGTHYLEVISSSVDVVFKNFFGSA

SEQ ID NO: 193398 - protein, 44 aa, Glycine max
  Clone ID: PAT_MRT3847_16663C.1.pep
IDIVLSVFCNDLSLLIVVPKDEGLYKLLRYISIKTIESYTLEIL

SEQ ID NO: 193399 - protein, 62 aa, Glycine max
  Clone ID: PAT_MRT3847_16664C.1.pep
AFACADAYGCSLGKHCGRRGKTFASWMRCGGAGFICKTLLTAYCVVRGVMYSFMCDSAYTFL

SEQ ID NO: 193400 - protein, 70 aa, Glycine max
  Clone ID: PAT_MRT3847_16665C.1.pep
ALRCWMMPLAVLFTLGLARESHARYKYFWHAVRPTTPIPRSLGEHLKPGPAGVEIDDHPVQIEETQNPRA

SEQ ID NO: 193401 - protein, 76 aa, Glycine max
  unsure (1)..(76): unsure at all Xaa locations
  Clone ID: PAT_MRT3847_16666C.1.pep
ESDSYRXQACHARCNLLKVDREECVEGEIPXPRPRPQHPXRDPQQRGXRSKSQXQQPRPLPFPRPQPRHAEEHVLR

SEQ ID NO: 193402 - protein, 33 aa, Glycine max
  Clone ID: PAT_MRT3847_16667C.1.pep
YTPYSRGHRRCDWLSDPVLSMSIEPPCRALRTL

SEQ ID NO: 193403 - protein, 72 aa, Glycine max
  unsure (1)..(72): unsure at all Xaa locations
  Clone ID: PAT_MRT3847_16668C.1.pep
KNSFIQQNNFPTRSLYFKITPPPKTKXLIKKSLYYPTQYSTTTPTFHHHSKLLIFPYQSPYLTITHPKIKIF

SEQ ID NO: 193404 - protein, 229 aa, Glycine max
  Clone ID: PAT_MRT3847_16669C.1.pep
MEPPLINDSTFSSANPSLSEIWPSHFPTDHTPSNKRHLSPSTDCGSNKHIKSSGSGSQDQNGALKAGEVDATSVAGNKLPEQTAKPSSSEQPPKQDYIHVRARRGQATDSHSLAERARREKISERMKILQDIVPGCNKVIGKALVLDEIINYIQSLQHQVEFLSMKLEAVNSRLSMSPTIECFPSKEVGTQPFDLAGIIFGSQPARGYAQGSQPGWLHMQIAGGFEKAT

SEQ ID NO: 193405 - protein, 58 aa, Glycine max
  Clone ID: PAT_MRT3847_1666C.1.pep
TNNATGNLSPSLWPAHRVIFSALRSRTQQSRNSLIDSWNQVATAFDAGHKVRQPMLAV

SEQ ID NO: 193406 - protein, 76 aa, Glycine max
  Clone ID: PAT_MRT3847_16670C.1.pep
GRATPYIASLAPLRARVLQKTKSHVVLDQGALPRPRIGVTQSGQALAGAHATPNAAVQRTPTTGYGSKTIIEGTRA

SEQ ID NO: 193407 - protein, 235 aa, Glycine max
  Clone ID: PAT_MRT3847_16671C.1.pep
MGDSQYSFSLTTFSPSGKLVQIEHALTAVGSGQTSLGIKAANGVVIATEKKLPSILVDETSVQKIQLLTPNIGVVYSGMGPDFRVLVRKSRKQAEQYHRLYKEPIPVNQLVREVAAVMQEFTQSGGVRPFGVSLLVAGFDDNGPQLYQVDPSGSYFSWKASAMGKNVSNAKTFLEKRYTDDMELDDSVHTAILTLKEGFEGQISGKNIEIGIIGADKNFRVLTPAEIDDYLAEVE

SEQ ID NO: 193408 - protein, 235 aa, Glycine max
  Clone ID: PAT_MRT3847_16672C.1.pep
MGDSQYSFSLTTFSPSGKLVQIEHALTAVGSGQTSLGIKAANGVVIATEKKLPSILVDEASVQKIQLLTPNIGVVYSGMGPDFRVLVRKSRKQAEQYHRLYKEPIPVTQLVREVAAVMQEFTQSGGVRPFGVSLLVAGFDDNGPQLYQVDPSGSYFSWKASAMGKNVSNAKTFLEKRYTDDMELDDAVHTAMLTLKEGFEGQISGKNIEIGIIGADKKFRVLTPAEIDDYLAEVE

SEQ ID NO: 193409 - protein, 235 aa, Glycine max
  Clone ID: PAT_MRT3847_16673C.1.pep
MGDSQYSFSLTTFSPSGKLVQIEHALTAVGSGQTSLGIKAANGVVIATEKKLPSILVDETSVQKIQLLTPNIGVVYSGMGPDFRVLVRKSRKQAEQYHRLYKEPIPVTQLVREVAAVMQEFTQSGGVRPFGVSLLVAGFDDNGPQLYQVDPSGSYFSWKASAMGKNVSNAKTFLEKRYTDDMELDDAVHTSILTLKEGFEGQISGKNIEIGIIGADKKFRVLTPAEIDDYLAEVE

SEQ ID NO: 193410 - protein, 87 aa, Glycine max
  Clone ID: PAT_MRT3847_16674C.1.pep
GPEFPGSTHASDFFSSDKILVHPSCAYSLRLRLNLKLNSENRTCATVHFQICGFGLACVDLVSVNRLPFPPSPLRRWKREKKSSRNI

SEQ ID NO: 193411 - protein, 235 aa, Glycine max
  Clone ID: PAT_MRT3847_16675C.1.pep
MGDSQYSFSLTTFSPSGKLVQIEHALTAVGSGQTSLGIKAANGVVIATEKKLPSILVDEASVQKIQLLTPNIGVVYSGMGPDFRVLVRKSRKQAEQYHRLYKEPIPVTQLVREVAAVMQEFTQSGGVRPFGVSLLVAGFDDNGPQLYQVDPSGSYFSWKASAMGKNVSNAKTFLEKRYTDDMELDDAVHTAILTLKEGFEGQISGKNIEIGIIGADKKFRVLTPAEIDDYLAEVE

SEQ ID NO: 193412 - protein, 91 aa, Glycine max
  Clone ID: PAT_MRT3847_16676C.1.pep
KNHILLLYRIIIISSPLHYQNCNLLTHYYILSSSLTFYLVLTTFNLFIMSLVLYITSLMHESYFVPHYFCPFFFLFLYFTLLKGLIISLYF

SEQ ID NO: 193413 - protein, 77 aa, Glycine max
  Clone ID: PAT_MRT3847_16677C.1.pep
KSEGFERPTKWHKGVTVNSRLKSRDVQQQSMSVLPCRCNRSSDSYRLDEHNNSRRRILAIESKCYSSSDRMVLDISS

SEQ ID NO: 193414 - protein, 54 aa, Glycine max
  Clone ID: PAT_MRT3847_16678C.1.pep
QSQAVVSRSDGALTTVTSRTWKQILNPYLESKHASSLPETTSSHELRPSHVRTA

SEQ ID NO: 193415 - protein, 56 aa, Glycine max
  Clone ID: PAT_MRT3847_16679C.1.pep
TDDTGSIVRHEGGALEALWLTSAAIGANDSIPLFPKLLEVALLAYTVWFTSRDLLF

SEQ ID NO: 193416 - protein, 70 aa, Glycine max
  Clone ID: PAT_MRT3847_1667C.1.pep
QFPVYQVKKKLENKEKAYSRQCLQVGQKTLVSFKNCMPKLFRGKGDFFFECSRKARELRPISQNLGQRFS

SEQ ID NO: 193417 - protein, 92 aa, Glycine max
  unsure (1)..(92): unsure at all Xaa locations
  Clone ID: PAT_MRT3847_16680C.1.pep
XDVXXXXCALWYXXVSAXXCGDGXAHSLXXXLIFXXXNXSCXCXFXXSQIDTRYSXXMMXRXFXXXNCKSXXVSXSDXLXSSRIPSLRTRAC

SEQ ID NO: 193418 - protein, 173 aa, Glycine max
  unsure (1)..(173): unsure at all Xaa locations
  Clone ID: PAT_MRT3847_16681C.1.pep
PVQDFEALFSRRDSPDWVEKAINETKKKIFDLVGYSHEGDNYPKALECLVVLRKGCILEQATISHIPAHKRCLGFSXEPKQFNDFLKHLCNFCQEKNLHSFCKYFASKELTLISKTEAVDIEVTDDEATSFLMTKLLIDSFTTCAEISESFIFFDSVMSMNNCFGKKKYCNSL

SEQ ID NO: 193419 - protein, 138 aa, Glycine max
  Clone ID: PAT_MRT3847_16682C.1.pep
MGKKTKKPGKGKEKTERKTARAEEKKARRETKKLSPEDDIDAILLSIQKEEAKKKEVHVDDNVPAPSPRSNCSLTVNPLKETELILYGGEFYNGNKTFVYGDLYRYDVEKLEWKLVSSPNSPPPRSAHQAVAWKNYVY

SEQ ID NO: 193420 - protein, 149 aa, Glycine max
  Clone ID: PAT_MRT3847_16683C.1.pep
VVFCCYLPVLLRLLLRSHLFVSQGVGPSVSCSWLRCCVHLAFLFCGCFPAPLAYLVRVALLSDQCFFGMACALLDFPTFAVSAPVFCSLYFGGSRVVVFRGGLSWSSSSFSFCCFSGFLAWVLCGSPPSAPVSSLVCVVRGVILTQRVG

SEQ ID NO: 193421 - protein, 111 aa, Glycine max
  Clone ID: PAT_MRT3847_16684C.1.pep
HYFEDNVKEILNFRGFNSEIGLQILVDKSLITISYGKIYMHDLLRDLGKCIVREKSPKEPRKWSRLWDCEDLYKFMSSNKEAKNLEAIVVEDEPGMFSETTMRFDALSKMK

SEQ ID NO: 193422 - protein, 169 aa, Glycine max
  Clone ID: PAT_MRT3847_16685C.1.pep
SKAEDFAISSKIDAIASSGTFTDNSVVKTSSTLQAGLKKSLVSRPSRHLGPPPGFSHVPPKQGSPTVSDSISGNPIMDDYSWLDGYQLPASTNDLGPDGPLTYSQSNPHQIGLSGTASFPFPGKQIPSTLQVEKQNGWRDFQTLELLKAHHNQQVQSQLAPNGNQHFTP

SEQ ID NO: 193423 - protein, 148 aa, Glycine max
  Clone ID: PAT_MRT3847_16686C.1.pep
PRVRLRVRKKKKKKKKKKKKKKKKKKKKKKKKKKKKKKKKKKKKKKKKKKGGPFKRTKIYFRGLARENFFNRATKIKLMGRVLKTWKWEKPWVTQIKSLGKKSPFPKWEKKKKGPNESPFQKFANLKWKMKPPFNGPIKRGGWGVTPQ

SEQ ID NO: 193424 - protein, 53 aa, Glycine max
  Clone ID: PAT_MRT3847_16687C.1.pep
APVVPGDVLQQHVKSADHEKCTVTVLSYSAYLQLDSICPQVDPEWPSSHTKIN

SEQ ID NO: 193425 - protein, 63 aa, Glycine max
  Clone ID: PAT_MRT3847_16688C.1.pep
LGVIGICRYTFCIYDYLHYKPYLGKVMRFVLLTLAYKTMRGMDELLCVQRLSRDFYIEENKNL

SEQ ID NO: 193426 - protein, 64 aa, Glycine max
  Clone ID: PAT_MRT3847_16689C.1.pep
ITSSTLSIRFFNNITRFLYGIHLRDSIHHSFASLISTRIHVSAASNLITTPIILQLLPLNIWNI

SEQ ID NO: 193427 - protein, 156 aa, Glycine max
  unsure (1)..(156): unsure at all Xaa locations
  Clone ID: PAT_MRT3847_1668C.1.pep
ENQVHVGLPLMPKAVVTLLLNRNSWSGEIPNHFSXLSHLQHLDLSSNHLSKMPPSSLISLPNISYLNIASNELSGSLPQKLNCGSKLWFVDISSNKLNGGLPSCLANTSGKRVDKYGGNCLAADSQPQRRGTYCKVSSSGRKNFWRWKIAAAVAMI

SEQ ID NO: 193428 - protein, 65 aa, Glycine max
  Clone ID: PAT_MRT3847_16690C.1.pep
GCTLNLLHVFLLRHGNENWARLIDKNKEVIGRADTCYGYNTDGGNTHMHAGILVMHLNSRKVTSI

SEQ ID NO: 193429 - protein, 51 aa, Glycine max
  Clone ID: PAT_MRT3847_16691C.1.pep
GTKGRPKGRVPKFISTLKIKKKKFLLVPKGLIKPSNFALKGVPSGKIDLIG

SEQ ID NO: 193430 - protein, 74 aa, Glycine max
  Clone ID: PAT_MRT3847_16692C.1.pep
DENRKENIIEPNTEKKKDYLLKINQSKHTLIIKRITNHITSAFFELHNADNVFYNISTQNQLGRRRSCDGVRGG

SEQ ID NO: 193431 - protein, 164 aa, Glycine max
  Clone ID: PAT_MRT3847_16693C.1.pep
ESSTQFRVGKASDLLVLERKHSQHSTEILANPWWTGHQVGLGVGVDPAATNSPSSNLNKRHMDLSINERSLVRERQEEEEEEEDERDNGDEPKEGAVEAGTRRPRGRPPGSKNKPKPPIFVTRDSPNSLRSHVMEVAGGADVAESVGPFARRRQRAVCVLTGAV

SEQ ID NO: 193432 - protein, 71 aa, Glycine max
  unsure (1)..(71): unsure at all Xaa locations
  Clone ID: PAT_MRT3847_16694C.1.pep
PVGTERSTPVHRLREMIKETVPDPRKNILXTLDKEXNKATAILLQLRLIHKKEEIPYANRQNLTVGAFGDF

SEQ ID NO: 193433 - protein, 70 aa, Glycine max
  Clone ID: PAT_MRT3847_16695C.1.pep
KHGLCFAKTNFESSQFLDYTFLDFQGAIMCQKLLTNNPSPDPILLVESQPKMRCFFSKLLCKFSPPSRRD

SEQ ID NO: 193434 - protein, 58 aa, Glycine max
  Clone ID: PAT_MRT3847_16696C.1.pep
ILLNIGSWQKTAVNQRVRPTPYISQHICEKSRVRPMSITYRAASVKRVLLGRYQHLSL

SEQ ID NO: 193435 - protein, 55 aa, Glycine max
  Clone ID: PAT_MRT3847_16697C.1.pep
LAPVVGVGIAGLLGQRGAVRCVVETRTRVKNTHPLMDRVSPKTNGVENSPRAEFR

SEQ ID NO: 193436 - protein, 150 aa, Glycine max
  Clone ID: PAT_MRT3847_16698C.1.pep
SPPYNLFPFLIELSPKPSPLSEVNSSPFFLQNTIIKTFTLPIAQKLLLQFLSSFTENSPELLFFSISPQKTLPLEGRQLLPFIFGGSFFLLGPQNSIFTCCNIHSAPSFSSFYFLGSVCFVLVSIASVSSLPSHTSSREPLPDVLSRACM

SEQ ID NO: 193437 - protein, 322 aa, Glycine max
  Clone ID: PAT_MRT3847_16699C.1.pep
MASHHLQYLVLAIATLLTISSHAQLTPDFYNNVCPQALPIIKSVVQRAIFRERRIGASLLRLHFHDCFVNGCDGSILLDDTPNFTGEKTALPNINSIRGLEVVDEIKAAVDRACKRPVVSCADILAVAARDSVSILGGSLYWYKVLLGRRDSRTASKDAANSNLPPPFFSLSQLLSSFQSHGLDLKDLVALSGAHTIGFAQCATFRNRIYNDTNIDPNFASSLQGTCPRSGGDSNLAPLDRFSPSRVDTSYYTSLLSKKGLLHSDQELFKGDGGESDTLVKLYSRNPFAFARDFKASMIKMGNMKPLIGNAGEIRVNCRSVN

SEQ ID NO: 193438 - protein, 407 aa, Glycine max
  Clone ID: PAT_MRT3847_1669C.1.pep
CKNTFSSVATTVTAKRYTFLAAALIEISPQKMPVAEIQLHNTLLKEVLGNMCHSSAQVREALGVTLSILCSNIRLYHSSRHDNAQDERNDDVDSLMKDESWVPFLTERAAEAVVNIQIATQSDKVVNPVDTNSQNGHLDGDSQDCIKWMETLLYFIISSLKSGRSSYLLDVLVGLLYPVICLQETSNKDLSTLAKVAFELLKWMIVWEPHLQKAVSVILSAANDSNWRTRSATLTYLRTFMYRHTFTVSSSKKQEIWRTVEKLLVDNQIEVREHAAAVLAGLMKGGDEDLARDFRDRAYREANIVQKRRKSRNASSGSSIASVHGAVLALVASVLSAPYDMPSWLPDHVTLLARFSGEPSPVKSTVTKAVAEFRRTHADTWNVQKEFFTEEQLEILADTSSSSSYFA

SEQ ID NO: 193439 - protein, 99 aa, Glycine max
  Clone ID: PAT_MRT3847_166C.1.pep
TLLEDDTKRADCGMELEAGRQQRKRAHLKKKALKNKSSSMTFYENGGTDGVTRFVKAKKNRRKDSRERQDDALGRKSTEGRHKGNLVREQGSHGRVAPP

SEQ ID NO: 193440 - protein, 335 aa, Glycine max
  Clone ID: PAT_MRT3847_16700C.1.pep
MASHHLQYLVLAIATLLTISSHAQLTPDFYNNVCPQALPIIKSVVQRAIFRERRIGASLLRLHFHDCFVNFKLRTRQNDKRGKGCDGSILLDDTPNFTGEKTALPNINSIRGLEVVDEIKAAVDRACKRPVVSCADILAVAARDSVSILGGSLYWYKVLLGRRDSRTASKDAANSNLPPPFFSLSQLLSSFQSHGLDLKDLVALSGAHTIGFAQCATFRNRIYNDTNIDPNFASSLQGTCPRSGGDSNLAPLDRFSPSRVDTSYYTSLLSKKGLLHSDQELFKGDGGESDTLVKLYSRNPFAFARDFKASMIKMGNMKPLIGNAGEIRVNCRSVN

SEQ ID NO: 193441 - protein, 92 aa, Glycine max
  Clone ID: PAT_MRT3847_16701C.1.pep
LVIGKTTDIMGPTMVAEARTSESQSHRPTGTCLSDTCCGSDCRTEPLTGRHWGGLRRRCFCSQTLINCTKVNNRCFDSKRKESMHLSTQGSQ

SEQ ID NO: 193442 - protein, 84 aa, Glycine max
  Clone ID: PAT_MRT3847_16702C.1.pep
NGFPESKPQRPKRKERKAGGASCIMQTGPVGRKSPNPCESIVFFKKGVGSGKKAYLFLGYFGWLLFFPFLLVGACPLYNSFLFM

SEQ ID NO: 193443 - protein, 148 aa, Glycine max
  unsure (1)..(148): unsure at all Xaa locations
  Clone ID: PAT_MRT3847_16703C.1.pep
MLGVLVARETGGEPELEWGALKKPINYSLIWSADSPHDGCGYFWLPNPPLGYKAMGIVVTNKPDEPEVEEVRCVRADLTETCETCDLLLSMSSKFSRISFKVWNTRPCKRGMWGRGVSVGTIFCSTYSNSEKIXNIACLKNLTSPYMP

SEQ ID NO: 193444 - protein, 105 aa, Glycine max
  Clone ID: PAT_MRT3847_16704C.1.pep
INLHRRQVAVSDTSCPLCRNEVEDAGHLFFHCRKVTPIWWESSAWVSQSSAFPKDPKMHFLQHVLTMVDGLRAKRWKWWWIAVTWTIWKQRNKMIFSNECSIQWQ

SEQ ID NO: 193445 - protein, 77 aa, Glycine max
  Clone ID: PAT_MRT3847_16705C.1.pep
ATHPDTLKAGLAEFIATLIFVFACSCSGISYNKLTYNGAATPAGLISASIAHAFALFVAISVGTNICVGHVIPAFTL

SEQ ID NO: 193446 - protein, 85 aa, Glycine max
  Clone ID: PAT_MRT3847_16706C.1.pep
MLPTRPVEKKMEKGSGEGEENKEKKEGGEGEAKAEEASTVLEVKKSEYYYNPPPRYGGMEFYAYSGPAYPPQIFSDENPNACSVM

SEQ ID NO: 193447 - protein, 101 aa, Glycine max
  unsure (1)..(101): unsure at all Xaa locations
  Clone ID: PAT_MRT3847_16707C.1.pep
FXXSXXXXYTXXLXLXLLXXVFXCXXXIIXXXGFSXXNXYVFSAXISXXLFXFXQXXSXFXXXXXFXYXLAXXXXXXXPXXQECXLXXXSSXIXXXXXLXX

SEQ ID NO: 193448 - protein, 68 aa, Glycine max
  Clone ID: PAT_MRT3847_16708C.1.pep
ICNSIPNDMLIRDSYEKLLRHATSPTMLLQSYKNYVHLCVYGDDISINVHEYVQPYFTGPIFKSFLAG

SEQ ID NO: 193449 - protein, 36 aa, Glycine max
  Clone ID: PAT_MRT3847_16709C.1.pep
TSDLMSCKCITVVPRSLKVHLYESSCISTHGYEKEK

SEQ ID NO: 193450 - protein, 72 aa, Glycine max
  Clone ID: PAT_MRT3847_1670C.1.pep
DNPETLSMIIKSIGREQNESIINNVLYTHPFFIKVSYQYSFPINEQCLVTSPTIYMCVWTYTVNNSHFKNRR

SEQ ID NO: 193451 - protein, 73 aa, Glycine max
  Clone ID: PAT_MRT3847_16710C.1.pep
LFRTHGIKDAQDGPQKRRTHPCTSDHKDMATWLSWGNSPISFRRGRDRTTSHYTLYTVYCHYALLANIYAMLG

SEQ ID NO: 193452 - protein, 99 aa, Glycine max
  Clone ID: PAT_MRT3847_16711C.1.pep
SDEIHLTYNINIVKLLDLKLIPQKHLTVVNMPWFGFIVNKIKGVWCYGKDWEETKEFNNIAFPCFGFVRHTIYMISICIELCECLLVLWSQNFNIGVKT

SEQ ID NO: 193453 - protein, 65 aa, Glycine max
  Clone ID: PAT_MRT3847_16712C.1.pep
MLVSVVYLLSYLYFFVLWNNSHMHVPKVIGYGPCWMYYCRRFYRKKTYSICFPTICVPYALLFRC

SEQ ID NO: 193454 - protein, 78 aa, Glycine max
  unsure (1)..(78): unsure at all Xaa locations
  Clone ID: PAT_MRT3847_16713C.1.pep
SKQPCRRTTNARTPATRRRRSRRPRRRRSSRTXATRTSSSATASRPRSRSRRSRACSRTRGRQGRRRALQVRRPHHPA

SEQ ID NO: 193455 - protein, 103 aa, Glycine max
  Clone ID: PAT_MRT3847_16714C.1.pep
LGVCARHHPSSSLAHAHPCWYCQPESITLADDSHLACTPAILLSNNIYCFFYFILFLVNNSFIENVDQHRCTLNTNNISNLNLQTPKKRKTEKLLPPITKKRR

SEQ ID NO: 193456 - protein, 47 aa, Glycine max
  Clone ID: PAT_MRT3847_16715C.1.pep
INTITHSFLCQTNMPSKLCLLITHKSHHFCLIGNCMQIHPKPILLQT

SEQ ID NO: 193457 - protein, 128 aa, Glycine max
  unsure (1)..(128): unsure at all Xaa locations
  Clone ID: PAT_MRT3847_16716C.1.pep
PFLRVTPFLPIWPTTPLESSYLGHAGPDVYALATMIATGVILGPDHTVIXSRMLDISPAPESMNGCKMELLNAAFPILNWVVATTDVAEACTGLNMAGIXGGCPTLQSMERQEVMTNMLSIYKSKAYD

SEQ ID NO: 193458 - protein, 60 aa, Glycine max
  Clone ID: PAT_MRT3847_16717C.1.pep
KLNGYPNIIVPAFLLCKFNLQPAKIGTRHLFFWSLKLKMSNKQACLPKRSDQDFFKSLFS

SEQ ID NO: 193459 - protein, 68 aa, Glycine max
  Clone ID: PAT_MRT3847_16718C.1.pep
YNNDRKPEMDDPPEKEDSPPSQSFTQKHFSVPTNLTEFHPTDLLSPGPGRFSPYIPSCVFFFIHRNER

SEQ ID NO: 193460 - protein, 96 aa, Glycine max
  unsure (1)..(96): unsure at all Xaa locations
  Clone ID: PAT_MRT3847_16719C.1.pep
HKWVKYCNDVLIGIYLIFSLSPISLLXIFLXXXXXXXXXXXXXXXXXXXTFQIXKCSLLSKLVSNNNGMVEVVVALEITQTIRTLPNSKQHTNSSY

SEQ ID NO: 193461 - protein, 47 aa, Glycine max
  Clone ID: PAT_MRT3847_1671C.1.pep
ELACIISSSGIPKLCASLVGMSEDVVGAYLPSAYTLVMNSINLSTQL

SEQ ID NO: 193462 - protein, 59 aa, Glycine max
  Clone ID: PAT_MRT3847_16720C.1.pep
IPLHSQNQIFSALVLEFFRYAPMSMNNNNNSNPHGPSSSGPVPSFPGPRAHTQPERQTF

SEQ ID NO: 193463 - protein, 60 aa, Glycine max
  Clone ID: PAT_MRT3847_16721C.1.pep
LTLPLLATRFHTNFRTFYALHSSVKTLDCTCGGKFGKAVQTWYLELASCKCEFYVWNSSY

SEQ ID NO: 193464 - protein, 73 aa, Glycine max
  Clone ID: PAT_MRT3847_16722C.1.pep
ANPCAPGAPLSPSPCVSSQHLPSRAGSQPEYWLRSKFGQRLRAADRTSVKELSYFMFSCTTVIYELCEVLSPA

SEQ ID NO: 193465 - protein, 65 aa, Glycine max
  Clone ID: PAT_MRT3847_16723C.1.pep
RAFIQRMLQIPSSFLAFMQLLEVTNFTRMQEMKQMNFKVANYGVHETEGESMVKEVGLSRVEIDN

SEQ ID NO: 193466 - protein, 71 aa, Glycine max
  Clone ID: PAT_MRT3847_16724C.1.pep
QACAIGWFIVRRICRGMAPWSRHPACYQVHSFEQATKSCFLRMNTHYGETAILGIMRTLFALYDCTLHLIL

SEQ ID NO: 193467 - protein, 99 aa, Glycine max
  Clone ID: PAT_MRT3847_16725C.1.pep
YRGPKPNPYRESTESDQISPAQPPSWEPGMFGGVMIGGRQSIANPRRRVTVHRLTGANVNDEMALHPAKLVGTATSCYIGKPVVTHAGIYAAVEKQGLD

SEQ ID NO: 193468 - protein, 52 aa, Glycine max
  Clone ID: PAT_MRT3847_16726C.1.pep
PTYDILSPLTHFFNICSLSYSARLLLTHGSKLLSLMMHIFYNHMSIKMLLKL

SEQ ID NO: 193469 - protein, 61 aa, Glycine max
  Clone ID: PAT_MRT3847_16727C.1.pep
EKGPLVYFLTTTGGPPPGEGSARIFFFTNPGVGNPLFPMGYVSAPPHFGKLPLNNGGNSPP

SEQ ID NO: 193470 - protein, 47 aa, Glycine max
  Clone ID: PAT_MRT3847_16728C.1.pep
HIHCWHFKDNDFGGRNVSRTEFSLVSHTLKFVPVKLLSPLLSSSRSV

SEQ ID NO: 193471 - protein, 74 aa, Glycine max
  unsure (1)..(74): unsure at all Xaa locations
  Clone ID: PAT_MRT3847_16729C.1.pep
RITVDCDFQSSSRRNDAAVVVEVVVTVAYCSXXRNSVAARDWXXRRXXKLXXXXXXXXXXXXXELRMLCGRERE

SEQ ID NO: 193472 - protein, 88 aa, Glycine max
  Clone ID: PAT_MRT3847_1672C.1.pep
YVNSPTKDKLASHCHERPQNYKWKGENEGKWRKMEDGRSSCCTPSLGQCPPLIPKRMFLLYWVQGLCFVTSEWVLLAGRFLCEFQKTL

SEQ ID NO: 193473 - protein, 36 aa, Glycine max
  Clone ID: PAT_MRT3847_16730C.1.pep
FPRKMGHFSPHLKLYRENIVYFHVKNAKSGVRLIPP

SEQ ID NO: 193474 - protein, 76 aa, Glycine max
  Clone ID: PAT_MRT3847_16731C.1.pep
KLVDKKKSPKGKVTKESPPSFGRDVCSLSPLSIDLLLLICNKMGQLTAAVPSTDDGYGQPVKGKTKAKSENDESPK

SEQ ID NO: 193475 - protein, 41 aa, Glycine max
  unsure (1)..(41): unsure at all Xaa locations
  Clone ID: PAT_MRT3847_16732C.1.pep
QVATTFGIFTANMMFXPPPKAXXXXLXXIXLFRXXCQRWHX

SEQ ID NO: 193476 - protein, 62 aa, Glycine max
  Clone ID: PAT_MRT3847_16733C.1.pep
PYQNKLTQHMCCYLSLTHLLRCSATKMNMQDLKDSSLWLYCPFHEHRLMHNIFLKFGEVISQ

SEQ ID NO: 193477 - protein, 71 aa, Glycine max
  Clone ID: PAT_MRT3847_16734C.1.pep
GNDFYWDKRVYNGSGGLKGLPSGHPLNGGPFRDGAHQFLIRVPTFVFMEELRNLSFTLPPKSKTQTFFTIF

SEQ ID NO: 193478 - protein, 83 aa, Glycine max
  Clone ID: PAT_MRT3847_16735C.1.pep
TVKLEQNTNNYHTKLQGFKIAAVADRIAISSQSLIPQKIVAKSEHNRSADNPQISTFWLQLQLPTVVFSFLKKKKKNLQNSTM

SEQ ID NO: 193479 - protein, 74 aa, Glycine max
  Clone ID: PAT_MRT3847_16736C.1.pep
TCFSIGIRPPLFLGALPVITSIKSRLSVTTSTMKGFHWFFVPGLWLFAFNLLFHICFRFSTFLFMAYVIKRKCV

SEQ ID NO: 193480 - protein, 97 aa, Glycine max
  Clone ID: PAT_MRT3847_16737C.1.pep
VVITTFFFWFFLNKRTPCLKHEAEKKRLIRRKIQVSITVAYRGGGGGSLPFNSQEPFQGAKGGGGSNHQSRRDLRGRIRERGEGPGPMNRPSAKHLM

SEQ ID NO: 193481 - protein, 86 aa, Glycine max
  unsure (1)..(86): unsure at all Xaa locations
  Clone ID: PAT_MRT3847_16738C.1.pep
MAPKXLIFLAXLCFSALSLSRCLAEDNGXVMNFYKXSCXHAXDIIKXQXXLLYKRXXNTAFSWLXXXFHXXXVHXXXXYXLLXSTS

SEQ ID NO: 193482 - protein, 76 aa, Glycine max
  Clone ID: PAT_MRT3847_16739C.1.pep
YILPPSDLWFPPLRPTSSHHVLLRIHHGFSTIPPSEMKKERKKKSVFHSLTKQKKKRLLKPPIVAETAKWVFLHQH

SEQ ID NO: 193483 - protein, 78 aa, Glycine max
  Clone ID: PAT_MRT3847_1673C.1.pep
LSLILDHGYQIRSRLAQRYSETALSMQRGLEDASIGDYYWLMTDLDWRMSYEGLHIMQRQQKSCSMKPAEHLSSKDID

SEQ ID NO: 193484 - protein, 99 aa, Glycine max
  Clone ID: PAT_MRT3847_16740C.1.pep
IILTNENNRSSTNTHKTRSNGCGHPRMILTTGMMWHPNDLHRRSTFIHVKWKNRQRSLKVQNLNNLCSLRSLFIIRIGAPAPHHKQTPHLIHLKLIVPR

SEQ ID NO: 193485 - protein, 53 aa, Glycine max
  Clone ID: PAT_MRT3847_16741C.1.pep
AKSYIIEELSKNSKEKKLKGFEFIKAGPLESNPFDKESCLIPSTTKKKKPQVV

SEQ ID NO: 193486 - protein, 123 aa, Glycine max
  Clone ID: PAT_MRT3847_16742C.1.pep
RGGGMKQKKRRGNRKAPTIPQKRGAENREEKGGEAEGGRKLKSMEKPKKDRNPKKKRGRAGGPKKGPTPQKRGGPQRARQGGKNLPPRDEKKMTPPHGEGPERVGAPGALFFAPKGKKKGGGG

SEQ ID NO: 193487 - protein, 83 aa, Glycine max
  Clone ID: PAT_MRT3847_16743C.1.pep
IVCAHAVSYSSITLSVSKGSPVATSATPANEAAAYTLYPDLEIYAILRYIGTTLFLVTVRTNCLLAPIVVRQSVSALIPRSLQ

SEQ ID NO: 193488 - protein, 204 aa, Glycine max
  Clone ID: PAT_MRT3847_16744C.1.pep
SWLQPRWALKHPVYDILILRLGICTNRPNVPKLCSFISSMNSSILISVILENKLLASVPCFQKICLLFTNDLYFLTITCRPSRSFFLFPFCFIFIYSQNYTPMVLYEEIFFCISSLLFMTNFFYIRIGTLSLYVTRSNPIYIQRSFLFFSNAHLWFIQKFLYIHSLFTHTRISLHVFFIKTLLCTFSFFFIYAKILFTTLLSFY

SEQ ID NO: 193489 - protein, 45 aa, Glycine max
  unsure (1)..(45): unsure at all Xaa locations
  Clone ID: PAT_MRT3847_16745C.1.pep
PNPIEARTSXDXXIASCXIXCETQDEISSSCDVCASFYHIFHPFK

SEQ ID NO: 193490 - protein, 53 aa, Glycine max
  Clone ID: PAT_MRT3847_16746C.1.pep
QRKELLIRKQKPLWNMGSEHSSVLDNEKGHQRILVLRRTETQETYEPLAEGFM

SEQ ID NO: 193491 - protein, 46 aa, Glycine max
  Clone ID: PAT_MRT3847_16747C.1.pep
LTTPITISRAYTKGNVIPLLCCIVYDHLTQMLAYRSLIKEDERDAP

SEQ ID NO: 193492 - protein, 50 aa, Glycine max
  Clone ID: PAT_MRT3847_16748C.1.pep
SVWGVVSSGVQLYPVLLHCLMQEVGDLQCVRFVYVLAEPMASVMLDSEGV

SEQ ID NO: 193493 - protein, 51 aa, Glycine max
  Clone ID: PAT_MRT3847_16749C.1.pep
ISSSLIAVFLSVELNLLLRLSLPDRSTTNVQSFFFFNLLFMFFRSWQTVLM

SEQ ID NO: 193494 - protein, 127 aa, Glycine max
  Clone ID: PAT_MRT3847_1674C.1.pep
INKDQLQLLQDVSGAFRPGILTTLVDVFAGRKIGGYIEGTYMDLFISISGYPKNQATFSRISGYCEQNDIHSPHVTVYESLLFSAWLRLPSDVNAQKRKMFVEEVMELVELNQIRDALVGLPGVDGL

SEQ ID NO: 193495 - protein, 146 aa, Glycine max
  Clone ID: PAT_MRT3847_16750C.1.pep
RDASSSASETRAKLSKWEKPMQEVLRRGNDAATLLWRNINVLASLLIGMTVIWFLIEIVEYNFRTNFRTLIFHIFITMMLVLFIYSTFANILKRISSGELSLRNFLLIIGSLYILSVIERYFSIVNWLHVGFLCLLTLPIVYKWHV

SEQ ID NO: 193496 - protein, 162 aa, Glycine max
  unsure (1)..(162): unsure at all Xaa locations
  Clone ID: PAT_MRT3847_16751C.1.pep
MLPNLETWHKLDKILDATLTNEVGRKASISQGSALMRVASAVFSEVPSLKTMRDASLGLETVSFHHAPVFGLICGALGFDRTSSQRAYMFITMRDVISAATRLNLIGPLGAALLQHQVAPIAEVILEKWMXNRVVEEACQTMPLLDTVQGCHGYLFSRLFSS

SEQ ID NO: 193497 - protein, 119 aa, Glycine max
  Clone ID: PAT_MRT3847_16752C.1.pep
KEFISIQNDAYSRIQILSMEKAILERLEWKLTVPTPYVFLVRFTRTFALSPDQQVIVIYLNSNTKNYQIQLTCFACHLIHIVQMKNMAFFLAELGRVHYGTANLFLPSMTAAAAVYAAH

SEQ ID NO: 193498 - protein, 208 aa, Glycine max
  Clone ID: PAT_MRT3847_16753C.1.pep
MRIMIKGGVWKNTEDEILKAAVMKYGKNQWARISSLLVRKSAKQCKARWYEWLDPSIKKTEWTREEDEKLLHLAKLMPTQWRTIAPIVGRTPSQCLERYEKLLDVACVKDENYEPGDDPRKLRPGEIDPNPESKPARPDPVDMDEDEKEMLSEARARLANTKGKKAKRKAREKQLEEARRLASLQKKRELKAAGIDIRQRKSGSVPVI

SEQ ID NO: 193499 - protein, 238 aa, Glycine max
  Clone ID: PAT_MRT3847_16754C.1.pep
MQVNEGHNRPCSDPFLQWSKWQLLDSLLPTGGFAHSFGLEATVQSHLVSNSNDLKTFVIHILENTGSLLLPFVYSASMLPNLETWHKLDKILDATLTNEVGRKASISQGSALMRVASAVFSEVPSLKTMRDASLGLETVSFHHAPVFGLICGALGFDRTSSQRAYMFITMRDVISAATRLNLIGPLGAALLQHQVAPIAEVILEKWMNRVVEEACQTMPLLDTVQGCHGYLFSRLFSS

SEQ ID NO: 193500 - protein, 112 aa, Glycine max
  unsure (1)..(112): unsure at all Xaa locations
  Clone ID: PAT_MRT3847_16755C.1.pep
QFYALLEQTQVVHCLDTLFCKLQINHSIIFCNAWSGVALLANIITDLGYSCFYIHALMLRHHRNIVFYDFRPAACLNFVXTDLSSRRLNILPHNVDLTLYYPIDCKDIYVQW

SEQ ID NO: 193501 - protein, 81 aa, Glycine max
  Clone ID: PAT_MRT3847_16756C.1.pep
IIAIRAPIPIVISHPVITRRIGTLSVAMHPLHCHQEGFNLEPVIIPTVDTRVPTSHSSRIKGDKLKSRVSKGQLTHIFLTL

SEQ ID NO: 193502 - protein, 137 aa, Glycine max
  Clone ID: PAT_MRT3847_16757C.1.pep
MKREKMACVYPGQLLLLCLILSVVPIAVSAGNDAAPLTNHGGRLLTGKLNVGILWYGPIPKAQKKAILSFFRSLNMNTPAPDAAKQPQVSSWWNIVESYGAASGNNNNIPVKVVNQVFDPNYSYGKVLIKDFIKPLL

SEQ ID NO: 193503 - protein, 47 aa, Glycine max
  Clone ID: PAT_MRT3847_16758C.1.pep
RPLVELRMLPIKNYSFLAGWFLDTSLDCVPRLRHYEQKDLPDFLRTT

SEQ ID NO: 193504 - protein, 65 aa, Glycine max
  Clone ID: PAT_MRT3847_16759C.1.pep
ELLKTTEAAKYLRQRIPPHQPPTEPHHRKNPTSPLAPLLPLPLRCCWPWCPRSLCFPFCRLLAAV

SEQ ID NO: 193505 - protein, 80 aa, Glycine max
  Clone ID: PAT_MRT3847_1675C.1.pep
KAGKKVSKVSKIQRLVPPFPLQKKRPRNRDKKKSIGKAKFKAAEFQKLLASRFKEQKVRRSESLVKRRSKLSSDAKAAAV

SEQ ID NO: 193506 - protein, 653 aa, Glycine max
  unsure (1)..(653): unsure at all Xaa locations
  Clone ID: PAT_MRT3847_16760C.1.pep
SAGTVTQMFINLIFHDLIGKFMQVYIDDVVVKSELKNNHLKHLKVSFERMRKPCIKMNPXKCAFGVSTGYFVIHQKGIKMNKNKAKAILETSSPKNKKQLQSLLGMVNFLRMFISNLSGKTKLFSPLFRLKNEFDFXWEHEHQDAFDGINKXIPPVLVLPVEGRDLKLYILASYSIIVSMPVQEDENDIECAIYYLSRILNDNETKYSPIKKLCLCLYLSXNIPLGILFKIRPTCSNNETKYEVLIADLETLIDLGSKHVLIRGDSXLVIKKLNKKYKCIKNNLLRYFSQATRXLSKFDDLEFKHVYQEENKESNASVQIAFGYKLSEQNFKLKINALITLDWQKPLVDYLQNLCLQVDQKTKYKYVNYVILANGLCKRGVDGVWLKYLGESEAYIALVETHEGICGSYQASEKMKXMLFRQGYYXPTILEDCINYAKSCEDCQKHGLIQQVSTSELHSMTKPXPFQGWTXXLIGQIHPTSXEEKYILVVVDYFMKXVKAIPLKXVDQGDIIXLLEQNIIFIGQKMVQYANSRNIKLLTSTLFYAXVNGPVEAINKILISLIKKHIGXKQISWHETLNQILWAYQNSPKGTIGVTPFKLVYGHEVVLPIEINLYSIQLQRQNEIPIQDYLNMMYGELNLLDEERLNYLENIIH

SEQ ID NO: 193507 - protein, 42 aa, Glycine max
  Clone ID: PAT_MRT3847_16761C.1.pep
ARAARAARAARDGCEKTTEGMGIMLLLIFLSWNYVLGLGDNL

SEQ ID NO: 193508 - protein, 70 aa, Glycine max
  Clone ID: PAT_MRT3847_16762C.1.pep
TFGCVMRILSDHTIQRHNDHHQRHNNIDCLEDDSRKAFGHHGRARTGASYVGDPCDEHESPIVHADAELG

SEQ ID NO: 193509 - protein, 53 aa, Glycine max
  Clone ID: PAT_MRT3847_16763C.1.pep
SDEGSVLMLSATDLTWEPSHGRKPLSICLCIASLVYFDTRNIPLISDAATLLM

SEQ ID NO: 193510 - protein, 64 aa, Glycine max
  Clone ID: PAT_MRT3847_16764C.1.pep
SLLAKGLRIMLIRLLIVSVIYLQQGIPHSLIRTMLCMRLLVFPPILLDCLQTLFDKLCGLKPYV

SEQ ID NO: 193511 - protein, 56 aa, Glycine max
  Clone ID: PAT_MRT3847_16765C.1.pep
MTEANLILLFLQHLFYKHAIGLDWPQQTFIYVVPPLPAITPYCPSFIHFPQGEVLL

SEQ ID NO: 193512 - protein, 69 aa, Glycine max
  Clone ID: PAT_MRT3847_16766C.1.pep
QDHTAHYMLHTKYTSFHFYNEYSRILRLHMNIYRWKESSYPAAELFHCKQIVAQAHKKLLFQHKIDTYP

SEQ ID NO: 193513 - protein, 86 aa, Glycine max
  Clone ID: PAT_MRT3847_16767C.1.pep
LYYLSAYLSAIFYFLLSWLQIPKKISLLMTYLEQNRVKHPLMRLHLKILQQNIERHLLSDLDLDLLGMQATLLISQQCLSCSMIQV

SEQ ID NO: 193514 - protein, 56 aa, Glycine max
  Clone ID: PAT_MRT3847_16768C.1.pep
KDPFGACARGGFTGLTAVEHLLDPECEDVLSFRKQHFPVYPSQLIRVRFAWSCSFG

SEQ ID NO: 193515 - protein, 122 aa, Glycine max
  Clone ID: PAT_MRT3847_16769C.1.pep
HLQTAAELFMCDAKALEDSLCKRVIVTRDETITKWLDPEAAALSRDALAKIVYTRLFDWLVDKINNSIGQDPESKSLIGVLDIYGFESFKTNSFEQFCINLTNEKLQQHFNQHVFKMEQEES

SEQ ID NO: 193516 - protein, 194 aa, Glycine max
  unsure (1)..(194): unsure at all Xaa locations
  Clone ID: PAT_MRT3847_1676C.1.pep
SWSERYKIIEGITQGISYLHEHSRLKVIHRDLKPSNVLLDSNMNPKXSDFGMARIVAIDQYQGRTNRIVGTYGYMSPEYAMHGQFSEKSDVFSFGVIVLEIISAKRNSRSAFPDHDDLLSYAWEQWMDEAPLNIFDQSIKAEFCDHSEVVKCIQIGLLCVQEKPDDRPKMAQVISYLNSSITELPLPKKPINSR

SEQ ID NO: 193517 - protein, 53 aa, Glycine max
  Clone ID: PAT_MRT3847_16770C.1.pep
MPEEDLVDIKFRLYDGSDIGPFRYSSAATVDMLKQRIVSDWPKGKTVVPKSAN

SEQ ID NO: 193518 - protein, 103 aa, Glycine max
  Clone ID: PAT_MRT3847_16771C.1.pep
LFATTIRIVLIAFVCNLSSYQQKKPDKTATRRIFNTLTLNNQMDRLIKVDPTNTVTIRMEPGQKCHGQITLRNVMYTMPVAFRLQPLIKTRYTVKPQSGIISP

SEQ ID NO: 193519 - protein, 43 aa, Glycine max
  Clone ID: PAT_MRT3847_16772C.1.pep
PRLIPFIYISGNTIFNLPYIRTFNYWVNKERKPDQVAYANYLG

SEQ ID NO: 193520 - protein, 228 aa, Glycine max
  Clone ID: PAT_MRT3847_16773C.1.pep
MSVLKYRNLFLCLVSWLCCCCVAVASSESSIGSKDLDQTPTWAVAGVCTVFILISITLEKSLHKVGTWLREKHKKALLEALEKVKAELMVLGFLSLLLTFGQSYIVRICIPMDVADKLLPCPYVGNDKGSSSEEEHRRKLLSYERRYLSDDATPYQCKERHQPLISGNGLHQLHILVFFLAVLHVFYSAITMLLWRLKIRGWKAWEAETSSHGYEFANDPSEFRVTHE

SEQ ID NO: 193521 - protein, 92 aa, Glycine max
  Clone ID: PAT_MRT3847_16774C.1.pep
SRKSQIAPRHVRTELGAKDDYHFCCSKILNISCSHKQKQRPLLQRIFTYTKLHSKSMVKSMQPTLSLKTMTIQFFRQILWGPCLLNSTLNVA

SEQ ID NO: 193522 - protein, 109 aa, Glycine max
  Clone ID: PAT_MRT3847_16775C.1.pep
AIGNMLVKVATLLTYRLHKNIRPLAIFLMTNAGASVKDTGRVVTLGPRAEPCHIPHKPARNVLYFLPLGIHLRGSDGTIADTTMLLKCRTELLLPQYIYRRKTMVRPQQ

SEQ ID NO: 193523 - protein, 51 aa, Glycine max
  Clone ID: PAT_MRT3847_16776C.1.pep
ENKTINYKLFDGDIDNQFKVFKLIFQAIDKENDSAIIKWTIEYKRIGEQVH

SEQ ID NO: 193524 - protein, 152 aa, Glycine max
  Clone ID: PAT_MRT3847_16777C.1.pep
MSLAGKISSEIGVQATAAKWFNLFTTQLHHVQNLTDRIHGTELHHGEDWHHNESVKHWTYTIDGKVTTCKESIESVDEENKTINYKLFDGDIDNQFKVFKLIFQAIDKENDSAIIKWTIEYERIGEEVDPPYGYIEYVHKCTKDIDAHLLKA

SEQ ID NO: 193525 - protein, 267 aa, Glycine max
  unsure (1)..(267): unsure at all Xaa locations
  Clone ID: PAT_MRT3847_16778C.1.pep
RAAARRRQKGDYMLGQSSCALYLSLRYHLLHPDYLFYRIRKLQKNFKLRVVLCHVXEDVIKPLLEVTKTALLHDCTLLYGWSLEECGRYLETIKVXENKPADIIQGQMDTDYLSRLTHALTTVRHVNKTDVVTLGTTFGSLCNIMGASMEDLARCPGIGERKVKRLFDTFHEPFKHVESSRQAIPETSVQNKPASPNNAESSSLIEDKHEDAEDVSXRRKKELEVTVKSALSAAFAKYSGRVGKRKSTSQVEEKGESIISKESEAET

SEQ ID NO: 193526 - protein, 54 aa, Glycine max
  Clone ID: PAT_MRT3847_16779C.1.pep
KGPPLFFLFLFFFFFFIFFCFFYFFIFIFIFFIFFLFFFFFFFLLKFFFFFFFF

SEQ ID NO: 193527 - protein, 72 aa, Glycine max
  Clone ID: PAT_MRT3847_1677C.1.pep
MLQMLSSKKDLNFVGYTYKNFEIVNDYQVPGMGTSLFSLFTATSCFMFIFCQEVLFLLCSWLLCLFVIYILL

SEQ ID NO: 193528 - protein, 82 aa, Glycine max
  Clone ID: PAT_MRT3847_16780C.1.pep
ILRFSQTIRGMAFTIRHPNIPIIVHDSDTIIVRPFPILHPYTKIIRPQNPCQAVIRLLVLNTLNIWMEYSAQLIIHTSKGVH

SEQ ID NO: 193529 - protein, 56 aa, Glycine max
  unsure (1)..(56): unsure at all Xaa locations
  Clone ID: PAT_MRT3847_16781C.1.pep
KRHXTXXXEXXYEPTIGVEVHPLXFFHXLWXDSXSXCXXIAGQEKFXGFRDGXYIX

SEQ ID NO: 193530 - protein, 94 aa, Glycine max
  unsure (1)..(94): unsure at all Xaa locations
  Clone ID: PAT_MRT3847_16782C.1.pep
GKNFEILLNKKXPGGKGKHQSRKRPNTKRQHHPQTGGPDGRNLPHEDNLREDETKMHHPTTPINSKQDQTPPTDTPDTPNPTHQEKGNHPGPLQ

SEQ ID NO: 193531 - protein, 136 aa, Glycine max
  Clone ID: PAT_MRT3847_16783C.1.pep
TPIQNLMAEAASGADHGLSTFRHSEYTRDGIESSLLTDSNGQRESFVHGKGLGGQRLTEMKLLAVEPDLGAAPERAQDYKGRIRTWPGVLLLFLIVAGAAALIVFNAMNFNDRAAINAERYENAAQLKRKIQDGLN

SEQ ID NO: 193532 - protein, 63 aa, Glycine max
  Clone ID: PAT_MRT3847_16784C.1.pep
RKIHNSSGNLLLNRKSSIKIARKLAIFDRVVVAGDCGTNSFQGSTSESACSTQENKPKTLSLS

SEQ ID NO: 193533 - protein, 122 aa, Glycine max
  Clone ID: PAT_MRT3847_16785C.1.pep
KGTKARFKRKPFPIFWFLGGAENHFFFHSQPQIKGGEPLGAPLGPNGFGGVFLNGGTPHPRERGPPGFPPRFRGPGGPPGISGRAPGGAPFFPMGGELRAGRNKGHGCSRGKIVTPSHFPPK

SEQ ID NO: 193534 - protein, 232 aa, Glycine max
  Clone ID: PAT_MRT3847_16786C.1.pep
MPSTRSWEMEHDECISCGGFIGFKRNQVIDCSSEIGDSDTEELFEINLKEKEPLALDAIREDCEISTVFSLDIDIHDGGSGNDDDVVYVAVGKDGDSSMEALSWALKHAVTPSATVCIVHVFPQVKLIPSPLGKIPRSHVNLEYVNMHLTQEKGKRKLLLQKFTDLCVDSKGKVEMKLIEGDNVAKTIVDLVGNLNIRKLVIGITKSNLRKSGSRVIFHSGPGIENAVIIKS

SEQ ID NO: 193535 - protein, 52 aa, Glycine max
  Clone ID: PAT_MRT3847_16787C.1.pep
ARAPRLFSSSTICAPATASSSYWGYKYPDLGSYGRNGISIRICSTLANASIR

SEQ ID NO: 193536 - protein, 66 aa, Glycine max
  Clone ID: PAT_MRT3847_16788C.1.pep
SFILVHSLFLEKLLQLSSPQPELDFHYALRILTSNHKHSTIPTRKKRLRHPTLGPSVNISLRKPYS

SEQ ID NO: 193537 - protein, 128 aa, Glycine max
  Clone ID: PAT_MRT3847_16789C.1.pep
MQIFVKTLTGKTITLEVESSDTIDNVKAKIQDKEGIPPDQQRLIFAGKQLEDGRTLADYNIQKESTLHLVLRLRGGIIEPSLMALARKYNQDKMICRKCYARLHPRAVNCRKKKCGHSNQLRPKKKIK

SEQ ID NO: 193538 - protein, 62 aa, Glycine max
  Clone ID: PAT_MRT3847_1678C.1.pep
SPFEKFVVFTKKKFVKNFSKTFLKFMSKNELVFYKNGTFGGRLENFFYFLQKFFAPGVKQGG

SEQ ID NO: 193539 - protein, 35 aa, Glycine max
  Clone ID: PAT_MRT3847_16790C.1.pep
KPKQSNKTLCTRVIKCHLEIRKTMFLLCPYFPSLL

SEQ ID NO: 193540 - protein, 66 aa, Glycine max
  Clone ID: PAT_MRT3847_16791C.1.pep
LALGNCNIKWNLDPLSTHLRYDILCSCQNPKCCQYMLIYSCIYIHSVLFFIILCCLFSLYVKKNPS

SEQ ID NO: 193541 - protein, 58 aa, Glycine max
  unsure (1)..(58): unsure at all Xaa locations
  Clone ID: PAT_MRT3847_16792C.1.pep
MAGASCMGLSSPSLAGKAGKLGPXPPEVWRGTMRXTRPNQASSGRPWAGPDRGKYLGP

SEQ ID NO: 193542 - protein, 171 aa, Glycine max
  Clone ID: PAT_MRT3847_16793C.1.pep
AGSSDRGQYEFKITSCFHENLPLILTRVVLGIALQVVCSYITFPLYSLVTQMGSHMKKTIFEEQTAKALKKWQKAAKDKRKLRKAGIDIPSGTMSGETTPSQGTSPLHLLHKYKPSHTDTDSVLYSPRSYQSDTDLSETEGSSHQLNEITQTRQASRNGETHNIDFSFVKP

SEQ ID NO: 193543 - protein, 83 aa, Glycine max
  unsure (1)..(83): unsure at all Xaa locations
  Clone ID: PAT_MRT3847_16794C.1.pep
MLVYQDLLRGDEHLSDSFRYNDIEKRMXWEVXGKWDVKGAVDVEIGENPSDEGGEDEGVDDAAVKVVDIVDTLRLQEQPDFDK

SEQ ID NO: 193544 - protein, 54 aa, Glycine max
  unsure (1)..(54): unsure at all Xaa locations
  Clone ID: PAT_MRT3847_16795C.1.pep
GPTDAXQHLQKTTLRDHYILRHLWENRANKYDFILSSHFLSRDLTAVEYPVDLT

SEQ ID NO: 193545 - protein, 109 aa, Glycine max
  unsure (1)..(109): unsure at all Xaa locations
  Clone ID: PAT_MRT3847_16796C.1.pep
LAFXXPSXLVXGVFARXAXFFFPFGLPRAXRGRRAXAXXVXXXXXXVCLWLXLXGVXXXFXASLXXXFCXLCXXXLVLXXGXXXFLCFXXXXCXWPXPPXCXVXXXXXX

SEQ ID NO: 193546 - protein, 52 aa, Glycine max
  unsure (1)..(52): unsure at all Xaa locations
  Clone ID: PAT_MRT3847_16797C.1.pep
IKLGCLQFXFSITEFATKQPKGDASLLQDGVLAEKLSLKPHQGPVLRSNSVP

SEQ ID NO: 193547 - protein, 54 aa, Glycine max
  Clone ID: PAT_MRT3847_16798C.1.pep
GSYFKSFVIGSLCCAMELQDVVACCCTLFDMVFSDGMLMLHAAMDDTWSMQDLV

SEQ ID NO: 193548 - protein, 63 aa, Glycine max
  Clone ID: PAT_MRT3847_16799C.1.pep
LVFYWEHWDAPYSSINVLSGSVTVKFNRFMFCRYCHSHIVLLKRIAVFRCYECHVSPRSVCDF

SEQ ID NO: 193549 - protein, 99 aa, Glycine max
  Clone ID: PAT_MRT3847_1679C.1.pep
ARNSARGWLGISSSGPLSLMPPSHLPHLNSTCCREQSHSHGSPPKPSSLLGQFSPAQVFGKQVWPEASLVLKALQSALSDTSSGLCSVDSGLVAGQMIL

SEQ ID NO: 193550 - protein, 89 aa, Glycine max
  unsure (1)..(89): unsure at all Xaa locations
  Clone ID: PAT_MRT3847_167C.1.pep
LSTTKYSAIKMVTFILAGFGTIFAXYIIQLRGETLNFNLYLSLPINALMQIPPMLIRTFLLLFTNTHQMLSLSSHISPLSSILSTYSSH

SEQ ID NO: 193551 - protein, 100 aa, Glycine max
  Clone ID: PAT_MRT3847_16800C.1.pep
VTAYVSSSRPNNAFKKGFLLSLKNLPLIKSFFCTRQILQMIPLFQDKCRSHRQKYVCSAISVSSEACSYMPEAPEGPSLMDSSCNPVCSLVKGKKKCSKA

SEQ ID NO: 193552 - protein, 69 aa, Glycine max
  Clone ID: PAT_MRT3847_16801C.1.pep
SRGLPGKLGWKKSFSPMVEGAKTQSHKPWFFFIIKTNQVFHGSLNQSLASGFPSFYYFETSFLYVFEVY

SEQ ID NO: 193553 - protein, 308 aa, Glycine max
  unsure (1)..(308): unsure at all Xaa locations
  Clone ID: PAT_MRT3847_16802C.1.pep
AAAAEAKEKEKARVSRTSLILWHAHQNDAAAVRKLLEEDPSLVKARDYDSRTPLHVKSLHGWVEVSKCLIEFDADVNAQDRWKNTPLADAERAKRTAMIELLKSHGGLSYLXQDFRHEVNLLVKLXRHPNVVQFLGAVTDKKPLMLITEYLRGGDLYKYLKDKGALSPSTAINFGLDIARGMAYLHNEPNVIIHXDLKPRNVLLVXGADHLKVGEFGLSKLIKVQSXMTGETGSYCHMAPEVLKYRRYDKKVDVFSFAMSEMLEGEPPFSIXEPYDGAKYVAEGQRPSFRAKGYILNCKTVVVVGGWG

SEQ ID NO: 193554 - protein, 71 aa, Glycine max
  Clone ID: PAT_MRT3847_16803C.1.pep
WHHLNMIHMVAQMIPNGQPSSDLSRRQCFPHSPYYFWNDHFESNMGSAGNNSKIAEKHFPSRNASTRMSLV

SEQ ID NO: 193555 - protein, 427 aa, Glycine max
  Clone ID: PAT_MRT3847_16804C.1.pep
MSSGGGSSEAAAAAKEKEKEKARVSRTSLILWHAHQDDAAAVRKLLEEDPSLVKARDYDSRTPLHVASLHGWVEVANCLIEFGADVNAQDRWKNTPLADAEGAKRTAMIELLKSHGGLSYGQNGSHFEPSPVLPPLPNKCDWEVDPSELDFSNSVCIGKGSFGEILKAHWRGTPVAAKRILPSLSDDRLVIQDFRQEVNLLVKLRHPNVVQFLGAVTDRKPLMLITEYLRGGDLHKYLKDKGALSPSTAINFGLDIARGMAYLHNEPNVIIHRDLKPRNVLLVNSSADHLKVGDFGLSKLIKVQSAHDVYKMTGETGSYRYMAPEVLKHRRYDKKVDVFSFAMILYEMLEGEPPFSNYEPYDGAKYVAEGHRPSFRGKGYIPELRELTEQCWDADMKQRPSFIEIIKHLEKIKENLPSDHHWHLFTS

SEQ ID NO: 193556 - protein, 187 aa, Glycine max
  unsure (1)..(187): unsure at all Xaa locations
  Clone ID: PAT_MRT3847_16805C.1.pep
DQIESTRSTIFGSASNIHSRLEKQSENVAHIPSVGNNQTPKVRKPYTITKQREKWTEEEHQKFLEALKLYGRGWRQIEEHIGTKNAVQIRSHAQKFFSKVVRESEGSAESSIQPINIPPPRPKRKPLHPYPRKSVNSFKGHCIPNETEISXSTNLLVAENDTPSXNLVLSTXGSEAFGSQFQSRLTD

SEQ ID NO: 193557 - protein, 380 aa, Glycine max
  unsure (1)..(380): unsure at all Xaa locations
  Clone ID: PAT_MRT3847_16806C.1.pep
MEMQDQIESTRSTIFGSASNIHSNAEKQAENVAPKVRKPYTITKQREKWTEEEHQKFLEALKLYGRGWRQIEEHIGTKTAVQIRSHAQKFXSKVVRESEVSDEGSIQPINIPPPRPKRKPLHPYPRKSVNSFRGPTIPNEQKXSPSTNLLVAEKXTPSPTSVLSTVGSEAFGSQFSEQTNRCLSPNSCTTDIHSVSLSPVEKENDCMTSKESEEEEKASPASRPLSTVSNPKMCMKPEFSSKEIEDATDMPQTTSIKLFGRTVSMVGNQKSLKIDDDGKPITVKSDEVDDVENEKLGQSGESKQVDTQLSLGVVSGNWPITPDADGANVTSIEPPKENQCFSESAPDAFFPQWSLSQGLPPFYLRPCNQVLIPCLLGPPL

SEQ ID NO: 193558 - protein, 54 aa, Glycine max
  Clone ID: PAT_MRT3847_16807C.1.pep
KSPDECKAFYAHPVHCSAFGCASPPPPPPSPAPPPPPPPPPPPPPPPASYHHYP

SEQ ID NO: 193559 - protein, 44 aa, Glycine max
  unsure (1)..(44): unsure at all Xaa locations
  Clone ID: PAT_MRT3847_16808C.1.pep
PPPQEHRHCNNAYLGSYPRFRPRNXGKRVNLSLVLVQYLSQFSV

SEQ ID NO: 193560 - protein, 97 aa, Glycine max
  Clone ID: PAT_MRT3847_16809C.1.pep
SVGWQKTTEGGSFLPLLQNIVFTMVIRLWFYQNRCHFEGSDIFVISVTFSMMVFEKLSLKLVIDGSFGMTHHYKFEVIWLFWDVVFWSLYMVVLEWN

SEQ ID NO: 193561 - protein, 127 aa, Glycine max
  Clone ID: PAT_MRT3847_1680C.1.pep
MAEKAAAPPPSKPLTTQEWETLIEGFQNGVHCKWSSLDPLFDPLLSSLHRKDFPLSLKLQLLVFLDEFSLSFFTSHNHLHRLVDALKTVVHAPLEAAAPSASTFKDQFMVSTTLILICASENVVVEA

SEQ ID NO: 193562 - protein, 43 aa, Glycine max
  unsure (1)..(43): unsure at all Xaa locations
  Clone ID: PAT_MRT3847_16810C.1.pep
ANLGHPKNWYXITLVFCGPWGXLPENVSCHPILADFANCMKKK

SEQ ID NO: 193563 - protein, 46 aa, Glycine max
  Clone ID: PAT_MRT3847_16811C.1.pep
MSTVSQLDMSIILKEWLRLAKIVLKGYKGNLSGHCDVLLKDNGVLC

SEQ ID NO: 193564 - protein, 140 aa, Glycine max
  Clone ID: PAT_MRT3847_16812C.1.pep
NSAREGSVAVSMSIEGTSFCFVAAHLASGEKKGDEGRRNHQVAEIFRRTSFSRTTKDHHHFPLTILGHDRIFWFGDLNYRLYLEDNFARHLIRKQDWKALQEFDQLQKELKECGVFEGWKEGDIKFGPTYKYSCSTTNGY

SEQ ID NO: 193565 - protein, 71 aa, Glycine max
  Clone ID: PAT_MRT3847_16813C.1.pep
RGLPPGCESHGFSSCVCFARSIVLPYFCLLCGASICFGTSRCFCKLGARGLLFTVVSGGLVVIAVLFSTPA

SEQ ID NO: 193566 - protein, 196 aa, Glycine max
  unsure (1)..(196): unsure at all Xaa locations
  Clone ID: PAT_MRT3847_16814C.1.pep
AYNLILTENHKTVKLAYFXLXREDALTXMMACXTXTYXWMAPELYSTVTLRQGEKKHYNHKVDAYSFAIVLWELVHNKLPFEGMSNLQAAYAAAFKNTRPSADELPEDLALIVTSCWKEDPNDRPNFSQIIEMLLRYLTTISPSKPVVPMRITSKNAVLPPESPGTSALMAGRDDSGETPKGNIEGRSKGFFFCCY

SEQ ID NO: 193567 - protein, 137 aa, Glycine max
  unsure (1)..(137): unsure at all Xaa locations
  Clone ID: PAT_MRT3847_16815C.1.pep
ISDGWAISSSPLDXHNARLLAXAALEHQVPETEHEDYVNAGTGGTSLWHSVGLILMALLLLRHAAPLFNADVEKALTYFYFFFLRAAAVILPCYLMAWMIRIIQHQSNQLKNLHLCYKQRNSKVSSLQYHQDLFFTD

SEQ ID NO: 193568 - protein, 80 aa, Glycine max
  Clone ID: PAT_MRT3847_16816C.1.pep
SDLIPELIEILRSLRLKTLKAEMATLGGRTRNVLVVATDKDHSGESIQFLQNSLKSLVERSSNSNDRSKRRRVLDRKFIA

SEQ ID NO: 193569 - protein, 116 aa, Glycine max
  unsure (1)..(116): unsure at all Xaa locations
  Clone ID: PAT_MRT3847_16817C.1.pep
LLFWDVVSDAALLCLLLILLWKEVPVLVKSHVLNHFHGTFPWFSCLGLSQNLQLMALLLLRHAAPLFNADVEKAVTYXYCFFLRAAAVILPCYLMAWMIRIIQHQRQRQVTTLCLF

SEQ ID NO: 193570 - protein, 124 aa, Glycine max
  Clone ID: PAT_MRT3847_16818C.1.pep
VAAQCIRRRNMYYHLEIFKKVDVIVTPTTGMTAPIIPPSALKSGETDMQTTANLMQFVVPANLLGFPSISVPVGYDKEGLPIGLQIMGRPWAEATILRVAAEVEKLCGESKKKPVSYYDVLKAK

SEQ ID NO: 193571 - protein, 281 aa, Glycine max
  Clone ID: PAT_MRT3847_16819C.1.pep
KLHFKKKKKKKKNSRLASTVEDVLLVYSAMLGASPANRISLKPSPPCLPSLSSNDNSNALGSLRIGKYTPWFNDVHSTEISDKCDEALNLLSKAHGCEMIEIVIPELLEMRTAHVVSIGSECLCSLNPDCEDGKGVNLTYDTRTSLALFRSFTAADYVAAQCIRRRSMYYHLEIFKKVDVIVTPTTGMTAPIIPPSALKSGETDMQTTANLMQFVVPANLLGFPAISVPVGYDKVGLPIGLQIMGRPWAEATVLRVAAEVEKLCGEWKKKPASYYDVLKAK

SEQ ID NO: 193572 - protein, 82 aa, Glycine max
  Clone ID: PAT_MRT3847_1681C.1.pep
NFFFGGPKLNLRGGVLQRGGGENPGGTQLNGLGEKPPFPRWGNNKKGPTGRPFQKLPPLNGERDPPFSGPLNAGGGGVTPRG

SEQ ID NO: 193573 - protein, 164 aa, Glycine max
  unsure (1)..(164): unsure at all Xaa locations
  Clone ID: PAT_MRT3847_16820C.1.pep
MAVKPSILCSSNTRGGCICTGVMCQSMCAHMMRAGYNVTGFNXRTLSKAQSIVDIGXHFCPCAHAVRSNSDVVFTIGGYPSDVRIVLLQPSCGAVSALRPGGVLVDMTTSEPSIVTMIXSAPSEQADTQSTHHDPDXDRRAKNGTLAIFAVGEEATEKRLEPLL

SEQ ID NO: 193574 - protein, 210 aa, Glycine max
  unsure (1)..(210): unsure at all Xaa locations
  Clone ID: PAT_MRT3847_16821C.1.pep
MRVPLVSWFSFILCYLLYLTIYISVVSGQCREDQQSLLLQLQNNLTFMPESSTKLKSWNQNIACCQWWGVTCDEESHVIGLDLSRESISGGFDNSSSLFGLQHLQNLNLSFNNFNSVIPSSINKLENLTYLNLAYAGFWGKIPMEISQLSRLVTLDLSNLFRPELEIQNLXMFVRNFTKIRQLFLDGVTISAHGLAWQAALLQIPTLQEL

SEQ ID NO: 193575 - protein, 86 aa, Glycine max
  unsure (1)..(86): unsure at all Xaa locations
  Clone ID: PAT_MRT3847_16822C.1.pep
XKSKEKTGIXKRQYDNDKVKEKPETVSSYVAVHAPVSVDMETXESKSHVQPLSSXVKTNXTGKXPXXXXXPXXXGKXXSXXXXFFF

SEQ ID NO: 193576 - protein, 135 aa, Glycine max
  unsure (1)..(135): unsure at all Xaa locations
  Clone ID: PAT_MRT3847_16823C.1.pep
QTATNLTNXXLIIKHSXXKKLSLXXCSGLDALXXXCPQLNDLNLNSCRNLHPERLLLQCPSLENVYASGCQDMLIGAIQSQVCNAFTDMENPSPCKRLPDGSKRVRVPHLVNTESPEDEKKGRRKKRRLCNVVVD

SEQ ID NO: 193577 - protein, 54 aa, Glycine max
  Clone ID: PAT_MRT3847_16824C.1.pep
IYIFDFTYAERSLLQLKSLPTKSLGNIVVPRPLNIYMNLEQRKKGQYLCCTRFN

SEQ ID NO: 193578 - protein, 395 aa, Glycine max
  Clone ID: PAT_MRT3847_16825C.1.pep
HRVIRDGYKAGNLKSAMNCSYVKDYEFVAIFDADFQPTPDFLKKTVPHFKDNDDLGLVQARWSFVNRDENLLTRLQNINLSFHFEVEQQVNGIFINFFGFNGTAGVWRIKTLEDAGGWLERTTVEDMDIAVRAHLHGWKFIFLNDVECQCELPESYEAYRKQQHRWHSGPMQLFRLCLPDIIRAKISVWKKFNMIFLFFLLRKLILPFYSFTLFCIILPMTMFVPEAELPAWVVCYIPAAMSFLNILPAPKAFPFIVPYLLFENTMSVTKFNAMISGLFQLGSAYEWVVTKKSGRSSEGDLVSLIEKGPKHQRGSSAPDLEEMKEELRKQEQQKASKKKKKHNRIYMKELALAFLLLTASARSLLSAQGIHFYFLLFQGISFLLVGLDLIGEQVD

SEQ ID NO: 193579 - protein, 408 aa, Glycine max
  Clone ID: PAT_MRT3847_16826C.1.pep
AGACLFEELGLFYIGPVDGHDIEDLVHILKSVKGMPTLGPVLIHVITEKGKGYHPAEVAPDKMHGVVKFDPKSGKQLKSKASTRSYTQYFAESLTAEAEVDEKIVAIHAAMGGGTGLNLFQKRFPERCFDVGIAEQHAVTFAAGLAAEGLKPFCAIYSSFLQRGYDQVAHDVDLQKLPVRFALDRAGLVGADGPTHCGAFDTTFMACLPNMVVMAPSDETELMHMIATAAAIDDRPSCFRYPRGNGIGTILPPNNKGTPLEVGKGRVLKEGSRVALVGYGTMVQSCMEAAKVLEAHGISTTVVDARFCKPLDGDLMRRLAREHEILITVEEGSIGGFGSHVSHFLGLNGLLDGNLKWRALTLPDRYINHGSQTDQIQMAGLSSNHIAVTALSLTNVHWDSRLLLSLQI

SEQ ID NO: 193580 - protein, 318 aa, Glycine max
  Clone ID: PAT_MRT3847_16827C.1.pep
KLQCVKSEEGYQDNNEVCIELLKTKDGIDSLALYSSSVGRFPNAPGALLYPIYGEGELPQAFCRRAAVKGCIYVLRMSVVSLLMDKVTGSYKGVRLASGQDLYSHQLILDPSFMIPSPLSSSPRDFPSEKLQMLGQRDIKGMVARGICITRSSIKPDVSNCSVVYPPRSLYPEQLTSIKALQIGSNLAVCPAGTFILYFSTMCNDADEGKKLLKAAMNALLTLPVSGNSESIPSVQSDSEDIKPIVLWSAFYIQKLIMCKLEFISSTPTPVGNLNYNALLDATEKLFNQMYPNEEFFPKATSPEYWTDEDEQGLTLDS

SEQ ID NO: 193581 - protein, 90 aa, Glycine max
  Clone ID: PAT_MRT3847_16828C.1.pep
EGTQILTILHCIEISDFHLVMLYCTMCFILKLKISFFLVIRLPLWLPKFEAPRMLCLKISVLLPFILMFKYLYYLLLYFFYLFMVFLLMY

SEQ ID NO: 193582 - protein, 55 aa, Glycine max
  unsure (1)..(55): unsure at all Xaa locations
  Clone ID: PAT_MRT3847_16829C.1.pep
LFHVLTSXACCGRHTITYESLNFSPSRSIPSCPLLPCYIPIGLPLLNLSLEACDF

SEQ ID NO: 193583 - protein, 55 aa, Glycine max
  Clone ID: PAT_MRT3847_1682C.1.pep
ETQKINELNSVLHITLPKCTFTRKESSIKCWFSQIDSCSNLNQTFHPRAPLNFHI

SEQ ID NO: 193584 - protein, 48 aa, Glycine max
  Clone ID: PAT_MRT3847_16830C.1.pep
PLLIDGFGKFLQVIWRGFTVHGETRISDHGLVIFPFFLAQYQPRLSSA

SEQ ID NO: 193585 - protein, 165 aa, Glycine max
  unsure (1)..(165): unsure at all Xaa locations
  Clone ID: PAT_MRT3847_16831C.1.pep
TATITTAFSLQAEATYMLPTKVGMATRNLESTQCISKASGLEPALAXLIRSLLPELKDHAXKMCSTPPKWHDYPLTPKLVXVIGASAXCVAKRLTFDEIQSMTYLEVIGTGTAYQCPTIEGGVDSLAFKAWKYNXQKLGLEHTSFTVNAEGVVKNAPIEFQNTSS

SEQ ID NO: 193586 - protein, 65 aa, Glycine max
  Clone ID: PAT_MRT3847_16832C.1.pep
TTSSHSTENDNSNSYSDTNTVYTNLYSSDSKGENFGGSPFKEEMPERRAAYFIVSLYLLILSFCF

SEQ ID NO: 193587 - protein, 77 aa, Glycine max
  unsure (1)..(77): unsure at all Xaa locations
  Clone ID: PAT_MRT3847_16833C.1.pep
GKARDSFSIIVSSIYTLHSIGISICCFFNLYICLVQYALKPRAMSPQASIPTNKVLPTKQKTNAQLFKFCLVYXXKQ

SEQ ID NO: 193588 - protein, 149 aa, Glycine max
  unsure (1)..(149): unsure at all Xaa locations
  Clone ID: PAT_MRT3847_16834C.1.pep
MAEQTDKVFLKQPXIVLSAQRTHGKAKKPKPGANHYRQSITLGLKTTREAIXRAYIDKKCPFTVNVXIRGRILTGTCHSANMNKTIIVRRNYLHSITYYQXRYENRHSXIPAHISPAFQVKERNHVILGQCMPFSRTXEXNVLKVIPAG

SEQ ID NO: 193589 - protein, 195 aa, Glycine max
  unsure (1)..(195): unsure at all Xaa locations
  Clone ID: PAT_MRT3847_16835C.1.pep
CSTTRRRRRIRGRRKRRFRRSAEETGDQRPAAAAGGWKTHETVSKAALGFRLSEVVVCLISFSVMAADKTQGWXADSLDRYKKYRXVVICEYYWHLHSSALQAFVLSCQLATGKRLISHHRRKYFEYFMVQVLAYLLISSSSSAATRVEDWILNWGKDEFTEMATASIGMAFLAFVAFAISSLISGYTLCNRSSM

SEQ ID NO: 193590 - protein, 188 aa, Glycine max
  Clone ID: PAT_MRT3847_16836C.1.pep
PIRSPTRPPTRPLFFFHRFPQKSPFLSLLSIWGFPNFPMVQVQVQIMPEHNSDPAAPPPPPPPPHNRRPRVREVSSRFMSPSVPRRPRTTEPDPDENSETPFPLGCSISQRKQTQTPQQQRSMKLFKENNNNEHVPPNPHPSKSCSGRNGTPCVSRPGTPTPLGYVSSRYRQTQQHHHHHNNNHHHHR

SEQ ID NO: 193591 - protein, 109 aa, Glycine max
  unsure (1)..(109): unsure at all Xaa locations
  Clone ID: PAT_MRT3847_16837C.1.pep
ARYEILRSCLQEMMRTGILTSLQDCKNAMLPHYASAKDRLNTLDFHEDATFMQLCKQLLETAEACXGMGGRSLRELPVLGDAALANPFECKPIKFLGSRVETANEERSE

SEQ ID NO: 193592 - protein, 305 aa, Glycine max
  unsure (1)..(305): unsure at all Xaa locations
  Clone ID: PAT_MRT3847_16838C.1.pep
LAKRYTFLLACXLFXSIXXVNHXAXFEXPFHLLASXIIXVPIDLPGTPFNKAIKAANAIRKFGLKIIRQRKVDLAEGKASPTQDILSHMLLTCDEKGQFMNELDIADKILGLLIGGHDTASAAITFIVKYLAELPHIYDRVYQEQMEIAKLKSPGELLNWDDVNRMQYSWNVACEVMRIAPPLQGGFREAINDFIFDGFSIPKGWKLYWSANSTHKSPEYFPEPEKFDPTRFEGQGPAPYTFVPFGGGPRMCPGKEYARLEILVFMHNLVKRFKWQKLIPDEKIIVDPLPIPAKNLPIRFHPHKP

SEQ ID NO: 193593 - protein, 65 aa, Glycine max
  unsure (1)..(65): unsure at all Xaa locations
  Clone ID: PAT_MRT3847_16839C.1.pep
FIAFLFXFRXIXLPSSMKSXSXIPLFSSPSLYLRLAVLXSIXFAANXLXLIENEEFGXLDASIWK

SEQ ID NO: 193594 - protein, 66 aa, Glycine max
  unsure (1)..(66): unsure at all Xaa locations
  Clone ID: PAT_MRT3847_1683C.1.pep
TFIVGNHVTIFFKDMQELLNDQEYDMNVLGHISYNIDIGADXYCRPKAGYTNDHMNNAHSLYGGIT

SEQ ID NO: 193595 - protein, 373 aa, Glycine max
  unsure (1)..(373): unsure at all Xaa locations
  Clone ID: PAT_MRT3847_16840C.1.pep
MAESALEKPERAPVLLKQARDLISSGDNPQKALDLSLQAMELFEKFGNGKPSLELVMCLHVTAAIYCSLGQYAEAIPILERSIEIPVIGESQQHALAKFAGHMQLGDTYAMLGQLENSIMCYTTGLEVQKQILGETDPXVGETCRYVAEANVQALQFDEAERLCQMALDIHIANNSAPSLEEAADRRLMGLICETKGNHETALEHLVLASMAMVSNDQEAEVASVDCSIGDTYLSLSRYDEAVFAYQKALTVFKTSKGENHPAVGLVFVRLADLYNRTGKIRESKSYCESALKIYENPMPGIPPEEIASGLTNISTIYESMNELEHALKLLQKALEIYNDTPGQQSTIAGIEAQMGVMYYMLGNYSKSYNTLK

SEQ ID NO: 193596 - protein, 142 aa, Glycine max
  Clone ID: PAT_MRT3847_16841C.1.pep
MRLGLPPPLTFRGAEQILGVPFFFFFFFFFLLLLLLLLLFIFHSLLVFFLLLGVMVLSQSFYDMLENPAILGLCTVIGMFFSPLLVTFLFGVIVGWLWKPKWATLGENKLATSLPKYLDFASPSSASSPSKFPVSPMKSWSF

SEQ ID NO: 193597 - protein, 129 aa, Glycine max
  Clone ID: PAT_MRT3847_16842C.1.pep
MVSESENNKCSDDHVLTKLSFLISRPTMPPETLMSPPQNTISVPFKWEEAPGKPRHCHTESDPEDSTTAVKKTLELPPRLLFLLDSTNKVSDVDGPSPTTVLDGPYVGRAMSFTTSYRTPRANWNSNFG

SEQ ID NO: 193598 - protein, 152 aa, Glycine max
  Clone ID: PAT_MRT3847_16843C.1.pep
LGDALFFPKKKFAKYYNVLDQIPAVFINLVKNLKLGPPHKYFEPQKTWFCKRCEPMSAKLSVLKPVFLLKTSLKAFIPPLHKKRKYFFEATKKVFFAKNKAVTPLGESQGVVPPFATIARQSHAFVQKLENIQWPIPQVKMVLKRLPNKPPP

SEQ ID NO: 193599 - protein, 545 aa, Glycine max
  unsure (1)..(545): unsure at all Xaa locations
  Clone ID: PAT_MRT3847_16844C.1.pep
MVSVFNEILFPPNQTLLRPSLHSPTSFFTSPTRKFPRSRPNPILRCSIAEESTASPPKTRDSAPVDCVVVCGGVSGLCIAQALATKHANANVVVTEARDRVGGNITTMERDGYLWEEGPNSFQPSDPMLTMVVDSGLKDELVLGDPDAPRFVLWNRKLRPVPGKLTDLPFFDLMSIGGKIRAGFGALGIRPPPPVXGHEESVEEFVRRNLGDEVFERLIEPFCSGVYAGDPSKLSMKAAFGKVWKLEKNGGSIIGGTFKAIQERNGASKPPRDRRLPKPKGQTVGSFRKGLTMLPDAISARLGNKVKLSWKLSSISKLDSGEYSLTYETPEGVVSLQCKTVVLTIPSYVASTLLRPLSAAAADALSKFYYPPVAAVSISYPKEAIRSECLIDGELKGFGQLHPRSQGVETLGTIYSSSLFPNRAPPGRVLLLNYIGGATNTGILSKTDSELVETVDRDLRKILINPNAQDPFVVGVRLWPQAIPQFLVGHLDLLDVAKASIRNTGFEGLFLGGNYVSGVALGRCVEGAYEVAAEVNDFLTNRVYK

SEQ ID NO: 193600 - protein, 32 aa, Glycine max
  Clone ID: PAT_MRT3847_16845C.1.pep
CTKQKMNFLLYKYYQHRSAFLLQLLISVTGNM

SEQ ID NO: 193601 - protein, 96 aa, Glycine max
  unsure (1)..(96): unsure at all Xaa locations
  Clone ID: PAT_MRT3847_16846C.1.pep
KRGNGKNPGVTKLNRLEKNPLFARGGKSKKARTNRLSKKWPTLKGKWNPPXNRAXSAGGGGVTPRGTVKFAKAQGPAPLVFFPSFLTTFAGFPRKA

SEQ ID NO: 193602 - protein, 49 aa, Glycine max
  Clone ID: PAT_MRT3847_16847C.1.pep
DTPLSTYLRRAFKTLSIGILYLSCHVWIAIHGSYQPFCVQIDTSTPLLR

SEQ ID NO: 193603 - protein, 115 aa, Glycine max
  unsure (1)..(115): unsure at all Xaa locations
  Clone ID: PAT_MRT3847_16848C.1.pep
EPLDTLNRLSPFLCSGHSDKQFAMDMIICSMLAERDTTSAALTWILWLILKPPKVEVEVDKEVLDKDAAYTHVYYEVKDMVYTHAXLRYSMTLYPADPQDTXKEAREDYSLPDGT

SEQ ID NO: 193604 - protein, 63 aa, Glycine max
  Clone ID: PAT_MRT3847_16849C.1.pep
KKKKGAGIIFTPSKIGINIGGLKGHETNISGQGKNPSAPHTKQINEKGLSNPFFTQHGTCIDS

SEQ ID NO: 193605 - protein, 76 aa, Glycine max
  Clone ID: PAT_MRT3847_1684C.1.pep
AVCQKLLTPLSLSTRSLSPTLAAYNRSKWRQLQKHFRAELTLFKYPLTLFLIFTLKKGNKKRSFFSLSITIGHRPS

SEQ ID NO: 193606 - protein, 106 aa, Glycine max
  Clone ID: PAT_MRT3847_16850C.1.pep
KEKMLPFINIRNILRLIKYTYSYKRGKKENHFKFLTQKLVNFFLKKKKIDPPKSLGTVFSWFYYPPLTFPCPRVLFTFLPPTKTGFTLHPPWLKKILFSPPFYSSR

SEQ ID NO: 193607 - protein, 108 aa, Glycine max
  unsure (1)..(108): unsure at all Xaa locations
  Clone ID: PAT_MRT3847_16851C.1.pep
NGFXIWSFNGKXCXRXXKDPLFQFIXXPSPPSLLPPEKQSEIAKILKKSSQKFEAEAQDVSLVVSXXKRXKRRLLKKEWDKWVNECNQTHKEESLQRQKFRDGHASDE

SEQ ID NO: 193608 - protein, 50 aa, Glycine max
  Clone ID: PAT_MRT3847_16852C.1.pep
IQSCDMNGESNVQGAKRILKQLSIYLPEKFVLVPNPDQTFQGGKFSSKLV

SEQ ID NO: 193609 - protein, 83 aa, Glycine max
  Clone ID: PAT_MRT3847_16853C.1.pep
FYFEFPVLTDHILIFGERRFKFEDNVDEVVSENDWNHVGVSVDVDFKWNPTEPLVVRTGLHVIKPKSSVEDIRFIDPYKPTFL

SEQ ID NO: 193610 - protein, 52 aa, Glycine max
  Clone ID: PAT_MRT3847_16854C.1.pep
GFNNILIFLKINSYEKVQRPAYSKRNLKYAFSLDKLDLNICIFFIDFSFFRR

SEQ ID NO: 193611 - protein, 285 aa, Glycine max
  Clone ID: PAT_MRT3847_16855C.1.pep
MFHCHGTRGSDLGFDLNKTPEQKAPQRRKHRPKVIKEAKPKSTRKPATQKTQMKENPHKKRKYVRKTAATPQTNVTEESVDSIVATKKSCRRALNFDLEHNKYASQSTISCQQEIDHRNEKAFNTTSDHKAKEPKNTDDNTLLLHEKQANNFQSERKLITALSETTEEPQIAKFPATEEGPALENSDLCQEGNNGSRHQYIQTKEIDNILYQSETCFENSQKTGEPICQNTLQLVPNILSNSIEAAKGSKRKYRKRTQKQHDSATNSHDTSLCQETLQANENFRG

SEQ ID NO: 193612 - protein, 103 aa, Glycine max
  Clone ID: PAT_MRT3847_16856C.1.pep
TLPRPNFFLRPPLRSKSCFKALGVPLSPSPGLWPNSRFFFRARFKLLVPRAFSQGGGVNFFPPGTRECWVFKGSPPQYGGPPLFPIGFFAPDRVFKGGVFWVP

SEQ ID NO: 193613 - protein, 128 aa, Glycine max
  Clone ID: PAT_MRT3847_16857C.1.pep
NIFGDGGLSGPNAQSVLKESNSNTAYSRLPPPLIDGPLVSRGPQLSAANYLVTSNAASPLPMPASAMARSFSTSYRGAKVAAIHDSRPLEDPNKSTISEDIDSPPLMQIALSTSQPSSDGSDTVAQAV

SEQ ID NO: 193614 - protein, 295 aa, Glycine max
  Clone ID: PAT_MRT3847_16858C.1.pep
CSCLLRPTLSRKFNSYVLPTPVDAKSSISMRSSNQVPLKIKTNLNEPMKNLWHSSPLEQKKYENIFGDGGLSGPNAQSVLKESNSNTAYSRLPPPLIDGNLSSSHDYITAYSKKIKRHAFSGPLVSNAWPTKPPVSVKSVQLFSGPLLRTSIPQPPSSSPKVSPSASPPLSSSPKINELHELPRPPTISPSNSKFLGLVGHSGPLVSRGQQLSAPNYFATSNAASPLPMPPSAMARSFSIPNIGDKVTELHESRPEEAPNKSTISEDIDSPPLMQIALSTSHPSSDGSDTVAQAV

SEQ ID NO: 193615 - protein, 97 aa, Glycine max
  unsure (1)..(97): unsure at all Xaa locations
  Clone ID: PAT_MRT3847_16859C.1.pep
MVHVFIYRNYVKTFKKPRRPYEKERLDAVVELXVNEYGLXCKIELWRVQYSLSRFRNNSRNLLTFDEEEPVPYLXGEALVQKMFRYGFLYETQYKLD

SEQ ID NO: 193616 - protein, 61 aa, Glycine max
  unsure (1)..(61): unsure at all Xaa locations
  Clone ID: PAT_MRT3847_1685C.1.pep
DLVFLVTRIFVAWKGHAYDMCPLRMNTGYGASTPEVKCAGWXRAVDAHKIFGFQINPDHCV

SEQ ID NO: 193617 - protein, 58 aa, Glycine max
  unsure (1)..(58): unsure at all Xaa locations
  Clone ID: PAT_MRT3847_16860C.1.pep
GLLKCIAQLSIFFGTLCQSIVRFECYVVMSLLIRLANFXCTNKQQKHTTRXAIGGVLK

SEQ ID NO: 193618 - protein, 47 aa, Glycine max
  Clone ID: PAT_MRT3847_16861C.1.pep
KGQVVCIIEAMKLMNEIEADQSGTIVEIVAEDAKSVSVDTPLFVIQP

SEQ ID NO: 193619 - protein, 46 aa, Glycine max
  Clone ID: PAT_MRT3847_16862C.1.pep
TFFCGVSWPFIRNKKWLSHGVLFVGNWAKGLSIFRLGLKPFGVFYN

SEQ ID NO: 193620 - protein, 118 aa, Glycine max
  unsure (1)..(118): unsure at all Xaa locations
  Clone ID: PAT_MRT3847_16863C.1.pep
HWSKKIVQVPRALTFERWTVQTDLLLFRGKLPSHHPLHLLNEEEEEPQRRRRKKKAQEEEAARRRNVMKQEDEEDEEVGRRRRXLIRKKKKRSANAGRERERLRFFFKLRKGIFAFSH

SEQ ID NO: 193621 - protein, 42 aa, Glycine max
  Clone ID: PAT_MRT3847_16864C.1.pep
LVNSRFSMCRHCPRFVRTICSTESDPALYQSGKMNQRAYPVL

SEQ ID NO: 193622 - protein, 517 aa, Glycine max
  Clone ID: PAT_MRT3847_16865C.1.pep
VSSSTGGRLQFPIYDKYLTGLERAVRKMKSNSESSLLVAVRSSKGEKILEVDGTVTTQPVLEHVGISTWPERLILTDHALHFEALRVVSYDKPKRYELSEDLKQVVKPELTGPWGTRLFDKAVFYSSSSLSEPVVLEFPELKGHARRDYWLAIIQEILYVHKFISKYKLKGVARDEALWKAVLGILRLQAIQDISSTIPIQNDAFLMFNLCDQLPGGDLILETLANMPNLRESHHENDFKGGSGMYSISALDMVSNLGFVFGASSNNSNESRIAVGEISVGEMTELERAVKESKNNHKKVISAQATVDGVKVDGIDTNLAVMKELLFPLNELAKSLQSLAYWDDPRKSLVFCLFFSYIIYRGWLGYAAALVLVLLAVFMIITRCFSQGRSVPEVKVLAPPPMNTMEQLLAVQNAVTQAEQLIQDGNVILLKFRGLLLSIFPQATEKLAFGLLSTALILAFLPTKCIVLLLFLEIFTRYSPPRKASTERLTRRLKEWWFSIPAAPVTLERDKEEKKRK

SEQ ID NO: 193623 - protein, 46 aa, Glycine max
  Clone ID: PAT_MRT3847_16866C.1.pep
DLDQSPLVCQTKVYIYVNRRDSAKFPGNPPPKKTFFPQFNVLIDRH

SEQ ID NO: 193624 - protein, 89 aa, Glycine max
  Clone ID: PAT_MRT3847_16867C.1.pep
RLEVKRCSDVSCAIRARALSNLAQCVGFLSRGERTSAVLKEFTGFGRVGDGNVGGGMNDMLRRRCMDDKAAVRKAALLLVTNLTSLLEV

SEQ ID NO: 193625 - protein, 141 aa, Glycine max
  Clone ID: PAT_MRT3847_16868C.1.pep
LSNQIEKHSQRLVTLVYPYIQITFHEFTGERLMRSEAYSAIENYLSSKASTQAKRLKADIGKNNQSLVLSMDDHEEVADEFNGVKLWWAYGKHISKSQSTISFHHPMSDEKRQRKLYTNSGAYWSHVVFEHPATFQTLAMD

SEQ ID NO: 193626 - protein, 482 aa, Glycine max
  Clone ID: PAT_MRT3847_16869C.1.pep
MKPGEMFAHIGSIVASLMFVWAMFKQFFPYQLSNQIEKHSQRLVTLVYPYIQITFHEFTGERLMRSEAYSAIENYLSSKASTQAKRLKADIGKNNQSLVLSMDDHEEVADEFNGVKLWWAYGKHIFKSQSTISFHHPMSDEKRYYKLTFHKSNRDLILGRYLSHVLKEGKAIKVKNRQRKLYTNSGAYWSHVVFEHPATFQTLAMDPKEKEMIIDDLITFSKAGEFYARIGRAWKRGYLLYGPPGTGKSTMIAAMANFLGYDLYDLELTAVKDNTELRKLLIETSSKSIIVIEDIDCSLDLTGQRRKKKEEVEEKDQRQKQQGMQEREVKSSQVTLSGLLNFIDGLWSACGGERLIVFTTNYVEKLDPALVRKGRMDKHIELSYCGYEAFKLLARNYLNIESHNLFGRICELLKETKITPAEVAEHLMPKNAFRDADLYLKSLIQALELAKEDARKSQHDPHWTENDSEDKATEKSTNYTST

SEQ ID NO: 193627 - protein, 67 aa, Glycine max
  unsure (1)..(67): unsure at all Xaa locations
  Clone ID: PAT_MRT3847_1686C.1.pep
XXXLCGPWLXXXXXAQPXXXFIAVQCXSPFRTAASTIPXCELDXXRKXSRTAXPRXNGQXLFLTXQX

SEQ ID NO: 193628 - protein, 341 aa, Glycine max
  unsure (1)..(341): unsure at all Xaa locations
  Clone ID: PAT_MRT3847_16870C.1.pep
MYSLTVKPFFTPNLVSSSSTSTSSSSISLVSFPSRSVSSISFSRNLKPKGRFGLRVEAYDSSNNDNSNPASAGDSKPPNGTLSKSRREILLEYVKNVQPEFMELFVKRAPQQVVDAMRQTVTNMIGTLPPQFFAVTITTVAENLAQLMYSIMMTGYMFKNAQYRLELQESLEQVIALPDVQDKKDVPDFASNTQXNVSGEVMFLGNGKWIEKIDAKKYIEXTGGXIDELRGHVGRQTSNGXNELLEYLKSLEPRNLKELTSTAGEDVVFAMNAFIKRLLAVSDPSQMKTSVTETSAAELAKLLYWLMVVGYSIRNIEVRYDMERVFGAPPKLAELPPGENV

SEQ ID NO: 193629 - protein, 109 aa, Glycine max
  Clone ID: PAT_MRT3847_16871C.1.pep
MYSLTVKPFFTPNLVSSSSTSTSSSSISLVSFPSRSVSSISFSRNLKPKGRFGLRVEAYDSSNNDNSNPASAGDSKPPNGTLETSSRREILLEYVKNVQPEFMELFVKR

SEQ ID NO: 193630 - protein, 125 aa, Glycine max
  Clone ID: PAT_MRT3847_16872C.1.pep
IHHSNNTHHFLDRDEEEAEAHHDDEEQQHHINNIIIPSPADADRTTTTTSSSTTTTSQEGAAAAADDDDYQRNNSCCSSSNSKNKHQELLPPAEEADVAAAADDKMILRRRTRQRRRGGKRTTAS

SEQ ID NO: 193631 - protein, 58 aa, Glycine max
  unsure (1)..(58): unsure at all Xaa locations
  Clone ID: PAT_MRT3847_16873C.1.pep
PSQMKTSVTETSAAELAKLLYWLMVVGYSIRNIEVRYDMXRVLGTPPKLAELPPGENV

SEQ ID NO: 193632 - protein, 89 aa, Glycine max
  Clone ID: PAT_MRT3847_16874C.1.pep
ELGPQVWSETKSGEAPQKMAGARPNKDDSKDSDFWKMLNEPEDQAPGGEEVPAEEQDPSPEAADSASGAPNDFQNNVQVKVIRSPADLI

SEQ ID NO: 193633 - protein, 85 aa, Glycine max
  Clone ID: PAT_MRT3847_16875C.1.pep
FYAYWRENAIDLGDYNFTLSYDTNITRQACLSAISWIVCDVLNCMLDFYILWHLVKVEVMPNLILVVDEELGIVVRLQDQARLAY

SEQ ID NO: 193634 - protein, 115 aa, Glycine max
  Clone ID: PAT_MRT3847_16876C.1.pep
KSFMGVKNKKGCQIEKRKKSYRHQKQVSNSKKNKKKRTTVRRPRQRSSSPSCCRSSCHSWCCWLLLRGVVLLSVVAAGCGCGVVLLFCFCVRGCCAFAIYYLVGLCRVSPTPAMK

SEQ ID NO: 193635 - protein, 166 aa, Glycine max
  Clone ID: PAT_MRT3847_16877C.1.pep
TYSIHNRLIVEFNRWSRIEVLLYLEEEVQFSWAGTPQNLSSNGGSFGFRNRGVSNSDQNLRFKSPLFSLPQPFPNFQLHRKPRHAARKRFSLQNPTNLFPSNLNQIPTFLRPLQLHQLLHQPLLHHRLHRFLPPEVPYLQRAPQRNNTQFQILRIQHRDNIRSIRI

SEQ ID NO: 193636 - protein, 68 aa, Glycine max
  Clone ID: PAT_MRT3847_16878C.1.pep
YYETLFNLLVGKLQLPNLKYPGHLGFKKAAKWSTFCSWEKACGENFLKVKWEPRVDWGYLPLERNLSF

SEQ ID NO: 193637 - protein, 92 aa, Glycine max
  Clone ID: PAT_MRT3847_16879C.1.pep
VILTCLAYGHGLQPNSKRCLGVIRERPWSCVWYTPCVNLCLGIAFSTVVRFRQSDTPSMVIFKLLLGYAAVMVSGRGCDHGRLGSRSHRSIA

SEQ ID NO: 193638 - protein, 45 aa, Glycine max
  unsure (1)..(45): unsure at all Xaa locations
  Clone ID: PAT_MRT3847_1687C.1.pep
AFRFCDFPHVNGSIPGTHHFPXVHSFXNIXTPCVFLSPLSFDXST

SEQ ID NO: 193639 - protein, 79 aa, Glycine max
  Clone ID: PAT_MRT3847_16880C.1.pep
VTGKDKTKDLSTLKQKLEKINGKIQPCYPHSDAPLYPTKPVCDPCHAPSYPYTNSDYLHHPQLHHHFPYPVMCLLGILI

SEQ ID NO: 193640 - protein, 33 aa, Glycine max
  Clone ID: PAT_MRT3847_16881C.1.pep
GCGLLMVSMKDQVQYYIHSVECENVLSKIPIMF

SEQ ID NO: 193641 - protein, 57 aa, Glycine max
  Clone ID: PAT_MRT3847_16882C.1.pep
FSHSHVKTGLVPNNQFPGAWKSHQHPLHAKAARGIAGLQLYIGRILVPLNDGRIAEL

SEQ ID NO: 193642 - protein, 144 aa, Glycine max
  Clone ID: PAT_MRT3847_16883C.1.pep
VYGRFEHIVLSCNATSDHGIFWIEREAEKAFQLMKAQSFETVTDPPTVQKFQRLKPIEKEHRDALERAVSLNVPHAVDTAENEPFENNEGDDASGNGRNNVSSNQSKFSGGRSNWDDVVEKLLKNKRETGMGEQNLKRDTNVTQ

SEQ ID NO: 193643 - protein, 322 aa, Glycine max
  unsure (1)..(322): unsure at all Xaa locations
  Clone ID: PAT_MRT3847_16884C.1.pep
EFLPLPKVEGDDRAQARALATLYSHPVWMVRRWTKYLGQEEAIKLMIWNNSEPSFSLRANRARGFSRDDLVTQLNALKVPHKLSPHLDEFVRIKTGLQIIIQAGLLKKGLCSVQDESAGLVVSVVDPQPGETIIDCCAAPGGKTLYMASHLSGQGKVFAIDVNSGRLRILKETAKLHQVDGVITAIHADLRTLPDSGQLKSNKVLLDAPCSGLGVLSKRADLRWNKNLEDMEQLKELQDELLDAASKLVKPGGVLVYSTCSIDPEENGDRVVAFLARHSDFHIDPVDRYVPPXFVTSSGFFFSNPVKHSLDGSFAARLVRDL

SEQ ID NO: 193644 - protein, 219 aa, Glycine max
  Clone ID: PAT_MRT3847_16885C.1.pep
FQLETSMGSVNFSSMVASLLVLSQGVTLMLSKSLLLFFDYERSYYSEYSVGFSGVLFAMKVVLNSQSENYTSVYGVIVPSRYAAWAELVLAQLLVPGVSFLGHLGGILAGLLYLKLRSTYSGSNPIKVVIRGIVDAVKWPFKFLPRRGRITGRGTVGSNRAWRCQTCTYDNNNGSLRVCEMCGTNRGVSGVSSFQRTSRSDGLPLDELRRRRIDRFGGS

SEQ ID NO: 193645 - protein, 901 aa, Glycine max
  Clone ID: PAT_MRT3847_16886C.1.pep
MLMQQVHVSNPSSSCLILQKPCLRDITHPSFQLWSRPSSFPNQRKQKRVSYGCRSNGNKIKAVAVTEAENKSVKVKATITVQPTVGGIFSEMAIERGLDDIKDLLGQSILLELASTELDPKTKLEKETIKDYAHSKHRSAQEVKYEGEFEVPDNFGEVGAIFVTNEHHREMFIKDIVLDGFLLGPVKFTCESWVHSKYDNPAKRVFFSNKSYLPSETPEGVKRLREEELEQLRGNGQGERKSFERIYDYDVYNDLGDPDSSDDLKRPVLGGNQHPYPRRCRTGRPRCDKDPLSEKRSSTVYVPRDESFSEVKQLTFSTKTLSSGLKALVPALKTLIVDKNLGFPVFSAIDDLFDEGLYLPPLKGIRSILPRLVRHIKDIQEDILLFDPPATMNKDRFFWLRDEEFGRQTLAGLNPCCIQLVTEWPLKSKLDPEIYGPAESAITTEIVEREIRGFNTVEEAIKQKKLFILDYHDLLLPLVKDVRELEGTTLYGSRALFFLTREGTLRPLAIELTRPPMDGKPQWKEVFTPCWHSTGVWLWRLAKLHILAHDSGYHQLVSHWLRTHCATEPYILATNRQLSAMHPIYRLLHPHFRYTMEINALAREALINGDGIIESSFSPGKHSILLSSIAYDQQWQFDLQSLPKDLISRGMAVEDPTAPHGLKLIIEDYPYANDGLVLWDALKTWFTEYVNLYYADDGSIVSDTELQAWWEEIRTVGHGDKKDEPWWPVLKTKLDLIDIVTTIAWTTSGHHAAVNFGQFSFAGYFPNRPTIARNNMPSEDPSDAEWELFLEKPEVIMLKCFPSQIQATTVMTVLDILSNHSPDEEYLGETVEPAWEEEPLVKAAFEKFRGKLIELEGIIDARNADRTRRNRNGAGIVPYELLKPSSEPGVTGKGVPYSISI

SEQ ID NO: 193646 - protein, 70 aa, Glycine max
  Clone ID: PAT_MRT3847_16887C.1.pep
GVLNGFCFRTSRLKSRGGGKWVRSGMWSFQTFHLYSSLDLFGLRFWITNQYLDRHHLIRYLLDILPFIFF

SEQ ID NO: 193647 - protein, 103 aa, Glycine max
  Clone ID: PAT_MRT3847_16888C.1.pep
NWRVTETVQANASTHEHLPAVADHQQQQQVLQQETKKVVLPAAVLFHTHHNQPQTKPCKITTQATISIHQIKRWKRRAATSATPGTVQIRSTGGGIKSTAGRE

SEQ ID NO: 193648 - protein, 96 aa, Glycine max
  Clone ID: PAT_MRT3847_1688C.1.pep
KGQGLGLNSSLQLFLGVEKARGGSLWLGFFSNPRWGFLGGERKKPFVPQPWENWGRGSQGPKKFRSWGCPGFLFRVGFLGGKFFYGANFRPWVKVG

SEQ ID NO: 193649 - protein, 82 aa, Glycine max
  unsure (1)..(82): unsure at all Xaa locations
  Clone ID: PAT_MRT3847_16890C.1.pep
RPKKLITXQNKHITIRISQKQNNQLXDIKCQSVIMLENLNIFFFFFFCTMRLLLRSMFPSRKYHKTSYYILSMHKLKKSTKH

SEQ ID NO: 193650 - protein, 109 aa, Glycine max
  unsure (1)..(109): unsure at all Xaa locations
  Clone ID: PAT_MRT3847_16891C.1.pep
IKTDITCGQLANFPAADMETLNTYXRPAAMEIIKDAFENCSFFXLFNHGISIALMDTAEKLTIEHYTMTMEHRFKEMVTSKXFESVHSEINDLDCESTYFLRHLPLSNV

SEQ ID NO: 193651 - protein, 128 aa, Glycine max
  Clone ID: PAT_MRT3847_16892C.1.pep
MRVNTGEKTGRAMNSAMKGRARGHANTDSYTNCEQDSDRWTTASTIAMTTKPNANAWAEAWSKQTVKHTEINCDTRWTTARTDDRKEAIEGTIDCQKCAHKSDRRTYPQKNPQKNMGIKKRTVKQSTP

SEQ ID NO: 193652 - protein, 65 aa, Glycine max
  Clone ID: PAT_MRT3847_16893C.1.pep
VGRVESKIDVDNGETPSEVAAFSSVTECWRLREKLIALQLPENVPPRGKYLDQEEPPAVVFSQPY

SEQ ID NO: 193653 - protein, 58 aa, Glycine max
  Clone ID: PAT_MRT3847_16894C.1.pep
HHSPNTLSLTSGLPMSLNGLVTVQCTCRQNDCFNVVDQVIIRSSPIKPVNLTHLAHNG

SEQ ID NO: 193654 - protein, 50 aa, Glycine max
  unsure (1)..(50): unsure at all Xaa locations
  Clone ID: PAT_MRT3847_16895C.1.pep
RGXCSRXDXCEYAHGVFECWLHPSRYRTEACKDGRNCKRXVCXFXDTPRX

SEQ ID NO: 193655 - protein, 108 aa, Glycine max
  Clone ID: PAT_MRT3847_16896C.1.pep
ALKQNSVHTASQDRRPKHKVAKRPFDDDEDEVDFRNVIRNIFNYNPNKFVDDDDDDNMEAGFDEILREEKRSEMIAKREDEEQLRLIEEEEERERRRKMAKLKKRKLG

SEQ ID NO: 193656 - protein, 455 aa, Glycine max
  Clone ID: PAT_MRT3847_16897C.1.pep
MRGYGDEGDGYDDYYEDEDEYEEEAEEEYEEEEEAPRKPSKEEMEYLELRQKLKESIRKQMKKESSGSGTSRRDSTDRSKNKLPYDNYGSFFGPSQPVIAQRVIQESKSLLENQHLASRFSDPHRIKKNQNKVPSGGSKSSSHNLAPKVSEMKVKAQKIKNTRDYSFLLSDDAELPASRKGPPSLNIPVRDQEGRPAQVPARNKLPLSNGGKHVRASHEERNVGSAAGHLPPKSGSSYRTSSTSKPSMASADSRKQPGNNSGNGPGRPVGPKGLPSKISVGTTGNKSSTPAIKNPVNGMPKSLPSKNHPSIPKQISVEQRKDIRELYRPKMAPKQPVASSKPQINRPLKQNSVHTASQDRRPKPKAAKRPFDDEEDEVDVRNMIRNMFNYNPNKFVDDDDVDDMEAGFDEILREEKRSEMIAKKEDEEQLRLIEEEEERERRRKMAKLKKRKLGY

SEQ ID NO: 193657 - protein, 178 aa, Glycine max
  Clone ID: PAT_MRT3847_16898C.1.pep
INGVQYKVPAYLGSISVCLLVAVVSLGLSIFIVPRQVAPWTGLLLMYEWTFTIFFILFGGYLNLIYHRGRIIASQMPSSLSHPESSDDDSEKVHQRQMSSCDAATWFYGLGMAFLAIATPSLPFLFGITALFLRLALMVVGGAILACFLTYSSERLAIRSFLKGLEERDVARNANFCC

SEQ ID NO: 193658 - protein, 539 aa, Glycine max
  unsure (1)..(539): unsure at all Xaa locations
  Clone ID: PAT_MRT3847_16899C.1.pep
PFAFEIIYPKGAEIDVRAIVVGDHTMSVLEIWGAEYQEQDAILVKPESRDLLESICNREKVSMAVIGTISGDGRVVLVDSVAAQKSISNGLPPPPPAVDLELEKVLGDMPKKTFKFNRVVYEREPLDIVPGLXIDSLKRVLSLPSVCSKRFLTTKVDRCVTGLVAQQQTVGPLQIPIADVAVTAQTFVDVTGGACAIGEQPIKGLLDPKAMARLAVGEALTNLVWAKVTSLSDVKASGNWMYAAKLDGEGADMYDAAISLSEAMIELGIAIDGGKDSLSMAAHAESEVVKAPGNLVISVYVTCPDITKTVTPDLKLKDDGILLHIDLSKGKRRLGGSALAQAFDQVGDECPDLDDVPYLKKAFEGVQDLLSDELISAGHDISDGGLLVCALEMAFAGNCGLSLDLASQGTSLFQTLYAEELGLVLEVNKKNLALVMDKLSNVGVSAEIIGQVTANPSIEVKVDGETYLPVPTRFPRVGWGVPSLLLVLSLRWASWVVMAFVRLNRRLLPSSAVSVARSFVPWRWHLLVIVDLVWTCIAR

SEQ ID NO: 193659 - protein, 52 aa, Glycine max
  Clone ID: PAT_MRT3847_1689C.1.pep
ELDPKALGPMLTFFTEARLFIPSTHWFSFIRGPRLFNMPLFLKKNTNQTMIF

SEQ ID NO: 193660 - protein, 47 aa, Glycine max
  Clone ID: PAT_MRT3847_168C.1.pep
TVLTREYLYARPGCLVDYSPQRIAQLGANKCTNKTLCEENLDVLLPA

SEQ ID NO: 193661 - protein, 191 aa, Glycine max
  unsure (1)..(191): unsure at all Xaa locations
  Clone ID: PAT_MRT3847_16900C.1.pep
LSLHCKYFLVPSSWISKWRNYINLAVKNSDKPETLDGVIDSLMCEKHSRLIERPPELVFRRGAIIARESSVSGLTIISENDWKCFCEEWSGIETKGISARIENVNDSENALTGSCREMPICEDQLNTWDKVNYESGTGHIVIKTCPEVCESCVGEKEXSCELMQKLNYCNQDICVILVRGKEVPRSILEAS

SEQ ID NO: 193662 - protein, 103 aa, Glycine max
  Clone ID: PAT_MRT3847_16901C.1.pep
MPGNEVGDRVHNFFGQENLSQGQYHSQEVDGNWPGLSNNLWAGSQRPTVAPFISNLKNFNLQQSDFEQGHTSTPHLRHGFEPGSIKFEALTLAEINPQTNRQL

SEQ ID NO: 193663 - protein, 244 aa, Glycine max
  Clone ID: PAT_MRT3847_16902C.1.pep
TRLPFCAVLFCCYRSFLKNQGYFGSCYRTSLCDHVRHLYYRIKSGGPLAYTTISTSTLNSPHKLINGAQYKAPAYMGSISVCVCLLAAVVSLGLALLIVPRQVAPWTGLLLMYEWTFTIFFILFGGYLNLIYHRGRIMTSQTPSSLSHHEYSDDDSGKVHQRQMSSCNAATWFYGLGMAFLAIATPSLPFLFGITALFLRLALMVVGGLILTCFLTYSSEHLAIRSFLKGLEERDASRNANFCC

SEQ ID NO: 193664 - protein, 59 aa, Glycine max
  Clone ID: PAT_MRT3847_16903C.1.pep
IDQTFENWTQSKTKFSINTFLNNGFLIFFCGPPVSFIIKLYPIGSIFSIGSPVGFLLSP

SEQ ID NO: 193665 - protein, 90 aa, Glycine max
  Clone ID: PAT_MRT3847_16904C.1.pep
TLSTPDSVNAALSIHMLSGPQWVQTTSRVGTRAVIWNLMPTLGPGGGSWHSTLFLVDSCRIGGDDQWPLIGCYTYTTKFLPSVSLLCAIW

SEQ ID NO: 193666 - protein, 49 aa, Glycine max
  Clone ID: PAT_MRT3847_16905C.1.pep
HRCSPLTFEIVCQILSNVLLLPANSEFADKAMSDRSRSYSSTKYEFCSE

SEQ ID NO: 193667 - protein, 39 aa, Glycine max
  Clone ID: PAT_MRT3847_16906C.1.pep
TKASLISYSPYKDIVLTHSIKYYQIISFHNYIFLLFNIT

SEQ ID NO: 193668 - protein, 138 aa, Glycine max
  Clone ID: PAT_MRT3847_16907C.1.pep
SSQTPVASAASGLVGDRRISLGAGAGCAGLAAQLEQGYRQAREVVRSNNGIKVLLHLLQPRIYSPPAALDCLRALACRVLLGLARDDTIAHILTKLQVGKKLSELIRDSGSQTLGTEQGRWQAELSQAAIELIGIVTN

SEQ ID NO: 193669 - protein, 84 aa, Glycine max
  Clone ID: PAT_MRT3847_16908C.1.pep
VRRVLRPGGLYVFVEHVAAKDGTFLKFMQRVLDPLQQTLADGCHLSRETGNDISRAGFSSVELNTAFLSSATFINPHAYGIAYK

SEQ ID NO: 193670 - protein, 72 aa, Glycine max
  Clone ID: PAT_MRT3847_16909C.1.pep
HDVLSVVFDQTRVQHSHHLVGAVRSGPTSMSRPSCEHYGDVYILCRHVSHDQRARLTCRCSGMKSYDERTRS

SEQ ID NO: 193671 - protein, 80 aa, Glycine max
  Clone ID: PAT_MRT3847_1690C.1.pep
QKFHYQLQNMSCIAHLFIHLKGENTSESLTSSGEVLILTCLSFSFLKITCRIAFGENKSHVVRRTTAQKLTTLQKYVIES

SEQ ID NO: 193672 - protein, 60 aa, Glycine max
  unsure (1)..(60): unsure at all Xaa locations
  Clone ID: PAT_MRT3847_16910C.1.pep
MEAKIGQTYLLLQTFFLKQFMVKDLGHLKYFLGMETASSNNSILISQRXYTLDLLKETGK

SEQ ID NO: 193673 - protein, 76 aa, Glycine max
  Clone ID: PAT_MRT3847_16911C.1.pep
VHMALLPPLIGLMLMAGGVPGARSTLIDGVAVAVALTLTCGVYVQVSRRVRITFEFRDRAPGEHAWFKRQKRAAPG

SEQ ID NO: 193674 - protein, 45 aa, Glycine max
  Clone ID: PAT_MRT3847_16912C.1.pep
GMFRTLHLRFAYDPVICFVVASWLWAPAFVRTSDVSQTRNRLRAF

SEQ ID NO: 193675 - protein, 60 aa, Glycine max
  Clone ID: PAT_MRT3847_16913C.1.pep
KGPPHLFFFFIFFIYYVFCYFNVFLYYFFFFFYFFFLFFFYFFFFFFFFFFFFFFKKSVL

SEQ ID NO: 193676 - protein, 322 aa, Glycine max
  Clone ID: PAT_MRT3847_16914C.1.pep
LTIQIHSIALPLLLICGLPAEVVHFKISHGKKMNYLLLEVNPRMTLFTGSSRVADKWAVDLKGRVKLEDAGFDWKILGPDVHQEDYIAWVCDQDAYACSGQKCSAQSLLFMHENWSKTSLLSKLKDLAERRKLEDLTIGPVLTCTTGMMLEHKNKLLEIPGSKLLFGGSPLENHSIPPIYGAIKPTAVYVPLEEIMKDKNFDLVTKEIFGPFQVITDYKNSQLSVVLDAVERMHNHLTAAVVSNDPLFLQEVVGNSVNGTTYAGLRARTTGAPQNHWFGPAGDARGAGIGTPEAIKLVWSCHREVIYDFGPVPKDWKTPQST

SEQ ID NO: 193677 - protein, 179 aa, Glycine max
  Clone ID: PAT_MRT3847_16915C.1.pep
FSWADAWADAWAVSWGKTVSTLFGKWDESMHYVNGDYTGKGKGHESLSDARLLWKRSRAPKFPTRYNFTRFAITLNELTPGLKEKLPPTDSRLRPDQRHLENGEYDMANAEKLRLEQRQRQARKMQESGWEPRWFGRDKASGSYRYLGGYWEARKQGNWNSCPDIFGHIPSDHVSDEGQ

SEQ ID NO: 193678 - protein, 55 aa, Glycine max
  Clone ID: PAT_MRT3847_16916C.1.pep
LRPEGTVVVRDTPEVIEKVARVAHAVRWKPTIYNKEPESHGREKIPRVRKTFWKS

SEQ ID NO: 193679 - protein, 101 aa, Glycine max
  Clone ID: PAT_MRT3847_16917C.1.pep
PVTNSQKKSPPGGGLFYLNGFTGGGVLLRPIPFKGVDPLLIALNCEGEDINPPFQFPLGSLLDRKNLPFFFPSKGSELTTVCLYPDLQTQTVLNFWINPQP

SEQ ID NO: 193680 - protein, 47 aa, Glycine max
  Clone ID: PAT_MRT3847_16918C.1.pep
LKLLYTQKGAFCGVLSVMEIDRNHMETHSAGFAFDGIETNYSFLFIF

SEQ ID NO: 193681 - protein, 232 aa, Glycine max
  unsure (1)..(232): unsure at all Xaa locations
  Clone ID: PAT_MRT3847_16919C.1.pep
MSSELRATSSSSAEATFGLDEQISQLMQCKPLSEHQVGVLSEKVKEILMDXSNVPPVKSPVSICGDIHGQFHDLAELYXIGGTCLDTKYFYMGDYVDRGYYSXVESVXLVVSLKVRYSKRLTILRXNHESRQITQVYGFYDECLRKYCSASVRMILSXFYNICKMTVLVYSGIYVLRGQFSTCFVRYQFMRNFGHVQLVAQDLLFCEMLINHGFKWSGLGRCTTLFCMLSTK

SEQ ID NO: 193682 - protein, 211 aa, Glycine max
  Clone ID: PAT_MRT3847_1691C.1.pep
MVRGKTQLRRIENATSRQVTFSKRRNGLLKKAFELSVLCDAEVALIIFSPRGKLYEFASSSMQDTIERYRRHNRSAQTVNRSDEQNMQHLKQETANLMKKIELLEASKRKLLGEGLGSCSLEELQQIEQQLERSVSSVRARKNQVYKEQIDQLKEKERALYAENARLCEQYGGIQPQPATKDPKEIQPYAESSPSSEVETELFIGLLRSSY

SEQ ID NO: 193683 - protein, 258 aa, Glycine max
  Clone ID: PAT_MRT3847_16920C.1.pep
VIWKKPAAEMCLPNQNEFGLDLCDDSDDPSFAWYFKLKKCVTRMSSVKGEYAIGTIPKWPERLTASPLRSTVLKNGADVYEADTKRWVRRVAHYKNSLKIKLGTSAVRNVMDMNAFFGGFAAALNSDPVWVMNVVPSHKPITLDAIFDRGLIGVYHDWCEPFSTYPRTYDLIHVASMESLVKDPASGRNRCTLLDLMVELDRILRPEGTVVVRDTPEVIEKVARVAHAVRWKPTIYNKEPESHGREKILVATKTFWKS

SEQ ID NO: 193684 - protein, 50 aa, Glycine max
  Clone ID: PAT_MRT3847_16921C.1.pep
GGFAEGGLSWLTPGFSSSGVFKRTPIDWILVAILEGFEVPFKANLGLNLL

SEQ ID NO: 193685 - protein, 57 aa, Glycine max
  unsure (1)..(57): unsure at all Xaa locations
  Clone ID: PAT_MRT3847_16922C.1.pep
PKPSIILFKLAIMESSRTHEVGRSHVSHYLXXXXXTXXXXGVLHANERVNPDAYEXF

SEQ ID NO: 193686 - protein, 39 aa, Glycine max
  Clone ID: PAT_MRT3847_16923C.1.pep
QKILILSVFLNVKLAYPNILMFTNPAPTRYFAHCSNITR

SEQ ID NO: 193687 - protein, 126 aa, Glycine max
  unsure (1)..(126): unsure at all Xaa locations
  Clone ID: PAT_MRT3847_16924C.1.pep
EDGVXEKTDQKGGSDPXXDIVPGVRXVWHXXSLVTESFSSFLLVTXXFFLLFFLXXSLLTNTPLHFNHXXLNFKPSVFIFRPSNRIXSIFLTMFLXFXWSLHTPSLARSXNISTRRRKKKEAIFVT

SEQ ID NO: 193688 - protein, 395 aa, Glycine max
  Clone ID: PAT_MRT3847_16925C.1.pep
MNIHHFNETEFSSLESQEQVHSSLLGRTPLMVGLTLIQSAAGKGAVCLDGTLPGYHLHRGYGSGANSWVVNLEGGGWCNDVRSCVYRKKTRRGSSTFMEKQIPFTGILSNNVEDNPDFFNWNRVKIRYCDGASFAGDGEDKAAQLQFRGQRIWSAAIEDLMSKGMRFARQALLSGCSAGGLATIIHCDEFRGFFPQTTKVKCLSDAGLFLDAIDVSRGHTIRNLFSGVVRLQGVQKNLPHICTSHLDPTSCFFPQNLIAGIRTPLFILNTAYDSWQVQTSLAPSSADPHGFWHDCRLNHAKCTSSQIQYLQGFRNQMLNAIKGFSRSRQNGLFINSCFAHCQSERQDTWFADNSPVIGNKAIALSVGDWYFDRAVVKAIDCPYPCDNTCHHLVFR

SEQ ID NO: 193689 - protein, 131 aa, Glycine max
  Clone ID: PAT_MRT3847_16926C.1.pep
LELNTAYDSWQVQTSLAPSSADPHGFWHDCRLNHAKCTSSQIQYLQGGFRNQMLNAIKGFSRSPQNGLFINSCFSHCQTERQDTWFADNSPVIRNKAIALAVGDWYFDRAGVKAIDCPYPCDNTCHHLIFR

SEQ ID NO: 193690 - protein, 321 aa, Glycine max
  unsure (1)..(321): unsure at all Xaa locations
  Clone ID: PAT_MRT3847_16927C.1.pep
MAEWQSLLQSILVGLIFSYLLAKLISIVVSFKDDNLTVTRASAAETTATRAEQFEDALKRDDAVSSDARPFEEESVVAEHGSVRIDSDGDYDDDWEGVESTELDEAFSAATAFVAAAAADRLSQKVSSDVQLQLYGLYKIATEGPCSTPQPSPLKMTARAKWQAWQKLGAMPPEDAMQKYIDIVTEIYPTWLDGSSLRNKSGDSGGHGSEAKGPMGPVFSTFVYEEEYGSDSQMEAIHGFAREGDMANLLKCIENGVSMNXRDNDGQTPLHYAVTCEREAIAEYLVKHNADIYSKDNDGSSPRDICESNWPCMQHVGEEVN

SEQ ID NO: 193691 - protein, 92 aa, Glycine max
  Clone ID: PAT_MRT3847_16928C.1.pep
THASDGCEKTTEDHKMARQLKEMGVVKSGEEELGIGTLVFVLCVTLSLIATIIFFCADEVPKNSKKASQDNNYGGSACATGCGAACGGGCGG

SEQ ID NO: 193692 - protein, 44 aa, Glycine max
  Clone ID: PAT_MRT3847_16929C.1.pep
KPPNPSLSYFVLLLSSSKAIVHFPMLKSPNNRDKWVIRPRACNN

SEQ ID NO: 193693 - protein, 211 aa, Glycine max; identical to SEQ ID NO: 193682
  Clone ID: PAT_MRT3847_1692C.1.pep

SEQ ID NO: 193694 - protein, 47 aa, Glycine max
  Clone ID: PAT_MRT3847_16930C.1.pep
AGEHPSLFVLDSPAHAFGNFCRALLQRLVTRLRTRYACLLGSRLASR

SEQ ID NO: 193695 - protein, 221 aa, Glycine max
  Clone ID: PAT_MRT3847_16931C.1.pep
GISYVLLLNIVCKLANKLTSFPVSSPFRRHAWQKLRAMPPEDAMQKYIDIVTEIYPTWLDGSSLRNKSGDSGGHGSEAKGPMGPVFSTFVYEEEYGSDSQMEAIHGFAREGDMANLLKCIENGVSMNLKDSEGRTPLHWAVDRGHLNVTELLVGKNADVNAKDNDGQTPLHYAVTCEREAIAEYLVKHNADIYSKDNDGSSPRDICESNWPCMQHVGEEVN

SEQ ID NO: 193696 - protein, 76 aa, Glycine max
  Clone ID: PAT_MRT3847_16932C.1.pep
RGEKKIWEGPTISYFSFWGPTLKVKKLGAPDGYGASLLKLGEFELCLGKTFFLGLTFSLNGGHLPLVFLQTSPFFF

SEQ ID NO: 193697 - protein, 160 aa, Glycine max
  Clone ID: PAT_MRT3847_16933C.1.pep
MKVRNKSGDSGGHGSEAKGPMGPVFSTFVYEEEYGSDSQMEAIHGFAREGDMANLLKCIENGVSMNLKDSEGRTPLHWAVDRGHLNVTELLVGKNADVNAKDNDGQTPLHYAVTCEREAIAEYLLKHNADIYSKDNDGSSPRDICESNWPCMQHVGGEVN

SEQ ID NO: 193698 - protein, 106 aa, Glycine max
  Clone ID: PAT_MRT3847_16935C.1.pep
MAEWQSLLQSIFVGLIFSYLLAKLISIVVSFKDDNLTVTRAAAAETTTTTRDDAVSSDARPFEEESMVAEHGSVRNDSDGDYDDDHWEGVESTELDEAFSAATAFV

SEQ ID NO: 193699 - protein, 107 aa, Glycine max
  unsure (1)..(107): unsure at all Xaa locations
  Clone ID: PAT_MRT3847_16936C.1.pep
SDEVLSQGVDEECSSNYSEREACTIRKSKSERSSRWYSDRMRRGRGKNDLDEAQVTDVYNYRIFAATWNVAGKPPPCYPSLEDCLHTSPPADIYALGFQXEIVPLTA

SEQ ID NO: 193700 - protein, 49 aa, Glycine max
  Clone ID: PAT_MRT3847_16937C.1.pep
KHAPLSMEPYRLYRIVYSIPNLIWVPMGYLELGSTYYTITIAKFCILNV

SEQ ID NO: 193701 - protein, 71 aa, Glycine max
  Clone ID: PAT_MRT3847_16938C.1.pep
MPSEMESNNAEYVTLGGEGSTPKLEKMSKVSIMPLMFLIFYEVSGGPFGVEDTVRAAGPFVALLGFLLFPF

SEQ ID NO: 193702 - protein, 61 aa, Glycine max
  Clone ID: PAT_MRT3847_16939C.1.pep
VARPQHAAVRLDTEPAMTGVVIEHPAIVDASVAPGADYLPSATQAGDFGTVEGAWAAVPSE

SEQ ID NO: 193703 - protein, 209 aa, Glycine max
  Clone ID: PAT_MRT3847_1693C.1.pep
MVRGKTQMRRIENATSRQVTFSKRRNGLLKKAFELSVLCDAEVALIIFSPRGKLYEFASSSMQDTIERYRRHNRSAQTVNRSDEQNMQHLKQETANLMKKIELLEASKRKLLGEGLGSCSLEELQQIEQQLERSVSNVRARKNQVYKEQIDQLKEKERALYAENARLCEQYGIQPQPATKDPKEIQPYAESSPSSEVETELFIGLPRSI

SEQ ID NO: 193704 - protein, 61 aa, Glycine max
  Clone ID: PAT_MRT3847_16940C.1.pep
SKAWVSFIGKTRPPLSKGDSVRNSMSPPPLPSVNKFAQTGDWFRSLIRRLKENYRLDQKAL

SEQ ID NO: 193705 - protein, 48 aa, Glycine max
  Clone ID: PAT_MRT3847_16941C.1.pep
LFVFNRLIKESSIYTYHSIYSLNKIKLKNKVYSYIYIITFILIFILNY

SEQ ID NO: 193706 - protein, 102 aa, Glycine max
  unsure (1)..(102): unsure at all Xaa locations
  Clone ID: PAT_MRT3847_16942C.1.pep
XIGXQEEKRVFFFFFFFFFFLTPNTGNRILFKQISIFEQVFAAFLGKKPDLKKRGVPYNKERGNFNLETLKTKEPGGGTGPGTKTGLLKEGNHRCPQVPLFF

SEQ ID NO: 193707 - protein, 126 aa, Glycine max
  unsure (1)..(126): unsure at all Xaa locations
  Clone ID: PAT_MRT3847_16943C.1.pep
MAEEAVLGYLEKNSEIRDSGEFAAELGIDHNEIVNVIKSLHGFGYVDAQDIKRETWVLTDEGKTYSSVGSPEVQLFFAIPPEEGISKQDLQKKVEPSVFKIACAQAAKXKWVEKGNNLLLERNGFV

SEQ ID NO: 193708 - protein, 102 aa, Glycine max
  unsure (1)..(102): unsure at all Xaa locations
  Clone ID: PAT_MRT3847_16944C.1.pep
QETLPKNVAAQLLSCKLDTVTVLYYPEWAPINCRVHRQPIHITERYYVMKXNDVIIEYDACTIPNDCSSXVVAKVGDHNQMVGLHAAXSLGRLRYTSLIPYI

SEQ ID NO: 193709 - protein, 56 aa, Glycine max
  Clone ID: PAT_MRT3847_16945C.1.pep
TSSYIVGEFALNEFYRHQASAIKASKIQATPNLPPFNKVQLLCSFFVVAVSFLFPF

SEQ ID NO: 193710 - protein, 54 aa, Glycine max
  Clone ID: PAT_MRT3847_16946C.1.pep
KGLPPPWSFHQKGKRVGIATFPKSLVGMIHHHPTLKFERKKILVFKKSLILLCP

SEQ ID NO: 193711 - protein, 46 aa, Glycine max
  Clone ID: PAT_MRT3847_16947C.1.pep
VSIWPYPPFFQNATIHEFIIEEWRISVILFPDRSIQIRPPVGSIHS

SEQ ID NO: 193712 - protein, 86 aa, Glycine max
  Clone ID: PAT_MRT3847_16948C.1.pep
MGNCCSNSTNTLTRTTNGHLSTQSTSSSYAIITISYTSTTTTSTTSSVLTSISINSTISESSGGKSYPNEQILPTSNLMISTFAES

SEQ ID NO: 193713 - protein, 103 aa, Glycine max
  Clone ID: PAT_MRT3847_16949C.1.pep
MILKRGLSGSSGDKFRTWMGITVADTDNCAVTTEANNLYFIKVNGIKGRLNHLPSICDGDMVMVTANKAKPDLRKKVLASVILRQSKPLRRKDSVYMYCQDNA

SEQ ID NO: 193714 - protein, 47 aa, Glycine max
  Clone ID: PAT_MRT3847_1694C.1.pep
VFETIVYNLIKRIFSLNMRVGIWIFIYTCFKEYKYKFFSSERVFKRK

SEQ ID NO: 193715 - protein, 39 aa, Glycine max
  Clone ID: PAT_MRT3847_16950C.1.pep
LNGVCTSPSLRIYYALCVGHFEKKEQYHLCFCSVLEGFE

SEQ ID NO: 193716 - protein, 63 aa, Glycine max
  Clone ID: PAT_MRT3847_16951C.1.pep
ELEVVKSSKALALEKLKILRENAMKDKISNVTKPSSLIIISKFEYEYLRNHARKSNEIAEKVK

SEQ ID NO: 193717 - protein, 38 aa, Glycine max
  Clone ID: PAT_MRT3847_16952C.1.pep
ESHVQRKVSSRDSSCESSRDASSKSNIVIGWQDGSLST

SEQ ID NO: 193718 - protein, 332 aa, Glycine max
  unsure (1)..(332): unsure at all Xaa locations
  Clone ID: PAT_MRT3847_16953C.1.pep
MRKRKGASAVVEDEEENENEDCEGNGFFACYLLTSLSPRYKGHTYIGFLIQLVXLFTVNPRRRIRQHNGEIGCGAWRTRKRRPWEMVLCIYGFPTNVSALQFEWAWQHPVESLAVRKAAVEFKSLSGIANKIKLAYTMLTLPSWQSMNITNEDDNIDEVEFNNNTSTSGSVPDVGDDFVTPDSPENPNHRDKISEAFEWNKESEVRQPLGNSFSSQEQSQPFSSTTPLTMKSSSTTSLHRVDIIEDDFMSVINKSGADLIQPEPEQSGATSAANKNHDISHTFVVPNEAEIIDLSTPSPSCRSVLDRKKRRVSSSVGTDFIDLTNSPNFVQL

SEQ ID NO: 193719 - protein, 283 aa, Glycine max
  Clone ID: PAT_MRT3847_16954C.1.pep
MNTNNDTEKNQSFPEAQGASSSSSSPPNVGTENWGTHIMGTPAVPSSHPDNKKAALQSGQPQPVQYYHDQHQHPYVQHSPVDKPSNSPMESILNMFDSWSKKAEATAHNVWHNLKTGPSVSSAALGKMNLTVKAISEGGFESLYKQTFTTYPNEKLKKSFACYLSTSTGPVAGTLYLSNIHVAFCSDRPLCFTAPSGQETWTYYKVMVPLGKVGVVNPVTMRENPSEKYIQVVTVEGHDFWFMGFVNFDKAVKNISEGISHFVAPGVAVPSTSGSEANRKNFQ

SEQ ID NO: 193720 - protein, 324 aa, Glycine max
  Clone ID: PAT_MRT3847_16955C.1.pep
MRKRKGASAVVEDEEENENEDCEGNGFFACYLLTSLSPRYKGHTYIGFTVNPRRRIRQHNGEIGCGAWRTRKRRPWEMVLCIYGFPTNVSALQFEWAWQHPVESLAVRKAAVEFKSLSGIANKIKLAYTMLTLPSWQSMNITNEDDNIDEVEFNNNTSTSGSVPDVGDDFVTPDSPENPNHRDKISEAFEWNKESEVRQPLGNSFSSQEQSQPFSSTTPLTMKSSSTTSLHRVDIIEDDFMSVINKSGADLIQPEPEQSGATSAANKNHDISHTFVVPNEAEIIDLSTPSPSCRSVLDRKKRRVSSSVGTDFIDLTNSPNFVQL

SEQ ID NO: 193721 - protein, 108 aa, Glycine max
  Clone ID: PAT_MRT3847_16956C.1.pep
GKKGPKRVYFPFKKTLGYYWLQSKRAQLNHINYDGGGGCNRIRKTLRVTSPIWEHCHQAERNTHTHRTQTKGGEKRGEKKIRGTGLHTHQHIGRAPGPPTWTPYGGFG

SEQ ID NO: 193722 - protein, 84 aa, Glycine max
  unsure (1)..(84): unsure at all Xaa locations
  Clone ID: PAT_MRT3847_16957C.1.pep
GLRQYLDNNMDGFYIAPAFMDKLVVHITKNFMTLPNIKVPLILGIWGGKGQGKSFQCELVFAKXGIXPIMMXAGXLESGMEPQQ

SEQ ID NO: 193723 - protein, 84 aa, Glycine max
  Clone ID: PAT_MRT3847_16958C.1.pep
AQLYYYVLVYPKVMTSVYVAKAFLYCCFQHVLNSTAGTSTSCHLVHNYLLLYLIMCLLIIGDQRPESVNIDAPDINGTRFFSQL

SEQ ID NO: 193724 - protein, 61 aa, Glycine max
  Clone ID: PAT_MRT3847_16959C.1.pep
LLSAILHSQHFFRSSLEFRFRSCILHPLGCSVHASSARVFGDLPPAGVEPTPLFTLSRSRL

SEQ ID NO: 193725 - protein, 186 aa, Glycine max
  Clone ID: PAT_MRT3847_1695C.1.pep
MILKVVHTLLSMKAIFIGTMPDANVIIKKLREAEGLTFGNRVYWVRFDEEFSDKKFKSSSPFGIKYTFHLEDAVDCPEWIVPFHVFKSLAEENDFELVFAKNSHEFVHEYMKKPEFVELMRRLGALGDGNQDQSTLSADEWEAAYLYMSFVLRKRGQPDKTQQSGRRNRGSMHISEEDIMYISTDD

SEQ ID NO: 193726 - protein, 95 aa, Glycine max
  unsure (1)..(95): unsure at all Xaa locations
  Clone ID: PAT_MRT3847_16960C.1.pep
NNMDGFYIAPAFMDKLVVHITKNFMTLPNIKACHYKHINSLHKLNSXTFAKLGDTFIFFSSIFYQVPLILGIWGGXKGQGKSFQCELVFAKMGIK

SEQ ID NO: 193727 - protein, 50 aa, Glycine max
  Clone ID: PAT_MRT3847_16961C.1.pep
GSSSKTTQKRTANPFQRAHHTPPRGTIKNDATAETGTTRTTQLNNSKDGT

SEQ ID NO: 193728 - protein, 134 aa, Glycine max
  Clone ID: PAT_MRT3847_16962C.1.pep
MNDTDILPLVSMNATCDALACDEDTYRLLQPFWDFLRLNYGHILRSPLFPPFFALSIDYIWVAVFTFIDVCCTEVPFFKQAKIQKDRKVTWDLIKESLHLQLFNQLLWIYPMALVQLLWVPEEKLPALAPTVWE

SEQ ID NO: 193729 - protein, 46 aa, Glycine max
  Clone ID: PAT_MRT3847_16963C.1.pep
EYKDGDCMLVGDVPREMFTDSCLRLKIMKSLETIELAPRAMDKCKS

SEQ ID NO: 193730 - protein, 45 aa, Glycine max
  Clone ID: PAT_MRT3847_16964C.1.pep
NMKPSSILMLGQNLYIALCLTNRLQASKLRLGTDLQCYFCVGQLD

SEQ ID NO: 193731 - protein, 41 aa, Glycine max
  Clone ID: PAT_MRT3847_16965C.1.pep
VVSLSKKKKKKKKKKKKKKKKKKKKKKKKKKKKGRSRLVLA

SEQ ID NO: 193732 - protein, 59 aa, Glycine max
  Clone ID: PAT_MRT3847_16966C.1.pep
TDMLVHQRTRIRAKAFSFTCSTGLVFEVVSSQIMLHQLLASFTRMCVCTPQTQLQRTGT

SEQ ID NO: 193733 - protein, 133 aa, Glycine max
  unsure (1)..(133): unsure at all Xaa locations
  Clone ID: PAT_MRT3847_16967C.1.pep
MFSAGTGRDVTPHEFVKAYSSHLTRSGTMELAEWTAIVKTARFKELAAYEPDCDYVTAAFMGRKIYLTGRLGVGAYQRTYGGSKRNGNHPPHFCQSWGAIDRHILQQLQNMNXTELDTTGGSKITSTGRLDLD

SEQ ID NO: 193734 - protein, 76 aa, Glycine max
  Clone ID: PAT_MRT3847_16968C.1.pep
SPTSARGCEKRQKGNIHIACIYSMYINLNSSTLLVDVGSLYRPGKNMEYNVVARKKNWWNVIHMHVLWSGLLVLMS

SEQ ID NO: 193735 - protein, 511 aa, Glycine max
  unsure (1)..(511): unsure at all Xaa locations
  Clone ID: PAT_MRT3847_16969C.1.pep
YNLRFRSGFPGRPTRPLPFARGSTDMLMKLKLHQLQHRLPPSSTNAQQHRLQLHVLSTQQSLTANHRIPHHHSLAPTGGILTVDGSMSNTFXTYDQVSENQFVRERKHTGSTSRSGISSPTANTTGASPSSAPSTPSTHTPGDVMSMPALPHSGSSSKPLMMFSADGSGTLTSPSNQLADVDRFVEDGSLDDNVESFLSHDDTDPRDTVGRCMDVSKGFTFSDINSVRASTNKVVCCHFSSDGKLLASGGHDKKAVLWYTDSLKQKATLEEHSSLITDVRFSPSMPRLATSSFDKTVRVWDVDNPGYSLRTFTGHSTSVMSLDFHPNKDDLICSCDGDGEIRYWSINKGSCXRVSKGGTTQMRFQPRLGRYLAAAAENIVSIFDVETQACRYSLKGHTKPVDCVCWDPSGELLASVSEDSVRVWTLGSGSEGECVHELSCNGNKFHTSVFHPTYPSLLVIGCYQSLELWNMSENKTMTLSAHDGLITSLAVSTVNGLVASASHDKFLKLWK

SEQ ID NO: 193736 - protein, 94 aa, Glycine max
  Clone ID: PAT_MRT3847_1696C.1.pep
GKFFFWGRWPIKGFMGFLAKEGSFKLEQKTKRGKKFQRAKKKTTPGTSPLGFFKTFSKKGGGTFLPTEKRGQKQIFLKKSPLKVQPILPKIFPL

SEQ ID NO: 193737 - protein, 59 aa, Glycine max
  unsure (1)..(59): unsure at all Xaa locations
  Clone ID: PAT_MRT3847_16970C.1.pep
REYVRETFAWMHYYWFLTNDGIEFLRNYLNXLPEMALLLWKRQARPPGRPFGGPFRDCP

SEQ ID NO: 193738 - protein, 62 aa, Glycine max
  Clone ID: PAT_MRT3847_16971C.1.pep
VFFGGRQNEHRPPHEPVRDTDAARTITGDSQPTHWATEVTVSDGKPPRRQREPCHDRTPPAR

SEQ ID NO: 193739 - protein, 114 aa, Glycine max
  Clone ID: PAT_MRT3847_16972C.1.pep
MATNPSHLPGIHNEEKVVSEIGNSEKQLWALIHSKGLLHSDAQDLYHRVRSSYERIILSNHMFSELQDVEYSLWKLHYKHIDEFRKIIKKTSGNVESKKSGMPQNRAVQGDSGN

SEQ ID NO: 193740 - protein, 147 aa, Glycine max
  Clone ID: PAT_MRT3847_16973C.1.pep
PPRRSLVVPRVRFSVRPRVRPRVRPRVRGDEKSMRERTHLLLACCSRMAICKKDVRRDECGIPSGLPLTVIRNSIANEMLIRYSYEKLLRQAKAPSMFLQPLKNFVSLCVHGDDNPISVHEYDKPYFNGSKSKSSLAGHNITITDGI

SEQ ID NO: 193741 - protein, 72 aa, Glycine max
  Clone ID: PAT_MRT3847_16974C.1.pep
RPSPGRFLWPTCGFPSTYFVVVKNLRRKCHALAYHMERDFRILEARLSNIEESSSSVPLPIDQVEGVSGPAK

SEQ ID NO: 193742 - protein, 51 aa, Glycine max
  Clone ID: PAT_MRT3847_16975C.1.pep
FPARPTRSSTRPAISQSEYHRGVIALNFHIDDFKTQAAFIQDYYYISKIKE

SEQ ID NO: 193743 - protein, 53 aa, Glycine max
  Clone ID: PAT_MRT3847_16976C.1.pep
PFFQIIKHQYNKKKGNFLIYKKKKKNRRQGMRPFYHKTINPPSSVALWRFFFV

SEQ ID NO: 193744 - protein, 71 aa, Glycine max
  Clone ID: PAT_MRT3847_16977C.1.pep
FVYSNGSGFLIAPVRFFDVVSMLFSIRYWSFCLSIYVTLLTPFGGPASHLRYGLSILLFAVSASYTCVLST

SEQ ID NO: 193745 - protein, 139 aa, Glycine max
  unsure (1)..(139): unsure at all Xaa locations
  Clone ID: PAT_MRT3847_16978C.1.pep
KKKDAEQSAAEIAIEKLGDLYRGXDPTPQEAQESLVSRIAYIFSEKFVVCDHPLSGHIRATLLRKGDLCGSIPISVIAFYDAKLFSLCKCINPEVESNPFLVISYIMNATANLHQFLATSERHLWIRRLSPYPQDIIES

SEQ ID NO: 193746 - protein, 96 aa, Glycine max
  Clone ID: PAT_MRT3847_16979C.1.pep
SFKIHESKLEMGFIAVLTITLREMIDKDEKTTIRSFDHDLSLNFIETEIHLNWPDLDYRMETNTISRYNEFYNTRELRLNVEIKEYLNKNLTNGSI

SEQ ID NO: 193747 - protein, 360 aa, Glycine max
  Clone ID: PAT_MRT3847_1697C.1.pep
PRVRRHFEGLKFTPWKFSYDRMLRNVAIRFYKSSVQLPELQACKASDFVRDVWIGRWTRHGKNDDCSIENDGRYRCLAPDFPCQAPWCDGSLGILESNGWVYSTHCSFKLYSAESAWNCLKNRWIFFWGDSNHVDTIRNLLNFVLDLPEIPSVPRRFDMNFSNPRDPSQTVRITSIFNGHWNETQNYLGLDSLRDEGFQDLLKKYFSEDTIPDTVIMNSGLHDGVHWRNIRAFSVGADYAASFWGDVMKTVKQRGLAWPRVFFRNTVATGGYARSLAFNPNKMEVFNGVLLEKLKQSGVVSGVIDNFDMTFPWHFDNRCNDGVHYGRAPAKMKWRDGQIGHQYFVDLMLAHVLLNALCAR

SEQ ID NO: 193748 - protein, 52 aa, Glycine max
  Clone ID: PAT_MRT3847_16980C.1.pep
LTNFNENLVYTLPILFPFFLCLRIQRPYTSPYHPFISQLLNYSYSLYLYVIA

SEQ ID NO: 193749 - protein, 63 aa, Glycine max
  Clone ID: PAT_MRT3847_16981C.1.pep
QTISGHSDKHPYWSNKILHPPPRCHTNGPTNPSLELSNITKSHYKQEELSANHLTEGFQSKVM

SEQ ID NO: 193750 - protein, 95 aa, Glycine max
  unsure (1)..(95): unsure at all Xaa locations
  Clone ID: PAT_MRT3847_16982C.1.pep
MATTASLSGTMVSTSFMRRQPITTIKPGHILHRCVKLFLVRLLVQVFVSLAWPRHMVNLITPDXNXEFECPSDVFTVYNAXDERIDLPYSCRAGS

SEQ ID NO: 193751 - protein, 45 aa, Glycine max
  Clone ID: PAT_MRT3847_16983C.1.pep
ENSTILTLFYNQPFKEKEGSIVSTTKGKRGKNIKRDKLETSQQSC

SEQ ID NO: 193752 - protein, 115 aa, Glycine max
  unsure (1)..(115): unsure at all Xaa locations
  Clone ID: PAT_MRT3847_16984C.1.pep
ARNSARGYFQPPKFLLFVADLFLLVVELLSQTPKVSSSFYPCHIFAGSFSLTMNNLKLRVEVASAHNLVPRDGQGTSTSYVELHXDTHRFPTTTKDTDLSPSWNESFYSTITVAS

SEQ ID NO: 193753 - protein, 316 aa, Glycine max
  Clone ID: PAT_MRT3847_16985C.1.pep
MATRNRTLLFRKHRDALKSVRIPSFSSAPSTASGAGGGPVIELATTSFLNSNRSYTPISTDDPGNSSRGPNAITVVGLPPAWVDLSEEISANVQRARTKMAELAKAHSKALMPSFGDGKEDQRAIETLTHEITDLIKKSEKRLRRLSATGPSEDSNVRKNVQRSLATDLQNLSVELRKKQSTYLKRLRQQKEGQDGVDLEMLNGSKSKYEDDDLDNMVFNEHQMAKLKKSEAFTIEREKEIQQVVESVNELAQIMKDLSVLVIDQGTIVDRIDYNIQNVATTVEDGLKQLQKAERTHNKGGMDMCATVHLIMCFAM

SEQ ID NO: 193754 - protein, 72 aa, Glycine max
  Clone ID: PAT_MRT3847_16986C.1.pep
RKYAGAILVLGRDLVVVPKLIHPLPPAISSPETSPEPHIEDTWMQELNANRPPTPTRGRPPVTNDRGSLAWI

SEQ ID NO: 193755 - protein, 200 aa, Glycine max
  Clone ID: PAT_MRT3847_16987C.1.pep
MATRDRTLLFRKHRDALKSVRVPSISSPAFTGSGAGGGPVIELATTARDFFCETWKWRVIHCFNGYSRGPNAITVGLPPAWVDLSEEISVNVQRARTKMAELAKAHSKALMPSFGDGKEDQRAIETLTHEITDLIKKSEKRLRRLSATGPSEDSNVRKNVQRSLATDLQNLSVELRKKQSTYLKRLKQQKEGQDGVDLEM

SEQ ID NO: 193756 - protein, 524 aa, Glycine max
  Clone ID: PAT_MRT3847_16988C.1.pep
MGGNGKHRWKFSFHRSSSQTSNPDPNQVPKEFTCPISGSLMSDPVVVASGQTFERLAVQLCKDLNFSPKLDDGTRPDFSTLIPNLAIKTTILHWCDNARTQHPLPPDYASLQRHVLEQKENDRVRVSEMELLNAVADNPPVIFSHAATELGPRVNHFNSGSSSEESVIIPPSPGTPLPLTIRPTCFSSSSSSCEIEIENPNTPASEEEEGILKKLKSNEVFEQEEGAIALRKITRCKEEARVSLCTPRVLLALRGLLASRYGVVQVNAVASLVNLSLEKQNKLKIVRSGFVPFLIDVLKGGLGESQEHAAGALFSLALDDDNKMAIGVLGALHPLMHALRAESERTRHDSALALYHLSLVQSNRLKLVKLGAVPTLLSMVVAGNLASRVLLILCNLAVCTEGRTAMLDANAVEILVGLLRGNELDSEANRENCVAALYALSHRSLRFKGLAKDARVVEVLKEIEQTGTERARERARKVLHMMRTVGDGDGDEIDEFYDSAGLTRNRYRVGAARNNNNLVNTTTF

SEQ ID NO: 193757 - protein, 41 aa, Glycine max
  Clone ID: PAT_MRT3847_16989C.1.pep
PKTSKVCLKKNSEITTLQRLTVLAHLRFHILYKLITDIENK

SEQ ID NO: 193758 - protein, 140 aa, Glycine max
  Clone ID: PAT_MRT3847_1698C.1.pep
LEIGRPFFFFFFFFFFGIKYTFHLEDAVDCPEWIVPFHVFKSLAEENDFELVFAKNSHEFVHEYMKKPEFVELMRRLGALGDGNQDQSTLSADEWEAAYLYMSFVLRKRGQPDKTQQSGRRNRGSMHISEEDIMYISTDD

SEQ ID NO: 193759 - protein, 78 aa, Glycine max
  Clone ID: PAT_MRT3847_16990C.1.pep
PRAALSNPYIINDSSKFHRTDVSLSCNFYTGDFVCPPTSLGFPMDQQRSLFDAARLQLPYSYRKYICLQLRTRRGMNP

SEQ ID NO: 193760 - protein, 36 aa, Glycine max
  Clone ID: PAT_MRT3847_16991C.1.pep
SLSYDTYPSMFKNFLRLHFCLSSNSLHRSGILELEP

SEQ ID NO: 193761 - protein, 49 aa, Glycine max
  Clone ID: PAT_MRT3847_16992C.1.pep
MVNLLVFTINAFLQVVTPIMISDCLTIKPYNNYLESRHTYHIFYDWLRV

SEQ ID NO: 193762 - protein, 147 aa, Glycine max
  Clone ID: PAT_MRT3847_16993C.1.pep
GEFMAEVEILGRIRHSNVVKLLCCFSSENSKLLVYEYMENQSLDKWLHGRNRVSANGLSSPSKNCLLLKWPTRLRIAVGAAQGLCYMHHDCSPPIIHRDVKSSNILMDSEFRASIADFGLARMLVKPGEPRTMSNIAGSLGYIPPGK

SEQ ID NO: 193763 - protein, 47 aa, Glycine max
  Clone ID: PAT_MRT3847_16994C.1.pep
TSRYIEPKWLSYGETSNGRYAVLGADGAIAAETLGNARLISEDTALP

SEQ ID NO: 193764 - protein, 46 aa, Glycine max
  Clone ID: PAT_MRT3847_16995C.1.pep
KETTMQLCFVLKSKVSPIFGRTYRETQCWEKSNLEPQESEAWGRKR

SEQ ID NO: 193765 - protein, 120 aa, Glycine max
  Clone ID: PAT_MRT3847_16996C.1.pep
MEGKEVCASESAVDGSRDVWSSEPSLASSADHLVVMVNGILGRETDWKYAAEKFVKELPDKVFVHCSERNVSMHTLDGVDVMGERLAEEVLEVIKRKPNMRKISFVAHSVGGLVARYAFG

SEQ ID NO: 193766 - protein, 50 aa, Glycine max
  Clone ID: PAT_MRT3847_16997C.1.pep
GQPGYQPLEWLLQPGFLHDLHLTVYKKVLPAAKTDLAYPMGEKREGLQHL

SEQ ID NO: 193767 - protein, 52 aa, Glycine max
  Clone ID: PAT_MRT3847_16998C.1.pep
SHTIIVSINLHVTHNRVLLTLSCKVKSSTICHMEINQEHGHIVISYHVIISQ

SEQ ID NO: 193768 - protein, 40 aa, Glycine max
  Clone ID: PAT_MRT3847_16999C.1.pep
LTFGAMLWCLYQSESIVILCLKARHSWSFQSIGNDQHELG

SEQ ID NO: 193769 - protein, 327 aa, Glycine max
  unsure (1)..(327): unsure at all Xaa locations
  Clone ID: PAT_MRT3847_1699C.1.pep
MKRGYQESPSSSLGPPHSRARHDPQGGAHFVEDESTKIFARKVADHYSARSNQTLEEREASPIIHLKKLNNWIKSVLIQLYARRGDAVLDLACGKGGDLIKWDKAKIGYYVGIDIAEGSIKDCRTRYNGDADHHQRRKKFTFPARLICGDCYEVRLDKVLADDAPFDLCSCQFALHYSWSTEVRARQALANVSALLRPGGIFIGTMPDANVIIKKLREAEGLTFGNSVYWVRFDEEFSDKKFKSSSPFGIKYTFHLEDAVDCPEWIVPFHIFKSLAEEYDXELVFAKNSHEFVHEYMKKPEFXVELMRRLGALGDGHQDXSTLSADE

SEQ ID NO: 193770 - protein, 50 aa, Glycine max
  Clone ID: PAT_MRT3847_169C.1.pep
MQRPSRQNSKGQVPGGGTVRPTEEAACGTAREQEIKNPPYPCSPGYFHAG

SEQ ID NO: 193771 - protein, 50 aa, Glycine max
  unsure (1)..(50): unsure at all Xaa locations
  Clone ID: PAT_MRT3847_16C.1.pep
XXXXXXXXXXXXXXQWSKCTDNGIDLIEYYLSLPEYLYSRFHSLHQQSWV

SEQ ID NO: 193772 - protein, 55 aa, Glycine max
  Clone ID: PAT_MRT3847_17000C.1.pep
RMVSSLRELNLERGARTLEFRGKPPQSTIRHPRQSRRVHRVSTPALVLPTVNKFA

SEQ ID NO: 193773 - protein, 48 aa, Glycine max
  unsure (1)..(48): unsure at all Xaa locations
  Clone ID: PAT_MRT3847_17001C.1.pep
KIQVNVSYXXXLQTIIKXXNKKTLVPKDTPNSVTCFLXXLSFVKQSYN

SEQ ID NO: 193774 - protein, 58 aa, Glycine max
  Clone ID: PAT_MRT3847_17002C.1.pep
ENRSQSRNKVVRNFCLMVKPLLLWEIPGFKAPPLQFFFEPKTVNLISPRVGFNYFLGF

SEQ ID NO: 193775 - protein, 118 aa, Glycine max
  Clone ID: PAT_MRT3847_17003C.1.pep
PRVRLFVCFYFFGNPDYRDRTKQPGGTGNPQPKPRQPRKRTHKYRNRARGQRTTKQTLGELHGGRPRLGNTTHWRRRPRSNICSGGTYTQMIAAMSSTPSPVPTLRYPTLAACKKHSS

SEQ ID NO: 193776 - protein, 38 aa, Glycine max
  Clone ID: PAT_MRT3847_17004C.1.pep
HIYMTTSKQIYTMFKTHIPSLLLSLLIISLFVAEIICK

SEQ ID NO: 193777 - protein, 270 aa, Glycine max
  Clone ID: PAT_MRT3847_17005C.1.pep
VLIFQSNEFLAELNVLTHVHHLNLVRLIGYCVEGSLFLVYEYIENGNLSQHLRGSGRDPLTWAARVQIALDAARGLEYIHEHTVPVYIHRDIKSANILIDKNFRAKVADFGLTKLTEYGSSSLHTRLVGTFGYMPPEYAQYDHVFFKIDVYAFGVVLYELISGKEAIVRTNEPENESKGLVALFEEVLGLSDPKVDLRQLIDPTLGDNYPLDSVFKVSQLAKACTHENPQLRPSMRSIVVALMTLSSATEDWDVGSFYENQALVHLMSGR

SEQ ID NO: 193778 - protein, 257 aa, Glycine max
  unsure (1)..(257): unsure at all Xaa locations
  Clone ID: PAT_MRT3847_17006C.1.pep
MSAFISHNLKPGGIMVSPSCNHRSSFPSQLSLKAPFSASHPLVLTRRLFLPSVSGIWDALTGGNNNNAREAVLAIRRGMLLFRQGDVSGSLAEFDKAIQLDPRQKAYXLARGLSLYYLNRFEEAAEQFRLDVAQNPNDTEESIWCFLCEAQLFGVDEARKRYLEVGRDPRPVMREAYNMFKDGGDPEKLVAAFSGSREGEYFYASLYAGLYYESQNGTDAAKVHIVAACQSPYGQRSDDYMASLAKVHCRCRNWVFN

SEQ ID NO: 193779 - protein, 58 aa, Glycine max
  Clone ID: PAT_MRT3847_17007C.1.pep
IHLDLDAVEALIKGLVLFQAGILMVSPDEHPISESVKLVWVVSSERVAPFQGTLRGYT

SEQ ID NO: 193780 - protein, 49 aa, Glycine max
  Clone ID: PAT_MRT3847_17008C.1.pep
FPLTKMAQALLKLILELGIFAIEEVKFKSQSPSAFYCHFFCLMQRTRHN

SEQ ID NO: 193781 - protein, 348 aa, Glycine max
  Clone ID: PAT_MRT3847_17009C.1.pep
IRHQGSGSGSIPSMNGFVEQALSMSSPNLSETVMKGFKPDSVPVYAALVKEFAVFDRWFSSIPGPTQPNRLFVYSATSHGSTSHIKRQLAKGYPQKTIFDSMHENGLDFGIYFQNIPTTLFYRNLRKLKYIWKFHQYDLKFKRDARDGKLPPLTVIEPRYFDLKGIPANDDHPSHDVAHGQMLVKEVYEALRASPQWNETLFIITYDEHGGFFDHVKTPFVNIPNPDGNTGPAPYFFKFDRLGVRVPTIMVSPWIKKGTVISGAKGPAENSEFEHSSIPATIKKMFNLSANFLTHRDAWAGTFEHVVGDLSSPRTDCPVTLPIVIPHSEKPKSYSQPCKDGRFLKVSV

SEQ ID NO: 193782 - protein, 267 aa, Glycine max
  unsure (1)..(267): unsure at all Xaa locations
  Clone ID: PAT_MRT3847_1700C.1.pep
SLSSIPQNQQSTNVQQSMQSMPQQHSQVIRHQQQQTSIVHQQQIPVTQQPSLPAQQQQQLMGHQPNTTNMQHAQMLGQQNNVGDIQQPQRMLSQQSNLTNLQQRQQLINQQNNPANIHQQLGNNGPGLQQQHLLGHESGNADMQTSHHSAHMLQQPKVPMQQQSQQSTSNLLLPHSQQSQPLGSQQQLMPQIHTQSAQLQQQLGLPQQLNPSQRDMQXRIQASGSLLQQQNVLDQQKQLYQTQRTLPETSATSLDSDTQTAQLSGAD

SEQ ID NO: 193783 - protein, 117 aa, Glycine max
  Clone ID: PAT_MRT3847_17010C.1.pep
FVANGKATPVFRAMASLEKEKNGFIINGPEGGFPLKKIGFFIEAGAPPVNFGPPCFWVENPPKALLATVMLWFCSQQISVCLFPRGTKKGRGLPKGVGGLQKHCPGFKKKTVSFKWE

SEQ ID NO: 193784 - protein, 173 aa, Glycine max
  Clone ID: PAT_MRT3847_17011C.1.pep
VETLDPQVRQFSDLSSWIDDNGERLKGKNILMYCTGGIRCEMASAYIRSKGAGFENVFQLFGGIQRYLEQFPDGGFFKGKNFVFDHRISVGSSDANVIGTCLICQCSFDDYSSRCRCAYCRMLVLVCGSCQNESTQYVCELCQKQGKAVRSTQLIENGESKTSLPGVEFQNFS

SEQ ID NO: 193785 - protein, 51 aa, Glycine max
  Clone ID: PAT_MRT3847_17012C.1.pep
QNRVSIIDSVSMSRWYGPNDPPALLSVTPVMLIRQRYACSRRQVFHDPTGC

SEQ ID NO: 193786 - protein, 83 aa, Glycine max
  Clone ID: PAT_MRT3847_17013C.1.pep
LSSICDLDPWHVGDSSAISCELNLGVCGALYDNFMPQSKYYMVSIINFNMDKRLLPSLVPLSSSCIEAAIYMISGCVTYVKSS

SEQ ID NO: 193787 - protein, 203 aa, Glycine max
  Clone ID: PAT_MRT3847_17014C.1.pep
FVFFFFAPLFIFFFVVFFFFFFFVFFLGPPPDFFSTPNVQKFWEKGPKFKNSPPPGAPPEIRTGPWRGPKFPLWGGLKTLGQTREKAVPGGKCLSAPNPPKIPPGSLKGKTGGPQRGGQPPLNGGPPPPPFQGGNPWGPPIKKTPPPPGGGLPLFCPPGGFFFFPRGGGPTPLVGPLIPPWGPLKKECENKGGAHPPWGVCPP

SEQ ID NO: 193788 - protein, 357 aa, Glycine max
  unsure (1)..(357): unsure at all Xaa locations
  Clone ID: PAT_MRT3847_17015C.1.pep
MEISDGGEPPISTCDYLRKEGSEGTPFQHMELSDRDRNYQIQSMNALEILTETVRILRFNSWGFMAIATRPICPVSAVLLSNVIVDESIVKNLSIRLMLVAQTSGLPLRPIIKQSCQRFAETVVSSAMCFPFYATLLLLSKAAVVYSVDCTYSRKKFDASKFCVIVAKFWRKILFTYMWXCTXIVCCITLFCVFLVAFCSALAVLGFLPDVVVYCAMLVGLVFSVVFANAIIICNIAMVISVLEDVSGAQAMLRSSILIKGQTQVGLLIFLGSTIGMAFVEGLFEHRVKTLSYGDGSSRVWEGPLLVVMYSFVVLIDSMMSAVFYFSCRSSNMEISDVEGKSILETMAISAESMGIQ

SEQ ID NO: 193789 - protein, 98 aa, Glycine max
  Clone ID: PAT_MRT3847_17016C.1.pep
EQKMEDTINRILNNAYDLEVIHHWHCIQCHSPDQITCLWLCFHFLEPMEEPVVTQQYLVIELTKLNSLTVKIPEDLFAPDPVVVPYTTVNNKIRQQLL

SEQ ID NO: 193790 - protein, 121 aa, Glycine max
  unsure (1)..(121): unsure at all Xaa locations
  Clone ID: PAT_MRT3847_17017C.1.pep
LTTSLPVNSLVSLVIWFCCLLYASIRTSSYTALGKIGGAISEGNAEGQDIPLSEASMSVEEGDRGTTGRNVYDNEKGXVAYSYYVFHFSFALASLYVMMTXTSWYTPSDDLRYLNDNMASL

SEQ ID NO: 193791 - protein, 97 aa, Glycine max
  Clone ID: PAT_MRT3847_17018C.1.pep
FPGPNPTLTLFFWFDPGFPPRGVVLGSFGKFFRWLRLDFLGRFLGFGFGGLIPTTTIGAGSLPGLGLGGGGLIPNLGQTPGLNQNPNLNQNNYPFQV

SEQ ID NO: 193792 - protein, 102 aa, Glycine max
  Clone ID: PAT_MRT3847_17019C.1.pep
MGVDDEQYTEEEEEEFIDGVRNNPKQAPPSLFPISGRKGFSAERVYRDEWSEWAVSTLLEAYEAKWVLKNRSPLKGLDWEDLALLVSSRAHCTKSPNTLTPC

SEQ ID NO: 193793 - protein, 67 aa, Glycine max
  Clone ID: PAT_MRT3847_1701C.1.pep
PLINKPIINIFSGKVHLRPFVVQLRSTLKAVNWSASLISAVILMIIESDYYRLTCVWHGYTHIWYMA

SEQ ID NO: 193794 - protein, 157 aa, Glycine max
  Clone ID: PAT_MRT3847_17020C.1.pep
MAVIFSSAIPGGAAPAAIEQVQCFGRKKTAVAVTYCKRGRGLIKINGCPIELVEPEILRFKAFEPILLLGRHRFAGVDMRIRVKGGGHTSQIYAIRQSIAKALVAYYQKYVDEQSKKEIKDILVRYDRTLLVADPRRCEPKKFGGRGARARFQKSYR

SEQ ID NO: 193795 - protein, 69 aa, Glycine max
  Clone ID: PAT_MRT3847_17021C.1.pep
LRPPPVVPYAPPLYQIVVQVNVAPHRADFSLFPGHLAIFGEVKIFPPQAGQGRGFIFFENMNRRVVGGN

SEQ ID NO: 193796 - protein, 46 aa, Glycine max
  Clone ID: PAT_MRT3847_17022C.1.pep
RLSRLGYRAVNYSLRHRFASIQCVGWHPAVEKGVWRIDEVLMKSMV

SEQ ID NO: 193797 - protein, 155 aa, Glycine max
  Clone ID: PAT_MRT3847_17023C.1.pep
MAQPAAAAAATGAAVIEQVQCFGRKKTAVAVTYCKRGRGLIKINGCPIELVEPEILRFKAFEPILLLGRHRFAGVDMRIRVKGGGHTSQIYAIRQSIAKALVAYYQKYVDEQSKKEIKDILVRYDRTLLVADPRRCEPKKFGGRGARARFQKSYR

SEQ ID NO: 193798 - protein, 92 aa, Glycine max
  unsure (1)..(92): unsure at all Xaa locations
  Clone ID: PAT_MRT3847_17024C.1.pep
RKTLKGGTVHITWRYRTPVLTLXFHSQSDSLSIVGADFHIKFWQIXAAGSAMNLPVVSYLTKLSYHISAINVIRIASSGELLPSGADRCDLI

SEQ ID NO: 193799 - protein, 67 aa, Glycine max
  Clone ID: PAT_MRT3847_17025C.1.pep
GVTSQSRGNCLIGYWCTAHTPHDRVWNFEGDMVLYKCNPSMSLFSHKYYKARELIFGAYAYTAAIVI

SEQ ID NO: 193800 - protein, 98 aa, Glycine max
  Clone ID: PAT_MRT3847_17026C.1.pep
QMVKYSLLLCLVASHHAPVPRSSSTVSQENNRVFLPLISEWVRILSGCLGRFFAHLICIVPLLFSLAQLSPSIFLGYEQFLWSSPPCFIIKSMSNEYV

SEQ ID NO: 193801 - protein, 43 aa, Glycine max
  Clone ID: PAT_MRT3847_17027C.1.pep
SIKHYMFLISEFMKDLISLEPKDSPPVASFQNRNSFLLPYSIS

SEQ ID NO: 193802 - protein, 110 aa, Glycine max
  Clone ID: PAT_MRT3847_17028C.1.pep
GTFTLRALGWKLFCAYTRQLLAHSYPIVFYTCCYKQCTDIYSCTSGDYHCIFVHPETRTHRDSSHRTIEHGHEDWQRNWNTLLSRTAWTHTHIRITLAYACVVCTALQMS

SEQ ID NO: 193803 - protein, 151 aa, Glycine max
  Clone ID: PAT_MRT3847_17029C.1.pep
SHARVRKLGIRLEDALCVIRNLIRDNRVVYGGGAAEISCALAVSQEADKCPTLEQYAMRAFADALEVIPMALSENSGMNPIQTMTEVRARQVKESNPALGIDCLHKGSNDMQYQHVIETLIGKKQQISLATQMVRMILKIDDIRKPGESEE

SEQ ID NO: 193804 - protein, 82 aa, Glycine max
  Clone ID: PAT_MRT3847_1702C.1.pep
KKPGTFSFHVRIKKNRDTCLTKILGKRTKEEFILGGHVYIWGGQAFIKIYRSMDRSELNLMGLGDKRVLGKLKKGLGKTSVL

SEQ ID NO: 193805 - protein, 45 aa, Glycine max
  unsure (1)..(45): unsure at all Xaa locations
  Clone ID: PAT_MRT3847_17030C.1.pep
MHKEEHEVAVLGAPPXTILPRSTVINIHSETSVPDHVVWSLFNTL

SEQ ID NO: 193806 - protein, 93 aa, Glycine max
  unsure (1)..(93): unsure at all Xaa locations
  Clone ID: PAT_MRT3847_17031C.1.pep
VRPHHINGSYMLCIQVSPPGASKNFETRSYLPHLDNPQLAKEVEFLHMKGWIPCLXIQXQHCFMYHDHNNSPPYYDGRYCTMWNLPMFGCTDA

SEQ ID NO: 193807 - protein, 69 aa, Glycine max
  Clone ID: PAT_MRT3847_17032C.1.pep
CFRVERYLIHAADNQYSLSLPDFHLSVKTECWSAYSYRCIHYFLGFLFFLFVFLSFFFFFFFFFPLFFF

SEQ ID NO: 193808 - protein, 95 aa, Glycine max
  Clone ID: PAT_MRT3847_17033C.1.pep
GGGGGVFPPPAWFNFPINKRSPDTKKKISPPPWKRKKIFFFTKVDPFSGALFGVFFGVKKKILSFSPPTPMFAGLFEDRKSPQNWGEKGPFPFVK

SEQ ID NO: 193809 - protein, 51 aa, Glycine max
  unsure (1)..(51): unsure at all Xaa locations
  Clone ID: PAT_MRT3847_17034C.1.pep
MATIXHSSLSAKVVLLGDMGPGGSRLVLRLVRAQFLEFHXSTIGAAFFSQT

SEQ ID NO: 193810 - protein, 62 aa, Glycine max
  unsure (1)..(62): unsure at all Xaa locations
  Clone ID: PAT_MRT3847_17035C.1.pep
MMRSWFPLLLLGVVFLASVSVSFGIAYWDKQNPNHNKCLRSXHSEKDSDRDQACHARCNLLR

SEQ ID NO: 193811 - protein, 111 aa, Glycine max
  unsure (1)..(111): unsure at all Xaa locations
  Clone ID: PAT_MRT3847_17036C.1.pep
RFCGRHKTCNEMAFFPANFMLQTPHHDDHHHQPPPSLTSILPTCAPQEYHGGVTFLGKRXMSFSSGIEHGKXVNAEEKLSDDGSQAREKKTXLNMEQVETLDXXXELGNKL

SEQ ID NO: 193812 - protein, 54 aa, Glycine max
  Clone ID: PAT_MRT3847_17037C.1.pep
QELPKNFKEHHGWTRLGGRGRQNFHTDVVKNETQCRQFLLLLLSERTDRTYCII

SEQ ID NO: 193813 - protein, 232 aa, Glycine max
  Clone ID: PAT_MRT3847_17038C.1.pep
MAPLTNLHGAVSKTLIPITCHLPNAHKSITKRGQVIGFLGSKTQKDASECQVQATRRAAALGLATVVLTWQFNDKVSLAKDNGFWYEDHPLPGPTVTNNIANEKTGTRSFLKRGLYIANIGVKGSVFRIKKYAFDLLAMADLIAEDTLNYVRKYLRLKSTFMYYDFDKVISAIPVDDKQQLTDMANKLFDNFERLEEASRKKSLPETKSCYQETEVMLKEVMDKMDIMYKSI

SEQ ID NO: 193814 - protein, 39 aa, Glycine max
  Clone ID: PAT_MRT3847_17039C.1.pep
LELLEPPSRLEILPKYEFAVLSKTGFLSFIVIKGVSMNQ

SEQ ID NO: 193815 - protein, 95 aa, Glycine max
  Clone ID: PAT_MRT3847_1703C.1.pep
QKPLSGEIFLFTVFRHQIPKPLTWVHSGILAMGVQIPNYTVFHMPLLLPGWVDHPLFLPLLNLLVSLDIWLLMGPGQRPPNLTEMDRRFLLKHLF

SEQ ID NO: 193816 - protein, 81 aa, Glycine max
  Clone ID: PAT_MRT3847_17040C.1.pep
SFPILNSSITFLTHTISPSKSFTLNISFPSTLFNISLNKYQPLILLITPSFLQYFIILFFHPYKYLHFFFIFLFITTILQN

SEQ ID NO: 193817 - protein, 170 aa, Glycine max
  Clone ID: PAT_MRT3847_17041C.1.pep
MGGSWSWQLTCALLLLFSAVVTATDHIVGANRGWNPGFNYTLWANNHTFYVGDLISFRYQKNQYNVFEVNQTGYDNCTTEGAVGNWSSGKDFIPLNKAKRYYFICGNGQCFSGMKVSVVVHPLPPPPTSAVAAQHSSPKSASPVLLKRGFRSLLVSTVSACFGIVWIYHL

SEQ ID NO: 193818 - protein, 54 aa, Glycine max
  Clone ID: PAT_MRT3847_17042C.1.pep
YVQRGSSKERHSSRSKRISRQKLSSIFRRTKRWSITLTKDLLYRLLGLQSVVEP

SEQ ID NO: 193819 - protein, 75 aa, Glycine max
  unsure (1)..(75): unsure at all Xaa locations
  Clone ID: PAT_MRT3847_17043C.1.pep
SCTFTTFFPKIAMATFVCSGFSFFWLVLYFYVLQKAKKHHKMKLIWIVTAVQTNSYSQLYVIGRFKRYESKCXTK

SEQ ID NO: 193820 - protein, 84 aa, Glycine max
  Clone ID: PAT_MRT3847_17044C.1.pep
SSSLVNRICLVRQAAYYCPCSGARSRSLEHPTLDLLPFPGVNSPPDRDGWEAKSGDCGGRNEHDPLGVAVCVLDANFSRAADRI

SEQ ID NO: 193821 - protein, 258 aa, Glycine max
  Clone ID: PAT_MRT3847_17045C.1.pep
PEFPRSTHASDWPVIPYTDVHLEFVRRVTIDHVETYTVLLSGIFDGPDEGVTGLLHLASLKFVTLRPVLGARLSEEISSLRIRVEVLKSAFDACESLLDSSRQLWKKSMVNVMSWLRPEIMTSEVRYGFGTCMKMEVDPQIEMADDTCKARKHARFDPAGFCEAIKPSKSEPMLKDDIPELLPKLRPYQRRAAFWMVEREKAVEESRGERERNLFHSPLCIPVDFLDTSSQISQMFFNPFSGSISLWGLGKTVELLAC

SEQ ID NO: 193822 - protein, 249 aa, Glycine max
  unsure (1)..(249): unsure at all Xaa locations
  Clone ID: PAT_MRT3847_17046C.1.pep
MSNSTERKPHALLTPYPLQGHINPLLRLAKLLHLRGFHITFVHTEYNIKRLLNSRGPKALDGLQDFHFETIPDSLPPTYGDGDVTEDAVSLAKSVREKMLVPFRDLLARLHDSSTAGLVPPVTCLVSDCWMLFTIQAAEELSLPIALFSPISACSLMSILHYRSLFDKGLIPLKDKSYLTNGYLDTKVDWIPGMKNFKLKDLPAFIWTIDPNDFMLKFLIEEGDNMQRSSAIILXNTFAELESDVLNAL

SEQ ID NO: 193823 - protein, 63 aa, Glycine max
  Clone ID: PAT_MRT3847_17047C.1.pep
YKYRPPLPTRNWRQAFTNLETGVFFGTPALSSHGALLDLSTSVHVRTKEFRYVMCKRTYCKSE

SEQ ID NO: 193824 - protein, 134 aa, Glycine max
  Clone ID: PAT_MRT3847_17048C.1.pep
TGTRIAQICKLSVEISRLALDNIATDLDAESGCVCREHSYYGFGHSHMVWTFIILDSSLSFGPSRMTKCQTLRMSIALMLLLLTATTTVCIKDNCVVCMFTPGDLLKSLHNRARTSLEDLAYEKGLILLGTHCT

SEQ ID NO: 193825 - protein, 313 aa, Glycine max
  Clone ID: PAT_MRT3847_17049C.1.pep
MTADKSYLTNGYLDTKVDWIPGMKNFKLKDLPTFIWTTDPNDFLLKFLIEEGDNMQRSSAIILNTFAELESDVLNALTSMFPSLYPIGPLPSFLNQSPQNHLASLGSNLWKEDTEYLEWLKSKEPKSVVYVNFGSITVMSPEQLLEFAWGLANSKRPFLWIIRPDLVVGGSMILSSEFVNETLDRGLIASWCPQEEVLNHPSIGGFLTHCGWNSTIEGICAGVPMLCWPFFADQPINCRHICKEWGIGIEINTNAKREEVEKQVNELMEGEKGKKMRQKVMELKKKAEEGTKLGGLSHINLDKVIWEVLLKKN

SEQ ID NO: 193826 - protein, 62 aa, Glycine max
  Clone ID: PAT_MRT3847_1704C.1.pep
QGRVKISSTKNGGYESGEPRTRCCRCQPFKNYSTSSQKEWIDPNEYFNIKHSKITGLVEPTL

SEQ ID NO: 193827 - protein, 94 aa, Glycine max
  Clone ID: PAT_MRT3847_17050C.1.pep
ILIFSLLRRECCTFSNGEYVKSGVAELEKWIVNATEEYAGTSWHELNYIRQAIGFLVIHQKRNKSLEEIRLDLCPAVISLIPSVHSTPATYMNS

SEQ ID NO: 193828 - protein, 45 aa, Glycine max
  Clone ID: PAT_MRT3847_17051C.1.pep
ITIQKIMPVISSASFTATIYSFIHESKEYSYYRANSGEGDFFLLN

SEQ ID NO: 193829 - protein, 57 aa, Glycine max
  unsure (1)..(57): unsure at all Xaa locations
  Clone ID: PAT_MRT3847_17052C.1.pep
PTCDHRVHPRRPTSKSVVKQKKVRRTTPXPGSQACHTGIRHPQSSLLELFSXRHRKS

SEQ ID NO: 193830 - protein, 33 aa, Glycine max
  Clone ID: PAT_MRT3847_17053C.1.pep
VVEFFMFLSYYLFHDLQLCMGAWAMKVVRFSLT

SEQ ID NO: 193831 - protein, 59 aa, Glycine max
  Clone ID: PAT_MRT3847_17054C.1.pep
GTLGHPSFFLTLQTTYLGTLHSHLRPLDSFLYAWPLGLRSVSLMPDQPLSLRLSEGDRR

SEQ ID NO: 193832 - protein, 52 aa, Glycine max
  Clone ID: PAT_MRT3847_17055C.1.pep
APFMSTFPLIWIVESHISIVLYIKNLFKSIIIIKDHDYASIILYHTNLIHLS

SEQ ID NO: 193833 - protein, 41 aa, Glycine max
  Clone ID: PAT_MRT3847_17056C.1.pep
IRHERILHTCRLACLYVQSRYNSLTGQLIMQFFWVLDSPRG

SEQ ID NO: 193834 - protein, 60 aa, Glycine max
  Clone ID: PAT_MRT3847_17057C.1.pep
TDDVSVMIIHELHSVLGHLCCGSSSANNYEKKCVLHMRLPPPEIHEQRQQEQLGLCLLTV

SEQ ID NO: 193835 - protein, 64 aa, Glycine max
  unsure (1)..(64): unsure at all Xaa locations
  Clone ID: PAT_MRT3847_17058C.1.pep
TVPNYLEREITXKLLLLGIQGSCTSTIFKQAKFLYWNQFSDXKLQDFKLNIQNNQYKYPSILLD

SEQ ID NO: 193836 - protein, 85 aa, Glycine max
  Clone ID: PAT_MRT3847_17059C.1.pep
EITNVPGCPQVPLVNLRFFACRGWGGVKPWEDVLILHMATCSRSRINSMLVLGRMQHIISTGNASITEIRDYSKTTSSLLHITRG

SEQ ID NO: 193837 - protein, 52 aa, Glycine max
  unsure (1)..(52): unsure at all Xaa locations
  Clone ID: PAT_MRT3847_1705C.1.pep
GHPFLWTAQGKXKSGWNNCSTSWLSRSSISQGTFSLIWGSVRVTSPNNGQVA

SEQ ID NO: 193838 - protein, 422 aa, Glycine max
  unsure (1)..(422): unsure at all Xaa locations
  Clone ID: PAT_MRT3847_17060C.1.pep
NKNAKKLPPGPKGLPILGSLHKLGPNPHRDLHKLAQKYGPVMHLRLGFVPTIVVSSPKSAELFLKTHDLVFASRPRFVADQYISWGQRNLGFAEYGSYWRNMRKMCTLELLSQSKINSFRRMREEELDLLIKLVREAANDGAAVDLSVKVATLIADMSCRMILGKKYMDQDMCGRGFKAVIQEAMRLLATPNVGDYIPYIGAIDLQGLTKRFKVLYEIFDDFFEKVIDEHMESEKGEDKTKDFVDVMLGFLGTEESEYRIERSNIKAILLDMLAGSMDTSATAIEWTLSELLKNPRXVGESDLDKLKYLEMVVKESMRLHPVVPLLIPHQSTEDCXKKFWPERFEGSNIDVRGRDFELIPFGSGRRACPGLQLGLITVRQTVAQLVHCFDWKLPNNMFPDDLDMTEAFGLTMPRANHLHAIP

SEQ ID NO: 193839 - protein, 124 aa, Glycine max
  unsure (1)..(124): unsure at all Xaa locations
  Clone ID: PAT_MRT3847_17061C.1.pep
MIWIAAFLVSLAFLWLWISNKNAKKLPPGPIGLPILGSLHKLGANPHRGLHQLAQKYGPIMHLRLGFVPTIVISSPQAAELFLKTHDLVFASRPPHEAIKYIALEQRNXGFAEYGSYWRNMRKM

SEQ ID NO: 193840 - protein, 141 aa, Glycine max
  unsure (1)..(141): unsure at all Xaa locations
  Clone ID: PAT_MRT3847_17062C.1.pep
MRLHPVVPLLIPHQSTEDCIVGDFFIPKXSRVIINAWAIMRDPSAWVEAEKFWPERFEGSNIDVRGRDFELIPFGSGRRACPGLQLGLITVRQTVAQLVHCFDWKLPNNMFPDDLDMTEAFGLTMPRANHLHAIPTYRLSN

SEQ ID NO: 193841 - protein, 99 aa, Glycine max
  unsure (1)..(99): unsure at all Xaa locations
  Clone ID: PAT_MRT3847_17063C.1.pep
CIMQFTLPTGASNGLFCTCLNQINQFSIIHSSIVVTLIFPCIQLFCILAFLVWSFIYLSVLISITLTFFLCYPFEAQQSLLYXYSWLYNSTIKLPFELG

SEQ ID NO: 193842 - protein, 1254 aa, Glycine max
  Clone ID: PAT_MRT3847_17064C.1.pep
MIWIALFLVSLAFLRLWRSNKNAKRLPPGPKGLPILGSLHKLGPNPHRDLHKLAQKYGPVMHLRLGFVPTIVVSSPKSAELFLKTHDLVFASRPRFVADQYISWGQRNLGFAEYGSYWRNMRKMCTLELLSQSKINSFRRMREEELDLLIKLVREAANDGAAVDLSVKVATLIADMSCRMILGKKYMDQDMCGRGFKAVIQEAMRLLATPNVGDYIPYIGAIDLQGLTKRFKVLYEIFDDFFEKVIDEHMESEKGEDKTKDFVDVMLGFLGTEESEYRIERSNIKAILLGDEETPNGIGNCGGYEEEGGGIGPGQVEVFGDGCKGKHEAPSSDPSAWVEAEKFWPERFEGSNIDVRGRDFELIPFGKKKGKRLPPGPKGLPILGNLHKLGSNPHRDLHELAQKYGPVMYLRLGFVPAIIVSSPQAAELFLKTHDLVFAGRPPHEAAKYMAWEQKNLAFGEYGSYWRNVRKMCTLELLSQTKINSFRPMREEELDLLIKNLRGASNDGAVVDLSAKVATLSADMSCRMILGKKYMDQDLDQKGFKAVMQEVLHLAAAPNIGDYIPYIGKLDLQGLIRRMKTLRRIFDEFFDKIIDEHIQSDKGEVNKGKDFVDAMLDFVGTEESEYRIERPNIKAILLDMLVGSIDTSATAIEWTISELLKNPRVMKKLQRELETVVGMKRKVGESDLDKLKYLEMVVKEGLRLHPVAPLLLPHHSREDCMVGEYFIPKNSRVIVNAWTIMRDPSAWDEAEKFWPERFEGSNIDVRGKDFRFLPFGNKNAKKLPPGPIGLPILGSLHKLGANPHRGLHQLAQKYGPIMHLRLGFVPTIVISSPQAAELFLKTHDLVFASRPPHEAIKYIAWEQRNLGFAEYGSYWRNMRKMCTLELLSQTKINSFRIVREEELDLSIKLLREASNDGAAAVDISAKVARISADVACRMVLGKKYMDQDLDEKGFKAVVQEVMHLLATPNIGDYIPYIGKLDLQGLIKRMKAVRKIFDEFFDKIIDEHIQSDKGQDNKVKDFVDVMLGFVGSEEYEYRIERPNIKAILLDMLLGSMDTSATVIEWTLSELLKNPRVMKKVQMELETVVGMQRKVKESDLDKLEYLDMVIKENMRLHPVAPLLIPHQSREDCMVGDFFIPRKSRVVINAWAIMRDSSVWSEAEKFWPERFEGSNIDVRGHDFQFIPFGSGRRACPGMQMGLTMVRLTVAQLVHCFHWKLPSDMLPDHLDMTEEFGLTMPRANHLLAVPTYRLHTASD

SEQ ID NO: 193843 - protein, 49 aa, Glycine max
  Clone ID: PAT_MRT3847_17065C.1.pep
MSLLVMRGNSADMARHVMCPSPNRRVSITFFRVRSDFNQCQSSTSTTMT

SEQ ID NO: 193844 - protein, 172 aa, Glycine max
  unsure (1)..(172): unsure at all Xaa locations
  Clone ID: PAT_MRT3847_17066C.1.pep
KPTYDLVRIPHPLENSWTLCFDNPSIKYKQAEWGISIQPIYTLATCEEFWSIYNNIHHPSKLDVGSDFHCFKHMIEPKWEDPIXANGGKWTMTFHRRKCDTTCIYTLLAMIGEQFDHRHEICGAVVNAISRHEKTAIWTKNALNESAQVSIGKQCKEXLDHNDTIAXIFHED

SEQ ID NO: 193845 - protein, 68 aa, Glycine max
  Clone ID: PAT_MRT3847_17067C.1.pep
DVFAQRFSPLFIFASTGYNLEGLGPLPVKASCFIFPPFLNLVGPSSFNWALPPTPFFFFFGMAPSLVC

SEQ ID NO: 193846 - protein, 74 aa, Glycine max
  Clone ID: PAT_MRT3847_17068C.1.pep
LGVSYGLIVYAVLAFAACAVRFFWYLFFGVLLFGDLYFIGHNCCGRYGTTLWSSPCDFCFLCNMDPLPLSPLMR

SEQ ID NO: 193847 - protein, 34 aa, Glycine max
  Clone ID: PAT_MRT3847_17069C.1.pep
LYALTIKGCDCFLCSGIVELECCLLLLVKVQIQY

SEQ ID NO: 193848 - protein, 68 aa, Glycine max
  Clone ID: PAT_MRT3847_1706C.1.pep
AALCHYVILYDRYEVTDRSGGGTGRSYVLIARSWCLRRSMSEQIAYCKNEYKQRDFVGVEDHVYHSGQ

SEQ ID NO: 193849 - protein, 75 aa, Glycine max
  Clone ID: PAT_MRT3847_17070C.1.pep
IIDKNSNYIQLTKIWVHILEKRVTREREEGSLKNQLGGLKSLMDSPIYGVGKKEPGGILKFSNGKKWLAFVEPFF

SEQ ID NO: 193850 - protein, 108 aa, Glycine max
  unsure (1)..(108): unsure at all Xaa locations
  Clone ID: PAT_MRT3847_17071C.1.pep
WSDAQAQRAERHSDYGPAEADSQEGEAHTGEEKTGXHDPQPTKTNLEETPKERQQDLPXNKRPSDSTTTRGTRRGKEQEGKEPXAGGTKKHATPKEPPDEKNPPKEAQ

SEQ ID NO: 193851 - protein, 66 aa, Glycine max
  unsure (1)..(66): unsure at all Xaa locations
  Clone ID: PAT_MRT3847_17072C.1.pep
IQCSVWVPSLLNTNTNTNTIHFLSLKPNSITFSSSFSSXLTRIRIRASSSSPTVEEAAMSIDNLRR

SEQ ID NO: 193852 - protein, 91 aa, Glycine max
  unsure (1)..(91): unsure at all Xaa locations
  Clone ID: PAT_MRT3847_17073C.1.pep
XXXXXLXXVXVXXSXCXXFXXLXWXCVXVWWVXXSWXSCXXFXCFGCXXGXXXXSXVXXLFFVCLXXVFXLXXXXXXGGXXCLXVXXXXWX

SEQ ID NO: 193853 - protein, 39 aa, Glycine max
  unsure (1)..(39): unsure at all Xaa locations
  Clone ID: PAT_MRT3847_17074C.1.pep
HTIQKYHKEATDKSXESLYMAYIMDTNVEXRLKVKTVEI

SEQ ID NO: 193854 - protein, 147 aa, Glycine max
  Clone ID: PAT_MRT3847_17075C.1.pep
HYLVLIRWRSIHVYDTDKSRPVAVVLRPGKTPGGVEVRAHLRRLVRHIRTRWHNTQITFRGDGHYARPEAMAWCETNGIDYIFGLSGTKPLARKVDEVADDIRTRRAIENLPVLRGYTETRHKAKSWDRERRTVARIEAAMLGLNIR

SEQ ID NO: 193855 - protein, 99 aa, Glycine max
  Clone ID: PAT_MRT3847_17076C.1.pep
YVNGALGAWQWWPLFPYISYNVKRQGCSRSPTSRASSLSCGIVRVPTSILLSSSCCLSLFIRHLNVMTVTASTHASAHASTDAWNDPWVKARILQGDQL

SEQ ID NO: 193856 - protein, 54 aa, Glycine max
  Clone ID: PAT_MRT3847_17077C.1.pep
QDVPGFNASLLNISCQRAAIFFRLLSSVTRTVSARLRQSRSEHIYVKHRPVSGR

SEQ ID NO: 193857 - protein, 70 aa, Glycine max
  Clone ID: PAT_MRT3847_17078C.1.pep
KRQTRLTKFNKDFTMLNVTFVTHKSFFLLFTTYIATISKGAYQHIYVIMGRIVFKIFQVLDKTCVRSGLI

SEQ ID NO: 193858 - protein, 32 aa, Glycine max
  Clone ID: PAT_MRT3847_17079C.1.pep
ENQNHRLQPYFDFIMNKHHPPQACPSVVFSQP

SEQ ID NO: 193859 - protein, 176 aa, Glycine max
  unsure (1)..(176): unsure at all Xaa locations
  Clone ID: PAT_MRT3847_1707C.1.pep
DLILPDNNRKQIMQYLFREGVXIATKDFNLPYXTIIDVPNXHAINVMHSFSSTDYATNTFARMPHYCSLTNDDIEFLRTYLXLPSQIGTATLKKSAQTALRSFVGPPRDRPSXPPLFDLETVLFGDRDAYVESTRXGEDFDHNVGCPAEYRPSLVGGSLMVRCWPLYSECLEIDIA

SEQ ID NO: 193860 - protein, 131 aa, Glycine max
  Clone ID: PAT_MRT3847_17080C.1.pep
MFLLSDLFFDLQVNSEAEVITVGALDNLQQMDKFSTRAVTLEGYYGTQQSVQGMLNLMGPTRDDYYGNQQTLQGLGPISSIPTSHDGYYGTHQGMPGLAQLDFLRTGFTYGIRDDTNVRATQLHEDPSRHA

SEQ ID NO: 193861 - protein, 384 aa, Glycine max
  unsure (1)..(384): unsure at all Xaa locations
  Clone ID: PAT_MRT3847_17081C.1.pep
TIQRSESVNSFFDKYVHKKTSVQDFVKQYEAILQDRYEEEAKADSDTWNKVATLKTPSPLEKSVAGIFTHAVFKKIQAEVIGAVACHPKADRHDDTTIVHRVHDMETNKDFFVVVNQVKSELSCICRLFEYRGYLCRHALIVLQYSGQSVFPSQYILKRWTKDAKVRNIIGEESEHVLTRVQRYNDLCQRALKLIEEGSLSQESYGIAFHALHEAHKSCVSVNNSSKSPTEAGTSGAHGQLSTEDDTQSRNMSKSNKKKNPTKKKKVXTGFTYGIRDDPNVRATQLHEDPTRHAXVSLSLITRAAQTRAINGLSGVEIGIPRARXGYNGKLSSIPTSHDGYYGTHQGMPGLAQLDFLRTGFTYGIRDDPNVRATQLHEDPSRHA

SEQ ID NO: 193862 - protein, 88 aa, Glycine max
  unsure (1)..(88): unsure at all Xaa locations
  Clone ID: PAT_MRT3847_17082C.1.pep
KIPIFYPFYHSFYXYYKXXXIXXTFLXTFIXXXTXXTLXYXXXFHHFXXSXFLILXTTIIHYXSXSISIXLXILLXTIIXXXQSNFYF

SEQ ID NO: 193863 - protein, 50 aa, Glycine max
  Clone ID: PAT_MRT3847_17083C.1.pep
MSVVLKKKKKKKKKKKKKKKKKKKKKKKKKKKKFKKKKKRGPLTPIFFSF

SEQ ID NO: 193864 - protein, 61 aa, Glycine max
  Clone ID: PAT_MRT3847_17084C.1.pep
TRESATCLWIYENSKRRRAEAELLTYSRLCVVLKLSYSPCSSSALKALTRVVIAGPHLRSS

SEQ ID NO: 193865 - protein, 71 aa, Glycine max
  unsure (1)..(71): unsure at all Xaa locations
  Clone ID: PAT_MRT3847_17085C.1.pep
PHLSTMVICLNTCXLXEXHFPKXQCXLSHSSVIXRXWXXXXPSXKLXKXASPXLXARAEFRAYVXVHAXXS

SEQ ID NO: 193866 - protein, 134 aa, Glycine max
  Clone ID: PAT_MRT3847_17086C.1.pep
RTKQTARKCTGGKAPRKQLATKAARKSAPTTGGVKKPHRYRPETEALRERRRYQRTTELLIRKLPFQRLVREIAHDFKTDLRCQSRAVLALQEAAEAYLVGLCDDTNLCAVNAKRVTIMPKDSELAREIPGERA

SEQ ID NO: 193867 - protein, 46 aa, Glycine max
  Clone ID: PAT_MRT3847_17087C.1.pep
VEGPPPSFVTHGHGIDEVSLAIHRFRLVRSLVCFIGSHESAIRYDP

SEQ ID NO: 193868 - protein, 109 aa, Glycine max
  Clone ID: PAT_MRT3847_17088C.1.pep
MEEVNVVETKRGTVSVASAFAGHKEAIQQRDHKFLRIAVEEAYKGVDCEDGGPFGAIIVCNDEIVARCHNMVLRNTDPTAHAEVTVIREGLTRQIYYAYGINSGHTSGY

SEQ ID NO: 193869 - protein, 66 aa, Glycine max
  unsure (1)..(66): unsure at all Xaa locations
  Clone ID: PAT_MRT3847_17089C.1.pep
LGFFLQPWETAPKPPSTGLIXRLNRXHNVTNKELPPRPSNRKGKTTIRVHFVNILIRQAAKNAPYE

SEQ ID NO: 193870 - protein, 75 aa, Glycine max
  unsure (1)..(75): unsure at all Xaa locations
  Clone ID: PAT_MRT3847_1708C.1.pep
KKKKKKKKKKKKNSRGGPVPNSPYSESYYARSLAVVXQRRDWENPGVTQLNRLAAHPPFASWRNSEEARTDRPSH

SEQ ID NO: 193871 - protein, 95 aa, Glycine max
  Clone ID: PAT_MRT3847_17091C.1.pep
INRRTKIQTRHLDVAERRDTFPVLNTAQFRVVSVDDGWQPARQKKMAYTRHGRNGWLHAKDSTRLEGDREDRREYNAGSGKAALSRGSGHIVQAG

SEQ ID NO: 193872 - protein, 103 aa, Glycine max
  unsure (1)..(103): unsure at all Xaa locations
  Clone ID: PAT_MRT3847_17092C.1.pep
TAARRRQKGTAARRRQKGSLSIKNDNRHQDANQYYICSVHIYNAMVVKDRDILXDQQINVSCEVXXLLGNNRFRTLTVSVINDLMRAMKVIDTGVLISGAAEC

SEQ ID NO: 193873 - protein, 95 aa, Glycine max
  unsure (1)..(95): unsure at all Xaa locations
  Clone ID: PAT_MRT3847_17093C.1.pep
KGFCFSPLGVGCRCLFFFGGGFGNSPVFLPCKIQGGAFCIWGPPPIFFVGAPLFWALKRCKNKRFRLDIHKACVEKSSNLRNPPLKYXXKIKKEK

SEQ ID NO: 193874 - protein, 126 aa, Glycine max
  unsure (1)..(126): unsure at all Xaa locations
  Clone ID: PAT_MRT3847_17094C.1.pep
MKELPXTDEGVAEWGADIFVGKGAXLDKHYXEGTFXEQELRETGPAIKCLLGXISWACXGXXGSXKGLRWAXLLSSWGGVAFSAFXXXVVTALMRILSQFSQAERANPAKSVPAKSKNKGCVIVGT

SEQ ID NO: 193875 - protein, 188 aa, Glycine max
  Clone ID: PAT_MRT3847_17095C.1.pep
CLSYCSALLYMKGYQSLQVYRVAHALWGQGRKVLASALQSRVSEVVFALGKKNGEIFRKGIIFVADDPTLYFLYCRFLELIYIQGVTFGGTGKETGDRHPKISEGVLIGAHATILGNITIGECVMIAAGSLVLQEVPPHSIVAGVPAKVIGRVHEHYPSLTMQQDENKHLSEEFFYSKDETTENYYIN

SEQ ID NO: 193876 - protein, 65 aa, Glycine max
  unsure (1)..(65): unsure at all Xaa locations
  Clone ID: PAT_MRT3847_17096C.1.pep
GTPRKKRERXELLWLDGKNXPQSAILFGVDLASIIFPSFFLSYLGSGNINYIIKSPMITNVKRSF

SEQ ID NO: 193877 - protein, 262 aa, Glycine max
  Clone ID: PAT_MRT3847_17097C.1.pep
MELGLMDKNPTKLEHFDDMWRLESTATLLSHLKGDDGRHVLTLDRTIFYPQGGGQPADTGFVLIHGFDNNKFLVSDVRSKDGIVFHYGFFENLGGEFEPTLEKGKEVSLFVDQPRRKLNSRLHSAGHLLDICLPRIGLGNLEPSKAYHFPDGPWVEYKGTISQNEMQSKQKDLELEANALISMGGKVSVDILPYDEAAKLCGGCLPDYVPKESTPRIVRIRDNPGCPCGGTHVADISDIKQIKVSQIRSKKGLTKVYYYVES

SEQ ID NO: 193878 - protein, 74 aa, Glycine max
  unsure (1)..(74): unsure at all Xaa locations
  Clone ID: PAT_MRT3847_17098C.1.pep
LQFPVSSPRXSLSLSLRFEEGSSLLFRCFHISQQPFGSYSSSCSLFTLPLSIHEFNSPGADPILRFSLPRFKPL

SEQ ID NO: 193879 - protein, 78 aa, Glycine max
  unsure (1)..(78): unsure at all Xaa locations
  Clone ID: PAT_MRT3847_17099C.1.pep
CVVFVGGSVPVVACWVLSGLSFLWRVFVLVLPPVWSPWLSXLGLAVAVAXALSGVWGGRGFPLAFGARVGLXFWAYGS

SEQ ID NO: 193880 - protein, 68 aa, Glycine max
  Clone ID: PAT_MRT3847_1709C.1.pep
EDFISILSFPDRHFVFHPKAYVALISWKFCLFTKACSHFGEENTETIFSLTVIKNYVGLSSSSQIEDT

SEQ ID NO: 193881 - protein, 46 aa, Glycine max
  Clone ID: PAT_MRT3847_170C.1.pep
SQKKIGNTCDELSFRSLRFSDVRGQLFGSDTGLLTWDVGLVNGVLL

SEQ ID NO: 193882 - protein, 62 aa, Glycine max
  Clone ID: PAT_MRT3847_17100C.1.pep
KIYKKVTMGIKPEALSKVTDPEVKEFIEKCIAQPRARPSATDLLKDPFFYELNNDEESTPIN

SEQ ID NO: 193883 - protein, 25 aa, Glycine max
  Clone ID: PAT_MRT3847_17101C.1.pep
VFILIHQVKNKLDKLLYFNPLCIKC

SEQ ID NO: 193884 - protein, 143 aa, Glycine max
  Clone ID: PAT_MRT3847_17102C.1.pep
ADDAPRTIPQQGSSEQVNAVPSRPSGRIVGIIKRNWHSYCGSLEPMPMPAGSGGIAHALFVSKDRRIPKIRIQTRQVENLLDKRIIVDVDSWDCQSRYPSGHCVRTIGEIGDRDTESEVWNIGFCTISLFVSIVGKISIIISH

SEQ ID NO: 193885 - protein, 158 aa, Glycine max
  Clone ID: PAT_MRT3847_17103C.1.pep
FYTYTNNYCSCFFCIIMSETVPPLRRAKIARYFKQMPLTDDQEHILALSGLWKIAITNPNDPEFPSLGIFRCMAKLIQKGVNHKDWLLRGQNMYIPYYAAHIIGSYTMNKAKFADKAVKFNVGQEIMQTLLQDYHKVKFGELKLKSEKTKRALEELWD

SEQ ID NO: 193886 - protein, 59 aa, Glycine max
  Clone ID: PAT_MRT3847_17104C.1.pep
RRNPRLCERISNMNWLYLNYPYPLILFKIGNFVNLKLPRFSCKFRKGLKNKAFPFYLGL

SEQ ID NO: 193887 - protein, 251 aa, Glycine max
  unsure (1)..(251): unsure at all Xaa locations
  Clone ID: PAT_MRT3847_17105C.1.pep
NLYISPDKSSAASASVLLISSSEELGVPITIHQTILPLVHCFGKGLCSDGIDVLVAFLGNXFIVKQMVPLLKNVVRSFIDVSCMNKPDPVQSWSALALIVYRQTDDGLVAFLTEEVIVKELLEDLSCIHIGVLMQKHMEIAVLQVLQIIHWXAASTLFGICQRIGADLTALHILPKLKELFDELAFSQEISKGSTTVGRNLKVGKIKIGGDLHIESRMDLVLVLYPSFASLLGIEKLLSVCYMLILDNIFY

SEQ ID NO: 193888 - protein, 37 aa, Glycine max
  Clone ID: PAT_MRT3847_17106C.1.pep
FIFKTFVLVIILSHGYFNIFVFLRSPLYSLLQDMVEI

SEQ ID NO: 193889 - protein, 212 aa, Glycine max
  unsure (1)..(212): unsure at all Xaa locations
  Clone ID: PAT_MRT3847_17107C.1.pep
MSNQPIDPYQYLQIFRNPDGTFTRLNDAVPCTPPSSDPTLSVLTKDITINQQNNTWLRLFLPRTALSSNSNPKKLPLIVFFHGSGFVRLSAASTMFHDFCVEMANTAEAFVASVDYRLAPEHRLPAAYDDAVEALRWIACSEEEWLTQYADYSKCYLMGNSAGATIAYHTGLRVCEVANDLEPLKIXGLILRQPFFGGTKRNESELRLENNP

SEQ ID NO: 193890 - protein, 54 aa, Glycine max
  Clone ID: PAT_MRT3847_17108C.1.pep
FPSPALAPKACFVGCTAFPHTDHSEIIKRRCKQLTAILQEKQDLHQYHQTNGGH

SEQ ID NO: 193891 - protein, 41 aa, Glycine max
  Clone ID: PAT_MRT3847_17109C.1.pep
NLKFKGGLLSCDFISQKKIFFCGFAPPEAMVLLEQPRLQSI

SEQ ID NO: 193892 - protein, 48 aa, Glycine max
  Clone ID: PAT_MRT3847_1710C.1.pep
KPKKWDIFPTNNNNNVRIIFCWIIIRPLKLGLFLQPYCFWNLDGPLMA

SEQ ID NO: 193893 - protein, 56 aa, Glycine max
  Clone ID: PAT_MRT3847_17110C.1.pep
MRQHRLWVLHEHPLGLFNDTIGSSRIASSAYQKWPTKNSNSFALSKHQSENAILAI

SEQ ID NO: 193894 - protein, 62 aa, Glycine max
  Clone ID: PAT_MRT3847_17111C.1.pep
GGKTRRLPGKESLLKKSPKPKKEIWDVSISFLNHLLKETPGSTKIKKTPSKGFNPPQGRVLS

SEQ ID NO: 193895 - protein, 515 aa, Glycine max
  Clone ID: PAT_MRT3847_17112C.1.pep
GAFVVGIFFPNDGPFASALVEKVEDLVSGLFLPLYFVSSGLKTNVATIKGAQSWGLLAFVIFTASFGKILGTLFVSLFCKVPFNEALVLGFLMNCKGLVELIVLNIGKDRKVLNDQTFAIMVLMAVFTTFITTPLVTAVYKPARKGKITNYKYRTIGRKNANSQLRILACFHGARNIPSMINLIEASRGIQKRDALCVYAMHLKEFSERSSSMLMVHKARRNGLPFWNKGHHADSNHVIVAFEAYRQLSQVSIRPMIAISSMNNIHEDICATAERKGAAVIILPFHKHQRLDGSLNITRNDFRWVNKRVLEHAPCSVGIFVDRGLGGTSHVSASNVSYRVTVLFFGGGDDHEALAYGARMAEHPGIRLLVIRFVGEPMNGEIVRVDVGDSTSTKLISQDEEFLDEIKTKIANDDSIIYEEKVVKDGAETVAIICELKSCNLFLVGSRPASEVASAMKRSECPELGPVGGLLASQDYPTTASVLVMQQFQNGAPINFTISDSEMEEHVPDRDSESA

SEQ ID NO: 193896 - protein, 217 aa, Glycine max
  Clone ID: PAT_MRT3847_17113C.1.pep
MGAYRADEDYDYLFKVVLIGDSGVGKSNLLSRFTKNEFSLESKSTIGVEFATRSIRVDEKVLKAQIWDTAGQERYRAITSAYYRGAVGALLVYDVTRHVTFENMERWLKELRDHTDANIVVMLVGNKADLRHLRAVSTEETTNFAEREKTFFMETSALESLNVESAFTEVLTQIYHVVSKKALEIGDDPAALPKGQTINVGSRDDASAVKKDGCCSA

SEQ ID NO: 193897 - protein, 43 aa, Glycine max
  Clone ID: PAT_MRT3847_17114C.1.pep
IMLFGGLDFGYFVLQSEFEYCRTFQLLNCCEPLQFGYLMYILY

SEQ ID NO: 193898 - protein, 59 aa, Glycine max
  Clone ID: PAT_MRT3847_17115C.1.pep
ESMNVENAFTEVLTQIYHVVSKKALESADDPAAFHASETINVGSRDDVSAVKKDGCCSA

SEQ ID NO: 193899 - protein, 46 aa, Glycine max
  Clone ID: PAT_MRT3847_17116C.1.pep
SHGSVIKGWNEGVLDMHIAEHVRLRCSTDFANGAGGYPYWWIHPNS

SEQ ID NO: 193900 - protein, 122 aa, Glycine max
  Clone ID: PAT_MRT3847_17117C.1.pep
MRLITHNMLSSNIKGVVNGFPLRIEAEKVMEKTMEMNSEFLEKMFEKVDWKAFVDASRAMGYTELPEEANSSMLDSDEFLNRFHHALLELDLEEGALVCPETGRRFPVSKGIPNMLLHEDEV

SEQ ID NO: 193901 - protein, 76 aa, Glycine max
  Clone ID: PAT_MRT3847_17118C.1.pep
SPWWGPFSASGGPRLWTWLTRFSVCSVAVCINVVALFRFVSAVVSGRVLVASAGGFFGALVQGSPPPSVVFSGAYF

SEQ ID NO: 193902 - protein, 106 aa, Glycine max
  unsure (1)..(106): unsure at all Xaa locations
  Clone ID: PAT_MRT3847_17119C.1.pep
HGPTPNNFTSSFSKTKPNWLKCSTLAKVAVNLSEWSDVRPGLDCEVHPCALRGNLPQPMGHFYVISGFFVVYRFFNLTAEATLEDVLEKXRRFCDKRWDDARTSVE

SEQ ID NO: 193903 - protein, 34 aa, Glycine max
  Clone ID: PAT_MRT3847_1711C.1.pep
CTSFVHQRQLVIMRWRPGSLQMVQYARERIYLDW

SEQ ID NO: 193904 - protein, 75 aa, Glycine max
  unsure (1)..(75): unsure at all Xaa locations
  Clone ID: PAT_MRT3847_17120C.1.pep
VILAPLPISAFITPLNQRINFGSYYYHDHYLCLLSLGYGLLCGCKGSVSYXTRLTSLNGAHYTFAYGRSPTLLTI

SEQ ID NO: 193905 - protein, 34 aa, Glycine max
  Clone ID: PAT_MRT3847_17121C.1.pep
NFIVLGLVCLYRNIRLLFELVWFRDRACVMYILP

SEQ ID NO: 193906 - protein, 78 aa, Glycine max
  Clone ID: PAT_MRT3847_17122C.1.pep
NQIKMKVITFILIVLVVLSIGIENEGPLKVIEARICEDTLYQLQCNDFKCNTACRKKYGKLASGMCNVVDDCTCHFPC

SEQ ID NO: 193907 - protein, 72 aa, Glycine max
  Clone ID: PAT_MRT3847_17123C.1.pep
YGAHCGPQTVRIKIGTLLPDGGTMNYFAKPIPINIIVDDIDDTGPVAGPHYYTTINGLNFKHTLHPGGPHEP

SEQ ID NO: 193908 - protein, 40 aa, Glycine max
  Clone ID: PAT_MRT3847_17124C.1.pep
ISKQFNWIGPMVSKKWSTNSHLLFIIELTDQLALLSNMSF

SEQ ID NO: 193909 - protein, 59 aa, Glycine max
  Clone ID: PAT_MRT3847_17125C.1.pep
KITNIFFIKFKKLIIFLNIYEINLNYLYFKMDELFSLLTLAYRSYTRVKHDSTIHATIA

SEQ ID NO: 193910 - protein, 64 aa, Glycine max
  unsure (1)..(64): unsure at all Xaa locations
  Clone ID: PAT_MRT3847_17126C.1.pep
HNEVEKNXTFLSDEENKTTCEFKHEYINLVAEPNLLNLNTEYEHYSARPHCLVLTGYLRNLNHE

SEQ ID NO: 193911 - protein, 41 aa, Glycine max
  Clone ID: PAT_MRT3847_17127C.1.pep
QTVREIAEYNLRISGVFDGFELVVGFGPPNARDVCPDCNGY

SEQ ID NO: 193912 - protein, 47 aa, Glycine max
  Clone ID: PAT_MRT3847_17128C.1.pep
FLNLHFFYWGVKPNFWVSLTIVVLICQGKYETVPTRFNTTSYFSSGS

SEQ ID NO: 193913 - protein, 40 aa, Glycine max
  Clone ID: PAT_MRT3847_17129C.1.pep
LLNNPLKIFFLKLHSFSFHFIFFYSFLITFLLYSFLLNFH

SEQ ID NO: 193914 - protein, 388 aa, Glycine max
  Clone ID: PAT_MRT3847_1712C.1.pep
GSRELSASTLVLYPASQPPQEPKNENNGGIVFDSKNLQQMQGEMPKEFLWPSRDLVDTTQEELKEPLVDLAIFKNGDEKAISNAAELVRKACLKHGFFQVINHGVDPDLIDAAYHEIDSIFKLPLSKKMGAKRKPGGVSGYSGAHADRYSSKLPWKETFSFLYDHQSFSNSQIVDYFKSVLGEDLQHTGRVYQKYCEAMKDLSLVIMELLGISLGVDREHYRRFFQDGDSIMRCNYYPPCNRANLTLGTGPHTDPTSLTILHQDQVGGLEVFVDNKWLAVRPRSEALVINIGDTFMALSNGRYKSCLHRALVNTYRERRSLVYFVCPREDKIVRPPDNLLCRNEERKYPDFTWSNLFEFTQKHYRADVATLQSFIEWQQCSNSNPSNF

SEQ ID NO: 193915 - protein, 95 aa, Glycine max
  Clone ID: PAT_MRT3847_17130C.1.pep
VIVRVSFYTTIMYCIMSQAFGIITYVLHSSSTESFSSFRVCECAQQSTCVRWSVLGRGSTNVICVTSIHPQLRRFRPSTSSSKLAYHSFCFSLEP

SEQ ID NO: 193916 - protein, 90 aa, Glycine max
  Clone ID: PAT_MRT3847_17131C.1.pep
KKTPLFKNHFQTPGGDLAFPGIKTLGPALNLFFLRTPWLGGPNIFFAPTGNPYCFYSPYREKVPPFLNLNPPTGKSQKNFFRRNLFGGGL

SEQ ID NO: 193917 - protein, 80 aa, Glycine max
  Clone ID: PAT_MRT3847_17132C.1.pep
EKYLVKFKVHFPSLVDYVLKKESGGSEGEINNICERKGEEKGNEKKNPKKLYLFVCSALSSSLSLTLVHWILIGICNNIL

SEQ ID NO: 193918 - protein, 139 aa, Glycine max
  Clone ID: PAT_MRT3847_17133C.1.pep
SWRARRLSLSRSLVLNRLRPVASGGGKAQPGSPWWRSKGYRCIGGVLYKVSANKLSKTFGHPSDAGSRPLLRTGRLDPACSCSRSLASRAVQRSLAIIRQARQRTEKRKEYCMYYNRFGRCNRGERCPYMHDPEKVAVC

SEQ ID NO: 193919 - protein, 48 aa, Glycine max
  Clone ID: PAT_MRT3847_17134C.1.pep
KSKKNNIHTHFTPAQNHNLIMIQVKEIKHVAYVSASGLISFPWIIIKL

SEQ ID NO: 193920 - protein, 48 aa, Glycine max
  unsure (1)..(48): unsure at all Xaa locations
  Clone ID: PAT_MRT3847_17135C.1.pep
YYEYDYGGARVLLPKXPRFPLLLVXRWHAWMYCDHLSNKKNVSFFGYL

SEQ ID NO: 193921 - protein, 45 aa, Glycine max
  Clone ID: PAT_MRT3847_17136C.1.pep
TVFAASFSYLVLLLLPIAFFVIVTMSRICRSYSLMELLDFVDDQF

SEQ ID NO: 193922 - protein, 78 aa, Glycine max
  Clone ID: PAT_MRT3847_17137C.1.pep
NTPSFPLTPHTLPINQTPPTQTTPHKQISQRPYHLPTKKPFTLYAPTTKNIFQRMLYSTSMTIPSKSVYLYFDPRKLI

SEQ ID NO: 193923 - protein, 76 aa, Glycine max
  Clone ID: PAT_MRT3847_17138C.1.pep
SGKKSTIVSVKQLNCTLEVRSKLSCMDAGEVPIPNTNTEYDKGSSKNVFKNKKVTTYVEWSLTVLTKKIYNKTCSS

SEQ ID NO: 193924 - protein, 37 aa, Glycine max
  unsure (1)..(37): unsure at all Xaa locations
  Clone ID: PAT_MRT3847_17139C.1.pep
RVYXERGRGRDLAEXQVISIXCXWIGXPXKXKPGDXK

SEQ ID NO: 193925 - protein, 44 aa, Glycine max
  Clone ID: PAT_MRT3847_1713C.1.pep
YSYFFLVRLILTCYLFIYLCVILYIYVYDIFSTFYLTSLQNLSY

SEQ ID NO: 193926 - protein, 176 aa, Glycine max
  unsure (1)..(176): unsure at all Xaa locations
  Clone ID: PAT_MRT3847_17140C.1.pep
KLSQIDAGLAFSDGNSTFRISSLGFLHYTTVQIGTPGVKFMVALDTGSDLFWVPCDCTRCAATDSTSFASALATDFDLNVYNPNGSSTSKKVTCNNSLCTHRSQCLGTFSNCPYMISYVSAETSTSGILVEDVLHLTQEDNHHDLVEANVXXGCGQIQSGXSFLDVXCSPIGFVWA

SEQ ID NO: 193927 - protein, 58 aa, Glycine max
  Clone ID: PAT_MRT3847_17141C.1.pep
EPLSSLVGTNAYSSRCSMKADWMPGHTKPHYLDGSAPVDFGYDPLRLAELPKNIERFK

SEQ ID NO: 193928 - protein, 71 aa, Glycine max
  Clone ID: PAT_MRT3847_17142C.1.pep
FTISTPRGCITMLLILSFIMYESRNIIISSLAGLFTFRSFGQIAPIIRAVFSLFRSRDPFQVALLGPSSPV

SEQ ID NO: 193929 - protein, 72 aa, Glycine max
  unsure (1)..(72): unsure at all Xaa locations
  Clone ID: PAT_MRT3847_17143C.1.pep
KKKVFPKCGAEGQKQKKVPPGILFLFFRKSPPQPLLIHHVKMESLKGCFSCPKKTLFAYLLNFFPKKKKKEX

SEQ ID NO: 193930 - protein, 32 aa, Glycine max
  Clone ID: PAT_MRT3847_17144C.1.pep
VGRIFFGYEGAPWTIMTCHSTHQSSINESYFK

SEQ ID NO: 193931 - protein, 59 aa, Glycine max
  Clone ID: PAT_MRT3847_17145C.1.pep
QLFCPNNSFKSQVDNPFFKNELPSHLLLRDYLMDWSPHWKPSPSEGVAHAWVSGAVPAR

SEQ ID NO: 193932 - protein, 96 aa, Glycine max
  Clone ID: PAT_MRT3847_17146C.1.pep
WNSGSFCRKWWDVSALAPPRDDRVFVNAADSAHQNKPGSYDDDSAVFTAAPQRMVRNLREPSRTNGKASTTADDELYDGIPRYPEDSLPNKPRSQR

SEQ ID NO: 193933 - protein, 67 aa, Glycine max
  Clone ID: PAT_MRT3847_17147C.1.pep
LCEEEKRKGGTLGLWRKLSSTPLALHTTRALSIPKTNPKSNLNPKAKPFQWNPHGCPRPFCSLLAAV

SEQ ID NO: 193934 - protein, 78 aa, Glycine max
  unsure (1)..(78): unsure at all Xaa locations
  Clone ID: PAT_MRT3847_17148C.1.pep
KQLDQKKEPKKPYDKPVGLPLKDAYTRESIGTVPLGRXETPFLKPVMVLTFAPTGLSTEGKSVEMPHESHYQGTYLRQ

SEQ ID NO: 193935 - protein, 45 aa, Glycine max
  Clone ID: PAT_MRT3847_17149C.1.pep
LSMTGYGSLARSGFLSTFIITTFPFLSYCFLLLFSFFCFFFFFFF

SEQ ID NO: 193936 - protein, 60 aa, Glycine max
  Clone ID: PAT_MRT3847_1714C.1.pep
GLGFYPNPFSMEEEAALEVVDPNTAVAAAAGAMAVRMARAGVNGPLPNKNLARGEGAPQA

SEQ ID NO: 193937 - protein, 65 aa, Glycine max
  Clone ID: PAT_MRT3847_17150C.1.pep
FVSKLSIIKKFVTTSSIQRRESIGLIVFKGRIVKMIAKLFNEAVPRKIGLLKKKRLLVFLLLFLD

SEQ ID NO: 193938 - protein, 82 aa, Glycine max
  Clone ID: PAT_MRT3847_17151C.1.pep
RVIMLVFSSGGFNVNYSIHLPGHMLYLLALLAVTLSPAGRLILYLLFMVHGPIQLYSPITSPVHFHGVICSPITPPHYHNLL

SEQ ID NO: 193939 - protein, 61 aa, Glycine max
  Clone ID: PAT_MRT3847_17152C.1.pep
AFMLPEVLKMRKELSLRVAELIMDCANIVLVRNLSAPIDKCPPLPHYLLENMILLFPEGIF

SEQ ID NO: 193940 - protein, 42 aa, Glycine max
  Clone ID: PAT_MRT3847_17153C.1.pep
NKLNLQSEQCACSTLYRESHHLIQIININIHNKSTRTNYRAK

SEQ ID NO: 193941 - protein, 704 aa, Glycine max
  unsure (1)..(704): unsure at all Xaa locations
  Clone ID: PAT_MRT3847_17154C.1.pep
MSSSNLTGFVLAVLSSAFIGSSFIIKKKGLQLASANGPRASVGGYGYLLQPLWWVGMITMIVGEIANFVAYIYAPAVLVTPLGALSIIVSAVLAHFLLKEKLQKMGMLGVSSVHWDQLLFVLHAPEEKSLSRHAVRTACEEDRRGQPAFLSYTASTIAVTLFLVLYCAPRYGQTNILVYTGICSIVGSLTVCGPSGRWYLADSGSVPGDLLLIIGKALTHATVGLCPAASYRASPDYFLSPNGGGRTSLAYRLMPQGNAILDCSLIAAAGHVIPQSYVRISVSQFMDDLVVEELIGNRWVYKNNGYLMVSCNGGLNQMRAAICDMVAIARYLNVTLIVPELDKTSFWADPSDFQDIFDVDHFITSLRDEVRILKELPPRLKMKVERGFLYTMPPISWSDISYYKDQILPLIQKYKVVHLNRTDARLANNGQPIEIQKLRCRVNFSGLRFTXPPIEXLGKRVIRLLRQNGPFLVLHLRYEMDMLAFSGCTQGCNSDEVEELTRMRYAYPWWKEKIINSDLKRKDGLCPLTPEETALTLRALDIGQSIQIYIAAGEIYGGDKRMASLAKNYPKLVRKETLLEPSDLQFFQNHSSQMAALDYLSFCIDWHTNCGSWAELVEGHWIWIIFTLPLLMNXRALXVSFLDQSHVRLMNWYEFSSAVKEVHANRMGGATKRLVIPDRPKEEDYFYANPEECLELSDVMLSST

SEQ ID NO: 193942 - protein, 195 aa, Glycine max
  unsure (1)..(195): unsure at all Xaa locations
  Clone ID: PAT_MRT3847_17155C.1.pep
PWSRGIALPNITVGGTILRIDLWANFLTXGSFRASVDLQRTHCIKGMIKMVATVWFPENTGLSLACALNSSYRGRASXDIYTICSQDXELWNSACTKALTMLFNPNPCSDAWSLELXTRTCSHCDIICVTGWTATPMQDVQGSIGWVYSSXKGVPRTYCVQNPQNPLGLNRGMGKTXFPRALSQIVKRMPFFLWG

SEQ ID NO: 193943 - protein, 257 aa, Glycine max
  unsure (1)..(257): unsure at all Xaa locations
  Clone ID: PAT_MRT3847_17156C.1.pep
NHETNLAMTENEKMEEIRNRRIPADDLAKQAHELEHQAVHESLKDQIPADDKLNSTKVNKFAKIMNLRQSVVGDLKLLTDGKLYEGKHIPVSNISAGENHVVQIPLMAQEEILSSSASDFRTAMVSKNSKPQATAMHVGAMEIIIDRFESPDCNIIGAMLXVDTYHTNPENALPTISDAPLTGRRPILVVTCPNTIVQIAPNMNXRFQILSATTNGDFVQGKDLAMVKVNVAXAAVGXTSSYTPTALLEFGSQKTDG

SEQ ID NO: 193944 - protein, 281 aa, Glycine max
  unsure (1)..(281): unsure at all Xaa locations
  Clone ID: PAT_MRT3847_17157C.1.pep
LSMWRYFAGDLVFEVSKMTAPYIKCTVSFFIAFANSADDTINSEAVPHXLVQFVEIQETVVSKFSQEEFLTAWATQVQXATTLLADGCPYLYAMVHDSSESTIPGDFVIGVKLTTINNMCAYGLNPAISGSRLLGTIPQSISQQTVWNHMASVRTPLNCDSSKQSFCQFSIDLLGGGILMDKTGDWITLIQKSPIINLLRDAAWKKGCLMGKIVMAGNAAIKRSEWASLVPVFLTNRNTTQHFXDACXWTKIQPLSRGMIFPPKVCGXPNKGFKMWRSQWA

SEQ ID NO: 193945 - protein, 253 aa, Glycine max
  unsure (1)..(253): unsure at all Xaa locations
  Clone ID: PAT_MRT3847_17158C.1.pep
PSTRGRTHGLDWLNVSSTPAPFASGKTFKYDIIGAGSHSSEDFPEKEDHEXPNKIDARLRQRIDPQYNEVHAQMDTNLFKXSLDDVETSKGSMLDLKISQSKIALAKNTVGGTILRRDLLANFLTEGNFRASVDLQLHSXIKGMIKMEVTVGIPENTGIALACAMNSFFMGRASSDIYTICSQDCELWNPVCTKAMTMLFNSNPCSDAXWSLEFLKRTGFNCDFICVIGWTVTPXQDVQVQFDWVFPFKNVFP

SEQ ID NO: 193946 - protein, 291 aa, Glycine max
  unsure (1)..(291): unsure at all Xaa locations
  Clone ID: PAT_MRT3847_17159C.1.pep
METNLLKLSLDDVATPNGSMVDLKISQSKSALPNNTDGGTILRGDLLANFLTEGIFRARVDSLRTHRIKGMIQMLATAGIPENTGIALARAMNRSFRGRASSDIYTICSHDCEVWNPACTXAMTMPFNPNPCSDAWRLEFLKQTGFHXDIIXDTGWTATPMQDDQATMDWXISSQECVPRTYCVLNPQNPFVLNRWMGKLTFPQGTSRSVKRMPLSIGGGAGAKNAILMTMPNAALSMWRYFVGDLVFAVSKMTSTYIKRTVSLFIALGNVADDTMILRLFPHAAQIERSG

SEQ ID NO: 193947 - protein, 49 aa, Glycine max
  Clone ID: PAT_MRT3847_1715C.1.pep
YVLSLDPHVMGVYSSFWSMRVVDPVCVTDMPLDAKFMENAVNLKAKKKD

SEQ ID NO: 193948 - protein, 246 aa, Glycine max
  unsure (1)..(246): unsure at all Xaa locations
  Clone ID: PAT_MRT3847_17160C.1.pep
ACDFPAVDKLYSTKVNKFAKIMNLTQSVVGDLKLLTDGKHAEGKHTSVSNISAGENHVVQIPLMAQEEILSSSASDFRTAMVSKNSRPXATAMHVGAIQLIIDSLASTDCNINGAMLLVDTYHTNAENAVRSIFVAPFRGGRPIRVVTFPNTIVQIEPDMNSRFQLLSTTTNGDFVXGKDLSMVKVNVASAAVGLTSSYTSTSSLESGLQKDRGLIVDYIGRMSYSVITLYIPXEKDLSLGNFSLI

SEQ ID NO: 193949 - protein, 367 aa, Glycine max
  unsure (1)..(367): unsure at all Xaa locations
  Clone ID: PAT_MRT3847_17161C.1.pep
MMWEPYRAALISLTNLFLCSVLLSLPNNNKKMPSAEASSETICVTGAGGFIASWMVKLLLEKGYTVRGTLRNPDDPKNGHLKEFEGASERLTLHKVDLLHLDSVRSVINGCHGVFHTASPVTDNPEEMVEPAVSGAKNVIIAAAEAKVRRVVFTSSIGAVYMDPSRSIDLVVDESCWSDLEYCKNTKNWYCYGKAVAEQAAWDTAKENGVDLVVVNPVLVLGPLLHPTINASTIHILKYLTGSAKTYANATQAYVHVRDVALAHILVYEKPSASGRFLCAESSLLRKELATMENXLKFSPRVPTKSSDEKNPRAKPYTFSNQKLKDLGLEFTPVSQCLYETVKSLQEKGPLPVPAKQQEEDSTTVKS

SEQ ID NO: 193950 - protein, 91 aa, Glycine max
  Clone ID: PAT_MRT3847_17162C.1.pep
KKKKKKKNKKKKKKKKKKKETTKGRSSTSRVLTPGIFSLTVPCCFIGFPYIEGVSPLVFDMPIPVPCLNLFPAGLSSPLAAPWHIVFRLGR

SEQ ID NO: 193951 - protein, 206 aa, Glycine max
  unsure (1)..(206): unsure at all Xaa locations
  Clone ID: PAT_MRT3847_17163C.1.pep
SDFITDSFASPDCNIFGAMLLVDTYHTNPENAARSIFVAPFTGGRPIRVXTFANTIEQIEPDMNSRFQLLSTTTNGDFVQGKDLAMVNVHVACAAVGLTSSYTSTSLLETGLQKDRGLIVEYYGRMFYVAHNGDQTQVKDLMEGNVSYDIKSRSRLEKVSXSTKAQFVSGKTFKFDXIGAGSHFSEDFPGKEYPEKPHVIAVGLRQ

SEQ ID NO: 193952 - protein, 251 aa, Glycine max
  unsure (1)..(251): unsure at all Xaa locations
  Clone ID: PAT_MRT3847_17164C.1.pep
PGAYGLNPGISGSRLLGTIPHSISQQTVWNQMATVRTPLNFDSSKQSFCQFSIDLLSGGILMDKTGNWITLIQNSPINNLLRVAAWKKGCLMVKIVMSGNAXXKKNDWASLVQMFLTNSNSTEHFDACKWTKSEPHSWELIFPIEVCGPNNGFEMWSSEWANQTSWPLRLLIDNTKQSTNIDILLGIPQNFEIAGDTLMPTFSVPQATGKSFENAGNLCMNRNKSFLLVVALFNFTKGKKHDPPVEYSLAI

SEQ ID NO: 193953 - protein, 136 aa, Glycine max
  Clone ID: PAT_MRT3847_17165C.1.pep
VHFGGERIAYEVSVQEAVALYGGHTPAGMQTKYLDVGWGLGSVTHELAPGIDCPETATFLDTFHYYDADDPVHYPRALCLFEMPTGVPLRRHFNSNFKGGFNFYAGLKGQVLVLRTTLTVYNYDYIWDFIFYPNGV

SEQ ID NO: 193954 - protein, 175 aa, Glycine max
  unsure (1)..(175): unsure at all Xaa locations
  Clone ID: PAT_MRT3847_17166C.1.pep
MGRLFYYSAFFHSLLLTDPHCRSKWSYLKNTWALVQMFASLMVSGDNRFTETTIFNCRDLDILVVHYTIATQFKKFLPHYIRWHLYTSLIYILQSFLTAEIKYKRNQSNIQIYGLFYDGXYKIWTKHEKNLAXLTEEENMEVITNRSIPADVHAKRAQECEKQVVHESLKDQISC

SEQ ID NO: 193955 - protein, 91 aa, Glycine max
  unsure (1)..(91): unsure at all Xaa locations
  Clone ID: PAT_MRT3847_17167C.1.pep
IGGIRAAPTGNERCPLTVVQSRNELHKGIGTIMSAPYRIRFIAEGHPLRPKFDXFAGIMLGVXIPTEWSAGDDLPEGPAVKHGENTDAMDG

SEQ ID NO: 193956 - protein, 51 aa, Glycine max
  Clone ID: PAT_MRT3847_17168C.1.pep
GASFPHSVYEHCCVVCCLQIWNCISLRRSHVSSLGLSTFLSKRATNSKSPV

SEQ ID NO: 193957 - protein, 227 aa, Glycine max
  unsure (1)..(227): unsure at all Xaa locations
  Clone ID: PAT_MRT3847_17169C.1.pep
SXVXEXXXXSVXXQXRNVKNNVIKIWXXLVQSMFREAEWLRTKTVPTIGDYMENAYISFXXGPIVLPAXYXVGXKLSDEVTENHELNYLYKLMSTCGRLLNDIHSFKRESEEGKLNVLALRIAHGNGVITAEDATEEMKGIAEEKRRELLRLILQEKGSVVPRECKDLFWKMIKVLHLFYMKDDGFTSHEMHSSVNAVLKKPVILNELLVHSQQNLSPVKATNDLML

SEQ ID NO: 193958 - protein, 46 aa, Glycine max
  Clone ID: PAT_MRT3847_1716C.1.pep
AGRVQFQKIRLEPEQSTRVPTLRPHSHLILLGVKSARKVAGHVLKQ

SEQ ID NO: 193959 - protein, 65 aa, Glycine max
  unsure (1)..(65): unsure at all Xaa locations
  Clone ID: PAT_MRT3847_17170C.1.pep
KTPYFGGLVWKKIKPPPPQKTPAKKGFPPVGQKKPVPKACVAKVPXPPPLPPPPPPPPGPGPGPS

SEQ ID NO: 193960 - protein, 41 aa, Glycine max
  unsure (1)..(41): unsure at all Xaa locations
  Clone ID: PAT_MRT3847_17171C.1.pep
SNSKFLKTTSNPSSKLHFSLKXSTPNLKNLLFIHTPQINYL

SEQ ID NO: 193961 - protein, 54 aa, Glycine max
  Clone ID: PAT_MRT3847_17172C.1.pep
SSWSKIPLLATFHICLHRDCKFFNFIYTYIYIGAMGRSGSTTKRHHFEIPTTSM

SEQ ID NO: 193962 - protein, 154 aa, Glycine max
  unsure (1)..(154): unsure at all Xaa locations
  Clone ID: PAT_MRT3847_17173C.1.pep
NKPHSVSGTINRKRPLPVGSSSSPMAQWVGQRPQKXSRTRRANVVSPVPSFDEVHTSLEGCSPSDVITRKTTAATSGFLISNGAINGGIHPGKMKHESVSSPTKLSESEESGAGENGESKMEKGLESNEVDGSAINNSYNTSSSMLTSKKKKKK

SEQ ID NO: 193963 - protein, 73 aa, Glycine max
  Clone ID: PAT_MRT3847_17174C.1.pep
EQFRYIIEQCRIGVFVLARATKTVTLLSAFVVVSPQVDLNLLISFFPHDPNQNAVMEDSDEDIVCNWVPSSPE

SEQ ID NO: 193964 - protein, 156 aa, Glycine max
  Clone ID: PAT_MRT3847_17175C.1.pep
MAAATAGVVGGNGSSASWMRFKGKERKQTKMNKSRISCSYSSSVMDPYKTLRIQRGASESEVRKAFRQLALQYHPDVCRGSNCGVQFHEINEAYDTVMANLRGESNATESYEAYYDAGIDEPLRGMNDPDWDMWEEWMGWEGAGIRDYSSHINPYI

SEQ ID NO: 193965 - protein, 100 aa, Glycine max
  Clone ID: PAT_MRT3847_17176C.1.pep
GVVGGNGSSASWMRFKGKERKQTKMNKSRISCSYSSSVMDPYKTLRIQRGASESEVRKAFRQLALQYHPDVCRGSNCGVQFHEINEAYDVRYISCNYPFL

SEQ ID NO: 193966 - protein, 55 aa, Glycine max
  Clone ID: PAT_MRT3847_17177C.1.pep
HEVKLSSEGVHCFVYNGRLSLIGVSISALFLNQCPVLVGIITCYAKRGPNYGSKV

SEQ ID NO: 193967 - protein, 136 aa, Glycine max
  Clone ID: PAT_MRT3847_17178C.1.pep
KFRNWKIVVRVLMMGKKKPQKTKELSVAIAEASSTIDEKEQHEVQVQPQPQAPRKRGRPRKIVLKLEESEEEKAQVIEQGGAQGTESSMEKGTTNEEEGTSSACMRVTTKQEEIQLPKVEPSRSRARRKSKPRKSS

SEQ ID NO: 193968 - protein, 82 aa, Glycine max
  Clone ID: PAT_MRT3847_17179C.1.pep
YATLYRGNSFSVLVTLQLSSNHTITNLNPLTTFTWVDDSVVTIKGIRVIAKHTFNTTRYLELCSTTWVRRVASSITHMQRSV

SEQ ID NO: 193969 - protein, 302 aa, Glycine max
  Clone ID: PAT_MRT3847_1717C.1.pep
MLSVLVCPSHELATPFQCLHFPNTDYSLKCSPKLQLGSTPSQRNPFKCFCNRKEHVTPFSQGFSELQEDDSPWESGNVWSNLALYLFTLHIPFSFGGLSVVALFNGQPVLDPQTEALSLLTIQILEFGGALVLLKYTAKPQYKFSNFSRKNKLLSNRNWFLSSAVGFGFLVLLIFLTSLLADRLFGSKPPVNNPILRDMLLNIDISRLSCVLAYCIVTPLLEEVVYRGFLLTSLSSTLEWQQAVAISSVVFSAIHFSGENFLQLFIIGCVLGCSYCWSGNLSSSIAIHSLYNALTLVITYFY

SEQ ID NO: 193970 - protein, 113 aa, Glycine max
  Clone ID: PAT_MRT3847_17180C.1.pep
KGIVHTLTTHPTSRCYPDNPWRSRQLRSFAESPRPIPTLSLMYISIGKFPRTSSKHLSTFLYTTIKVPRPPRATVSSSASLVIQATANAYYPRNYFPRRPTSPTRKRKHRCIS

SEQ ID NO: 193971 - protein, 120 aa, Glycine max
  unsure (1)..(120): unsure at all Xaa locations
  Clone ID: PAT_MRT3847_17181C.1.pep
MAEPSKAIHVPNVGHDTSENDXLKLHNPYRVITKLERWRAKNQALLRMQHITSAXQCLTKISXGQPCLWGPNGYGHTFSHYGLTTLGQNHARLHEPNWNLLDTVHHKLHPITDGVPHQEL

SEQ ID NO: 193972 - protein, 44 aa, Glycine max
  Clone ID: PAT_MRT3847_17182C.1.pep
FQLHMFSPGVSLSFVLYIVWSDRGLVPFVHFLEINNTSLPHSFL

SEQ ID NO: 193973 - protein, 296 aa, Glycine max
  unsure (1)..(296): unsure at all Xaa locations
  Clone ID: PAT_MRT3847_17183C.1.pep
ARTRTYWPDPPTRANNRPHTPPTTQAEILTCTASDPRTAMVSKNSKPHATAMHVGAIEIIIDRFASPDCNIIGAMLLVDTYHTNPENADRSIFVAPFRGGRPIQVDTFPNTIVQIEPDMNSRFQLLSTTTNGDFVQGKDLAMVKDNVPCAAAGXTSSYTPTPLLECGLQKDRGLIVEYFGRMSDVAHNVYQPQEIDLAEGNSPLDIKSRSRLEKVGSTKAQYVSGKTSKYDIIGAGSHSSEDFPEXEDHVXPKKIDARLRQRIDPHYNEVQAQMETNQSKLSLDDSETXKGSMSDL

SEQ ID NO: 193974 - protein, 153 aa, Glycine max
  Clone ID: PAT_MRT3847_17184C.1.pep
VQTKRVTKICSSKDIVTINGMFPGPVVYAQEDDRIIVKVTNMTPFNVTIHWHGVRQRLSCWYDGPSLITQCPIQAGQSFTYNFTVVQQKGTFFWHAHVSWLRGTVYGAMIVYPKTGVPYPFKFPFQEHIIILGNLVPPFGFEFRVLLSNKFSI

SEQ ID NO: 193975 - protein, 281 aa, Glycine max
  unsure (1)..(281): unsure at all Xaa locations
  Clone ID: PAT_MRT3847_17185C.1.pep
FYCDIICGTGGTXTPMQDXQVTIDWFIHYQEXDPGPMAFTTPQNPWELNRGMGKLTFRQCTFXSVKRTSISIRGGSDAKNATLXMNMPNAVLSMWRYFVGDLVFEVDKMTSPYIKCTVSFFIALGNLADDTINFEAFPHKLVQFGEIQEKVVLKFSQEEFLTAWSTQVRSATTLLADGCPYLYAMVHDSSVSTIPGDFVIGVKLATINNMCAYGLNPVISGSCFLGTIPQSISQXTGCNQMATVRTPFXFDPCKQSFCQIFIDLLGGGILLDKTXDWFTLI

SEQ ID NO: 193976 - protein, 206 aa, Glycine max
  unsure (1)..(206): unsure at all Xaa locations
  Clone ID: PAT_MRT3847_17187C.1.pep
MANLITLFSLWLSMMSTIYSVKLIANGSTKGESTRFYDFKVQTKRVTKLCNSKDIVTINGMFPGPVVYAQEDDRIIVKVTNMTPFNVTIHWHGVRQRLSCWYDGASLITQCPIQSGQSFTYNFTVVQQKGTFFWHAHISWLRGTVYGAMIVYPKTGVPYPFNFPYQEHIIILXGEYWLQDLQXNENATIASGRPXPIADAYTINGH

SEQ ID NO: 193977 - protein, 208 aa, Glycine max
  unsure (1)..(208): unsure at all Xaa locations
  Clone ID: PAT_MRT3847_17188C.1.pep
RSRGLPMRRYSVGDVAFEVSKMTSPYINMYTLSSLSYAFWKXADDTLNFEAFPHKLVQFGEIQEKVCXKFSQEEFLTAWPTQVRPATTLLADGCPYSDAMVHDSSVSTLPGDFAIGVKLTAINNMXAYGLNPGITGSGLLGTIPQSIXQQTGWNQMVPARTPLNFDSSKXSFCQFSIDLPGGGIVVDKTGEWITLIQNCPIRNLVRVA

SEQ ID NO: 193978 - protein, 226 aa, Glycine max
  unsure (1)..(226): unsure at all Xaa locations
  Clone ID: PAT_MRT3847_17189C.1.pep
KLTTINNMCAYGLNPGIAGSRFLHTIPKSISQPTVWNQMATARTPSNFDSSKQRFCQCSIDLVGGGILVDKTGDWITLMQNSPVSNLLRAAAWKKGXLMDKIEMSGNAVIKRSDWASLVQVFLTNSNSSEHSDACEWTQSAPHSWELIFPIEVCGPNIGFEMWSSEWANQTSWHLSFLIDNPKQTTVFDIFLGISQDFEIAGYTLMPAFFVPQATAISSENAESSA

SEQ ID NO: 193979 - protein, 142 aa, Glycine max
  Clone ID: PAT_MRT3847_1718C.1.pep
MASSFVGTLLPNHFTQTKHSAVPASRSGAPRRRRVHLATTRAETMTTVIEKLGIKIERNPPESKLTQLGVRQWPKWGCPPSKFPWTYEAKETCYLLEGKVKVFPSGSNESVEIAAGDLVVFPKGMSCTWDVSVGVDKHYNFE

SEQ ID NO: 193980 - protein, 58 aa, Glycine max
  Clone ID: PAT_MRT3847_17190C.1.pep
HHHPWRFLRRSPPLRRRSTCGSSTPTRATSISLSHSTTSRALSMFSILLTPGGGEPSV

SEQ ID NO: 193981 - protein, 149 aa, Glycine max
  unsure (1)..(149): unsure at all Xaa locations
  Clone ID: PAT_MRT3847_17191C.1.pep
MGSILAFQGPRLSGTIPQSISQQTVWNQMAPLRTPLNFDSSRQSFRQFSIDLIGGGILRDKTGDWITLIQNSPISDLLRVAAWKKGCLMDKIAMPGNAAVXRSDWAXLVRAFLTNSNSSDHXDACKWTKIESHFCELILPXEVCGPNNG

SEQ ID NO: 193982 - protein, 181 aa, Glycine max
  Clone ID: PAT_MRT3847_17192C.1.pep
MAGKGEGLAIGIDLGTTYSCVGVWQHDRVEIIANDQGNRTTPSYVAFTDTERLIGDAAKNQVAMNPINTVFDAKRLIGRRVSDPSVQSDMKLWPFKVTAGAGEKPMIGVNYKGEEKQFAAEEISSMVLTKMREIAEAYLGSTVKNAVVTGPAYFNDSQRQATKDAGVIAGLNVMRIINEPT

SEQ ID NO: 193983 - protein, 215 aa, Glycine max
  unsure (1)..(215): unsure at all Xaa locations
  Clone ID: PAT_MRT3847_17193C.1.pep
HLKMFILRHHTNLAIVLTIFIACTTRAQNLTTCNGKCGEHTLQFPFGFSQGCPIQLDCSNDQVQLRSEFGEFLVQNVTNSNIFVNLPAKCNRTMESIQPIFTENFAPTINNSFLVQDCREVFGGCVIPASFVSNQIDVENCSNKSANISCFSKQMKXFVTYADLNGTKCKYLFSAVSLGQSKEIPLQFQGVEXXGWLPGQCEDHQWSNNATCTTV

SEQ ID NO: 193984 - protein, 265 aa, Glycine max
  unsure (1)..(265): unsure at all Xaa locations
  Clone ID: PAT_MRT3847_17194C.1.pep
FQTAWSTQVRPATTLLADGCPYLYAMVHDSSVSTIPGDFVIGVKLTTINNMCAYGLNPGISGSRLLGTIPQSISQQTVWNQMAMVXHDSSKQSFCQFSIDLLGEEILVDKTGDWITLIQNSPISNLLRVAAWKKGCLMVKIVMSGNAAVKRSDWASLVQVFLTNSHSTEHFYACKWPKSEPHSWELIFPIKEWGPNKGFEMWSSEWANQTSWHLSFLIDNPKQFTVFDILLGISQDFEIAGNTLMPAFFVPQGTARFFENAESSA

SEQ ID NO: 193985 - protein, 130 aa, Glycine max
  Clone ID: PAT_MRT3847_17195C.1.pep
MAATMKALAFVALLVTINAIVCESRVARKDLGLDLGGVGIGVGAGVGLGLGGGGGAGSGAGAGSGSGSGSSSYSSSGSSSSSSGSGSGAGSEAGSYAGSHAGSGSSRAGSEAGSYAGSHAGSGSYGGNGK

SEQ ID NO: 193986 - protein, 314 aa, Glycine max
  unsure (1)..(314): unsure at all Xaa locations
  Clone ID: PAT_MRT3847_17196C.1.pep
MGGRWGSRLTEKTNVTCRDXTSLDVYYTIGTQFRKFLPHYIRWHLYTLLIYILPSFLTAEIKYKRNLSNIHISGLFYDGRYKFWTKHEKNLALTEEEKMEVIRNKGIPADVFAXRAYEFEXHVAHESLKDQIPAVDKLYSTKVNKFAKIMNLTQSVAGDLKLLTEWEVVLGXKIVPVSNISAGENHVVQIPXLMAQEEILFSSASDFRTAMVSKNSKPQATAMHVGAIEIIIDSFASPDCNIVGAMLLVDTYHTNPENAVRXIFVAPFTGGRPIRVXTFPNTLVQIVPDMNSRFQLFGSTSNGDFVQGNDFPLV

SEQ ID NO: 193987 - protein, 58 aa, Glycine max
  unsure (1)..(58): unsure at all Xaa locations
  Clone ID: PAT_MRT3847_17197C.1.pep
LXXKQKDYDVFPPMDVMRNESFPKQLKFGPGYGQFHYYXLSYRIXGALKPSGLGFVLV

SEQ ID NO: 193988 - protein, 372 aa, Glycine max
  unsure (1)..(372): unsure at all Xaa locations
  Clone ID: PAT_MRT3847_17198C.1.pep
FASGCSDCNIAGAMLQVDTYHTNPENAVRSIFVAPFRGGRPIRVVTFANTIVQIEPDMNSRIQLLSTTTNGDFVQGKNLAMVKVNVACAAGGLTSSYTSTPLLEYVLQKDRGRIVEYFGRMSHVAHNVHQAQEKDLLEGNFSFDIKFRSTLEKVSSTKAQFVCGKTSKYDIIGAGSHFSHDFPXKVDQEKPKKIDARLRQRIDPQFIEVXAQMETNLFKLSLDDVETPKGSMMDLKISQSKIALPKNTVWGTILRSDLLANLLTEGNIRASVDLQRTHRFKGMINMVATVGIPENTGLALACAMNSFFRGRAPTDIFTICXNTXELCNPACSXPMSMSFNPNPRSDAWSXEILKRPGFHCDTICLTGWTATP

SEQ ID NO: 193989 - protein, 51 aa, Glycine max
  Clone ID: PAT_MRT3847_17199C.1.pep
RFFACDLKGEPQAQGVVTNVRAQIARIGHLMNIGTQAPYGCTSSAGKPERI

SEQ ID NO: 193990 - protein, 156 aa, Glycine max
  Clone ID: PAT_MRT3847_1719C.1.pep
QDTESTRVDLGTSNLSGHLVPELGKLEHLQYLELYKTNIQGTIPPELGSLKSLVSLDLYNNNISGTIPPSLGKLKNLVFLRLNDNRLILRLNRGPIPKELSAVSSLKVVDVSNNDLCGTIPTSGPFEHIPLNNFENNPRLEGPELLGLVSYDTNCS

SEQ ID NO: 193991 - protein, 159 aa, Glycine max
  unsure (1)..(159): unsure at all Xaa locations
  Clone ID: PAT_MRT3847_171C.1.pep
RLREDDRRGCLPISRHFSANPRRRRPTNTRKLQTLACQTNPNLDQKDTPTTDEEKLVVEPSTSTTTSSLPQLPTKNINNKIALVSTLAALGLFLSARLDFGVSLKDLSANAMPYEEALSNGKPTVVEFYADWCEXDRVNXVMLNVDNTXWEQELDEFGV

SEQ ID NO: 193992 - protein, 427 aa, Glycine max
  unsure (1)..(427): unsure at all Xaa locations
  Clone ID: PAT_MRT3847_17200C.1.pep
FIIDSSVSPDCNIVGAMLLVDTYHTNPENAARIMFVALFRIGRPILVVTFPNTIVQIEPHMNSRFQLLSTTTNGDFGKEKISQWSKVNVACAAVGLTSSYTPTSLLQSGLHNDRGLIVECFVRMSYVAHNVNQPQEKDLLXGNLSFDINISLXKLEKSLPLTKATNLLSGKNPSKYDYKFGCLGSTFLSRRFFLEKEDQEXPKIDARLRPKINPXYNEVQASMETNLFKLSLDDVETPKGSMLDLKISQSKIALPKNTVGGTILRSDLLANFLTEGNFRASVDLQRTHRIRGMIKMVATVGIPENTGISLACAMNSSFRGRASSDIYTICSQDCELWNPACTKAMTMSFKSNPXSDAWSLEFLKRPGFYCDIXCVTGWTGPPMPGVQXTIDWLFPFKNASPDPLVLNPQIFCVNSGGKMFSPGPSQV

SEQ ID NO: 193993 - protein, 319 aa, Glycine max
  Clone ID: PAT_MRT3847_17201C.1.pep
DLIRKEYDMKCKFLRNLESKGEKTSRIDKMRAVVKDLHSRIRIAILRIDSISKRIEELRDKELTPQLEELIDGLSRMWEVMFECHKLQFQTMSTVYNNSHAGIAATHSELRRQITSYLESELHYLSSSFIKWIGAQKFYLEAINGWLHKCVSLKQKPGKKKRPQRPLLRMYGPPIYATCEIWLEKLGELPVQDVVDSMKSLAGEIAQFLPRQEKNQGKGANHSHLTTWSANNIRSESSDNLLRDGTLEDWDSGFDQFRASFLGFLAQLNNFAGSSIMMYTDLRQAIQIAKKNYHHRSNSQAQDGQWNSLSQDDNSMSQS

SEQ ID NO: 193994 - protein, 70 aa, Glycine max
  Clone ID: PAT_MRT3847_17202C.1.pep
ERLRRQAFKRQKQRFHEQALVPELKLSFEQVSREVMVVERIGTSSFFPRGRSVDLSTRKPLLLYSPQLSF

SEQ ID NO: 193995 - protein, 70 aa, Glycine max
  Clone ID: PAT_MRT3847_17203C.1.pep
DMRRPPIDRSGSTRCSRIPCQVHLTRLSVGSSLVRVNPRIPISSCWSLASPHTVYHVHMTLVRQHHQQLQ

SEQ ID NO: 193996 - protein, 66 aa, Glycine max
  Clone ID: PAT_MRT3847_17204C.1.pep
RQRNPKPPSVKTSFSGCEPPEQKASTSICQGSRAAALTASLALPSWETISSAGQLGSKRTMAVYSP

SEQ ID NO: 193997 - protein, 55 aa, Glycine max
  Clone ID: PAT_MRT3847_17205C.1.pep
LSWAPFGFVVAISFIAAGVNVCMIVSMLRDDTFTSHPCVSFSLCSRVLWGGLYLL

SEQ ID NO: 193998 - protein, 105 aa, Glycine max
  Clone ID: PAT_MRT3847_17206C.1.pep
GSGEKFFLGGAFSGAPLNPGGTFGPSLVSGPWPPPWFYWAGPPPGGGMAGVIYEVVFFSPPPGQVPRVVFLGGKMDFLKKKLGFFEFSRNLFRGRVSPPWGFFSR

SEQ ID NO: 193999 - protein, 99 aa, Glycine max
  unsure (1)..(99): unsure at all Xaa locations
  Clone ID: PAT_MRT3847_17207C.1.pep
HLXXSRXTHXXXPRXLMXSHISXXXRSIXIVLTSXSRTPWXXDXSXTXTXSXXXIIGXXXISXXPVLXKXXRPFPSXLPXXNVFSIIXSXXXRPIPXLX

SEQ ID NO: 194000 - protein, 175 aa, Glycine max
  unsure (1)..(175): unsure at all Xaa locations
  Clone ID: PAT_MRT3847_17208C.1.pep
FGTSSLDDIFIPKVFRDISSGLNELKRQLSQLDSDGSXRLHHKXRSPFESELVHLDDPAESYVRDLLVASGLYFGSWNKSLLRGDTFAKPIGNSVFEEVEESHNNLIKEDERSTKDQNKNKLEHKVLLDLLNEALSIVLRSHLTLSKFRRKLXNSSMAPSPCGKELLKLVWDIVN

SEQ ID NO: 194001 - protein, 286 aa, Glycine max
  unsure (1)..(286): unsure at all Xaa locations
  Clone ID: PAT_MRT3847_17209C.1.pep
PGPDSPFDSPLPVCLGIDPHCNAVLDLMETNVFKLTLEDVQTPKGSMWDLKICXSKIALSKNTVGGTILRSDLLANFLTEGIFRASVDLQRTHRIKGMIKMVATVGIPENTGIALACAMNSSYRGRASSDIYTICSQDCELWNPACTKAMTMSFNPNPCSDAWSLEFLKRTGFHCDIICVTGWTATPMHDVQVTIDWFISSQECVPRTYCVLNPQNPFVLNRWMGKLTFPQGTSRSVKRMPLSIXGGGAGAKNAILMNMPNAVLXSMWRYFVGDLVFEVXKMTSPT

SEQ ID NO: 194002 - protein, 71 aa, Glycine max
  Clone ID: PAT_MRT3847_1720C.1.pep
MQQVKSGDTVKVHYHGRLTDGTTFDSSAGREPLQFEVGSGMVIPGFDNGVMGMIVGDKRTINIPVAEAYGP

SEQ ID NO: 194003 - protein, 191 aa, Glycine max
  unsure (1)..(191): unsure at all Xaa locations
  Clone ID: PAT_MRT3847_17210C.1.pep
DSIRQQWRTPLXFDSSKQSVRQFSIDLLGGGISLDKTGDWITLIQNSPISNLLRVAAWKKGCLMVKIVMSGNAAIKRSDWASLVQVFLTNSNSTEHFDACKWTKSEPHSWELIFPIEVCGANNGFEMWSSEWANPTSWHLSFRTGNPQQFTVFDILLGISQDFGIAGNTLKPAFSVPQATARSSENAESYA

SEQ ID NO: 194004 - protein, 75 aa, Glycine max
  unsure (1)..(75): unsure at all Xaa locations
  Clone ID: PAT_MRT3847_17211C.1.pep
PSRDHYPHPVISKSSCCTWPPGLILSDRHPMAAKXHQCSVQTPFGGYYKCTCERGLTCDGDKHIYGSINKTNFGV

SEQ ID NO: 194005 - protein, 209 aa, Glycine max
  unsure (1)..(209): unsure at all Xaa locations
  Clone ID: PAT_MRT3847_17212C.1.pep
VSVGIPENTGLSLAWALNCSLXGRARSDIHTICCQEXKSWNAACTRAMSMSFNPNPCSDAWSLEILKRTGFHCDIICVTGWTATPMQDVQVTIDWFISSQECVPRTYCVLNPQNPFVLNRWMGKLTFPQGTTRSVKRMPLSIGGGAGAKNAILMNMPNGCLLIXRNFVGDLVFEVSKMTYAYMKCTVSIXITFENLADDTIYSEAFPTS

SEQ ID NO: 194006 - protein, 135 aa, Glycine max
  unsure (1)..(135): unsure at all Xaa locations
  Clone ID: PAT_MRT3847_17213C.1.pep
SNLQLCPLKFLHREGCFMVKTVMSGNAALKRSDWAXLVHAFLTNSSSTEHFDACKWTKSEPHSWELIFPIEVCGPNNGSEMCSSEWANQTTWHLSFLIDNPKQSTVFDILLRMSQDFAIAGNTLMPAFSVHRLLP

SEQ ID NO: 194007 - protein, 137 aa, Glycine max
  Clone ID: PAT_MRT3847_17214C.1.pep
GDKTHRVLEFNQSKMGINPTKCVTIAIGLLCLCCVADSVPNTSIINVLCNNGVYTSGELEEETPAQRNYDYHNISPYPNAYAYGHATCNLNLTSPDCKTCLGAAQTAFFSTCQTPRIGARSVLYDCTIKYEQYPFDD

SEQ ID NO: 194008 - protein, 367 aa, Glycine max
  unsure (1)..(367): unsure at all Xaa locations
  Clone ID: PAT_MRT3847_17215C.1.pep
LFLPHYIRWHVSTLVIYILPSLLTGEIKYKRNLSNIHISGLFHDGRYKFWTKHEKNLALTEEEKTEVIRNRGIPADVLAKRAHELEKHVAHESLKDQIPAVDKXNSTKVNKFAKIMNLRQSVDGDLKLLTDGKLYEGKHIPVSNISAGENHVAQIPLMAHEEILPSSAWDFRTAMVSKNSTPQTTAMHVGAIEIIIDSFASPDCIIHGAMLLVDTHDTSTERAVRSIIVAPFIGLGGIRVDTFPNTIEQIEPDMNSKVXLLSTTTNGDLVQGKDLAMVKVNVACAAVGLTSSYTPTPLLESGSQKDRRLIVEYLGGWSTVVITVNQPQKKDWWKGNFSLVLNLRSRWEKVSFTKAHLVGGKPFKYDI

SEQ ID NO: 194009 - protein, 178 aa, Glycine max
  unsure (1)..(178): unsure at all Xaa locations
  Clone ID: PAT_MRT3847_17216C.1.pep
MFASLIFSGDNRLTEKTIFTCRDLDILVVYYTIATQFRKFLPHYIRWHLYTLMIYILPSFLTAEIKYKRNLSNIHISGLFYYGRYKFWTKHEKKFALTEEEKMEVIRNKGIPADVSSKXAHEFEKHVAHESLKDQIPVGDKLNSTKVNKFGKILNLRQRDVGDLKLLTDGXLYEGSYF

SEQ ID NO: 194010 - protein, 299 aa, Glycine max
  unsure (1)..(299): unsure at all Xaa locations
  Clone ID: PAT_MRT3847_17217C.1.pep
GTNLFPSELDHXQTPKGSMLDLRISHSNIALSKNTLGGTILRRDXLATCQTFFNLRASVDMQRTHRIRGMINMVATAGIPENTGIAXACAMNSSFRGLAISDIYTICSQDCELWNPACTKAMTMSFNPNPCSDAWSLEYLKRTGFHGDIICVTGWTATPMQDVQVTIDWFISSQECVPRTYCVLXNPQNPFVLNKWMGKLTFLHGTFLSVKRMPISIGGGAGAKNAILMNMPNAVLSMWRYFVGDLVFEVFKMTSCYIKCTVSLFIAXGNLADDTINIEAYPHKLMQLVXIQENVVLKF

SEQ ID NO: 194011 - protein, 227 aa, Glycine max
  unsure (1)..(227): unsure at all Xaa locations
  Clone ID: PAT_MRT3847_17218C.1.pep
CNAEIKYKRNLSNIHISGLFYDGRYKFWTKHEKNLALTEEEKMEVIRNRGIPADVLAKRAHEFEKHVAHESLKDQIPAADKLYSTKVNKFAKIMNLRQSVVGDLKLLTDGKLYEGKHIPVSNISAGENHVVQIPLMAQEEILSFSASDFRTAMVSKNSKPQATXMHVGAIEIIIDSFASPDCNIVGAMLMVDTYHTNPENAVRSIFVAPFKGGRPIRVVTFPIPSAD

SEQ ID NO: 194012 - protein, 390 aa, Glycine max
  unsure (1)..(390): unsure at all Xaa locations
  Clone ID: PAT_MRT3847_17219C.1.pep
WYPPVPLRRSRRALFRPITRPKGCCTKAQFAGGKTFKYALIGAGSHSSEDSPDYGXDQETPKTIDALSRQRIEPQYNEVQAQMETNLFKLSVDDVETSKGSMLDLKISQSKNALAKNTVGGTILRSDLLANILTEGNFRASVDLQRTHLMEGMIKMGATVGIPENTGILLACAMNSSFRGRASSDIYTICSQDCELWNPACTKAMTMSFNPNPCSDAWXSLEFLKRTGFHCDIICVTGWTATPMQDVQVTIDWSISSKECVPRTYCVLNTQNPFVFNRXMGKWTFPQGTSRTVKIMPLSIRGGAGATNAILMNMPNAVLXMWTYXAGDIVFEGTKMTPPXIKCTDSVLIALXNSADDTIDCEAFPHKLVQLVEIHEKVVXNFHQEESLTA

SEQ ID NO: 194013 - protein, 225 aa, Glycine max
  Clone ID: PAT_MRT3847_1721C.1.pep
ADEIPCISAVVVEFGSRPKPRIDYTLKAVGGSLTALPGISDMIDDMVNSIVTDTLQWPHRIVVPLGGIPVDTSELELKPQGTLRVTVIKANDLKNMEMIGKSDPYAVLYIRPLFKVKTKVIDNNLNPVWNEVFDLIAEDKETQSLIVEVFDKDIGQDKRLGIVKLPLNDLEPETEKEFELRLLSSLDTLKVKDKKDRGTITIKIFYHQFNKEEQLVALEAEKNIL

SEQ ID NO: 194014 - protein, 94 aa, Glycine max
  Clone ID: PAT_MRT3847_17220C.1.pep
MAFQRASATMIAVWIVVLMVLSKGLSSSGVVSDNSTIPAFVNIGVLYSFNTSVGRMVKTAVQAAVDDVNFEQSILASTKLKASLQEDNQYQRFF

SEQ ID NO: 194015 - protein, 197 aa, Glycine max
  unsure (1)..(197): unsure at all Xaa locations
  Clone ID: PAT_MRT3847_17221C.1.pep
CGRNFHISGLFYDGRYKFWTKHEKNLALTEEEKMEEIRHKGIPADVLAKRAHEFEKHVAHESLKDQIPAVDKLYSTKVNKFAKIMNLRQSVVGDLKLLTDGKLYEEXHIPVSNISAGENHVFQIPLMAQEEILAFSASYFITCMVSKNSKPQATAMHVGAIKIIIDSFEGXDCNIFGPLLFGDTYHTIPEMPFLFFC

SEQ ID NO: 194016 - protein, 74 aa, Glycine max
  Clone ID: PAT_MRT3847_17222C.1.pep
TSGAFISLIKVLYYSHAVISPCNLLLFFCFNGRNINALFFPIMVVFEMRFTTLCLMFLFWVTWPGISLTCQIRS

SEQ ID NO: 194017 - protein, 56 aa, Glycine max
  Clone ID: PAT_MRT3847_17223C.1.pep
NFLSLKIKKNRETSFSFAGNGTLLPLRIKMVFLTFGFHATLAKEIPAKRITTTRGF

SEQ ID NO: 194018 - protein, 63 aa, Glycine max
  Clone ID: PAT_MRT3847_17224C.1.pep
VPGMAGCDPRVPPTRAVRVDDDRRGSRIFMPSQVSTSHATPQMDSGCVAMGLSLSCVTSNNKP

SEQ ID NO: 194019 - protein, 60 aa, Glycine max
  Clone ID: PAT_MRT3847_17225C.1.pep
ASPAFHAVLGWGKGWRSNPTSGPEVEITLHALDFTKGPLWELRTMLPWNLSTPCAPHTDV

SEQ ID NO: 194020 - protein, 69 aa, Glycine max
  Clone ID: PAT_MRT3847_17226C.1.pep
HSCKNNVLMDGIVSRIAPKYKAKHRNTRTYEVPTRKAAAHIEHTPIQAMDLSWPKILTMDQTTDNHLFS

SEQ ID NO: 194021 - protein, 112 aa, Glycine max
  Clone ID: PAT_MRT3847_17227C.1.pep
MDRENGDGDIEGGGGADDGGFRSPIGRKYHPVLANDRAVLEMSSMDQGPSSSSSAFPDQHPNIRKVNTSVNGSSDAKEENPSHENQPNGSLQQESKLELFGFDSLVNILGLK

SEQ ID NO: 194022 - protein, 265 aa, Glycine max
  unsure (1)..(265): unsure at all Xaa locations
  Clone ID: PAT_MRT3847_17228C.1.pep
TRPDIGNDNIKNPKERLVRQKQNLRRRLGLDVCEQFVDISDVIRDEDLMASKSDSHLNGIDRRLFTSCSAHNIQKMVSNMVPSVKSKWPSARELNLLKRKAKINSKDQTKSWXEDGSTEASGAQNLTSKGTCPDSVNYSKAFVGVNHDEDGLEHDGDGQWPFHTFVEQLIIDMFDPVWEVRHGSVMALREILAHQGASAGVFKPDSRMGGTLFIELEDKVTKYFEEREGXIGLNMQVSTDEFVSNLKXPKLEDVSSSTSMDSDDL

SEQ ID NO: 194023 - protein, 197 aa, Glycine max
  Clone ID: PAT_MRT3847_17229C.1.pep
KRGRKPANGREEPLNHVEAERQRREKLNQRFYALRAVVPNVSKMDKASLLGDAISYITELKSKLQTLESDKDVLHKQLEGVKKELEKTTDNVSSNHACNNNNNNKLSSNQPALIDLVEMDVKIIGWDAMITITCSKKNHPAATLMTALMELDLDVHYATVTLVNDLMIQQATVKMGSRFYTQEQLRAALSAKVGDVR

SEQ ID NO: 194024 - protein, 223 aa, Glycine max
  Clone ID: PAT_MRT3847_1722C.1.pep
SSDQRWQQQPPLLCGSSSQSPLTLTLAHLAASNSEGDALYTLKRSLSDPDNVLQSWDPTLVSPCTWFHVTCNQDNRVTRVDLGNSNLSGHLVPELGKLEHLQYLELYKNNIQGTIPPELGNLKSLVSLDLYNNNISGTIPPSLGKLKNLVFLRLNDNRLTGPIPKELSAVSSLKVVDVSNNDLCGTIPTSGPFEHIPLNNFENNPRLEGPELLGLVSYDTNCS

SEQ ID NO: 194025 - protein, 263 aa, Glycine max
  unsure (1)..(263): unsure at all Xaa locations
  Clone ID: PAT_MRT3847_17230C.1.pep
MDSPRYHQEHHHHRGGVSLVPSPRHSLSSSNSSSTSSTSSNNNGLHHTQLLSPLTPTAAAAQSPTSSYPPKPVTRSESANPYPTTFVQADTTSFKQVVQMLTGSTQTAKQASASASEPAKPHTHIPPIKKQTGFKLFERRNSLSKNLSINPLNNVVVSSFSPRKHHEVLSPSILDFPALVLSPVTPLIPDPFNRSRSLNENGAGMVMDTAEATEEKAIKEKGFFLHPSPASTPRDEKPRLLPXLFPTTTAAAASPGSGSSSSS

SEQ ID NO: 194026 - protein, 141 aa, Glycine max
  Clone ID: PAT_MRT3847_17231C.1.pep
AHVVRGGEPESAGGIHQSPPSSSSWSSSSLVADQAPSSEVIPVSSPVDNSNTVGDVDSSDGAEGNADCSKKPAWNKPSNGVVVVETGPVMGAAESWPTLLASTKGSAKLPAESSSKTVTDDGSLSTSQWPMTSQSSHKQAT

SEQ ID NO: 194027 - protein, 118 aa, Glycine max
  unsure (1)..(118): unsure at all Xaa locations
  Clone ID: PAT_MRT3847_17232C.1.pep
MGMQLVFIGTIALCLVVSSAMLEQFEQAPKQDGSLSFLVIGDWGRKGAYNQSXVAFQMGVIGEQLDIDFVISTGDNFYYSGLXGIDDPAFDDSFTKIYTASSLQKQWYSVLGNHDYRG

SEQ ID NO: 194028 - protein, 65 aa, Glycine max
  unsure (1)..(65): unsure at all Xaa locations
  Clone ID: PAT_MRT3847_17233C.1.pep
MMRARFPLLLLGVVFLASVSVSFGIAYWAKQNPSQNKCVRSCXSEKDSYRKQAWHARXCNSLKVE

SEQ ID NO: 194029 - protein, 61 aa, Glycine max
  Clone ID: PAT_MRT3847_17234C.1.pep
EKKKTKKKKKKKKKKKKKKKNKKKKKHKKQKKKKKKKGRPPNRFKPYLPLHATSHPFNTVT

SEQ ID NO: 194030 - protein, 119 aa, Glycine max
  unsure (1)..(119): unsure at all Xaa locations
  Clone ID: PAT_MRT3847_17235C.1.pep
RFLASFDAGALMVAWSCPGVRYYGHPLLMKTCYGERSALVLLSSYXLDVEAHCIRGFKSLPXXCLESSKDYFSGAHSXSDSITGDLPAFFYXSGRQVHQNDISIICLYDSVLCNIRYYE

SEQ ID NO: 194031 - protein, 100 aa, Glycine max
  Clone ID: PAT_MRT3847_17236C.1.pep
ASHLLVFGPHVVLVSSYTTLIKPFILLCILYGEILIAEGAVGEPSKDVEEGPNGIHYDFSGCNDVQGSLLSAMKFQLNHDPALCGTGKGTGKGGYGGGGS

SEQ ID NO: 194032 - protein, 96 aa, Glycine max
  unsure (1)..(96): unsure at all Xaa locations
  Clone ID: PAT_MRT3847_17237C.1.pep
MPEAYPHLILNNFSTKLGDRXANIMKHLFPVPKLDTKRIVVFSNQSDYISLRHHIYEKNGSPKSIELKEIGPRFELRLYQVCITIKLTIDCLLLVM

SEQ ID NO: 194033 - protein, 53 aa, Glycine max
  unsure (1)..(53): unsure at all Xaa locations
  Clone ID: PAT_MRT3847_17238C.1.pep
STTSLITVXDXLLHTDPVTPSPGPXLQXSARVETDALLGDSDGLTNPGSIEED

SEQ ID NO: 194034 - protein, 297 aa, Glycine max
  unsure (1)..(297): unsure at all Xaa locations
  Clone ID: PAT_MRT3847_17239C.1.pep
PEKEDQEKPKKTEARXRQRIEPQYXEGQAQKETNXTKPPLDDVETPKGSMLDLKISQSKIALPKNTVGGTILRSDLLANFLTEGNFRASVDLQRTHRIKGMIKMVATAGIPENTGIALACAMNSSFRGRASSDIYTICSQDXELWNPACTKAMTMSFNPNPCSXDAWSLEFLKRTGFHCDIICATGWTATPMQDVQVTIDWFISSQECVPRTYCVLNPQNPSVLNWXMGKLAFPQGTSPSVKXCLFLLGGGAWCKECFLMISPMLFFMGKILWKLVLKFLKTFLIKCQLFFITFEFG

SEQ ID NO: 194035 - protein, 123 aa, Glycine max
  Clone ID: PAT_MRT3847_1723C.1.pep
GKDRRMEGSSASSHEEERTATFYVYHPCYFLQQAFRALLRCLGIESEATMCSKAEEEKSSLSQITAADDLITNSPSCNISHKNSQDAADPPSTTNQTIIIASSMARRGNRGSRISHGSGPQHN

SEQ ID NO: 194036 - protein, 323 aa, Glycine max
  unsure (1)..(323): unsure at all Xaa locations
  Clone ID: PAT_MRT3847_17240C.1.pep
LCARGHLQRTHSFKGLIPLVATAGIPENTGLSLACAMNRSSRGRASSDIYTICSQDCELWNPACTKAMTMSFNPNPCSDAWSLEFLKRTGFHCDIICVTGWTATPMQDVQVTIDWFISSQECVPRTYCVLNPQNPFVLNRWMGXLTFPQGTXSRSAKRMPLFIRGGAGAKNAILMNMPNAVLSMWRYFAGDLIVKXGLLKTSTYRNRGTSHGDSFGKNADDTINFEXAYAHTLVQFGEIHEKVVLKFLQEEFLTAWSTXVRPATTLLADGCPYLYXAMVHDSSVSTIPGDFXVIGVKLXTINNMCAYGLNPGISGSRILGTNS

SEQ ID NO: 194037 - protein, 210 aa, Glycine max
  unsure (1)..(210): unsure at all Xaa locations
  Clone ID: PAT_MRT3847_17241C.1.pep
SLDEVESLKGLMWELXISKSKCALPKNTVGGTILRSDLLANFLTEGNFRASVDLQRTHRIKGMIKMVATVGIPENTGISLACAMNSSFRGRASSDIYTICSQDCELWNPACTKAMTMSFNPNPCSDAWSLEFLKRTGFHCDIICVTGWTATPMQDVQVTIDWFISSQEXCVPRTYCVLNPQNPSVFNRXVWELNFPQGTSRSVKECLFYR

SEQ ID NO: 194038 - protein, 348 aa, Glycine max
  unsure (1)..(348): unsure at all Xaa locations
  Clone ID: PAT_MRT3847_17242C.1.pep
MRQFSELGMISINQKHCSNYVAVRTCETINDNFYSSHMHCSSLRLAIFTHHCSSENAVRSIFVAPFHXAVRSHSGWLHLPNTIVQIEPDMNSGFXLLSTTTNGDCVQGKDFVMVKVNVACAAVGLTSTYTPTSLMESGLQKDRGLIVEYFGRMSYVAHNVNQPQEKDLMEGNFSFDIKSRSRXEKVSSTKAQFVSGKTFKYDIIGAGSHSSEDFPEKEDQEKPKKNDARLRHRIDPQYNEGQAYMETNLFKXSLDDCETSKGSMXLDLKFLNSKIVLSKNTICGTIVAXELLANFSTEGNFRACVDLQSTYRIKGMIKMVATVGIPENPGISLCCAMNRSFKGRGRSD

SEQ ID NO: 194039 - protein, 341 aa, Glycine max
  unsure (1)..(341): unsure at all Xaa locations
  Clone ID: PAT_MRT3847_17243C.1.pep
FSFGATRFTETTIFNCRDLDILVVYYTIATQFRKFLPHYIRWHLYTLLIYILPSFLTAEIKYKRNQSNIQISGLFYDGRYKFWTKHEKNLALTEEEKMEVIRNRGIPADVLAKRAHEFEKHVAHESLTDQIPAVDKLYSTKVNKFAKIMNLTQRAAGDLKLPTDGKLDEGKHMPVSNISAGENYVDQIPLMAQEEILFSSASDFRTAMVSKNSKPQATAMHVGAIEIIIDSFARPDCNILGAMLLVDTYHTNPENAVRSIFVAPFRGGWPIRVXTFPNTIVQIEPDMNSRFQFLSSTTNXGDFVQGKDLTMVKVNEPCAAVGLALISTSTSIVGIWFEKDR

SEQ ID NO: 194040 - protein, 246 aa, Glycine max
  unsure (1)..(246): unsure at all Xaa locations
  Clone ID: PAT_MRT3847_17244C.1.pep
VLNAHNRLTEKTIVTGRDLDILVVYYTIAPQFIKFLPHYIRWHLYTLLIYILPSFLTAEIKYKRNLSNIHISGLFYDGRYKFWTKHEKNLALTEEEKMEVIRNRGIPADVLAKRAHEFEKHVAHESLKDQIPADDKLYSTKVNKFAKIMNLRQSVVGDLXKLLTDGKMYEGKHIPVSNISAGENHVVQIPLMAQEEILSSSASDFRTAMVSKNSKPXLLQCNVGALETIIDSLPSPDCNIYGQSFG

SEQ ID NO: 194041 - protein, 377 aa, Glycine max
  unsure (1)..(377): unsure at all Xaa locations
  Clone ID: PAT_MRT3847_17245C.1.pep
GIVLACAMNSSFRGRARSDIYTICSQDCELWNPACTKARTMSYNPNPRADAWXLXFMKRTGFHXIYIRVTGWTATPMQDDHXTIDWYIYSQECVPRTYCDENPQNTCVINRRMGKLTFPQGTYRSVKRMPLSIGGGAGAKNAILMNMPNAVLSMWRYFVGDLVFEVSKMTSPYIKCTVSFFIAFGNLADDTINFEAFPHKXLVHIGEIQEKVVLKFSQEEFLTAWSTQVXRPATTLSADGCPYLYAMAHDSSVSTIPGDFVIGVKLTTINNMCAYGLNPGISGSRLLGTIPQSISQQTVWNQMATVRTPLNFDSSKQSFXQFSIDLLGGGILADITGDRITLIQNSAISNLLRVAAWKKGCLMVKTVMSRNACRQNE

SEQ ID NO: 194042 - protein, 233 aa, Glycine max
  unsure (1)..(233): unsure at all Xaa locations
  Clone ID: PAT_MRT3847_17246C.1.pep
SALPFKVVLFEKHLGVGANVCFVIFSGDNRFTETTXFNCRDLDILGVDYTIATQFRKFVPHYIRWHLSTWLIYILPYVLTAEIKYKRYQSNIQISGXFYDGRYKFWTKHEKNLALTEEEKMEVIRNRGIPADVLAERAHEFEIHVAHDSLKDQIPAVDKLYSTKVNKFAKIMNLRQSVVGDLKLLTDGKXLYEGKHIPVSNISAGEKYVVQIPLMAQEEILVSNARDFKLHGE

SEQ ID NO: 194043 - protein, 179 aa, Glycine max
  unsure (1)..(179): unsure at all Xaa locations
  Clone ID: PAT_MRT3847_17247C.1.pep
MFASLIFSGDNRLTEKTIFTCRDLDILVVYYTIATQFRKFLPHYIRWHLYTLLIYILPSFLTAEIKYKRNLSNIHISGLFYDGRYKFWTKHEKNLALTEEEKMEVIRNKGIPADVLAKRAYEFEKHVAHESLKDQIPVVDKLYSTKVNXLEKILNPRQXSLLGILNLLPDGKLFEGKLF

SEQ ID NO: 194044 - protein, 37 aa, Glycine max
  Clone ID: PAT_MRT3847_17248C.1.pep
GIADPFHQNHGCNHVQDPGQCRDQQKTLSYVPECLNA

SEQ ID NO: 194045 - protein, 307 aa, Glycine max
  unsure (1)..(307): unsure at all Xaa locations
  Clone ID: PAT_MRT3847_17249C.1.pep
EFQHHQGSMLDLKISQSKIALPKNAXGSSNCVTGGSYSGWGNLQSPHGTFGRINMVAREGIIAITGIALAXAMNSSFRGRASSDIYTICSQDCELWNPACTKAMTMSFNPNPCSDAWSLEFLKRTGFHCDIICVTGWTATPMQDVQVTIDWFISSQECVPRTYCVLNPQNPFVLNRWMGKLTFPQGTSRSVKRMPLSIGGGAGAKNAILMNMPNAVLSMWRYFVGDLVFEVSKMTSSYIKCTVSFFIAFGNLAVDTINSXGFPHKLVPFAEIQVIVVLKFXQEDILTSWSTMCDLHNLLADVGLFVC

SEQ ID NO: 194046 - protein, 78 aa, Glycine max
  unsure (1)..(78): unsure at all Xaa locations
  Clone ID: PAT_MRT3847_1724C.1.pep
MGGGMEAXKNKFIEDWSTARENLEXNWRWTQRYLALVGMFGIAIPFLVYKGISREFVCRHVSITKLGLYLLNESLYGL

SEQ ID NO: 194047 - protein, 92 aa, Glycine max
  Clone ID: PAT_MRT3847_17250C.1.pep
CSNRTCGIKRLLLVEKGCMGCLECPLKLINLIVTITGLAIVGYGIYISVEFSKASDDDNMPVVSPASDDSYLSQLRPPVLIAKSLSNDFYDH

SEQ ID NO: 194048 - protein, 148 aa, Glycine max
  unsure (1)..(148): unsure at all Xaa locations
  Clone ID: PAT_MRT3847_17251C.1.pep
AFNKNGANCGPKAVWSKPGAFFFEGGTLNNSGKPPPPNFNGAGGAKKVFGGGAETPKKIKGPDLETKLLPGGPFAPRGPTKDPAPAALLKGKEIKNGGPPKFPKLGFPPPPYVPGKGPFXNLPNPLGAPFGKNPPPVNAGPLKRAPPL

SEQ ID NO: 194049 - protein, 43 aa, Glycine max
  unsure (1)..(43): unsure at all Xaa locations
  Clone ID: PAT_MRT3847_17252C.1.pep
KTKRXFQWATSGGLNPCXRXSNQPWLQXLXSNLSHHQXXRTXT

SEQ ID NO: 194050 - protein, 249 aa, Glycine max
  Clone ID: PAT_MRT3847_17253C.1.pep
MARYDRAITVFSPDGHLFQVEYALEAVRKGNAAVGVRGTDNVVLGVEKKSTAKLQDSRSVRKIVNLDDHIALACAGLKADARVLINRARVECQSHRLTVEDPVTVEYITRYIAGLQQKYTQSGGVRPFGLSTLIVGFDPYTHSPSLYQTDPSGTFSAWKANATGRNSNSIREFLEKNYKDTSGQETVKLAIRALLEVVESGGKNIEVAVMTKEQGLRQLEEAEIDAIVAEIEAEKAAAEAAKKAPPKET

SEQ ID NO: 194051 - protein, 81 aa, Glycine max
  unsure (1)..(81): unsure at all Xaa locations
  Clone ID: PAT_MRT3847_17254C.1.pep
PSQSCKQKQMVSILSKLPTLSCESRQFRKHVQSSCPNYAICWRWVXXCFGSLSCMGHVSCHAYFRVKMFVTFIEDXSCFEX

SEQ ID NO: 194052 - protein, 190 aa, Glycine max
  Clone ID: PAT_MRT3847_17255C.1.pep
SVSNPDTRVDDAEFEENEVYAIDIVASTGDGKPKLLDEKQTTIYKRAVDKSYHLKMKASRFIFSEISQKFPIMPFSARALEEKRARLGLVECVNHELLQPYPVLHEKPGDYVAHIKFTVLLMPNGSDRVTSHSLQELQPTKTIDDPEIKAWLALGTKTKKKGGGKKKKGKKGAEAEPMDATNDATPQEQD

SEQ ID NO: 194053 - protein, 91 aa, Glycine max
  Clone ID: PAT_MRT3847_17256C.1.pep
KNTLQKKGGAVFRVSSFLSPFCELYNFFFGDRKSLPVAVFLKLGVGETLGVSQLYRMRKQPFFFRGVKMKEVPPYPLFKRLLNLKGIWAPP

SEQ ID NO: 194054 - protein, 390 aa, Glycine max
  Clone ID: PAT_MRT3847_17257C.1.pep
MSDDEREEKELDLTSPEVVTKYKSAAEIVNRALQLVISECKPKAKIVDLCEKGDSYIREQTGSMYKNVKRKIERGVAFPTCVSVNNTVCHFSPLASDETVLEDGDIVKIDMACHIDGFIAAVAHTHVLQEGPVTGRAADALAAANTAAEVALRLVRPGRKNKDVTEAIQKIAAAYDCKIVEGVLSHQMKQFVIDGNKVVLSVSNPDTRVDDAEFEENEVYAIDIVASTGDGKPKLLDEKQTTIYKRAVDKSYHLKMKASRFIFSEISQKFPIMPFSARALEEKRARLGLVECVNHELLQPYPVLHEKPGDYVAHIKFTVLLMPNGSDRVTSHSLQELQPTKTIDDPEIKAWLALGTKTKKKGGGKKKKGKKGAEAEPMDATNDATPQEQD

SEQ ID NO: 194055 - protein, 61 aa, Glycine max
  Clone ID: PAT_MRT3847_17258C.1.pep
PVLVSIHTVSLVALRLSTILRGNVAVGRFSCFHPPPPRPAKRSYPPPAPPPNERSDDHTAD

SEQ ID NO: 194056 - protein, 45 aa, Glycine max
  unsure (1)..(45): unsure at all Xaa locations
  Clone ID: PAT_MRT3847_17259C.1.pep
GSLETTKYFCTVIDAPGPXRDFFKKMITGTSQADWAVLIIDSTTG

SEQ ID NO: 194057 - protein, 41 aa, Glycine max
  Clone ID: PAT_MRT3847_1725C.1.pep
VLSTLQEIEILLPNKIKIIQQLEISLTLVLKHQTTEARIQA

SEQ ID NO: 194058 - protein, 46 aa, Glycine max
  Clone ID: PAT_MRT3847_17260C.1.pep
TFSMVLLLLFIFILAFFKFSLENYKVPNEYSPIMWELRCNKLACLI

SEQ ID NO: 194059 - protein, 71 aa, Glycine max
  Clone ID: PAT_MRT3847_17261C.1.pep
AKKKPLSAQFEAKRAKNKANKKRKIARREERLAQGPGKKVSPASSVPVGPASQPAQAPKKSKKWSPYFDIG

SEQ ID NO: 194060 - protein, 99 aa, Glycine max
  Clone ID: PAT_MRT3847_17262C.1.pep
KNTKGQKIDPRPKHRGMKPENLKTSRGIKLTTALNIHHSHWDGPFFFLINGHSHPSSLKQGQKKKRPSCSFAWAFLRNLQRKQNLKGGFSFSPFPSYFF

SEQ ID NO: 194061 - protein, 105 aa, Glycine max
  Clone ID: PAT_MRT3847_17263C.1.pep
GGTGPDSQGGGMGGAPLVGPVLVYLVSLFFLKTWAFEFNKGWGIGPFYGAVLGGCRTFFIGFGANCFLNLGPPFLGDFFSGASRSFGSGECCLSGLFLARLVFFS

SEQ ID NO: 194062 - protein, 146 aa, Glycine max
  unsure (1)..(146): unsure at all Xaa locations
  Clone ID: PAT_MRT3847_17264C.1.pep
MCSSRGEQRPPKRLKTGGVAFGRSDDSITQTSIKAYIADDHTTLLSAFAGAGSDVPYGKLTREATLAPDGXLTDAIRHGRAVLDAVPVGGNICGGHVNPAETIGLALGGHITILTGFLHWIAQLLGYMVAXVLRNHGTGGLPTPIH

SEQ ID NO: 194063 - protein, 192 aa, Glycine max
  Clone ID: PAT_MRT3847_17265C.1.pep
MANCRKQQGEGHHQVGHWRSSYNRKPPLGNKWHSTVPAWERKFCTSIGSVPWRKLVESKKYMHLFEHVVNWDDSAGKEAFDNAKTRYWAEINGVPCNISPPDPNIFIDEVDWNATVDPQLILDVETELAKVPNEELRKNDHEIVMIGGALFLNEQKLPCTGWDDDYAAEGPKPFDPNSAVQGWGENLQDTME

SEQ ID NO: 194064 - protein, 335 aa, Glycine max
  unsure (1)..(335): unsure at all Xaa locations
  Clone ID: PAT_MRT3847_17266C.1.pep
MFASLIFSGDNRFTETTIFNCRDLDILVVYYTIATQFRKFLPHYIRWHLYTLLIYILPSFLTVEIKYKRHQSNIQICGLLYDGRYKLWTKHEKNLALTEEEKMEVIRNRGIPADVLAKRAHEFEKHVAYESLKDQIAARDKXYSTKANKFARIMSLRQSVVGDLKLLTDGKLDDGXHIAVSNIMARENYVGQIPLMGQEEILSSNARDFRTAMESKNSKPQATAVHVGAIEIIIDSFASPDCNIDGAMLLVDTYHTNPENAXSSIFVAPFRGGRPIQVVTFPNTIVQIEPDMNSRFQLLSTTTKGDFVQGKKLPMVKVNATCAAVGLTSRYTPTP

SEQ ID NO: 194065 - protein, 103 aa, Glycine max
  unsure (1)..(103): unsure at all Xaa locations
  Clone ID: PAT_MRT3847_17267C.1.pep
MANWRKQQGESHHQVGQWRSSYNRKPPLGDKWHSTVPAWERKFCTSIGSVPWRKLVESKKYMHLFEHVVNWDDSAXKRHLTCQMRYWAGINGVPCTYXLPDPT

SEQ ID NO: 194066 - protein, 219 aa, Glycine max
  unsure (1)..(219): unsure at all Xaa locations
  Clone ID: PAT_MRT3847_17268C.1.pep
MFASLIFSGDNRLTEKTIFTCRDLDILVVYYTIATQFRKFLPHXYIRWHLYTLLIYILPSFLTAEXFKYKRNLSNIHISGLFYDGRYKFWTKHEKNLALTEEEKMEVIRNKGLPADVLATRAHEFEKXHVAHESLMEQIPAVDKLYSTKVNKFXAKIMNLRQSVDGELKLLTDGKLYEGKRIPVSNISAGEKHVVQIPLMADEEILSYSACDYRTAMES

SEQ ID NO: 194067 - protein, 106 aa, Glycine max
  Clone ID: PAT_MRT3847_17269C.1.pep
MASAVDASGNPIPTSAVLMASSKHIGIRCHSENLEFLKCKKKDQNPENCLDKGRDVTRCVLGLLKDLHQKCTKEMDDYVGCMYYHTNEFDLCRKEQQAFEKKCSLE

SEQ ID NO: 194068 - protein, 246 aa, Glycine max
  Clone ID: PAT_MRT3847_1726C.1.pep
TQMRKERKKLRKNAAKPVVSTSRNFIRAKKDENSFEKNGAFGRGNESEGKLKKRGNFKGMRSGEEVLERGKLRTLDSGGKKKSIYASAGGDKNVKLENGMEVSKKRTLIRNGEKRVKDVPVEGNDGHHTMWDHDKTRNGGFKVKRSTQMRKERKEDVVLAIAKQKGKAEDAGKIGLVGTEDQGSGSVKRSRDKKTELSKGKNQEVLSGSSFAKKKARDRTGLDDDDAEMLHDRPKKKKRVIKNDPH

SEQ ID NO: 194069 - protein, 64 aa, Glycine max
  Clone ID: PAT_MRT3847_17270C.1.pep
KGVLAGESNRRGWKKGSGEVVEKGEKGAYFGERGVRIWVLECAQRIWGEAGCRFGSPLGSGSGA

SEQ ID NO: 194070 - protein, 400 aa, Glycine max
  unsure (1)..(400): unsure at all Xaa locations
  Clone ID: PAT_MRT3847_17271C.1.pep
SSRARSDIYTICSQDXELWNPACTKAMTMSFNPHPCSDAWSVEFLKRTGFHCDIICVTGWTATPMSDVXVTIDWIIFSNECSPRTYCVLNTHKPFALNRRVGKLTLPQGTSRSVNRKPLSIGGGAGAKNAILMNMPNAVLSMWRYFVGDLVFEVSKMTSPYIKCTVSFFIAFGNLADDTINFEAFPHKXLVQFGEIQEKVVLKFSQEEFLTAWSTQVRPATTLLADGCPYLYAMVHDSSVSTIPGDFVIGVKLTTINNMCAYGLNPGISGSRLLGTIPHSISQRTVWNQMASVRTPLNFDSSKQSLCQFSMDLVRGGILLDKTGDWITLIQNSPMTNLLRVAAWKKGCLMVKIVMSVNASFKRSDWASLVHMLLTNSIYSEQFDACEWTXLEPHSLELRF

SEQ ID NO: 194071 - protein, 485 aa, Glycine max
  unsure (1)..(485): unsure at all Xaa locations
  Clone ID: PAT_MRT3847_17272C.1.pep
MSFHNIMDNIVLKMTSLYTLVLLLFLFLSYRPALSFSSRHRQYWGGGGRILSSGEHNGDLVTNLPGQPRVNFQHYAGYVTVNETNGRALFYWFYEAITQPKEKPLVLWLNGGPGCSSVGYGATQEIGPFLVDTDGQDLKFNNFSWNKEANMLFLESPVGVGFSYSNTSSDYDQLGDELTANDAYSFLXQLFQFPSYRGRTFYIAGESYAGKYFPELAELIRDXNKDPSLYIDLKGILLGNPETSDADNLSLACFHNMDNLHWSLVDYAWSHAVISDETHQTVKTSCDFNSTDPWRNKDCSQAVDEVLKQYNEIDIYSLYTSRSSKMMPRMLGGYDPCLDGYAKAFYNKPDVQKALHASDGHNLKKWSICNDKIFNDWADSKPSVIPIYKKLISAGLRIWVYSGDTDGRVPVLSTRYSLSPLALPITKSWRPWYHDNEVSGWFEEYEGLTFATFRGAGHAVPCFKPSNSLAFFSSFLNGESPPSTK

SEQ ID NO: 194072 - protein, 289 aa, Glycine max
  unsure (1)..(289): unsure at all Xaa locations
  Clone ID: PAT_MRT3847_17273C.1.pep
KFLPHYIRWHLYTLLIYILPSFLTAEIKYKRNSSNIQISGLFYDGRYKFWTKHEKNLALTEEEKMEVIRNRGIPADVLAKRAHEFEKHVAHESLKDQIPAVDKLYSTKVNKFAKIMNLRQSVVGDLKLLTDGKLYEGKHIPVSNISAGENHVVQIPLMAQEEILSSSASDFRTAMVSKNSKPQATAMHVGAIEIIIDSFASPDCNIVGAMLLVDTYHTNPENAVRSIFGAPFRGGRTIRVVTFPNTIVQIEPDMNLRFQLWSTTTNGDYVQGXDLAMVKVMSMCCCCLT

SEQ ID NO: 194073 - protein, 231 aa, Glycine max
  unsure (1)..(231): unsure at all Xaa locations
  Clone ID: PAT_MRT3847_17274C.1.pep
MFASLIFSGDNRLTEKTIFTCRDLDILVVYYTIATQFRKFLPHYIRWHLYTLLIYILPSFLTAEIKYKRNLSNIHISGLFYDGRYKFWTKHEKNLALTEEEKMEVIRNRGIPADVLAKRAHEFEKHVAHESLKDQIPAVDKLYSTKVNKFAKIMNLRQSVVGDLKLLTDGKLYEGKHISVSNISARENHVIQIPLMAQXEILSSNAKYFKTSNXVFKNRKPHTTAIHFGTI

SEQ ID NO: 194074 - protein, 69 aa, Glycine max
  Clone ID: PAT_MRT3847_17275C.1.pep
TDTIVPITEVQNLSSRAIHQTCRTLTCSYISINQATCLSCTLTDSTNELSGLWFMTTYNTDPAADCAVP

SEQ ID NO: 194075 - protein, 403 aa, Glycine max
  unsure (1)..(403): unsure at all Xaa locations
  Clone ID: PAT_MRT3847_17276C.1.pep
VHTLRIYILPCFLTAEIKYERNLSHIHISGLFYDGGYKFWTKHETHLALTEEEKMEVIRNRGMPADVLAKRAHEFEQHVAHESLKDQIPAVDKLDSTKANKSAKIMNLRQSVAGDLKLLTEGKLYEEKHIPVSNISAGENHVVQIPLMAQEEILSSSASDFRTAMVSKNSKPQATAMHVGAIEIIIDSFASPDCNIVGAMLLVDTYHTNPENAVRSIFVAPFRGGRPIRVVTFPNTIVQIEPDMNSRFQLLSTTTNGDFVQGKDLAMVKVNVACAAVGLTSSYTPTPLLESGLQKDRGLIVEYFGRMSYVAHNVNQPQEKDLLEGNFSFDIKSRSRLEKVFSTKAQFVSGKTFKYDIIGAGSHSSEDFPEXEDQEKPKKIDAXSRQRIDLXYNEVQAQMEQIC

SEQ ID NO: 194076 - protein, 611 aa, Glycine max
  Clone ID: PAT_MRT3847_17277C.1.pep
MDSNSKAILDYALFQLTPTRTRCELLVFCGGVHQKIASGLFEPFVSHLKFLKDEISKGGYSIKLLPPNHGGFWFTRATFERFVRFVSTPAILERFVSLENEILQIRSSFQANAFSMSVATPDEGSVPQANGITRRLSDSTKLNDVLEGVDNKEENSKVSLHRLLESRIALLRKEQAMAYTRGLVAGFEIDSIDDLIYFANAFGEARLSEACMNFKELWKKKHADDLWIKEVAAMQSSLPPALSLSGSSGIILANDITTHNSSRDSIASGDENVSLETLNSALNKKEDVNLPTADHKLSHTANVNMPMPWPYNVPPYMYNLQNPQMPSYQGYPMTNMQSVPPYLVPNMQWSPDLGVNQKPSETKRDKSHKKRAEEYQDQQTESSDPDSGSESDSDKQNHSSHSSKDDLKRKKHRRKSSGTVVIRNINYITPKRRNGNEDGGSDESLEDDDVIDDETIKQKVGVALESLQKVHKGEKRANGKKAAVRHNVTKSRDATAEDLTENLSDASEGGKKNDNWDAFQNLLKIDEGTGTDGPERMQSIDVQDEHFVLRSSEERMPNGASSSPKFDFKQVLKNPKVPNDSFIVTRRDWRNEGGFKLDEYVDKCGPVTKSR

SEQ ID NO: 194077 - protein, 88 aa, Glycine max
  Clone ID: PAT_MRT3847_17278C.1.pep
LLYPMFGKIINSTFSIRCSKILVKLLESFGSFLGFSFSFLIFSLPFCPNFSIIAHVKGLKHSHLNTFIPPRFFILNTFYFTTGIFYHS

SEQ ID NO: 194078 - protein, 58 aa, Glycine max
  unsure (1)..(58): unsure at all Xaa locations
  Clone ID: PAT_MRT3847_17279C.1.pep
MAKFLQLGILSFNRPQIRKSNLVKPANEIQLYRPPRSGKTFIAXAVSYETLTIFFCIN

SEQ ID NO: 194079 - protein, 46 aa, Glycine max
  Clone ID: PAT_MRT3847_1727C.1.pep
TIKCYRILCTDSKDKKAEECIREFITTQLSKLTFLTLPWIIGPLKY

SEQ ID NO: 194080 - protein, 345 aa, Glycine max
  unsure (1)..(345): unsure at all Xaa locations
  Clone ID: PAT_MRT3847_17280C.1.pep
WLACRYRPGLPGSTDPRVFLTVGIFRACDDWQRTHRIKGMIKMAAIVGVPENTGIALACAMNSXSFRGRASSDIYTICSQDCELWNPACTKAMTMSFNPNPCADAWSLEFLKRTGFHCDIICVTGWTATPMQDVQVTIDWXISSQECVPRTYCVLNPQNPFVLNRWMGKXLTFPQGTSRSVKRMPLSIGGGAGAKNAILMNMPNAVLSMWRYFVGDLVFEVSKMTSPYIKXTVSFFIAFGNLADDTINFEAFPHKLVQFGEIQEKVVLKFSQEEFFTAWSTXVRPATTLLADGCPYLYAMVHDSLVSTKPGDFVLVXVGTHNNMCAIWLNPGISRFVFWDHSHPI

SEQ ID NO: 194081 - protein, 100 aa, Glycine max
  Clone ID: PAT_MRT3847_17281C.1.pep
NLYLVGCFCFYSVWLVDGFLCRCELLVFRGGVHQKIASGLFEPFVSHLKFLKDEISKGGYSIKLLPPNHGGFWFTRATFERSLLLLLELPWPLNGFSSLL

SEQ ID NO: 194082 - protein, 291 aa, Glycine max
  unsure (1)..(291): unsure at all Xaa locations
  Clone ID: PAT_MRT3847_17282C.1.pep
YNASDIKTEKESKNSKPQATAMHVGAIEIIIDSFASPDCNIGGAMLLVDTYHTNPENAVHNIYVAPLTGCRPIRVVTFPNTIVQIEPDMNSRFQLLSTTTNGDFVQGKDLAMVKVNVACAAVGLTSSXYTPTPLLESGLQKDRGLIVEYFGRMSYVAHNVNQPQEKDLLEGNFSFDIKSRSRLEKVSSTKAQFVSGKTFKYDIIGAGSHSSEDFPEKEDQEKPIKIDARLRQRIDPQYNEVQAQMETNLLKLXLDDVETLRVHVDLKFSSKXALPKHIGGTFRSDFCHFLT

SEQ ID NO: 194083 - protein, 116 aa, Glycine max
  Clone ID: PAT_MRT3847_17283C.1.pep
GTDCILVIGYPWYEGQQTESSEPDSGSESDSDKQNHSSHSSKDDLKRKKHRRKSSGTVVIRNINYITPKRRNGNEDGGSDESLEDDDVIDDETIQQKVGVALESLQNVHKGEKRAN

SEQ ID NO: 194084 - protein, 438 aa, Glycine max
  unsure (1)..(438): unsure at all Xaa locations
  Clone ID: PAT_MRT3847_17284C.1.pep
RLDAINQTKEKYGWAGHVCLKVKSRCRWGNVCCTKAQFASGKTFKYDIIXVLGSHSSEDFAEKEDQEKPKKIDARLRQRIDPQYNEVQAQMETNKIKLSLDDVETPKGSMLDLKISQSKIALPKNTVGGTILRSDLLANFLTEGNFRASVDLQRTHRIKGMIKMVATVGIPENTGISLARAMNSSFRGRASSDIYTICSQDCELWNPACTKAMTMSFNPNPCSDAWSLEFLKRTGFHCDIICVTGWTATPMQDVQVTIDWFISSQECVPRTYCVLNPQNPFVLNRWMGKLTFPQGTSRSVKRMPLSIGGGAGAKNAILMNMPNAVLSMWRYFVGDLVFEVSKMTFPYIKCTVSFLHRHLENLGLMIPIKFLRAFFPPQSLGCKVWEEDFRKKLVFWKIFSQRRISFTGLVKLQGCGLQQTLCWGLMGVSHYLYCQMVP

SEQ ID NO: 194085 - protein, 227 aa, Glycine max
  unsure (1)..(227): unsure at all Xaa locations
  Clone ID: PAT_MRT3847_17285C.1.pep
FLNFSFYILCLLQLNDVLEGVDNKEEENSKVSLHRLLESRIALLRKEQAMAYTRGLVAGFEIDSIDDLIYFANAFGAVRLREACINFKELWKKKHADDLWIKEVAAMQSSLPPALSLSGSSGIILANDITTHNSSKDSIASGDENVSLETSNSTLNRKEDVNLPTPDQKPSHMANVHMPMPWPYNVPPYMYNLQNPQMPSYQGYPMTNMXVCSSLPCTKYAMGLLTE

SEQ ID NO: 194086 - protein, 188 aa, Glycine max
  unsure (1)..(188): unsure at all Xaa locations
  Clone ID: PAT_MRT3847_17286C.1.pep
VRTPLNFDSSKXQSFCQFSIDLSWGRDPNGQTGNWIPLIPNFFHLITLVEKCLVGKKGWLMXKMGMAGIATAKRSDWASLVQVFXTNSNSTEHFDACKWTKSEPHSWELIFPIEVCGPNNGFEMWSSEWANQTSWHLSFLIDNPKQSTVFDILLGISQDFEIAGNTLMPAFSVPQATARSSENAESSA

SEQ ID NO: 194087 - protein, 158 aa, Glycine max
  Clone ID: PAT_MRT3847_17287C.1.pep
MLVLGLFVSLQVKGSDVNEDDEIDIVTVEKDPAFSDSDMSEEELCFLPATPSCDAPEQPDKFVNSSSKLVDSNNSGSPLSEEAGPNENPMNHNSSPVEDDAGGTRIKRKWKPSEKVLELQAEKMKKPTKSGKSSKSKSKYLVDEDDGIGFYGDDLSDG

SEQ ID NO: 194088 - protein, 131 aa, Glycine max
  Clone ID: PAT_MRT3847_17288C.1.pep
MKLTFAGIPCHASLFVSPKFNSFAVFIQHYDLEILGFALLIIFAPLFPLPSWCNTKKALTNRLSQHLHHLNGDWYAPCNRAFSAGDAVVTLNLPVIFVSALGPVPFPCLHPLLAPLAGFSRLARLRGLLFG

SEQ ID NO: 194089 - protein, 141 aa, Glycine max
  Clone ID: PAT_MRT3847_17289C.1.pep
RSLSLMMLTRRASLGVRVIFFLMEMKIQHDIRSAAEGSPIDQIGPLCIKDESLERNMWKEILIQPRRRESKGWGEGGEGGVCDAIWRFSWSIGGNRKSFGLGGRSESTILLHSSSRLHFHQPKQEIIEFISDYLCTVPEGQ

SEQ ID NO: 194090 - protein, 50 aa, Glycine max
  Clone ID: PAT_MRT3847_1728C.1.pep
ELGKCHIKRSKDRPLFTSHRVHWSHASSLICKNHTIHTHFVTSNQLRTYP

SEQ ID NO: 194091 - protein, 40 aa, Glycine max
  Clone ID: PAT_MRT3847_17290C.1.pep
PRVRPRVRTMVQTKKGTLRTCIVPEAHDGISDPNMPSHLG

SEQ ID NO: 194092 - protein, 67 aa, Glycine max
  Clone ID: PAT_MRT3847_17291C.1.pep
NFLISDYAKKKKKKKKKKKKKKKKKKKKKKKKKKKKKKKKKKKKKKNPPPQKTPTYLPRPANEKPFL

SEQ ID NO: 194093 - protein, 33 aa, Glycine max
  Clone ID: PAT_MRT3847_17292C.1.pep
FINQNYLLIIYQVLKSLVYKIEEPNISIKNQKD

SEQ ID NO: 194094 - protein, 39 aa, Glycine max
  Clone ID: PAT_MRT3847_17293C.1.pep
IHMKLPRPYSRDMKPYITGTYTVQGYISGSALNKKNASL

SEQ ID NO: 194095 - protein, 550 aa, Glycine max
  unsure (1)..(550): unsure at all Xaa locations
  Clone ID: PAT_MRT3847_17294C.1.pep
LDLFPAADKMGSTYAYKFAKIMNLRQSVVGDLKLLTDGKLYEGKHLPVSNIRAGENHVAQIPLMAHEDIMSSSARDFRTAMGSKNSKPQATAMHVGAIEIIIDRFASADCNIDGAMLLVDTYHTIPENAVRSILVAPFRGGRPIRVDTFPNTIVQIEPDMNSRFQLSSTTTNGEEVLRQTVSQGEVNGACAGAGSPMQDAPATMXDLFPLRNVGPVPSVFXKPQNPFELNRQTQEKDYVEGNFSFDTKSRSRLEKVSFTKAQFVSGKTFKYDIIGAGSHSSEDFSEKEDSXKPNKIDARLRQRIDPQYNEVQAQMETNLFKLSLDDVETPKGSMLDLKISQSKIALSKNTVGGTILRSDLLANFLTEGNFRASVDLQRTSNRIKGMIKMVATVGIPENTGIALAXCAMNSSFRXGRASSDIYTICSQDCELWNPACTKAMTMSFNPNPCSDAWSLEFLKRTGXFHCDIICVTGWTATPMQDVQVTIDWFISSXEWVPRTYWGLNSTKPLXLKRWMVKLNFPRGTPXSVKRMPFSIGGGAGQRMLFYNLPN

SEQ ID NO: 194096 - protein, 49 aa, Glycine max
  unsure (1)..(49): unsure at all Xaa locations
  Clone ID: PAT_MRT3847_17295C.1.pep
GLATLKLHERVKKSCIIGSXHPCPTMPKNSYVTYVYAGNQYMVCAHYYE

SEQ ID NO: 194097 - protein, 224 aa, Glycine max
  Clone ID: PAT_MRT3847_17296C.1.pep
MGDHNIMGLCMSVHFLQYRLMGSIPQSISQQTVWNQMATVRTPLNFDSSKQSFCQFSIDLLGGGILVDKTGDWITLIQNSPISNLLRVAAWKKGCLMVKIVMSGNAAVKRSDWASLVQVFLTNSNSTEHFDACKWTKSEPHSWELIFPIEVCGPNNGFEMWSSEWANQTSWHLSFLIDNPKQSTVFDILLGISQDFEIAGNTLMPAFSVPQATARSSENAESSA

SEQ ID NO: 194098 - protein, 63 aa, Glycine max
  Clone ID: PAT_MRT3847_17297C.1.pep
RVEKKTEKIERGLKKSVDMCVMRIEIRVYLGRGGRKPTQPSISLSLANLFSQCFIIIFSSHTP

SEQ ID NO: 194099 - protein, 444 aa, Glycine max
  unsure (1)..(444): unsure at all Xaa locations
  Clone ID: PAT_MRT3847_17298C.1.pep
FIQISGLFYDGRYKFWSKHERNLALSEEEXMAVIRYRGIPADVLAXRAHEFEKHVGHESLKDQIPAVDKLYSTKVNKFAKIMNLRQSVAGDLKLLTDGKLYEGTLIPCSNIWAGENDVGQIPLMAQEEILSSSACDFRTAMVSKNSKPQATAMHVGAIEIIIDSFASPDCNIVGAMLLVDTYHTNPENAVHSIFVAPFKGGRPIRVVTFPNTIVQIEPDMNSRFQLLSTTTNGDFVQGKDLAMVKVNVACAAAGLTSSYTPTPLLESGLQKDRGLIVEYFGRMSYVAHNVNQPQEKDLLEGNFSFDIKSRSRLEKVSSTKAQFVSGKTFKYDIIGAGSHSSGDFPEKEDQEKPKKIDTRLRQRIDPQYNEVQAQMETNLFKLSLDDVETPKGSMLDLKISQSKIALPKNTVGGTILRSDLLANFLTEGNFRASVDLQRTHRIPR

SEQ ID NO: 194100 - protein, 48 aa, Glycine max
  Clone ID: PAT_MRT3847_17299C.1.pep
SILKFVTFVAIPNVLSSSFCKPQDSNLLIAWESSSFSIHLKTERAPPS

SEQ ID NO: 194101 - protein, 43 aa, Glycine max
  Clone ID: PAT_MRT3847_1729C.1.pep
RKPILRLLTKWFNLYKNFTGDFSYAPLSYNKKYFVAFTWGFEK

SEQ ID NO: 194102 - protein, 81 aa, Glycine max
  unsure (1)..(81): unsure at all Xaa locations
  Clone ID: PAT_MRT3847_172C.1.pep
TTAAQTGTXXSTSGTRRQPXTSTSRKTXPNGXEAXXXXKRGRGGXGXXKAAXKGKXKTPEGEXEXEGPXXXXNGDKAEDEG

SEQ ID NO: 194103 - protein, 322 aa, Glycine max
  unsure (1)..(322): unsure at all Xaa locations
  Clone ID: PAT_MRT3847_17300C.1.pep
EFSKLSCYCIINNQDVQISAEIKYKRNLSNIHISGLFYDGRYKFWTKHEKNLALTEEEKMEVIRNKGIPADVLAKRAHEFEKHVAHESLKDQIPAVDKLYSTKVNKFAKIMNLRQSVVGDLKLLTDGKLYEGKHIPVSNISAGENHVVQIPLMAQEEILSSSASDFRTAMVSKNSKPQATAMHVGAIEIIIDSFASPDCNIVGAMLLVDTYHTNPENAVRSIFVAPFRGGRXPILVVTFPNTIVQIEPDMNSRFQLLSTTTNGDFVQGKDLAMVKVXVACPALLDIKYTSTHCGICLQKTKVNWEYLEGWLLCYYVITPKKI

SEQ ID NO: 194104 - protein, 45 aa, Glycine max
  Clone ID: PAT_MRT3847_17301C.1.pep
LLSAVVVELELNWEGTFLRAKSKKKPHNSLHRFGIYLYMVSRCIS

SEQ ID NO: 194105 - protein, 303 aa, Glycine max
  Clone ID: PAT_MRT3847_17302C.1.pep
ISPNYTVDFEAFPHKLVQFGEIQEKVVLKFSQEEFLTAWSTQVRPATTLLADGCPYLYAMVHDSSVSTIPGDFVIGVKLTTINNMCAYGLNPGISGSRLLGTIPQSISQQTVWNQMATVRTPLNFDSSKQSFCQFSIDLLGGGILVDKTGDWITLIQNSPISNLLRVAAWKKGCLMVKIVMSGNAAVKRSDWASLVQVFLTNSNSTEHFDACKWTKSEPHSWELIFPIEVCGPNNGFEMWSSEWANQTSWHLSFLIDNPKQSTVFDILLGISQDFEIAGNTLMPAFSVPQATARSSENAESSA

SEQ ID NO: 194106 - protein, 963 aa, Glycine max
  unsure (1)..(963): unsure at all Xaa locations
  Clone ID: PAT_MRT3847_17303C.1.pep
MFASLIFSGDNRLTEKTIFTCRDLDILVVYYTIATQFRKFLPHYIRWHLYTLLIYILPSFLTAEIKYKRNLSNVHISGLFYDGRYKFWTKHEKNLALTEEEKMEVIRNRGIPADVLAKRAHELEKHVAHESLKDQIPAVDKVHSTKVNKFAKIMNLRQSVVGDLKLLTDGKLYEGKHIPVSNISAGENHVVQIPLMAQEEILSSSASDFRTAMVSKNSKPQATXQWHVGAIEIIIDSFAXPDCNIVGAMLLVDTYHTNPENADRSIFVAPFRGGRPIRVVTFPNTIVQIEPDMNSRFQLLSTTTNGDFVQGKDLAMVKVNVTCAAVGLTSSYTPTSLMESGLQKDRGLIAEYFGRMSYVAHNVNQPQEKDLSEGNISFDIKSRSRLEKVSSTKAQFVSGKTFKYDIIGAGSHSSEDFPEKEDQEKPNKIDARLRQRIHPQYNEVQAQMETNSFKLSLDDVETPKGSMLDLKISQSKIALPKNTVGGTILRSDLLANFLTEGNFRASVDLQRXLHRIKGMIKMVATRWYFXEYTVLALACAMNSSFRGRASSDIYTXICSQDCELWNPACTKAMTMSFNPNPCSDAWSLEFLKRTGFHCDIICVTGWTATPMQDVQVTIDWFISSQECVPRTYCVLNPQNPFVLNRWMGKLTFPQGTSRSVKRMPLSIGGGAGAKNAILMNMPNAVLSMWRYFVGDLVFEVSKMTSPYIKCTVSFFIAFGNLADDTINFEAFPHKLVQFGEIQEKVVLKFSQEEFLTAWSTQVRPATTLLADGCPXYLYAMVHDSSVSTIPGDFVIGVKLTTINNMCAYGLNPGISGSRLLGTIPQSISQQTVWNQMATVRTPLNFDSSKQSFCQFSIDLLGGGILVDXTGDCVTLVLXSSISNLLRLLLEEKLLIVKNGCLGMHSQRSDWPDGSKVIQTAQYRSFDAESGRIGPLPGMDLRMSLSASIEMQRISMSRTQRTHY

SEQ ID NO: 194107 - protein, 68 aa, Glycine max
  unsure (1)..(68): unsure at all Xaa locations
  Clone ID: PAT_MRT3847_17305C.1.pep
IQRVVACVAHTAIIPMQHVLGMGKXARMNIPANQVXKWGWTIARSVSIDGLETEASRLIEMLSMHARL

SEQ ID NO: 194108 - protein, 48 aa, Glycine max
  Clone ID: PAT_MRT3847_17307C.1.pep
TYSDISLRKMLLICYLIPFYLSIVYVSHILYLANLIFKLVEFYININK

SEQ ID NO: 194109 - protein, 102 aa, Glycine max
  unsure (1)..(102): unsure at all Xaa locations
  Clone ID: PAT_MRT3847_17308C.1.pep
PSKGPLEGVSALQGISGGPRFXIHKAYGGSDPLPFGQPRFKPLELPKDPFXPPLEERVLLALPEAKEGFGFGWPGFFFFFPFSLWGGWGGNKPYSLFRLEAI

SEQ ID NO: 194110 - protein, 70 aa, Glycine max
  Clone ID: PAT_MRT3847_17309C.1.pep
VCQWLCWMNPKLSMFHFSGKSESLVLPCFRYLCSLVSLISPCVDHKCVPNNSPFVFLLSRRMPFLRIFFT

SEQ ID NO: 194111 - protein, 48 aa, Glycine max
  Clone ID: PAT_MRT3847_1730C.1.pep
NIVMLELIPRERVKIVRVRSGYAFCGKWCSKATFVCQFCNERLDFYHQ

SEQ ID NO: 194112 - protein, 122 aa, Glycine max
  unsure (1)..(122): unsure at all Xaa locations
  Clone ID: PAT_MRT3847_17310C.1.pep
EPLLSPVVAFNACLDILPVYVFPPPTSSXDLVLPSPAPLAYALNTLSLHHLLSAPVLDVNAPGDANMIDXYIGMEELAGIGVRILPHPERASPVSPFVRAACTAALNGLSAVLCVFNLLRLL

SEQ ID NO: 194113 - protein, 51 aa, Glycine max
  Clone ID: PAT_MRT3847_17311C.1.pep
SRFYQSSAYSLMIAQRIYRIPSLDAGTSQLDDIARQNPHVKRVSSHNTLKG

SEQ ID NO: 194114 - protein, 51 aa, Glycine max
  Clone ID: PAT_MRT3847_17312C.1.pep
RIAFASLTYVAVGSQSTWPAIYATVMGSLILLSAIGSMCHCVIFTRSWRLH

SEQ ID NO: 194115 - protein, 39 aa, Glycine max
  Clone ID: PAT_MRT3847_17313C.1.pep
IFHKLLIPVGSNLALLCTREILTYEGVSSSPQLPARHFS

SEQ ID NO: 194116 - protein, 50 aa, Glycine max
  Clone ID: PAT_MRT3847_17314C.1.pep
KPCLNSVNKNIGYLNCIIYRLNNKFQLYINIMVSSSIYESNQIIFLNTFH

SEQ ID NO: 194117 - protein, 133 aa, Glycine max
  Clone ID: PAT_MRT3847_17315C.1.pep
MGGILSALLGGDAAAAASSPESSTSRVSSFHSSPRWQLYFNEIKDTDKLVVIDFSASWCGPCKFIEPAIHAMADKFNDVDFVKIDVDELPDVAQEFQVQAMPTFVLWKKGKEVDKVVGAKKDELEKKIEKHRS

SEQ ID NO: 194118 - protein, 101 aa, Glycine max
  unsure (1)..(101): unsure at all Xaa locations
  Clone ID: PAT_MRT3847_17316C.1.pep
MATSLKWWGKESHRGTPVVVKMENPKWSMLELEGPSDEDFIIGNDNDNNNNNRDNKGRGKNAKQLTWVLLLKAHKAACXLASVAPALLGLVDVVKRRVAVG

SEQ ID NO: 194119 - protein, 43 aa, Glycine max
  Clone ID: PAT_MRT3847_17317C.1.pep
PAPIAIELFIDASNEITVYSTPTMGWLQRTTYSSTIAHRVIQS

SEQ ID NO: 194120 - protein, 96 aa, Glycine max
  Clone ID: PAT_MRT3847_17318C.1.pep
SSRTAALFFFFFFFFFFFFFFFFFFFGRERRILYTFLHGTSKPYTCWTTPVQSRGRPTRTATALLLLASHFYKLVLHLHTVTCRAGRVGGRVNGRV

SEQ ID NO: 194121 - protein, 45 aa, Glycine max
  Clone ID: PAT_MRT3847_17319C.1.pep
ASGHASVQIEFAKYKSISSRFVVLLKEHGFTGSFRGWMPTLLAYS

SEQ ID NO: 194122 - protein, 118 aa, Glycine max
  Clone ID: PAT_MRT3847_1731C.1.pep
PLFWVPRGPGKEPKPRPLWFSPPKPLGGTLPGFQKTRGVYPGPPPFPPSLGTGPLKGGPHYLRAPPIRKTGVFKKAPPLPFGAPKKGKTKKKRGFGKLGQTLKLPPFRTGAVKNPWPF

SEQ ID NO: 194123 - protein, 95 aa, Glycine max
  Clone ID: PAT_MRT3847_17320C.1.pep
PHPLVFLEGFEPLHRMSNLLPLDLEIIGLDVETASLLTQWDEGSLHLVFSIPPQIMVEPCVLNYSFFLIRAMEEGDFILFSGKESKVDISFHNIG

SEQ ID NO: 194124 - protein, 34 aa, Glycine max
  Clone ID: PAT_MRT3847_17321C.1.pep
ARQRSQYNISLTQQRFFAGIMTSTHGRKLRYSLL

SEQ ID NO: 194125 - protein, 38 aa, Glycine max
  Clone ID: PAT_MRT3847_17322C.1.pep
LIYCCNLKKIPFMIILKKLFISLINPKSEQHHRMVRMI

SEQ ID NO: 194126 - protein, 53 aa, Glycine max
  unsure (1)..(53): unsure at all Xaa locations
  Clone ID: PAT_MRT3847_17323C.1.pep
RSLKSCVLDIFFFFFVEKVSICIIKGIRELYNYKYYNGRSNEVDHERLTFQXS

SEQ ID NO: 194127 - protein, 79 aa, Glycine max
  unsure (1)..(79): unsure at all Xaa locations
  Clone ID: PAT_MRT3847_17324C.1.pep
TGPVFLGLSHASALILTKSXDQLNWCTTYKYIHFRVILPRVIAANQNRIQSSTQEKLFRGFDALFDWMVRSIPCCNCFL

SEQ ID NO: 194128 - protein, 61 aa, Glycine max
  Clone ID: PAT_MRT3847_17325C.1.pep
PVKDFAGRLYYYWPNFHSLQFTEPQCRSKWPHLKNTRALEQMIASINPFGDNRLTGKTILT

SEQ ID NO: 194129 - protein, 50 aa, Glycine max
  Clone ID: PAT_MRT3847_17326C.1.pep
MVKILCQVPGEHSLIVALQREMNGMVENQLHPFIDGIMETRLPPKWKMLM

SEQ ID NO: 194130 - protein, 57 aa, Glycine max
  Clone ID: PAT_MRT3847_17327C.1.pep
NKKKALSTLKAFIIQHMIIESICMLYDKSLQMDSIIICSSISYTFFSKLEKPIIRKK

SEQ ID NO: 194131 - protein, 35 aa, Glycine max
  Clone ID: PAT_MRT3847_17328C.1.pep
LVEAQAQLQGELIAASVLLLHLCFRCSLSTPCDCP

SEQ ID NO: 194132 - protein, 86 aa, Glycine max
  Clone ID: PAT_MRT3847_17329C.1.pep
SGALTRLCCRLRPPPCRRPSMPKCCFRHFPEWIENPPYPFPKRKNEIYLTYVDLVSLPGFYRRYKLTQYSIPFFGFFFSRKNFRMR

SEQ ID NO: 194133 - protein, 156 aa, Glycine max
  unsure (1)..(156): unsure at all Xaa locations
  Clone ID: PAT_MRT3847_1732C.1.pep
ARDFALSLVASADINHINKLXDRVEELNSDQNLRHIRITFKEFQDFAELRKKLKSFSLAIFSYGKVNGVLTKSDFQSAASQVCGVCITDEVVDIIFHVFDANRDGSLSAAEFVRVVQRRESNNSSRHDSFGGLTSCWLNCVKNCSSAQFNFDGIRS

SEQ ID NO: 194134 - protein, 102 aa, Glycine max
  unsure (1)..(102): unsure at all Xaa locations
  Clone ID: PAT_MRT3847_17330C.1.pep
RVRTAARRQQKGTPKRNKEEKKNSGAVKNWEXXVGRIWYYNFTFFSSLHISLGMATSRRFLQGLRRCSYWGAFLLRLRSGLSFGAGRGPAPGPGLDAGPAWS

SEQ ID NO: 194135 - protein, 144 aa, Glycine max
  Clone ID: PAT_MRT3847_17331C.1.pep
LQFVSPLSLNNFDICCFQHTVKPGSYTWIHHRPPPQRRQNHFDVHDMLNMLQDVDLTSAEYFSIMRDSDLYDDMDPFEMMVSDRLAGDSGPCLGPFDSDEEDLDIFQMAALTEVLASGVDDFGPEDFGDEDFNPMEAALLSMMM

SEQ ID NO: 194136 - protein, 64 aa, Glycine max
  Clone ID: PAT_MRT3847_17332C.1.pep
KLPLHLRDLFGGQYINNVAYAICTSRVEANNVLKWKTVPASCGEYIVDYVLRDQYRSDSKTIKQ

SEQ ID NO: 194137 - protein, 51 aa, Glycine max
  Clone ID: PAT_MRT3847_17333C.1.pep
CIRKKKPLGVSNQFLTKKGQQIPYFLLTNWLHPKGKINPPFNIKHFSNRDP

SEQ ID NO: 194138 - protein, 43 aa, Glycine max
  Clone ID: PAT_MRT3847_17334C.1.pep
KGPLWGYIQLLKFTLLPQIWHTKLQANGKLGGEKGIISYFCTL

SEQ ID NO: 194139 - protein, 102 aa, Glycine max
  unsure (1)..(102): unsure at all Xaa locations
  Clone ID: PAT_MRT3847_17335C.1.pep
LFFLLFHFLCSLLSQFYLNLHLTRSVRIGLLVAKVALQRDYVXLDAVNDPFITTDYMTYMFKYDSDHGHWKHHDVTVYDXKTLLFGDKPVTDYGHKNPAEIP

SEQ ID NO: 194140 - protein, 30 aa, Glycine max
  Clone ID: PAT_MRT3847_17336C.1.pep
EAYQVFLLWSGLKAGGIMGISGFWGKMVFR

SEQ ID NO: 194141 - protein, 77 aa, Glycine max
  Clone ID: PAT_MRT3847_17337C.1.pep
QSSGSKHQCPSLRRSSCRITGNQCIELARRLQRKNRENPGPTERTRPAYIHQWLADVAAKRPDPIVQCIRCSPCMGN

SEQ ID NO: 194142 - protein, 89 aa, Glycine max
  Clone ID: PAT_MRT3847_17338C.1.pep
RERFRQTLIDHSIFRFLRYPKSSPPTDFKHRGIGNRRSSTHKNRFFLCPIVGAARPKALCFTKLFLLNYHPFMVHVFLSGVRAFETPSQ

SEQ ID NO: 194143 - protein, 158 aa, Glycine max
  Clone ID: PAT_MRT3847_17339C.1.pep
MGILGTMARNLDTIVGPGVLLLYPLYASMRAIESPSTLDDQQWLTYWVLYSFTALFELSCYKILAWFPIWPYMKLVFCLWLVLPMFNGAAYIYENYVRQYVKHIGSYYGNSKYPEVQKKVLQMMSLDARKAVERYIDTYGSDAFERVVKAADREASRH

SEQ ID NO: 194144 - protein, 87 aa, Glycine max
  Clone ID: PAT_MRT3847_1733C.1.pep
YHYLPLGMKASNPSASEMASYNELVQNIRVSPLKLVPEYWKYVHGRHCRQLVGGASIHYGSMKIRIKKCSPHRSSAIYGSDTVGWLA

SEQ ID NO: 194145 - protein, 84 aa, Glycine max
  unsure (1)..(84): unsure at all Xaa locations
  Clone ID: PAT_MRT3847_17340C.1.pep
PPPPIPNRKKFVLSSPKGTLGCTTKGFGTNXGGKIAKPKFPPAVKNYENYHVCYGGQEEERKANYTDMVNKYXDSVTSFYEFGW

SEQ ID NO: 194146 - protein, 99 aa, Glycine max
  Clone ID: PAT_MRT3847_17341C.1.pep
MKLASVSNITHARLLHRCCRRTANRSTCRKIIRRHPKICVTYLLAVAIPNIWYFFQFLGSITIVCFLFIFPAAIVLRYCYLFLFSLYICFFKKRILTIH

SEQ ID NO: 194147 - protein, 104 aa, Glycine max
  Clone ID: PAT_MRT3847_17342C.1.pep
ISMEPLLFNDSTFSSANPSLSEIWPSHFPSDHTPRKRRLSPSSDSASNKHIKLSAPESQDQNGALKVGEVDATSVAGNKLPQQTPKPSSSEQAPKHDYYTCEPE

SEQ ID NO: 194148 - protein, 176 aa, Glycine max
  Clone ID: PAT_MRT3847_17343C.1.pep
MQALCPSFPDCSTLRVPRFSISATPPNFASFLSPSKAGIKLSCGIHKPVWRSRCDGLRVQCAASNGENDDDDGFYIRRCVELARKAVGFTSPNPLVGCVIVKDGKVVGEGFHPKAGQPHAEVMRLFALRDAGELAQSATAYVSLEPCYHFGRTPPCTEALIKARVAGVVVGMVDPN

SEQ ID NO: 194149 - protein, 600 aa, Glycine max
  Clone ID: PAT_MRT3847_17344C.1.pep
FNQLDGLLPANLLTLPTLQELRLENNMISGGIKFSSSPDQSDLQILDLSHNQLNGYFPDEFGSLTGLKVLNIAGNNFSGSLPTTIADMSSLDSLDISENHFTGPLPSNMPKGLQNFNASQNDLSGVVPEVLRKFPSSSFFPGNTKLHFPNGPPGSISSPAESSKRKHMNTIVKVIIIVSCVVALFILILLAVFIHYIRISRSPPEYETSKDIHRHPQPIISAPVRTTDGGGALVVSAEDLVTSRKESPSEIISSDDSSRSSRGFSPSKQSHFSWSPESGDSLSGENLARLDTRSPDRLVGELHFLDDTITLTPEELSRAPAEVLGRSSHGTSYKATLENGLLLRVKWLREGVAKQRKEFVKETKKFANIRHPNVVGLRGYYWGPTQHEKLILSDYISLGSLASFLYDRPGRKGPPLTWTQRLKIAVDVARGLNYLHFDRAVPHGNLKATNVLLDTTDMNARVADYCLHRLMTQAGTIEQILDAGVLGYCAPELAASKKPMPSFKSDVYAFGVILLELLTGRCAGDVISSEEGGVDLTDWVRLRVAEGRGSECFEATLMPEMSNPVVEKGMKEVLGIAMRCIRSISERPGIKTIYEDLSSI

SEQ ID NO: 194150 - protein, 51 aa, Glycine max
  Clone ID: PAT_MRT3847_17345C.1.pep
CENFYTNNTRLLNSFKNYINFPFPLTMHYSCIYVPLKRKNMKLIHQTASNS

SEQ ID NO: 194151 - protein, 128 aa, Glycine max
  unsure (1)..(128): unsure at all Xaa locations
  Clone ID: PAT_MRT3847_17346C.1.pep
FTFARRTPLTCDPCKRSSCQSSIDRIRXGTLLGNSIDWITLIQXSTFSNIVRVCMXKERLFHVEIEMSETATVKSSDWASVLLVFFTHRCCTEPSDSCMWTFSQPRSWEMNFPIKVFGTNNVSEKSSP

SEQ ID NO: 194152 - protein, 60 aa, Glycine max
  Clone ID: PAT_MRT3847_17347C.1.pep
YPYHHYIRGYSLSNQSSLSLCLTASLAKLNMARYTFLFTSESMEKEHPDRLCDQIPDAVL

SEQ ID NO: 194153 - protein, 58 aa, Glycine max
  Clone ID: PAT_MRT3847_17348C.1.pep
ASGRERGILTCYPNTSLAMAKELMEAKDIKQLPVVKRGVDQSREMKRRIVGLLHYDAL

SEQ ID NO: 194154 - protein, 144 aa, Glycine max
  unsure (1)..(144): unsure at all Xaa locations
  Clone ID: PAT_MRT3847_17349C.1.pep
LQXTPXPXXFPGRPTRPVVYVLLLPFANGFFLSLFRAFDPCISRLVFSLSPQSTSSQCKSPNLRVFFYSSIVMNFSRGVGIRRQVWPPKDVKSHDTAPLDQDNRFQASRFTPLFVSYPILHNHLNGLIGPHYLPAMLLQDKTMP

SEQ ID NO: 194155 - protein, 77 aa, Glycine max
  Clone ID: PAT_MRT3847_1734C.1.pep
NIKKPKISKTYQDQVKKLIQKKNLGKKKKKSPTKIRERVPQAEGTGESLTELRQGDPLEPNWAKNIKKKRGRAKNKP

SEQ ID NO: 194156 - protein, 214 aa, Glycine max
  Clone ID: PAT_MRT3847_17350C.1.pep
MGICLSTQIEAGLNSKHVSVDAKDLSSPSSKITKDLSNPISNKITEDLSTPISNKITEDLSTPISNKITEDLSTPISNKITEDLSTPISKVSEILVPLTPQIEGEILQSSNLKNFSLTELTAATRNFRKDSVLGGEGDFGSVFKGWIDNHSLAAAKPGTGVVVAVKRLSLDSFQGHKDRLARHGMTHEASLEAEVNYLGQLSHPHLVKLFGYCF

SEQ ID NO: 194157 - protein, 128 aa, Glycine max
  Clone ID: PAT_MRT3847_17351C.1.pep
MRVSYESMHAEAFLTALVNTRQTGRSYVGEFEVANYSNHANDMYFFIGLHQIPMDRLDLRLMDWYYPQMIKNFVKGKAPDIGWKPQNWNGRNYFRITFNVSDNGTLTDWPHGVDGYQDVAGLDFWLHE

SEQ ID NO: 194158 - protein, 107 aa, Glycine max
  Clone ID: PAT_MRT3847_17352C.1.pep
IITLCAGHNLMKFFSFPLLVDLLDTLLLDIGLRVRLKQFLSVCQSYVQSQAQAVDDGGSYSHSTMCDRIAWTDPGNSVLGVTLSFSLIRSAFRSGLIMTTLGRWGTS

SEQ ID NO: 194159 - protein, 83 aa, Glycine max
  unsure (1)..(83): unsure at all Xaa locations
  Clone ID: PAT_MRT3847_17353C.1.pep
GIVHSDMWSLDPKTWEWNKVKKSGMPPGPRAGFSMCVHKRRALLFGGVVDIEVEGDVMMSLFLNELYGXQLDTNRWYPLELRK

SEQ ID NO: 194160 - protein, 204 aa, Glycine max
  Clone ID: PAT_MRT3847_17354C.1.pep
SARGLVPNSARGNSSDEAECSGSDQVKEYIENVLGPNAAELVYWRDVKNSGIVFGSGLVILLSLSIFSVISVVAYTLLFTLLGTLSFRIYKNVMQAVHKTDDGHPFKEYLEIEIAPPQERIHEIVDSVVAHGTCFINRMRSVLLVEDIVDSLKYLLIFWALTYIGACFNGMTLILLAYLGAFSLPKVYELNKVQIDQYLDLANS

SEQ ID NO: 194161 - protein, 78 aa, Glycine max
  Clone ID: PAT_MRT3847_17355C.1.pep
ACLEVSTGMNLFLTWGKMGGKISFNTVALQGQLQRQGFGSTSFPFTFTGGKNRKIIFLKNQKKGNIFIIEPLSTLNKW

SEQ ID NO: 194162 - protein, 41 aa, Glycine max
  Clone ID: PAT_MRT3847_17356C.1.pep
LIQPMTHDRNKHAPLLHNQIPGAGGMTVEQIMLNVLLHKSN

SEQ ID NO: 194163 - protein, 514 aa, Glycine max
  Clone ID: PAT_MRT3847_17357C.1.pep
MEEDAYYQPQSILSASMDKTMMIWQPEKTSGVWMNVVTVGELSHCALGFYGGHWSPNGDSILAHGYGGSFHLWKNVGNDNWLPQKVPSGHFASVTDIAWARSGDYIMSVSHDQTTRIYAPWKVEAPLQDGEFWHEISRPQVHGHDINCMAVIHSKGNHRFLCGAEEKVARVFEAPLSFLKTLSNATLQKSCSSDDIMGDVQILGANMSALGLSQKPIYVQAVHEAPERSGVNGLDTLETIPDAVPTVFTEPPIEDQLAWHTLWPESHKLYGHGNELFSLCCDHKGELVASSCKAQSAAVAEVWLWQVGSWKAVGHLQSHSLTVTQMEFSHDDNFLLTVSRDRQFSVFSITRTGTGEISYSLLARQEGHKRIIWSCSWNPHGHEFATGSRDKTVKIWAIERESVKQLMSLPQFTSSVTALSWVGLHHRKNNGLLAVGMENGQIELWNLSYNRADDGSIAAPGLAASLAVRIDPFICHASTINRLAWKKNEDDHMSMQLASCGADNCVRVFDVTVE

SEQ ID NO: 194164 - protein, 51 aa, Glycine max
  Clone ID: PAT_MRT3847_17358C.1.pep
SVRVLGRCWWPCCLNEVTDAVVLSCGLAVRVICPVGQFALGCSIPVDQFWC

SEQ ID NO: 194165 - protein, 139 aa, Glycine max
  unsure (1)..(139): unsure at all Xaa locations
  Clone ID: PAT_MRT3847_17359C.1.pep
LEFLKRTGFFCDIICVSGWTATPLQDVQVTIDXWLLYSQECVPSTYCVLNPQNPLVFNRWMGKLTFPHGTSLRVKRMPLSILARTHAAKNAILMNMPIAVLSMWRYLVGDXLVSEVSXMTSAYIKCSVSFFIAFGNLAD

SEQ ID NO: 194166 - protein, 84 aa, Glycine max
  Clone ID: PAT_MRT3847_1735C.1.pep
AQCQQATAGCLLPICPSLCVVVCVGPELHKCVSGRLSQRQRLYYSIPHQLPGTLRFCNAPWLVVLVATLIMGCSLSAVAVAEAI

SEQ ID NO: 194167 - protein, 114 aa, Glycine max
  Clone ID: PAT_MRT3847_17360C.1.pep
MIALKSLHPFFTPTNIKYGINRSRCLNTKGSVLCLCKSNESESQAPQPGDIRKQELLAQIAMLQTQKVRLTDYFDERSEYLTQFGEEAKAEFDKIGKDALQGLDEASAIVCFNF

SEQ ID NO: 194168 - protein, 54 aa, Glycine max
  Clone ID: PAT_MRT3847_17361C.1.pep
FKPNRRARLPPNLVQAQRDLFGAQTKERVDPPGAFQTKWTKLPPKSGTGVGAPK

SEQ ID NO: 194169 - protein, 79 aa, Glycine max
  Clone ID: PAT_MRT3847_17362C.1.pep
GGVQKGGVPAIGGGGVVHQKQMWYERVQFQDRKGHCMALGPCTSLRRQCTCHSWMGKACPKVSRPSKPPPPNTYILDLF

SEQ ID NO: 194170 - protein, 111 aa, Glycine max
  Clone ID: PAT_MRT3847_17363C.1.pep
KQKHDLEKKKAEVARIRKKYPNRIPEMGKKAKKRDIPRIDKKKNLVPADLTEGQFAYGIRKRIKLRAKKAILILGDKVLPPTGAIMPALYDEKKDKDGFLYVTYRGKNTFG

SEQ ID NO: 194171 - protein, 66 aa, Glycine max
  Clone ID: PAT_MRT3847_17364C.1.pep
YTNQYMDRSYRTFQIKLLILKNNRQYSQLHLCSCEGKRRNTKIFSLHNPNTCDIQRNFKAINLLGM

SEQ ID NO: 194172 - protein, 729 aa, Glycine max
  unsure (1)..(729): unsure at all Xaa locations
  Clone ID: PAT_MRT3847_17365C.1.pep
RLREGYLLECKKNMDAAAESTAATEEVIELLFKTMESLNVLRETIVKGLESGLRNDAPDSAIAMRQKWRLCEIGLEDYSFVLLSRFLNEFEVMGGAHRLAESIQSKNLNSWNDPLGALIIGVHQLKLSGWKPEECGAIENELITWSKRGLSETEGNEDGKTIWTLRLKATLDRSKRLTDEYTEELLNIFPQKVQILGXALGIPENSVRTYTEAEIRAGVIFQVSKLCTLLLKAVRNTLGSQGWDVLVPGTALGKLVQVEKIVPGSLPSSVEGPIILVVNKADGDEEVTAAGRNIVGVILQQELPHLSHLGVRARQEKVIFVTCEDDEKVADIQRLIGSYVRLEASTAGVNLKLSSSVDIEDNSSIRSSSDDCVSGVEVPSFSSGRISNFDQGASSGRVILLPDAELQTSGAKAAACGHLSSLSAVSDKVYSDQGVPASFRVPSGAVLPFGSMELELEKSNSTEAFRSILEKIETAKLEGGELDVLCHQLQELISSLKPSKDIIQSIGRIFPSNARLIVRSSANVEDLAGMSAAGLYESIPNVSPSNPTVFGNAVSQVWASLYTRRAVLSRRAAGVPQKEASMAILIQEMLSPDLSFVLHTVSPTNQDNNCVEAEIASGLGETLASGTRGTPWRISSGKFDGQVQTLAFANFSEELLVRGAGPADGEVIRLTVDYSKKPLTVDSVFRGQLGQRLCAVGFFLERKFGCPQDVEGCLVGKDIFIVQTRPQPL

SEQ ID NO: 194173 - protein, 52 aa, Glycine max
  Clone ID: PAT_MRT3847_17366C.1.pep
MMMFEDMGFCGDLDMLCGSLGDGDIAVRQTEPDPVVEDDYSDEEIDVDFPLL

SEQ ID NO: 194174 - protein, 614 aa, Glycine max
  Clone ID: PAT_MRT3847_17367C.1.pep
MMMFEDMGFCGDLDMLCVSLGEGDIAVRQTEPDPVVEDDYSDEEIDVDELEKRMWRDKMRHKRLKEQTKSKEGTDATKQRQSQEQARRKKMSRAQDGILKYMLKMMEVCKAQGFVYGIIPEKGKPVTGASDNLREWWKDKVRFDRNGPAAIVKYQADNAIPGKNDGCNSIGPTPHTLQELQDTTLGSLLSALMQHCDPPQRRFPLEKGVPPPWWPTGNEEWWPQIGLPKDQSPPPYKKPHDLKKAWKVGVLTAVIKHMSPDIAKIRKLVRQSKCLQDKMTAKESATWLAIINQEEALARELYPDYCPPFSSAGGNGSLVINDCSEYDVDGAEEELNFDVEDRKPDHLLPSNLGMERMRGRMPIQQPSHPMKGDVVTNLDFIRKRKISSDFNMMMDQKIYTCEHPQCPYSEVRLGFHDRSARDNHQLNCAYRNSSADYGGGPNFHATEDKPVIFPQSFVQPNTTTQSASLVAPSFDLTGLGVPEDGQKMISDLMTIYDTNVVGNKNLSSSNCVAVENHNLSQASLQQQESYFPGQGMVLEGNFFAREEGQFDRFKATMNMNTHTPFDTNHSNNNNIHLMFNSPCDLSSFDFKEDIQGGVGMDPLHKQQEVSIWYQ

SEQ ID NO: 194175 - protein, 616 aa, Glycine max
  Clone ID: PAT_MRT3847_17368C.1.pep
MMMFEDMGFCGDLDMLCGSLGDGDIAVRQTEPDPVVEDDYSDEEIDVDELEKRMWRDKMRLKRLKEQTKSKEGTDAAKQRQSQEQARRKKMSRAQDGILKYMLKMMEVCKAQGFVYGIIPEKGKPVTGASDNLREWWKDKVRFDRNGPAAIAKYQADNAIPGKNDGCNSIGPTPHTLQELQDTTLGSLLSALMQHCDPPQRRFPLEKGVPPPWWPTGNEEWWPQIGLPKDQGPPPYKKPHDLKKAWKVGVLTAVIKHMSPDIAKIRKLVRQSKCLQDKMTAKESATWLAIINQEEALARELYPDYCPPFSSAVANGSMVINDCSEYDVDGAEEEPNFDVEDRKPDHLHPSNLGMERMMGRMPIQQPSHPMKGDVVTNLDFIRKRKISSDFNMMMDQKIYTCEHPQCPYSEVRLGFHDRSARDNHQLNCAYRNSSADYGGGPNFHATEVKPVIFPQSFVQPNTTAQSASLVAPSFDLTGLGVPEDGQKMISDLMTIYDTNVVGNKNLSSTNCVTAENHNLSQASLQRQDSFFPGQGMVLEGNLFAREEGQFDRFKATMNMNMNMNMNTPFDTNHNNNNIHLMFNSPCDLSSFDFKEDIQGVGMDSLQKQQEVSIWYQ

SEQ ID NO: 194176 - protein, 65 aa, Glycine max
  Clone ID: PAT_MRT3847_17369C.1.pep
KTEALSWKAAWLLVQSIQLAGDMTQYIGGIWVSLLFLLLHTSFLQCHFSSNDHPLFAPFSCNLLI

SEQ ID NO: 194177 - protein, 138 aa, Glycine max
  Clone ID: PAT_MRT3847_1736C.1.pep
PSFRSVLVEATSGNTGIGMAFVATLKGYKVIVAMPASVSLERKIVLGAFGAEVYLTDPTKGTNAVLRKAEEIVNNTPGSYMLRQIDNPANPKIHYETTGPEIWRDSGGKVDALVAGVGTRGTITGAGRFLKERNPNVK

SEQ ID NO: 194178 - protein, 49 aa, Glycine max
  Clone ID: PAT_MRT3847_17370C.1.pep
GPWLAVGHVNAYLELSKILGQKGHFVTFISSPKNIDGMAKIPETLQPSI

SEQ ID NO: 194179 - protein, 62 aa, Glycine max
  Clone ID: PAT_MRT3847_17371C.1.pep
WLGAPAYVEDRGVLVGEGVRVGTCVADIANASIWGCGNSHRSDWKINALVWWDASVLGNLPE

SEQ ID NO: 194180 - protein, 64 aa, Glycine max
  Clone ID: PAT_MRT3847_17372C.1.pep
FFQSKHLLIFTQTKYLGKRVPLSKIDTTLLTWLFNSASIKQHIYNTCKLLKQNNLQLLSCLMNF

SEQ ID NO: 194181 - protein, 43 aa, Glycine max
  Clone ID: PAT_MRT3847_17373C.1.pep
SNKDKTLASLMSSMSLMANSISHLTNAGSHVPKPTLDDTDDDF

SEQ ID NO: 194182 - protein, 308 aa, Glycine max
  unsure (1)..(308): unsure at all Xaa locations
  Clone ID: PAT_MRT3847_17374C.1.pep
ARDLIACLGGEEKTIQFMENMSLTESSIPLLKEAYAYGVVEHPFPLNIFLEDWNLGPEFYQSVKIGIVQYMILKMICAIVAIILESFGVYGEGKFEWKYGYPYLALVLNFSQTWALYCLVQFYAVIKDKLKPIKPLAKFLTFKSIVFLTWWQSVAVAFLFYMGAFRGSLAQELKARIQDYIICIEMAVAAVVHLYVFPAEPYKMGERCIRNVAVMDDYASLGSPLDPEEVQDSQRSTRTWLGAHNNQREKNPMKFTQSVRDVVVGSGEIIVDDMKFTVSHVVEPVERGIAKINKTXHQISENVKRHEQ

SEQ ID NO: 194183 - protein, 92 aa, Glycine max
  unsure (1)..(92): unsure at all Xaa locations
  Clone ID: PAT_MRT3847_17375C.1.pep
GPGCRRSDWAXLVQVFGTNRNGTXHFDAWKRTKSKPHSWELILPIEECGPNNGIEMWSSXWANQTLWRLSFLIGETKQHTVCDILLGIWHDF

SEQ ID NO: 194184 - protein, 93 aa, Glycine max
  Clone ID: PAT_MRT3847_17376C.1.pep
GEIHNQIVHFIIIDFPHTRSLATMAISYYLNNQMPNLPSSKLIKMLHPIPVTNTKPIQVLNLYYIQSTPKEERVNTACTISAYKNVCENASPR

SEQ ID NO: 194185 - protein, 58 aa, Glycine max
  Clone ID: PAT_MRT3847_17377C.1.pep
TLKVLMLTIGTNRVEFLYKNRLLAYKQPRSINFHGICFQNAIEIKVANFTTVSSNNRF

SEQ ID NO: 194186 - protein, 46 aa, Glycine max
  Clone ID: PAT_MRT3847_17378C.1.pep
SSRIGSRIWRYETCRHCQYYVKACDATPTTYTTTGTESNSCSLSSV

SEQ ID NO: 194187 - protein, 105 aa, Glycine max
  unsure (1)..(105): unsure at all Xaa locations
  Clone ID: PAT_MRT3847_17379C.1.pep
LFLLSLLGISTTNVYFQKSSDDGWEYRWVQSYWKXKMKTWRGEWNHTFRHCNGDTYDDXIHTKEDYEHCATXCEYPDSTYKGKTLYSHSSVQRERKLHCMGRSMK

SEQ ID NO: 194188 - protein, 45 aa, Glycine max
  Clone ID: PAT_MRT3847_1737C.1.pep
KAVHHLRLLSAIAVSLPGHISYRACNNSINNLCYCYSICIREAII

SEQ ID NO: 194189 - protein, 121 aa, Glycine max
  unsure (1)..(121): unsure at all Xaa locations
  Clone ID: PAT_MRT3847_17380C.1.pep
KNGRSIYCFYVDNMFIASQNLLVIQRLKSLLNGELXMKDMXAIRKIMGMEIKRDQXKRRSFCVRKXYILKVFNHFGMAFTKSVCFPLTPSIRLSELNTTRSKLEKEYMXVPYASVVSWLIY

SEQ ID NO: 194190 - protein, 100 aa, Glycine max
  unsure (1)..(100): unsure at all Xaa locations
  Clone ID: PAT_MRT3847_17381C.1.pep
SFDXGHDVPSLNPPTVTGTPSPSDWKYAPPPTXGAPHXNXRPXAXPHFSPFRFFFHSQLTRQWQWQCHPRNRNGTTLCSPPPPQDXHGSLISGRVGAPGN

SEQ ID NO: 194191 - protein, 110 aa, Glycine max
  unsure (1)..(110): unsure at all Xaa locations
  Clone ID: PAT_MRT3847_17382C.1.pep
MASLKLLKRLIASMLKCGKRKGRLDPNEXSTEISMDNSRQNIRKLVKDGFIIRKPTKIHSRXRARRMKEAKKNGRHSGYCKRKGTKEAMLPTKILRMRRMRVLKQLLWKF

SEQ ID NO: 194192 - protein, 70 aa, Glycine max
  Clone ID: PAT_MRT3847_17383C.1.pep
ALSKLRVLPEYDTPLTQIHIRDDQSPVASQHCHDVDKHCHYPNESYHSSNYIIMICTRFLRIQHYYTNAK

SEQ ID NO: 194193 - protein, 68 aa, Glycine max
  Clone ID: PAT_MRT3847_17384C.1.pep
VSERRCSRGVCESSAHERCRSTRCCMCQRQAANVGCFTALLSRTVCSRCFEMQPFLGMTWPCFYILYA

SEQ ID NO: 194194 - protein, 64 aa, Glycine max
  Clone ID: PAT_MRT3847_17385C.1.pep
DSLSAPDSATLYLGYSLLVAGEHMLSTSTIGSLMAFYFVHYLVLSKMIDRGSSLHCTLTMTMAD

SEQ ID NO: 194195 - protein, 89 aa, Glycine max
  unsure (1)..(89): unsure at all Xaa locations
  Clone ID: PAT_MRT3847_17386C.1.pep
CRIECEGARLPIMLAPIXMILLLGWQYTTISQHEVELNDEVALDWPTALGPSXELLRGPGMGLVCTDLTTGIPXNLQRSVTHLPAYHRY

SEQ ID NO: 194196 - protein, 53 aa, Glycine max
  Clone ID: PAT_MRT3847_17387C.1.pep
WFNIEDIIAMFWHSRLMTGKNMLLMKVARAKFVPPATGIVLGIISSHKSHALH

SEQ ID NO: 194197 - protein, 220 aa, Glycine max
  Clone ID: PAT_MRT3847_17388C.1.pep
SIFLNGPLGIQLDFNGAQVGGGFVDPITIKKNIHGILNAVSWGVLFPLGVIIARYMRTFPSADPAWFYLHVGCQVSAYAIGVAGWGTGMKLGSESVGIQYRSHRYIGIALFCFATLQIFALFLRPVKDHKYRYIWNIYHHSVGYSIVILGIINIFRGFSILHPDQKWKSTYTAVLIALGAVALFLEVITWIVVLKRKSYKSTKTYDGYNNGQSREEPLNI

SEQ ID NO: 194198 - protein, 77 aa, Glycine max
  Clone ID: PAT_MRT3847_17389C.1.pep
FQKSKQSEESRLFQIHGVVKYRDSISLSRSIFSRKAVPYKLTIYIAYSSLHLSCLSKNNKEMQNRRIKKISYIKIKF

SEQ ID NO: 194199 - protein, 127 aa, Glycine max
  Clone ID: PAT_MRT3847_1738C.1.pep
MTTEQTFIAVKPDGVQRGLIGPIITRFENRGFKLAGIKMVTPSKEHLEKHYADLSDKPFFPGLIAYMGSGPVCAMVWEGCDAVKTGRSILGATNPLVFSPGTIRGDYALDVGRIVCHGCDSGENSKK

SEQ ID NO: 194200 - protein, 159 aa, Glycine max
  Clone ID: PAT_MRT3847_17390C.1.pep
ADPAWFYLHVGCQVSSYAIGVAGWGTGMKLGSQSEGIQYSAHRYIGIFLFSFATLQIFALFLRPVKDHKYRYIWNIYHHSIGYSIIILGIINIFRGFSILHPDQKWKSTYTAVLIALGAVALFLEVITWIVVLKRKSGKSTKTYDGHNNGQSREDPLTI

SEQ ID NO: 194201 - protein, 180 aa, Glycine max
  Clone ID: PAT_MRT3847_17391C.1.pep
MSFSTKLPLVLLFSSLFIHASLAEMVCEDLPKEVCAFSVASSGKRCLLETEKAADGGVEYQCRTSEVVVERMADYIETDQCVEACGVDRNSVGISSDAFFEPQFTGKLCSPACYQKCPNIVDLFFNLAAGEGVFLPELCEKHKTNPRRAMVELVSSGAAPGPVSDVSEAIIASAPAPSAL

SEQ ID NO: 194202 - protein, 46 aa, Glycine max
  Clone ID: PAT_MRT3847_17392C.1.pep
TLLWTRLMLSWHRPLWLSTSFCWSWVNGDDTIHRKLERPIWLKSVA

SEQ ID NO: 194203 - protein, 64 aa, Glycine max
  unsure (1)..(64): unsure at all Xaa locations
  Clone ID: PAT_MRT3847_17393C.1.pep
AIPLLPVYGGVIVEIVSSMLDLCVPQVRALMRALAREDDRGAPRRQAQDPHASMCVHFXKNGFV

SEQ ID NO: 194204 - protein, 99 aa, Glycine max
  unsure (1)..(99): unsure at all Xaa locations
  Clone ID: PAT_MRT3847_17394C.1.pep
MHXXGARVDXEXXLSQVPGLRCHTALGLLSVQYEQYTFATNCPRHTSNGDNHEVKKPXPAELFXXIHLEWQSCWLPSTFQGGQPSGPVSSERKCLDPGV

SEQ ID NO: 194205 - protein, 72 aa, Glycine max
  Clone ID: PAT_MRT3847_17395C.1.pep
LRSHFPNTLSVLPHLPLRGRSQVSTFSPISKQRLVILHTVRYKLIEGPCVLLSEQEARSKPSARVGVSQALP

SEQ ID NO: 194206 - protein, 75 aa, Glycine max
  Clone ID: PAT_MRT3847_17396C.1.pep
VVVDKNSQWLLKKNGEMDFALGKNILEADDGHFHYLVLEVGLSHLLSDNIDYVIFHHESFILLSRGVCYLVRLLT

SEQ ID NO: 194207 - protein, 199 aa, Glycine max
  Clone ID: PAT_MRT3847_17397C.1.pep
MAEEEKPNGEEQVKDNNNNNLYDAVQRLILEPSKIKASLIPLFPEASRTYSRQLLHWSRQGSPLRRILFISIGIVALVALSGLVAFTLFFLAATVNAIFVSLLISLAVAGGFLVLFFAFVTAIYIGALSLAIFAISTVTFWAVVAIIITAGWVGFLYTVWLVTSKSLGLAKQSLSVTGSAITTYSAAWGTRNLADKNSI

SEQ ID NO: 194208 - protein, 76 aa, Glycine max
  Clone ID: PAT_MRT3847_17398C.1.pep
SSHLATNIPYSPMLTLGELEIILIFFACRSLIPKPKNWGGYRLTPQFWSFVKDRNLACMTGGCSPVCDRFLVFIFF

SEQ ID NO: 194209 - protein, 48 aa, Glycine max
  Clone ID: PAT_MRT3847_17399C.1.pep
APSSLRLLRHESEVAEEENAQAEAQEKKDEAEVQVNHLVHPRSLREQK

SEQ ID NO: 194210 - protein, 77 aa, Glycine max
  Clone ID: PAT_MRT3847_1739C.1.pep
TCHSGAMLPFLSRGGALMPPLVCWLLDALLSSLIYAALNGNKLSLISSCIATATATAFYSNVASLSVGLMHGNLLIR

SEQ ID NO: 194211 - protein, 252 aa, Glycine max
  Clone ID: PAT_MRT3847_173C.1.pep
MARLISSNPIALHRFQPCLPISRHFSANPRRRRPTNTRKLQTLACQTNPNLDQKDTPTTDEEKLVVEPSTSTTTSSLPQLPTKNINNKIALVSTLAALGLFLSARLDFGVSLKDLSANAMPYEEALSNGKPTVVEFYADWCEVCRELAPDVYKVEQQFKDRVNFVMLNVDNTKWEQELDEFGVEGIPHFAFLDKEGNEEGNVVGRLPRQYLLENVDALARGEASVPHARVVGQYSSAEARKVHQVADPRSHG

SEQ ID NO: 194212 - protein, 147 aa, Glycine max
  unsure (1)..(147): unsure at all Xaa locations
  Clone ID: PAT_MRT3847_17400C.1.pep
VAVVQKHVEQLDRPFHKISLHPLTLSIEECIYAAKEADDEIKXKLRLQETEGCFVDMKKRALNDRLMLAEKGFLDADGLQGKQWFKHLVFGPSSDHERINFFPGISDSTITSAGVSERERLASIQHEIWRVARAIRRAASALRGEFT

SEQ ID NO: 194213 - protein, 60 aa, Glycine max
  Clone ID: PAT_MRT3847_17401C.1.pep
SLSPSLKIFLKPYLPLPAPLRGFSHTDCVLDTGIGRQYELWGRQWTCRHKVSEEKDSVGP

SEQ ID NO: 194214 - protein, 161 aa, Glycine max
  Clone ID: PAT_MRT3847_17402C.1.pep
MPEMDGSSAKPPQISEMFQKFALAFKTKTFEFFSEEENNASPLLDDIDGFSLLDSTEEIITDQKVVVIKPDPDPSLKSPPSPPPESPPPPPPPPPPQITHPPPPPEFREPETPPPPPLTEAQIRETTHALISSVFAAVSAFEASYFQLQSAHGAVVEEHVT

SEQ ID NO: 194215 - protein, 231 aa, Glycine max
  unsure (1)..(231): unsure at all Xaa locations
  Clone ID: PAT_MRT3847_17403C.1.pep
MATSTKFDISSSSPDRPLYSGQRGSHIVPSLDRSGSFRESMESPILSSLPSMSRSSSSATQGDVVSFFSCVRFNLKLVAPEHKSNRQIDYKRLVSAAFGISPDDSPSSSGXSKQLSSPVPDDIKRLRDIFRWQGIVLRGIVRAKLFTTEMSRLYKDFQNIILKKRSRAATFSNERSGFTLNDRSVLGTSTGKVGVEGHAVTGGFEHDQPKLEERTKNVSNKRTRTSLVDVR

SEQ ID NO: 194216 - protein, 76 aa, Glycine max
  unsure (1)..(76): unsure at all Xaa locations
  Clone ID: PAT_MRT3847_17404C.1.pep
PQTFAVERKEHSIGNILGIQLHSDPNGLXVAYKVPPPMQLEILVRVRTPNQFWAKQAYNESINNLDRELDHLKNAF

SEQ ID NO: 194217 - protein, 97 aa, Glycine max
  Clone ID: PAT_MRT3847_17405C.1.pep
ICPLCALVSVVLNLCHAPISVLCIWLKRCVGISAMATSTKVDISSSSPDRPLYSGQRGSHMVPSLDRSGSLRESMERPILSSLPSMSGSSSLATQGG

SEQ ID NO: 194218 - protein, 193 aa, Glycine max
  unsure (1)..(193): unsure at all Xaa locations
  Clone ID: PAT_MRT3847_17406C.1.pep
AVGGSKDTPSKIWEPPPHRPRGKGRPPPNAKGGAQNGPPPRGKRGGEGGPKEPGRGGRPKEKKAPPPRGPGKTPPKRTPGKKPQREQRPGQVPAPTPGGPNLNQGPPPXGPQPPGPPPVGDSPGETPPPFGGKNGGFPPPPPQGPGEKKKGETPKFFPPPPKKKKKKKKKKKKKKKKKKKKKKKKKKKKKKRK

SEQ ID NO: 194219 - protein, 131 aa, Glycine max
  Clone ID: PAT_MRT3847_17407C.1.pep
KCVHYEKIGNSLLVFFFQQKYFYIIKKGIRASPMQVSSQVLNGKKPFLNFFFALEWVDLAECVPSWLRIVSYIRNHTMTETRAWLETRDATMVGDATCNRNGDARCDHGRRRNHGRRRDHGWRCYDGGRRC

SEQ ID NO: 194220 - protein, 95 aa, Glycine max
  unsure (1)..(95): unsure at all Xaa locations
  Clone ID: PAT_MRT3847_17408C.1.pep
FGVLDKNTFLWGHDIDKWAPIPMIYXMERALATWEIIVAACATALFGRLHKGIPPGGPSKGFEKTTYKRLQDEGVERKTRALSRLKAKEGLWPEA

SEQ ID NO: 194221 - protein, 67 aa, Glycine max
  Clone ID: PAT_MRT3847_17409C.1.pep
NILDCFFDWTGLTLIIHSQRLLFLPRMQCGQLNLSHEELKPHRLSKQKNPITKIFIKKKKNKRKKKE

SEQ ID NO: 194222 - protein, 59 aa, Glycine max
  Clone ID: PAT_MRT3847_1740C.1.pep
NPTSTNPHKPNHLHQPKPNPKPIKLKFKRVDRLGKSWKQGEKLSHCQMEFKTWMFMFFV

SEQ ID NO: 194223 - protein, 92 aa, Glycine max
  Clone ID: PAT_MRT3847_17410C.1.pep
HQAPGTPLPPCPFPYAPHTLAPRPIIAIRNLVESQNTYDTIYQYNILPAALTTNPAIAQYTSTCIFLSFHLLLYYGGLIIPTKYTSCDPSDT

SEQ ID NO: 194224 - protein, 35 aa, Glycine max
  Clone ID: PAT_MRT3847_17411C.1.pep
DFGYQELVRHRLSTQAVLEPFVIQSNRHVTWTDPI

SEQ ID NO: 194225 - protein, 217 aa, Glycine max
  Clone ID: PAT_MRT3847_17412C.1.pep
MSGPLSPKTSLEKSDRVGSLKKMLRNSLTRSKRRSSSKVMSVEIEDIRDAEESKAVDEFRQALVLDELLPEKHDDYHMLLRFLKARKFDLEKSKQMWSDMLQWRKEFGADTITEDFEFKELDEVLQYYPQGHHGVDKDGRPIYIERLGQVDATKLMQVTTMDRYIKYHVKEFERTFDVKFAACTIAAKKHIDQSTTILDVQGVGLKNFNKHARELIT

SEQ ID NO: 194226 - protein, 62 aa, Glycine max
  Clone ID: PAT_MRT3847_17413C.1.pep
TKQGGKANPVKKPKCDKRDYDEGDMSHIQKKREEENALRELRANAQQRGSFRGSALKKSGEI

SEQ ID NO: 194227 - protein, 216 aa, Glycine max
  Clone ID: PAT_MRT3847_17414C.1.pep
CICTKIYYFVDLFFCFCQSGRNSAEKMSKANAKNKSPSTELHPPYFEMIADAISSLKDRTGSSQPAIAKFIEDKHSKVLPPNFRKLLSVQLKKLVKSEKLYKVKNSYKLSSATDKETQKNTETEPKQKVEKKKKKKKKVGEKIKRLSQVKTPETLKKKAPTKKDAAATKKKSASAVEGSGGGKVKCLSQVKTPEALKKKKPNLTPKPSRPNRNARK

SEQ ID NO: 194228 - protein, 205 aa, Glycine max
  Clone ID: PAT_MRT3847_17415C.1.pep
RERTLGFSLELIFKSKPDMDPTKLHWMIGIMVCVTVVKFILMVYCRRFKNEIVRAYAQDHFFDVITNSVGLAAAVLAVKFYWWIDPTGAIIIALYTINTWAKTVIENVWSLIGRTAPPDFLAKLTFLIWNHHEQIKHIDTVRAYTFGAHYFVEVDIVLPEDMLLHQAHNIGETLQEKLEQLPEVERAFVHVDFEFTHRPEHKTMV

SEQ ID NO: 194229 - protein, 92 aa, Glycine max
  Clone ID: PAT_MRT3847_17416C.1.pep
EIVFLLFIFETEEPNQRENMISLAPLLLHTIHLILTLRSVYDFTPERFSHPHTHALINNPTLLSHQNQAEYVRALILRNSYTNFPKPLTLPL

SEQ ID NO: 194230 - protein, 100 aa, Glycine max
  unsure (1)..(100): unsure at all Xaa locations
  Clone ID: PAT_MRT3847_17417C.1.pep
MTRLEDNIKFSLFYVMEITRIGQWLSLLICVLLLLQTEGVPVGITFXNAVAKGAVCLDGSPPAYHFHKGSGAGINNWIXHFEGGGCNNVTTSFRRTLDYI

SEQ ID NO: 194231 - protein, 57 aa, Glycine max
  Clone ID: PAT_MRT3847_17418C.1.pep
TLKEDPVLAFNPFFPTGMAPPMKKPAPLRGGMAFPSKLGNFWAAFAFQKRLGPDAPL

SEQ ID NO: 194232 - protein, 130 aa, Glycine max
  Clone ID: PAT_MRT3847_17419C.1.pep
PMMPLDEKILFKVAQNLVEEWFNCVDKENSFEEVFLRPPLNGVEGLAFLERIPFATFEGLPNGLSPKNGEKGKRKLVFGDGEEMTLIPGTSVEEANTKLIVELEKSVPTLVGIECPKDEKLPRRKIFDKP

SEQ ID NO: 194233 - protein, 239 aa, Glycine max
  Clone ID: PAT_MRT3847_1741C.1.pep
MVQSKKFRGVRQRHWGSWVSEIRHPLLKRRVWLGTFETAEEAARAYDQAAILMSGRNAKTNFPITQTPEGDPKSTTSEDTPSTTSKDLEEILHAKLRKCGKVPSPSMTCLRLDPENSHIGVWQKRAGRRSDSNWVMTVQLGKKSVNVNNNDTHHQADSSSSSSLSSSLPSSEHHHIESPSLAVTGNLHHQEVVRGEIDEEERIALQMIEELLNDRNCPSPSFNNNIQERDGADHDHFFL

SEQ ID NO: 194234 - protein, 100 aa, Glycine max
  unsure (1)..(100): unsure at all Xaa locations
  Clone ID: PAT_MRT3847_17420C.1.pep
MLXPKLHSIKLGQLPNLTGGWPPIHPREVADYKKRAHSRAVATTFDDTKQDAIRGGTSQTLGKHYLIKLLSEKIKGEHKIVVPRTANVVHFASGTAKNNP

SEQ ID NO: 194235 - protein, 69 aa, Glycine max
  Clone ID: PAT_MRT3847_17421C.1.pep
QKCSFRSQSFDSLYLIDYIMIFLFWGGGGDFPICLRKTKGYTLWQKICEQMPLNTDFPNLFEENPNLEF

SEQ ID NO: 194236 - protein, 106 aa, Glycine max
  Clone ID: PAT_MRT3847_17422C.1.pep
FEFGAPKKKLIRCKPGVGNLEPPKRPPHFFFFIFFFFFFFSTKAVSLKLEYPSLGPTYNPKILLGPWGPSPNGWEFNPNHLKNNPGKLIGQPFQIRTTFNGPWNGS

SEQ ID NO: 194237 - protein, 32 aa, Glycine max
  Clone ID: PAT_MRT3847_17423C.1.pep
LEDRFVNELIMLIKEIRELLGTSSTQKLYCVL

SEQ ID NO: 194238 - protein, 33 aa, Glycine max
  Clone ID: PAT_MRT3847_17424C.1.pep
IFSSTPFARSAWFFHHQLIMVLHRELDQLRASP

SEQ ID NO: 194239 - protein, 507 aa, Glycine max
  unsure (1)..(507): unsure at all Xaa locations
  Clone ID: PAT_MRT3847_17425C.1.pep
MATPLAYQEHLPAAPSWLNKGDNAWQLTAATLVGLQSMPGLVILYASIVKKKWAVNSAFMALYAFAAVLICWVLVCYRMAFGEELLPFWGKGXAPALGQKFLTKRAIVNETIHHFDNGTVESPPEEPFYPMASLVYFQFTFAAITLILLAGSVLGRMNIKAWMAFVPLXXIFSYTVGAFSLWGGGFLYQWGVIDYSGGYVIHLSSGIAGLTAAYWVGPRLKSDRERFPPNNVLLMLAGAGLLWMGWTGFNGGAPYAANIASSIAVLNTNICAATYGFVKTTLGVIFFGKPSVIGAVQGMMTGLVCITPGAGLVQSWAAIVMGILSGSIPWVTMMILHKKSTLLQKVDDTLGVFHTHAVAGLLGGLLTGLLAEPALCRLLLPVTNSRGAFYGGGGGMQFFKQLVAAMFVIGWNLVSTTIILLVIKLFIPLRMPDEQLEIGDDAVHGEEAYALWGDGEKYDPTRHGSLQSGNTTVSPYVNGARGXDYKLMSQEIRLCLAHTCMCINLYD

SEQ ID NO: 194240 - protein, 49 aa, Glycine max
  Clone ID: PAT_MRT3847_17426C.1.pep
PLREDHRKGLPLYLTNHRQKVSSLSVESLSISTLLSLSISIPIFSDSLS

SEQ ID NO: 194241 - protein, 72 aa, Glycine max
  Clone ID: PAT_MRT3847_17427C.1.pep
IKLFVKVQICESHFVVRETKGNKMCHLQLLHTSSSWMYTYRGRPRGYNLMYPCMSRLSSSRLSPKVTSSGVD

SEQ ID NO: 194242 - protein, 120 aa, Glycine max
  Clone ID: PAT_MRT3847_17428C.1.pep
EGIPPDHQRFFFSGKQLKDGRTLFDFNIQKESTLPLGLGFCGGMQIFVKTLTGKTITPEVERSDPLDNVKAKIQGKEGIPPGQQRVIFAGQQLKDGRTLPDFNIQKESTLPLVLGFCGGF

SEQ ID NO: 194243 - protein, 76 aa, Glycine max
  Clone ID: PAT_MRT3847_17429C.1.pep
NSPFGGKPEISAAKSPSCPGWLTGGFVNSFKGVKKAGFDPIPQANDLFPPMNCRGLCFGPNRPELVFSNPFQIVGS

SEQ ID NO: 194244 - protein, 65 aa, Glycine max
  Clone ID: PAT_MRT3847_1742C.1.pep
MATATNAVAAPPRQLFQKEADIQMMLAADVHLDTKNCDFQMERNIFKHRNDEVVIIYINLQSCKL

SEQ ID NO: 194245 - protein, 61 aa, Glycine max
  Clone ID: PAT_MRT3847_17430C.1.pep
PTRPKSWSFNEHIQQRHDRVDGSCLPYSKEKMEGSITISYGGLHISRVLTVLRRCVMMLMG

SEQ ID NO: 194246 - protein, 66 aa, Glycine max
  Clone ID: PAT_MRT3847_17431C.1.pep
RVLEQNHRIKRPIRRPPLGTKLQTITTPNFLRPPPRVGGGTNPSSPVRGSFPTRRKGGRTLWSTPE

SEQ ID NO: 194247 - protein, 93 aa, Glycine max
  Clone ID: PAT_MRT3847_17432C.1.pep
RWPKPHPSPFCLSYSSTATCASPSPWRVQLTSSLRARPLRRLGFAAADPLLAASVSVRVAAVRGGRKGARGAVSMANKSVGDLNAADLNGKKV

SEQ ID NO: 194248 - protein, 61 aa, Glycine max
  Clone ID: PAT_MRT3847_17433C.1.pep
DVWRTHGGRGEKTRDLMLYTGHWKFNHFYGHYAYGKWFLCSLIGCMLWPSFVMASLYLDID

SEQ ID NO: 194249 - protein, 48 aa, Glycine max
  Clone ID: PAT_MRT3847_17434C.1.pep
ESLGTMVISKIRVTTLGSSGVISVQWNHFHTHQVMLANLVKKKIRHAR

SEQ ID NO: 194250 - protein, 72 aa, Glycine max
  unsure (1)..(72): unsure at all Xaa locations
  Clone ID: PAT_MRT3847_17435C.1.pep
XSGXITXGTXVLGSHXVLXXNXVSFXTXIRXRXXXFLYXXRQXXAXXIXSXMXXXXXKXAXYXLNXXVHPXH

SEQ ID NO: 194251 - protein, 87 aa, Glycine max
  unsure (1)..(87): unsure at all Xaa locations
  Clone ID: PAT_MRT3847_17436C.1.pep
RTRREQSNNHPSXATTKXXIVYYSTXGXVEKLXEEIKGGAGSXXGVGAXXXEXPXTLSXEVRXKMGTXPESDXXXITPXDXXXGDXL

SEQ ID NO: 194252 - protein, 139 aa, Glycine max
  unsure (1)..(139): unsure at all Xaa locations
  Clone ID: PAT_MRT3847_17437C.1.pep
LATMKSFFGAVEDSSAPGGWRHVPERIPDNWFSRVEPYKNMDVTNEILAQYLKYPKLFGGNVGTNNFDALSTPFDILVDGKLPNDVTAAQLLCLLYQLGVMAVPSTLSTVTDITGAVLDFGIGKLNPVFKNAGCPXKVG

SEQ ID NO: 194253 - protein, 59 aa, Glycine max
  Clone ID: PAT_MRT3847_17438C.1.pep
KETRHRGSKKTRTQSIINAANVTVVRSPAIHSTRPGYTASAPFFSSPRSRPCINKQSNG

SEQ ID NO: 194254 - protein, 42 aa, Glycine max
  unsure (1)..(42): unsure at all Xaa locations
  Clone ID: PAT_MRT3847_17439C.1.pep
RTXSENAPSLFSRGQCSXESLKPGALSSLPSGEPGPXXIVMD

SEQ ID NO: 194255 - protein, 45 aa, Glycine max
  Clone ID: PAT_MRT3847_1743C.1.pep
SGIAGAIHAIAKQRFYFLRGPHKTPTVAEYYILNTAFTCPNYGLK

SEQ ID NO: 194256 - protein, 43 aa, Glycine max
  Clone ID: PAT_MRT3847_17440C.1.pep
LIQLMPAIYSSCWYNLSWECHTCTRKRLLLYKPCFTPTMPSNS

SEQ ID NO: 194257 - protein, 49 aa, Glycine max
  Clone ID: PAT_MRT3847_17441C.1.pep
CDKIACYSLKFKFSLYLRQLRQFSCYLCSDNTIFCMKFSFLAPLFSKKK

SEQ ID NO: 194258 - protein, 87 aa, Glycine max
  unsure (1)..(87): unsure at all Xaa locations
  Clone ID: PAT_MRT3847_17442C.1.pep
MSSTFSPLLNLIAVFLLLFXFLHTCEAHDPFPFDPKNLSTQNIPFCNASLPIPQRVKHLLSRLTLQDKLKLLVNNPSTLPKLLIKTY

SEQ ID NO: 194259 - protein, 155 aa, Glycine max
  Clone ID: PAT_MRT3847_17443C.1.pep
GWAGFNGGDPYAANTDSSMAVLNTNICAATSLLVWTWLDVIFFKKPSVIGAVQGMITGLVCITPGAGLVQGWAAIVMGVLSGSVPWFSMMVLGKKLKLFQMVDDTLAVFHTHAVAGLLGGILTGLFAEPRLCALFLPVTHSKRGVYGGPGGVQIP

SEQ ID NO: 194260 - protein, 69 aa, Glycine max
  Clone ID: PAT_MRT3847_17444C.1.pep
NVKGYLLIIIAMRTLYQKCKLGALYLREYHILYFEGHLYIIDVSQADDPEHPHAFVFLSEHCFHKTYFF

SEQ ID NO: 194261 - protein, 649 aa, Glycine max
  unsure (1)..(649): unsure at all Xaa locations
  Clone ID: PAT_MRT3847_17445C.1.pep
GPAPMVALVHHFSPYLQDWGTFDHLQKQHLDNPKDDNIAQQAAKQRFTLENFVRLSESLKTSSCGERIKDIILEKGITKTAMTHLKDSFANTGQAGFKNSAEWAQGLTLPSVPLILSMLRGLSMGHLLTQKCIDEEGILPLLHALEGVSGENEIWERAENLLDTLSNKEGKGDGFLEEKVCKLRDATRDEMKRRALRKREELLQGLRMRLEPSSDGGERIVVSQPVLEGLEDVQEEDGLACMVCQEGYSLRPADLLGAYSYSKRVNLGVGSSGXSARGGECVYXSASDSQLTPGTEEIVQFRTDAALKNPKKEWDGATRRNNECLCNSLFPVRGPSVPLAQYVRYVDQYWDNLNALGRADGSRLRLLTYDIVLMLARFATGASFSADCRGGGRESNSRFLPFMIQMACHLLDQGNPSQCRTMARAVSAYISSSSSDLRPSSPSGTQPMPGTEETVQFMMVNSFLSESYGSWLQHRCAFLQRGIYHAYMQHTHSRSATRAPSVTAPAQGVESGSMDQTATTETGQSDLLSIIRPMLVYTGLIEQLQRFFKVKKSTSATPPARTEGASSTIEGEDESGNLEGWEVVMKERLLNVKELLEFPKEMLSWLDEINSATDLQEAFDIVGVLAEVLSGGFTRCEDFVQAAINAGKS

SEQ ID NO: 194262 - protein, 177 aa, Glycine max
  Clone ID: PAT_MRT3847_17446C.1.pep
MLPNNPSTIVPDAVARHHTHVVSPHQCCSAVVQEIAAPVSTVWSVVRRFDNPQAYKHFVKSCHVILGDGDVGTLREVRVISGLPAAVSTERLDVLDDERHVIGFSMVGGDHRLFNYRSVTTLHPRSAAGTVVVESYVVDVPPGNTTEDTRVFVDTILRCNLQSLAKFAENLTKLHQR

SEQ ID NO: 194263 - protein, 73 aa, Glycine max
  Clone ID: PAT_MRT3847_17447C.1.pep
AFFLPTKFSVPVHVDGATKLFDQTCFLDVKGTCPEKGTQEGLGMGGSLVDQKLANTWEGGSPKAPLKGWKEED

SEQ ID NO: 194264 - protein, 527 aa, Glycine max
  unsure (1)..(527): unsure at all Xaa locations
  Clone ID: PAT_MRT3847_17448C.1.pep
MVSPISLIVLLLSVSLADSASVQESFVQCLNLNSDKTFPFYSSIYTASNPSFTSILDSSAQNLRLLVPSVPKPEFIFTPSRDSHVQAAVICSKKLGIHIRVRSGGHDYEGISYVSEIETPFIVVDLVKLRGIDVDVKSNTAWVQAGATTGEVYYRIYEKSSVHGFPAGLCTSLGIGGHITGGAYGTMMRKYGLGVDNVLDAQIVDANGRVLDREAMGEDLFWAIRGGGGGSFGILLWWKIKLVPVPPTVTVFTVTKSLEQGATXILAKWQEVAPYIDENLFIRVIIQPSSDARNKTQRTIATSYNALFLGGARTLLQVMKTSFPELGLTIKDCLETSWIKSVLYIAGFPSDTPPEVLLKGKSTFKNFFKAKSDFVREPIPETGLEGLWQRLLVEDSPLMIWNPYGGRMSQFSESETPFPHRNGTLYKIQYLSLWQEGDKNAAKHIDWIRKLYNYMGPYVSSLPREAYVNYRDLDLGINTKNSTSYIQASAWGYRYYKNNFDRLVKIKTKVDPENVFRHEQSIPPLPL

SEQ ID NO: 194265 - protein, 118 aa, Glycine max
  Clone ID: PAT_MRT3847_17449C.1.pep
LLRAVIDAGPLLKSLLFAGPLPTWRNPPHLQNIKVPPLAIKKCDATCIVPNTFGEIGNSLLKPKLPPLHYSNAPSSCSASMLNFAGQTTGSWNNNAWQLNSNPGVSIQVPSSKKKRHQ

SEQ ID NO: 194266 - protein, 62 aa, Glycine max
  Clone ID: PAT_MRT3847_1744C.1.pep
NTQRYSSISSVALGSMSTTISSLPFSLPLRQKSRVRLLIDSRLLVHPCRQSPFLKDHVVFCC

SEQ ID NO: 194267 - protein, 45 aa, Glycine max
  Clone ID: PAT_MRT3847_17450C.1.pep
VMRAQTRGVEPRTHAEHMSLIAHHGETDSWRVTTLGNSKHWADSG

SEQ ID NO: 194268 - protein, 58 aa, Glycine max
  unsure (1)..(58): unsure at all Xaa locations
  Clone ID: PAT_MRT3847_17451C.1.pep
YFYLFPXCIYXXXKXPKTPXLPPTXMXIXINNIACNTTHETSPXNIRWDFLCPPPXSK

SEQ ID NO: 194269 - protein, 169 aa, Glycine max
  unsure (1)..(169): unsure at all Xaa locations
  Clone ID: PAT_MRT3847_17452C.1.pep
LSGEIPKSYGRLAQLNFLDLSNNNFNGSITRXLGDCNRLPSLNLSHNNLSGEIPFELGNLFSAQIMLDLSSNSLSGAIPQNLEKLASLEILNVSHNHLSGTIPQSFSSMLSLQSIDFSYNNLSGSISTGRAFLTATAEAYVGNSGLCGEVKGLTCPKVFLPDKSRGVNK

SEQ ID NO: 194270 - protein, 102 aa, Glycine max
  Clone ID: PAT_MRT3847_17453C.1.pep
VLDSEESAAVQVYEQLQVHQVGCIPVLFQKEGLCVTQYQASLGPAIGQHERQHWCCLCGKQENISVSFNDLVRAVRYFHWPNPPGSMRQMSCCSQIRPQPQG

SEQ ID NO: 194271 - protein, 125 aa, Glycine max
  Clone ID: PAT_MRT3847_17454C.1.pep
YPVFCSQNLLVKMEAYRKSHRGSSMRGKSLPFYRNAPKLASSTTVQYTTTASDIKTNHYSSSPASVGFVVHEDYATTKRNPKLRIVVADSRSNLDELYRQPADESVDTKAEIYIAMVQKRLMLER

SEQ ID NO: 194272 - protein, 87 aa, Glycine max
  Clone ID: PAT_MRT3847_17455C.1.pep
MPPTLNESKKAREHIAVAVTSLTQKAKKEDNFSVDNVIRVLQAIPDLDDDLILDACDFLEDETRGRMFLALASPLRKKWLLRKLRSQ

SEQ ID NO: 194273 - protein, 52 aa, Glycine max
  Clone ID: PAT_MRT3847_17456C.1.pep
IIRGLSTRLMGSPRIILKRAHENPFNGMHVHPIRYLPELSMYEELASWTLVK

SEQ ID NO: 194274 - protein, 42 aa, Glycine max
  Clone ID: PAT_MRT3847_17457C.1.pep
IILIFKFFFLKTFILTTILIMTFHTFFLNFQILIPNKTYTFI

SEQ ID NO: 194275 - protein, 66 aa, Glycine max
  unsure (1)..(66): unsure at all Xaa locations
  Clone ID: PAT_MRT3847_17458C.1.pep
FXKCXKGISLSCYXISXAXXMXGRVESXXLWIXXTMXXCYQXXXIXQSGXXQARAEFRAXVRVXAT

SEQ ID NO: 194276 - protein, 100 aa, Glycine max
  unsure (1)..(100): unsure at all Xaa locations
  Clone ID: PAT_MRT3847_17459C.1.pep
ALPGPKDMMSANSVGIISMLHSALRVYVTTLFCDLRAAXNAIELHNESDGNQLHESVLLWHDXRTVQYVCSGGNHIGGCETTTARHTHWKLVPQLIPAGA

SEQ ID NO: 194277 - protein, 70 aa, Glycine max
  Clone ID: PAT_MRT3847_1745C.1.pep
EYGRDLCVSLLQDRAVNSLGRIEPLAIIAENSPRILLRTLQRAFPGGFADTTLNEGFCARPAEIAHRGCL

SEQ ID NO: 194278 - protein, 176 aa, Glycine max
  Clone ID: PAT_MRT3847_17460C.1.pep
ARDLTHDLNSRSHHHRRQPPHRATVIPRLLHDAHHHHSPNTRTTAHSPTPARSTWDLLNAHTPPRSDLTPTPLSAPAPRLPQNHPCTSVLSAARPHYHHVQTPLWRFSFSMSSVQRHSSFCKKKKKKHYITVVRFWCTICNKIILMLWYFLFSPHLYKESTIPLHNGGMNGFEYLK

SEQ ID NO: 194279 - protein, 72 aa, Glycine max
  Clone ID: PAT_MRT3847_17461C.1.pep
THPDTLKAGLAEFISTLIFGVTDSSSGITYNKLTDNNTTTPANLISASITHTFALFITSSVDTNISNDHINP

SEQ ID NO: 194280 - protein, 89 aa, Glycine max
  unsure (1)..(89): unsure at all Xaa locations
  Clone ID: PAT_MRT3847_17462C.1.pep
FSSAEEAYNTLTVELDKSAPTLIGIERSKDDNPFLGIICDKPKTRCLSILHVEPNLPGLHKLPNSVRLIMNKRDKLNXQVVINPYSMDW

SEQ ID NO: 194281 - protein, 36 aa, Glycine max
  Clone ID: PAT_MRT3847_17463C.1.pep
KKSMRFDWQSGVTIVMCLTANSNEMFHENPVLCRFR

SEQ ID NO: 194282 - protein, 97 aa, Glycine max
  unsure (1)..(97): unsure at all Xaa locations
  Clone ID: PAT_MRT3847_17464C.1.pep
KXEPRRKTQGGRALPPPPRXLRLLPPLRPRLEPVDREKPVRYWLRVXFPKIGSPLSLEDLAVRXGKEPKAEVQIYPLERPLPLRDLTDLCQKKCSGW

SEQ ID NO: 194283 - protein, 139 aa, Glycine max
  unsure (1)..(139): unsure at all Xaa locations
  Clone ID: PAT_MRT3847_17465C.1.pep
ATEKATRAGCQAPKQATMRKPRWVTRGRFXAGQRLVTPGKNVNIMGLGTIRPLPNEHSKHLRXXHGSQKHRTMGKSENQNSXPTPHSCPXXKTDWXVVXXQSQXQLHVSQCGQRXPCVXWXEADMYSREPNLSFKATWH

SEQ ID NO: 194284 - protein, 46 aa, Glycine max
  Clone ID: PAT_MRT3847_17466C.1.pep
GRPNKKGRLKPEIVKRGGPQPIHGQLGTKLEDMGTKTGGNKTHTKQ

SEQ ID NO: 194285 - protein, 49 aa, Glycine max
  Clone ID: PAT_MRT3847_17467C.1.pep
FIYFPFGKKKGLTGHCYKLSAHFTSQHQYRLVKGGQRFTSRPIMKLEWG

SEQ ID NO: 194286 - protein, 50 aa, Glycine max
  Clone ID: PAT_MRT3847_17468C.1.pep
LPGFAQLNTKKEKKRFNFQQKKEGRKNASGFIKKGTESEGLMILVIICLA

SEQ ID NO: 194287 - protein, 333 aa, Glycine max
  unsure (1)..(333): unsure at all Xaa locations
  Clone ID: PAT_MRT3847_17469C.1.pep
MAAIFSSSLFASSPLPKPLSSSYSRIHTAPQLFRARSSLLQDNEKKVIVHDSFPSKTSPLHTADKSTGGNSINTSAFEKRIIKVEQSVNIFLTDSVIKILDTLYHDRHYARFFVLETIARVPYFAFMSVLHMYESFGWWRRADYLKVHFAESWNEMHHLLIMEELGGNAWWFDRFLAQHIAIFYYIMTVLMYAVSPRMAYHFSECVESHAFETYDKFIKVQGDEXLKKMPAPEVAVNYYTGDDLYLFDEFQTSRVPNSRRPKIKNLSDVFVNIRDDEAVHCKTMKACQTHGNLRSPHSYAEDDDSSVCALEADCEGIVDCIKKSVTFNAAKVK

SEQ ID NO: 194288 - protein, 345 aa, Glycine max
  Clone ID: PAT_MRT3847_1746C.1.pep
NPSALRGPVLLTPWVGGGEAGGREIVDRARRAAPRVPFVHPLKFEKFGMSPSKGVLFYGPPGCGKTLLAKAIANECQANFISVKGPELLTMWFPAREANVREIFDKARGSAPCVLFFDELDSIATQRGSSVGDAGGAADRVLNQLLTEMDGMSAKKTVFIIGATNRPDIIDPALLRPGRLDQLIYIPLPDEDSRHQIFKACLRKSPVSKDVDLRALAKYTQGFSGADITEICQRACKYAIRENIEKDIERERRKRDNPEAMEEDDVEDEIAEIKAAHFEESMKYARRSVSDADIRKYQAFAQTLQQSRGFGSEFRFADSTSAGGTAAASDPFSSAGGADEDDLYN

SEQ ID NO: 194289 - protein, 67 aa, Glycine max
  Clone ID: PAT_MRT3847_17470C.1.pep
KRQMLWRTTARRQLAHFTSGVRHHSPVFVPPGTMSFLLFFLFFFFFFFFFFFFFFVFKSSYTIIYQN

SEQ ID NO: 194290 - protein, 65 aa, Glycine max
  unsure (1)..(65): unsure at all Xaa locations
  Clone ID: PAT_MRT3847_17471C.1.pep
KVPRTPIEKSKAMKEKGWLFCWKRTTPFVLKWGVTVCGHPLHXVSLSSNPCWLEPNSELTYACXR

SEQ ID NO: 194291 - protein, 38 aa, Glycine max
  Clone ID: PAT_MRT3847_17472C.1.pep
FKFIAVLLSIHNIIVLINIKKTEIEKDFCPHYLLSHKS

SEQ ID NO: 194292 - protein, 86 aa, Glycine max
  Clone ID: PAT_MRT3847_17473C.1.pep
TTRVPSWVGFYEAYFFLIKTKPRKNKASASREGGGAVTKITGGEGGGGKLQQPGAARRRNGSAQCEGRGRRRESSHRERGGRRRGQ

SEQ ID NO: 194293 - protein, 65 aa, Glycine max
  Clone ID: PAT_MRT3847_17474C.1.pep
VCTVSSESIDYACHLTQYSMVCFYKKSSLRDGISSVGRVSRQLYEVHSVHPTDTQCCRSRRVSTG

SEQ ID NO: 194294 - protein, 77 aa, Glycine max
  Clone ID: PAT_MRT3847_17475C.1.pep
GKRKAKAKPPPKKQRDKLNTAFSCPFCNHGSSVKCRLDMKNLIGKAICGICQKSFSTTITVLSKPINIYREGIDECE

SEQ ID NO: 194295 - protein, 81 aa, Glycine max
  Clone ID: PAT_MRT3847_17476C.1.pep
CKNSRFSWHCSNLCSLCNSACNNPFQKKPRPVISTKTMGHLGASLNCHYPKLAPGWFGPKKCVWEKKKGYPPQWISQKKIF

SEQ ID NO: 194296 - protein, 98 aa, Glycine max
  Clone ID: PAT_MRT3847_17477C.1.pep
CVNYLFFELIMYTSRVSCNYKRSHIRSLLTFIIVTILTMMIPLIESKNFYTNIFLVQYDTICVLNSLLLLLHLCLEYDKVFKERGNHDYNHWLWNINY

SEQ ID NO: 194297 - protein, 52 aa, Glycine max
  unsure (1)..(52): unsure at all Xaa locations
  Clone ID: PAT_MRT3847_17478C.1.pep
NWFQNFKPPLNLNGWXKVPFPLITIKFFSLIFNKLKGFIKLKFEKNEINFYP

SEQ ID NO: 194298 - protein, 111 aa, Glycine max
  unsure (1)..(111): unsure at all Xaa locations
  Clone ID: PAT_MRT3847_17479C.1.pep
MGSGNEVHSIVEFNLDAKWLIDPKQLFVGPKIGEGAHAKVYEGKYKNQNVAVKIIIXGETPEQISRREARFAREIAMLSRVQHKNLVKFIGACXEPVMVIVTELLLGGHCA

SEQ ID NO: 194299 - protein, 227 aa, Glycine max
  unsure (1)..(227): unsure at all Xaa locations
  Clone ID: PAT_MRT3847_1747C.1.pep
MGKKLDALLGRTFKVAKFKAIVNLAISRLAVLKNQRQARLRQARSDILELLQIGHLERASLLQEIRAILTSRFGKEFAARSIELRNNCGVHPQFILKLSTKMPRLXCRMKVIKDISIEDGKVLAFEDASVSDVEESCVEEQNQHESEKKEENVSMLPNRGKDEKLTDSYKGRKKYKDVADAAQAAFESAEYAAAAARAALELSRSESHDPDDHYSPRLQPRKVEDET

SEQ ID NO: 194300 - protein, 346 aa, Glycine max
  unsure (1)..(346): unsure at all Xaa locations
  Clone ID: PAT_MRT3847_17480C.1.pep
MSPAWLLLLTQILLVAEAKKNVPAVIVFGDSSVDSGNNNVIATVLKSNFKPYGRDFEGGRPTGRFCNGRVPPDFIAEAFGIKRAIPAYLDPAFTIKDFATGVCFASAGTGYDNATSAVLNVIPLWKELEYYKEYQAKLRAHVGVEKANEIISEALYLMSLGTNDFLENYYVFPXRRLHFTVSQYQDFLLRIAENFVRELYALGVRKLSITGLVPVGCLIVHNWSCILGDDGCNEEYNNVAMSFNRKLENVITKLNRELPRLKALSANAYSIFNDIITKPSTYGFEVVEKACCSTGTFEMSYLCSDKNPLTCTDAEKYVFWDAFHPTEKTNRIVSSYLIPKLLETFR

SEQ ID NO: 194301 - protein, 47 aa, Glycine max
  Clone ID: PAT_MRT3847_17481C.1.pep
VNVTTLSCIVLNTFFWGSQSPNGNFASYLKFFVESLSTKSDHFNIST

SEQ ID NO: 194302 - protein, 101 aa, Glycine max
  Clone ID: PAT_MRT3847_17482C.1.pep
KLENVITKLNRDLPQLKALSANAYSIFSDIITKPSTYGFEVVEKACCSTGTFEMSYLCSDKNPLTCTDAEKYVFWDAFHPTEKTNRIVSNYLIPKLLATFR

SEQ ID NO: 194303 - protein, 58 aa, Glycine max
  Clone ID: PAT_MRT3847_17483C.1.pep
AYKHRVANQSQNNQRKACPQASHSSLSHTHTFTLSLSYSSKLLPLPVEKVKLKKQNEE

SEQ ID NO: 194304 - protein, 109 aa, Glycine max
  unsure (1)..(109): unsure at all Xaa locations
  Clone ID: PAT_MRT3847_17484C.1.pep
VPKSIRLNDMSFSVFNEGLTESEMSSHMNSLASKNKCFKSYIGMGXYNTHVPPVILRNIMENPAWYTQYTPYQAEISQGRLESLMNFQTMISDLTALPMSNASLLDEGT

SEQ ID NO: 194305 - protein, 51 aa, Glycine max
  Clone ID: PAT_MRT3847_17485C.1.pep
THFLISAPLAVMEESESFAPCHGGISNITLSRLLNFSCLSCATLSLLVRAR

SEQ ID NO: 194306 - protein, 62 aa, Glycine max
  unsure (1)..(62): unsure at all Xaa locations
  Clone ID: PAT_MRT3847_17486C.1.pep
RPRQLKLPRIKEGTPAFVESKNPLRRWPSHWATPKDGRNLXYAFFSVKKSILSLTCDSNLYA

SEQ ID NO: 194307 - protein, 239 aa, Glycine max
  unsure (1)..(239): unsure at all Xaa locations
  Clone ID: PAT_MRT3847_17487C.1.pep
MLELVLLYKNPLLHTSLTLILAFTFAFFKIPLFFLHGLQTYIHPDSQPQSNNGLRAAIRRPGSIDSYQPLSSKTAAELKKRNKSNNKSDFDENNAQIFRITLDHAHLQSRLFIDQYCVAFTLSFAALSTLFLHTFLDSPQNRGFFSNGVFVPVLLSILSLYSWGSLLAKTTFERSASRRFEKQLSVVLGGLGFXLGLLFAPEGLALVLEFRSGVQFDGFWRVFVAALMGCLSGFLLIPA

SEQ ID NO: 194308 - protein, 291 aa, Glycine max
  unsure (1)..(291): unsure at all Xaa locations
  Clone ID: PAT_MRT3847_17488C.1.pep
MVSLDSAFGRHHACSGSWVPLSWLPLLSRSVGFGLLCRGIRTFGYNAKKLPLGKLSKSTILKGYEVLKRLANVIDKGDRKVLKQLSGEFYTVIPHDFGFKKXEFVIDTPQKLKRKLEMVEALAEIEVATKLLKDDAEMQGDPLYTHYQRLHCELAPVEFGCVEFHLIEEYTKNTHAETHSNYTVDIVQIFRTSREGEAERFRKLARTRRCCPWSLGSPRTCGSARCSPGLPLAPPGPPGPAFVLGMRGFFAGAVSDAPYCSLASRSADDGVPPLRVLGSWLLHLLLLRKAR

SEQ ID NO: 194309 - protein, 81 aa, Glycine max
  unsure (1)..(81): unsure at all Xaa locations
  Clone ID: PAT_MRT3847_17489C.1.pep
FILFAQFPTSPFKMQIFVKTLTGKTITLEVESSDTIDNVKAKIHDKDXIPPEXQRRIFPGNHLKDGRTLADSSVRRDSPLH

SEQ ID NO: 194310 - protein, 372 aa, Glycine max
  unsure (1)..(372): unsure at all Xaa locations
  Clone ID: PAT_MRT3847_1748C.1.pep
MENCVFHHHLRSMITLPQPPSTPLFPKVMRVRASAGRRHCEFSSQNAPLEPRSLVGKFLSGVLQNRRQLFHVVAKEELKMLSDDRDSALARMHLSQHSDEALLHRRIAQVKENESMIAIADVMYLLILYKFSEIRVNLVPKLSSCLYDGRLEILPSKDWDLESIHSLEVLDIIRKHVSTVTGLRSNPSVRESWKTTPIRQVWLAQVYVASILYGYFXKSVSLXYNLERSLSLSDHDFHHGHKISPSFHDMYHSGAKDVMFGPKSDTQSVWHGLIGQEEEIGDLKCYVPGFPPGSFEKCAQLRSKEAVLLVESHSNALFGDGKFGLSQHDDIIGTSFSSLRGLVLEAVAFGSFLWGPEDSIARVYKLKDQEVE

SEQ ID NO: 194311 - protein, 97 aa, Glycine max
  unsure (1)..(97): unsure at all Xaa locations
  Clone ID: PAT_MRT3847_17490C.1.pep
NRRSRTALYTVSQTCPQTSNDALKTQQQRSYFDDTSLQCLYTSIKNGLETLMHLEQXTTHVTDHPTSDHYATLQRSSLRSIAAQSTLTLPLYVLVHT

SEQ ID NO: 194312 - protein, 89 aa, Glycine max
  Clone ID: PAT_MRT3847_17491C.1.pep
HPHHHHHHHHHHHHHHHHANTVPSCAHEYFLFDLSPSSKSPSYPTYHPSPTGGGRQPQPWYQSRRLHQAQWRGRIEDQIPKHSSRRDGG

SEQ ID NO: 194313 - protein, 50 aa, Glycine max
  Clone ID: PAT_MRT3847_17492C.1.pep
GPDITVPIVSMLEHENYSLVIPRSVLLYRDTALDIHLIASIYVAIKPTEV

SEQ ID NO: 194314 - protein, 71 aa, Glycine max
  Clone ID: PAT_MRT3847_17493C.1.pep
IFSLAKRNFQNNKGNDKNYRNVSNKSRSCDNGGSSQKTIYLQLVISSLSYSKYKNNSITKFARFSAYLFHC

SEQ ID NO: 194315 - protein, 86 aa, Glycine max
  unsure (1)..(86): unsure at all Xaa locations
  Clone ID: PAT_MRT3847_17494C.1.pep
ASEASAEMSEDLSGRRXGEPLSDVAAHGGVGYFNRSRLLRIMAAEAMESLGKSQKGKKLDSVLSSRQGLIRGENMDAGRDXSDTGG

SEQ ID NO: 194316 - protein, 38 aa, Glycine max
  Clone ID: PAT_MRT3847_17495C.1.pep
FPKFNLLMEIRPRSLLVHHFNAISPQLAYINFLWTNST

SEQ ID NO: 194317 - protein, 34 aa, Glycine max
  Clone ID: PAT_MRT3847_17496C.1.pep
FINCYQCSVPLKCGMAHKMLKGRPQAGQLVSPLV

SEQ ID NO: 194318 - protein, 142 aa, Glycine max
  unsure (1)..(142): unsure at all Xaa locations
  Clone ID: PAT_MRT3847_17497C.1.pep
MATATMATAAGAAALLYYTLNRKLQTHDAIDEDGEENGSDTPTDTPLGIGRVSHRLIQAPATWLETISTLSETLRFTYSETLGKWPIGDLAFGISFLLKRQGNYHVDSEFCGTDSVQLKGSEITAELKYLLNLLTLXCWHFS

SEQ ID NO: 194319 - protein, 568 aa, Glycine max
  Clone ID: PAT_MRT3847_17498C.1.pep
MEVFFSQCVPLYKHALDGNWQAAKHILDANPALKTAAIAPGWPTVLHVAAGTNHYHFVEELLNILDNDAIQLQDKKGNTAFCFVAAAGNWRIAELMQKRNILLPTVKGGDGMTPLHFAALQGRCPMACKLYPMTKEMFDDEDWELLFFTCIKTCNYHLALKMVRDRKELAFARDGNNGEEKKGGIALHLLAQNQKPLDSCCHCHQHQIPVKINPGMKQHVFLQLVNFLWNTLLENIDSKSKILDIISEPSHLLFDAAEVGNFGFLSELISAYPSLIWEVDSRNRSIIHTAVLNRHASIYNLIHEIGSIKDIIVTFAGEEDENTLLHLAAKLAPPSQLELVSGAAFQMSLEISWFEEVNKIMPPSFRWMKNSEGLTARELFTKEHADLRKNAESWMKRTAESCMLISTVIATGVFSAAISTPGGMNDESKEPNYLDKTSFLIFAVSDATSLISSATAILIFLSILISRYAEYDFHKSLPLKLIFGLISLFISITSMMVAFGCSFFITYYYGMKWVPSFISVLACLPILLFIGLQFSLWSVIIYSTYYCKALFKPGKKMLYVVERKGYNV

SEQ ID NO: 194320 - protein, 128 aa, Glycine max
  Clone ID: PAT_MRT3847_17499C.1.pep
MAVALTSCISSSWGLFSTVKFRYSLRHRPIVASFYNNNNYPLRLSSSSSSSSKSNRQKEGVGQKKQSKDERPARGNVLEPQQTSSSKPFGIQRKNKDLIFDSKDQQVEPSALQDSAFLNAVVKVYCTH

SEQ ID NO: 194321 - protein, 233 aa, Glycine max
  Clone ID: PAT_MRT3847_1749C.1.pep
VLKDIASENGIVLQLEETSVSVEEQSSVEKQNQHESEKKEENVSMLPNRGKDEKLTDSYKGRKKYKDVADAAQAAFESAEYAAAAARAALELSRSESHDPDDHYSPRLQPRKVEDGHDDVRPQMEEKEILSETQREDELKKSKDIISCNSTDEVLKGATALVDGEIEADPLEKEVIFDDSDDENDNKQNINQSSKQTSSGYGAGIVVNTVPGSKMQNAPQLDLQKRPISVRTR

SEQ ID NO: 194322 - protein, 221 aa, Glycine max
  Clone ID: PAT_MRT3847_174C.1.pep
MDKLFFNYCFVGYCLLYSLLLVHGKQLSCNETPYPRVCKHYIETTNTLSALDASPSYSFHDMALKVTMEQAMEAYKLVSNMDLNNFKDKRAKSAWEDCLELYENTLYQLKRSMNSNNLNDRMTWQSASIANHQTCQNGFTDFNLPSHLNYFPSMLSNLSGLLSNSLSISKAMTLRSLSSSPTTKQSGGRKLLSDGFPYWLSRSDRKLLQETASKADVVVAQ

SEQ ID NO: 194323 - protein, 106 aa, Glycine max
  unsure (1)..(106): unsure at all Xaa locations
  Clone ID: PAT_MRT3847_17500C.1.pep
FSTGYEGCNGGFLLPCVPLYKHALDGNWQAAKHILDAXPALKTAAIAPGWPTVLHVAAGTNHYHFVEELLXILDIDAIQLQDXKGNTAFCVVAAAANWRIAELMAE

SEQ ID NO: 194324 - protein, 82 aa, Glycine max
  Clone ID: PAT_MRT3847_17501C.1.pep
LTASVLEQPIAQLQQQSLAHLTIQTIATQQQQALSHLAVVNPIAYLRQQLLASNPLALANVAAYQQQQQLLQFLPALSQLAM

SEQ ID NO: 194325 - protein, 40 aa, Glycine max
  Clone ID: PAT_MRT3847_17502C.1.pep
HNLLQCIYHAPHHSNGVINHALSSLTLQVHADKLWSLILK

SEQ ID NO: 194326 - protein, 32 aa, Glycine max
  Clone ID: PAT_MRT3847_17503C.1.pep
RFPIIMRFSGTYLGLYRPAHTGLLPSSKNKEK

SEQ ID NO: 194327 - protein, 85 aa, Glycine max
  unsure (1)..(85): unsure at all Xaa locations
  Clone ID: PAT_MRT3847_17504C.1.pep
QDIQXLVCDNGTGMVKAGXAGXDAPRXXXPSXXGRPXHTGVMXGMGXXXAYVGXEAQXQRGXLXLXYPIEHXLVXXWGGKTLIVL

SEQ ID NO: 194328 - protein, 82 aa, Glycine max
  unsure (1)..(82): unsure at all Xaa locations
  Clone ID: PAT_MRT3847_17505C.1.pep
GELGKGAWDLRNQLPLTPVWEKEWLAWANVALNLSSLWSSLSFIRDGSXGITSSFIRSEWPAVDIPLDXEAFAVPKGXXAPX

SEQ ID NO: 194329 - protein, 201 aa, Glycine max
  Clone ID: PAT_MRT3847_17506C.1.pep
YAIKFILNLDGPDPGADDLKVINGLIDMYAKCQSTEVARKMFDSVSPKDRDVVTWTVMIGGYAQHGDANNALQLFSGMFKMDKSIKPNDFTLSCALVACARLAALRFGRQVHAYVLRNFYGSVMLFVANCLIDMYSKSGDVDTAQIVFDNMPQRNAVSWTSLMTGYGMHGRGEDALRVFDEMRKVPLVPDGITFLVVLYAC

SEQ ID NO: 194330 - protein, 103 aa, Glycine max
  Clone ID: PAT_MRT3847_17507C.1.pep
NWETPRGSPPCGIEKPVPKEVNRGPPKKREKARQSQGPNDGKPKSRAPPFILTLYYCLSFSDAFVFKLWLFLIFFIFFFFFFFFFFFFFFFFFFFFFFFFFLI

SEQ ID NO: 194331 - protein, 261 aa, Glycine max
  Clone ID: PAT_MRT3847_17508C.1.pep
MSSATAPRRRSAGVSGGSPSPQPGAAAPRSMTRGPGPPCQRLGGLFLATEMKRHTTAGGGSLFGRARRFAFSAPRNRDPRSMTRGPRPPVSAIGPLFLAEMKGHTTAGDGPRVSDWAVVFSGDEGAHYRGWRFTPRGSSALGGPPTICMTCGPGPPCHRLGCFSARRARFPAASQGANGSVFLEKGFTPRAVVTLSHSFQLMRPFAFEFSAPHCICAPLLSAAVVAMALPVHPGRFQSEVALNLVRNLLGWGAPVFDGRIR

SEQ ID NO: 194332 - protein, 279 aa, Glycine max
  Clone ID: PAT_MRT3847_17509C.1.pep
MRKRNYCTRGESLFKEDTPVRALRRRRKSRSPCTEAAQPMTRGAGPTSHTDGVEKTNRRARPKSEPSPAVVCPFISAKNNGPIADTGGLGPRVILLGSRFLGAEKANRRARPKSEPPPAVVCLFISVARNKPPSLWHGGPGPRVILLGAAAPGCGEGEPPLTPALRLLGAVAEDIEAAGTDVAVSVTEGGLAVIMSASARKRRANRQSSFGPTCRLVSSPEVGPGATVGTLKQGYPLLQYEDVVPARLSLAAWGTTPDPTTWTAPGPPRGERRQYPPKY

SEQ ID NO: 194333 - protein, 150 aa, Glycine max
  unsure (1)..(150): unsure at all Xaa locations
  Clone ID: PAT_MRT3847_1750C.1.pep
MGKKLDALLGRTFKAAKFKAIVNLAISRLAVLKNQRQARLRQARSDILELLQIGHLERASLRVEHVMKDQNMLDVYVRIEGYCNLLIERVHLIEQERECPEELKEAASGLLYAASRCGDFPEIQEIRAILTSRFGKEFAXRSIELRTTWS

SEQ ID NO: 194334 - protein, 62 aa, Glycine max
  unsure (1)..(62): unsure at all Xaa locations
  Clone ID: PAT_MRT3847_17510C.1.pep
ANFIILVLCSNRDLKARVSEFNYVWCVSNVIMNVCVLEIIFFGSHVHRPTNSMRPACIVEXX

SEQ ID NO: 194335 - protein, 39 aa, Glycine max
  unsure (1)..(39): unsure at all Xaa locations
  Clone ID: PAT_MRT3847_17511C.1.pep
XFPFNRXXLXTNTKRSLSVFXVXXSXSSXSKXSTEXGTR

SEQ ID NO: 194336 - protein, 70 aa, Glycine max
  Clone ID: PAT_MRT3847_17512C.1.pep
RVLWRLLMRFLCKNKKVIDFSHFLSSVLLCLVRVFFTGQIRDSVDERRDFINHRNVKTLGKLISIKASIQ

SEQ ID NO: 194337 - protein, 123 aa, Glycine max
  Clone ID: PAT_MRT3847_17513C.1.pep
KNHPPQDSSKKPKFLRPSPPVLVTNKKKRVFFFFFFTKIFWGWGVPPPLREPPPHKKKGGVFLKNWPRRRSLPASVCVLKKSVKYPKFFQGGVGPLRGGPLKKEFRQKAPPQRTPPPRNFVPL

SEQ ID NO: 194338 - protein, 126 aa, Glycine max
  unsure (1)..(126): unsure at all Xaa locations
  Clone ID: PAT_MRT3847_17514C.1.pep
XVYXXXSGXXRXPXLCXXXXXXXXAXXXPXXPTARVTCXQCXXAXSXXXXRVNDGRTXXPXVVNXXAXXXXXTLPVVXXCXFSXXXXXXXXXXRPXGRXXXXXXXALXXXPXXVXXXYSXXSRXAX

SEQ ID NO: 194339 - protein, 47 aa, Glycine max
  Clone ID: PAT_MRT3847_17515C.1.pep
NCTFFQTRAIQLIKNLGPVNLPTKKIKRATVPSRLTLLFFPGGPQGT

SEQ ID NO: 194340 - protein, 64 aa, Glycine max
  unsure (1)..(64): unsure at all Xaa locations
  Clone ID: PAT_MRT3847_17516C.1.pep
FRLRQKNQLESKKVIYEDVSLERGSFLVQHAMRAFFAQNLXSARSRLNLCAEDIRNQLEKVGNT

SEQ ID NO: 194341 - protein, 97 aa, Glycine max
  Clone ID: PAT_MRT3847_17517C.1.pep
MDIQQQLLKFRYHIGGALLVSLSIFSVLFLAPRFLNILAYFWPLFLSTALFLALVLFFAKTQTSPNSDASIPKPAEELLDFVAGHHHNPPLDAHKSD

SEQ ID NO: 194342 - protein, 86 aa, Glycine max
  unsure (1)..(86): unsure at all Xaa locations
  Clone ID: PAT_MRT3847_17518C.1.pep
XQHEEXPQEEKXXSQXVPXXXGTVXWDXFPXSVXIXTGXKXRXFPRMXHPKXXKLTAFLGYKAGMTAXVRXVXXAXSKLTRWNCEX

SEQ ID NO: 194343 - protein, 82 aa, Glycine max
  unsure (1)..(82): unsure at all Xaa locations
  Clone ID: PAT_MRT3847_17519C.1.pep
XCXXAIXPSGXXSXLXAXPRASRTDPXVXXAIGHPLAXYXXXVMSXKTLXDLTFXKXVIPKYXSVXEAVLPFXKFPGCDVXL

SEQ ID NO: 194344 - protein, 213 aa, Glycine max
  Clone ID: PAT_MRT3847_1751C.1.pep
SVLKVGTKRKKPLTAGLPETFEFEDMSDTYWTDRVIDNGSEAQPAQPCQPPQPARRNRKKDHQLVPTEPGKPVQVSRRPYSRKQYSNNNHIEAPAKPPGYIDENAPAELVMNFAELGSVPSETNLNKMFRRFGPLKEAETEVDTVSSRARVVFKKSVDAVVACSSAQNINIFGPILVNYQLNYSATCIVTKLHLLPQHRTRRCILISPILRLI

SEQ ID NO: 194345 - protein, 127 aa, Glycine max
  unsure (1)..(127): unsure at all Xaa locations
  Clone ID: PAT_MRT3847_17520C.1.pep
FLRSSTRSVMSKIVEMINSLCGGDEKLLLERSHLSLACCTRMAIFQKDEWRVECGIPSGFPLTVICNCLFYEMPIRYSFEKLLAPRLIATNVCFYISSKIFDSLCVYGDDNFXLVVHDYAKSFFSGS

SEQ ID NO: 194346 - protein, 452 aa, Glycine max
  Clone ID: PAT_MRT3847_17521C.1.pep
MVTSELSNHQNNNSPMMAKPHRNKTSSVFLSDGSLFLGGAFSALILVWGFSSFTTTIPKETPNFESLTKNDAVPHHGTPDFNFDPPDRTFYDDPQMGYTMDKKVRNWDEKREEWLKLHPSFAAGARERVFMVTGSQPKPCRNPTGDHLLLRFFKNKVDYCRLHGCDVFYNNALLDPKMFAYWAKYPVVRAAMVAHPEAEWIWWVDSDALFTDMEFKLPLERYREHNLVVHGWAHLIHEKRSWTGLNAGVFLIRNCQWSLDFMEAWASMGPQTPNYEKWGQTLRSTFKDKFFPESDDQTGLAYLIAMEKDKWAERIYLESEYYFEGYWEEIQGTFKNITEKYKEMEKGVQRLRRRHAEKVSETYGEMREEYLKDAGNGKGSWRRPFITHFTGCQPCSGKYNAMYSADDCWNGMQKALNFADNQVMRKFGYMRPDLLDNAISPVPFDYPRSLRH

SEQ ID NO: 194347 - protein, 195 aa, Glycine max
  unsure (1)..(195): unsure at all Xaa locations
  Clone ID: PAT_MRT3847_17522C.1.pep
IRNCQWSLDFMEAWASMGPQSPXYEKWGQTLRSTFKDKFFPESDDQTGLAYLIAMEKDKWAERIYLESEYYFEGYWEEIQGTFKNITEKYKEMEKGVQRLRRRHAEKVSETYGEMREEYLKDAGNAKGSWRRPFITHFTGCQPCSGKYNAMYSAHDCWNAMHNALNFADNQVMRKFGYSLLDNAVSPLPFDYPRH

SEQ ID NO: 194348 - protein, 56 aa, Glycine max
  Clone ID: PAT_MRT3847_17523C.1.pep
SYVDMLGESCCNGGNARLLLVNDELEVTTRFSSSAHRCLSAKMWPSTWGSSQQRKP

SEQ ID NO: 194349 - protein, 233 aa, Glycine max
  unsure (1)..(233): unsure at all Xaa locations
  Clone ID: PAT_MRT3847_17524C.1.pep
MAQRDLRLLGAWFSPFVLRVQIALNLKGLDYEVVEETLNPKSELLLKSNPVHKKIPVFFHGDKVICESAIIVEYIDEVWSNNALSILPQNAYDGANARFWVSYIDDKWLTSLKSVLLAXSDDEAKKLHFEQAEEVLEKVEEVFNKCSEGKAYFGGDTIGFVDIGFGSFLSFIRVSENMNERKLLDETKHPGLTLWAETFAADPAVKGLLPETEKLVEFAKILQLKWAAAAAAK

SEQ ID NO: 194350 - protein, 78 aa, Glycine max
  unsure (1)..(78): unsure at all Xaa locations
  Clone ID: PAT_MRT3847_17525C.1.pep
RGEGAKAKDFSNPPPFFPPPXPPEPPPLPIAPCENHPRFLKKFGQRGPFASAPPPISQSLGGKISAPPPPLGKGPFPI

SEQ ID NO: 194351 - protein, 48 aa, Glycine max
  Clone ID: PAT_MRT3847_17526C.1.pep
LTLRFLDDSACVFAVGHCPVRFLCPRYFFGSQCVKHPVLSPDALSVAT

SEQ ID NO: 194352 - protein, 138 aa, Glycine max
  Clone ID: PAT_MRT3847_17527C.1.pep
SMPQVPTCCTLDLKALPQMIHLSSYYSLWRVMTALSLPVAFENPGLSLLFFIYVFECICLVYITTNLSLAGNIIGGIYKPPPIGIILSDRLCTSAGRLLLEPAPPHPPAVFLAPADSSSTSFFNSCLSFSATKNLIGK

SEQ ID NO: 194353 - protein, 69 aa, Glycine max
  Clone ID: PAT_MRT3847_17528C.1.pep
PSCTNPYIYNTPFPCTDYFCHSAAQLLHTLSRLLNVRHCFTLRHFQNNFLIIETRLEKKLLRHGYQNCV

SEQ ID NO: 194354 - protein, 45 aa, Glycine max
  Clone ID: PAT_MRT3847_17529C.1.pep
GFLLYFFLKSYYGRMVIYTHTPKKRVNKTNRSGDAVLGNINSQAF

SEQ ID NO: 194355 - protein, 344 aa, Glycine max
  unsure (1)..(344): unsure at all Xaa locations
  Clone ID: PAT_MRT3847_1752C.1.pep
MAWGSSSSSSSSSSNYDVFLSFRGEDTRHAFTGHLYKALHDKGIHTFIDDEKLQRGEQITRALMEAIQDSRVAITVLSQNYASSSFCLDELATILHCHQRKRLLVIPVFYKVDPSDVRHQKGSYAEALEKLETRFQHDPEKLQKWKMALKQVADLSGYHFKEGDGYEFKFIEKIVERVSREINPRTLHVADYPVGLESRVLDVRRLLDAGSDDGVHMIGIHGMGGIGKSTLARAVYNELIIAEKFDGLCFLANVRDNSDKHGLERLQEKLFXDILGEKNISLTSKAQGIPVIESRLTXKEVLLILDDVDKREQLQAIAGRPGWFXPGSIIIITTRYKQLLTSHE

SEQ ID NO: 194356 - protein, 102 aa, Glycine max
  unsure (1)..(102): unsure at all Xaa locations
  Clone ID: PAT_MRT3847_17530C.1.pep
FLGLALRLIGYPETHSFCGRRRWGPVPARPRPHRRRRLRGVSGRVDLRDTEVSHRIVWEPRLDLVALIVTTRFCDQNKVNGDDVTYSSGNEIDSDEGKTESX

SEQ ID NO: 194357 - protein, 206 aa, Glycine max
  Clone ID: PAT_MRT3847_17531C.1.pep
MSMKLYASLTFVVWLFMATSSLAQYVLDTNRERVDSDDEYYIRPAITDNGGRFTLINRNRSCPLYVGLENTDTPLGYPVKFTPFSRNNNDDDDDDIRVNRDLRVAFDEVSTTCVQSTEWRVGENDTRSGRRLIITGRDETTGSYGNYFRIVETENVGIYNIQWCPTEVCPTCRFICGTGGILRENGRILFALDGTPLPVMFQKKDD

SEQ ID NO: 194358 - protein, 42 aa, Glycine max
  Clone ID: PAT_MRT3847_17532C.1.pep
FYAVLFLSLIFATFSLILGYLKILSRLIVACLSIYLFIFKEV

SEQ ID NO: 194359 - protein, 364 aa, Glycine max
  unsure (1)..(364): unsure at all Xaa locations
  Clone ID: PAT_MRT3847_17533C.1.pep
MVNSMVERATSDMLIGPDWAMNIEICDMLNHDPGQAKDVVKGIKKRIGSKNSKVQLLALTLLETIIKNCGDIVHMHVAERDVLHEMVKIVKKKPDFHVKEKILILIDTWQEAFGGPRARYPQYYAAYQELLRAGAVFPQRSEQSAPVFTPPQTQPLASYPQNIHDSDAHRDTAQSSAESEFPTLNLTEIQNARGIMDVLAEMLNALDPSNKEVIRQRLLKEQIXLTKQCRTYKQRVVHLVNSTLDESLLCQGLALNDDLQRVLAKHESISSGTSTKNENHTQNSKPAPAGALVDIDAPLVDTGDTSKQTDGRSSSNVEAGSQTLNQLLLSAPSTSNGSTIPGKVDPKWNLAQWRDYNSPKADSS

SEQ ID NO: 194360 - protein, 55 aa, Glycine max
  Clone ID: PAT_MRT3847_17534C.1.pep
WFNGKTNDSQHHCNQKRILKRLTKLNQIKCKFQNIIFYLIMTLIIVYFFAEVVSP

SEQ ID NO: 194361 - protein, 335 aa, Glycine max
  Clone ID: PAT_MRT3847_17535C.1.pep
DAWGANRVIGHGAFGTVYKGVLPESGDIVAVKRCNHSGQGKNEFLSELSIIGSLRHRNLVHLQGWCHEKGEILLVYDLMPNGSLDKALYESRMALSWPHRLKILLGVSSVLAYLHHECENQVIHRDIKTSNIMLDEGFNARLGDFGLARQTEHDKSPDATVAAGTMGYLAPEYVLTGRATEKTDVFSYGAVVLEVASGRRPIEKDDDAAAGNGKVGISSNLVEWVWSLHQDGKLLTAADPRLEGEFEEGEMRKVLLIGLACSHPDSMARPTMRCVVQMLLGEAEVPIVPRAKPSTSYSTSQLLMNLQDSDTDCKNGMITISTSSSENSSNGKDIV

SEQ ID NO: 194362 - protein, 59 aa, Glycine max
  Clone ID: PAT_MRT3847_17536C.1.pep
IDQIVQTIYHLKFRVGFFFFCFDKICENRANPNFFLLVENSLWPVSFSTCLSTGRSLLV

SEQ ID NO: 194363 - protein, 197 aa, Glycine max
  Clone ID: PAT_MRT3847_17537C.1.pep
APLSIVMPSRTAATAVSVARAVLVTPLLLLLLIGKKWPIDVRGMVYSITQIAVVPIAAGLPRICNVIRPFLPPLSVLVASICAGAPLALNVETMKSPVGVAILLLVVAFHLSSFIAGYILSGFVFRDSLDVKALQRTISFETGMQSSLLALALANKFFEDPKVAIPPAISTSIMSLMGFVLVLIWTRRGKSEIKNSS

SEQ ID NO: 194364 - protein, 62 aa, Glycine max
  Clone ID: PAT_MRT3847_17538C.1.pep
SFPWSATFLQFLLSCQLPTASREAIKSKPKTVMSKSFEAMVESGKCCREKNNAGFVHSLSLC

SEQ ID NO: 194365 - protein, 105 aa, Glycine max
  Clone ID: PAT_MRT3847_17539C.1.pep
FKKKKGFSQGFILLSKPPPLFFLKQGKKNFSPSVCGNSPKHIFCGDPKDLKKGANFETKCLRRPSFQLYHFPGGENKTKGFFSPFKKNGCLAKGFFKRESAFVFC

SEQ ID NO: 194366 - protein, 62 aa, Glycine max
  unsure (1)..(62): unsure at all Xaa locations
  Clone ID: PAT_MRT3847_1753C.1.pep
KGXPSHSNPLTWIENKKKPGGALGFLTLYFAKMFHQKEASFFSHTFLSLVFCFLILDIRSTH

SEQ ID NO: 194367 - protein, 37 aa, Glycine max
  Clone ID: PAT_MRT3847_17540C.1.pep
EGPKDQKDGAVLQLQYDPAVIVGSRVRTVPARVVARL

SEQ ID NO: 194368 - protein, 45 aa, Glycine max
  Clone ID: PAT_MRT3847_17541C.1.pep
VHRAGNFNHCTPHRGFPVVNRRNEEAFHYITDGPVENLFLPALVG

SEQ ID NO: 194369 - protein, 76 aa, Glycine max
  Clone ID: PAT_MRT3847_17542C.1.pep
ENWKGGNQKAIILKNQKWELKGMVNPTPVLGPVSKLGKKLPFWKVKPPPPEISPPLPKTIWFNLVQKKKWGNPNLF

SEQ ID NO: 194370 - protein, 40 aa, Glycine max
  unsure (1)..(40): unsure at all Xaa locations
  Clone ID: PAT_MRT3847_17543C.1.pep
LLSGVCDNIEGLANTLFMFITTENEEYIYFASNXQECXMN

SEQ ID NO: 194371 - protein, 62 aa, Glycine max
  Clone ID: PAT_MRT3847_17544C.1.pep
PQPWPQKTHLRNHHQALPFRLIQLTVDASAHDPHGHQHAPDSRSANLGKWCVVKHKHKVKEE

SEQ ID NO: 194372 - protein, 480 aa, Glycine max
  Clone ID: PAT_MRT3847_17545C.1.pep
MISATKLKSVDFYRKIPRDLTEASLSGAGLSIVAALVMMFLFGMELSSYMSVSTSTSVIVDKSSDGDYLRIDFNISFPALSCEFASVDVSDVLGTNRLNITKTVRKFSIDSNLRPTGAEFHSGTVANAVKHDDEVDEESVEGSFSLTTHNFDKYVHQFPITAVNFYAPWCSWCQRLKPSWEKTAKIMKERYDPEMDGRIILAKVDCTQEGDLCRRNHIQGYPSIRIFRKGTDLRSEHGHHEHESYYGDRDTESLVKFMEDLVTSLPTESQKLALEDKSNASDNAKRPAPSAGGCRVEGYVRVKKVPGNLIISARSDAHSFDASQMNMSHFINNLSFGKKVTPRAMSDVKLLIPYIGSSHDRLNGRSFTNTHDLGANVTIEHYIQIVKTEVVTRNGYKLIEEYEYTAHSSVAHSVDIPAAKFHLELSPMQVLITENQRSFSHFITNVCAIIGGVFTVAGILDSILHNTIRMMKKVELGKNF

SEQ ID NO: 194373 - protein, 216 aa, Glycine max
  unsure (1)..(216): unsure at all Xaa locations
  Clone ID: PAT_MRT3847_17546C.1.pep
MISATKLKSVDFYRKIPRDLTEASLSGAGLSIVAALAMMFLFGMELSSYLSVSTSTSVIVDKSSDGDYLRIDFNISFPALSCEFASVDVSDVLGTNRLNITKTVRKFSIDSNLRPTGAEFHSGTVANGCKHDDEVDEESVEGSFSLTTHNFDKYVHQFPITAVNFYAPWCSWCQRLKPSWEKTAKIMKERYDPEMDGRIIVAKVDCTQXGDLCTRN

SEQ ID NO: 194374 - protein, 86 aa, Glycine max
  Clone ID: PAT_MRT3847_17547C.1.pep
NIPRGKKNSKLKGPLITGNFFYWAKKGQVGWPSGTQKKGFLRGFSKIKKIFLAFFFPKSGGKKRKLNPKFDGGPCPLDEKKKVFLY

SEQ ID NO: 194375 - protein, 79 aa, Glycine max
  Clone ID: PAT_MRT3847_17548C.1.pep
HQQRRCNPIFICLDSSGAKDFLDDIGAGAVVATEGGEQIRGDHLHLSERERRCERKENNRRLRRVMLWRCSPSVVFSQP

SEQ ID NO: 194376 - protein, 92 aa, Glycine max
  Clone ID: PAT_MRT3847_17549C.1.pep
LSSTTPCAEASMAIVFIYIRESERMNGAIDQSHVNVSPISYRGRRNKTKYSILELCTNLGTKIGSKIESDEIISEVQNRSLTRTIFLQEFIF

SEQ ID NO: 194377 - protein, 58 aa, Glycine max
  unsure (1)..(58): unsure at all Xaa locations
  Clone ID: PAT_MRT3847_1754C.1.pep
MTGQDNFVMLKGHLMLTFLLMITTARIKLNLFKNDHSSNYHHYXYSKPYSHLFMCTHS

SEQ ID NO: 194378 - protein, 67 aa, Glycine max
  Clone ID: PAT_MRT3847_17550C.1.pep
ICDQISGTVPKSCSHLYPCSKGCRPYCPKRIMWMVTAIATIHATIVYAKNHHDQCRLLLCGPHEVGL

SEQ ID NO: 194379 - protein, 66 aa, Glycine max
  unsure (1)..(66): unsure at all Xaa locations
  Clone ID: PAT_MRT3847_17551C.1.pep
MYTPSCFSRLLLGFDCPLLWYYAAIVYFGNXYYHKDPRERSGLAASASAALLMTLDVVMTVAAMLL

SEQ ID NO: 194380 - protein, 98 aa, Glycine max
  Clone ID: PAT_MRT3847_17552C.1.pep
YNHINKTKYKNRKLTHKTKVACTKTIVVLQVKLSGLIYLFKHLKAATYIYINTIAMDASAQGVVLLNYTGWKLEIFMHHPLFLHVLHAQSHRLYLAIT

SEQ ID NO: 194381 - protein, 48 aa, Glycine max
  Clone ID: PAT_MRT3847_17553C.1.pep
IKILKLLILYVTMCEDIMSISEAWIMHLICQYRHSLLNQSYFFHTYSS

SEQ ID NO: 194382 - protein, 55 aa, Glycine max
  Clone ID: PAT_MRT3847_17554C.1.pep
EWAQPSVFLCEPNRKQMKQSSRSRVQSNFPNLNPLLILVTNNYTFLFIIPKILIC

SEQ ID NO: 194383 - protein, 133 aa, Glycine max
  Clone ID: PAT_MRT3847_17555C.1.pep
RVSVPVSGPEQQYEENHRDELSEDLRLTWDRPDCRYCESGQQLCGFDPDNNGQLFCFPGYQTVTSRRGAQVFRIITFCIAGPAAVIAIVMACCVCYKDRLTNRSALSATISPVPQIATTGLDESTIESYEKMV

SEQ ID NO: 194384 - protein, 135 aa, Glycine max
  unsure (1)..(135): unsure at all Xaa locations
  Clone ID: PAT_MRT3847_17556C.1.pep
GHEAYMGKLLMRGTAPSSDALRFFAGALNFIMWYYGQSSGTAXSELLWDTVALSSCPCLILIASXGHFQYNCMTVGTIPLSTVADILYGNDLQSSDLYCVSLCYKQMSAYFATYLYRHLLGKGLRRQYSILEVSK

SEQ ID NO: 194385 - protein, 82 aa, Glycine max
  Clone ID: PAT_MRT3847_17557C.1.pep
CPFCRSHEEDASHLFFSCDEVLPLRWESMSWINTVGVFSETPKNHFLQFSNCNSTGFRGQRWQSWWIALTWCTWHHRNKLSS

SEQ ID NO: 194386 - protein, 271 aa, Glycine max
  Clone ID: PAT_MRT3847_17558C.1.pep
IDSNTLLHYTNVFDAIVDAAYFAMSYLKFTNIPILVTESGWPSKGDSSEPDATVDNANTYNSNLIRHALNNSGTPKQPGIAVSTYIYELYNEDLKSGPVSENNWGLFYASGAQVYTLHLTNSGTVFANDTTNQTFCVAKSNADSKMLQAALDWACGPGKVDCSPLLQGQSCYEPNSVASHATYAINSYYQQMAKSAGTCDFKGVASITTTNPSHGSCIFSGSGGKNVTSVNGTALAPSTNSTNSGCLSQYYNGGFFTSTVILTLILSVVVL

SEQ ID NO: 194387 - protein, 73 aa, Glycine max
  Clone ID: PAT_MRT3847_17559C.1.pep
SRMGFSHGHPSDDSFNENELFNEQVQSLQSSIPAPPAHFKLRDDHISGSSLKAPKSFFSLSTFRSKGSDSKPR

SEQ ID NO: 194388 - protein, 111 aa, Glycine max
  Clone ID: PAT_MRT3847_1755C.1.pep
YFVCFSCSHSNPATELFLKPIIYFLDTCMCLCSKFVSQASYVFFRIINQAKYRCNWLELESLCYVHFEFYHALHHLSPLLIGVQNTSDREHFCGTWNLLLIIDVQMHFLCF

SEQ ID NO: 194389 - protein, 99 aa, Glycine max
  Clone ID: PAT_MRT3847_17560C.1.pep
MKLFDPRSPNGPKKSSVGFVRRPSLFVVWDDLQVTPLANTSSISLLQKLNVPLDNLEEHELRIGEIEALNLLGASLTSKAALTEGLFYLLRKPKEEAKD

SEQ ID NO: 194390 - protein, 236 aa, Glycine max
  Clone ID: PAT_MRT3847_17561C.1.pep
MDKDKSLGLPPPSGRYSGYSSTGSVFNVKSEPSPSSSTTLYPPLAPGTTSSESSHFGHGLSTDSSGFSHDISRMPDNPPRNRGHRRAHSEILTLPDDISFDSDLGVVGGGDGPSFSDDAEEDLLSMYLDMDKFNSSSATSTFQMVEPSNAVGASASTPASGAPTSSTENVVIGTNERPRVRHQHSQSMDGSTTIKPEMLVSGSEDMSAADSKKAMSAAKLAELALIDPKRAKRFAL

SEQ ID NO: 194391 - protein, 30 aa, Glycine max
  Clone ID: PAT_MRT3847_17562C.1.pep
HSVRQPQIPPLFNLRQGPELMFSCEKNTNT

SEQ ID NO: 194392 - protein, 87 aa, Glycine max
  Clone ID: PAT_MRT3847_17563C.1.pep
VQENIHNPISYIFHIDHCIVPTSLFCIIFNIVLYTHTIEDDPNYLPGQLTEISSGFRVTYPCFGKLIVKKMIWELLLNFLIYDHPSV

SEQ ID NO: 194393 - protein, 36 aa, Glycine max
  Clone ID: PAT_MRT3847_17564C.1.pep
DIHVFYYNLGQLYLHLKKLNPMKSTTPLTSTRHSIL

SEQ ID NO: 194394 - protein, 207 aa, Glycine max
  Clone ID: PAT_MRT3847_17565C.1.pep
NYIFYAHSHSPMAFTVASGSGVAIIPCGNTGTAALFPHRTRRNLHVARAKKPLNGDDVSVYAELLKAEVSVLENNKPLDDNDAALKFLEKIDRQFQQPDLWEGPQWDWLGIFIKFSPIIGIAVAASLAIYGCFTFHEPPKNVREAAERLYSVQSGVESNAESDDVESSAETDVESSAESSSEVFKEPDAYDSDVFDSNPTEVAPSLE

SEQ ID NO: 194395 - protein, 64 aa, Glycine max
  Clone ID: PAT_MRT3847_17566C.1.pep
QAKFSRFIPNQKNLTSGPGNRLRIRIPANYGFGLTKNLQALWFKGPTRNPNRSLSLERLIGINF

SEQ ID NO: 194396 - protein, 38 aa, Glycine max
  Clone ID: PAT_MRT3847_17567C.1.pep
KHRGHCQEFSVRSNNGSWTHGSTLFLQVCLFFFTNYVR

SEQ ID NO: 194397 - protein, 39 aa, Glycine max
  Clone ID: PAT_MRT3847_17568C.1.pep
LLAKVTLKLATFHGIPMKLWLSPFGKNLAIGFRQPEMDN

SEQ ID NO: 194398 - protein, 47 aa, Glycine max
  Clone ID: PAT_MRT3847_17569C.1.pep
KFKRRAFKAKVYIDLFIQKEASQTLTITLKVRILNIQVLSILSDSRP

SEQ ID NO: 194399 - protein, 82 aa, Glycine max
  Clone ID: PAT_MRT3847_1756C.1.pep
NQGYVYRSPTKKGQRWGFLAFFFKDKTLFLKHANPGTFYTHKVFTLESKRSRPGRGKNLSRSQLNFGRNKTFSKGWGPWSMG

SEQ ID NO: 194400 - protein, 172 aa, Glycine max
  Clone ID: PAT_MRT3847_17570C.1.pep
MRYLQNSIMDPGQRGNQVQPQPHPYPQPQVPGNVQPHPPPLSALLPNPPIPMYPSLRFNGPVPPMNATNPPVPSLPSPQANGPPPLLPSPTSQFLLPSPTGYMNLLSPRSPYPLLSPGIQFPSPLTPNFPFSSMAQPGILGPGPQPPPSPGLMFPLSPSGFFPISSPRWREH

SEQ ID NO: 194401 - protein, 50 aa, Glycine max
  Clone ID: PAT_MRT3847_17571C.1.pep
HVVMYVESDHPCVQHSHHLVRGVSTVPTKNESPSWSIYGDVYIFSHTCNT

SEQ ID NO: 194402 - protein, 50 aa, Glycine max
  Clone ID: PAT_MRT3847_17572C.1.pep
AHAPGKESEAVYQNRTRTAKAKMDPDHPAEKNPLSYDHTAFSTLWGEWSW

SEQ ID NO: 194403 - protein, 72 aa, Glycine max
  Clone ID: PAT_MRT3847_17573C.1.pep
GWILIYSTRPRAGNVIPGGKGHQNKRQGAAINNGGRGKPMGKPNIMVLNKIPKKNGGVKRKGPRPITLIKKS

SEQ ID NO: 194404 - protein, 62 aa, Glycine max
  Clone ID: PAT_MRT3847_17574C.1.pep
TRPINLRLAMFFINGYLHTDSLAPCQRSLCGQLLRRSLSSSNTTYVLNWKTIDMEASCPSED

SEQ ID NO: 194405 - protein, 99 aa, Glycine max
  unsure (1)..(99): unsure at all Xaa locations
  Clone ID: PAT_MRT3847_17575C.1.pep
MHYTISNIATFVADQFGERDPTGQHQTIVSVSSLYLGTNTGTLFSITILTNLEDDDGLSTLRIWASAASICCSGXIMSPRGTRLDRYHKPNGNPRATFR

SEQ ID NO: 194406 - protein, 132 aa, Glycine max
  Clone ID: PAT_MRT3847_17576C.1.pep
PLEEIMKDKNFELVTKEIFGPFQVIADYQNSQLAVVLDALERMHNHLTAAVVSNDPLFLQEVIGKSVNGTTYAGLRARTTGAPQNHWFGPAGDARGAGIGTPEAIKLVWSCHREIIYDFGPVPKNWEVPPST

SEQ ID NO: 194407 - protein, 280 aa, Glycine max
  unsure (1)..(280): unsure at all Xaa locations
  Clone ID: PAT_MRT3847_17577C.1.pep
MHPFCCVSAISDQASPVKPSFADFAMPPLPAAAAATTVRSDSAPRHSHKHSHSHSGSQREQPVVDVKINDLVGNGISGILYKWVNYGKGWRPRWFVLQDGVLSYYKIHGPDKIVVNPETEKGSMVIGEESMRRITRNRNSYPSQHIRKPFGEIHLKVSTIRESKSDEKRFSVFTGTKRLHLRAETREDRVAWMEALQAVKDMFPRMSNSELMAPVDNVTVSTEKLRVRLMEEGVSEAAIQDSEXIMRTEFAALQSQLVLLKQKHSALIDTLRQLETERLI

SEQ ID NO: 194408 - protein, 197 aa, Glycine max
  unsure (1)..(197): unsure at all Xaa locations
  Clone ID: PAT_MRT3847_17578C.1.pep
NSARGKTRDLDSEELLEQLPALQQLLYRLVGCRPEGAAVSNYVIQYALALVLKESFKIYCAINDGIINLVDKFFEMPRHEAIKALDAYKRAGQQAASLSDFYDVCKGLELARNFQFPVLREPPQSFLVTMEEFIKEAPRVVIVPNEPLTRRXPTIEDNKSSEEQEPSVPVDDIVSNSEPAPPQSRNNFETGDLLVKP

SEQ ID NO: 194409 - protein, 157 aa, Glycine max
  unsure (1)..(157): unsure at all Xaa locations
  Clone ID: PAT_MRT3847_17579C.1.pep
RLTTTPVLILHDPKRPFEVYCDASGQGLGCVLMQEGKVVAYASRQLRPHEVNYPTHDLELVAVVFALKIWRHYLYSXCFEVFSDHKSLKYLFDQKELNMRQRRWMEFLKDYDFGLSYHPGKANVVVDALSRKSLYVATMMILEQRLIEEFRDLESTC

SEQ ID NO: 194410 - protein, 56 aa, Glycine max
  Clone ID: PAT_MRT3847_1757C.1.pep
NLTFFNAMTLTAAYYMHNHSSVFVGQCASYFSASLYVVLISQLFMNSLFCRLFWFG

SEQ ID NO: 194411 - protein, 81 aa, Glycine max
  Clone ID: PAT_MRT3847_17580C.1.pep
SHIVLHSKTFQQHKTMGFLMAGRYSLHMDPQSATPKRNRSLTKDEIDAYWESKKKIEEEHLRAISNGSETFSGLQNTQSLK

SEQ ID NO: 194412 - protein, 568 aa, Glycine max
  unsure (1)..(568): unsure at all Xaa locations
  Clone ID: PAT_MRT3847_17581C.1.pep
MGTLQSWRRAYGAIKDTTKVGLAHVNSDYADLDVAIVKATNHVECPPKERHLRKILFATSAVRPRADVAYCIHALSRRLTKTRNWTVALKTLIVIHRLLREGDPTFREELLNFSQRGRILQLSNFKDDSSPIAWDCSAWVRTYALFLEERLECFRILKYDIEAERLPKPAQGQEKGYSKTRDLDSEELLEQLPALQQLLYRLVGCRPYGAAVSNYVIQYALALVLKDRSKIYVSSNDGIINLESTCFEXRAGQQAASLSDFYEVXQRIGSLSDFYDVCQGLELARNFQFPVLREPAQSFLTTMEEYIKEAPRVVTVPTEPLLQLTYRPEEVLAIEDAKPSDEEQEPPVPVDNNVVVSDSEPAPPPPPPSSHNNFETGDLLGLNDTAPDASSIEERNALALAIVPTETGTTSAFNTTAAQTKDFDPTGWELALVSTPSTDISAANERQLAGGLDSLTLNSLYDEAAYRSQQPVYGAPAPNPFEMQDPFALSSSIPPPPAVQLAAMQQQANPFGPYQQPFQPQPQPQQQQHHMLMNPANPFGDAGFGAFPAPNPAPHPQNNNPFGSTGLL

SEQ ID NO: 194413 - protein, 268 aa, Glycine max
  unsure (1)..(268): unsure at all Xaa locations
  Clone ID: PAT_MRT3847_17582C.1.pep
KTRDLDSEELLEQLPALQQLLYRLVGCRPEGAAVSNYVIQYALALFFFESFKIYCAINDGIINLVDKFFEMPRHEAIKALDAYKRAGQQAASLSDFYDVCKGLELARNFQFPVLREPPQSFLTTMEEYIKEAPRVVTVPTEPLLQLTYRPEEVLAIEDAKPSDEEQEPPVPVDNNVVVSDSESAPXPPPPSAHNNFETGDLLGLNDTAPDASSIEERNALALAIVPTETGATSAXNSTASHTKDFDPTGWELALVSTPSTDISAANER

SEQ ID NO: 194414 - protein, 115 aa, Glycine max
  unsure (1)..(115): unsure at all Xaa locations
  Clone ID: PAT_MRT3847_17583C.1.pep
IEEFHSMQRIMNAPDSNDNIDLLLSIDLLGLQGAGKAFPNKIVFNDKLVLANTQEFFDGNFPTDSWLPIFVNCLYPVXQLPADLPIHYVVCVFKGNRFSTTSLCPLFFPSFLTPP

SEQ ID NO: 194415 - protein, 88 aa, Glycine max
  unsure (1)..(88): unsure at all Xaa locations
  Clone ID: PAT_MRT3847_17584C.1.pep
LGRRGRVSQQWCTCKAQKSKAYFKRYQVXKFKRRREGKTDYRARIRLINQDKNKYNTPKYRFVVRXSNKDLLTQIISAXMRRFVLLQC

SEQ ID NO: 194416 - protein, 57 aa, Glycine max
  Clone ID: PAT_MRT3847_17585C.1.pep
EQKNLQIRKNITSPASTREGNKRLFNFVLQVVQATLTSIVLGFLGSGGGNFCTMTLS

SEQ ID NO: 194417 - protein, 222 aa, Glycine max
  Clone ID: PAT_MRT3847_17586C.1.pep
MKLPVRYLIVILTFICTLVCYIERVGFSIAYTVAADGAGVNQSSKGTILSTFYYGYACSQVPGGWAAQKIGGRRVLLLSFLLWSLTCALLPLDPNRVLLLVIARLLVGIAQGFIFPSIHTVLAQWVPPHERSRSVSLTTSGMYLGAALGMLLLPTLVKFRGPESVFLAEAALGASWSLLWFKYATDPKSTASGVGESVLPVNKKIDTHNKKPLSAKIPWVKI

SEQ ID NO: 194418 - protein, 66 aa, Glycine max
  Clone ID: PAT_MRT3847_17587C.1.pep
PKQSVFISKSVSVTKRGIKPHFASTKRLRTYTDLSERKLGVKIPFSQHVIGKQQKLCEAVSRGGPL

SEQ ID NO: 194419 - protein, 337 aa, Glycine max
  unsure (1)..(337): unsure at all Xaa locations
  Clone ID: PAT_MRT3847_17588C.1.pep
MDYICLFVTFTAIALLGFVFVVFFEAYKRRNNHQHIEVPAIFEDPSSLKQVPCPHIVDPATKYISLIIPAFNEEHRLPGALEETMNYLHQRTLKDSSFTYEVVIIDDGSADETKRVAFEFVRKYTVDKVRVILLGRNHGKGEAIRKDFIXGMMHSRGELLLMLDADGATKVTDLXKLENQIQAVAKREYHQGDSSDSDPRFRISDVPAAVFGSRAHPDDKDFSARVWKRSFLRKGFQYAEHVLGACANSCTQCGFKMFTRAAARKLFSNVRLKRWCFDVELVFLCKWFRIPVSEISVNWSEIPGSKVNLLSIPNMLWELVLMSVGYRTGMWRISNST

SEQ ID NO: 194420 - protein, 127 aa, Glycine max
  Clone ID: PAT_MRT3847_17589C.1.pep
PRVRTAARRRQKGTLAKKQQKVPVAKNTTKGSGCKKTTKGSGSKKHNERFPVRKHHRGARVRKHHRGAPVRKHHRGARVRKHHRGTRVRKHHKGAPVRKHHRGAPVRKHHRGRCAGDTMCVHNTCHC

SEQ ID NO: 194421 - protein, 105 aa, Glycine max
  unsure (1)..(105): unsure at all Xaa locations
  Clone ID: PAT_MRT3847_1758C.1.pep
SRTTKMVHEAREYIKQCLGGGEDDALILCGSGTTAAIKRLQEVMGIAVPSVLRERALKSLVFLXRWVVFVGPHVFYSNLLSWRQSLAEVVEIGLDHKGLLDIDGL

SEQ ID NO: 194422 - protein, 86 aa, Glycine max
  Clone ID: PAT_MRT3847_17590C.1.pep
MVLQNDIDLLNPPAELEKRKHKLKRLVQSPNSFFMDVKCQGCFNITTVFSHSQTVVVCGNCQTVLCQPTGGRARLTEGCSFRKKGD

SEQ ID NO: 194423 - protein, 128 aa, Glycine max
  Clone ID: PAT_MRT3847_17591C.1.pep
MGSSEMDKTPKEKESKTPPPPPTSQEQSSTTSTGTINPEWPGFQAYSPIPPHGFLASNPQAHPYMWGVQQFMPPYGTPPHPYVAMYPPGGIYAHPSMPPGSYPFSPFAMPSPNGIAEASGNTPGQHGS

SEQ ID NO: 194424 - protein, 100 aa, Glycine max
  unsure (1)..(100): unsure at all Xaa locations
  Clone ID: PAT_MRT3847_17592C.1.pep
MDYICFFVTFTAIALLGFVSVVFFEAYKRRNNHQHIEVPAIFEDPSSLKQVPCPHIVDPATKYISLIIPAFNEEHXLXGALEETMNYLHQRTLKDSSFTY

SEQ ID NO: 194425 - protein, 37 aa, Glycine max
  Clone ID: PAT_MRT3847_17593C.1.pep
AERGSRYENNATYTMRPFLNSLRIHEWKTGRPLSLVH

SEQ ID NO: 194426 - protein, 186 aa, Glycine max
  unsure (1)..(186): unsure at all Xaa locations
  Clone ID: PAT_MRT3847_17594C.1.pep
IQAVAKREYHHGDSSDSDPRFRISDIPAAVFGSRAHLEEKALATVMCCLLHSLFYCCHMCRSSWLNNLNXCFQRKWYRNFLMKGFHLVVLMAAGPGICDTQCGFKMFTRAAARKLFSNVRLKRWCFDVELVFLCKWFRISISEISVNWSEIPGSKVNLLSIPNMLWELVLMSVGYRTGMWRISNSA

SEQ ID NO: 194427 - protein, 133 aa, Glycine max
  unsure (1)..(133): unsure at all Xaa locations
  Clone ID: PAT_MRT3847_17595C.1.pep
PTPPKTNKQQPKGSLLKEKKTPPTNREREKPETHDLIEKEKRITPEGDQQKEEXNEHPNPKNQDNTNALTNKNPEGRPSNRYYGGNEDIDQIGWEVPPPTHKTKAATPKSXGVNVQPYPGSPDKIAGYTAGLN

SEQ ID NO: 194428 - protein, 91 aa, Glycine max
  unsure (1)..(91): unsure at all Xaa locations
  Clone ID: PAT_MRT3847_17596C.1.pep
MMMMLEDMGFCGDLDMFSAPLGEGDITARQTEPEVIVEDDYSDEEIDVDELERRMWRDKMRLKRLKEQSKPKEGFDAVKQRQSQEQARSXX

SEQ ID NO: 194429 - protein, 444 aa, Glycine max
  Clone ID: PAT_MRT3847_17597C.1.pep
MEGNLPQGGIIQGGTSFGGFDLPGSIRVQHQAQHPHSMHQHQTHPRQGSSVHSAVHDGFPLTMGTMQNCDQTISLADFSKGDRSKNSASEEDEPSYTEDGVDCHHETTRGKKGSPWQRVKWTDKMVKLLITAVSYIGEDVTADGGSSGRRKFAVLQKKAQWKSVSKVMAERGYHVSPQQCEDKFNDLNKRYKKLNDMLGRGTSCQVVENPVLLDVIDFLSEKEKDDVRKILSSKHLFYEEMCSYHNGNRLHLPHDPALQRSLQLALRNRDDHDDDMRRSHHDEDDQDVEIDDHDDFEENCASHGDSRGIYGPLGGSMKKLKQCQGQEDANTFGNSLNCQDYNKSSYPHGQMIPSDVNQGLPEGMKAAWLQKQWVESRTLQLEEQKLQIQVEMLELEKQRFKWQRFSKKKDRELEKLSLENERMKLENERISLELKRKEMGTGFK

SEQ ID NO: 194430 - protein, 332 aa, Glycine max
  Clone ID: PAT_MRT3847_17598C.1.pep
MICRLFTIYFTFFLCLLFTFFVPYVHSNNQLDTNFYDGSCPNLATIVRYGVWSAIKNDNRMAASLLRLHFHDCIVNGCDASVLLDDTPYFTGEKNASPNRNSLRGMEVIDNIKEQVERQCPSTVSCADILSLAVREAIDLVGGPSWPVALGRRDATKANRMEANQQIPSPFEPLDNIIAKFTSKGLNLRDVVALSGAHTIGYARCLTFKRRLFDFQGSGRPDPVLASSLLSKLQSTCPNGDTSNSYIAPLDSNTTLTFDNEYYRNLLYNKGLLESDMALLSDRRTSSMAYFYSTDQYSFYNDFAASMVKLSNVGVLTGIQGQIRRKCGSVNY

SEQ ID NO: 194431 - protein, 47 aa, Glycine max
  Clone ID: PAT_MRT3847_17599C.1.pep
TTEGYGCDNTHKGSACEKTTEGYGLGKNYRRVRLRLDYSRGDGCFLS

SEQ ID NO: 194432 - protein, 106 aa, Glycine max
  Clone ID: PAT_MRT3847_1759C.1.pep
MQRLPAATRATLILSLAFASLHSACSAASSSNSSTLTAHHPDPGTLEQCLNVDFCPQADRCCRTGVDEYGWIAAAVGWSLWFLTLILLCVDKLMKLTPDEPKDLQA

SEQ ID NO: 194433 - protein, 65 aa, Glycine max
  Clone ID: PAT_MRT3847_175C.1.pep
RKASKRENNIVQGPSLIKYYSSGLFLLKIKGHLKGWFGSFIIIPGIRQLKSPSPFVAFQEVTSLV

SEQ ID NO: 194434 - protein, 96 aa, Glycine max
  Clone ID: PAT_MRT3847_17600C.1.pep
RAVLCTIFYLLGLWHHAPSSFPAAEFTTITTGNPICLNSSPTLNFSATNFPPNPDAWRDFNPPPCAASFSEYTPCEDVQRSLKFPRENLIYRERHC

SEQ ID NO: 194435 - protein, 266 aa, Glycine max
  Clone ID: PAT_MRT3847_17601C.1.pep
MLELRLVQGSLLKKVLESIKELVNDANFDCSSTGFSLQAMDSSHVALVALLLRSEGFEHYRCDRNTSMGMNLNNMAKMLKCAGNDDIITIKADDGSDTVTFMFESPTQDKISDFEMKLMDIDSEHLGIPEAEYHAIVKMPSSEFARICKDLSSIGDTVVISITKEGVKFSTKGDIGTANIVCRQNTSVDKPEEATVIEMNEPVSLTFALRYMNSFTKATPLSNTVTISLSNELPVVVEYKIAEMGYVRFYLAPKIEEDEEDTKPQV

SEQ ID NO: 194436 - protein, 568 aa, Glycine max
  Clone ID: PAT_MRT3847_17602C.1.pep
IRHSSISFFSYISEEPMAAASFGQVYFARTTDGNNVAVKVQRPNLHHVVVRDIYILRLGLGLLQKIAKRKSDPRLYADELGKGFVGELDYTLEAANASKFLEVHSSFTFMNVPKVFPHLTRKRVLTMEWMVGESPTDLLSVTAGNSVGNVSGYSERQKLDAKRRLLDLVSKGVESTLVQLLETGLLHADPHPGNLRYTSSGQIGFLDFGLLCQMEKRHQFAMLASIIHIVNGDWASLVRALVDMDVVRPGTNIRLVTLELEQALGEVEFKEGIPDVKFSRVLGKIWTVALKHHFRMPPYYTLVLRSLASLEGLAIAADTNFKTFEAAYPYVVRKLLTENSAATRNILHSVLLNQRKEFQWQRLSLFLRVGATRKALRLVASNSETSLDHSTNKATDTIDVAYLVLRLLPSKDGVAIRRLLMTADGASLIKAMVSKEGKFFRQQLCKIIVDLLYQWMIKLFGPRITVTQYSRVVLANGPSNKESGLSPRSSLPTYDYNSIFRDRRLRVIFSKVLKSASRDKILMLRFSWASLLIIITASTLACHQLVVSLSEAYLGKIFDAPKRYAVSV

SEQ ID NO: 194437 - protein, 117 aa, Glycine max
  unsure (1)..(117): unsure at all Xaa locations
  Clone ID: PAT_MRT3847_17603C.1.pep
RKKVVTDLTRDNFQSGEWKELEFKEYNYSAKGQPLEGGSLHPLLKVRAQLKQIFLCMGFEEMPTYNFVESSFWNFDALFQPQQHPARDSHDTFFLETPSTTKILPEDYXVHRVRQVH

SEQ ID NO: 194438 - protein, 41 aa, Glycine max
  Clone ID: PAT_MRT3847_17604C.1.pep
GINIGLCAISQAVSVQCKLVGCLTVRTACYGVLKFGMENRA

SEQ ID NO: 194439 - protein, 53 aa, Glycine max
  Clone ID: PAT_MRT3847_17605C.1.pep
FLKPFQQTASEIWLTTTKICLTGENCNCFYNWIGSGFKILEITIYIILANEIH

SEQ ID NO: 194440 - protein, 59 aa, Glycine max
  Clone ID: PAT_MRT3847_17606C.1.pep
TVFQSSSLLFLSRSACPQLDDDSRGRGPSHFELPLLSIQLALGWISRSPRAEAQALEAS

SEQ ID NO: 194441 - protein, 53 aa, Glycine max
  Clone ID: PAT_MRT3847_17607C.1.pep
SGFSSQQRDCLMNYNLMNSCHKKSHLLSYHLGSSQRPSKLNELEFIMFLEFVL

SEQ ID NO: 194442 - protein, 35 aa, Glycine max
  Clone ID: PAT_MRT3847_17608C.1.pep
SLLTLALYLLKLMTLSYISITGTHPDLNHRPPTRQ

SEQ ID NO: 194443 - protein, 78 aa, Glycine max
  Clone ID: PAT_MRT3847_17609C.1.pep
MKLHRGKSALLSLVLSSSFLEISMAGSPFCDSKSAQRCAKAGVQDRCLKFCGICCEKCNCVPSGTYGNKDQCPLLHGP

SEQ ID NO: 194444 - protein, 44 aa, Glycine max
  Clone ID: PAT_MRT3847_1760C.1.pep
FKFLGRMFWPFTLYLLRDCCSNFLWIMQCSFSKHGLSYSLELIA

SEQ ID NO: 194445 - protein, 319 aa, Glycine max
  unsure (1)..(319): unsure at all Xaa locations
  Clone ID: PAT_MRT3847_17610C.1.pep
MAATASVSSSICNRIYNLSFTHPSLSLTSSNFPQRPVSQKPLSLNLESQSFALSFLPLHRLPPPFAAFDGLEVAQDTTESQQDEPEPETVEKTEQEEEQKVSDSNDAGRLYVGNLPYSITNSELAELFGEAGTVASVEIVYDRVTDRSRGFAFVTMGXSVEDAKEAIRMFDGSQVGGRTVKVNFPEVPKGGERLVMGSKILNSYRGFVDSPHKIYAXGNLGWGCXQQGLREAFAEQPGVLSAKVIYERDSGRSRGFGFVSFETAESARAALDIMNGVEVQGRPLRLNLAEARTPSSPPVIQKNVGSNVESSELVSSAST

SEQ ID NO: 194446 - protein, 93 aa, Glycine max
  Clone ID: PAT_MRT3847_17611C.1.pep
VFQKNPVPNSCNFGGTAVIISTNPSTGACQYPSPSTSTSVLNTTNSNGANVFGSVPVPTNPSPSFVGAPDTLNSFADICVILWIISPLQRNYL

SEQ ID NO: 194447 - protein, 281 aa, Glycine max
  Clone ID: PAT_MRT3847_17612C.1.pep
MPALRHLQFAGLDCWCSLGSAASEGWRRKQKGIANLIARVPMENILYLGGPNIASEIYNKEYANARICGAEKWRKPLAKFLRQPHFIVWDNSDLVTHEVMGGLKNVYAIGAGMVAALTNESATSKSVYFAHCTSEMIFITHLLAEEPEKLAGPLLADTYVTLLKGRNAWYGQMLAKGQLSPDMGDSISGKGMIQGVSAVEAFFELLSHSSLNVLHPEENKPVAPVELCPILKTLYKILISREQSSEAILQALRDENLNDPRERIEIAQSHVFYKPSLLGQP

SEQ ID NO: 194448 - protein, 166 aa, Glycine max
  unsure (1)..(166): unsure at all Xaa locations
  Clone ID: PAT_MRT3847_17613C.1.pep
GDSPRSTPRISELYSKPEATAMHVGAIEIIIDSSTSPDCNITGARPMADTYDTNSVNAPHTIXVAPFTGVRPIPVXSSTNTMAQIEPNTNSXFSLLSTTTNGDSGQRKDLAXMDKCYVACTAGGXTSSYTPTPTLESGLQKDSGLSGEYFGTMAHFAHNVHQPQEK

SEQ ID NO: 194449 - protein, 58 aa, Glycine max
  Clone ID: PAT_MRT3847_17615C.1.pep
DCPQAVGIGFIASALLLCIQVSIHDGVPPGLMPIEEEPDKCECYSAMLVRVCPNSRAV

SEQ ID NO: 194450 - protein, 71 aa, Glycine max
  Clone ID: PAT_MRT3847_17616C.1.pep
AAHVSKQPSSQHCHRGEDIMGAGKSHRFCEVIVRGLCVFNVQLLFCSASLNVEPGACVRSLLCRVIICTIR

SEQ ID NO: 194451 - protein, 84 aa, Glycine max
  Clone ID: PAT_MRT3847_17617C.1.pep
VGVPSKQGIVENHVRAENYNTSAVEFLRRCPGVTDSNYRAIMDGCKSLAELALLPVEKLAELMGGHKAARTLRDFLDAKYPTLL

SEQ ID NO: 194452 - protein, 87 aa, Glycine max
  Clone ID: PAT_MRT3847_17618C.1.pep
ILPTHGIKGTPLKNFMFLGCIALYRKCTFINHMNVSILEMSFVNIIFPCYLTNCFCTYLIILKAVFCIRVLNTVIKCSQSSPLNRSR

SEQ ID NO: 194453 - protein, 54 aa, Glycine max
  Clone ID: PAT_MRT3847_17619C.1.pep
INLNLYFLIQVFPIFRLLKKDHLHRINSSTIFLKRMGKVTPSNLLPIHMQNEIQ

SEQ ID NO: 194454 - protein, 94 aa, Glycine max
  Clone ID: PAT_MRT3847_1761C.1.pep
FTRSMILMCHLACNPLWYNRLHKTCSYRIRCIIQMKLGWIECVLHDDSTSSFVTPISVVSVMSLACEFRVFAGTGFLETEYTRAVVTLIKRSNC

SEQ ID NO: 194455 - protein, 326 aa, Glycine max
  unsure (1)..(326): unsure at all Xaa locations
  Clone ID: PAT_MRT3847_17620C.1.pep
PQNFVTRKAGGRKEAEKEMQVIVDMREFMSSLPNVLHQKGMNIIPVTLEVGDYILSPLICVERKSIQDLFMSFTSGRLYHQVETMVRYYRIPVLLIEFSQDKSFSFQSASDIGDDVTPNSIISKLSLLALHFPRLRIIWSRSLLATAEIFASLKAGGRNQDEPDERNADHSSDPRSWXLYSITINLCGKKKFQDLFMSFTSGRLYHQVETMVHISPDLVNGKSRDEGISFQRASDVSEDIRVGVPSEEGIVENDVRAENYNTSAVEFLRRLPGVTDSNYRAIMDXGCKSLAELALRPVEKLAELMGGHKAARTLRDFLDAKYPTLL

SEQ ID NO: 194456 - protein, 65 aa, Glycine max
  unsure (1)..(65): unsure at all Xaa locations
  Clone ID: PAT_MRT3847_17621C.1.pep
MPLSPRKGSAGHWFMRGTRFEKSGLIQPAHSPYFFIAXDVLPIGAALRAAFALSRPSNSPSSCPL

SEQ ID NO: 194457 - protein, 61 aa, Glycine max
  Clone ID: PAT_MRT3847_17622C.1.pep
HRVTAHVTIQMYCLKVYGLFTALWGVTCHSTDIDLISCLCIEVFELVMASDESLHGPWGSA

SEQ ID NO: 194458 - protein, 74 aa, Glycine max
  Clone ID: PAT_MRT3847_17623C.1.pep
TTQDLPNIVQIHTATYCYDAGVVPTGARIKPTNDEAGVIAPSIYHIGICPSTVYGLTSLSGLTVCGILLLMSAL

SEQ ID NO: 194459 - protein, 56 aa, Glycine max
  Clone ID: PAT_MRT3847_17624C.1.pep
KLVSTASNFFVNSRFFFKGALWVSGAFTPAGPGGFFLGAPRGWPLIKPFPCLTPFF

SEQ ID NO: 194460 - protein, 470 aa, Glycine max
  unsure (1)..(470): unsure at all Xaa locations
  Clone ID: PAT_MRT3847_17625C.1.pep
LRVLDLRNLGIEVVPSSIGDLKELEYLDLSQNKMKKLPSSIAKLSKLHTLKLFSCFDLTRMPCEMSKLSSLKTLSTFVASKKETMGGLGELAKLNDLRGNLEILHLDXVRCSSSTNGERKLLLAKEHLQRLTLSWTPKGDKEGGHLSQLLESLKPHSNLGSLILVGFPGSSLPGWLNSLTKLVKLSLQDFQKPHGCKLKYLSEQDNQLPPKLKILELENLENLEYITEKCIDGENFYKSLEEMTIKNCRKLESWRGTETEAGPLFEKISKLHLHNCTLKLLRLNTTSIPLKDLHIQYCRDLENLSGVFQHLSSLQRLTIENCDMSSLDGESKAWEGLKSLSCLTLRDIKHLSSLSFGDGVTTLQQLTLEKCHLLPSISIGKLTSLQELTLRNCDKLTSICIDKVASLRSLKISGCNKLESLPKTSEALNSLKTLHILDCALLQPRCVEPTGEDWPQICNIKYLKVGKTVH

SEQ ID NO: 194461 - protein, 45 aa, Glycine max
  Clone ID: PAT_MRT3847_17626C.1.pep
KQRRPAPLGLAMDYKSELDITFSPKTLGNWVYWSVPLCYLHLAHS

SEQ ID NO: 194462 - protein, 85 aa, Glycine max
  Clone ID: PAT_MRT3847_17627C.1.pep
QRRDWKNPGVPKFNPFEKNPLFPSWVITKKAPPNRLSKNLPTLIGKWNPPCTGPLTPGVVGVTPRVTVTFASPLAPVLLVFFLSF

SEQ ID NO: 194463 - protein, 167 aa, Glycine max
  Clone ID: PAT_MRT3847_17628C.1.pep
CTNQPTALGASVLKETVPHSPKPLHENKPQISAPAAKAQVVGWPPIRSFRKNSMASQPQKNDAAADAEAKSGCLYVKVSMEGAPYLRKVDLNSFTTYKDLSLALEKMFSCFTLKYVLTYEDKDGDWMLVGDVPWEMFTESCKRLRIMKSSEAIGLAPRAMEKCKSRY

SEQ ID NO: 194464 - protein, 88 aa, Glycine max
  Clone ID: PAT_MRT3847_17629C.1.pep
HDGHRRWVTMVKGKLRQKGIWKFAKQGQSSRVGYCSSQRRACRQKHSLNRFPTCRHAPKTEPAWLDVLRKELACGGALIFLWRCGGWR

SEQ ID NO: 194465 - protein, 65 aa, Glycine max
  unsure (1)..(65): unsure at all Xaa locations
  Clone ID: PAT_MRT3847_1762C.1.pep
VFVVVVFGGVCLGAGAGGGGWSWWWCCVCGALAGGLSRCLCGRVRVRVXRWQSFELFSGPPXPPC

SEQ ID NO: 194466 - protein, 81 aa, Glycine max
  Clone ID: PAT_MRT3847_17630C.1.pep
SGQCGSYGVSSRENLSESRLMDLLHGSEYVLTYEDKDGDWMLVGDVPWEMFTESCKRLRIMKSFEAIGLAPRAMEKCKSRY

SEQ ID NO: 194467 - protein, 403 aa, Glycine max
  unsure (1)..(403): unsure at all Xaa locations
  Clone ID: PAT_MRT3847_17631C.1.pep
MVVSKCLSLTLHVPTHPSTPFLTPPSKKTPTLSYSSTHFSFQTKLNKAFPTSYNHSLTKHFPMKCSNSSSYTSPPDFELESDDPTLTNEDLKPTTPSQRTFAGFEIASLWVGLVVGVPSYYLAGSLVDLGMAWWQGIATVVAANMILLVPLVLTGHAGTRYGISFPVLVRSSFGINGAHVPTLIRALIGCGWYGIESWIGGEAIFLLLPKAMKEATSLSQSLPWLGTSPLEFACFLVFWVAQLAFVWKGIDGIRKLEKYSAPILVALTSCLLIWSCVKAGGIGHMLSLSSRLSTSEFWSVFFPSLTANISFWATVAINIPDFTRYAKSQKDQVIGQIGLPIFMGAFTFVGLAVTSSTKVIFGQVIXDPILLLGQIGGLTTKIVAILGISLAIITTNIAANVVA

SEQ ID NO: 194468 - protein, 101 aa, Glycine max
  Clone ID: PAT_MRT3847_17632C.1.pep
ASAPSPREENVCMAKLAVLGERYEEMEASMEKVYADVDNQERTAEEMNHLCVAYKNEIGARRASWRIISSIEQNEESRGIDDHMYVNRCYLFKIQSELSSI

SEQ ID NO: 194469 - protein, 147 aa, Glycine max
  Clone ID: PAT_MRT3847_17633C.1.pep
EKHNGGLVDRAVDAVGYQAVGTSGNKEEPNIVLANLIRVVRPTGGLGIPGLYVPSDPGAPDSAAAQGNLVIPFGKLFEKGLSLGTGQCNVKAYNRQLRDLIIAGKAKPSFVVSHHVSLEDAPEAYRKFDAKEDGYTKVLLQPGLSRK

SEQ ID NO: 194470 - protein, 67 aa, Glycine max
  Clone ID: PAT_MRT3847_17634C.1.pep
LALSVSTLPSVGPAAILSHSFEKRVSHAKLADVLRCSCLRSYHLWNSQRPQGGVGNHMSSSKGAYSV

SEQ ID NO: 194471 - protein, 61 aa, Glycine max
  Clone ID: PAT_MRT3847_17635C.1.pep
PGNSESNSLGIRVGLIRKPMNTIYICNTCAAYNLENIDLEFPEESTISFPLASRLAYYENN

SEQ ID NO: 194472 - protein, 46 aa, Glycine max
  Clone ID: PAT_MRT3847_17636C.1.pep
GKYNSFKQPLPNTTRSDHIGNIRGCYGHARQYKEQAIKPSHPIELT

SEQ ID NO: 194473 - protein, 75 aa, Glycine max
  Clone ID: PAT_MRT3847_17637C.1.pep
IALYVVLFCFSLKVVRKWNCSIVLIFSWNYSCNRSLTIGQMQGKFQMVVVRRTGHAIQVCTSHVSFCIHYKNEVT

SEQ ID NO: 194474 - protein, 60 aa, Glycine max
  Clone ID: PAT_MRT3847_17638C.1.pep
RRGRRRGRVREREPYVKLLVPSSTELSIRVKDSLRTRPPPALPYLFSSERPPFIFIPPLS

SEQ ID NO: 194475 - protein, 176 aa, Glycine max
  Clone ID: PAT_MRT3847_17639C.1.pep
KSQLFREVFLDFDPSAVSRMNEKKIAAPGSPANSLLSELRLRSIIENARQMCKVIEEFGSFDTFIWNFVNHKPIVSQFRYPRQVPVKSPKAEFISKDLVRRGFRSVGPTVIYTFMQVAGLTNDHIISCFRFKECTSNAEAMGKESSLNSKVKEKANEEPTSVGLLLSVNKLSFTSK

SEQ ID NO: 194476 - protein, 53 aa, Glycine max
  Clone ID: PAT_MRT3847_1763C.1.pep
QYEITQNLEKMFFFLNNLTIFCTYKSPTHLLVKSYWLCTNPLFVLGKNRKRER

SEQ ID NO: 194477 - protein, 88 aa, Glycine max
  Clone ID: PAT_MRT3847_17640C.1.pep
ADKPGFIACLKFFSVRLNKERLLSKNTPLQRDSRSLAVPPPLVWGPSLGFHPLRVYNPLLCETFVFSKTKPTPLFTPITFFGTLLEHP

SEQ ID NO: 194478 - protein, 87 aa, Glycine max
  Clone ID: PAT_MRT3847_17641C.1.pep
MESIISKLRNLDAYPKINEDFYSRTLSGGVITLASSILMLLLFYSELRLYLHAVTETKLVVDTSRAETLRINFDVTFPALPCSILSL

SEQ ID NO: 194479 - protein, 142 aa, Glycine max
  unsure (1)..(142): unsure at all Xaa locations
  Clone ID: PAT_MRT3847_17642C.1.pep
EINXXNLXXXXINGPFISVXLHNVPWGAEDTMAAXDAKFSDGYXDLIIIKNCPTLPVRSMMSELNKGGHVKSPYVTYLKVKAFNLQPGPRTKDQEKEGIIDSDGEVLARGKGTYKCEQKTLMAYDKLQITVDQGLATLFTPL

SEQ ID NO: 194480 - protein, 99 aa, Glycine max
  Clone ID: PAT_MRT3847_17643C.1.pep
SLAPMANCKASRRMGNTDAQIPMVPGRIFIAHGHLFKNPTQNARVQICTSEKSYWHVYDPDKLHMFVNMRNSTFILTPTSVRSPTFTLGTCYRWDTRDN

SEQ ID NO: 194481 - protein, 112 aa, Glycine max
  unsure (1)..(112): unsure at all Xaa locations
  Clone ID: PAT_MRT3847_17644C.1.pep
KMTALYTKRTVSLFIASGRWADDTSNEEASPHRPEPLGEIQENSCRKFAQEESITGWTTRVRTATTVLAXGCHKCLLRRVKSXYTIPGDYVIXTXLTSLNNMCAYGHNPGIT

SEQ ID NO: 194482 - protein, 237 aa, Glycine max
  unsure (1)..(237): unsure at all Xaa locations
  Clone ID: PAT_MRT3847_17645C.1.pep
ATASPSVLPTHCVSPAASARALRGPRPLLEASSSSGLSVGTGPPIQLPTHSPSWRGVVLHSGILSGIRVYYPVKVTFWFKQEEKIYKIRSVDCPALVLHGTKLQKLDGVHGKSAILSGIRVLYPVKMTFWFSIXKNIYKIRHVACTEFVIHGTNDDIVDWSHGKRLWELSKEKYDPLWVKGGGHCNLETFPEYIKYLRKFINAMEKLSLTKQTNKQLTQNPSITESRHNKCLRFGKK

SEQ ID NO: 194483 - protein, 63 aa, Glycine max
  unsure (1)..(63): unsure at all Xaa locations
  Clone ID: PAT_MRT3847_17646C.1.pep
MADEIQNKYESSEVXVQDRSTYDFLGKNXDEEDKPHPXEEVIDTEFQKVTVSDHGENKHSLLE

SEQ ID NO: 194484 - protein, 60 aa, Glycine max
  Clone ID: PAT_MRT3847_17647C.1.pep
GFAQAFPYLIFFLKKNARIVLTIKQFPGVNKFVHLALLFLCEVIIRAFLYYTKIFTLLIP

SEQ ID NO: 194485 - protein, 162 aa, Glycine max
  Clone ID: PAT_MRT3847_17648C.1.pep
SFNGRSGGPAGVRDWQGAEPGSAGVLLQNDEDHGQLAEAGRDANCQTRQIVTETVGKCRGRAAVAYQRKVAVRAVVQQCATRGRVHVFCARGFVPLRAARLRARAVGLALQRPLYVQQAQHLHGAAGSRAMVRAGNEQLRQQEGEAEAAAARQQAVELPLRA

SEQ ID NO: 194486 - protein, 46 aa, Glycine max
  Clone ID: PAT_MRT3847_17649C.1.pep
GKVTKTGAATQWFFSKPIHNFDTTLLGHIKLSELNPHPFTLANKLA

SEQ ID NO: 194487 - protein, 55 aa, Glycine max
  Clone ID: PAT_MRT3847_1764C.1.pep
HASGWFRFVFLRLSFLTYNGSCVYRPSNEMIVRNYRIKKKKKSANKKKTKKNTTA

SEQ ID NO: 194488 - protein, 66 aa, Glycine max
  Clone ID: PAT_MRT3847_17650C.1.pep
YYFSERLLVFLSNNCGVGCNALILKEVISKPHICVCVTLSVMIHIKYNFLMISDIVTSENSLLHHR

SEQ ID NO: 194489 - protein, 61 aa, Glycine max
  Clone ID: PAT_MRT3847_17651C.1.pep
RVKSYVLITPSNSYCTSYLLVMHTLLTPMLSQTRMTIYFYSRHNGGDKPDSRSGLVKSLHL

SEQ ID NO: 194490 - protein, 80 aa, Glycine max
  unsure (1)..(80): unsure at all Xaa locations
  Clone ID: PAT_MRT3847_17652C.1.pep
GNLGIIAPIAFGFIVGANILLGGALFGASMIPGVHIAXAVVSWNXPGNKILWSGPLVGGCKTGLEVRIIEQPHPRKGYPR

SEQ ID NO: 194491 - protein, 72 aa, Glycine max
  Clone ID: PAT_MRT3847_17653C.1.pep
TSHFFFPALSMGIIWVEVCLISAHGLQLSTSLWKRQWFAVGWIDHNSKYCTKVVNSGNANPVWRTKFVLEPN

SEQ ID NO: 194492 - protein, 88 aa, Glycine max
  Clone ID: PAT_MRT3847_17654C.1.pep
VSRPSIRIKHPPPPKMVSGLKGPGGKTQGFFPFLPQPPKTFPNFYGQPPDPFLAYPHFYPLGEKALNQLLGAPPLAFREKARQTNCPQ

SEQ ID NO: 194493 - protein, 77 aa, Glycine max
  Clone ID: PAT_MRT3847_17655C.1.pep
AIISFLVLATVNKSCTLLLSLDQRGIAFRAELCTNAVKRKTNIFNLWTLNKCLIHASFERVKRNFGTKGTSSACNKG

SEQ ID NO: 194494 - protein, 65 aa, Glycine max
  Clone ID: PAT_MRT3847_17656C.1.pep
NDLLEMLHRILFFQIQGLDCILLGNYLQKRAPEMIHALSDVMSDNTTDCVRSAANNMSLRHKHKD

SEQ ID NO: 194495 - protein, 98 aa, Glycine max
  unsure (1)..(98): unsure at all Xaa locations
  Clone ID: PAT_MRT3847_17657C.1.pep
VKASTREDVDGNPITTINMSETGAXGWIGYHLCKKLMSDTANKHGGSLVGYDRMRHLTVSDTLTWAFCIQHHRLIIQHDPGMVRLIKKPEMNSDLADT

SEQ ID NO: 194496 - protein, 70 aa, Glycine max
  Clone ID: PAT_MRT3847_17658C.1.pep
LHRDCRTEHRTDSPSDYINAPLPTSGHHTSISSSLCKISIYNMPSTMRVQRTFLGVSQLQLPQCLYQKPP

SEQ ID NO: 194497 - protein, 58 aa, Glycine max
  Clone ID: PAT_MRT3847_17659C.1.pep
FDPPDLALTVDDCTIEEQVRDQRGWISSPNGGRDTSMDYDDNDFQSQNLHLPGEGSTK

SEQ ID NO: 194498 - protein, 230 aa, Glycine max
  unsure (1)..(230): unsure at all Xaa locations
  Clone ID: PAT_MRT3847_1765C.1.pep
RVRKPSPSSLLPNPTAIESLPPLRDVDVSERPALFLRKIQVCCFLCDFSDVLKYVYEKETKRQTLEELVEIIQSGSFGFTENQEDLINMVSVNIFRCFPPSSLNTQNVDPEDDEKYQEPSWPHLQLVYEILLRYIVSPETDIKTSKRYIDHIFVLKLIELFDSEDQHEREYLKTILHRIYGKFMVHRPFIRTAINNVFYRFIFETQRHNGIAELLEIWGSIXNGFALPMK

SEQ ID NO: 194499 - protein, 82 aa, Glycine max
  Clone ID: PAT_MRT3847_17660C.1.pep
ILVSVYADCTLFLRNPGILNFLSCSKSLNCCSALQSVIAIILLVIAINCTLFFWGSINYLFVIRWISQFRNIKRLFERQALN

SEQ ID NO: 194500 - protein, 73 aa, Glycine max
  Clone ID: PAT_MRT3847_17661C.1.pep
LQNALPTLSAIPIPHTDPKIQALLVHLPNPAYAIDLYIALYPERPFRQLILRVQTRPAFKAPNALITNASIKL

SEQ ID NO: 194501 - protein, 705 aa, Glycine max
  unsure (1)..(705): unsure at all Xaa locations
  Clone ID: PAT_MRT3847_17662C.1.pep
SKVCLYHMVKLAREATTLRRVLQPLFHYFDSENQWSSEKGVPDHVLMYLQSLLAESGDNSCLLLSILVKHLDHKNVAKQPILQINIINTTTKLAQNLKQQASVAILGAISDLIKHLRKCLQNSAEASSTGNDGFKLNTELQFTLXMCILHLSKRVRDVXPFLDLMNXGXEVVRNTAIIAYTTISAVYQXAKLIMSIPNVSYHKKAFPDALFHQLLLAMAHPDHETRVGAHSIFSLVLMPSPFSPQLDQKTNMSQKVPSESFSIQHESFLGAEQINGKSMEGKAVVSVSGKYAVHPYHGHIFSGALTDGKHELSSFRLSSHQVSFLLSSIWVQATSLDSGPANFEAMAHTYSIALLFTRSKTSSYMALVRCFQLAFSLMSLSLDQEGGLQPSRRRSLFTMASYMLIFSARAGNFPELIQKVKAFLTETTVDPFLELIDDVRLQAVYREPENIIYGSQEDDVSAMKTLSAVKLDDKQLKETVISCFLTKFSKLSEDELSSIKKQLVQGFSPDDAYPLGPPLFMETPGKSSPLAQIEFPDFDEIVAPLALMDEETWPKSSGSQSDHKSSLSSNSPDILSVNQLLQSVLETARQVASFPISSTPVPYDQMKNQCEALVTGKQQKMSILHSFKHQQETRALVLSSENETKVSPLPIKTLDYSEGDLKLVSQQPIQAQYQVRLCSYDFGQQHSLKLPPASPFDKFLKAAGC

SEQ ID NO: 194502 - protein, 200 aa, Glycine max
  Clone ID: PAT_MRT3847_17663C.1.pep
MKAHLVLFLLMILVTFTSNVNTLSINPKSNSSIPQLTQQKRPDNETIYRVSKQLCWGCIAESLEFLFRHNLVRAAKWELPLMWDFQLEQYARWWAGERKADCKLEHSFPEDGFKLGENIYWGSGSAWTPSDAVRAWADEEKYYTYATNTCVPGQMCGHYTQIVWKSTRRIGCARVVCDDGDVFMTCNYDPVGNYVGERPY

SEQ ID NO: 194503 - protein, 119 aa, Glycine max
  Clone ID: PAT_MRT3847_17664C.1.pep
KITATMATPARAVKSTAGVEGEAAAAISQNLPPPPTERKVVSGRVVLVLLFKWVDDVNMGWNVGERGGVVWNYLNALSLRPSIFFFLLLFHHLVVLRGFDWLFFLVTQTPRKRGSFCFC

SEQ ID NO: 194504 - protein, 115 aa, Glycine max
  unsure (1)..(115): unsure at all Xaa locations
  Clone ID: PAT_MRT3847_17665C.1.pep
PTLKRGDTYRVFNSQPYSTNRNTKGPVGGQSGTPFGNLWPVFPPFEXXIKPLPFPFLISRTPKFSGSTLSLERGTGLILSSIPYLKVKTGRALGNSSKQLFQVSNFSLSXLNPXX

SEQ ID NO: 194505 - protein, 134 aa, Glycine max
  unsure (1)..(134): unsure at all Xaa locations
  Clone ID: PAT_MRT3847_17666C.1.pep
KMFNLSANFLTPRDAWAGTFEHVVGDLSSPRTDCPVTLPDVTPXRSTEAKENAGLSEFQSEVVQLAAVLNGDHFLSSFPDEMSKKMSVKEAHEYVRGAVSRFIRASKEAIKLGADESAIVDMRSSLTTRSSVHN

SEQ ID NO: 194506 - protein, 113 aa, Glycine max
  unsure (1)..(113): unsure at all Xaa locations
  Clone ID: PAT_MRT3847_17667C.1.pep
VFEVVKMTASYIKRTHCCFIASENMADDTINKKAYPHKLERIGEIHEKVAVNTQQEVCITAXELRGEQQQLITADGCTYEYALVHDRAESTIPLGFCDYVSRYTTMIQYECIW

SEQ ID NO: 194507 - protein, 193 aa, Glycine max
  unsure (1)..(193): unsure at all Xaa locations
  Clone ID: PAT_MRT3847_17668C.1.pep
TRLWRSGLLSCTRRFVEEMSIEPGAMVWRTLLSACIVHKNIDIGEFAASHLLELDPXDSVTYVLLSNMYAVTGKWGCRDQTRQMMKDRGVKKEPGLSWIEVNNSVHAFFGGDQKHPHVDKIYEYLEDLNELAAENGYIPQTNSLLNDVEXRQKGPAQIIHSEKLAIAFGLLSLSSSTPIHVFKSLRVXGDCHN

SEQ ID NO: 194508 - protein, 65 aa, Glycine max
  Clone ID: PAT_MRT3847_17669C.1.pep
GPVPQCISGFYPIEIPPARGPLWILGDVFMGGFHTVFGFGKLRAGYFDFAKSVNVTRAMTNQLLF

SEQ ID NO: 194509 - protein, 230 aa, Glycine max
  Clone ID: PAT_MRT3847_1766C.1.pep
KLIAAPSRESHASEMGQIPAMWEPDSDTNSSVGMEHVKSAGNMQVCGEDSGTNGIATLPNSGTAWFSQQSSKQLPNFDVWRDAESAGSYRRNEVPGKYKHHMEKNPLVLESSKDGNVEGAAHDLENSNKKEKSADSLGSNPSNPRAGGMRENSSFDGNDLHSPKLSGQGNRRPPVSRKFQYHTMAGQGNRKVEPYGIFQKHVKNSQPMPHQPLGGGSKYGNSDKKYNEMP

SEQ ID NO: 194510 - protein, 61 aa, Glycine max
  Clone ID: PAT_MRT3847_17670C.1.pep
RIEGYDASVLALWTGIAGILESIDSGIRTVWALIGAGKVLMRRGAICKAYILQPVESSNWS

SEQ ID NO: 194511 - protein, 78 aa, Glycine max
  Clone ID: PAT_MRT3847_17671C.1.pep
SSRALCDYCVISNSPANGNPVEHEEKFVADGVVFAELNEGLTRELTEGRYSGVAVKVTPMRTEIMIRGNKTQAVLGEK

SEQ ID NO: 194512 - protein, 132 aa, Glycine max
  Clone ID: PAT_MRT3847_17672C.1.pep
NLWADLCACLCACREKMIDGGNKVTRTEMIKNAFYNLYRAPKPPPHGEYSLSCIYDRLSDTSNRTGVFHHHHSRSNFSASTLLITHLLTEPPRPTRRPSPYPSKPTNLTSPRISPPGALQLSTLNRSCIRIP

SEQ ID NO: 194513 - protein, 112 aa, Glycine max
  unsure (1)..(112): unsure at all Xaa locations
  Clone ID: PAT_MRT3847_17673C.1.pep
KLVQFGXIHHKFVLKVSQEEWVAAWSTQVRPATTLLADGCPYLYAMVHDSSVSTIPCDFVIGVKLTTINNMCSYGLNPGILGSRFLGTIPYSISQQTVWNQMLPVXTPLNFD

SEQ ID NO: 194514 - protein, 47 aa, Glycine max
  Clone ID: PAT_MRT3847_17674C.1.pep
NHKILRSYSAMNTALPRAIYSLSTAGDVTLTHAPPSTCWHRITSLLT

SEQ ID NO: 194515 - protein, 60 aa, Glycine max
  Clone ID: PAT_MRT3847_17675C.1.pep
KKKKFFNKTTIYITTDKKGIYIKINFPAKKKFKTKHPNSKIFNPMYKVYQSKKEYLKVVE

SEQ ID NO: 194516 - protein, 156 aa, Glycine max
  Clone ID: PAT_MRT3847_17676C.1.pep
MAQPQPQSQPQHGQAALEQVQCFGRKKTAVAVTYCKRGRGLIKINGCPIELVEPEILRFKAFEPILLLGKSRFAGVDMRIRVKGGGHTSQIYAIRQSIAKALVAFYQKYVDEQSKKEIKDILVRYDRTLLVADPRRCEPKKFGGRGARARFQKSYR

SEQ ID NO: 194517 - protein, 74 aa, Glycine max
  Clone ID: PAT_MRT3847_17677C.1.pep
PKFQNATILSIMEIKIYQLHTYTTIILKPFTPSTTLSTNSIQKNEIHILYTTNFHSLTNNFTNNLFTTISICFS

SEQ ID NO: 194518 - protein, 36 aa, Glycine max
  Clone ID: PAT_MRT3847_17678C.1.pep
GFLLIKYKGGQTRRIKLRCILYFLASCKSRCQSSCT

SEQ ID NO: 194519 - protein, 303 aa, Glycine max
  Clone ID: PAT_MRT3847_17679C.1.pep
MEAASELDQGMKVLDSCLANINWRLKPSSKRRLQLDVLALITRMRAVVMVDYGGIMPQLQHHLSSLLQLALRDSPSIFEHIRVMVIQDMIYLIHITEIAHFVRSSFNSQQHPLLFVDLEHQPPKMITQIEESQLAMQLVSIQRLFLTVFSPEEPKSADDPKANANANAACQSSSSPSAHCIDLSNCMDNTDITVPTLNGWLLGYPVVYLFGKDHISDAIYHLSTKYLHIFQVFVCRNSTLKKGTQAEELLSFSVPYDLSMRGSNEQWAEAFLAHMQAKWERCASAWKSLKMEVSECHPQAIVL

SEQ ID NO: 194520 - protein, 233 aa, Glycine max
  Clone ID: PAT_MRT3847_1767C.1.pep
KAEEIELETVVTSKGDEDQKHAIKGFGFEDDRLMNCNWLQEPNADDLLMFFRILAVCHTAIPELNEETGVYTYEAESPDEGAFLVAAREFGFEFCRRTQSSIFIHERFSASRKVVEREYKLLNLLDFTSKRKRMSVIVRDEEGSLFLFCKGADSIIFDRLSKNGKHYLEATTRHLNEYGEAGLRTLALAYRKLDEQEYTAWNNEFQKAKAAVGADRDSMLERVSDMMEKGLIL

SEQ ID NO: 194521 - protein, 54 aa, Glycine max
  Clone ID: PAT_MRT3847_17680C.1.pep
IHLCLKNTLRFCFPTQSSCSYSSSESDRTCSLTYPLAWICLTSIRNIAPTNKYA

SEQ ID NO: 194522 - protein, 55 aa, Glycine max
  Clone ID: PAT_MRT3847_17681C.1.pep
MQGGTVHINWHDRKHVVSLDFHPHSASLTIDEADFEITFWHIKAVGSTDNLPVDA

SEQ ID NO: 194523 - protein, 48 aa, Glycine max
  Clone ID: PAT_MRT3847_17682C.1.pep
TGLPLIPPWRERKLKIDLGLVLVKTSSAFGPPKHVGNLYRRHKGYRSK

SEQ ID NO: 194524 - protein, 91 aa, Glycine max
  Clone ID: PAT_MRT3847_17683C.1.pep
LNRIYLELCWIYFFLSLQLKSLGYPINGSESCTDISGDSSCGNWLHCQRKFCVPGGAAEKELKRCQSSRRSPSGSNSLRRGSQPRRQWASP

SEQ ID NO: 194525 - protein, 66 aa, Glycine max
  Clone ID: PAT_MRT3847_17684C.1.pep
KKAPHLFSPLQPKKNMIYYTEPSPNFCHLKSPPPFFFTLKLDKVISLPSHKLPIINNFFYFILFFL

SEQ ID NO: 194526 - protein, 73 aa, Glycine max
  unsure (1)..(73): unsure at all Xaa locations
  Clone ID: PAT_MRT3847_17685C.1.pep
MXNPKVFFDMXIGGQSAGRIVXELYXDVTPRTXENFRAFCTGXKGVGRSXKPLXXKGSSFXRVIPEFHVSXWD

SEQ ID NO: 194527 - protein, 45 aa, Glycine max
  unsure (1)..(45): unsure at all Xaa locations
  Clone ID: PAT_MRT3847_17686C.1.pep
DPPSEEQSRMYTGSHMNRPIYPPEDKFAFKRRFTQDXNATLMCLG

SEQ ID NO: 194528 - protein, 47 aa, Glycine max
  Clone ID: PAT_MRT3847_17687C.1.pep
FHVGLIHFTVSVLYTNFHVSNPYISHQVRAIWLVEPLVLVTQVLRPN

SEQ ID NO: 194529 - protein, 92 aa, Glycine max
  Clone ID: PAT_MRT3847_17688C.1.pep
DFFTYLRIDYKFTQHPTSCGIEFELQIANTTFSAELQRIRISKNIIKTVLKQKKILIFWVMYINLYKGSCGYYYYKTFYSTKFQPLYKGDPA

SEQ ID NO: 194530 - protein, 132 aa, Glycine max
  unsure (1)..(132): unsure at all Xaa locations
  Clone ID: PAT_MRT3847_17689C.1.pep
MELGSIMHFLQDKTILVTGATGFLAKIFVEKILRVQPNVKKLYLLLRARDTESATQRLHTEIIGKDLFRLLKEKLGTRFNSFVSEKLAVVPGDISQDDLNLEDPILGEEIFNQTDVIVTXAATTNFDERPNL

SEQ ID NO: 194531 - protein, 55 aa, Glycine max
  Clone ID: PAT_MRT3847_1768C.1.pep
FFDNMSAMDNIQYIYKSRVGQLQALNNSNGPLVLVGKTGIYSYCLFDTALDVSPL

SEQ ID NO: 194532 - protein, 73 aa, Glycine max
  Clone ID: PAT_MRT3847_17690C.1.pep
RNNHNNIKPQCRGFGARRVLSNYLGAESKETKIVSNSTVMNGSNPSSNKAEQPERQNKSHAMNGKTKLTSEVV

SEQ ID NO: 194533 - protein, 44 aa, Glycine max
  Clone ID: PAT_MRT3847_17691C.1.pep
CWTLNLVPIHYISEFKLQNKINMIVIENSKVVFEYTQLLILLEI

SEQ ID NO: 194534 - protein, 42 aa, Glycine max
  Clone ID: PAT_MRT3847_17692C.1.pep
YVTKLVQLVKILTVGEFEMAHVLIFSIKMLPKNQVAFVCWFF

SEQ ID NO: 194535 - protein, 101 aa, Glycine max
  Clone ID: PAT_MRT3847_17693C.1.pep
SSRPRRGRRRRTGDFPADAVALPPAPMPLQVMTEDALPSFPQATAAAVMNGGCGLIVDPASGLPTALSSAAAAATAVSGGSTTENPILTALVKEMVRAMLN

SEQ ID NO: 194536 - protein, 102 aa, Glycine max
  Clone ID: PAT_MRT3847_17694C.1.pep
IKFSHGENLSPYLGQVFKPPQLGKDVKPTGTGQNKIPGGEGPKGGAPPFFYFYFNLLYFYFFFFLIYYNFIFIIFFFFFFFFFFFFFLKRVIPFGLKPTHTT

SEQ ID NO: 194537 - protein, 144 aa, Glycine max
  Clone ID: PAT_MRT3847_17695C.1.pep
PKLFISKLGIFFSHRNYLPKNSLFIKKPMKNPKFLIWTILGPLKGFFFIFPPKIIWGRNPQPKMVNEFSTALFFFFIFWKKKNLKGFSKKTMFGWDWKILVEICVWNFRKNGVFFFILGENGKFWWSLAALLKCPNPGPGGGPG

SEQ ID NO: 194538 - protein, 59 aa, Glycine max
  Clone ID: PAT_MRT3847_17696C.1.pep
MDLHKQHARYNCATYNAEDGLLNGGKPKTESHRAHPKLGENKNGATTKARKPPGKGETV

SEQ ID NO: 194539 - protein, 84 aa, Glycine max
  Clone ID: PAT_MRT3847_17697C.1.pep
AGSINEKGIKPQAPPPCGRKFFLEAKFSGEPNLGEIKSPPKGPCRTPHHQRPKMVFLLRHFVIYFFPFRTVPTCASFVPSADSQ

SEQ ID NO: 194540 - protein, 86 aa, Glycine max
  unsure (1)..(86): unsure at all Xaa locations
  Clone ID: PAT_MRT3847_17698C.1.pep
TLEHAMRVCRTWDXIISLMPKGGETIWGGLDWCLEDWNNYDQEISWGSNSATFNLSYEAVWIDCDEMSRESIQKISKKRAYTARTV

SEQ ID NO: 194541 - protein, 82 aa, Glycine max
  Clone ID: PAT_MRT3847_17699C.1.pep
SPQHTFSNGFKSLSIIHNRNLKICISKSLSERLPLVLFSRNTKSYVLLSTGKVLCILQLDRLIYSSIKNREIKNVTLCLRSM

SEQ ID NO: 194542 - protein, 110 aa, Glycine max
  Clone ID: PAT_MRT3847_1769C.1.pep
RGGPGTNHFISTGGPSMAPGGFPREGRRSLLWHPVGKSPPQEPFSPFERAQKNRRAPWPILWEGGKDFNRGGGSPPNPFEKGRGGLKKKIGDQSFPGPALNFNKQCDLGN

SEQ ID NO: 194543 - protein, 45 aa, Glycine max
  Clone ID: PAT_MRT3847_176C.1.pep
GWMHSIRVHMMQIALKFEHLSWLPQPNQTARCLILCQGCVPLVVS

SEQ ID NO: 194544 - protein, 70 aa, Glycine max
  Clone ID: PAT_MRT3847_17700C.1.pep
LALQILCSFCPGVKASSSDFFYHHGWERDSWVRLWVRLLECMNDICGLPECAIFVKKMIGNLDRKARDLS

SEQ ID NO: 194545 - protein, 114 aa, Glycine max
  unsure (1)..(114): unsure at all Xaa locations
  Clone ID: PAT_MRT3847_17701C.1.pep
AKADIVGLWALRFLISQDLLSDSLLKSXMYVSFLAGCFQSVRFGLEEAHGKGQALQFNWLYEKGAFVWDSEGTISVDFTKIEGAIESLSREILTIQAKGDKENAGLLLQKYCVG

SEQ ID NO: 194546 - protein, 90 aa, Glycine max
  unsure (1)..(90): unsure at all Xaa locations
  Clone ID: PAT_MRT3847_17702C.1.pep
KKTHAERQEYGSRERHTVFKLIGSPSGCVFYTEGGQLTNTILRXSYTDVLLDEIEKAHPDVFNMXLRFCXDGRLTDSMVRTFYFKNTLLI

SEQ ID NO: 194547 - protein, 140 aa, Glycine max
  unsure (1)..(140): unsure at all Xaa locations
  Clone ID: PAT_MRT3847_17703C.1.pep
GEEGFKLDVQPGNTYLLRIINAALNEELFFKIAGHELTVVEVDAVYTKPFKTDTIVIAPGQTTNVLLTTKHAAGKYLVAASPFMDAPIAVDNKTATGTLHYSGTLGSTITTLTSMPPKNATPLAXSFTDSLRSLNSKKYP

SEQ ID NO: 194548 - protein, 282 aa, Glycine max
  Clone ID: PAT_MRT3847_17704C.1.pep
LLLLEQNLPMDSAYKSEDVNAAPIRVIQLLYNAGDVKGPQTLAFNLPNDERIVKDRGSSMVMLKNVSEAKFKHILLPIAAACVANDQQEHVDFESFFTHTICHECCHGIGPHTITLPNGQKSTVRLELQEFYSALEEAKADIVGLWALRFLISQDLLSESLLKSMYVSFLAGCFRSVRFGLEEAHGKGQALQFNWLYEKGAFVWDSEGKVSVDFTKIEGAVESLSREILTIQANGDKETAGLLLLKYCVLTEPLKVALKNLEDIQVPVDVAPTFPIGNKILQ

SEQ ID NO: 194549 - protein, 158 aa, Glycine max
  Clone ID: PAT_MRT3847_17705C.1.pep
QVAEVNVLCFNLFVRPPFINNNGDDYKDERIREFLKMINTYDVICLQEMFGVYSRRRELLINEARKAGFLFHAVSPKPSTLSRHYIDGGLLVLSRFPITNFEFCPYPMGCGVDYYVQKGILYTKIQIGSASLHLFNTHTQANYEPDISCLLRKAEQLR

SEQ ID NO: 194550 - protein, 132 aa, Glycine max
  Clone ID: PAT_MRT3847_17706C.1.pep
IQSGVPSTSKHACMYLTIVSKCNLILWSSMNLALNRKLRDVRQWQRTWNGSCFSTLPRSQHAEQLLCHCTNLSHLQQTQGFMLTRGLDQDDILLARFIYTSASLGLSSYAYSVFISNHRPSIFFYNNVIWAL

SEQ ID NO: 194551 - protein, 113 aa, Glycine max
  unsure (1)..(113): unsure at all Xaa locations
  Clone ID: PAT_MRT3847_17707C.1.pep
ARTTICSKICSKHVQDFVLEPVTSKKADGPLHVVIKDFAHKCDDATKIAPYALATYALGESEASTECVPKRXTDTKSKSSTYLDTNGTGNXNQHPTIYEGIGLINPSSRVKYN

SEQ ID NO: 194552 - protein, 63 aa, Glycine max
  Clone ID: PAT_MRT3847_17708C.1.pep
YYHGHTIWPAHQCAWIPDRLSRISKSQLHLGQCESGQAPKAYGLSKTSQPFCGSWPYAGYLLT

SEQ ID NO: 194553 - protein, 94 aa, Glycine max
  Clone ID: PAT_MRT3847_17709C.1.pep
MILLLAADLKGKMEMSQQIQEYECLIKKLKEELREEKLRAKEEAEDLVQEMAELRYQFTSSLEEECKRRACIEHASLQRIAELEAQLQREHKNP

SEQ ID NO: 194554 - protein, 42 aa, Glycine max
  Clone ID: PAT_MRT3847_1770C.1.pep
MSGRGKGGKGLGKGGAHRPSLVLRDYIHGISKPALCGLCRSA

SEQ ID NO: 194555 - protein, 93 aa, Glycine max
  Clone ID: PAT_MRT3847_17710C.1.pep
MREWYRKGKKWKAGRESPDLSYTPYRSSSPQVSDRLLSSDFRAKSLQEKTRGTSMQNGGKDTMPLRGNHMLLRGEETESDSSEQLGDDDDNTP

SEQ ID NO: 194556 - protein, 40 aa, Glycine max
  Clone ID: PAT_MRT3847_17711C.1.pep
SHIQWCKQDKFRMIFYPCQIYQSPIGSVSVSITPHLTLCT

SEQ ID NO: 194557 - protein, 69 aa, Glycine max
  Clone ID: PAT_MRT3847_17712C.1.pep
ARGFFSPVKLGGLIKILCKMLWEWVFDQVFQIRSKKGLPKVFSKVESQLNVAESRAIKLLFGLHTDGHF

SEQ ID NO: 194558 - protein, 104 aa, Glycine max
  unsure (1)..(104): unsure at all Xaa locations
  Clone ID: PAT_MRT3847_17713C.1.pep
IFTRWHWHIRKGCWTLATEALQLMPYHSELIMLTKMIYMIASRITAQLKTRRILLRINSSXLIMHLKQRXWTNHNKKLRGTGEEVSACLSIIGMPGNVXAKRAH

SEQ ID NO: 194559 - protein, 130 aa, Glycine max
  Clone ID: PAT_MRT3847_17714C.1.pep
MATVEVAQQTPTTVTENEATEVTKIEETTPEQPATQVTTTEEPKEETTKEAKEEEEAPVETNEATEVTEEVKPEVEENPAPERTEEEEVKEETKETESAPVEEQKQEENKPAETVEETKTEQVSVEKTEA

SEQ ID NO: 194560 - protein, 56 aa, Glycine max
  Clone ID: PAT_MRT3847_17715C.1.pep
PSHSEKLMHEMLPIAAEGGHAIVGNEVLATDVSNERTGLEVSEQRGLEAGPAHVVN

SEQ ID NO: 194561 - protein, 89 aa, Glycine max
  Clone ID: PAT_MRT3847_17716C.1.pep
ENCASFGTSSKSGTSMATEEVNKLQSLPPYPEVIHINIQNPFFILFFLSKIIKPWNNFPSKVGRFHTDVIDLCIFPDLGFLFWSPSLKF

SEQ ID NO: 194562 - protein, 59 aa, Glycine max
  Clone ID: PAT_MRT3847_17717C.1.pep
TFSPPPAFGGLCFGAPPGLADFLGAPGSGPGILFPGPPFFRGFWPFWKGRASGLGFFGF

SEQ ID NO: 194563 - protein, 70 aa, Glycine max
  Clone ID: PAT_MRT3847_17718C.1.pep
EIGFLRLKSKYLTGGSTPDTDNHFLAPGSDPWGHPIISRPVPAGLPTFPIEGGFKAKPDHRPQQLPAPKR

SEQ ID NO: 194564 - protein, 59 aa, Glycine max
  unsure (1)..(59): unsure at all Xaa locations
  Clone ID: PAT_MRT3847_17719C.1.pep
KVDLMLLGSRQHAQPLYLLLPRWQNTXSGLFLXXXSXFFXFFXXPPPPPPLLKENKGTN

SEQ ID NO: 194565 - protein, 39 aa, Glycine max
  Clone ID: PAT_MRT3847_1771C.1.pep
VRVSCVCDMRVYVTMRVCVRVCHEIRVVVSVWSCMYVCA

SEQ ID NO: 194566 - protein, 41 aa, Glycine max
  Clone ID: PAT_MRT3847_17720C.1.pep
VFVRGERQYKLEMNCTEYQIIALEAFSMRTRSSCVCIIVCI

SEQ ID NO: 194567 - protein, 78 aa, Glycine max
  Clone ID: PAT_MRT3847_17721C.1.pep
GNHGTRVLNLLQNRRQNQVVKATKIPSRVRQMKPITTESHTSIKEKYRPNQVPNALMISTSSKLGRFNHEQTIVFYAK

SEQ ID NO: 194568 - protein, 167 aa, Glycine max
  unsure (1)..(167): unsure at all Xaa locations
  Clone ID: PAT_MRT3847_17722C.1.pep
TIEKLKKKTKLLKKNPKPKTELTYPGKRPQSPSKGRPKNTCGAGDLQRGDRKNPGAPKTKGGEGNSPLPGGGKGGKAPTAPPSKKTPNLNGERDPPCAPKITPRGGGATQRRTPHLGRAQTPPPXRDFPFFPAQVGGLPRKSLEGGVPLGAPNRGERRPHPKKIWWG

SEQ ID NO: 194569 - protein, 128 aa, Glycine max
  Clone ID: PAT_MRT3847_17723C.1.pep
MKEKVFFLWWFGMTLRLCFLLGASCSEKTTLRRGLRETLAKQSTTSKSGVMVNSNNREQLVVDNGIVAVTFSRPEGYILGISYNGIDNILEEENQDQDRGYLDVVWNTPGKPSNFQRIPRDNFFGYSS

SEQ ID NO: 194570 - protein, 104 aa, Glycine max
  Clone ID: PAT_MRT3847_17724C.1.pep
MVEGGAPMAHAVLTSGQVTGSLPNCIGYLQKGGTPSSECCNGGKSLKAAAKTTANRKTGCNCLRSAASKISGLNANNAAWFPGNCGVSIPYKISTLTNCVTIKV

SEQ ID NO: 194571 - protein, 104 aa, Glycine max
  unsure (1)..(104): unsure at all Xaa locations
  Clone ID: PAT_MRT3847_17725C.1.pep
XXXLTXLGVXXDXXREXXXLXNXPTXEXXXXSXFXXRRDDXSXXRLMSXRVXXCXXXKPXDXXXLXXLXXXVXWXIYVSXEFVELWRKXANSVQXGXXXXXRXS

SEQ ID NO: 194572 - protein, 83 aa, Glycine max
  Clone ID: PAT_MRT3847_17726C.1.pep
MSSSLSFWEYTVLLLLRPLFAVAFVLFLISLGWFVAWKLVLVHVPLVQEVFGLKKKAVRVKPPTGRFSKIYSTLHAQKSPSTS

SEQ ID NO: 194573 - protein, 87 aa, Glycine max
  Clone ID: PAT_MRT3847_17727C.1.pep
PESTESSGWNSGFRIVLLAAALYPTIILVSCQFHQTAANGDILRRLYQGKENFHVWSGNFMYIMNYARQSIYSYQGPYTQRSHMTHP

SEQ ID NO: 194574 - protein, 56 aa, Glycine max
  Clone ID: PAT_MRT3847_17728C.1.pep
MESDIIQPEMEMVSRGLEKHLKPEQREQLMFLFGKVCGEDSHRIAREALGLMHSQK

SEQ ID NO: 194575 - protein, 86 aa, Glycine max
  Clone ID: PAT_MRT3847_17729C.1.pep
ESTKNLNFNIKSKLYTLHEAEYAIAIIYEIKFNARSDCYFALPQLQKRVRELIVELKIGNIPVRAKLGFFIGNLTKRNKRGFVYIN

SEQ ID NO: 194576 - protein, 241 aa, Glycine max
  Clone ID: PAT_MRT3847_1772C.1.pep
EQLNFSDDDEQGSPSPKESSSEDQTAKTPESTENRKEVDEASSTKSSSQIPAQPPVTKSPYGKGPPFNQERGPSSHLPPPPKLLAQQHPPPPDRQIPGRQGPFPSKPPVPDNDEIWKQRRKQQSEISAAVERARKRREEEERRMEEQRKAACAEKLKQLDEKLGIIEKQPSPEELREREREKERERELEKEKERELEKEQEKQREMERARQQEKELEQQREKEQELQRLREQEKEGEPKEQ

SEQ ID NO: 194577 - protein, 181 aa, Glycine max
  unsure (1)..(181): unsure at all Xaa locations
  Clone ID: PAT_MRT3847_17730C.1.pep
MEITYASPSFSDLRAAATSSSMPSSARPVRIIPLQHPTATTSSSSPPNAAFSRWTAKLRRMTWMEWIEFFLPCLRWIRIYKWREYFQVDLMAGITVGVMLVPQSMSYAKLAGLQPIYGLYSGFVPLFVYAIFGSSRQLAVGPVALVSLLVSNVLGNIADSSTELYTELXILLVLMVGIMEC

SEQ ID NO: 194578 - protein, 164 aa, Glycine max
  unsure (1)..(164): unsure at all Xaa locations
  Clone ID: PAT_MRT3847_17731C.1.pep
MEITYASPSFSDLRAMPSTATAARPVRIIPLQHPTATTSSPQPNAAFSRWTAKLRRMTWLEWIEFFLPCLRWIRIYNWREYFQVDLMAGITVGVMLVPQSMSYAKLAGLQPIYGLYSGFVPLFVYAIFGSSRQLAVCPVALDSLLVSXVLGSIADSFTELYTEL

SEQ ID NO: 194579 - protein, 89 aa, Glycine max
  Clone ID: PAT_MRT3847_17732C.1.pep
MAPKGLTFLAVLICVSYLSLCPYGAEEGHNNGLVMNFCNESCPHAEDIISDQVKLLYKLHMNTAFFWLRNILHDCSVHSCDASLLLDLT

SEQ ID NO: 194580 - protein, 118 aa, Glycine max
  unsure (1)..(118): unsure at all Xaa locations
  Clone ID: PAT_MRT3847_17733C.1.pep
DPQALGVYKGQSFKEKGIFYISFIXPRMVTQFPKFWGAKLSLTPIKKAFKKGAFILGGGYHRNKGKKTFFWASANLVAYGGLFLVKPNFPPKFXVDGPLKQTDAPPFFSKNPGVGKKK

SEQ ID NO: 194581 - protein, 215 aa, Glycine max
  Clone ID: PAT_MRT3847_17734C.1.pep
DAWADAWADAWADAWADLDDEIRKKILNLGACLLRGSQKPVAKELLCRIELAISKLKCGTNLEDIWKEDDSFIAHSADNGNDVMEVMVYDDPFEVRTGLESYDFLPRSLKLESEVDQVLQALRKSQELEYKVAEETLQDQKTYLKNLYQQLDCEKYELACQNSSTSDVSSSAVRERKKQIRREVAKFEIMKKVANGFGRTSNDIVKEHFGLKVID

SEQ ID NO: 194582 - protein, 77 aa, Glycine max
  Clone ID: PAT_MRT3847_17735C.1.pep
RPNSIAHMTMQRQPHQVYLQRYQRKLTVPGTILSRNHRTGYQVEGRDRVSEELEGQGMLKTPRGYGPSTWSIPLVWA

SEQ ID NO: 194583 - protein, 230 aa, Glycine max
  Clone ID: PAT_MRT3847_17736C.1.pep
RAFVRSKTLISVASNRISSSGPTSLNPWQPLYLYRQKQQEASHSSSCNSGNTPFGSPARVQKLIASQSDPLLAKEIFDLASRQPKFRHTYSSYLILLLKLGRSKHFSLLDDLLRRLKFDSHPITPTLFTYLIKVYAEADLPDKALNSFYTILHFNCKPLPKHLNRILEVLVSHRNFIRPAFYLFKDAHRYGVEPDTKSYNILMRAFCLNGDISVAYSLFNKMFKSLVKCL

SEQ ID NO: 194584 - protein, 72 aa, Glycine max
  Clone ID: PAT_MRT3847_17737C.1.pep
FLLEKKIGLKPPKDQIQPLLVLPNKERLPVSNFYVHIEGKNCVSPVFGRSVGFLCVFILTSAFQTKKRGSCV

SEQ ID NO: 194585 - protein, 160 aa, Glycine max
  unsure (1)..(160): unsure at all Xaa locations
  Clone ID: PAT_MRT3847_17738C.1.pep
TLRGKFTTLRSYLTPGQLLCFSTAFGASLWVTFIGGIIIYSNLSSYHLGHPRSKMFSAYFSDEXRCLDARVYTLLISCLIPRKTAFITDRCQPGYWLHYLACNRTDMYASTPQTLEMMKLMHYVERGDHIWEDSLWPNHVESAESNPDLAAMNNIFGMTH

SEQ ID NO: 194586 - protein, 79 aa, Glycine max
  Clone ID: PAT_MRT3847_17739C.1.pep
GGHSGQPLLCMKHKALLRCSSSDGGPLSPSQVSANAVTVLPGNLLPGCTLAFSRQDSFLDVKVRINVATPEKLVQTGGY

SEQ ID NO: 194587 - protein, 47 aa, Glycine max
  Clone ID: PAT_MRT3847_1773C.1.pep
YKLYLSPNSNFAYLLVILIRDIGTLNLIKLLNIIFRIISRYLSPFIN

SEQ ID NO: 194588 - protein, 142 aa, Glycine max
  unsure (1)..(142): unsure at all Xaa locations
  Clone ID: PAT_MRT3847_17740C.1.pep
FGLARPTPLFLLFPQILCFLGTWPGPLAFFSPLAGGVIPPFRWVPPPPLKILVGPPPVRQGGKNFFPPPPPPXGGFFSFAFSGGVANFLTHPHGKTXVFPLRMCPRCTSILKGVGDIFREEIKSELKKKVEKKKKKIGKPPY

SEQ ID NO: 194589 - protein, 55 aa, Glycine max
  Clone ID: PAT_MRT3847_17741C.1.pep
ICSMFSVLTRCFILFKLSKVHPFLSSLCNSNFAVAVTVLGHLHRCHLTSVLNFHG

SEQ ID NO: 194590 - protein, 57 aa, Glycine max
  Clone ID: PAT_MRT3847_17742C.1.pep
FCILCGSNFLTLAIRSKHYLGCINLSSITLQVCCPQIELTEYKGPIQKDMINVIGQK

SEQ ID NO: 194591 - protein, 197 aa, Glycine max
  unsure (1)..(197): unsure at all Xaa locations
  Clone ID: PAT_MRT3847_17743C.1.pep
MILLQSHSRFLLQTLLNRAQNLEKGVELDHHWVEFDDVRYHIQVSMKNPHVLLLSVSLPTPSSETIFVCGLPFGAIEAIKAAYGNLVQILDPPRDGFNLTLKINLSKLPANQGQSHGFFESKNMLFXVKVASIXEDVLGAPLRVILEHLAARTVAPDLGPPGPPVLRPRLSCFLFPQADKVTVVYPMRFNDSIDIVL

SEQ ID NO: 194592 - protein, 60 aa, Glycine max
  Clone ID: PAT_MRT3847_17744C.1.pep
NFEYTISYGICAGERILYFVCFLEMLKQPNSQLILNYVFCLFSYNETLCWCENFVTALCP

SEQ ID NO: 194593 - protein, 230 aa, Glycine max
  Clone ID: PAT_MRT3847_17745C.1.pep
MAINSNVLAEIDIPETYIDNLPKLKFYCQVIEDSFKCDPIKQMSWNFSSNFISLLWKPIIAAESCRKRDDIVSIKSGRSSVGDSIYHYMHTADKFSPEQLLDCLKISSEHEALELADRVESSMYTWRRKACLSHSKSSWSKVKDLIEDTDCKDKNYTLAERAESLLLCLKQRYPELSQTSLDTCKIQYNRDVGKAVLESYSRVLEGLAFNIVAWIEDVLYVDKSMRNRDV

SEQ ID NO: 194594 - protein, 44 aa, Glycine max
  Clone ID: PAT_MRT3847_17746C.1.pep
SQTDTESFVGVNSFTHFIMSSMILVYFWELKPLQKTISFTKILP

SEQ ID NO: 194595 - protein, 93 aa, Glycine max
  Clone ID: PAT_MRT3847_17747C.1.pep
EREVSVRRRSGPFALEEAEFRQPAVLVLQVWDYDRISANDFLGITMLSLPHPQPLPSALTAPASPHRPPVPYSDPTLNLIDPRCEPLFLANTE

SEQ ID NO: 194596 - protein, 85 aa, Glycine max
  unsure (1)..(85): unsure at all Xaa locations
  Clone ID: PAT_MRT3847_17748C.1.pep
TVSPSVSSKKFGSLSALDARPGSISKIMGDELEEGEIVVSGXSHMDHQQSGSWIHDRDEGEDEQVLQKPKIKRKXSLRVRPRHAM

SEQ ID NO: 194597 - protein, 92 aa, Glycine max
  Clone ID: PAT_MRT3847_17749C.1.pep
VINRPNNFTFQSLIFSANKIIQFYPTSQTIKHMHNCSQSSFLLFICIFHTYIHILFTAIHQAGTLFFNFISIIVRMRKKKRDNRQRFSMYDY

SEQ ID NO: 194598 - protein, 32 aa, Glycine max
  Clone ID: PAT_MRT3847_1774C.1.pep
FLRLKSNKDPANNADDQSAQALPQARSEHHNP

SEQ ID NO: 194599 - protein, 141 aa, Glycine max
  Clone ID: PAT_MRT3847_17750C.1.pep
SVVFLRHFTLTFKTSRLTRFYTTLLRISFFSLIFIVSFIPPCMISSSPRNPRGIVIIIVVVVIVTTTLSVLRSILLTKHRIRPLRLRTTTVLLILPFKNTTDINSTTSRESRRPYRLNRFTVSKSRSIIFSRPCKHINQTK

SEQ ID NO: 194600 - protein, 73 aa, Glycine max
  Clone ID: PAT_MRT3847_17751C.1.pep
ALCWRTKKQCQLSIGIIMDPVPSKSLNRITLTFKSLGKIFKFVHKKNYGDVLISKKKKIISIFIPQACKQKGL

SEQ ID NO: 194601 - protein, 78 aa, Glycine max
  unsure (1)..(78): unsure at all Xaa locations
  Clone ID: PAT_MRT3847_17752C.1.pep
MTLMKTLWKSIFPGCYKGEYPSPKPKKVVATKPNSSHRISVTDLSYPSTTLSEDLSISLAGTNXHVFSLAELKIITQQ

SEQ ID NO: 194602 - protein, 70 aa, Glycine max
  Clone ID: PAT_MRT3847_17753C.1.pep
QSKYTYNRLTTCHITKPILHLYPIVITPQNLICNGNHNHFLLTCLLNHNLQIVTTLLNSNPSLLHQTTLY

SEQ ID NO: 194603 - protein, 90 aa, Glycine max
  Clone ID: PAT_MRT3847_17754C.1.pep
AISSKHSNLSRAMVTTCSSFFPSCYKRSTNFAGSPFGKFFSYYGLYDLLHSLSLPSHASSFFFSRSIPPNRPANDRTDHHTVMIRKTCIG

SEQ ID NO: 194604 - protein, 55 aa, Glycine max
  Clone ID: PAT_MRT3847_17755C.1.pep
DCSAFHFVAVNVLSHRSFKISSVFSVLYCQYMKCYNCSRLFIMKPKSDQSIKLYI

SEQ ID NO: 194605 - protein, 60 aa, Glycine max
  Clone ID: PAT_MRT3847_17756C.1.pep
DYMPRTLMSPLVPHADAAQRTCRRPGHVVKHSLQQDNLYCNSGILPITVAALINEIQMIP

SEQ ID NO: 194606 - protein, 133 aa, Glycine max
  Clone ID: PAT_MRT3847_17757C.1.pep
RVCFLGFLLLYPLKTLTPIYSFLLPQAPPSFSFSFFSNPSGFLSPLYKTPLFELNSRQLQVGFLQNSIFRFLASRDSEWGVGGSVRFGFILSGPFTSVSCLTFFLEPFAAIFLFLNEREFLSFSLSSLLFFIL

SEQ ID NO: 194607 - protein, 120 aa, Glycine max
  unsure (1)..(120): unsure at all Xaa locations
  Clone ID: PAT_MRT3847_17758C.1.pep
RPRVRLIFISVSGRVSVFRKQGYIVRSCSIKLKSQCKFVITFLECSALDRLNDCFCNLNLGXLPIKGCLXAYSCKHVXSDKKLSISFETDILDYLVKSFDTDCSSPDQTLLTRTSRTLLS

SEQ ID NO: 194608 - protein, 61 aa, Glycine max
  Clone ID: PAT_MRT3847_17759C.1.pep
RRRFHPHVLGMKGNYGIKPQSRSGLSGVAPTAIEPAVHSVHHGAERKEENTGSSSSNWLEP

SEQ ID NO: 194609 - protein, 92 aa, Glycine max
  Clone ID: PAT_MRT3847_1775C.1.pep
TGFTPFVFLLLGIGCNARPLYPLPSKGDDGNRKPLQTFRPYNIAHRGSYGELPEETHPAYLVRRLFSLNLNFSDMEIDYIGFFIRCNHATIM

SEQ ID NO: 194610 - protein, 233 aa, Glycine max
  unsure (1)..(233): unsure at all Xaa locations
  Clone ID: PAT_MRT3847_17760C.1.pep
MVFPKLVITIALILVLFLFICESQGASYASASHNAGHGADINTSLAHQKVNLSVYYDSLCKTCAKFIIEDLRDIFGNNLISIVNLQLVPWANAYVNNTNKSISCQNGPDECELNSLESCALNLWSKVDIQYQFVNCXEFLAIKGTIKEWKEECLNQLGLPKEPFLNCFNMGNGTELGKTYINQIAQLDPPPSFVPWVVVNNQPVEKDYANFAHYVCKAYRGVVVPGICNTLLK

SEQ ID NO: 194611 - protein, 85 aa, Glycine max
  Clone ID: PAT_MRT3847_17761C.1.pep
LTRGNNMASKIKVFIPRRTILNVANPFFVARENTPGQRSYSLKKGTFFGIPSLTLRINSRHKPLVEVMLCLSQKIFLLFPAVFYK

SEQ ID NO: 194612 - protein, 114 aa, Glycine max
  unsure (1)..(114): unsure at all Xaa locations
  Clone ID: PAT_MRT3847_17762C.1.pep
MKMKVLGFFVATIMVAWQCHAYDMVPLXMNTVYGARTPEVKFPSWTLSVEAHNIFGCKTIPEECVEATYEYMHGEQYRSDSRTVNQQAYSYAIDRQVHSNDTFEFSIDGTVLYN

SEQ ID NO: 194613 - protein, 105 aa, Glycine max
  unsure (1)..(105): unsure at all Xaa locations
  Clone ID: PAT_MRT3847_17763C.1.pep
EGFFPVDPQSYPVFIDRNAGKNGTFTVTIVLEKCTKEEVRMIRXTVIEYFPRLVSAHTQQGFDCVPAPFHVAMEGGFKRIKDQDQPQFHKWKVSPDPMLFRSAPS

SEQ ID NO: 194614 - protein, 55 aa, Glycine max
  Clone ID: PAT_MRT3847_17764C.1.pep
RFLFLKNGASIWKGFLLARNLQLNLKGFFFSQTFVIKTGPNLDSHNEGNSTPPFS

SEQ ID NO: 194615 - protein, 363 aa, Glycine max
  unsure (1)..(363): unsure at all Xaa locations
  Clone ID: PAT_MRT3847_17765C.1.pep
MDSLTSINGDFGFAGGTDRRFAFSRQASFQQPHTPIDIPAHGHHYWSARDDKPSSASLQRSSLSSFVFSVFRNVRSGHRYMKRLFLLISLNVAYSTAXWLTGLFTGRVGLVSDAVHLTFGCGLLTFSLFVMAASRKKADREYTYGYKRLEVLSAFTNALFLLFMSFSLAVEALHAFIQDESEHKHYLIVSAVTNLFVNLVGVWFFRNYARINLTYRNAEDMNNHSVFLHVVADSIRSAGLILASWLLSIGVQNAQVLCLGLVSVAVFMLVLPLFRATGGILLQMAPPSIPTTALNKCLRQISAREDVMEVSQARFWELVPGYVFGSLIIQVKKGTNDRPILEFVHGLYHDLGVQDLTVQTDDA

SEQ ID NO: 194616 - protein, 588 aa, Glycine max
  Clone ID: PAT_MRT3847_17766C.1.pep
MSSPRFPGGGASDFYGGAGGFPSQFTAVQPTMNNHSATTPRPLYRSQPSILLNPSSHIAQHQPSPLIGKRTLAEFQTHNLNSRNNNNDNPLLSNHLLRSVKPRTFQHTELSTFPSRRYGLPLLHHLRPNAVNAQQQPVTNSILANTNYLSPVHSRLTATHEPEKNLIALRLQELEKQLLEDNEDDAVSVITTTTSEWSHTIQNLITPQKPASSSPTSSTTSSNTSVESSSYKQSLTEAATAISEGKFDAATEILTRLLLNSDQRFVNCMVSALKSRMNHVECPPPVAELFGTEHAESTQLLFEYSLFFKVARMVANIAILESALTENGKLCVLDFDIGDGNQYVSLLHELSARRKGAPSAVKIVAVAENGADERLNSVGLLLGRHAEKLGIGFEFKVLIRRIAELTRESLDCDADEALAVNFAYKLYRMPDESVSTENPRDELLRRVKALAPRVVTLVEQEANANTAPFVARVSELCAYYGALFDSLESTMARENSARVRIEEGLSRKVGNSVACEGRNRVERCEVFGKWRARMSMAGFRLKPLSQRVAESIKARLGGAGNRVAVKVENGGICFGWMGRTLTVASAWC

SEQ ID NO: 194617 - protein, 70 aa, Glycine max
  Clone ID: PAT_MRT3847_17767C.1.pep
RGVRHKFSLSLSLSLVPFCPSCDLLMSDKNKSYRLCVYLDVHSTSSSLWHGWFVTSLQGLCSIVYYPREI

SEQ ID NO: 194618 - protein, 298 aa, Glycine max
  Clone ID: PAT_MRT3847_17768C.1.pep
TEHAESTQLLFEYSLFFKVARMVANIAILESALTESGKLCVVDFDICDENQYVSLLHELSARRKGAPAAVKIVVVTENCADDERLNIVGVLLGRHAEKLGIGFEFKVLTRRIAELTRESLGCDADEPLAVNFAYKLYRMPDESVSTENPRDKLLRRVKTLAPRVVTLVEQDANANTAPFVARVTELCAYYGALFDSLESTMARENLKRVRIEEGLSRKVVNSVACEGRDRVERCEVFGKWRARMSMAGFRLKPLSQRVADSIKARLGGAGNRVAVKVENGGICFGWMGRTLTVASAWC

SEQ ID NO: 194619 - protein, 69 aa, Glycine max
  Clone ID: PAT_MRT3847_17769C.1.pep
TASPKEKLEPLKGQVGNSRGTLTVFPGGPKGEKKTKGGSKKKIKVLLKKKKVFSETLKGLGVNRISGGF

SEQ ID NO: 194620 - protein, 145 aa, Glycine max
  unsure (1)..(145): unsure at all Xaa locations
  Clone ID: PAT_MRT3847_1776C.1.pep
MEDTVSALRSLMVSHSPPLDALVVPSEDYHLSEYVSARDKRREFVSGFTGSAGLALITKKEALLWTDGRYFLQAEKELSAGWKLMRIGEDPAVDIWMADNLPKEASVGVDPWCISIDTAQRWERAFXRKQQKLVPTSKILAVKVG

SEQ ID NO: 194621 - protein, 330 aa, Glycine max
  Clone ID: PAT_MRT3847_17770C.1.pep
QLAITYMSMGEAHRRITEYLNRFSDAISSQDGATFKSLFALSSNSPFLLSLGDALNLFQDPNRLIKQSDNYSQFADILVPLFRSLLNYRQNNLLEAYNAFEKTANAFIQEFRNWESAWALEALYVIVYDIRVLAEKADKELASNGKSPEKLKGAGSVLMKFFGTLAGKGSKRVGALYVTCQLFKIYFKLGTVHLCRSVIRSIETARIFDFEEFPKRDKVTYMYYTGRLEVFNENFPAADYKLSYALKHCNPQSEANIRMILKHLIPVKLSLGILPKNSLLEKYNLLEYSKIVQALRRGDLRLLRCAQQNYIIRLQKEPVYVDQEKLEVNV

SEQ ID NO: 194622 - protein, 90 aa, Glycine max
  Clone ID: PAT_MRT3847_17771C.1.pep
TSSMEDPLKKKDAKSKSLFFPYGIKLYLCPPFVGPIMTDLLMVKCNNVESFGVSFKPLAPPGFIFILGKNIPPFFAQRDNVMVHVYKKGI

SEQ ID NO: 194623 - protein, 72 aa, Glycine max
  Clone ID: PAT_MRT3847_17772C.1.pep
GGVFLDNFNVSTRYAPLGGAELQRFEHSPNFTLNSDDDGDDHTPEDDNVGNKKVVVVEHAVNGNGVLPHTTE

SEQ ID NO: 194624 - protein, 45 aa, Glycine max
  Clone ID: PAT_MRT3847_17773C.1.pep
LSLSLFLYSIVVAACMIRSQMLLDSIIGSVESILMDVLSDARADA

SEQ ID NO: 194625 - protein, 39 aa, Glycine max
  Clone ID: PAT_MRT3847_17774C.1.pep
LFFFFFFLKADPAMGSLNCHHETQGLLNLINLEITLCIL

SEQ ID NO: 194626 - protein, 82 aa, Glycine max
  Clone ID: PAT_MRT3847_17775C.1.pep
MNEKRLVILIEFEKSRKKWEGGGGHKRLREGMNETWKSASWAINHQHTLQTTITETIEGGHQYTTNFSSKCYFFFFYVIIFK

SEQ ID NO: 194627 - protein, 80 aa, Glycine max
  Clone ID: PAT_MRT3847_17776C.1.pep
TVPRDFWGCDQSTRYGCFLFHAGAGVGTLLGCARYFLWPGSGIPGTRGERGRSKSVLRFIRSIRPPWLSVSSMGPNRKLV

SEQ ID NO: 194628 - protein, 62 aa, Glycine max
  Clone ID: PAT_MRT3847_17777C.1.pep
SLQEEDRTKYENAKILMHFLYEISYSAVKISESPASMIDKVETPWSLPQAVPRSMLVPGKRY

SEQ ID NO: 194629 - protein, 62 aa, Glycine max
  Clone ID: PAT_MRT3847_17778C.1.pep
LLRNGTRFHGVFLLGCRRSHQACCLRPGKLVGKYSRLGEKQRKRCRNNRKGGTWTTLFKNSK

SEQ ID NO: 194630 - protein, 467 aa, Glycine max
  Clone ID: PAT_MRT3847_17779C.1.pep
MTGQVVVTNGGGCAAVGKGRRAAAGEEEQNPASPVALLLAALRKSMVACSVDSPDDVISAVHHPMEIGWPTNVKHVSHVTFDRFNGFLGLPLELEVHVPAPVPSASVSVFGVSAESMQCSYDSKGNSVPTILLLMQDRLYSQDGLKAEGIFRINPENSQEEHLREQLNKGIVPDDIDVHCLAGLIKAWFRELPSGVLDGLSPEQVLQCNTEEESVELVKQLKPTESALLNWAIDLMADVVAEEDFNKMNARNIAMVFAPNMTQMSDPLTALMHAVQVMNLLKTLILKTLREREETAAAGYSPMSSLSSDHQSEDDYDSQQEMDTSGELRETKSDDDHDHDVNYSHASEEEGEADASVSDIVECFLKRLDEKTKRFSEEPAGYLQEKLESPKSCSGYNLESALTFTDIKTVDSCSSPSYENDSRTTLTAEESNADTSSPSIESTSTNDVEMIDKFTDSVSLVPLFASS

SEQ ID NO: 194631 - protein, 61 aa, Glycine max
  Clone ID: PAT_MRT3847_1777C.1.pep
KPQVKCTCILFLEKFQLNGDFKEGCAPCSSFTNRYKILSSGNSFYFRLWGLDLELLAVMGT

SEQ ID NO: 194632 - protein, 212 aa, Glycine max
  Clone ID: PAT_MRT3847_17780C.1.pep
RWSPPTAPNFTAKTTQGDIEFHKWIGDSWAILFSHPADFTPVCTTELGAFAKLKPEFEKRGVKMVGLSADDLSSHDKWVADINEVSSTNLQFPIIADADRKVAFLYDMVTEDDMRDIATKGLPFTIRSVFIIDPAKKIRLMMIYPASTGRNSAEVLRVIDALQLADKKGIATPIDWTQGEDVIVPPSVSTADAKKKFGEVRELKPYLRYTKA

SEQ ID NO: 194633 - protein, 89 aa, Glycine max
  unsure (1)..(89): unsure at all Xaa locations
  Clone ID: PAT_MRT3847_17781C.1.pep
FVFVTSLFHGSFLGKXXPFPKXCXPSSPTFELIHLLSQSTTDTYFPPNNAANQPSLGHATAVLKLQKVYRTRLAGWPTPPLPTRPPTRP

SEQ ID NO: 194634 - protein, 365 aa, Glycine max
  unsure (1)..(365): unsure at all Xaa locations
  Clone ID: PAT_MRT3847_17782C.1.pep
THASVRLREDDRREGKKGRKECFCFRKDDSEVLSDNNVEQYDLAPLXDSHVNFDLDELLKASAFMLGKSGIGIMYKVVLEDGLALAHRRFGEGGSQWFKEASTEVEAIGKLRHPNIATLRAYYWSVDEKLLIYDYVPIVWFHFITSGKAGLDTFVPLSWSYRLKIMKGTAKGLLYLHEFSXPKKYVHGDLKPSNILLGQNMEPHISDFGVGRLANIAGGSPTLQSNRVAAEKLQGRQKSLSNEVTSNVLGNGYMAPEAMKVVKPSQKWDVYSYGVILLEIITGRSSIVLVGNSEMDLVQWIQLCIEEKKPLLEVLDPYLGEDADREEEIIGVLKIAMACVHSSPEKRPTMRHVLDALDKLTISSD

SEQ ID NO: 194635 - protein, 347 aa, Glycine max
  unsure (1)..(347): unsure at all Xaa locations
  Clone ID: PAT_MRT3847_17783C.1.pep
LHWQYDPRVRLTPNPANSPPLTPLTFLERAAIVYGDSHSILYNRTSFTWSQTHRRCLQLASSLTSLGLGRGHVISVLSPNTPSMYELHFAVPMCGAILNNLNLRLNPHILSVLLRHSESKLVFVHSHSLPLILRALSNFPKTTPRPSLVLITDDADAVTVSLAHVIDTYEGLIKKGNPNFHWARPNSEWDPITLNYTSGTTSSPKGVVHSHRATFIMALDSLIDWCVPKQPVYLWTLPMFHSNGWTFPWGIAAAGGTNVCPRKIDAPMIYHLIQSHNVTHMCAAPVVLNLLLTRTEPVKNPVHVLTGGSPPSAAILTRAEXLGFRVRHGYGMTETLGVVVSCAWKKE

SEQ ID NO: 194636 - protein, 116 aa, Glycine max
  Clone ID: PAT_MRT3847_17784C.1.pep
MAEQKNRWSWDVAGFDPWKSSTPPQSPAAAEHGDRKPSAPLVRRYSISATSVLPQSKHAVAFKLQRLKDQVKLAKEDYLQLRQEASELQEYSNAKLDRVTRYLGVLAEKTRNLDQV

SEQ ID NO: 194637 - protein, 58 aa, Glycine max
  Clone ID: PAT_MRT3847_17785C.1.pep
IGFRQNCSRLKIRIRKEFDDTLILTIYTHKQIGRKFTAVIYVGICLLMKQDKYAHKPT

SEQ ID NO: 194638 - protein, 108 aa, Glycine max
  Clone ID: PAT_MRT3847_17786C.1.pep
PPPGNWGVYSFSLPHLLPFQKPAGRSRNLQVGRCFRMRPLMAARRSLANLAPFPWHPLPACFQVFPLSWPPCILGPLRLFPTPFNGSDRFTGFFRWLIYFIFVPLSTA

SEQ ID NO: 194639 - protein, 56 aa, Glycine max
  Clone ID: PAT_MRT3847_17787C.1.pep
KVLILWQTMISQASWRPNMSSTKFTHFIKTLSSKLKTQHEVHITLRDYLFENVTIF

SEQ ID NO: 194640 - protein, 79 aa, Glycine max
  Clone ID: PAT_MRT3847_17788C.1.pep
MATSAIQQSAFTGQTALKQLNEFVRKTGGAGKGRTNMRRTAKSAPQSIWHGPDRPKNLGPFSEEIPSYLAGEFPGDHGW

SEQ ID NO: 194641 - protein, 78 aa, Glycine max
  Clone ID: PAT_MRT3847_17789C.1.pep
FQTQRDKRGFVTLLPGEHIKVKELFKLIPLGNPKIQIWAKTNRKNWVKKISLICYYPSGAKGGAFNSIFYPFFSQTQT

SEQ ID NO: 194642 - protein, 281 aa, Glycine max
  Clone ID: PAT_MRT3847_1778C.1.pep
MARAACNHLHLVPSLVHPLKSTLFTNHTLSTTRTRFYGIHRRFSSSSSKISMSLKAGIVGLPNVGKSTLFNAVVENGKAQAANFPFCTIEPNVGIVAVPDSRLHVLSDLSKSQRAVPASIEFVDIAGLVKGASQGEGLGNKFLSHIREVDSILQVVRCFEDNDIVHVNGKVDPKSDIDVINLELVFSDLDQIEKRIDKLKKGKAKDSQKLKEEAEKSALEKIREALMDGKPARSVTLTDFERDAVKHLCLLTMKPVIYVANVAESDLADPANNNYVKDVTN

SEQ ID NO: 194643 - protein, 65 aa, Glycine max
  Clone ID: PAT_MRT3847_17790C.1.pep
PPWGGGLVFRPGSSGWVEGPFGWFLIFPHGPLISLGGCFYPPAHSVSRWIFLLAGAGPPRIKKVF

SEQ ID NO: 194644 - protein, 109 aa, Glycine max
  Clone ID: PAT_MRT3847_17791C.1.pep
FGSSTAARRRQKGATERMKERIPCAHHTVASPQPTDDLTMGFFDTVVSRVGGNGFWFEGLTVVSGGVVTCAKGNKKRGRKHASSPPGAVSDGVTRFNTATKVSHAYGEN

SEQ ID NO: 194645 - protein, 474 aa, Glycine max
  Clone ID: PAT_MRT3847_17792C.1.pep
ESSSAFLINIHEPIIWRLHEMIQQVKLSRLYDSKTTAASVDPIIQIGVLNISEVRFRVSMAMSPSQRPRGVLGFWASLMTALGNTDNMPVRINQRFNENVCMRKSSMITMAISNVRKDLLGQPLQLLSGVDILGNASSALGHMSKGVAALSMDKKFIQSRQRQENKGVEDLGDVIREGGGALAKGLFTGVTGMLTKPLEGAKSSGVEGFVHGVGKGIIIRLAQPVSGVLDLLSKTTEGANAMRMKIASAITSDEQLLRRRLPRVIGGDNLLKLYDEYKAQGQVILQLAESGSFFGQVDLFKVRGKFALSDAYEDHFMLPKGKILVVTHTRVILLQQPSNIIAQRKFSPARDPCSIMWDILWDDLGTMELTHGKKDKPKAPPSQLILYLQSRSMDMKENHRIIKCIRETHQALQIYSSIQHALNTYGPGVSKGVLKNKVAKPYSPHVDARSVDLSPQQMPGSVPLSSTFGSSARD

SEQ ID NO: 194646 - protein, 335 aa, Glycine max
  Clone ID: PAT_MRT3847_17793C.1.pep
MQWYFVAALLTVLTSSQGILTTLSQSKGEYKYDYATVPFLAEIFKLAVSSLLLWKECKKSPLPKMTTEWKTVSLFPIPSVIYLIHNNVQFATLTYVDTSTYQILGNLKIVTTGILFRLFLGRRLSNLQWMAIVLLAVGTTTSQVRGCGEASCDSLFSAPIQGYMLGVLSACLSALAGIYTEFLMKKNNDSLYWQNIQLYTFGTLFNMARLLADDFRGGFENGPWWQRIFNGYTITTWMVVLNLGSTGLLVSWLMKHADNIVKVYSTSMAMLLTMILSLFLFNFKPTLQLFLGIIICMMSLHMYFAPPNMLLDMPLTVKPDEEKLIEVSVDRRTLS

SEQ ID NO: 194647 - protein, 114 aa, Glycine max
  unsure (1)..(114): unsure at all Xaa locations
  Clone ID: PAT_MRT3847_17794C.1.pep
MKTILSTETINILDCVSIKVHAKVIESEGPRXKLVQDFXHLNLHGHHITDENGXXKLTIVAWFGLQKTFVGIHTVMSHKRNLIIXFTKVYLYIMRLVDTHFTIIASINHRNKSI

SEQ ID NO: 194648 - protein, 106 aa, Glycine max
  Clone ID: PAT_MRT3847_17795C.1.pep
FWTRGRTPGIVWDFYYNLSNAGGNTFFDEANLFKDMQVEELSRAIEGSQIAIADLCETYTESSWCLCALEKSDKSHETYWQAIAPIFYDVTPDGVRHPTEHFGDTL

SEQ ID NO: 194649 - protein, 93 aa, Glycine max
  Clone ID: PAT_MRT3847_17796C.1.pep
LKKMAPFLLCMGRNCFFNVGPQGLGDCGKKLGRPKNLRNSTPPVRFSCRKTSRVFLICLSWGRTEGKPKKKKVICFLAAVGYGIKTPKEKIFF

SEQ ID NO: 194650 - protein, 62 aa, Glycine max
  Clone ID: PAT_MRT3847_17797C.1.pep
IITPLNIHEKRFICLSMSRKPSFTPQLSRMACQCSSLSLRCPQSFLITPLIRKRLVLTHSLH

SEQ ID NO: 194651 - protein, 355 aa, Glycine max
  Clone ID: PAT_MRT3847_17798C.1.pep
MADVTTYLRHHPDSDPNPNPNPNPNPNPDDDQTLIPFPYWDLDFDFDPEFPSNTLSFTDRENQVNFIMDLFHQSVEQSQLTDPLSNDAVFGAIDGIDLGFPAADDFFVGQRFSVGSDESHTHPHTLAANDDGVLGFCAHSNENDDVASIPLCWDALQLEENNNNNNTYEDFEWEEVMDERDVISMLDDTVSVSLGIEEETEAAAAEEDAESEVSILEWQVLLNSTNLEGPNSEPYFGDSEDFVYTAEYEMMFGQFNDNAFNGKPPASASIVRSLPSVVVTEADVANDNNVVVVCAVCKDEFGVGEGVKVLPCSHRYHGECIVPWLGIRNTCPVCRYEFPTDDADYERRKAQRSVM

SEQ ID NO: 194652 - protein, 53 aa, Glycine max
  Clone ID: PAT_MRT3847_17799C.1.pep
VLKIMLSNLLRLCWTTRCLEHTFGVPNLVLYYVWIFQKLMLQPTVWGNLLLLK

SEQ ID NO: 194653 - protein, 81 aa, Glycine max
  unsure (1)..(81): unsure at all Xaa locations
  Clone ID: PAT_MRT3847_1779C.1.pep
MEDTVSALRSLMVSHSPPLDALVVPSEDYSXSEYVSARDKRREFVSGFTGSAGLLLSLNFSLMHFRFCLFLYYCSIHQFRV

SEQ ID NO: 194654 - protein, 104 aa, Glycine max
  unsure (1)..(104): unsure at all Xaa locations
  Clone ID: PAT_MRT3847_177C.1.pep
XLIXXCXLGILXXXYYVXLCXXXXVCGXVWXLXXSXCLGXXXVFXXXXXVCVXXCXVXWCXXXRXCXVXCXXXXXXXVEXLGXVXXLXXFCLXWVIGYGCXXXG

SEQ ID NO: 194655 - protein, 63 aa, Glycine max
  Clone ID: PAT_MRT3847_17800C.1.pep
LIGLMIFRSIKSFVSIHNLHLSMHPCPICGLSLLFTSFGGHIESIDLLLMMALLCCKPSSSLS

SEQ ID NO: 194656 - protein, 110 aa, Glycine max
  Clone ID: PAT_MRT3847_17801C.1.pep
VSLLDRLYPPYARAVLFAQSLNVLTALMFLPSAAIVRSNPVAIWLPISSARPCCVFPQCICILSNIIVGQESPSSFLLICSRILQIRCRLSLCPSWLKYPFFASRPRPCR

SEQ ID NO: 194657 - protein, 100 aa, Glycine max
  unsure (1)..(100): unsure at all Xaa locations
  Clone ID: PAT_MRT3847_17802C.1.pep
ALQQLKCFEVLKFVILSRAGYPIPMGHQYFSRGDGFLLSQANISXDPLSISAADFQKFYIPXQIYHFSYTKLYLSARQIDPLDNYIKQVLPGILKIHKCF

SEQ ID NO: 194658 - protein, 69 aa, Glycine max
  Clone ID: PAT_MRT3847_17803C.1.pep
MKEVDPCEDLTDDDIRTAIQNATGPKSAVFAPSVPFKVLVRRQISRLLDPSLQCARFIYDELIKVGTGL

SEQ ID NO: 194659 - protein, 276 aa, Glycine max
  unsure (1)..(276): unsure at all Xaa locations
  Clone ID: PAT_MRT3847_17804C.1.pep
VRTNKRDAKHGQAPLPRRGIAAIVGVGPNLGLSIARKFAHEGYTVAILARDLGIXRLSRFADEIAREDXAKVFAIRIDCSDSRSVREAFEGVLSLGFVEILVYNAYQPLPWCPSSFQDLRIESFERSLAVSSVGAFHCAQQVLPGMVERGKGTILFTGCSASLNGIAGYSELCCGKFXXRALSQCLAKEFQPQGVHVAHVIIDGVIGPPRGPMLTTTSSSSQRRNSLGEQSSGVVGGGEGTMDPDSLAQTFWHLHVQDRNAWTQEMDLRSPSARFF

SEQ ID NO: 194660 - protein, 54 aa, Glycine max
  Clone ID: PAT_MRT3847_17805C.1.pep
HDAVLLGLVFKCYRGFIYNSLPLTPLLLLTNLEPSSPIQHGIYERIIHRHTISL

SEQ ID NO: 194661 - protein, 49 aa, Glycine max
  Clone ID: PAT_MRT3847_17806C.1.pep
PTILRVTLTRDYGLLQALIRVVSSSFSYGFIPWADLYCRELQTLTLLLS

SEQ ID NO: 194662 - protein, 72 aa, Glycine max
  Clone ID: PAT_MRT3847_17807C.1.pep
KVGAADQGAFAVVPKKFFAEESGVEAGFLARVADEEARDFWQGGGLSCGWFFLGVRLHLLGTPWESINQTIN

SEQ ID NO: 194663 - protein, 158 aa, Glycine max
  unsure (1)..(158): unsure at all Xaa locations
  Clone ID: PAT_MRT3847_17808C.1.pep
MQNNQSITFMYRKLPCHYRVRAAVQTTCRRRNFLYKFGFYWKLPFVESFIHWYLPHFFSFFLGYKYIISPLPFFFTEICFVPTYDGNMAIVYEGHRRYLVFKKTILLNRXLLVELIDQYINGALNWDEFSSALNEAHANHMASQTKRFVIPDKPNEDD

SEQ ID NO: 194664 - protein, 82 aa, Glycine max
  Clone ID: PAT_MRT3847_17809C.1.pep
LTVFLFDGSLSMRPSLYTACSLNAVVFLFALPLSLMVVACSLLPPIFVDQTLSPPDSEGSAKETKRLHQSQKRRLAGGSACC

SEQ ID NO: 194665 - protein, 48 aa, Glycine max
  Clone ID: PAT_MRT3847_1780C.1.pep
WQYRQLSALHRAPRPTRPDKARTLRYTAKQGYVIYRIRVRRGVLKRPV

SEQ ID NO: 194666 - protein, 82 aa, Glycine max
  unsure (1)..(82): unsure at all Xaa locations
  Clone ID: PAT_MRT3847_17810C.1.pep
GRTRRTARKSTRGKAKRKQLAAVAARKSEPRTEGXXKXXXKXXGFFFXSEIRKYHKELVCFSTPLLPFQGFVXXIXEDLEND

SEQ ID NO: 194667 - protein, 47 aa, Glycine max
  Clone ID: PAT_MRT3847_17811C.1.pep
YNSHLFFLTSNSYTFQLITNIHIKLHIIFLNRTLNSTIKNFTYHQNP

SEQ ID NO: 194668 - protein, 48 aa, Glycine max
  Clone ID: PAT_MRT3847_17812C.1.pep
PYLATVALYSSIMTLAPVNINLTPSPSSMHMYIGYYNFPGSLLVVGSG

SEQ ID NO: 194669 - protein, 110 aa, Glycine max
  unsure (1)..(110): unsure at all Xaa locations
  Clone ID: PAT_MRT3847_17813C.1.pep
MFTGEEAYNTLIVELERNVPTLLGTEWPKDKKLPRRKICDIPKTRRLTILRRELNLVDRQKLLXIARFIVPKWDKLNCQVGSNPYSMERTGLANTLLSXGNDILGCHNAS

SEQ ID NO: 194670 - protein, 53 aa, Glycine max
  Clone ID: PAT_MRT3847_17814C.1.pep
VVWKFSNRQSILNKRVMPPSLYSFSRASLPERARVRVHARETARGGGPPNYGA

SEQ ID NO: 194671 - protein, 258 aa, Glycine max
  unsure (1)..(258): unsure at all Xaa locations
  Clone ID: PAT_MRT3847_17815C.1.pep
SQQPLWDSFGRLVEPYASXRPGMVTEGNHEIEIFPIIYPQGFQAYNARWPMPFQQSGSTSNLYYSFEVAGTHVIMLGSYTDFDSQSLQYTWLQSDLANIDRVKTPWVIVLLHAPWYNTNEAHQGEGESMRQAMEELLYEARVDLVFAGRVHAYDXFCRILAAXADSCGPMYVTIGDGGNREGLALMFKNPSSPLSLYREPSFGHGRLRILNETHAHWSWHRNNDADAVVADGVWIESLSSSKACSKTPYQQYAANEEL

SEQ ID NO: 194672 - protein, 146 aa, Glycine max
  unsure (1)..(146): unsure at all Xaa locations
  Clone ID: PAT_MRT3847_17816C.1.pep
PPLSTTNACARLLYSVGCSSGSRVLYRIWAPLVMAPASACTLLGLSERGARCFSIWLCSVASRAALLTCTSISAGSVVVPSSTXRLLAFSYTGYCNTTSTSVLTRTCTLDRRGTFQNVSLNGRLYHLCLYVHHILLCMRHMFVYHV

SEQ ID NO: 194673 - protein, 117 aa, Glycine max
  unsure (1)..(117): unsure at all Xaa locations
  Clone ID: PAT_MRT3847_17817C.1.pep
RWIFDTEKVILEAVILTAVVVIGLTLYTFWAARRGHDFNFLGPFLFGAVLVLMVFALIQVLFPLGKLSVMIYGCLAAIIFCGYIIYDTDNLIKIHLGFXSIINLFLSLLTIFRAADS

SEQ ID NO: 194674 - protein, 84 aa, Glycine max
  Clone ID: PAT_MRT3847_17818C.1.pep
LEPENLSHSVTIPVATDNVEILQRIVKQLIGCFYIDVNEIRRIGLHVSMLESAEASKQGTVQYTLKSWLTSRYVSIENLAYPMG

SEQ ID NO: 194675 - protein, 242 aa, Glycine max
  Clone ID: PAT_MRT3847_17819C.1.pep
MWNQPFGKTDLESGSRPLYPMMLESPELRWSFIRKVYSIIAIQLLVTIVVGAVVVTVRPISVFFATTGAGLALYIVLIFVPFITLCPLYYYSQKHPVNYLLLGVFTVSLGFVVGLSCAFTSEKVILEAVILTAVVVIGLTLYTFWAARRGHDFNFLGPFLFGAVLVLMVFALIQVLFPLGKLSVMIYGCLAAIIFCGYIIYDTDNLIKRYSYDEYIWASISLYLDIINLFLSLLTIFRAADS

SEQ ID NO: 194676 - protein, 59 aa, Glycine max
  Clone ID: PAT_MRT3847_1781C.1.pep
SMIMVSKTFTFHLILSFNLYFDHYQPFHFYFNITSLSVLQLTLIQSLVYLTFHVILAPC

SEQ ID NO: 194677 - protein, 221 aa, Glycine max
  Clone ID: PAT_MRT3847_17820C.1.pep
KETFTSDFERGRSYWIGSYLNFSFARPVVKKPTFLRLRGSFEYEIQSWKHSIPLFFSTQGFDIFRNRETLLSSSRSRTDAWADAWADAWDSSLVEWKELGEEGSPDNENEWEDRKVGRRKNFLFRRIELAKHFLRTNIEPEWMVLCLLPVLPPELRPIIQIDGGKLMSSDINELYRRVIYRNNTLIDLLTTSRSTPGELVMCQDKLDKKYPCIHFFVYGIL

SEQ ID NO: 194678 - protein, 199 aa, Glycine max
  Clone ID: PAT_MRT3847_17821C.1.pep
VNHRTCQSLISHSVLYPNLGLARPLNGSVSRWAEERELLITITWMGEYNITSPYHDLQDIDDQRRTLTQWATTTVKKPDNGGWPRLHIFSRRANISNPSSTNVYNHSQDTPHTPPLYNTNTLNHIIAPRDEPSYHAQNGNTTQHQTANSLISNNHGAHYDKMSSHQAFKRTLHTSLQPSSTRATNFFICTKQHIKKLNT

SEQ ID NO: 194679 - protein, 42 aa, Glycine max
  Clone ID: PAT_MRT3847_17822C.1.pep
SLHFSVNVDIRKHFHVIYDSVKRLILKLAIIHKLQLAPKRVN

SEQ ID NO: 194680 - protein, 140 aa, Glycine max
  Clone ID: PAT_MRT3847_17823C.1.pep
KLPDTSSSWYDKSLNLEKCEKLCLKNCSCTAYANVDVDGRGCLLWFDNIVDLTRHTDQGQDIYIRLAASELDHRGNDQSFDNKKLVGIVVGIVAFIMVLGSATFTYMKRKKLAKREMLKIFHWKYKREKEDVELSTIFDF

SEQ ID NO: 194681 - protein, 39 aa, Glycine max
  Clone ID: PAT_MRT3847_17824C.1.pep
LHKDPQVNQEEILPCHFMQEEQKGASLSTYPNPLFKEVR

SEQ ID NO: 194682 - protein, 73 aa, Glycine max
  Clone ID: PAT_MRT3847_17825C.1.pep
TGENNTTEWGERLYYPPYERMRYPSSPTDSAECGVLDRTELVSHCKLLERSACIFPSYPLFGNSFSRFTDTLL

SEQ ID NO: 194683 - protein, 123 aa, Glycine max
  Clone ID: PAT_MRT3847_17826C.1.pep
MAYHSSQNSQPALPMHLCFFLLTLFMFLSFSFYSSYEPIMESFMDQVKLVLMVSPLLLLLVVHFLCNYGSGGVLSSLIPLPERESLHRAGGTPWGVGLVLVLLLFMVSYQSSFQERWFPLLTR

SEQ ID NO: 194684 - protein, 65 aa, Glycine max
  Clone ID: PAT_MRT3847_17827C.1.pep
IKNCKLLGYWSKYVGYILVFRAQWNINPLYMDLLAWARLVSYSEAFSQLFYGFLNDMFLYGHVCP

SEQ ID NO: 194685 - protein, 63 aa, Glycine max
  Clone ID: PAT_MRT3847_17828C.1.pep
IIEYHLVFSSPKYIATQSRWLFLSPSVEHPLDPMNPYWNLSVFLLPDQDPPENHLRVDRKKVR

SEQ ID NO: 194686 - protein, 92 aa, Glycine max
  unsure (1)..(92): unsure at all Xaa locations
  Clone ID: PAT_MRT3847_17829C.1.pep
YSSFAKINLXNVMEIAGWVRTGXKGTVRRKKKAVHKTTTTDDKRLQSTLERIWENAIPAIEEVNIFKDDIFIQFLNSKVXAFIACNTWVDKW

SEQ ID NO: 194687 - protein, 193 aa, Glycine max
  Clone ID: PAT_MRT3847_1782C.1.pep
TRPDFYCDAHRGLGQSAPSMAAFTKARVAAAKIFRIIDHKPNIDRNSESGIELDTVTGLVELKNVDFSYPSRPEVQILNDFSLNVPAGKTIALVGSSGSGKSTVVSLIERFYDPTSGQVLLDGHDIKTLKLRWLRQQIGLVSQEPALFATTIRENILLGRPDADQVEIEEAARVANAHSFIIKLPDGYETPVG

SEQ ID NO: 194688 - protein, 89 aa, Glycine max
  Clone ID: PAT_MRT3847_17830C.1.pep
KRLLVRLFCLMTFHCVCYKLHNMFHSTFQKLIFSIIICLLFPQTTRVRFVFDDEALVCSLLTSPRTLCFMYCIIYFLSTYASSLHYLLS

SEQ ID NO: 194689 - protein, 94 aa, Glycine max
  unsure (1)..(94): unsure at all Xaa locations
  Clone ID: PAT_MRT3847_17831C.1.pep
XRWREKKEWKKKKEMGAKIGKFQSHFSNPWPYLIPNFFWNVFWDCLKFFQIISFNSFHGEILGGKTCHLAGGVFGVWKAFWAGLGYKGGAKGVL

SEQ ID NO: 194690 - protein, 89 aa, Glycine max
  Clone ID: PAT_MRT3847_17832C.1.pep
VFVLGYQSLRLPSCACSNSGSAVSSSPAAAAKETNPSPLPHVASNSGYSSTVTLELPGKLEALEESIEKVIYRCRFMAILGVFGSLTGS

SEQ ID NO: 194691 - protein, 202 aa, Glycine max
  unsure (1)..(202): unsure at all Xaa locations
  Clone ID: PAT_MRT3847_17833C.1.pep
KRGAKPKGRPETNAKIENRDRNRHNYPLIERGRKKRPRQSQGKTRSKKKMGNPSTAKKKSKQKKKKLGRXKKKKTQTNSVGVTAPHPIGKGKPNSPKKKKKNPTKRKRAIGARGGRCIFKKKGKGQKVLPQQPLKKKKTGPTPKGDTPKKQKLWGEAGKRNKKRERXKRKKKTQKLENPPHXQTWKGEKRGPKPPKKKGGKG

SEQ ID NO: 194692 - protein, 147 aa, Glycine max
  Clone ID: PAT_MRT3847_17834C.1.pep
LTARHTFVPCHAYHVHISLLHFTLPPTRPSFWAKLTQPMLLCLCTSRSPRPTVFLSLPLSSLVPQLPLSLLITASLVLYGGRTAHSHTASTMAHVRNESYPSRATAVLYPLNAFWVGTALVYNFRYLVAICRHACDRTLDSSIDIAR

SEQ ID NO: 194693 - protein, 281 aa, Glycine max
  Clone ID: PAT_MRT3847_17835C.1.pep
MSRTMEWAARAEHLRGIPRKLVIAAVGGFAKTVSSFLNTADVHNGDTLLRLVRSRPHRVPLITVSNHMSTLDDPVMWGFKGFPIFDTNLARWVLAAEDICFRNALYSYIFRVGKCIPITRGGGIYQEHMNEALERLNDGEWLHTFPEGKVYQEDAPIRQLKWGTASLIVRAPITPIVLPIVHHGFHEVMPENYMFGKRPPIPLWNKKIHIVIGDPIEFDLPAMRQKAISQSRNESFPTIGWPSTPDGLDEAAQRYLYTTISEQIRAAMERLRCLGKSFMKS

SEQ ID NO: 194694 - protein, 89 aa, Glycine max
  Clone ID: PAT_MRT3847_17836C.1.pep
NSFSFPSLIPVWGFFFFFLLLFIFFPFLWPSNEFFSPFAENTQKKKRKKKKNKPKKKTKKKKNIKKKKKKKKKKKKKKKKKKKKKKKKK

SEQ ID NO: 194695 - protein, 46 aa, Glycine max
  Clone ID: PAT_MRT3847_17837C.1.pep
LFTKVIGIKWNFRKGSFFFKTNPTFFINGQYKNIQPLQNNGLSKPH

SEQ ID NO: 194696 - protein, 56 aa, Glycine max
  Clone ID: PAT_MRT3847_17838C.1.pep
LTMEMVSLVALLSLIIPGFSSNIQAIIFPKKKPQNPSTSATSFSIYWKPKTFENPL

SEQ ID NO: 194697 - protein, 38 aa, Glycine max
  Clone ID: PAT_MRT3847_17839C.1.pep
GEASWDTSPQQQIDSCFYSHLISSSYCNICVVAFITVR

SEQ ID NO: 194698 - protein, 220 aa, Glycine max
  unsure (1)..(220): unsure at all Xaa locations
  Clone ID: PAT_MRT3847_1783C.1.pep
MAAPPARARADYDYLIKLLLIGDSGVGKSCLLLRFSDGSFTTSFITTIGIDFKIRTIELDGKRIKLQIWDTAGQERFRTITTAYYRGAMGILLVYDVTDEASFNNIRNWIRNIEQHASDNXVNKILVGNKXADMDESKRAVPTSKGQALXLDEYGIKFFETKCKXKHECWEEVFFSIARDIKQRLADTDSKAEPQTIKINQPDQTATGGLAAQKSACCGS

SEQ ID NO: 194699 - protein, 52 aa, Glycine max
  Clone ID: PAT_MRT3847_17840C.1.pep
GDPESKKQAELCSDAPVKKSTDKLRSSLSLMSRSIQLRKSGVFSLDNGGDEL

SEQ ID NO: 194700 - protein, 97 aa, Glycine max
  Clone ID: PAT_MRT3847_17841C.1.pep
IYLFVLMPAIFLNRRERKPQPLPSYTKSHIQRYPHTDNALSLYLGTTFEEFLSRPCIDKSALSNSFETEAAILLPILNKRKAYPPSLEESGAFTYQS

SEQ ID NO: 194701 - protein, 63 aa, Glycine max
  unsure (1)..(63): unsure at all Xaa locations
  Clone ID: PAT_MRT3847_17842C.1.pep
PPFFVVILTLHLLTPGPRRSGHRNIKTRHVIVSYQLLHASQGSSASHAIKRXDQITRVAKANR

SEQ ID NO: 194702 - protein, 117 aa, Glycine max
  unsure (1)..(117): unsure at all Xaa locations
  Clone ID: PAT_MRT3847_17843C.1.pep
GFFFFFFFLFFLSRERLKKKMGRTKATPFLRVEPGAHKTIPTSTXGVPSLKGCKKRNPVLEKKKPPIRAAPDPPTPIDRPMLVEKTPGWGEGTGIKSFNTTGGYQGFFIPGKGPLQT

SEQ ID NO: 194703 - protein, 423 aa, Glycine max
  Clone ID: PAT_MRT3847_17844C.1.pep
MIPQQEPDFNLNHLKLYYGKLFPFADLVRWVSYGNDGKHPGCDQSYIGRREFSFTLENDIYLRFQSFHNALELENSIKEKTPVKIDIGPVYTVDPAKRNAYAQSGDNNVFAPVERELIFDIDMSDYDDVRYCCSGADVCLVCWPLMTIAIKVIDTALRDDFGFKHILWVYSGRRGVHCWVCDGKARRLTNEQRGAIADYFRVYKGNENSHKKVSLMGAALHPFLATSYTNVLKDYFEKNLLTGQNLLAIEERYEKILGMIPDESIASELRGRWQDSRRSSSAKEDINVVRWEQCKQLLQSGKHKAQGLRRCIEEIVFCFTYPRLDMEVSKHMNHLLKAPFCVHPKTGRVCVPIDPKRCEEFDPTTVPTLSQVNSFCNDSFLICIPGREKLSKTVLSSMGMFVFTTFGSGTCIKTHASFTHCHV

SEQ ID NO: 194704 - protein, 202 aa, Glycine max
  Clone ID: PAT_MRT3847_17845C.1.pep
MASVDPEIAKTQEERKRMEQQLASLTSVTFDTDLYGGSDKGSYLTSIPANEDDENLDAMDNEVARKLASYTAPKSLLKDMPSAPDSDNDIGFRKPQRIIDREDDYPGPFLNQIISPERHDPFADGEKTPDPSVRTYADIMREEALKREKEETLKAIAKKKKEEEEAAKDAPPQQQQKRRNRWDQSQDDGGAGGSLGIPFPSH

SEQ ID NO: 194705 - protein, 104 aa, Glycine max
  unsure (1)..(104): unsure at all Xaa locations
  Clone ID: PAT_MRT3847_17846C.1.pep
VGIXIDXXXNCHLIXXXSXYVXEXRXXVXXEXXXXHMVXAXXXXLXQLRXRHXRXXXIXXIAXTXCIXXPFXXYXRQHTWFFCATXXQVPARNYRXXGXXQXQG

SEQ ID NO: 194706 - protein, 47 aa, Glycine max
  Clone ID: PAT_MRT3847_17847C.1.pep
WRREISNIKMKKKNKIENIGFKMERVAAQHVSPLCRLRSRRNAWGGP

SEQ ID NO: 194707 - protein, 47 aa, Glycine max
  Clone ID: PAT_MRT3847_17848C.1.pep
RLSSFYNTSIILMNSLSTIHHVQINRYFHTPYLDILILNLIISDYTS

SEQ ID NO: 194708 - protein, 69 aa, Glycine max
  Clone ID: PAT_MRT3847_17849C.1.pep
KYVFCAGIPFSKVHEVIFLFFNMDFFILAEAQKKLEHAFETSLIYLNDWIYTAVDAWYLVTLRNSEGPV

SEQ ID NO: 194709 - protein, 65 aa, Glycine max
  Clone ID: PAT_MRT3847_1784C.1.pep
CRIANIALYMVVTFCRHIILSSILLVEDGKVILRAFIRHMWLNIMSPLCIYHSTNASIYEHVHVF

SEQ ID NO: 194710 - protein, 85 aa, Glycine max
  Clone ID: PAT_MRT3847_17850C.1.pep
TPCHLVYYIACCSKTDLHPNDTEYNRHLQVLTTHDADNSSYTHDRSAPADGLSVFCTSFKDLNHTCSALGLKLTTRYIEGKDLYQ

SEQ ID NO: 194711 - protein, 152 aa, Glycine max; identical to SEQ ID NO: 158042
  Clone ID: PAT_MRT3847_17851C.1.pep

SEQ ID NO: 194712 - protein, 67 aa, Glycine max
  Clone ID: PAT_MRT3847_17852C.1.pep
KDKVPNEFSICRGKFFFKAEIQRSSETLLYETNFIPKFPFLEILSEFCLAHSYPRKGNTNSILLCPK

SEQ ID NO: 194713 - protein, 82 aa, Glycine max
  unsure (1)..(82): unsure at all Xaa locations
  Clone ID: PAT_MRT3847_17853C.1.pep
MSTPARKRLMRDFKRLQQDPPAGISGAPQDNNIMLWNAVIFGPDDTPWDGTFKXLILQFTIDYPNKPPTVVFYFFTLSRMFH

SEQ ID NO: 194714 - protein, 48 aa, Glycine max
  Clone ID: PAT_MRT3847_17854C.1.pep
KHPKKRDSMLYTFIIINHYINYDGLSGGWLTSLNQVWLTRVHAIQFIH

SEQ ID NO: 194715 - protein, 48 aa, Glycine max
  unsure (1)..(48): unsure at all Xaa locations
  Clone ID: PAT_MRT3847_17855C.1.pep
MDIDIHTCEQWRLPVVAXLNANERSFFCXRDRKYATGLGTNTATTCGY

SEQ ID NO: 194716 - protein, 102 aa, Glycine max
  Clone ID: PAT_MRT3847_17856C.1.pep
PKFNPFSGTGRRLDGNPLNYQPPPVSSSGSKDQKSDVVNSLSSTASSSQSNARQSQGKLVFGSNANRTNETGKAKESKPEPPKEKEEPKFQPFSGKKYSLRG

SEQ ID NO: 194717 - protein, 455 aa, Glycine max
  Clone ID: PAT_MRT3847_17857C.1.pep
RKNVLPSRIIPIAVLNSYQGRWAIKARVTANGDLRRCNNARGDGKDLSLDLLESDGGEKRVTCFNAVVDRFYNVIEVGKVYMISKGSLKPAQKNFNHLKNEWEILLESSSMVELCPDEDGSIPRQQFSFRPISDIENVDNNSILDVIGVVTSVNPSVPILRKNGMETQRRILSLKDSSGSSVELTLWGEFCNREGQQLQDMVDAGFFPILAVKTGKVNDFSGKSIGSISTTQLFINPDFPEAHSLREWFELVGKDSASLSISKDIIPGALKNEVRKTVSQIKDEGLGRSDKPDWITVRAAILFIKTDTFCYTACPLMIGDRQCNKKVTRLGNTRWQCDRCNQEFEECDYRYLLQVQILDGTGLAWVTAFQEAGEEIMDYSAKDLYFLKHEEQDDEKFGEIIKSRLFNQFMFRLKIKEELYGDEQKVKITVVKADKVNYSSESRYMLDTISKFCRQ

SEQ ID NO: 194718 - protein, 316 aa, Glycine max
  Clone ID: PAT_MRT3847_17858C.1.pep
MFFDGYGYHGTSFEQIYRCYPASFIEKPQIESGDKIIMPPSALDRLASLHIDYPMLFELRNDAAERVSHCGVLEFIAEEGMIYMPYWMMENMLLQEGDIVKVKNVTLPKGTYVKLQPHTKDFLDISNPKAILETTLRNFSCLTTGDSIMVAYNNKKYYIDIIETKPDTAISIIETDCEVDFAPPLDYKEPEKPTAPLSAGKAAVAAEVIPAEDEPKFNPFSGTGRRLDGKPLNYQPPPVSSSGSKDQKPDVVNLQSSTASSSQSNARQSQGKLVFGSNANRTKETGKAKESKPEPPKEKEEPKFQPFSGKKYSLRG

SEQ ID NO: 194719 - protein, 56 aa, Glycine max
  Clone ID: PAT_MRT3847_17859C.1.pep
YNWPDPRVRALLLTPPFSCLKASYRALLPWKQNSSLSFSSPKPLKFSRTIIASAVD

SEQ ID NO: 194720 - protein, 88 aa, Glycine max
  Clone ID: PAT_MRT3847_1785C.1.pep
APQVYAFQIEALLKLLRYQEAYTIYNKMPKFSIDWCTKIFGPACSAYLLMIGSMIYLASGRFEEAVTAAQQAVKVDPGNRELDAMVKK

SEQ ID NO: 194721 - protein, 35 aa, Glycine max
  Clone ID: PAT_MRT3847_17860C.1.pep
VLPFLKAPSLDFLKQIIVLTQSLEPILNAKKLLSN

SEQ ID NO: 194722 - protein, 90 aa, Glycine max
  Clone ID: PAT_MRT3847_17861C.1.pep
TNSGYYPKITNRDWKRHNFREAQQEENESPKVFFKKKKQILQDTQMKMNQRIKVLLGCYKRRVQIIKTLMEKGESQHTVEVWEANQQRNA

SEQ ID NO: 194723 - protein, 75 aa, Glycine max
  Clone ID: PAT_MRT3847_17862C.1.pep
SLTLRLVVCMATLSLTLNCWSNVELAHRRFPSTLTSLGRRNCIVKRSFARRSLTNPGKMLYKELDISYLISLCSE

SEQ ID NO: 194724 - protein, 86 aa, Glycine max
  unsure (1)..(86): unsure at all Xaa locations
  Clone ID: PAT_MRT3847_17863C.1.pep
STIHPYNFPPNHPTPLIFLFPLSRLGSFVTACLGLAPRLPNYPSAPXLQNSPPTRTPSVLSTFAATLVALHRASASHQRCLLHTIL

SEQ ID NO: 194725 - protein, 166 aa, Glycine max
  Clone ID: PAT_MRT3847_17864C.1.pep
EILTVQRYFTTDLEDSASFVNPTPANDTNNFNTTTPGAFFQVVEFPDFKVFHYRLGFNGLSNLYIHLNVSLNTLYTSCNFDKLVAPHPSASPSPIVRPSSSTNPSFHPSASSNPSRAPTSTATLVPNPNDSSDISSGKTDSRSSDSSGEQSSASSLSIPFLLALAL

SEQ ID NO: 194726 - protein, 51 aa, Glycine max
  Clone ID: PAT_MRT3847_17865C.1.pep
VNATPQLNIFAFGINAENNQRNFLAGSKDNAISQIPSQVQELAFPGSAKDI

SEQ ID NO: 194727 - protein, 152 aa, Glycine max
  unsure (1)..(152): unsure at all Xaa locations
  Clone ID: PAT_MRT3847_17866C.1.pep
KKKKKKKKKGQKILPNKKKNTGAALFKGSNFISPCFQFISFFLITPNFSYLAVFLKLIDWKNLAFSQFNPFAKNPLLSTLRNSKKAXTVSLSQHLPTLIVHWNSPLRAALPLXFFVFSPTLIFIFAIPFSPVPLVFFLFFLTKFSVFPFKVL

SEQ ID NO: 194728 - protein, 63 aa, Glycine max
  Clone ID: PAT_MRT3847_17867C.1.pep
INPALFCSLQHSPLSTMASKLLLISVFVFDLSAHWTMPRLIEQTRITAQCCHGPCQALQLLCL

SEQ ID NO: 194729 - protein, 95 aa, Glycine max
  unsure (1)..(95): unsure at all Xaa locations
  Clone ID: PAT_MRT3847_17868C.1.pep
NTRGRRCWSKHEKNLAETAEALRQEIRNGGIPADGLAKRAQELEKQDAHDSTMGEICAPGRSTSTQVNXLAKIMIRRHRVVGELTAHTAREETEG

SEQ ID NO: 194730 - protein, 516 aa, Glycine max
  unsure (1)..(516): unsure at all Xaa locations
  Clone ID: PAT_MRT3847_17869C.1.pep
MADVRGRDTWTEELPSLIEDSGVLYGGDPTTTTTTTTTTSFEVYAPHSESGESFKEQALGFVMAWCEILMELGRGFRDILRQNLMNEDSYVVRKFGGPCSKVSKRLRFLNDFLPEDRDPVHAWSVVFFVFILALAAISVDPSREAVAPVVKVRQHPPSASRVLLPDGRYMAYHEQGVLADTARFSLVAPHSFLSSRLAGLPGVKASLLEEYGIRLVTYDLPGFGESDPHPNRNLNSSAMDVLHLVNAVNVTDKFWILCHSSGCIHAWASLRYIPEKIAGAAMLAPMINPYDPHMTKEEMKRTWEKWLPRRKMMYSLARRFPKLLTFFYRKSFLPEQHDEIDKLLSVSPGKKDKLVTEEPEFEQYWQSVLEWAVRQNGGSEREXTWTEELASLIEDSGVLYGGDSVKQEASSSATSFEVNAPHIESGGELXEHTLGDGMDRVVLPTVMEXKDSVLPEAVIHKLPNEGHFSYFYLCDQCHRQIFATLFGTPQGPVERQEETATAFEEEDKEEVLQVPV

SEQ ID NO: 194731 - protein, 95 aa, Glycine max
  unsure (1)..(95): unsure at all Xaa locations
  Clone ID: PAT_MRT3847_1786C.1.pep
VFTTLSPTTPTQLCSRKSGIFNPXQALLVKPVNRQKMGKSNGIIIACLATSITADRGPDMGKIHLINLILLGAILRPSARMLIPYTYYVVTPVSC

SEQ ID NO: 194732 - protein, 510 aa, Glycine max
  unsure (1)..(510): unsure at all Xaa locations
  Clone ID: PAT_MRT3847_17870C.1.pep
MAEVRGRDTWTEELASLIEDSGVRYGGDSPPTSFEVHAPQSESGESLKEQALGFVMAWCEILMELGRGFRDILRQNLINEDSYVVRKFGGPCSKVSKRLRFLNDFLPEDRDPFHAWSVVFFVFILALAAISVDPNREAVAPVVKVRQHPPSASRVLLPDGRYMAYHEQGVLADTARFSLVAPHSFLSSRLAGLPGVKASLLEEYGIRLVTYDLPGFGESDPHPNRNLNSSAMDVLHLVNAVNVTDKFWILCHSSGCIHAWASLRYIPEKIAGAAMLAPMINPYDPHMTKEEMKRTWEKWLPRRKMMYSLARRFPKLLXFFYRKSFLPEQHDEIDKLLSVSPGKKDKLVTEEPEFEEFWQRDVEESVRQGNIRPFIEEAVLQVSNWGFDIKELHVQKKCQTRGILLWLKSMYSQAGCELAGFLGLKHIWQGLDDRVVPPSMMEYIERVLPEAVIHKLPNEGHFSYFYLCDQCHRQIFTTLFGTPQGPVERQEETATAFEEEDKEEVLQVPV

SEQ ID NO: 194733 - protein, 101 aa, Glycine max
  unsure (1)..(101): unsure at all Xaa locations
  Clone ID: PAT_MRT3847_17871C.1.pep
ERVALKSSQEAIFTAGLTDVITPTTKMSLGGPFLFAKVHDXSEFTLPIEICQLLFXLTTINNMCAYGLNPGVAGYGDLGTISQDIXVXTVWNQMATKRTPL

SEQ ID NO: 194734 - protein, 160 aa, Glycine max
  Clone ID: PAT_MRT3847_17872C.1.pep
MGVTKKPDLNDPVLRAKLAKGMGHNYYGEPAWPNDLLYIFPVVILGTIACNVGLAVLEPSMIGEPADPFATPLEILPEWYFFPVFQILRTVPNKLLGVLLMVSVPTGLLTVPFLENVNKFQNPFRRPVATTIFLIGTVVALWLGIGATLPIEKSLTLGLF

SEQ ID NO: 194735 - protein, 28 aa, Glycine max
  Clone ID: PAT_MRT3847_17873C.1.pep
PFVHLTNQFSIIILSVNISTFYNYLYHV

SEQ ID NO: 194736 - protein, 112 aa, Glycine max
  Clone ID: PAT_MRT3847_17874C.1.pep
MVAAKKTKKTHESINNRLALVMKSGKYTLGYKTVLKSLRSSKGKLIIIANNCPPLRKSEIEYYAMLAKVGVHHYNGNNVDLGTACGKYYRVCCLSIIDPGDSDIIKTLPGEQ

SEQ ID NO: 194737 - protein, 119 aa, Glycine max
  Clone ID: PAT_MRT3847_17875C.1.pep
GFSSSQKWLPQKKTKKTHESINNRLALVMKSGKFTLGYKTVLKSLRSSKGKLIIIANNCPPLRKSEIEYYAMLAKVGVHHYNGNNVDLGTACGKYYRVCCLSIIDPGDSDIIKTLPGEQ

SEQ ID NO: 194738 - protein, 333 aa, Glycine max
  Clone ID: PAT_MRT3847_17876C.1.pep
MVREKIRVSTRTLQWKCVESRIDSKRLYYGRFILSPLMKGQADTIGIAMRRVLLGEIEGTCITRVKLEKIPHEYSTIIGIEESVHEILMNLKEIVLRSNLYGTRDASICFKGPGYVTAQDIILPPSVEIVDNTQHIANVTEPVNLCIELKIERNRGYRIKTLKNFQDGSYPIDATFMPVRNVNHSIHSYVNGNEKQEILFLEIWTNGSLTPKEALYEASRNLIDLFIPFLHAEEDNFNLENNQHKVTLPLFTFHDILAKEKLRKKKKKITLKSIFIDQLELPPRIYNCLKRSNIHTLLELLNNSQEDLLKIEHFRVEDVKYILDFLEIEKHFA

SEQ ID NO: 194739 - protein, 54 aa, Glycine max
  Clone ID: PAT_MRT3847_17877C.1.pep
AHASASSMGWLSLFITSVAFWSILVIFSPYTLGSKSTTLSTYLKLSHLLYFFTI

SEQ ID NO: 194740 - protein, 58 aa, Glycine max
  Clone ID: PAT_MRT3847_17879C.1.pep
LTSCSYAQEAFQDFLNEKRCSQKSHVFFGQQPTTIKTLNTSPTPSATGFSECLEGREA

SEQ ID NO: 194741 - protein, 300 aa, Glycine max
  Clone ID: PAT_MRT3847_1787C.1.pep
MENLGGSSRRKAIEELLRGRDSAQQLKSVINGTYDDGSATPFAQQLVKEVLMSFTNSLLFLHNNPTSESHHVFNVQVWDSPKSEDSQESNCKSSTIKEPRGCYKRRRTEQTWEKESEAPIDDGHHWRKYGQKEILNAKFPRNYYRCTHKFDQGCQATKQVQRVQEEPILFKTTYYGHHTCKNSANPDIILDPMSPSSSSKFLSFDNSFSTPSKQECPFLSSSNNFPSSSSVKRECKEEVPPSISSNDYLISSDLTFDSSPRHHVTLSSTLDSEYKSVDISDVLYDSAQLDFVFEPFLEIR

SEQ ID NO: 194742 - protein, 121 aa, Glycine max
  Clone ID: PAT_MRT3847_17880C.1.pep
PSNKKVSAHLPWGPPPNPSFGGGPLRAPVKNFPPPLGARAPTPGFPSPLGAWGPPNPFFFSPPPGPGMKGLGPEICPPGIPGGGVPPPPPWVGGGPLWSWGGKKKKKTKKNQKKKKKKKKK

SEQ ID NO: 194743 - protein, 43 aa, Glycine max
  Clone ID: PAT_MRT3847_17881C.1.pep
IKSLFYQNQQQHKDKEIHDRYYSFTQFFTIITTNHLMRFYLLR

SEQ ID NO: 194744 - protein, 59 aa, Glycine max
  unsure (1)..(59): unsure at all Xaa locations
  Clone ID: PAT_MRT3847_17882C.1.pep
RTSVHMNGTCPWLTPDGKTHVTDEPTTTCXAMVTILVHTELNSXQHDDDCTRDETAVRT

SEQ ID NO: 194745 - protein, 130 aa, Glycine max
  Clone ID: PAT_MRT3847_17883C.1.pep
GQKVLQGIDVNMNKMPDVAMTLAVVALFANGQTTIRDVASWRVKETERMIAICTELRKLGATVEEGPDYCVITPPEKLNVTAIDTYDDHRMAMAFSLAACGDVPVTIKDPGCTRKTFPDYFEVLERFTKH

SEQ ID NO: 194746 - protein, 534 aa, Glycine max
  Clone ID: PAT_MRT3847_17884C.1.pep
MAQVSRVHNLAQSTQMCLRFLHRSIFGHSSNPNKPKSANSVSLRPRLWGPSKSRILVHKTGSLMGNFNAGKGNSGMFKVSASVAAAEKPSTSPEIVLEPIKDFSGTITLPGSKSLSNRILLLAALSEGTTVVDNLLYSEDIHYMLGALRTLGLRVEDDKTTKQAIVEGCGGLFPTSKESKDEINLFLGNAGTAMRPLTAAVVAAGGNASYVLDGVPRMRERPIGDLVAGLKQLGADVDCFLGTNCPPVRVNGKGGLPGGKVKLSGSVSSQYLTALLMAAPLALGDVEIEIVDKLISVPYVEMTLKLMERFGVSVEHSGNWDRFLVHGGQKYKSPGNAFVEGDASSASYLLAGAAITGGTITVNGCGTSSLQGDVKFAEVLEKMGAKVTWSENSVTVSGPPRDFSGRKVLRGIDVNMNKMPDVAMTLAVVALFANGPTAIRDVASWRVKETERMIAICTELRKLGATVEEGPDYCVITPPEKLNVTAIDTYDDHRMAMAFSLAACGDVPVTIKDPGCTRKTFPDYFEVLERLTKH

SEQ ID NO: 194747 - protein, 304 aa, Glycine max
  unsure (1)..(304): unsure at all Xaa locations
  Clone ID: PAT_MRT3847_17885C.1.pep
MMEAGTALSLRLHTRIPIPINTANSNTLLFQPRFTLSSHSPSSFSAYSYRGPTPKRPFLADWVSQNDDLVRTLPIYVGSASLFAVLLNRSLSGIAPVVDAGRHVPXSQSRADLLTLGLAVTNILAGLVWLSEXPKSITVVNPRGVECKSLCATLPEVARNELLWVWESLSDATCCRSLGVVYESSCVLPIGFAAESSPGDGDAVSVDANKLMQGSVYQGVMKSGAQSYLANLSLYPGKSELPFVPSNTQAVILQPLGDKGIAIIGGDTIRGFTGSDQVWITYIGAKLDSTLAKYLKHHPLTSQD

SEQ ID NO: 194748 - protein, 137 aa, Glycine max
  Clone ID: PAT_MRT3847_17886C.1.pep
SKTELVSDFLLVKDSLERSGGAISVLHPLSKLLEGGNTCGANYDTYREICGSSLSKGLFPDQAKAVGIKWKPQLPESKVASRGKEHENPSVQNNVNPVMKNVERAKPNPIDQLGNAPFCGQVSTFEIVDFYVAEANL

SEQ ID NO: 194749 - protein, 180 aa, Glycine max
  Clone ID: PAT_MRT3847_17887C.1.pep
LIMEIFQATAEKMEINPKRFTTLFFVVLFISFPVAFIVSSIYRNSSFAIFYEGLTESSAQNVTNNGFPLGGRVHNTTSDDEIETHLRTRHNDTVSVVLPGNIQNGSTVEERARTMNSTASGIEGKVERGTDRNVTAELLNGGVKDLQERSQNNFATEGRSENITAAYAGSKNASLASSTN

SEQ ID NO: 194750 - protein, 288 aa, Glycine max
  unsure (1)..(288): unsure at all Xaa locations
  Clone ID: PAT_MRT3847_17888C.1.pep
LIELGGVKDLQERSQNNFATEGRSENITAAYAGSKNASLASSTNVSTTEPVNLDDNDKLLGGLLTSGFDEASCKSRMQSHLYRKASPHKPSPYLISKLRKYEEIHRRCGPNTRDYDKSMKKIVSSKNNGAATKCKYIIWNTAXGLGNQMISIAATFLYAILTDRVLLVKFNKDKHGLFCEPFLNSTWILPQKSPFSSWNEHNTETYQTMLDKDRASNSKKGLPSVLFINLQFSFENPEKYFHCDHSQDLLRKIPMLILRSDQYYVPSMFMNPFFNLEIANMFPERDII

SEQ ID NO: 194751 - protein, 95 aa, Glycine max
  Clone ID: PAT_MRT3847_17889C.1.pep
NSLYFRNNGLGKVKVLPGNIQNGSTVEERARTMNSTASGIEGKVERGTDRNVTAELLNGGANFTTHGFELGGTSQNIYNTLYACVFLTDFHSKLP

SEQ ID NO: 194752 - protein, 333 aa, Glycine max
  Clone ID: PAT_MRT3847_1788C.1.pep
MKPCDHKVQLVRGIKTFLDWNMAKLGCSSRRKAIEELLRGRDCAKQLRSVINGSCEDGSSTTPSFAEQLVKEVLMSFTNSLSFLKNNPTSESHDVSNVQVCESPKSEDSQESNCKSSIIKERRGCYKRRRTEQTWEKESEAPIDDGHQWRKYGQKEILSAKFPRNYYRCTHKFDQGCQATKQVQRVQEEPILYKTTYYGLHTCKNLANPEIILDPMSPSSSSKFLSFDNSFPTPSKQECPFLSSSNLPSSVKGGVQGGGPLPQLPPIIISSLLTSLLIAHQGIMSLYHQHLTQSTRVWTFRMSCMILLSLMMPLNPSLNLDEHVLVWFVIFFI

SEQ ID NO: 194753 - protein, 158 aa, Glycine max
  Clone ID: PAT_MRT3847_17890C.1.pep
PLVTCWSKHPSSFYFPHFKNHYSTTHTTQISFLVVRSDTETTLEQPSTPPQPDPSAAVSFSIWPPTQRTRDAVVNRLIETLSAPSVLSKRYGTLCSDESSSAARQIEDEAFSAASSSDGIETLQGYSKEISKRMLDTVKARAAPIPSAEEGVAASVSD

SEQ ID NO: 194754 - protein, 213 aa, Glycine max
  unsure (1)..(213): unsure at all Xaa locations
  Clone ID: PAT_MRT3847_17891C.1.pep
YNERYTNETDICTHGFRSSSSYSRLYYTEIPKFLFLRSTARCTVHASRRPPPPGPGVDTRIHWENEDEGWIGATNTKHQQTHKPNNNMLQADDFPDFLSASLGSHYXFLGVSRDADVEXKLKVAYRKLSKEYHPDTTSLPLKTASEKFMKLTEVYNVLSNEESRKFYDLTLVQEAXGRNVEKMNLKLQAVSGEVIEDYQPGQEVKQKFNDNGA

SEQ ID NO: 194755 - protein, 105 aa, Glycine max
  unsure (1)..(105): unsure at all Xaa locations
  Clone ID: PAT_MRT3847_17892C.1.pep
HASAXQVFQRERLNGHYGVTSFVISNTLSAMPFLILITFLSGTICYFMVRLHPGFWHYLFFVLCLYASVTVVESLMMAIASIVPNFLMGIIIGAGIQVCMSLPRI

SEQ ID NO: 194756 - protein, 101 aa, Glycine max
  Clone ID: PAT_MRT3847_17893C.1.pep
TVLVGPAHMNYKYKKNRYKPGISPKNKKPYKPVKHPKLCHNTNFLLITIWFLSASDQQFDFPSVKIRVIDRSKDLPFICMGHTYGGAGKLKLTTYVIISAI

SEQ ID NO: 194757 - protein, 66 aa, Glycine max
  unsure (1)..(66): unsure at all Xaa locations
  Clone ID: PAT_MRT3847_17894C.1.pep
FANWVMFVQKVLETCDDQQREXILSRIKVHLNALKKYTYGKHIVARVEKLVAAGERRIAAQSPHPA

SEQ ID NO: 194758 - protein, 82 aa, Glycine max
  Clone ID: PAT_MRT3847_17895C.1.pep
LVETLSAPSVLSKRYGTLSSDESSSAARQIEDEAFSAASSSDGIETLQVYSKEISKRMLDTVKARAAPIPSAEEGVAASVSD

SEQ ID NO: 194759 - protein, 135 aa, Glycine max
  Clone ID: PAT_MRT3847_17896C.1.pep
MSDTETTPEQPSTPPQTEAPPQPDPSAAVSFSIWPPTQRTRDAVVKRLIETLSAPSVLSKRYGTLSSDEASAAARQIEDEAFCAATAASASAAADGIETLQVYSKEISKRMLDTVKARAPPSPAAVEGVAAAVSD

SEQ ID NO: 194760 - protein, 357 aa, Glycine max
  Clone ID: PAT_MRT3847_17897C.1.pep
MNSTSTTYFYYNNTIFSSVTSITRTMVQEKKLVDEVSGWLRLYEDGSVDRTWTGSPEVKFLVEPVPPHEEFIDGVATRDIMAGDNFRVRLYLPENISNEEKLPIFLHFHGGGFCISEPDWFMYYQFYTRFARVARVIVVSPFLRRAPENRLPAAIDDGFFALLWLDSVARRNAEEPWLKKHGNFGRVFLIGDSSGGNIVHEVAVRAGEAKLDLLHLAGGIPIHPGFMRSKRSRSELEKPQSPFLTLDMVDKFMSLALPLGSNKDHPIACPMGGGAPPLSGLKLPPILLCLAEMDLIFDTEMEYNEAMKKANKDVELFVNKGATHSFYLNKIAVDMDPNTGAQTEALIARIKEFIEQH

SEQ ID NO: 194761 - protein, 91 aa, Glycine max
  Clone ID: PAT_MRT3847_17898C.1.pep
MENGVVTVNRKNHESKANSTITIKGFMSLLMKSVDENGDGSKRVISLGMGDPTLTTYFPISNVAEEAVSEALQSHKFRGYAPTAGLPQARM

SEQ ID NO: 194762 - protein, 47 aa, Glycine max
  Clone ID: PAT_MRT3847_17899C.1.pep
MSHLNGAYYGPSIPRPKTSYNRPGRGGGCCCGCFFSFIFRFILTGLF

SEQ ID NO: 194763 - protein, 56 aa, Glycine max
  Clone ID: PAT_MRT3847_1789C.1.pep
CIKIPYKNRALFQDQRFTLPINRSNLYDIFGTTTFTSIDTIQSTEKGLEGIKIPWD

SEQ ID NO: 194764 - protein, 57 aa, Glycine max
  unsure (1)..(57): unsure at all Xaa locations
  Clone ID: PAT_MRT3847_178C.1.pep
ATLTVPPVPPSPRDDAMPLLRXLKGFRCHTTAVLTIPASSSSYTALPTSQQEYTPLY

SEQ ID NO: 194765 - protein, 79 aa, Glycine max
  Clone ID: PAT_MRT3847_17900C.1.pep
TLFHNWRQEDNLSFLILFNYSVFFLYHFSENIAVLQCCTVARSISIERMQHFSYSKSQYVYQHLNWLPLTISNSFFQLL

SEQ ID NO: 194766 - protein, 84 aa, Glycine max
  Clone ID: PAT_MRT3847_17901C.1.pep
VSSTLLFVQSPAQSPSNLARDTEECMDDDVAYPTKITTTRLLSMLGYRITVMDIHFIHATFDSIGVYVAPELLGHFDQFTPTSA

SEQ ID NO: 194767 - protein, 74 aa, Glycine max
  Clone ID: PAT_MRT3847_17902C.1.pep
PKVSSSSSTRVAVDVDLSRNRGTFLAGCPQPSVRAHPEPSITLLVRPSCPSQIEQDSQRFVVKEPPLVCLLQPV

SEQ ID NO: 194768 - protein, 73 aa, Glycine max
  Clone ID: PAT_MRT3847_17903C.1.pep
FLQNISLFLFTYQSIDYNLNNKHYGYRSTEIIKYVGTYKRTQFLVIINPILTPFIIDDIRLSLPYTCSKLFIL

SEQ ID NO: 194769 - protein, 72 aa, Glycine max
  unsure (1)..(72): unsure at all Xaa locations
  Clone ID: PAT_MRT3847_17904C.1.pep
LLFCAVTTSNLPXSMVDYLLQIESSAHDNGGTDDVLSDXAEMEAHXADPTANERRCLTVRLSRSELDRGIGT

SEQ ID NO: 194770 - protein, 80 aa, Glycine max
  unsure (1)..(80): unsure at all Xaa locations
  Clone ID: PAT_MRT3847_17905C.1.pep
KLAAIELGAVYTGTIFNIPAVTINQLKVIEQSXKQNQMKIPSIRNTHHLHISRIMISFSKCTPQILAYEYMKNGAHKKTI

SEQ ID NO: 194771 - protein, 118 aa, Glycine max
  Clone ID: PAT_MRT3847_17906C.1.pep
LREDDRRGLMMLKQLLFSFLLIGRLGCSSKTSSLRLTACKQLSDILLSKRTIETEFGDIVKRCRQNLSSSPNYSVSCVGREANHVTRYSVRMSRCYANQHIFCCISSCIQPIILNKMV

SEQ ID NO: 194772 - protein, 115 aa, Glycine max
  Clone ID: PAT_MRT3847_17907C.1.pep
SEPLYPDMTKHGVSVGDVVAEEKASHKTPTVVEMSSKTDDAVTSSLKQNYVGNALVKEKDGDCLVADNADDTLVVRSAASPRTEGHCCFAPELVDYQVSQDLDRNMRSSSTKCKV

SEQ ID NO: 194773 - protein, 132 aa, Glycine max
  Clone ID: PAT_MRT3847_17908C.1.pep
MNLFCSSHINIIIILSIWSFLPVLCLCNSKATYIVHMDKSHMPKVFTSYHNWYSSTLIDSAATLSILYSYFFAPHPPPVLLSQEQLETLKQNTRYISAYRDRRPTLYTTQSYPFLSLNQSNGLWPASPYIQN

SEQ ID NO: 194774 - protein, 102 aa, Glycine max
  Clone ID: PAT_MRT3847_17909C.1.pep
MATSLVRSGFLRSALRGSARGSQVPKRNFASSGHHDDAYETAKWEKITYLGIVSCTGLAVYNLSKGHPHFKEPPAYPYLHIRNKEFPWGPDGLFETKHHDEH

SEQ ID NO: 194775 - protein, 109 aa, Glycine max
  unsure (1)..(109): unsure at all Xaa locations
  Clone ID: PAT_MRT3847_1790C.1.pep
YLLDFRILAFNSEPGTLFLPYHAYADYLSVIQNGTAILTLVNNDDXDSYNLXSVDALIVPAXTTYYVVTPSYDEFFLMITLVISFNKPGRFESFFLSITQTQHFYMQGF

SEQ ID NO: 194776 - protein, 63 aa, Glycine max
  Clone ID: PAT_MRT3847_17910C.1.pep
YFSLKTEFHVQRRPGIEGISLILDHYAFMPANLTHLLIVQPLFPTDSPEYSSCTNNPYQDHAA

SEQ ID NO: 194777 - protein, 103 aa, Glycine max
  Clone ID: PAT_MRT3847_17911C.1.pep
MATSLVRSGFLRSALRGRARSSQVPKRNFASSGHHDDAYETAKWEKITYLGIVGCTGLAVYNLSKGHPHFKEPPAYPYLHIRNKEFPWAGPDGLFETKHHDEH

SEQ ID NO: 194778 - protein, 51 aa, Glycine max
  unsure (1)..(51): unsure at all Xaa locations
  Clone ID: PAT_MRT3847_17912C.1.pep
SSRPXNXLXSHFFLSHXTXXXXKSPCXXXXLDTLXXXDGSXMSMXVGNGXS

SEQ ID NO: 194779 - protein, 103 aa, Glycine max
  unsure (1)..(103): unsure at all Xaa locations
  Clone ID: PAT_MRT3847_17913C.1.pep
AARDFHLLINAVDYCLIRGVYHRDLXPENLLLDSNAILDGTDFGXGTYARQEDELFLTAGGTPNFVGSEARXERSNVGSTSDMWSCGEIFLELMAGSLPFDEP

SEQ ID NO: 194780 - protein, 92 aa, Glycine max
  Clone ID: PAT_MRT3847_17914C.1.pep
GSRCNFDRFTWTTGPSITAGAVFLTKTLVSNTRAPTGPTPRNAQRERPIPGAPGNGRIKPGPRPREAIDVELRSQRNKQNPVLMARAHSPHV

SEQ ID NO: 194781 - protein, 100 aa, Glycine max
  unsure (1)..(100): unsure at all Xaa locations
  Clone ID: PAT_MRT3847_17915C.1.pep
SMIAVRNNHWQICKNLTLFINQXLFSTLHRLNHXRHSCFGQDSKPPTTTEKSISTVIICRIVLRRGQSGQINLSLRVSVHRLWMKSTEELPELRLTDPKP

SEQ ID NO: 194782 - protein, 94 aa, Glycine max
  unsure (1)..(94): unsure at all Xaa locations
  Clone ID: PAT_MRT3847_17916C.1.pep
XWNQXATXRTPXXXDSSXQSFXQXSIXDLLGGXILVXKTGDWXXRYQXPPXSNLXXXAAWXTXCXMVXXXMXGNXAVXRSDWXSLXQVSLTDST

SEQ ID NO: 194783 - protein, 50 aa, Glycine max
  Clone ID: PAT_MRT3847_17917C.1.pep
INNNVWRQHLPTSFKMWNLQKCIDSICNAFIEYHHPFFKKIPKTTHTKKG

SEQ ID NO: 194784 - protein, 86 aa, Glycine max
  Clone ID: PAT_MRT3847_17918C.1.pep
GANQVGPERPRALDDGFQLILAGSQLDIDGLEVDDCQSASRNCICNLQAERCDSLTRRLWGRPGSPLSQSFATDSPTEPASSLPEK

SEQ ID NO: 194785 - protein, 237 aa, Glycine max
  Clone ID: PAT_MRT3847_17919C.1.pep
YGCEKTTEGGPWRMLQVNWDEPEVLQNAKRVSPWQVELVSLPFALHTVYSPNKRLRSDQGSGLLSNREGDPFFPMTGFPNSTMEHMTGFPNSTVGHMDKSLLSYDTFPAGMQGARHDLFSPSSFSNFLNDKSYLYMGSGSFGNNPVQSLGTVTTELNMSSSQSDDLSPHSQSSFHSFAREFAGTRNCDTKVASGSILLFGKIIQPAESDLHDGDCMERDGSRGSNKLKTVEACYFSK

SEQ ID NO: 194786 - protein, 61 aa, Glycine max
  unsure (1)..(61): unsure at all Xaa locations
  Clone ID: PAT_MRT3847_1791C.1.pep
XPAXXTVXRAXAXMXXPFXXLKXMAGXXXMXXTNXXTSIXXXGXRVQCMXVWXPXGKKSVL

SEQ ID NO: 194787 - protein, 329 aa, Glycine max
  Clone ID: PAT_MRT3847_17920C.1.pep
MERGVLDSIINRLLEVRGRPGKQVQLSEAEIKQLCLVSRDIFLRQPNLLELEAPIKICGDVHGQYSDLLRLFEYGGLPPRSNYLFLGDYVDRGKQSLETICLLLAYKIKYPNNFFLLRGNHECASINRIYGFYDECKRRYNVRLWKVFTECFNCLPVAALIDEKILCMHGGLSPELHNLNQIKGLPRPIEVPETGLLCDLLWSDPSSDIRGWGENERGVSYTFGADRVTEFLQKHDLDLICRAHQVVEDGYEFFANRQLVTIFSAPNYCGEFDNAGAMMTVDETLVCSFQILKPVENKKPSKFGFGSTTTVKQSTTKAKFQQSFFGAKA

SEQ ID NO: 194788 - protein, 164 aa, Glycine max
  Clone ID: PAT_MRT3847_17921C.1.pep
MANPASARFSVLILLVSLLVNIAATAATAAESPAPTPTPDFPPSSSPPFPSPASNPSTANFPPSPTPAPSHHSPPAPSPSSNPSPSPAPAPVDDAHDGVSLAGVDGSDGKSSSSGGMSSGKKAGIALGVIIGAGVVVLGALVYTRRRQNIQRSQYGYAARRELL

SEQ ID NO: 194789 - protein, 71 aa, Glycine max
  Clone ID: PAT_MRT3847_17922C.1.pep
ASLVHLQDVQSLSKRKIVHQPLHSCKLTLIGRWVSEASVKYRNLKAKQKIGNTAILTYPPPKLCIMTLVPI

SEQ ID NO: 194790 - protein, 236 aa, Glycine max
  Clone ID: PAT_MRT3847_17923C.1.pep
MPITNNTSHTMTNNRFSGMIETVAMCKQLCFGGSALGLFTKIIKKVLFALFTCILALGGSIVGTIAGGIKGQTTEAGFLDGAGKGAITGAIAALELINFDAFDEPISKVALLSSLLNGKIFMEWICPAVARLYQLHVTVNTLETIYQEVSDIYDIRGVRGIPHNVILKLPFQPFNSRKMLKSYNMSCCSICFQDFEDGELVRILPKCDHLFHLQCIDKWLVQQGSCPMCRTYVPES

SEQ ID NO: 194791 - protein, 161 aa, Glycine max
  Clone ID: PAT_MRT3847_17924C.1.pep
MANPASARFSALLLLVSLLVNIAAESPAPAPTPKPDLPPSSSPTSAPASNPSPANSPPSPTPAPSHHSPPAPSPGTNPSPSPAPAPADDAHDGVNHAGMGGVDEKSSSSGGMSSGKKAGIALGVIIGAGVVVLGALVYKRRRQNIHGLSSDTQRGENFCRS

SEQ ID NO: 194792 - protein, 123 aa, Glycine max
  unsure (1)..(123): unsure at all Xaa locations
  Clone ID: PAT_MRT3847_17925C.1.pep
DTGFWKQQLGIYWRLMNIGDTETRCVLYMTAYCGAFXVALNKVTVRILTVPTASMTNTLFGLNARRLIVKHHDCRDPFLSFPNTYELCDAIYIFSPYKPYGQGCLLPDIPVXIDRHIRPSRYI

SEQ ID NO: 194793 - protein, 51 aa, Glycine max
  Clone ID: PAT_MRT3847_17926C.1.pep
KECPRLSHTEKELHALASSHFKQDNSDSNHLAYQSPEGFNHGIFWLTGRVG

SEQ ID NO: 194794 - protein, 40 aa, Glycine max
  Clone ID: PAT_MRT3847_17927C.1.pep
INIYSIKVWNRWGCGIIDKMKVCREVFVPAVCYCKFSLNV

SEQ ID NO: 194795 - protein, 44 aa, Glycine max
  Clone ID: PAT_MRT3847_17928C.1.pep
PDVRTQRRGRDPMVYNRSHIGVGSLSKALKCSKPNLWEGILSKL

SEQ ID NO: 194796 - protein, 54 aa, Glycine max
  Clone ID: PAT_MRT3847_17929C.1.pep
KFGIPWPECNDGLSFDDFVRASDAGATLIEFYSTKYKSSAPLQGWLQRIKSGQV

SEQ ID NO: 194797 - protein, 57 aa, Glycine max
  Clone ID: PAT_MRT3847_1792C.1.pep
ANIPDQPLVRKSLPAYRVFFFPVSIRNHPTRLWSYEGSASLRLGAFVSGHKLGLAAS

SEQ ID NO: 194798 - protein, 56 aa, Glycine max
  Clone ID: PAT_MRT3847_17930C.1.pep
TKTATSSNPQVAVTVNFRRRLVAGTRSGRDGAPAGSLSESTLSHIHKHPSPLTSPN

SEQ ID NO: 194799 - protein, 162 aa, Glycine max
  unsure (1)..(162): unsure at all Xaa locations
  Clone ID: PAT_MRT3847_17931C.1.pep
DPDPEEATQRRRKKTTHRPRRKRGQNQQSRRQGXSPTRXRXXRXXTGGXXPXKXEXXXXXQAXSKRKXXREEDPXRXAKHQRSRTKKXXKXXATEAGKRTQTXXKXXKKEKEAAGPEQXXXXXAEGXXEXXERPKXNKKPXQTAXRHQVRKFXPNGEXXXQP

SEQ ID NO: 194800 - protein, 51 aa, Glycine max
  Clone ID: PAT_MRT3847_17932C.1.pep
SVPVDCEVFQGSATITIEHLTGEVKPLEAKVGDRIPGGSRNLDGRIIVEVC

SEQ ID NO: 194801 - protein, 61 aa, Glycine max
  Clone ID: PAT_MRT3847_17933C.1.pep
KMLRFKKIGLILIGDLLGKNSMFHTQKLIKMLILGILPTCQGTMNPVTRIHPLLLTVWLVR

SEQ ID NO: 194802 - protein, 169 aa, Glycine max
  Clone ID: PAT_MRT3847_17934C.1.pep
CTSPLLKRIIDDEAEPDDSILPLRDMFGTCLSVVAALTKDCIEGFHLQEVKSFNQRRLIHTKLAFSLEQIISISKLALASKYAEDCEARNSICVGAVRYCIQCIHTVLSDSNVQVQVIGLQFLKARIQRGVNTEDNSFIMFLVGELIGDIFTLIHKMLKNTITRESVTI

SEQ ID NO: 194803 - protein, 76 aa, Glycine max
  Clone ID: PAT_MRT3847_17935C.1.pep
PRMYQILETNHCDKPNIVAPKYQYYVVTEFMNRSREGLHIKKELLLQVALPMFMLFETWLKKKPYLKDNNIWLFIF

SEQ ID NO: 194804 - protein, 64 aa, Glycine max
  Clone ID: PAT_MRT3847_17936C.1.pep
KCALQIFHVDPSQTSRIRIASTTALSSLNLCITNHKLVVAEAGGNDVTPFAVDDIDIYSGESYS

SEQ ID NO: 194805 - protein, 78 aa, Glycine max
  unsure (1)..(78): unsure at all Xaa locations
  Clone ID: PAT_MRT3847_17937C.1.pep
MFTYLPWRTIWGLLLLLHXTYIIXPTIVSKSITSNSQSHRFIFPCLSDTNCGSLCRTKRFTXGHFLILHTRCFFTKHF

SEQ ID NO: 194806 - protein, 78 aa, Glycine max
  Clone ID: PAT_MRT3847_17938C.1.pep
ANPHIPANVQFGRNYLPTWSFDHIKYFNGCSDIHLHHDKYTGTFFQSKWSYLHSHFIMYINIFPEDSHGTVTVIYLSS

SEQ ID NO: 194807 - protein, 96 aa, Glycine max
  unsure (1)..(96): unsure at all Xaa locations
  Clone ID: PAT_MRT3847_17939C.1.pep
FLIFDSEDNMDLLLRVDLLCQHCVVHRLLNKIVFDDKLVLDNTQEFFDGKFAVESRLPIFVNCLYPVSQLPSEAVRVNVTCRNERGGXPTSAWISS

SEQ ID NO: 194808 - protein, 96 aa, Glycine max
  Clone ID: PAT_MRT3847_1793C.1.pep
FFLFICFFFFLTYFFFFFFFFFFFFFFAGNRGPFFFKPPKKKTLMGDFFKCFVDPHLKQYKGNLGPFLDPVFLLLHYGGQPFFLGGEGPPAFIPGV

SEQ ID NO: 194809 - protein, 86 aa, Glycine max
  Clone ID: PAT_MRT3847_17940C.1.pep
DFYSGGISFSVHAGSPCFCCSLGPAFGLRSRSLRFTLCQDYQIKLIIQVMFKLKEKNPKKPKKKRKDKKKKKKKKKEQPKGGRRGV

SEQ ID NO: 194810 - protein, 44 aa, Glycine max
  Clone ID: PAT_MRT3847_17941C.1.pep
SLHHELILTSWHNLISDQFVILHNLSSLPKMVSSHLKLMTKTIN

SEQ ID NO: 194811 - protein, 337 aa, Glycine max
  unsure (1)..(337): unsure at all Xaa locations
  Clone ID: PAT_MRT3847_17942C.1.pep
MFLKCFGHSSSSQRQYPTIIEELCHQFSLADLGKSTNNFDQNRVIGRGAFSTVYKGCLQHKDGSDYTVALKRFHEGYSAVYKKEIGTISLVRRHSCVYIIRLCINEXRRTMCECXRANGALDCNLVTRKQPEKQKGLYLIFLXTNHLALELESSPXIKQFIIKANNTKLNEDKEPKLAGFGLSIQGPQFNSKKPKQINADHIMDTLGYMPLEYVMNGSVTDKWDVFSFGLVLLRVVCGMDYFIMAAERKRMEKPVEENIDLNIKGKIAPECWQVFIDIMVRCLEYEPDERPAMGEVEVELEHALSLQEQADITNTDGDYTLLSKTIIPIARGSEMKE

SEQ ID NO: 194812 - protein, 253 aa, Glycine max
  unsure (1)..(253): unsure at all Xaa locations
  Clone ID: PAT_MRT3847_17943C.1.pep
DAWADAWAPPQLICQLHNVTMHADVETDEVYAQMTLQPFVRQEQKDTFLSMELGIPSKQPSNYFCKTLTASDTSTHGGFSVPRRAAEKVFPPLDFSQQPPAQELIARDLHDVEWKFRHIFRGQPKRHLLTTGWSIFVSAKRLVAGDSVLFIWNEKNQLLLGIRRANRPQTVMPSSVLSSDSMHXGLLAAAAHAAATNSXLPVFYNPRASPSEVXIPLSKYIKLVXYTYFLLGMRFRKLFETGEXSVRRYNGYN

SEQ ID NO: 194813 - protein, 39 aa, Glycine max
  Clone ID: PAT_MRT3847_17944C.1.pep
NNLYGMRVKYAYFLASVEGWCLDWLVSFPWQTDSSICTR

SEQ ID NO: 194814 - protein, 69 aa, Glycine max
  unsure (1)..(69): unsure at all Xaa locations
  Clone ID: PAT_MRT3847_17945C.1.pep
AQEYQDGSTAPVPVSDTHRXCSSHTQCPLCLLFARYVPIARLYMISKYDAFVMRYSIRSSLSVMAHRSS

SEQ ID NO: 194815 - protein, 83 aa, Glycine max
  unsure (1)..(83): unsure at all Xaa locations
  Clone ID: PAT_MRT3847_17946C.1.pep
LTXILNXQLLLRKYWFXIFLLFSFPFVSFSVTHAAPLNYNQVPHFNTHVACSPLSNLCFIEKNRRKQNFLRKRTRGSTGNPDR

SEQ ID NO: 194816 - protein, 166 aa, Glycine max
  Clone ID: PAT_MRT3847_17947C.1.pep
PRVRSKGDVFGIKISWNCNSPICIPCNQRSLNKNDNLVCFKVVGMEPSDEPVFRVNNTLTALVLVGSSPSALPPDLLIGGQAEGPVPLQGDTVNILASILTPTFCPSVLSSKFRVSVLLYGLAGCGKRTVVRYVARQLGVHVVEYNCHDLMGSDRQSVALAQAFKT

SEQ ID NO: 194817 - protein, 163 aa, Glycine max
  Clone ID: PAT_MRT3847_17948C.1.pep
MSEIEHMKKLYNGIIYFVQNHVKPVAPSNNNTFPSFLLCSNNINSNSNNNTSSQPQASPMSNVSTLQRQVKQFLGCYSNNTKQARAVNSSPTNSSITIVEEEASSNSCKTKLFGVSLQSKKRVHPDEYGSNYILQSSETNNKARLVLENDELLGLNLMPPSTC

SEQ ID NO: 194818 - protein, 120 aa, Glycine max
  Clone ID: PAT_MRT3847_17949C.1.pep
KIQNHCGERCSCVIVSPAVTFLCATVSKTGNWVLLLSPLCASIMRRVPQISSSGSKRGCLKRFLMHKGLCMSRNNFVLLMLVATEGSGGSCWYIFCLRMPWYGNLANSVWYCGVFGKTQK

SEQ ID NO: 194819 - protein, 69 aa, Glycine max
  unsure (1)..(69): unsure at all Xaa locations
  Clone ID: PAT_MRT3847_1794C.1.pep
VVCLAINSGISTPSMSANLTYFNTYRKEKLPTNLIQAQQDYFNAHTYKKINIEESYHTKXFKLTKXSKN

SEQ ID NO: 194820 - protein, 164 aa, Glycine max
  Clone ID: PAT_MRT3847_17950C.1.pep
TITIINHLSFFVDLQTATGPPPVHPVFSLYPPPPSRRSQPSCNRSPPPPVTNPYPHPHPVYHSPPPPPKKPYKYPSPPPPVKKPYPHPHPVYHSPPPTPKKPYKYPSPPPPVHTYPPHVPTPVYHSPPPPPYKKPYKYKSPPPPVHSPPPPHYYYKSPPPPYHY

SEQ ID NO: 194821 - protein, 178 aa, Glycine max
  Clone ID: PAT_MRT3847_17951C.1.pep
AGREIHTHPHPVYHSPPPPPKKPYKYPSPPPPVKKPYPHPHPVYHSPPPPPKKPYKYPSPPPPVKKPYPHPHPVYHSPPPPPKKPYKYPSPPPPVKKPYPHPHPVYHSPPPPPKKPYKYPSPPPPVHTYPPHVPTPVYHSPPPPPYKKPYKYKSPPPPVHSPPPPHYYYKSPPPPYHY

SEQ ID NO: 194822 - protein, 159 aa, Glycine max
  Clone ID: PAT_MRT3847_17952C.1.pep
WIPRAAGPSPPPPVKKPYPHPHPVYHSPPPPPKKPYKYPSPPPPVKKPYPHPHPVYHSPPPPPKKPYKYPSPPPPVKKPYPHPHPVYHSPPPPPKKPYKYPSPPPPVHTYPPHVPTPVYHSPPPPPYEKPYKYKSPPPPVHSPPPPHYYYKSPPPPYHY

SEQ ID NO: 194823 - protein, 594 aa, Glycine max
  unsure (1)..(594): unsure at all Xaa locations
  Clone ID: PAT_MRT3847_17953C.1.pep
MSNKLGKQTVELATENSQGMDSGSRGEKVDGKESTKTQGFSHSGQSNLKRNLCSEEDVDAPLQSGIIRVFEQPGIEVPSDEDDFIEVRSKRQMLNDRREQREKEIKAKSRVAKAQRRPRSGSQSVVAVANSTKGSITAVEVANSIHADFVAADVRGMTKMDASSGFNSSLLSQALPPIGTPPLKIDAQPDLRSQMSRSHKTSLPAVSGGEKDPGSGVIFESKNKVLDNVXASLGSXGDHASGQQVMALTQTQLDEAMKPQQFDYXASVGNMTGAVDEPSLPTSSILTKEKTFSSASSPINSLLAGEKIQFGAVTSPTVLPSSSRVVSHGIGRPRSSRSDMQMSHNLTASDNDCSLFFDKEKHGNESHGHLEDHDAEAEAEAAASAVAVAAISSDEIVGNGLGACSVPASDGKSFVAADIDRVVAGVGCEQQSANQSRSEEPLSVSLPADLSVETPPISLWPPLPSTQNSSGQMISHFPSVPPHFPSGPPSHFPFYEMNPMMGGPVFAFGPHDESASTTQSQPQKSTTSASRPIGSWQQCHSGVESFYGPPTGFTGPFIAPPGGIPGVQGPPHMVVYNHFAPVGQFGQVGLSFMG

SEQ ID NO: 194824 - protein, 90 aa, Glycine max
  Clone ID: PAT_MRT3847_17954C.1.pep
RRVLRLDLIAENIAYTTTSTMTGCIFGCTPVTKPAQRTLLRRRLVKSAGENVRDNDNDDNGERNWMMNLTVAAAVSAAGIAAGNEPAPET

SEQ ID NO: 194825 - protein, 143 aa, Glycine max
  unsure (1)..(143): unsure at all Xaa locations
  Clone ID: PAT_MRT3847_17955C.1.pep
TVCLSKEKGGLGIRDLTKFNQALLGKWKWDLFHHQGELWARVLDSKYGGWRSLDGNNTPQAVSKXWYDLKKVRHNSGEESWFQQGIRWNVGSGSKARFWEDGWTTDGIPLKAKHPRLYLNSKQQKQYISPEDKASLWSQLKNK

SEQ ID NO: 194826 - protein, 113 aa, Glycine max
  Clone ID: PAT_MRT3847_17956C.1.pep
LKPLSPFLLCKGGRWIFKVGPQGLGEWGKEIGRPKNIRNSTSPVWVSCRKTSRGSNKRLFWGRTEGKPKKKKGICFLAPVGYGIKTPKGKIFFLKKRERGREGGGREEGRGGK

SEQ ID NO: 194827 - protein, 262 aa, Glycine max
  unsure (1)..(262): unsure at all Xaa locations
  Clone ID: PAT_MRT3847_17957C.1.pep
PRVRGPLYHGNSKEFLELIKSIGESRSKAEEDCIVLREIETLKRRINDADTPKRKIKEYIIRLLYVEMLGHDASFGYIHAVKMTHHDSLLLKRTGYLALTLFLSDDHDLIILIVNTIQKDLASDNYLVVCAALNAVCRLINEETIPAVLPRVVELLHHSKDAVRKKAVMALHRFYLKSPSSVSHLLSNFRKRLFDNDPGVMGASLCPLSNIVSDDVNSFXDLVVSFXNILKQVAEHRLPQTYDYHQMPAPFIQIKXLKYLRY

SEQ ID NO: 194828 - protein, 170 aa, Glycine max
  Clone ID: PAT_MRT3847_17958C.1.pep
EESEDESTSKKNQKMSQPIRKISFSWEKKPGVSKVTTTTHGENLIPKEEEFLAKLPPPPCTPEESSATHHHKNHHPLLDFQIPLPPCAFQPPFYRTSSKRGLWVQDKDPFLAAFKECTKNHQKTSAKVNKKLIKDGIEARVRKSMSFFSCTRSCTVHDTNLVRISHLDKD

SEQ ID NO: 194829 - protein, 57 aa, Glycine max
  unsure (1)..(57): unsure at all Xaa locations
  Clone ID: PAT_MRT3847_17959C.1.pep
SLNILWNFCQKKNLXSFCEYLAFKELTLISKTEAIASENSDDKAKKGFLVKFEPKVD

SEQ ID NO: 194830 - protein, 214 aa, Glycine max
  unsure (1)..(214): unsure at all Xaa locations
  Clone ID: PAT_MRT3847_1795C.1.pep
MGEIQESKALAKSKPSTEQDVTDELDLRMKKYLRGEGANLEGLKDKKLKGQLAVKEDLYGKSAKAAAKAEKWLMPSEGGYLEAEGLEKTWRIKQEAIAREVDISSSGKQYDIILPELGPYSLDFTSSGRYMAVSGRKGHLGIVDMINLSLIREFQVRETVRDVAFLHNELFFVAAQKKYPYIYXREGTELHCLKEHGPVXRLQFLXNHFLLASI

SEQ ID NO: 194831 - protein, 75 aa, Glycine max
  Clone ID: PAT_MRT3847_17960C.1.pep
ARFRLRGLDLPQEVQILLGLIQLLVKPNLVLKVVIDPEIEIASDVLSSIANGPIPKNKKVMVQTVRSLTIDPVSA

SEQ ID NO: 194832 - protein, 64 aa, Glycine max
  Clone ID: PAT_MRT3847_17961C.1.pep
LTTIYMVFHLLITFSTHNLILTPIPSILQTPIIFPRSKTFPNHTLNLFLFKYIIRSQFPTSLQP

SEQ ID NO: 194833 - protein, 60 aa, Glycine max
  Clone ID: PAT_MRT3847_17962C.1.pep
YTLHYNNMGQVHFPLKQPIFLGPYWSFTTNRLLAENEKNGPFKFPNKGNSQQYYAFLKRF

SEQ ID NO: 194834 - protein, 81 aa, Glycine max
  Clone ID: PAT_MRT3847_17963C.1.pep
REEGVCNNRGYDIEPALSSSKASSHQSMDKHAILRRIRQRRFNNRAKTALEALIGTSEANNNTTTGQEHLWLQLGDSFSSP

SEQ ID NO: 194835 - protein, 522 aa, Glycine max
  Clone ID: PAT_MRT3847_17964C.1.pep
MVQKRSFDAEEILEGSFKHPKHAGPSTELFSLSESVFPDDDCHSRMPKTSEDGCTQCSSEGIEKLGGESFGELPTGAGNSETSFPVIDIPASSWATSGTIEDLHLEPPLHLSLFPEYFSPERPIRTLTRYEDIYSILLEHSPRKPVSVGSDHQADVPAWDILGATNRPNASDAVSVSDFTVGHIDETEKRLMGTCVIPMPQMELSSNDDEVGKASTDCSCEDQGSMRCVRQHIAEEREKHIKTFGVEKFTELGFTNMGEQVAENWSAEDEQLFHEVVFNNPVSLDKNFWNYLSIAFPSRTKKEIVSYYFNVFMLQRRAEQNRNDLLSIDSDNDEWQGSEGNDIATREEDEDSVAESPVCHDETCMADCHNNDLQAYNEYAADETCAANETVDFTNKNIDDDSQYDPIEMHHSSGSPLIQPQDQPIWQDSCDGKVKEDSCTSSDVGVVSQETKVNTENGDHWCGNYNGVTNGYSQGYVLEHCDAKVWDSGFVSCSKNKIDFVPTCNMIEEVFGDGRRQDIRRA

SEQ ID NO: 194836 - protein, 90 aa, Glycine max
  unsure (1)..(90): unsure at all Xaa locations
  Clone ID: PAT_MRT3847_17965C.1.pep
SSASSSSFCLPTYKVLLQVLVVGLASNDYKIRYTKRTHLCCCEKPWXRTLRESQLEQMKAALNGMILPPIHRESVRVTMIANEIIDALLR

SEQ ID NO: 194837 - protein, 53 aa, Glycine max
  Clone ID: PAT_MRT3847_17966C.1.pep
EKTTEGLGHLSLLKCKCSLKTKTVHEHFLKVTIACNCQVYYAVIQLLTFEKVH

SEQ ID NO: 194838 - protein, 72 aa, Glycine max
  Clone ID: PAT_MRT3847_17967C.1.pep
FYLFRSGNPAWSNQSQVINNYLLKIIHIVNNLFLILHISTSFSNLVFQNPTFHFHNFWELNLTANAKNHLKR

SEQ ID NO: 194839 - protein, 38 aa, Glycine max
  Clone ID: PAT_MRT3847_17968C.1.pep
CINNAIANTKLSGEVSQSTHNLITKGLGLLTAPRPLRN

SEQ ID NO: 194840 - protein, 81 aa, Glycine max
  Clone ID: PAT_MRT3847_17969C.1.pep
MDHNTPWRGMFLYAREGVYQMDAHMTVLDWETFRDGSRSEDQEDIAFEYGRDVQNISSSLEESIARIEDFLSFERAFSHGD

SEQ ID NO: 194841 - protein, 52 aa, Glycine max
  Clone ID: PAT_MRT3847_1796C.1.pep
NTTNKLLQSQNKSYFSANCYIKSNRIGPLTLYANMLENGQTPYVISYIMVLL

SEQ ID NO: 194842 - protein, 92 aa, Glycine max
  unsure (1)..(92): unsure at all Xaa locations
  Clone ID: PAT_MRT3847_17970C.1.pep
MKTMAAQALVASSSLTVSGEAAIHTLGTRSYQSRSGVAKXASFLVNVAANPPVKLGSDRPLWFASKQDHSYVDGILSGDYGIDPLGPSYPEG

SEQ ID NO: 194843 - protein, 65 aa, Glycine max
  unsure (1)..(65): unsure at all Xaa locations
  Clone ID: PAT_MRT3847_17971C.1.pep
DFTKATQFKKGLPHYIRRHLYTLQIYIVSSSLTAEIKYTLVXSNIHIRGLCIDGRTKLWTKRKEF

SEQ ID NO: 194844 - protein, 47 aa, Glycine max
  Clone ID: PAT_MRT3847_17972C.1.pep
TFTTRSMPVVTRFCIMCSVFSSSDFVHPHYIVIIVNGNVGPMLLHNF

SEQ ID NO: 194845 - protein, 104 aa, Glycine max
  Clone ID: PAT_MRT3847_17973C.1.pep
MMPSCNRSCSCSRGPSVEDGKWYGVRSYLHLFYEDCAGTALSDDPEGPPVLCPRRPWPSLCWKISLSSGTLLLLLGVAALTTGYAVPPKLEGIGEGEFLVLDQR

SEQ ID NO: 194846 - protein, 75 aa, Glycine max
  Clone ID: PAT_MRT3847_17974C.1.pep
WRSSETGSAHKSKQRQGGPVICLVITKRPGLVLQLCASTIHTSKDINIRHYLSANTNSHVSRLSMGPVSLWIDTY

SEQ ID NO: 194847 - protein, 72 aa, Glycine max
  Clone ID: PAT_MRT3847_17975C.1.pep
LLGRFRVYMRGFLKLLLNRQSFPQHFPFFAFQFFFQQVLWGDFVGFMSFWWGNRCLFLRQFFQKLVPPDHLR

SEQ ID NO: 194848 - protein, 70 aa, Glycine max
  Clone ID: PAT_MRT3847_17976C.1.pep
YGIRVEETCFQMSQSMALDFLLMCKYEVIQTVKLRMAYIVSYSLFDGIDIRDTSNVSRCLKGQKIRHVRG

SEQ ID NO: 194849 - protein, 594 aa, Glycine max
  Clone ID: PAT_MRT3847_17977C.1.pep
MGTFSRSLSIRSPSFSLFFSKHCHCSTNTYDTDSHSNGTQFLISMRNLCKSGKVKNIDEALDLFQGMASMKPLPSVKDFTLLLGVIVRLKHYTTAISLVKHIFSSLGIEADTITLNIVINCLCRLKLVAFGFSVLGTMFKLGLEPTVMTLTALINGLCVQGNVAQAVGLVDHMEKMRYPLDVYTYGVLINGLCKTGDTLAAVEWLRKMEERNWKPNVVVYSTIMDGLCKDGLVSEALNLCSEMSGKGVRPNLVTYACLIQGLCNFGRWKETGSLLDEMIKMGMRLDLQTLNILVDAFCKEGKVMQAKSVIGFMILTGEGPDVFTYNSLIHIYCLQNKMNEAMRVFHLMVSRGCLPDIVVFTSLIHGWCKDKNINKVMHLLEEMAKMGFVPDVVTWTTLIGGFCQAGRPLAAKELFLNMHKYGQVPNLQTCAVILDGLCKGNLLSEAVSLAEAMEKSNLDLNIVIYSILLDGMCSAGKLNAAWELFSSLPGKGLQINVYTYTIMIKGLCKQGSLDKAEDLLINMEENGCLPDNCTYNVFVQGLLTKKEIARSIKYLTIMRDKGFSVDAATTEITINYLSTNEGDTRIREFFFPKR

SEQ ID NO: 194850 - protein, 46 aa, Glycine max
  Clone ID: PAT_MRT3847_17978C.1.pep
IFLTTPLTTPYHLQTQFHLKIIHIITISILNHISSFILFHTILTIH

SEQ ID NO: 194851 - protein, 43 aa, Glycine max
  Clone ID: PAT_MRT3847_17979C.1.pep
YARTGQTAPFWMFAENMRHPTTPGACHISILATRVPASPCSSM

SEQ ID NO: 194852 - protein, 123 aa, Glycine max
  unsure (1)..(123): unsure at all Xaa locations
  Clone ID: PAT_MRT3847_1797C.1.pep
LKREILLKRETFFFSFSHFSTKGEVKMKSNIKCLVLAXLKLSAFSIFIHLLPATLTQMGVPXYQSSVTILSCTPLFEKPISPTNTPSYXKLSCPLKRFESLYTDSNPXDFILHPFPQTNSFIF

SEQ ID NO: 194853 - protein, 65 aa, Glycine max
  Clone ID: PAT_MRT3847_17980C.1.pep
HMMWPSKGWHVKKKSCRHMHTHGFIVTRERNFYSAKGTFPRDIQEMTYCTVSRTSLGHSSVGFCL

SEQ ID NO: 194854 - protein, 88 aa, Glycine max
  Clone ID: PAT_MRT3847_17981C.1.pep
LPTLTPLTLQPLSSLKSISTTLFSLIPTNSFSFSPFSQTNHFYIFSLSFPTPFFLTTSFPQHHSFFNIFFPSFFILTFLYLLIFTFTF

SEQ ID NO: 194855 - protein, 47 aa, Glycine max
  Clone ID: PAT_MRT3847_17982C.1.pep
MAAHTIAHATLKGPNVVNEITLGITLGSSADSQSKMHHWNDQTKTRT

SEQ ID NO: 194856 - protein, 109 aa, Glycine max
  unsure (1)..(109): unsure at all Xaa locations
  Clone ID: PAT_MRT3847_17983C.1.pep
VLSTTLDDWPEDEIDAMXEAAGIAPVNSTYEANTRERXTKPEPHAGHEHGAKHIRSRNEVQEFLRPSFRIETGKSILQSSAAXKSFMDSVKRTGSSHRMEGMDESIGLL

SEQ ID NO: 194857 - protein, 68 aa, Glycine max
  Clone ID: PAT_MRT3847_17984C.1.pep
QQLVLGSCSRFLILELVFCFESIIKSILYQLTFIPLDSRLCENGYVCSVHIQISGEMFILKVCVFYNL

SEQ ID NO: 194858 - protein, 66 aa, Glycine max
  Clone ID: PAT_MRT3847_17985C.1.pep
PSFFGLILALLNKLLKICAEYDNMSPIIDLNICNLTNFPKYYESIFLRLCPRILCQWVLIYICVAD

SEQ ID NO: 194859 - protein, 45 aa, Glycine max
  Clone ID: PAT_MRT3847_17986C.1.pep
KEGIPPGQQRVIFSGKQLEDGRALPGFNIPKGSTLPLVLRFRGGV

SEQ ID NO: 194860 - protein, 165 aa, Glycine max
  unsure (1)..(165): unsure at all Xaa locations
  Clone ID: PAT_MRT3847_17987C.1.pep
LTHAQQEVWWRFMLLPNGNMVHFXDAHSRTGRQRLDQPTDTLLAGXYLRSKRPSKLVRRLXQKENVDGPYRKVLAPKRLAVPYNNMNSSKPILXRDYYEWFTIQRRSQENVTFTSASYTFELIFDYNVDNSSSGGHIMLELPVNNRTITISLLGIDGHIMHYTYS

SEQ ID NO: 194861 - protein, 63 aa, Glycine max
  Clone ID: PAT_MRT3847_17988C.1.pep
WRRLIVDNSLYLPFKSNSLVTLQHFMASTNPKYSTNQRELVHFQYIHCPPWIQMYFTFYLCSN

SEQ ID NO: 194862 - protein, 350 aa, Glycine max
  unsure (1)..(350): unsure at all Xaa locations
  Clone ID: PAT_MRT3847_17989C.1.pep
MMANKLQGAIVSCHSRTRQLSIDEKGRAISAVLTTHQEPFKTKVPELTISHVPPPTPSIKNKDFIIPSTTSGKFGRFGGKFVPETLVASLTQLEAEFKNALRDHAFQAELAEALRDYAGRETPLYHAKRLSEYYKSVNNGKGPDIYLKREDLNHSGSHKMNNALAQAMIAKRMGCKSVVTATGSGQHGLATAAACAKLALDCTVFMADKDIHRQYSNVRLIKLLGAQVEAVDGGFTDAASEAFRYWVGDLENRYHLSGSAVGPHPCPTMVREFQSVIGKETRMQALEKWGGKPDVLVASVGTGSNALGLFHEFIADKDVRFVGVEAGGLGLESGKHXSTLTTGEVGAYHG

SEQ ID NO: 194863 - protein, 60 aa, Glycine max
  Clone ID: PAT_MRT3847_1798C.1.pep
VRAFGKSLGFTVGWGQFFCCFHVMGLHPRSCLSVECCFRFSPDFLLSRPFLFFICFTTRL

SEQ ID NO: 194864 - protein, 154 aa, Glycine max
  unsure (1)..(154): unsure at all Xaa locations
  Clone ID: PAT_MRT3847_17990C.1.pep
IQPQLEKKKKLFEMARTKQTARKSTGGKAPRKQLXATKAARKSAPTTGXGVKKPXSLFVPGYPGCFFWGGIWKSPQKIPRLFEPENPPLKRGCFRKYSKVFKGCLRGYKSHPTFFFFFKEGLGKTPLGPLWEKTLGGPPPPGGVFFFSPKKYLR

SEQ ID NO: 194865 - protein, 74 aa, Glycine max
  Clone ID: PAT_MRT3847_17991C.1.pep
RSDESSPVLFAILSQKPWLFSSLVSMNAHQHFIVTQSGIRAGILIFDTVTDKLRFLYDTTWHSDTQRRGRYVCS

SEQ ID NO: 194866 - protein, 182 aa, Glycine max
  Clone ID: PAT_MRT3847_17992C.1.pep
FRSHLQPMGICYRLYHFLTKALALQMSKTVTLGRSRRDSSSSTAVRSSDSKAKREVQSETPCEVDDGKKLPPTEGVVGDSISSPVQQAEEKNKPCMNVDKMEGENAALTLPMPSLAPTRSIKKTVSISENVEEIPPPKKLKRKWSRSFQKSFSLDQEEEPIPPPRSILKVGSDLDDKSNSFS

SEQ ID NO: 194867 - protein, 39 aa, Glycine max
  Clone ID: PAT_MRT3847_17993C.1.pep
PHLRHYHLTLRHIVQTKDRGYWRFVSYTLIATANEIMKY

SEQ ID NO: 194868 - protein, 44 aa, Glycine max
  Clone ID: PAT_MRT3847_17994C.1.pep
ARLATVRSGITSPTSARVPDGVTHPNTLRSNAACTLIHTLTCTS

SEQ ID NO: 194869 - protein, 101 aa, Glycine max
  unsure (1)..(101): unsure at all Xaa locations
  Clone ID: PAT_MRT3847_17995C.1.pep
ARVMPHILYSPLTIPEYPWTDLPMDFVLGLPQTMNGKDSIFVVVDGLXKMTHFIPCKKNDDACHVADLFFKEVVCLHRLSGSIVSNXDTKILSHYWRTLWG

SEQ ID NO: 194870 - protein, 90 aa, Glycine max
  Clone ID: PAT_MRT3847_17996C.1.pep
EYIQAFFSSSSRPALELPPVSPSSRGSQSGSARLSLEPPSVTPSSRDPKVDKSNGSSSGLFGLISGVYGPLLTRTRSATDAVVQKTRSTS

SEQ ID NO: 194871 - protein, 50 aa, Glycine max
  Clone ID: PAT_MRT3847_17997C.1.pep
VHGCLGAFWLRLMVVGCPMPCSLLRRACAALIFLSWCPLFSYLFCLFLFF

SEQ ID NO: 194872 - protein, 97 aa, Glycine max
  Clone ID: PAT_MRT3847_17998C.1.pep
RSTEYKEVRSSGCHRAALEQESENHISRSRTASLPPTLPTDPPSPSNSGGSFQGPKVDKSNGSSSGLFGLISGVYGPLLTRTRSATDAVVQKTRSAS

SEQ ID NO: 194873 - protein, 350 aa, Glycine max
  unsure (1)..(350): unsure at all Xaa locations
  Clone ID: PAT_MRT3847_17999C.1.pep
MALSLGKLVILVSAGIAGSVIAKEGRLPDVSGLASGAFKVVLRQLKSDDPAPTVKKQPHNDALLAQVNSLRQELQLLARDRSITIVNASGTGGRKYITVIVIVVVGYGYVWWKGWKLPDLMFATRAXVWPDACTSIGNQMGKLYESIGDTKKKLSARINGLDKXLENCLALLKGTRKDIYVIQRKADTISEDSKSFHVAVHVLESKIKEIEEKQVATIEGVNMLCQFTKTLENSRSTEYIQASSSSSSRPALELPPVSPSSRGSQSGSARLSLEPPSVTPSSRTASLPPTLSTDPPSPSISGGSFQEPKVDKSNGSSSGLFGLISGVYGPLLTRTRSATDAVVQKTRSTS

SEQ ID NO: 194874 - protein, 119 aa, Glycine max
  unsure (1)..(119): unsure at all Xaa locations
  Clone ID: PAT_MRT3847_1799C.1.pep
MESPQSAGSPFKSSVLGEAEKYTTDVMTQSSGPLSKDIEVNGKDAATINPXELIRAVAVYIHQARDIHHICIYHRLDGHAXICLTSXPENTVSTNTINGGGRNPAINENLGIRAMTVDS

SEQ ID NO: 194875 - protein, 155 aa, Glycine max
  Clone ID: PAT_MRT3847_179C.1.pep
MEAYYSGSYPASTKPISLLHTVRKVQAKPWKKAAVAPPAPTPIRVYKVDAINFRDLVQQLTGAPEFKPADQEQHQLFPSVAPIAATFVDTPQKPMLSSKDNIAASSTVSSATNWYQGAKSEPLEMNLSSPSSYNWFFVPPISQGNMTSLEPGRVL

SEQ ID NO: 194876 - protein, 52 aa, Glycine max
  Clone ID: PAT_MRT3847_17C.1.pep
MGGDLGPKLMGKRNEEEEEQEEEFLLGQKVWNENHGIWIVAVPAIFTKGFTF

SEQ ID NO: 194877 - protein, 104 aa, Glycine max
  unsure (1)..(104): unsure at all Xaa locations
  Clone ID: PAT_MRT3847_18000C.1.pep
PLPPTLAQNFGVNFIPALTPFPGNPSNGKNAWVGLNGKPGCFPPLKKGQIWGAPHLGAPXFKLPFKXACLLFGVFYLVGGVKKKPAPWAPPFKPQVLARANFSH

SEQ ID NO: 194878 - protein, 126 aa, Glycine max
  unsure (1)..(126): unsure at all Xaa locations
  Clone ID: PAT_MRT3847_18001C.1.pep
MVLGASVMELRINFAITATGHKRIAQKRLHLHMSITPLSFLERAASGHPTINSLIHGSSSYTWQHTYHRCRRFTSALSNNSIGLGXTVAFIVPNITATYEAYFWIPIVGAVLNXVILRLIAFTVAF

SEQ ID NO: 194879 - protein, 137 aa, Glycine max
  unsure (1)..(137): unsure at all Xaa locations
  Clone ID: PAT_MRT3847_18002C.1.pep
PTNGWKAYYAATRAIVNINTEFFNIVRDKSLQAMSHFWLNADYVKCIHASGFFSGYDXFMQGWQLVFNWEQGLNFQVRDVCARVLTDMAWVTMKTYVDMDTGPFNVTNIYEFHNGRWYMVHHHSSVDGDVDHQIVHG

SEQ ID NO: 194880 - protein, 99 aa, Glycine max
  Clone ID: PAT_MRT3847_18003C.1.pep
IHSLTRERYLYCIIDINKLRISAEVQDTPSKTARILGTPAIIYRPQEVGQTSRLCGDRISGFNGIKMASIEHALCAVPTNNPCNWGRRLAGGPAFSIES

SEQ ID NO: 194881 - protein, 233 aa, Glycine max
  Clone ID: PAT_MRT3847_18004C.1.pep
MVEGMNFFRRVNRTSCISTEAKKVSSQSMDSNGECDFISDSDSGSALLLLGTVQTAELSEHDNPRNPFKSSKRHKNKFTEHLGAQWDVFRRQDVPKLIEYLERHYDEFSYTHDYHKKMVHPILDQSIFLDSTHKMRLKEEFKIEPWTFQQHVGQAVVIPAGCPYQIRNSKSSVHAVLEFVSPENVTEGIQLFDEVRLLPEDHKAKADMLEVKKMALHSMNTAIKEVRQLTSKT

SEQ ID NO: 194882 - protein, 108 aa, Glycine max
  Clone ID: PAT_MRT3847_18005C.1.pep
DFKKKKKKQKKKKQKAKRKKNKKKQKIQNKSRAPDLVLTLYREQDPTILMIEILAYHIQILGTKRIENPTEYHTKVWWPHKKKFQKKGEGKKKKNNRIKKHKNQGRAI

SEQ ID NO: 194883 - protein, 61 aa, Glycine max
  Clone ID: PAT_MRT3847_18006C.1.pep
KKEIFNIFKSKSTYISSLHKGLLTKNLNYHIFSSHSLELVDRIKKIWITWVTGKVKFEFTA

SEQ ID NO: 194884 - protein, 53 aa, Glycine max
  Clone ID: PAT_MRT3847_18007C.1.pep
SKCVFLGQFLLKVFIFHNVICLDRFLVFKINIFSCKVLVGYVFNHNLDINNIM

SEQ ID NO: 194885 - protein, 102 aa, Glycine max
  Clone ID: PAT_MRT3847_18008C.1.pep
GTLSLASITNSFNSSKKIFLWIILFVSYGVCNFCDYFSLPSHLLVAGHLLLTNFLFITLREECVHFSRLQVPLLVSFIGFLKFATKSVCVLNMWLERRIKLF

SEQ ID NO: 194886 - protein, 97 aa, Glycine max
  unsure (1)..(97): unsure at all Xaa locations
  Clone ID: PAT_MRT3847_18009C.1.pep
KKKRGQETLELRENFFGGGDQVPWTQRQKIKTPKGLHRGPFFGRKQNQMEFWKPSYPHFKPNESPGESEKKNNXPRKGRQGTLQGRPHKKNWEKGGE

SEQ ID NO: 194887 - protein, 42 aa, Glycine max
  Clone ID: PAT_MRT3847_1800C.1.pep
VLLSAGSLQAMNSVSIPQFVSLGLFTRFPLVFPSSIVALSSA

SEQ ID NO: 194888 - protein, 104 aa, Glycine max
  Clone ID: PAT_MRT3847_18010C.1.pep
NLKVTNYALLVYKPSLPHKKKKINGQKKISGWENPLLCKKNSNWDRHWNLVLKTLGFVFKNPGKEQPNPPPNLTLMVDNSLTQSCSSPNPLIGVLTKKIFWGLI

SEQ ID NO: 194889 - protein, 105 aa, Glycine max
  Clone ID: PAT_MRT3847_18011C.1.pep
KSPGRPTRPYGCVHLTEGVHSVVREEWTAEVFDLELIRYPNIEEEMVEMLQIAMSCVVRVPDQRPKMLELVKMIENVRQIEIVVNQPSISSENQVESSTQTPLTT

SEQ ID NO: 194890 - protein, 58 aa, Glycine max
  Clone ID: PAT_MRT3847_18012C.1.pep
ATILLVLAFFLSLDHIDVKSINIRKSLHMKLLTDLLSLLKPTLRQHSACLWIDLCHAG

SEQ ID NO: 194891 - protein, 104 aa, Glycine max
  Clone ID: PAT_MRT3847_18013C.1.pep
VRISSDPQTVAARQRRERISERIRVLQKIVPGGSKMDTASMLDEAANYLKFLRSQVKALENLGNKLDTMNCPPTNIAFSFNPSFPIQTHFPMQNPSSHIQYSKG

SEQ ID NO: 194892 - protein, 78 aa, Glycine max
  Clone ID: PAT_MRT3847_18014C.1.pep
QLSTSSNTSHKIVNISVNVNAWKPPQHQEPREVTELDGNRTFYNERAPRSSTRPVKENANTLKVSNGNANLLLMFRRV

SEQ ID NO: 194893 - protein, 43 aa, Glycine max
  Clone ID: PAT_MRT3847_18015C.1.pep
NGAFFNLFKNIQMPKGPKELRASSIHGITHFVQLILRLGPQGE

SEQ ID NO: 194894 - protein, 57 aa, Glycine max
  unsure (1)..(57): unsure at all Xaa locations
  Clone ID: PAT_MRT3847_18016C.1.pep
CFSILDLSIVHQLSSKAILAFIFQYMFCVYFSIFRGAFLHPNIVSIYDFIFLWDEDX

SEQ ID NO: 194895 - protein, 154 aa, Glycine max
  Clone ID: PAT_MRT3847_18017C.1.pep
ARARFSLVLFSRSGVYVINITCFDNHTPLVSWHDDDDDETSNVALIKFSKSKHLLPCCHACLMESTTQKNKSKKSSLLMRLKPVMGFDDSIMPNRNGDDPVLSYLAIANKNGAVLPAMLSSMFGGAEDLGEKCGCRRRKWQALKAVFSGTTLMR

SEQ ID NO: 194896 - protein, 48 aa, Glycine max
  Clone ID: PAT_MRT3847_18018C.1.pep
LRHLSPHEASRWDGSCYLTVQDAGCSVLRPTESQSESPFSFSLFMSLS

SEQ ID NO: 194897 - protein, 78 aa, Glycine max
  Clone ID: PAT_MRT3847_18019C.1.pep
RKGPGRGALASGPPPFCGGGPPPPFPAREPGGGGWFSGAAPPPGKAPTPRPPRFFFFFPPKAANFSPPFPPGPFFLRP

SEQ ID NO: 194898 - protein, 118 aa, Glycine max
  Clone ID: PAT_MRT3847_1801C.1.pep
RAEADGADQRTKQRLLQAAIASLKTNNCTLAKRQLQKIHRLYSMWKRNMHRLDATEVFLKTTRHEAEEAWEDHVLSKTRRILHKFLYEDTHVVPAGIASVVIASSPPPMPATAAAATH

SEQ ID NO: 194899 - protein, 37 aa, Glycine max
  Clone ID: PAT_MRT3847_18020C.1.pep
SMTSRLPIIIGLYIRTLTKRSLISTTFNSYQLFRFYT

SEQ ID NO: 194900 - protein, 84 aa, Glycine max
  unsure (1)..(84): unsure at all Xaa locations
  Clone ID: PAT_MRT3847_18021C.1.pep
SILNVLLEVGMTPSXAKIFLPGPPESLTVLLDGRAVGSIASMEVKKVDAHHTQLKVISVEMISDDMKVRSVCSSMGGAYSEIYL

SEQ ID NO: 194901 - protein, 67 aa, Glycine max
  Clone ID: PAT_MRT3847_18022C.1.pep
MFNLLGKKKKKKKKKKKKKKKKKKKKKKREGEKKRGEIKKKRGARLKKSNFTNPAIQRKSFFIGHPK

SEQ ID NO: 194902 - protein, 51 aa, Glycine max
  Clone ID: PAT_MRT3847_18023C.1.pep
MSCLALSLQPANGSDILLQTREWFPSSRALYALFAFRHTHRAFLFYKHFAP

SEQ ID NO: 194903 - protein, 66 aa, Glycine max
  Clone ID: PAT_MRT3847_18024C.1.pep
ILGVHKIWIHFVIPCLESLIPINLFFKHRTILAGTASLTALCLMMIIYIKEVYYLEPQQSLHKLQV

SEQ ID NO: 194904 - protein, 47 aa, Glycine max
  Clone ID: PAT_MRT3847_18025C.1.pep
NRFNSGGRRCYFDHIGALIGCSCSTNTTPLLVAFPNSCFCPKRENQG

SEQ ID NO: 194905 - protein, 63 aa, Glycine max
  Clone ID: PAT_MRT3847_18026C.1.pep
IKTDKVLTIQKSSFLSRVFVLPETYWFMRKRLGKTLPKGLQQSRCHKQSQLPIKQLDTKCINS

SEQ ID NO: 194906 - protein, 76 aa, Glycine max
  Clone ID: PAT_MRT3847_18027C.1.pep
NRSGVPGSTPRVQRTTEGNGCGRTTDCAWVLVDNRGGRVSDDDYTFRVGDDGCKTYPIAGGATRWITRIMLLAMMI

SEQ ID NO: 194907 - protein, 88 aa, Glycine max
  Clone ID: PAT_MRT3847_18028C.1.pep
CNNDTKRCSLLKHSTSTWHCTHDLLYISYGPAENFFSFIHSKIRLLILLCQDTSFAFKAPHQTFPILLSIRRLQDRPQFLSVPNTDRH

SEQ ID NO: 194908 - protein, 160 aa, Glycine max
  unsure (1)..(160): unsure at all Xaa locations
  Clone ID: PAT_MRT3847_18029C.1.pep
MTMKLVLVVVVEVACLVSGILSFGSETLSELSFLENDVVSTTRPSSSSQLQPQPQPQPLMVDLTLIHEADSKGAVCLDGTVPGYHLXRGFGSGADSWLIHLEGGGXWCNTXRNCVYRKNXRRGSSKYMENQIPFTGILSNKPEENPDFFNWNRVKLPYCD

SEQ ID NO: 194909 - protein, 91 aa, Glycine max
  unsure (1)..(91): unsure at all Xaa locations
  Clone ID: PAT_MRT3847_1802C.1.pep
PXXKXILXXLXACMXHLHHLXIIXRSXXVTLTXCFFGXLFSNSSSNSSTHSXXLLFMWMLKWGTWTWGSLWWRSRRKRRCLNLSVCHKSMA

SEQ ID NO: 194910 - protein, 751 aa, Glycine max
  unsure (1)..(751): unsure at all Xaa locations
  Clone ID: PAT_MRT3847_18030C.1.pep
NKRERERMEGRESCHPLLRGGRRREEKGYNHGLSTTQMHVMAAICDALIPSLPLNKDTSQDQALSDFYNTSASQLPFPDEAAELLYKRTVPEAVSLVSWVLWILSFRLGTLLLCGRLSLDWKWPFIRKFSEISLEKREQIFRNWTREKSWVALRVVFVLIKLFCFYNFFSRTDANGQNPTWKAIGYQVDTKEKLIRKERPLEKGLIETMYETDSTLIQSLTEKGLEVTEDKRQNLYKVKCDVVIVGSGCGGGVAAAVLANSGHKVVVLEKGEYFVSHDYSSLEGPSMDEQYESGGIMPSLDGKMMILAGSTVGGGSAVNWSASIRTPDSVLREWSKKYKIPLFGSSDYQSAMDSVCRRIGVTEKCKKESFQNQILIQGCEKMGLKVESVAINSSADHYCGSCCYGCRTGDKKGTDSTWLVDSVGNGAVILTGCKAERFILENGKNGMKKKKCLGVIAAASWRSKVTKKLQIESKVTISACGSLNTPPLMISSGLKNPNIGRNLHLHPVQFAWGYFPEDMTTNFSGNNYEGGIITSIHKEYAEDSTPRFIIETPSLGPGSXSAFVPWLSGQDMKDRMAKYARTANIFALIRDQGSGEVKAEGRVTYRLDKEDKESLRVGLRKALRILVAAGAMEVGTYRSDGQRIKCKGMKEEDLEEFLDTVTIVGGPRSRNEVWTVFTTAHQMSSCRMGASEEEGALDENGETWEAEGLYVCDGSVLPSAVGVNPMVTIQSTSYCIASKIAESLGKASTYS

SEQ ID NO: 194911 - protein, 191 aa, Glycine max
  unsure (1)..(191): unsure at all Xaa locations
  Clone ID: PAT_MRT3847_18031C.1.pep
MTMKLVLVVVVEVACLVSGILSFGSETLSELSFLENDVVSTTRPSSSSQLQPQPLMVDLTLIHEADSKGTVSLDGTLPYNHLDRGFGSGSSSWLIHXAGGFNWKYVKVPNCDGSSFTGNSQKQVAQIPLXGQKIWRAAMHELLFKGMQKANQALLTXCSAGGLASIIHXDEFRSLFSTSTKVKCLRDAGFF

SEQ ID NO: 194912 - protein, 50 aa, Glycine max
  Clone ID: PAT_MRT3847_18032C.1.pep
RSWRIIHPMSRIVIIIYCHIVAAFASGSHTIRAWSDIILSSPGLAILALY

SEQ ID NO: 194913 - protein, 88 aa, Glycine max
  Clone ID: PAT_MRT3847_18033C.1.pep
MTMKLLLVAVVEVACLISGILSFGSETLSELSFLENDVVLTARPSSSFQPLMVDLTLIQRADSKRAVCLDGTVPGYHLDRGFGSGANS

SEQ ID NO: 194914 - protein, 174 aa, Glycine max
  Clone ID: PAT_MRT3847_18034C.1.pep
VLHNLETLDLRESGVRRMPREIYKLKKLRHLLVYDKLFGFLGGLQMEGGIGDLTSLQTLRDMDADHVTEEVMKGLERLTQLRVLGLTCVRGQFKSSLCSLINKMQRLDKLYITVSTFRSINLQFDVCAPVLQKVRIVGGLKEFPNWVAKLQNLVTLSLTRTRMTDDPLPLLKDL

SEQ ID NO: 194915 - protein, 367 aa, Glycine max
  Clone ID: PAT_MRT3847_18035C.1.pep
MVDLTLIQEADSKGAVCLDGTVPGYHLDRGFGSGADSWLIHLEGGGWCNTIRNCVYRKNTRRGSSKYMENQIPFTGILSNKPEENPDFFNWNRVKLRYCDGASFSGDSEDESAQLQFRGQKIWLAAMEELMSKGMQKADQALLSGCSAGGLASIIHCDEFGSLFGKSSKVKCLSDGGFFLDAMDVSGGRTLRTLFGGVVQLQDVQKNLPKSCLDQLDPTSCFFPQNMIEHVETPLFLLNAAYDVWQVQASLAPPSADRLGSWNECKSNHANCSSSQMQFLQDFRNQMLGDIKDFSSSSQTGLFINSCFAHCQSERQETWFADDSPLIEDKPIAVAVGDWYFDREVVKAIDCAYPCDNSCHNLVFNFK

SEQ ID NO: 194916 - protein, 127 aa, Glycine max
  Clone ID: PAT_MRT3847_18036C.1.pep
EFLVKVSEMFEIIIFTASKRMYAETLLDVLDPDKKFFSRRVYRESCTWKDRRCVKDLTVLGIDLAKVCIIYNTPEVFRFQVNNGIPIKSWFDDPTDSALMSLLPFLEKLVDVDDVRPLIAEKFGART

SEQ ID NO: 194917 - protein, 85 aa, Glycine max
  Clone ID: PAT_MRT3847_18037C.1.pep
IRIEQMASLRIQPCGKIRTCSQQHFADRFLSMQLVMQRMQALLERIKFRSNPGGLMCSCRQRQLRVSLHQQLTLLLIQFCGKIWS

SEQ ID NO: 194918 - protein, 41 aa, Glycine max
  Clone ID: PAT_MRT3847_18038C.1.pep
RRVWNHILTPLYDGLDAKSRLGSVYTQLQTHSLFNVIMPRS

SEQ ID NO: 194919 - protein, 80 aa, Glycine max
  Clone ID: PAT_MRT3847_18039C.1.pep
MRYSIWIAPPLLLFFPFMAAAAKIRSFQDKTPYLNAIEYVVDNHKPSGKAVAGKIRKMQQLTRTARGSPPAYLWRSLASE

SEQ ID NO: 194920 - protein, 77 aa, Glycine max
  Clone ID: PAT_MRT3847_1803C.1.pep
LKPLQDGENTELYCYTLKSKILILHQKAGYFSTKFHNYFLVFYHTKPYAGSRYSLPYQSKSVESNSTLQIVYLQILV

SEQ ID NO: 194921 - protein, 102 aa, Glycine max
  unsure (1)..(102): unsure at all Xaa locations
  Clone ID: PAT_MRT3847_18040C.1.pep
VCFYFNEKTNPPSIIFISSPSFCLLNYFLFPSGDCPLPKARLDEIIYVLQELAHLVIHPDAAPILPLHPLLRTGLAEEKEKHDNXXHLFVLLPSLCELVTSR

SEQ ID NO: 194922 - protein, 116 aa, Glycine max
  unsure (1)..(116): unsure at all Xaa locations
  Clone ID: PAT_MRT3847_18041C.1.pep
KKSPPSTXSXXISHXHRXGRRYYSISHKYXEXXAETHXRXWGEXXXXSXYXXXIHVISXXVXMXPXXXNXGRETYHXRXIXWRGGVSSHVVRVXXSXEGVIAHRILVXSPRNKYLV

SEQ ID NO: 194923 - protein, 71 aa, Glycine max
  unsure (1)..(71): unsure at all Xaa locations
  Clone ID: PAT_MRT3847_18042C.1.pep
VVYREENMKLFVFFVAASSLVAWPCHGASYQRXPLRXXTGMXRSSEVKXXSFRLAVEXHNIRXLKXILKRR

SEQ ID NO: 194924 - protein, 68 aa, Glycine max
  Clone ID: PAT_MRT3847_18043C.1.pep
APEGTPASGGLLVIIVHEAEDVEGKHHTNPYVRLLFKGEERKTKVLYTDYDIVNFDFLLSGLSSFSSF

SEQ ID NO: 194925 - protein, 104 aa, Glycine max
  Clone ID: PAT_MRT3847_18044C.1.pep
EDVPNGGGLLLSELWAGPTYSNSPPPSSLPIPKFSVRPKRTVSLDLPGSSSPGIEMRPVAKSAPSSPSRELLDLPFTRDFFDDNADSAATKTLCRILNLNINDD

SEQ ID NO: 194926 - protein, 89 aa, Glycine max
  unsure (1)..(89): unsure at all Xaa locations
  Clone ID: PAT_MRT3847_18045C.1.pep
ASSXISSPTVTTVXNRADAGXVATIXGXXSMAXFPTRKTNXDITSXASNGGRLQCMXXWPPVXGKXXFETXSYLPDLXDXQLAKEVEYL

SEQ ID NO: 194927 - protein, 326 aa, Glycine max
  Clone ID: PAT_MRT3847_18046C.1.pep
MRELKRLFRLTKGSSTAVSVSSLPSPLSFFSQQEQRKMEVAAAKALKPSLRTEFIFPQAIYDEILCFNANNVVAGEDFSVDDLLDFSNGEFQVGKDFDDYEEDEDEEKGSTSGSLQSQDRTEDDSNSNSTAGGGGDSVFAGELSVPADDVADLEWVSHFVDDSLPELSLLYPVRCSEQTRVCTEPEPRPGSVQTIPAVPRKPRTGKTRKPNARVWSSMSSLCSSVTAKKQKKKVEAQNGGAQSLRRCSHCQVQKTPQWRTGPLGPKTLCNACGVRFKSGRLFPEYRPACSPTFSDDIHSNSHRKVLEMRRKKEIVESDRIQLIPSC

SEQ ID NO: 194928 - protein, 53 aa, Glycine max
  unsure (1)..(53): unsure at all Xaa locations
  Clone ID: PAT_MRT3847_18047C.1.pep
YACRXXGSGIPXGSTXTRXXVKXAKSDLMGTEXYLLPFYLGFFXXRSGSLSYP

SEQ ID NO: 194929 - protein, 55 aa, Glycine max
  Clone ID: PAT_MRT3847_18048C.1.pep
LHYWLVIFRDGRNCSPYLCQKPPVVLSLLSFTGKVSVSVPVEALQLLSFLKIANH

SEQ ID NO: 194930 - protein, 121 aa, Glycine max
  Clone ID: PAT_MRT3847_18049C.1.pep
WVLLFFLNTEKKKQRNTNTSEGRKKTVCSRTEPKDLLFTCSCEDPILLLLLPLLGSALFGLFFHSRTRTPSRVNSNFALRAVFFPHHKSFRGSICSVGRRSRKVLDWGRGFGSFQFGRVLL

SEQ ID NO: 194931 - protein, 372 aa, Glycine max
  Clone ID: PAT_MRT3847_1804C.1.pep
MANTRMANMNTNSNSKEESKKMDEREAIPFLTSYKMGNFNLSHRIVLAPLSRSRSYNFIPQPHAALYYSQRTTKGGFLIGEAAGVSDTAKGYPNTPGIWTREQLEAWKPIVSTVHEKGGIFFCQLWHAGKVSNYDEFQPHGEAPISSTNKRPRKEIPKLVNEFVIAAKNAMEAGFDGIELHGANGYLLDQFLKDKVNDKDDEYGGNLENRCRFPLQVVKAVADEIGADKVGMRLSPFADYNDCGDSDPHALGVHMAQSLNEMGILYIHLIEPRMVTQFHKFDGTKSSLTPIRKAFKDGTFIVAGGYDRNEGNEAISCAAADVVAYGRLFLANPDLPTRFQLDAHLNQPDATTFYSHHPVLGYTDYPYLRPNA

SEQ ID NO: 194932 - protein, 91 aa, Glycine max
  Clone ID: PAT_MRT3847_18050C.1.pep
CPVVVGTSVLLNMIWSRLSRRTHLLPSLKTLQTNSLESRLCDVALIPIFLLILSQIINSFMGYVLKHIGDKMNGIILYFLGRLLKPIVLSN

SEQ ID NO: 194933 - protein, 45 aa, Glycine max
  Clone ID: PAT_MRT3847_18051C.1.pep
IIRKPETLIHEQRRSYTPSLLKHHHLWFSTFFLLAGRTRIKLKWW

SEQ ID NO: 194934 - protein, 188 aa, Glycine max
  Clone ID: PAT_MRT3847_18052C.1.pep
MVVSSTNPHNKEIAIRRRIASIFNKREDDFPSLREYNDYLEEVEDMTFNLIEGIDVSDIEAKIAKYQEENAEQIMINRARKAEELAAAMAASKGQPAQTDDDSATNQNSQAGFGAVPQGQYAPTFAGGQPRPTGMAPQPLPLGGGDMPGFAGDDEETKRLRTERAGGWSGDISRKRALEEAFGSIWVC

SEQ ID NO: 194935 - protein, 87 aa, Glycine max
  unsure (1)..(87): unsure at all Xaa locations
  Clone ID: PAT_MRT3847_18053C.1.pep
ALSGTVVSTSLMRRGAVTTTQVKTSPNDGEVISGPKFGXGGRVNCMAAYNEKLITPERFFFFECANDAYIADYLEDLGMETGYSRRA

SEQ ID NO: 194936 - protein, 40 aa, Glycine max
  unsure (1)..(40): unsure at all Xaa locations
  Clone ID: PAT_MRT3847_18054C.1.pep
LFPGDNRLTEKTFFTSRVLAILVAYYTIVTXFRKFLPHYI

SEQ ID NO: 194937 - protein, 183 aa, Glycine max
  Clone ID: PAT_MRT3847_18055C.1.pep
MVVSSTNPHNKEIAIRRRIASIFNKREDDFPSLREYNDYLEEVEDMTFNLIEGIDVSDIEAKIAKYQEENAERIKQAEELAAAMAASKGQPAQTDDDSATNQNSQAGFGAVPQGQYAPTFAGGQPRPTGMAPQPLPLGGGDMPGFAGDDEETKRLRTERAGGWSGDISRKRALEEAFGSIWVC

SEQ ID NO: 194938 - protein, 52 aa, Glycine max
  Clone ID: PAT_MRT3847_18056C.1.pep
DVGMAVTCFDAKKKKKKEKKKKKGGPRNYRVCTRGLSAFRIIGGAVFSQGGR

SEQ ID NO: 194939 - protein, 175 aa, Glycine max
  Clone ID: PAT_MRT3847_18057C.1.pep
LTGEDGQDVVVHPPEERDPIPLIIHHLPIAVTFGFFSNENLLVIDPTHHEECVMTGRMTPTLNSNGDVCAIQKPGGESVSQSVIMHCLKLAHVKATDITTKIKDAVEIHNNERMLRKIKRHSSSAAVDVCGATAGFGGKQNPLDGDDLECRATPSGQQHSKDGASKNFTGGPSSW

SEQ ID NO: 194940 - protein, 161 aa, Glycine max
  Clone ID: PAT_MRT3847_18058C.1.pep
MANDGTVSETKCTHDVFLSFRRDDTHHTFTCKLYDSLCRKGIITFMDNEELKVGDQIGHKLLKAIEESRISIVVLSENYAASSWCLDELVKIHECMKAKNLLVWPIFYKVDPSDVRHQNGSYGEAMTEHETRFGKDSEKVHKWRLTLTDMTNLKGEHVQEG

SEQ ID NO: 194941 - protein, 60 aa, Glycine max
  Clone ID: PAT_MRT3847_18059C.1.pep
NNLIFIIRQRHENTHRTACFLRPRTHPPETRLYAKDLFYFLIGGIKLSSVHHNNLVAPTR

SEQ ID NO: 194942 - protein, 219 aa, Glycine max
  Clone ID: PAT_MRT3847_1805C.1.pep
PRVRLKAAHPDWSPAAIRSALITTAYTLDNGGGPMLDESNANVSSVFDYGAGHVHPDSAINPGLVYDISTYDYVDFLCNSNYTSHNIRVITRNQASDCSGAKRAGHSGNLNYPSLSAVFQQYGKQHMSTHFIRTVTNVGDPNSLYTLTVAPPPGTEVTVVPDTLAFRRLGQKLNFLVRVQTRAVKLSPGTSTVKTGSIVWSDAKHTVPSPLVVTMQQPL

SEQ ID NO: 194943 - protein, 130 aa, Glycine max
  Clone ID: PAT_MRT3847_18060C.1.pep
VCFFFFFFFFFFLKNNWKTLFCIRGNHIIISCANLDYSSRDRNSKLWIVSCKCRKRNSGMDLIQHREAKEPDIKKYWPYTKPLLNWKGIYRAKYHKTLPNQAKKVPKSGMPRALFILNPKDPKTILKLNL

SEQ ID NO: 194944 - protein, 334 aa, Glycine max
  unsure (1)..(334): unsure at all Xaa locations
  Clone ID: PAT_MRT3847_18061C.1.pep
MSCSNLTMLVSSKPSLSDPSNLSFRSVLNPFQLPSQNPTSCTPSRSSTTQIQCGLRELRTRIDSVKNTQKITEAMKLVAAAKVRRAQEAVVNGRPFSETLVEVLYNINEQLLTEDVDIPLTKVRPVKKVALVVVTGDRGLCGGFNNAIIKKAEARIRELKELGLEFTVISVGKKGNSYFIRRPYIPVDRFLEGGTLPTAKEAQAIADDVFSLFVSEEVDKVELLYTKFVSLVKSDPVIHTLLPLSPKGEICDVNGVCVDAAEDEFFRLTTKEXGKLTVEEWMIVRTKTXDISPFLQFKXNTPVQILDALGCNLYLNSTNHELISLGLVATNYPH

SEQ ID NO: 194945 - protein, 83 aa, Glycine max
  Clone ID: PAT_MRT3847_18062C.1.pep
AEDPQDVADRERIFKRFDANGDGQISSAELGEALKALGSVTAEEVKRMMEEIDTDGDGYISYQEFTEFAKANRGLVKDVAKIF

SEQ ID NO: 194946 - protein, 73 aa, Glycine max
  Clone ID: PAT_MRT3847_18063C.1.pep
PMGSIGFFFWKNSLFAKRKPRAKRIFCHALSGESLALSAEPLHHRLIWSAKLAKAELSPFQFDLNSAKRWPAR

SEQ ID NO: 194947 - protein, 386 aa, Glycine max
  Clone ID: PAT_MRT3847_18064C.1.pep
MASENVSTDTVSKAVDALLKWRRSQSETLKPKLFDEDEEYVYLILTLKKIPSKSRVNPHKIPLPHSLFSPFSEQCLILDDRPNKARVTKAQAQARIQSESIPVNKILKLSKLASDYRPFEAKRKLCDSYDLFFAEKSIVPLLPRLLGKSFFKKRKIPVPVDLKKGSWKEQVERACSSAMLFMRTGTCSVVRVAKVRMERDEIVENVVAAIEGIVEVVPKKWGNVRSLHLKLLESVALPVYQTVPDVKLKIEGFKVEEKKNEKERDGEVSDSIEGGTEKKKKKKGRIHEVRYMDENVVEAGMEDELASDDDDSEDEMVSKKRKKGVSSELSGVEQLKKLVFNELSANGKKKSKKGCLSVGKGVKGGLIEGSGSELVVKDEESGVKKE

SEQ ID NO: 194948 - protein, 159 aa, Glycine max
  unsure (1)..(159): unsure at all Xaa locations
  Clone ID: PAT_MRT3847_18065C.1.pep
GSRLQVADSAIYAIAQCAETFTQDICSSCLSIEQSDIQGCLPNTNGRAFDPPGCFLRYSGTPFFADNQTTDISRFLIQGESSSKKWVIFGGGVGGVVLVAILLSLLTWHRRSQSPKSVPRAYKFGATELKAATKYNYSDLKAATKNFSQKNMLXEGGFG

SEQ ID NO: 194949 - protein, 68 aa, Glycine max
  Clone ID: PAT_MRT3847_18066C.1.pep
ERMKEAGFVEEVFGEDAIDGGRALLRKYESNWEMKVEDDNRSVGLWWKGQSVSFCSLWKLDGNDQSST

SEQ ID NO: 194950 - protein, 81 aa, Glycine max
  Clone ID: PAT_MRT3847_18067C.1.pep
FTPLSSFSQRVQVFLAVVRNTRLLSNLSNVTPTVPRGLFHNRINFSSLRVTGVFDPCSFFQVPNSHCKSFDFFDVCIHNRS

SEQ ID NO: 194951 - protein, 57 aa, Glycine max
  Clone ID: PAT_MRT3847_18068C.1.pep
QIWNLGLRHTLHIKPQLIKRVLLTRHPRGGAWDHQILRWWRGPTTLDIIQATYMRYT

SEQ ID NO: 194952 - protein, 60 aa, Glycine max
  unsure (1)..(60): unsure at all Xaa locations
  Clone ID: PAT_MRT3847_18069C.1.pep
CLPPPSSPTPTPPPPPTPTPXPAPAPTPTPTPIPIPIPTPPPHPRPPPFPAPPPTPPPNP

SEQ ID NO: 194953 - protein, 57 aa, Glycine max
  Clone ID: PAT_MRT3847_1806C.1.pep
LPNQKGGGGEMIHSLMISKPIQVLLLCTFALFSDVVFADPPYNICSTSIIYAKDRSF

SEQ ID NO: 194954 - protein, 65 aa, Glycine max
  Clone ID: PAT_MRT3847_18070C.1.pep
LLHAHAPETPTGKLTTSMRRSIIITSVMPLGLLLPLIEVEVPRINSISPAYTPTMLHVQHPNSHL

SEQ ID NO: 194955 - protein, 59 aa, Glycine max
  Clone ID: PAT_MRT3847_18071C.1.pep
GHKILYSTIEKLAENYGCTSSQLALAWILHQGDDVVPILATTKIKFLDSNIGSCDVNLS

SEQ ID NO: 194956 - protein, 352 aa, Glycine max
  Clone ID: PAT_MRT3847_18072C.1.pep
IHLRLFLQVLVVTVRNWMVKVPLDSDELYEIQSHESSLKKKLIPHTNQFRVLDKAAVLPEGNEARRWKVCTVTQVEEVKILTRMMPILLSTIIMNTSLAQLQTFSIQQGTLMNTYIGKLNIPAAFIPIIPLVFMTLLIPVYEFAFIPLVRRITGHPNGITELQRVGVGLVLSAISMVIAGVIEVKRKHEFNDHNQHRISLFWLSFHYAIFGIADMFTLVGLLEFFYKEAPQGMRSLSTSFSFLSLSIGYYLSTAFVELINLVTSKIGKSKKGWLEGRDLNRNHVQLFYWFLAILSLINFLIYLMCAKWYKYQSVVPFDKGMLLKDPPPRNDENVYSTSFVSTVQNIPQNEDK

SEQ ID NO: 194957 - protein, 31 aa, Glycine max
  Clone ID: PAT_MRT3847_18073C.1.pep
HQSFPTYQDFTLLPIFAIFFLTVRFFLYRFI

SEQ ID NO: 194958 - protein, 78 aa, Glycine max
  Clone ID: PAT_MRT3847_18074C.1.pep
YCYSLEFSLFPKTLLVFNFRCTLPLMLNTTTTTTFVSSSSFFNVFVLVNYISRPGCIRSQLSLFLVFTALSSVFFLLA

SEQ ID NO: 194959 - protein, 418 aa, Glycine max
  Clone ID: PAT_MRT3847_18075C.1.pep
MASSSSDPGKSAETSEAALVVANDQLLLYRGLKKAKKERGCTAKERISKMPPCAAGKRRSIYRGVTRHRWTGRYEAHLWDKSTWNQNQNKKGKQVYLGAYDDEEAAARAYDLAALKYWGPGTLINFPVTDYTRDLEEMQNVSREEYLASLRRKSSGFSRGLAKYRGLSSRWDPSYGRMSGSDYFNSMHYGAGDDSAAESEYVSGFCIERKIDLTSHIKWWGSNKSRHSDVGTRLSEEKKLGSAGDICIEIKQLEQKVQPTAPYQMPQLGRPQNEKKHRSSSVSALSILSQSAAYKSLQEKASKTLENIIDNDENENKNTINKLDHGKAVEKPSNHDGGNDRLDIATGMSGTMSLQRNVYPLTPFLSAPLLTAYNTVDPLVDPVLWTSLVPMLPAGLSHTAEVTKTETSSTYTMFRPEE

SEQ ID NO: 194960 - protein, 81 aa, Glycine max
  Clone ID: PAT_MRT3847_18076C.1.pep
QKMFLLAPCLFACIHYTKIPFSKKTAIVFIFFSFTFILCVFYSIHFIDLVSFSVYLVAINFNVDLMDLYLSITIPVLLYIY

SEQ ID NO: 194961 - protein, 200 aa, Glycine max
  unsure (1)..(200): unsure at all Xaa locations
  Clone ID: PAT_MRT3847_18077C.1.pep
MVYMAASRGGVHKLVSFSQIEKLVSFVHCKQYLPPLLETVRHFSFTDDCSGRSKQPVGESDDFFLQQSDSSFKDNGESDQSLSEPIPSRPLRSRKPVNQPPPRFQEYDREHKCGKNEXDAGQSGDSFLNKFKLGFDDKTVNLSEVAASKQSEEAKRSNPNQPAQESMPQDADEIFKKMKETGLXPNAVAMLDGLCKDGFG

SEQ ID NO: 194962 - protein, 87 aa, Glycine max
  Clone ID: PAT_MRT3847_18078C.1.pep
LDHGKAVEKPSNHDGGNDRLTIAMGMSGTMSLQRNAYPLTPFLSAPLLTAYNTVDPLVDPVLWTSLVPMLPAGLSRTAERKSNPMAV

SEQ ID NO: 194963 - protein, 151 aa, Glycine max
  unsure (1)..(151): unsure at all Xaa locations
  Clone ID: PAT_MRT3847_18079C.1.pep
AGHIKDRLPTWTNLRVRQVELNDSRCPLCNSSEEDAAHLFFHCTKTEPLWWETQSWVNSLGAFPHNPKDHFLQHDNRSAGGVXARRWKCLWVALTWVIWKHRNGVVFHNHSFDGSKVMEDAILLTWSWLKVMEKGFTGPFSFWSSHLKAAF

SEQ ID NO: 194964 - protein, 49 aa, Glycine max
  Clone ID: PAT_MRT3847_1807C.1.pep
AFLVVVYPCWVGRAAVCRGVVLDYDPPCLLGWSFLSIANLVLASIRARA

SEQ ID NO: 194965 - protein, 39 aa, Glycine max
  Clone ID: PAT_MRT3847_18080C.1.pep
LYLTVKFFEDYILQFALGFHPGEAGCKPILTSYVITKHL

SEQ ID NO: 194966 - protein, 111 aa, Glycine max
  Clone ID: PAT_MRT3847_18081C.1.pep
PFWPPIGLEKVDWDSPGDSQPNFFGFQVGLKRKPKISIHFLTFLPSYFLEMWEWDFPRKFHFNFFWFMIGLIRKPIIPIPLLTFLAPYFLEMLKLDFPRGFPLGHLPAFHL

SEQ ID NO: 194967 - protein, 43 aa, Glycine max
  Clone ID: PAT_MRT3847_18082C.1.pep
VTHAYILYIENIRGKQQLLLFTQIELTGHYHYFYYLLLVYNYY

SEQ ID NO: 194968 - protein, 117 aa, Glycine max
  Clone ID: PAT_MRT3847_18083C.1.pep
ISTGINCNLLSDLLSATPVELMCMLIFHAFTLFFCLCVIFYFYLAITWIPAILYYAIVSGDTLLIPTYIYAPSSIYTVPTCPTLLYFSALPHTVSLVHFIGWHISCERFVDRRDYMA

SEQ ID NO: 194969 - protein, 60 aa, Glycine max
  Clone ID: PAT_MRT3847_18084C.1.pep
KCYQKDATIEVQKPKENAVYKFFFNQVAVVNCEEDKFLLGCRYHVKGKEKKRCMIKYAIH

SEQ ID NO: 194970 - protein, 75 aa, Glycine max
  unsure (1)..(75): unsure at all Xaa locations
  Clone ID: PAT_MRT3847_18085C.1.pep
FSVFLLMLKGQFEFLISYLVRNPIYVIGIRLAFSFSVVFVAHNILMAPPNFFLGFFKKXXKKKKKKAAALQEPPF

SEQ ID NO: 194971 - protein, 129 aa, Glycine max
  unsure (1)..(129): unsure at all Xaa locations
  Clone ID: PAT_MRT3847_18086C.1.pep
SSLELRPLWNPPVTKKGHHKIELKVNASTNLFAMAVGIKQKDLVSKMVKKFIDSNFVVMLFHYDGIVDEWKDLEWSSLVIHVSAIDQSKXYDYIFLWDEDLRVEHFHPDKYVSIIKREGLEISQPALDP

SEQ ID NO: 194972 - protein, 131 aa, Glycine max
  Clone ID: PAT_MRT3847_18087C.1.pep
DRFKRQFAHLEEHYGKGERSTPLLRHHASLPRERVLAPKDENNQNNDVENPTGANLQSPPGFDVTDSGNTDAQNGPSRPKCSARSLLKSASISGSKSIDVKQSKVSEEEPLREVNNEILDELTQKVASLHS

SEQ ID NO: 194973 - protein, 67 aa, Glycine max
  Clone ID: PAT_MRT3847_18088C.1.pep
MGGGHGHGTTYKGVTVHHPKRWHTITGKGLCAVMWFWVFYRAKQDGPVVLGWRHPWEGHHDDHGKGH

SEQ ID NO: 194974 - protein, 67 aa, Glycine max
  Clone ID: PAT_MRT3847_18089C.1.pep
MGGGQGHGTTYKGVTIHQPKRWHTITGKGLCAVMWFWVFYRAKQDGPVVLGWRHPWEGHHDDHGKGH

SEQ ID NO: 194975 - protein, 68 aa, Glycine max
  Clone ID: PAT_MRT3847_1808C.1.pep
ERSQLGAALQILVRPASRYLLTNSRSIPAREHMAWLNVSILLCQNDFSFRYGFDGERLLAPRGGVFNV

SEQ ID NO: 194976 - protein, 53 aa, Glycine max
  Clone ID: PAT_MRT3847_18090C.1.pep
YINKLEDRVLSSERLDVLEVFMSEGWSHFIVYIDYETQKKGKGILKWSVLERE

SEQ ID NO: 194977 - protein, 324 aa, Glycine max
  unsure (1)..(324): unsure at all Xaa locations
  Clone ID: PAT_MRT3847_18091C.1.pep
MKSPSRAFSGADTKSRKSCLYAIFPAASLICAVLFFMTSSFTHEPKLPGLKMDTAVDADQNVIVDTVIDKCKNQCRPNGSEALPAGIVSTTSSLELRPLWNPPVTKKGHHKIELKVNASTNLFAMAVGIKQKDLVSKMVKKFIDSNFVVMLFHYDGIVDEWKDLEWSSRVIHVSAIDQSKWWFAKRFLHPDIVAEYDYIFLWDEDLGVEHFHPDKYVSIIKREGLEISQPALDSKKSEVHHQITARGRRSNVHRRIYKTGGSGKRCDESSTAPPCTGWVEMMAPVFSRAAWRCVWYMIXNDLIHAWGLDAGRRSRYAARLLCSG

SEQ ID NO: 194978 - protein, 104 aa, Glycine max
  Clone ID: PAT_MRT3847_18092C.1.pep
FAGKGGRSRCESLPRPPVFIAPLQGAFPSPFCLLVCWEGPSAFAFFAFTLPAQFRLVVLVVSRGSLTRVAPRSLVSQPRQSFVLRSHFQIGPSGARLRTFDWIV

SEQ ID NO: 194979 - protein, 66 aa, Glycine max
  Clone ID: PAT_MRT3847_18093C.1.pep
PVLCRAGRSGHLSSGILFHIIPGHLCPPCGQRKVHMLVRVSQQHRCYRVNREVSRIDTTVVTQCFG

SEQ ID NO: 194980 - protein, 253 aa, Glycine max
  unsure (1)..(253): unsure at all Xaa locations
  Clone ID: PAT_MRT3847_18094C.1.pep
MCSLISKSHCHLRQQLPLQPTRTGNGIARVRMSGRMEVVCRGMLKPRKFMQRRRKFEVFKDSADEADQKNWRRIMTEIEESGSAVSVLSAEKINNQNIPKDLVVGTLIRFKQLKKWNLVVEILEWLRTQNWWDFGKMDFFMLITAYGKLGDFNGAEKVLGLMNKNGYAPNVVSQTALMEAYGKGGRYNNAEAIFRRMQKWGPEPSAFTYQIILKTFVQGNKFREAEELFDNLLMXKSPLKPDXXMFNMMIYMH

SEQ ID NO: 194981 - protein, 64 aa, Glycine max
  Clone ID: PAT_MRT3847_18095C.1.pep
HVSQSYLLFFPITHSFSNLHKHFLFSSEPVFYSILNSWVALLSSFPITLTVSHTPLKVTREKQR

SEQ ID NO: 194982 - protein, 31 aa, Glycine max
  Clone ID: PAT_MRT3847_18096C.1.pep
FTRFIEIQSNYKYMLINITEQFYTRSLNLII

SEQ ID NO: 194983 - protein, 77 aa, Glycine max
  unsure (1)..(77): unsure at all Xaa locations
  Clone ID: PAT_MRT3847_18097C.1.pep
PASWDWRNKGVITQVKYQGGCGNGRAFSATGAIYAAHAIATGDLVSLSEQELVDCVXESEGCYHGWHXSSFEWVLEH

SEQ ID NO: 194984 - protein, 48 aa, Glycine max
  Clone ID: PAT_MRT3847_18098C.1.pep
CYIIHLFDDQINTYMASVSYRLMFLFFLKSILYNTSHISIHLFDDQIN

SEQ ID NO: 194985 - protein, 83 aa, Glycine max
  Clone ID: PAT_MRT3847_18099C.1.pep
GGKEGVEPKGNWGPIFTAFPTKQKDFFWTQTSLLFINYPPPAQKLGIFRFFIPPFYWNKPFIFDPKPCVGFNPLPFFFLKLLK

SEQ ID NO: 194986 - protein, 38 aa, Glycine max
  Clone ID: PAT_MRT3847_1809C.1.pep
ELAQHIVSRLATLFQTMSFLSRLLVLVKPNARLSELVP

SEQ ID NO: 194987 - protein, 86 aa, Glycine max
  Clone ID: PAT_MRT3847_180C.1.pep
GQCFHVILFGTGCRSCQGLPMPAVISSPVPGNLLHSVNWRVPQGMITQVRDVQALPVVSRSWNDASWFGVISRHHTLILDEHSCSI

SEQ ID NO: 194988 - protein, 98 aa, Glycine max
  Clone ID: PAT_MRT3847_18100C.1.pep
MQQSLMDIHEDLLFASQLIFSLLNLSLPFSLSHDFKIAIIQVVSEYRNQGMEFILQAINYPTFLEDVTGLTELMKSATSLSLDWDKEIDEEEDCVEIQ

SEQ ID NO: 194989 - protein, 70 aa, Glycine max
  unsure (1)..(70): unsure at all Xaa locations
  Clone ID: PAT_MRT3847_18101C.1.pep
TNDLRTMFKMIHKYVFLIGNISPRTSYYPTLXSQRWPSLLTQKFETATLDLVYCSISLSKHITSQKCNRV

SEQ ID NO: 194990 - protein, 57 aa, Glycine max
  Clone ID: PAT_MRT3847_18102C.1.pep
QSFMRDKGTEKHGKKERVFVKPALDLVCLLLKLFHKTPNCVSVYAYYLRVMIIKHYQ

SEQ ID NO: 194991 - protein, 30 aa, Glycine max
  Clone ID: PAT_MRT3847_18103C.1.pep
NTPPPVYHSPPPPPTNKPYIYASPPPPYHY

SEQ ID NO: 194992 - protein, 195 aa, Glycine max
  Clone ID: PAT_MRT3847_18104C.1.pep
NPSGNGMWGSPGCPKPSEYVQGLIGVVLLALNSLKNAKMMPTEANITDCIRYGDPKHRNTDVKKALESAIEQNMVVKQNLGALPLYVGKNDKLWKCVNPLGGTPKQHSKETWDEIEKFLTTPAGRSALMGTQCKYEAGIVIKSMCFKDLALGDVLQILNMLITHKKWVTHHPSGWQPLNITLPETNPGSRVVAGA

SEQ ID NO: 194993 - protein, 273 aa, Glycine max
  Clone ID: PAT_MRT3847_18105C.1.pep
MGTKRSFNSPVNVLIERLRKVPMKVKIFCGVLFAVFALVALKLTITNHYYFFIASETVHVAGIIALIYKLFALKTCTGLSLKTQELTALFLAARLSCSTLTEANIHTALDLISLFATLFLIWMIRFKLKSSYIKDLDNLRLYFVVVPSAILAILIHPFTTHWRLVRIVWAFSLYLEAVSVLPQLRFMQNAKMVETFTGYYVFALGVSRFIALAYWLIQIYETRGAYLFLVGSGYFWFLAAFLSEMVQSFILADFCYYYMKSFMQGQILRKMPV

SEQ ID NO: 194994 - protein, 61 aa, Glycine max
  unsure (1)..(61): unsure at all Xaa locations
  Clone ID: PAT_MRT3847_18106C.1.pep
KQKETPHCLSNYASAIELYLNRALEKQDLIPWIVPARRPMTTHLIXMESRPHITLLSAAFF

SEQ ID NO: 194995 - protein, 133 aa, Glycine max
  Clone ID: PAT_MRT3847_18107C.1.pep
MGDGDPSLGDGGENDEEDTPLLRVPLVDAPILLFVCLHKAFRSELDHLRRLAETASSLEDEPRRCRQIVLQLQRRFQFLKLAHKYHCAAEDEVIFLALDTHVKNVICTYSLEHRNTNGRFGSVFHFLDELMVP

SEQ ID NO: 194996 - protein, 122 aa, Glycine max
  unsure (1)..(122): unsure at all Xaa locations
  Clone ID: PAT_MRT3847_18108C.1.pep
YSVTGIMYQMVYLVYNIPIRVFNYLEAYXVKFPCIQHLNEYIRFLNDDDWSTTGDYQNTDRNNARFIIIYIWLHILVCDFTFNSNYCSTHCTRCWAPPEKYEIVSDSDKSLMRVFSRFTHYC

SEQ ID NO: 194997 - protein, 289 aa, Glycine max
  Clone ID: PAT_MRT3847_18109C.1.pep
MDVEAVDEGENSDRPASENVETEKGQEQNMTVNLAEREVNNQNGDAYRKPQVGMLFESEDAAKSFFDAYARHVGFSTHVGQFSRAKPDGPIITWDFACSREVFKRKNIVSCNAMLRVERKDGNWIVTKFVEDHNHSLASSRKVQNLQPGRHFVGAARNVTTETFDARNESYVSVNGNHLEPIGSVRSSSLAEKCHPMRNIESLTYARSSRKRTLGRDAQNLLNYFKKMQGENPGFYYAIQLDDENRMTNVFWADARSRTAYNYFGDAVIFDTMYRPNQYQVPFASFTGF

SEQ ID NO: 194998 - protein, 92 aa, Glycine max
  Clone ID: PAT_MRT3847_1810C.1.pep
HASVRLREDDRRGPQATYTRMARTLVSVISLIFFTFAVMVVVLFSIGVNSSQICPGNCENFSNCNAYCQAHYHKKGICISPPKRGYICCCFS

SEQ ID NO: 194999 - protein, 69 aa, Glycine max
  Clone ID: PAT_MRT3847_18110C.1.pep
GIHVLEPPGTDVQVGMGSNMTVPVPLQRVLSVHASESGVISIRSCARRTVHVYRRNRIGRPQATGLATI

SEQ ID NO: 195000 - protein, 36 aa, Glycine max
  Clone ID: PAT_MRT3847_18111C.1.pep
NIAVICFMGCPTPVSFLLGLISMFIPVIDTYLCSIP

SEQ ID NO: 195001 - protein, 129 aa, Glycine max
  unsure (1)..(129): unsure at all Xaa locations
  Clone ID: PAT_MRT3847_18112C.1.pep
MTSKGLLRGASLTANAVWHRSSFFPKVTVSVHPKLVKFQSFSSTTACSSLPPPDLPRLAKTAQISLTPNXFGQLQGIDLESVEPSIRAETENNLRGNAPETFDHKDALIASVPSYEEPYIKVPRVLSMD

SEQ ID NO: 195002 - protein, 235 aa, Glycine max
  Clone ID: PAT_MRT3847_18113C.1.pep
MSRQRSRRAELPPAQENIEKLEKVVNDGNYYGAQQMYKSVSARYVSAQRYSEALDILHSGACIQLSHGQVTCGAELALLFVETLGKGKIPYNEEILERLNKIYKSFPRVSLPQNLWDVDDMQQLSENIGSAKTRVEGCSSFLKAAIKWSAEHGANNNGSPELHIMLAEYIFSESPEDMAKVTYHFVRGNNRMNIASTLVSSLGKQFHGESNFKTAGAVLRGLSSRDLKAANVSIW

SEQ ID NO: 195003 - protein, 154 aa, Glycine max
  Clone ID: PAT_MRT3847_18114C.1.pep
MSRQRSRRAELPPAQENIEKLEKVVNDGNYYGAQQIYVSAQRYSEALDILHSGACIQLSHGQVTCGAELALLFVETLGKGKIPYDEEILERLKKIYKSFPRVSLPQNLWDVDDMQQLSENIGCAKTRVEGCFSFLKAAIKWSAEHGANNNGSSE

SEQ ID NO: 195004 - protein, 103 aa, Glycine max
  Clone ID: PAT_MRT3847_18115C.1.pep
CPPKRGVPCEFPRHTPCLMCGNRARFSFHTDCETVLKRDMYGPLFDKARPRKRDVLARDINCVSPRFYQSQGCVKTGTVMNKYATICKMMKKSSAMATHQKVD

SEQ ID NO: 195005 - protein, 135 aa, Glycine max
  unsure (1)..(135): unsure at all Xaa locations
  Clone ID: PAT_MRT3847_18116C.1.pep
ASLTANAVWHRSSFFPKVTVSVHPKLVKFQSFSSTTACSSLPPPDLPRLAKTAQISLTPNEVEEIAPKIQQVIEXLFGQLQGIDLESVEPSIRAETENNLRGNAPETFDHRDALIASVPSYEEPYIKVPRVLSMD

SEQ ID NO: 195006 - protein, 69 aa, Glycine max
  unsure (1)..(69): unsure at all Xaa locations
  Clone ID: PAT_MRT3847_18117C.1.pep
LYAYFNIDNISLKGLAKFYKESSEXNRELAEKLIKSQNIRGEQVVLHPITSSSSEFQHSELGDALYAME

SEQ ID NO: 195007 - protein, 99 aa, Glycine max
  Clone ID: PAT_MRT3847_18118C.1.pep
ARLTRSYSRCSCFSRCLRSVELQPCVAAECVPWHLDLASTPAFLAPFLFSCSLWHYEPLAVTPQSSLLHGGCQGFGGIGEISLKVPPGPLILSRKNKKG

SEQ ID NO: 195008 - protein, 88 aa, Glycine max
  unsure (1)..(88): unsure at all Xaa locations
  Clone ID: PAT_MRT3847_18119C.1.pep
MACVSTSLLKSSLVVDRXEWVKGQTLSQPFAVVVRSNPTTPSGLTIRAGYYADELVKTXDTRASPGRGIWRMHECNATCGRALALIGL

SEQ ID NO: 195009 - protein, 89 aa, Glycine max
  Clone ID: PAT_MRT3847_1811C.1.pep
NQIHWISITSIPSQFLTTNPSQAFKLSSPLTTYFASKASRFYPIKTFGLNQNQSSLPFHLSKPQPILFKNPEPNNFWPVNNNCFFHVKI

SEQ ID NO: 195010 - protein, 106 aa, Glycine max
  unsure (1)..(106): unsure at all Xaa locations
  Clone ID: PAT_MRT3847_18120C.1.pep
FSREPGALYGADPIYRSVKPCLGLPKDPHLSLDXYVLQSVYSFACKIALVDSHSFQTLTLAHLKLQVATTAHGVLKTGFNKNDVFLLLAPNSIHYPIFYLAGTAIG

SEQ ID NO: 195011 - protein, 57 aa, Glycine max
  Clone ID: PAT_MRT3847_18121C.1.pep
RKVFNLVQVYIFVKKITFCVEIGWIIGQNMDLKFNLYENEELFLNVIVVAFMIKVPY

SEQ ID NO: 195012 - protein, 557 aa, Glycine max
  Clone ID: PAT_MRT3847_18122C.1.pep
MYSHWVRLMLLIACILPALVECRVRHYKFHVVSKQTNRLCSSKSIVTINGKFPGPTLYAREDDTVLVKVINQVNHNVTIHWHGVRQLRTGWADGPAYVTQCPIQPGQTYVYNFTLTGQRGTLLYHAHVNWLRSTLYGALVILPKRGVPYPFPKPDDELVVVLGEWWKSDTEAVINEALKSGLAPNVSDAHTINGLPGTVTNCSTQDVYNLPVESGKTYLLRIVNAALNEELFFKIAGHKLTVVEVDATYVKPFKIETIVIAPGQTTNVLLNANQKSGKYLVAASPFMDAPVAVDNLTATATLHYTGTLAATPTILTTPPPKNATQIANNFISSLRGLNSKKYPVNVPLTVDHSLIFTVGLGINPCPSCKAANGSRVVAAINNVTFIMPTIALLQAHYFNIKGVFTTDFPANPPHVFNYSGPGPANLNTETGTKVYRLPFNATVQVVLQDTGIIAPENHPVHLHGFNFFVVGRGVGNFNPKIDPKNFNLVDPVERNTIGVPAGGWTAFRFRADNPGVWFMHCHLEVHTTWGLKMAFLVDNGKGPKQSVIPPPKDLPKC

SEQ ID NO: 195013 - protein, 119 aa, Glycine max
  Clone ID: PAT_MRT3847_18123C.1.pep
LNFWLSLYGMRVWIALEEKGIKYENRQENISNKSQLLLQMNPVHKKIPVLFHNSRHICDSLIAVEYIDEVWNDQSPLLPSDPYQRSQARFWSNYVDTKVLYFSTVLLYCDYDYFCFSIR

SEQ ID NO: 195014 - protein, 398 aa, Glycine max
  Clone ID: PAT_MRT3847_18124C.1.pep
MKLNTTTTEQQEILIFLLLFAPLTPLSATRLPILNHSFPLPLRVQASTPPSLAYLVSGSKGDGAGLTRVLLALYHPNNRYVVHLDLESSAEERSDLVRFVEGHALFKRFGNVRVIKKANLVTYRGPTMVANTLHAAAILLRELEDWDWFINLSASDYPLVTQDDLLHAFSHLPRDLNFIDHTSDIGWKDHQRARPIIIDPGLYMTKKQDVFWITQRRSRPTAFKLFTGSAWMVLSRSFIDYCIWGWDNLPRTVLMYYTNFISSPEGYFHTVVCNAQEFKNTTVNSDLHFISWDNPPRQHPHYLSLDDMKRMVDSNAPFARKFHGDDPVLDKIDTELLSRGPGMVVPGGWCIGSRENGSDPCSVVGNTTVLRPGPGSERLETLINSLLSDENFRPKQCV

SEQ ID NO: 195015 - protein, 51 aa, Glycine max
  unsure (1)..(51): unsure at all Xaa locations
  Clone ID: PAT_MRT3847_18125C.1.pep
AYGVRADKDSKYPNIWNLYHSXVGRMALFFAALNIVLGMRAAGAGNDWKAR

SEQ ID NO: 195016 - protein, 145 aa, Glycine max
  Clone ID: PAT_MRT3847_18126C.1.pep
MSAPTAKASKKELNSNHDGADETSEKEQQEAIEHIDEVQNEIDRLNEQASEEILKVEQKYNKLRQPFFQKRSELIAKIPNFWVTTFVNHPQVSALLGEEDEEALHYLTRVEVTEFGDIKSGYRIDFYFDENPYFENKVLFKEFHL

SEQ ID NO: 195017 - protein, 653 aa, Glycine max
  Clone ID: PAT_MRT3847_18127C.1.pep
MASSAMETCKSEDLHMQVDIEKNAKDIRSQWVLNAPEPPSPWRVVADSVSKTISHYKHKLSSLIDQPCTTLLLSVLQVVFPILAWGRNYTATKFRKDLLAGLTIASLCIPQSIGYATLAHLDPQYGLYTSVVPPLIYAVMGTSREIAIGPVAVVSLLLSSMMEKLVDPATDPVGYTKLILLATLFAGIFQTSFGLLRLGFLVDFLSHAAIVGFVAGAAIVIGLQQLKGLLGITHFTTKTDIVSVMKAVWEAVHNPWNPRNFILGCSFLVFILTTRFLGKRKKKLFWLASISPLVSVVLSTLIVFLTRADKNGVKIVKHVKGGLNPSSLHQLDFNNPYIGEVAKIGLVVAVVALTESIAVGRSFASIKGYQLDGNKEMMSIGLTNIIGSFTSCYVATGSFSRTAVNYAAGCETLVSNIVMAITVLISLQFLTKLLYYTPTAILASVILSALPGLIDLSEAYKIWKVDKIDFLACAGAFFGVLFASVEIGLLVAVVISFSKIILISIRPGTETLGKIPGTDLFCDVYQYPMAVKVPGVMIIRVKSALLCFANANFVRERIIKWVTEEESEDDKGNSRSTIQLVILDTSNLVNIDTSGITALEELHKSLSSQGKQLAIANPRWQVIHKLKVSNFVGKIGGRVFLTVEEAVGCKSRC

SEQ ID NO: 195018 - protein, 247 aa, Glycine max
  Clone ID: PAT_MRT3847_18128C.1.pep
MSLSLIHHKPLSSSCIFYLHSSTSHHIHTLSKPFFLLHSKTLPSSLSLSASPSNSSPHSSTTPIPLPYLQEEEGHDPDEPNYNFFETSKWISSQDPQSEEKLYLEEDPHISWHLATDLDEESEMSLEKEEMGCFQKRELPEAEGIVGEIVELARNLPQNLTLEEALAEYEGRFSEKECWEVLEILGEEHLLLCCVCFFQWMSLQEPSLVTPRACTVLFPLLGKGGMGDEVMDLFRNLPSSNEFRDVH

SEQ ID NO: 195019 - protein, 68 aa, Glycine max
  Clone ID: PAT_MRT3847_18129C.1.pep
MNTKPGFFLCFLCALVLISVEGTDPLKDETQEEPKTQSDAWGRGGRGGHDGSWGHGGHWGHGRGRHRG

SEQ ID NO: 195020 - protein, 70 aa, Glycine max
  Clone ID: PAT_MRT3847_1812C.1.pep
NNHTIDEQAHNESAGPEFNNNVTESSSSQQVSPSSNKDALNPQSPNEFGVSGADCGHFHCSHHHILVHQG

SEQ ID NO: 195021 - protein, 167 aa, Glycine max
  unsure (1)..(167): unsure at all Xaa locations
  Clone ID: PAT_MRT3847_18130C.1.pep
GQVETPKGPMLELKITQAKSALAKNTVRGTLLRRDLLANFXLTEGNFTVSVDLQGTDRIKGMDKMVGTVVFPENTGVELXACAKEXVILARAGQNMVFTLSGSQECELWNSACTXRRPMSFNSKPSAHAWTLEFLMRXGFHXDIISKLHGLHTPLHDVQVQLLAYFL

SEQ ID NO: 195022 - protein, 196 aa, Glycine max
  Clone ID: PAT_MRT3847_18131C.1.pep
QYVDSICGNSLLNHSSLLRNSYQTPSAGNLGSAGDIEFMDPAILAVGKGRLQGALNSPALDIRSNFMPQLNYFENDARLQLLMQRSLAPQQNLRFSEIGNTFSQLGDSYAVSSRLDQSQVSNLGPFQQLSLQQSTNAVLSNGQWDGWNEVQSGNGLGVAELLRNERLGFNKFYSGYDDSKFRMPNSGDLYNRTFGM

SEQ ID NO: 195023 - protein, 110 aa, Glycine max
  Clone ID: PAT_MRT3847_18132C.1.pep
YAAGFVEQSGRTAYDAHNINQPHEKDAPEGNYSFDSKCRSRAKKDSSTKAQVGGGKSLRYDMVGAGSHSMEDCPEAEDQEGPTKIDARERQINKPEDTEGQAQKETNWIE

SEQ ID NO: 195024 - protein, 385 aa, Glycine max
  Clone ID: PAT_MRT3847_18133C.1.pep
MLHASNILCNGHPEKLVSSSSYGLLHDERNGHIIQRLVGEAVNSGHDIARDKGESSIISNILSMDFDTWDDSLTSPHNLAKLLGDNTDNQNGPLKKSSSWKVHSNNQSRFSFARQEESKFQANVHPSSGANQQFPKNGSLIQDFVDFYFSLDKLGFANGIPSNNLEESGNLGSGHFIASNNKLSAVSRAQISAPPGFSVPNRAPPPGFSSLERMGQAFDSLSGDIEFMDPAILAVVKGRIQGAQNSPVLDMRSNYPEQLNYFENEARVQLLMQRSLSPHQNLRFSEIGNSFSQLGDSYGISSRLDQSQVSNLGPFHQLSLQQSTNAVLSNGQWDGWNEVQSGNGLGVAELLRNERLGFNKFYSGYDDSKFRMPNSGDLYNRTFGM

SEQ ID NO: 195025 - protein, 84 aa, Glycine max
  Clone ID: PAT_MRT3847_18134C.1.pep
LKKFKLYGHNSQTLTKNTSKGQLDFHNNYLVNKMKRQKLVKKIKLKNNTFSRGIFLKTNSNQEKLVRPFKNKKPSSQLKNFQPL

SEQ ID NO: 195026 - protein, 115 aa, Glycine max
  unsure (1)..(115): unsure at all Xaa locations
  Clone ID: PAT_MRT3847_18135C.1.pep
KKKERGKEGKREKKKRGEKTKGRXRKKKEEXKRKKGEXEPNVRGKKNKQRWGVKKGVFPKKRGKKRGXAEKKKKSGKXKTRKEGRGKKRKLNPPVLKRGKFLKRAFLGGKNGPIF

SEQ ID NO: 195027 - protein, 129 aa, Glycine max
  Clone ID: PAT_MRT3847_18136C.1.pep
FAFPYSKVGPGPALFFWGGVARAQTPCCWSFWSPPPPFGWGKGVSLGKSHFPSLWSGFFIFPRGGGRLFFFFFPTFFCPFLKKLLPPPPLGLNSQREIWVLGSGSPRWGFLALAPSSGLFFFVKGILVR

SEQ ID NO: 195028 - protein, 519 aa, Glycine max
  unsure (1)..(519): unsure at all Xaa locations
  Clone ID: PAT_MRT3847_18137C.1.pep
MGILVLLSLLSIVISIVLFITHTHKRNNTPRGPPGPPPLPLIGNLHQLHNSSPHLCLWQLAKLHGPLMSFRLGAVQTVVVSSARIAEQILKTHDLNFASRPLFVGPRKLSYDGLDMGFAPYGPYWREMKKLCIVHLFSAQRVRSFRPIRENEVAKMVRKLSEHEASGTVVNLTETLMSFTNSLICRIALGKSYGCEYEEVVVDEVLGNRRSRLQVLLNEAQALLSEFFFSDYFPPIGKWVDRVTGILSRLDKTFKELDACYERSXYDHMDSAKSGKKDNDNKEVKDIIDILLQLLDDRSFTFDLTLDHIKAVLMNIFIAGTDPSSATIVWAMNALLKNPNVMSKVQGEVRNLFGDKDFINEDDVESLPYLKAVVKETLRLFPPSPLLLPRVTMETCNIEGYEIQAKTIVHVNAWAIARDPENWEEPEKFFPERFLESSMELKGNDEFKVIPFGSGRRMCPAKHMGIMNVELSLANLIHTFDWEVAKGFDKEEMLDTQMKPGITMHKKSDLYLVAKKPTT

SEQ ID NO: 195029 - protein, 75 aa, Glycine max
  unsure (1)..(75): unsure at all Xaa locations
  Clone ID: PAT_MRT3847_18138C.1.pep
HDKIDLRMYIDTKGLQGALQVLTDRIAHDDKHVMLNTQEFLDGTLPGDPWIPKFVNRLYTARQLTGXAVVVNGTC

SEQ ID NO: 195030 - protein, 174 aa, Glycine max
  Clone ID: PAT_MRT3847_18139C.1.pep
KMVRKLSEHEASGTVVNLTETLMSFTNSLICRIALGKSYGCEYEEVVVDEVLGNRRSRLQVLLNEAQALLSEFFFSDYFPPIGKWVDRVTGILSRLDKTFKELVGCYERFIYDHMDSAKSGKKDNDNKEVKDIIDILLQLLDDRSFTFDLTLDHIKAVLMVNYSFKHSSLFLFT

SEQ ID NO: 195031 - protein, 241 aa, Glycine max
  unsure (1)..(241): unsure at all Xaa locations
  Clone ID: PAT_MRT3847_1813C.1.pep
MATSAIQQSAFAGQTALKQLNELVRKTGGAGKGRTNMRRTVKSAPQSIWYGPDRPKYLGPFSEQIPSYLTGEFPGDYGWDTAGLSADPETFARNRELEVIHSRWAMLGALGCTFPEILEKNGVKFGEAVWFKAGSQIFSEGGLDYLGNPNLIHAQSILAIWAVQVVLMGFVEGYRVXGGGPLGEXLDPIYPCGAFDPLXGLADDPDAFAELKVKELKSDRLTMFSMVFLLFRAISTNRDAV

SEQ ID NO: 195032 - protein, 190 aa, Glycine max
  unsure (1)..(190): unsure at all Xaa locations
  Clone ID: PAT_MRT3847_18140C.1.pep
MRRGGEGENMAVPQLTSSSSTRRLSLRTTRPDPFLSLCKCFSFVVVLSAILCIAVNVLSAIRSFKHQSDIFDGIFRCYAVFLACFVVLAETEWNFIIKFWKVLEYWVGRGMLQIFVAVMTRAFPDYSGERKELVIFQGIACYMLLACGXIYVVSGILCVXLLKRSRQKQEISREQAXKDLXELERRXEEL

SEQ ID NO: 195033 - protein, 97 aa, Glycine max
  Clone ID: PAT_MRT3847_18141C.1.pep
MKSNFAVFVVFSLLLIANLSCARKDLGWYWKNVMKEQPMPQAIKDLVEDSQASAAGKKDRFIRDFDVKPNVILYHTHVVPMKQKHKHKQNPFVKNQD

SEQ ID NO: 195034 - protein, 74 aa, Glycine max
  Clone ID: PAT_MRT3847_18142C.1.pep
AKALEQLRPFYMGWKKVSACRRRSQGLSERAIMCGGAIILRLYTSGCRRQGASRDRRHSVAELVEAELEAAAGL

SEQ ID NO: 195035 - protein, 229 aa, Glycine max
  Clone ID: PAT_MRT3847_18143C.1.pep
QELLKYSNEEKKRNFLETVELQIGLKNYDPQRDKRFSGTVKLPRVPRPNMAICILGDQHDIDRAKHGGVDAMSADDLKKLNKNKKLIKKLARKYDAFVASDALIKQIPRLLGPGLSKAGKFPTPVSHNEDLSAKITEVKSTIKFQLKKVLCMGVAVGNVDMTDEELVGNVMLSINYLVSLLKKGWQNVGSLTLKGSMSPPKRLYYTCRWILSEEALGRIPLFFWRLGMA

SEQ ID NO: 195036 - protein, 110 aa, Glycine max
  Clone ID: PAT_MRT3847_18144C.1.pep
NAIFFFIILAFCHFSLPNCFLSFLSPELLSPPSLFLLSIFFILPVFLYFLTSKAVIFYIKIVIFISDSMTTISYLRSSPSLYFYLTVTNYCSSFATQKLQFFCVFCFFVL

SEQ ID NO: 195037 - protein, 51 aa, Glycine max
  Clone ID: PAT_MRT3847_18145C.1.pep
LYLYLQHFILLLFLVLLELFQHPRINHSLTIIIINNHDPTYFHTSNSLQQY

SEQ ID NO: 195038 - protein, 61 aa, Glycine max
  Clone ID: PAT_MRT3847_18146C.1.pep
CGYAKKTNGDKKKKKREKPKKKNKRPTASKVPTLQYPCFTRPKSFAAQPTFRPLALMLTTS

SEQ ID NO: 195039 - protein, 41 aa, Glycine max
  Clone ID: PAT_MRT3847_18147C.1.pep
SHYLISTVNFFIFILCSKNRNINISKVENHLCVRLKKKNQE

SEQ ID NO: 195040 - protein, 98 aa, Glycine max
  unsure (1)..(98): unsure at all Xaa locations
  Clone ID: PAT_MRT3847_18148C.1.pep
LIVXRLLXXXWXXEXXXXXXVXXCVXXXXVXXXXVXXVSXXXXAGXXXFXXXCXXXXXXFVXXXXLIXXXWCXIXXXXXKXXXXXXXGXXXKXCXXXF

SEQ ID NO: 195041 - protein, 47 aa, Glycine max
  Clone ID: PAT_MRT3847_18149C.1.pep
QFFKYWIKLQTFGHWFSSWTTVGGEGLLYLLNGEHFQVLALHCTRYL

SEQ ID NO: 195042 - protein, 48 aa, Glycine max
  Clone ID: PAT_MRT3847_1814C.1.pep
SNQSLPTFIESFLALISLDLEDYEHLLDLTSCFSYKTFVLNKSSAFML

SEQ ID NO: 195043 - protein, 50 aa, Glycine max
  Clone ID: PAT_MRT3847_18150C.1.pep
HHHGTDPLCPPHTYANSPSQHFIMHILNRGGSSLRKEDHGIVDLPQSQFE

SEQ ID NO: 195044 - protein, 521 aa, Glycine max
  unsure (1)..(521): unsure at all Xaa locations
  Clone ID: PAT_MRT3847_18151C.1.pep
TRQQPALTYPGAYRNVTVELKIHHLAVNALLKYNLVNEMEGGTLLRFGHELDSGAFSTNDQNGFDESTSCVQAFRVLKQLIQRCLADAVTSGNVYADSILQHLYRWLCSPKSKLHDPALHQLLHKVMQKVFALLLAEFRKLGAMIVFANFTKIVIDTGKYDLSRAKAYCDSLLRTIQSRDLFEWVELEPLQFWCSLLFMDQYNYGGIPTKSDEALNDESQVDIISSWNIAEYLPKKIQDHFVFIVSQFMYIPWNYAKKQAQIRASLQNGDSCTPSINIGAAEAFESEITEFXKEQIGSYFTHKLLGIVHDIGLHMKGMNRLENNQSTSGLPPLTGDVHRGDASLEFIKHVCAVLALDQSVQHEVLVLRKNLLKYVDVKEFAPEAKFHGPCHSFILSNVICSYCNDCRDLDLCRDSALLTEEWRCAVPQCAQPYDREVMENALLQTVRQRERLYHLQDLVCTRCHQVKAAHLAEQCACAGSFRCKEDASEFREKMQIFLNIASRQKXFQLLQECTSWILELR

SEQ ID NO: 195045 - protein, 38 aa, Glycine max
  Clone ID: PAT_MRT3847_18152C.1.pep
TQTVNKKFILTTHTRCHLQTKIEVLAYMFNNITIYITD

SEQ ID NO: 195046 - protein, 100 aa, Glycine max
  unsure (1)..(100): unsure at all Xaa locations
  Clone ID: PAT_MRT3847_18153C.1.pep
XXXXYXSSXFGSXXXMVXXXXMANXRXXLWVXIXXXXXXKMXVSXQQXLVSPXXGXRXXXXXAXTXXXXXXXRXKXXGSQXXAXNXXXGMIXXSXXEXXX

SEQ ID NO: 195047 - protein, 42 aa, Glycine max
  Clone ID: PAT_MRT3847_18154C.1.pep
AQILNLMFGGSHCTGAVVAVVLSPDPIKRPPAGRSLLWSKEA

SEQ ID NO: 195048 - protein, 109 aa, Glycine max
  Clone ID: PAT_MRT3847_18155C.1.pep
MEEAKGVVKHVLLAKFKDDVTPERIEELIKDYANLVNLIPPMKSFHWGKDVSAENLHQGFTHVFESTFESPEGVAEYVAHPAHVEYANLFLSCLEKVIVIDYKPTVVKL

SEQ ID NO: 195049 - protein, 41 aa, Glycine max
  Clone ID: PAT_MRT3847_18156C.1.pep
MNIIIIIRKEKKLRKLFLLYYFSYQFLYTSFIQGQINHVEI

SEQ ID NO: 195050 - protein, 44 aa, Glycine max
  Clone ID: PAT_MRT3847_18157C.1.pep
TQMDPCYFLMIWLQMRTTSPSLETAQKKELSPEQSGLIYHPSCN

SEQ ID NO: 195051 - protein, 70 aa, Glycine max
  Clone ID: PAT_MRT3847_18158C.1.pep
AALDLRPGKPHSNTTPLLVHATPFCSSSTFQGVKSIKMAETIPIYLRVGELGTPLTSSETKSPMLSSTLA

SEQ ID NO: 195052 - protein, 106 aa, Glycine max
  Clone ID: PAT_MRT3847_18159C.1.pep
FGWNPSSFFLLSFLLFSSSSQHQVKGERKPLATPPHVGKASQERGIIVPFLGTTVPPLCYRHHLFDSFIPYPPRCFSSNGGGVWQTKLCDHLDGLHVIISRRCIIV

SEQ ID NO: 195053 - protein, 265 aa, Glycine max
  Clone ID: PAT_MRT3847_1815C.1.pep
MATSAIQQSAFTGQTALKQLNEFVRKTGGAGKGRTNMRRTVKSAPQSIWYGPDRPKYLGPFSEQIPSYLTGEFPGDYGWDTAGLSADPETFARNRELEVIHSRWAMLGALGCTFPEILEKNGVKFGEAVWFKAGAQIFSEGGLDYLGNPNLIHAQSILAIWAVQVVLMGFVEGYRVGGGPLGEGLDPIYPGGAFDPLGLADDPDAFAELKVKELKNGRLAMFSMFGFFVQAIVTGKGPIQNLYDHVADPVANNAWAYATNFVPGQ

SEQ ID NO: 195054 - protein, 53 aa, Glycine max
  unsure (1)..(53): unsure at all Xaa locations
  Clone ID: PAT_MRT3847_18160C.1.pep
RHIDHNVLVAEAFPCYNYGIIARSVIGHPXSVIGGGVPLRYRAVGPCAALXXT

SEQ ID NO: 195055 - protein, 59 aa, Glycine max
  Clone ID: PAT_MRT3847_18161C.1.pep
RRIIDVLILLKVAQDVFFMLIITNSIYSLYEPQPTNHMFLILKRKGEGFRNDILYTTNP

SEQ ID NO: 195056 - protein, 103 aa, Glycine max
  Clone ID: PAT_MRT3847_18162C.1.pep
ISVRRSIGLNPKSDGERLIAVIQPLTKEHIQAMTKLVAKSCEDASQSIRRAQQKAMDAIKKLYSSLPKDDIKRLEKEVDDLTKKFIKSAEDICKAKEKEISQG

SEQ ID NO: 195057 - protein, 56 aa, Glycine max
  Clone ID: PAT_MRT3847_18163C.1.pep
WKLLILQAMDAIKKLYSSLPKDDIKRLEKEVDDLTKKFIKSAEDICKAKEKEISQG

SEQ ID NO: 195058 - protein, 66 aa, Glycine max
  Clone ID: PAT_MRT3847_18164C.1.pep
MKSIYFVAGLFVMLVQGSWQRSLQDTEEKSRSFSASQADPLSDPDQMNEDKRHSQGTFTSDYSKYL

SEQ ID NO: 195059 - protein, 589 aa, Glycine max
  Clone ID: PAT_MRT3847_18165C.1.pep
TDEDLHLYGTNTYHDESHPVEARNLSAELNESKEINWTEVDLEDANVTSGACQINIDSKQGCDGSEVFLCGSNKSGSVGERADIIMSDSTEVENDKANKLGGAATELISAPNTREPCQSNSIAEDRMVVSEVSSGGLGNELERHRVSSTLCVDDRDNKHEADSGVIVDMKSSVHDLSTMINSSISSLGNSCSGLSFSSENKHVPLGNPRVSALSMDNLHALLQNTVAVDVQCEKTASQDQMSSTCDIRGGRDMHCQNSISNADHQHITGNLSDHVDAVSILQGYPLQVPVKKEMDSDMNCTSSATELPFLPHKIEQDDDHIKTFQSSDSDKTSRNGDVKLFGKILTNPSTTQKPNVGAKGSEENGTHHPKLSSKSSNPKITGHHSADGNLKILKFDHNDYVGLENVPMRSYGYWDGNRIQTGLSTLPDSAILLAKYPAAFSNYLTSSAKLEQPSLQTYSKNNERLLNGAPTLTTTRDINGSNAVIDYQLFRRDGPKVQPFMVDVKHCQDVFSEMQRRNGFEAISSLQQQSRGVMGMNGVGRPGILVGGSCSGVSDPVAAIKMHYSNSDKYGGQTGSIAREDESWGGKGD

SEQ ID NO: 195060 - protein, 49 aa, Glycine max
  Clone ID: PAT_MRT3847_18166C.1.pep
WVISFGLPFLNIHHITIIVLLYVSHMNGHSRNADIETLASPSHPSKSPK

SEQ ID NO: 195061 - protein, 33 aa, Glycine max
  Clone ID: PAT_MRT3847_18167C.1.pep
CRAISMCWVFQNFGFSNVPKTRGLSHAVLRMKV

SEQ ID NO: 195062 - protein, 145 aa, Glycine max
  Clone ID: PAT_MRT3847_18168C.1.pep
MGWRYKAGLFLILTVVVIWVTSAEVTQDIFIDYKQPFAVTYLGASLMVVYLPVAFIKDWLYKLFKHCSSKSGRSAKVGDDFSVTCTSPLKGNGVQKTTEVELGSMTRKDSDANLSVQEQVKPLVAKYNDATAIKAEKELTTGEIA

SEQ ID NO: 195063 - protein, 74 aa, Glycine max
  Clone ID: PAT_MRT3847_18169C.1.pep
MSSSSGSTAAATPILKEEVDIVIPTIRNLDFLGMWRPFFEGYHLIIVQDGDPSKVIKVPEGFDYELPFCRLLAA

SEQ ID NO: 195064 - protein, 78 aa, Glycine max
  Clone ID: PAT_MRT3847_1816C.1.pep
TPPLPLPIAVSCVHQATSLTEASRDPSQHFGTGIQANGIGSASYEHHHPLLQVCFFFVFDASTFLNLQPCLYVCFFIS

SEQ ID NO: 195065 - protein, 183 aa, Glycine max
  Clone ID: PAT_MRT3847_18170C.1.pep
ELLSAKLEIENAHAISNSSGLYAPIFRDVSKFSRSYELMERKLKVFIYREGAKPIFHQPKMRGIYASEGWFMKLMEGNKRFIVKDPRKAHLFYLPFSSQMLRVTLSNPKQMEQHLEKYVELIAGRYRFWNRTDGADHFLVACHDWASRITRQPMKGCIRSLCNSNVAKGFQIGKDTTLPVTYI

SEQ ID NO: 195066 - protein, 27 aa, Glycine max
  Clone ID: PAT_MRT3847_18171C.1.pep
LSGTPSERGMTYDALHVFDWIISRSGD

SEQ ID NO: 195067 - protein, 104 aa, Glycine max
  Clone ID: PAT_MRT3847_18172C.1.pep
AGIQNAALDNAQPVPVDFSVSQKTRVIVITGPNTGSKTICLKTVGLAAMMAKSGLYVLASESAQIPWFDFVFADIGDEQSLSQSLSTFSGHLKQISVGNNVLIV

SEQ ID NO: 195068 - protein, 58 aa, Glycine max
  Clone ID: PAT_MRT3847_18173C.1.pep
NGRIVLSVPVLVTLEWGFFFFGYRYLNSLLLAVVFYIGAWKIHGVAELFSFASTCKFL

SEQ ID NO: 195069 - protein, 40 aa, Glycine max
  Clone ID: PAT_MRT3847_18174C.1.pep
RPTELFHGHMRKIGPHLMLAIIDQYSAIEIKQQPKRSPVF

SEQ ID NO: 195070 - protein, 49 aa, Glycine max
  Clone ID: PAT_MRT3847_18175C.1.pep
VVDYPYPPLVFLIQDGILFLWMVPRGWPSDSGTRIEWVDKRIKKTGERF

SEQ ID NO: 195071 - protein, 80 aa, Glycine max
  Clone ID: PAT_MRT3847_18176C.1.pep
ISFFLKKFSRHLLLLCPTNGAHNGGSLFADDITRNPTETKVPQAAHTRLKTQCRKQKPHPITEYFSALPGNYTNCRELGK

SEQ ID NO: 195072 - protein, 102 aa, Glycine max
  Clone ID: PAT_MRT3847_18177C.1.pep
DKTNPIPKNFPFIFISLILFCKPFSLTFNSSTFFINASMILFSRLLTSESCHSKNEHPFSTCNHKNVSLDYPQSMMSPMEPLHYTNTSCEFGDRRYTTTWKM

SEQ ID NO: 195073 - protein, 78 aa, Glycine max
  Clone ID: PAT_MRT3847_18178C.1.pep
TTTFMKNWINIGLVYAGHGRFGKLRMHPFSHRYAGGLHDLRFLFYKYHPGLFMKAVLRYFLKLLCRFYCSMINRVKLW

SEQ ID NO: 195074 - protein, 43 aa, Glycine max
  Clone ID: PAT_MRT3847_18179C.1.pep
RWKLSKGKIFETVSSCLEIICRVSHCVHYSTYRESKASALCSL

SEQ ID NO: 195075 - protein, 51 aa, Glycine max
  unsure (1)..(51): unsure at all Xaa locations
  Clone ID: PAT_MRT3847_1817C.1.pep
AXEGGAFRKSGAHPKPHRSEPHVLVTSIAIGSNVSRIRSHALSWINAMFKH

SEQ ID NO: 195076 - protein, 53 aa, Glycine max
  unsure (1)..(53): unsure at all Xaa locations
  Clone ID: PAT_MRT3847_18180C.1.pep
EDLLWFLDIGQLAAMHFFMDVVQSNXVLEAQSXIESGGYSTLIGVYDGHGGPE

SEQ ID NO: 195077 - protein, 70 aa, Glycine max
  Clone ID: PAT_MRT3847_18181C.1.pep
SNICLNVVQARKMQESGWKPRWFAKDKASGSYRYLGGYWEARQRGNWDSCPDIFGQIPSVHISDEGQITF

SEQ ID NO: 195078 - protein, 538 aa, Glycine max
  unsure (1)..(538): unsure at all Xaa locations
  Clone ID: PAT_MRT3847_18182C.1.pep
MATTTRTTFLKRRSISASAESPSSYRIRFSPIMDSNESFPSSFSKFNSALTAGLLNPMSPPPDKTRSSPTLFEMMASEPDVHHRPTTHIPNPTTTNANHKPQILDRQALMMQRISELLGSRSPGNQFNDPLSSDIKLTLSSKDGISVSMNVHRQILVAHSRFFSVKLSDRWTNLQQQRSPVPYEVEIADCDDVEVYIETLRLMYCKDLRKKLMREDVSRVLGILKVSAAIGFDAGVLSCLEYLEAAPWAEDEEEKVASLLSELRLEAVGAGEVLKRVSTDVVSGNEEGSDNXEGLLKLIRVVLEGKDEKARREMKGLVSKMLRENASQNDLRKESLYLACDDCLQLLRHHFLQAAALDMQDVSQIARQADNLHWILDILVDRQIAEDFLKTWASQSDLAEVHSKVPAVHRFEVSRVTARLFVGIGKGQLLASKDVRCLLLKTWLVPFYDDFGWMRRASKGLDRHLIEDGLSNTILTLPLSWQQDILLAWFNRFLNSGEDCPNIQRGFEVWWRRAFWKRNGEQERTRQLRITTTSVENP

SEQ ID NO: 195079 - protein, 81 aa, Glycine max
  Clone ID: PAT_MRT3847_18183C.1.pep
RKVEKFGRSTPEIEGLVATTRLSSLIACSLDTGDQGLISAFAKRWHMETSCFHLLVREITITLDDVALFVYLPITGILHNF

SEQ ID NO: 195080 - protein, 76 aa, Glycine max
  Clone ID: PAT_MRT3847_18184C.1.pep
MFTLTAAATSSVMGTRLLEAHSKTERMQARFGFGKKKAAAPKKVSRGSGSSFYRPLWYSGAKVPEYQYVCLVCDYG

SEQ ID NO: 195081 - protein, 97 aa, Glycine max
  Clone ID: PAT_MRT3847_18185C.1.pep
NKLWCIVDDFNCVRRQSERVGASQREQGGGIMTEFNDWIVDLEVEDMPSVGHKYTWYRLKSGWIGFLCLLNGFLNGVEVFNSYWIGTTQTTIQFMLD

SEQ ID NO: 195082 - protein, 56 aa, Glycine max
  Clone ID: PAT_MRT3847_18186C.1.pep
KGEACWIELQYCGLVVSQPEALSIIELNSLYCPELIVKKISMRPLVGEKVVLGLSS

SEQ ID NO: 195083 - protein, 44 aa, Glycine max
  Clone ID: PAT_MRT3847_18187C.1.pep
FFFFFFFFFFFFFFFFLFFFFFFLGEKKPPQIFMGIINEGGTKI

SEQ ID NO: 195084 - protein, 146 aa, Glycine max
  Clone ID: PAT_MRT3847_18188C.1.pep
MDSIVDSLNNAYQDFVVAAANVLEAKENAGSIKTTATDTALENFKQKWELFRVACDQAEEFVESVKQRIGSECLVDEATRPVAGKPGQATMTGLPPISAVRLEQMSKAVRWLVIELQHGSGAGSANSALTHPSAQFDARFSEDAAQ

SEQ ID NO: 195085 - protein, 147 aa, Glycine max
  Clone ID: PAT_MRT3847_18189C.1.pep
KQQNPIKDPHSHPTLHVSETANVLEAKENAGSIKTTATDTALENFKQKWELFRVACDQAEEFVESVKQRIGSECLVDEATRPVAGKPGQATMTGLPPISAVRLEQMSKAVRWLVIELQHGSGAGSANSALTHPSAQFDARFSEDAAQ

SEQ ID NO: 195086 - protein, 189 aa, Glycine max
  Clone ID: PAT_MRT3847_1818C.1.pep
LYISLHDLYLAANLVFIAAVAGVHMSHKTAGLLSTIFDIGGVLGGITAGFISDLIEARAITSILFLFLSIPALALYRIFGSLSMLINIILMFLSGFLVNGPYSLITTAVAADLGTQSMNDRNSRALATVTAIIDGTGSVGAALGPLLAGYISTRGWNSVFFMLILSIFFAGLFLIRIARTEIREKLSGK

SEQ ID NO: 195087 - protein, 94 aa, Glycine max
  Clone ID: PAT_MRT3847_18190C.1.pep
MDSIVDSLNNAYQDFVAAAANVLEAKENAGSIKTMATDTALENFKQKWELFRVACDQAEEFVESVKQRIGSECLVDEATRPVAGKPGQATMTGL

SEQ ID NO: 195088 - protein, 277 aa, Glycine max
  Clone ID: PAT_MRT3847_18191C.1.pep
MAPTLQRALSHLLTLVASLSILLGVPSSCFNPKKIVNASYASYSLYGSDWSPAVATWYGPAQGDGSEGGACGYGSAVGEPSSRICSRAGSPLLFESGEGCGSCYEMKCTGNYACSGNSVRVVITDSCPGCGSDAQYHFDLSGTAFGAMAISGQDEKLRNAGKIDIQFRRVECNYPGVSISFRVDPGSNKEYFAILIEYESGDGDLDKVELKEAHASAQWYSMQRSWGAVWKLDKGSALVAPFSIKLTTLKSGKTIVANNVIPAGWIIDQTYRSIVNF

SEQ ID NO: 195089 - protein, 183 aa, Glycine max
  Clone ID: PAT_MRT3847_18192C.1.pep
MIKLFKVKEKQRELAENASGGPPVKKQSAGELRLHKDISELNLPKSCTMQFPNGKDDLMNFEVSIRPDDGYYLGGTFLFSFQVSPIYPHEAPKVKCKTKVYHPNIDLEGNVCLNILREDWKPVLNINTVIYGLYHLFTEPNYEDPLNHDAAAVLRENPKMFESNVRRAMAGGYVGQTFFPRCI

SEQ ID NO: 195090 - protein, 281 aa, Glycine max
  unsure (1)..(281): unsure at all Xaa locations
  Clone ID: PAT_MRT3847_18193C.1.pep
AGESAAEYFELLFKMVDSEEALLFLTVQGCLRTICTLITQEVSNVESLERSLHIDITQGFILHKLIELLGKFLEVPNIRSRFMRDDLLSEILEALIVIRGLIVQKTKLISDCNRLLKDLLDSLLLESSENKRQFIRACINGLEIHREERKGRACLFILEQLCNVICPSKPEPVYLLVLNKAHTQEEFIRGSMTKNPYSSVEIGPLMRDVKNKICHQLDLLGLLEDDYGMELLVAGNIISLDLSIAQVYEQVWEKXSIIKYCPPMTVTLSAQGWDGEATEPM

SEQ ID NO: 195091 - protein, 91 aa, Glycine max
  Clone ID: PAT_MRT3847_18194C.1.pep
SNIKAFQIYHAVSLWQEIWGHCVPFAYNIHREINGCSAQCPPLCISNPQTHWPAKISRSSQRFPNPNCALLFASFPVKPFSRECNVQRKEK

SEQ ID NO: 195092 - protein, 79 aa, Glycine max
  Clone ID: PAT_MRT3847_18195C.1.pep
KTSTFFLGFTTSNITVQNCDFCITKGWLRLKIDYNQMATRSPFTNYFLLSFCQTNVVIRQWDYPINYPNFLRWPFLVNE

SEQ ID NO: 195093 - protein, 67 aa, Glycine max
  Clone ID: PAT_MRT3847_18196C.1.pep
KLKPKVFYNELQFRTGIPNQRTIPKPQMNGHPHIQGRKQPLENDQNPVVPEEGFHLEVGAPVTQVPA

SEQ ID NO: 195094 - protein, 44 aa, Glycine max
  Clone ID: PAT_MRT3847_18197C.1.pep
KKYFSFYFSALSNTQTWDYNITREIFHRNLYISKNNYFYFDLKN

SEQ ID NO: 195095 - protein, 70 aa, Glycine max
  Clone ID: PAT_MRT3847_18198C.1.pep
DRLSKKSLAHLSLFQPLHVALVESSLFFSFSTSSTFPQSPSTPCFIKTACGTVCFFTYLVLESHRNCCHP

SEQ ID NO: 195096 - protein, 209 aa, Glycine max
  unsure (1)..(209): unsure at all Xaa locations
  Clone ID: PAT_MRT3847_18199C.1.pep
MCCVSSQKPKHTKTVLNGVTGMVGPREVMAMLGPSGSGKTTLLTALAGRLAGKLSGAITYNGHPFSSSMKRNIGFVSQDDVLYPHLTVLETLTYAAMLKLPKSLTREDKMEQAEMIIVELGLSRCRNSPIGGGSALFRGISGXERKRVSIGQEMLVNPSLLLLDEPTSGLDSTTAQRIVAMLQSFARAGRTXVVTTIHQPSSRLYWMFD

SEQ ID NO: 195097 - protein, 212 aa, Glycine max
  Clone ID: PAT_MRT3847_1819C.1.pep
MNSLNFVSAAIVSVHYSEPSPKLVSISRARDKPYTLVIRSSGHLSNKLKVSALKSNETKPKQFSLCQNGWLPAFPHVLVASMSNFIFGYHIGVMNGPIVSIARELGFEGNSFIEGLVVSIFIAGAFIGSISSASLLDRLGSRLTFQINSIPLILGAIISAQAHSLNEIIGGRFLVGLGIGVNTVLVPIYISEVHVDIDFSFVYNHFLVLQLY

SEQ ID NO: 195098 - protein, 44 aa, Glycine max
  unsure (1)..(44): unsure at all Xaa locations
  Clone ID: PAT_MRT3847_181C.1.pep
XXEVGXAEVVSCRCSAHPVLPQEKLGXTVSRVXPTKLTQGSGXG

SEQ ID NO: 195099 - protein, 170 aa, Glycine max
  Clone ID: PAT_MRT3847_18200C.1.pep
MSESVANICLHVMRVSYIPIFYDTGHLVSIYTYREKCKCHRSGPFGDEVSRVFGGGLVPGSLTLIGGNPGVGKSTLLLQIAAIIAKGDSDGEACPVVYVSGEESVEQIGNRADRLRIESDIYLYSSNDVEDILKKVQYLSPGALIVDSIQTVYLKGIMGSPGGIMQVKEC

SEQ ID NO: 195100 - protein, 45 aa, Glycine max
  Clone ID: PAT_MRT3847_18201C.1.pep
TNLYLTFYDTSKAQFLHPSLLFLLLVLTLIVIPRPYPLCKGRNKD

SEQ ID NO: 195101 - protein, 556 aa, Glycine max
  unsure (1)..(556): unsure at all Xaa locations
  Clone ID: PAT_MRT3847_18202C.1.pep
MAESEVEVIHSWSAPRSLSTSLMYSFSQRDDIEVLDEPLYANFLRVTGLDRPYREELLSKMEADGDKVTNDIIFAPGKKKYRFCKHISKQRLQGLTDDLMKKGKHFILIRNPLDILPSFDKVVPPSFYELGLAELVCIYNELREIGKAPPVIDAAELQQDPEFTLRSLCNDLEIPFQAAMXEGKMDESNLMSXGPLVLXSVHKSTIYQIPWTHPFLFLFSPNMLLGQSLPLYNMLRRHVKKKSSLLSPPLPNPDLPVPANEKLLAWVGDEIVTRDSAKVSVFDSVVQGGDSVWEGLRVYNGKIFKLEEHLDRLFDSAKALAFENVPTRDEIKEAIFRTLIRNGMFDNSHIRLSLTRGKKVSSGMSPAFNLYGCTLIVLAEWKPPVYDNTRGIVLVTATTRRNSPNNLDSKIHHNNLLNNILAKIEGNNAKADDAIMLDQDGYLSETNATNIFVVKKGRVLTPHADYCLPGITRATVMDLVVKEQLILEERRISLSEVHTADEVWTTGTMGELSPVVKVDGRIIGNGEVGPVTRRLQAAYKKLTEQSGVPIPTYLKT

SEQ ID NO: 195102 - protein, 88 aa, Glycine max
  Clone ID: PAT_MRT3847_18203C.1.pep
MKSEVAQAHAVVLKLKGTIPQGKHSSDAMRIEPACLDNNGQVFWKLKSYNSECAVLLQDIKIKDETATAPAEKWFVYGPEKKDEVDKY

SEQ ID NO: 195103 - protein, 111 aa, Glycine max
  Clone ID: PAT_MRT3847_18204C.1.pep
GSRDYAADKLRELFSKFGAVEDVVIKGSKKKGSALVVMATKEGAVSATGSVIGHLANPLLVLPLKPATVADSSSVPKSAETTRMSNLVGAGYQAFEDSVLKKLQKAAEKQR

SEQ ID NO: 195104 - protein, 50 aa, Glycine max
  Clone ID: PAT_MRT3847_18205C.1.pep
FNIPLGRIAPTKWNSGLETRIMRFDGTTLQFQPSSIAVVNDHIKHKKILK

SEQ ID NO: 195105 - protein, 83 aa, Glycine max
  Clone ID: PAT_MRT3847_18206C.1.pep
EGIAYQWNYMVENQYGDGGRKAGSCPHRAESSPLDDKSKSLVLVNYFRSTPFKPIACEDNSGGLIDMLQTCHGAAANRWANYL

SEQ ID NO: 195106 - protein, 41 aa, Glycine max
  unsure (1)..(41): unsure at all Xaa locations
  Clone ID: PAT_MRT3847_18207C.1.pep
XIDQIVXMYELDXISGFIPLVELNYSGSSSLLSILKRNXXL

SEQ ID NO: 195107 - protein, 79 aa, Glycine max
  unsure (1)..(79): unsure at all Xaa locations
  Clone ID: PAT_MRT3847_18208C.1.pep
LYPGTKGYLYSIEIGQVRKFLGELRAYLNPNKPQFKKIISSTKTFTGEAKVLLKXSLSKTQMHLFFLQEQVEKKLINPL

SEQ ID NO: 195108 - protein, 187 aa, Glycine max
  unsure (1)..(187): unsure at all Xaa locations
  Clone ID: PAT_MRT3847_1820C.1.pep
MVGDNINSRQYNIDINSTKIFVGGLAWETQRDTMRRYFEQFGEILEAVVITDKNTLKSKGXYGFVTFKDPEAAMKACQNPSPIIDGRRANCNIASIGANKNRTRAPQXSTXGRSRAHLVLLSSPAYHGTSSTFVHQNSGQYTFPNSSFGYTGYSQGTIYPLSCMYGKANSQLTTRPMGHLAKWGIGS

SEQ ID NO: 195109 - protein, 41 aa, Glycine max
  Clone ID: PAT_MRT3847_18210C.1.pep
QHTEKCTYYKPQYLLTIKNELKPVSGHFQFQGHPEQLPTLL

SEQ ID NO: 195110 - protein, 60 aa, Glycine max
  unsure (1)..(60): unsure at all Xaa locations
  Clone ID: PAT_MRT3847_18211C.1.pep
KTQNNKXXIHKIVKHTGLFCHGKKEQSKLSEESYTGKIKAGKVGTNLKYLFSSIEPDERG

SEQ ID NO: 195111 - protein, 190 aa, Glycine max
  unsure (1)..(190): unsure at all Xaa locations
  Clone ID: PAT_MRT3847_18212C.1.pep
ELILFSRGGLVERMAARAGFNAPRLNTESIRSTDLSLNSDIQSPYLTIPPGLSPTTLLDSPVFLANSLAQPSPTTGKVLFMVNGNMRHSELSSDAPEKCKHNGFDDIYTSSFAFKPATDSSSSFYHGAGRKINSTTLPQQXFLVLRFSAQPENSFQWPSVDAAKAQTENKSGLHLQEDFVESAPHKDNGT

SEQ ID NO: 195112 - protein, 64 aa, Glycine max
  Clone ID: PAT_MRT3847_18213C.1.pep
MESLLLQPVSAALSPGAEPTVEASSLYGVTQLSSATSAFARPYTALCYTTKPSGNKTPRINSLL

SEQ ID NO: 195113 - protein, 232 aa, Glycine max
  Clone ID: PAT_MRT3847_18214C.1.pep
TRAKEVDSAKESSGAEKPSVFSRKRNFQTAMLQHKKPASSVNAEIIGGPMLISSASSKGATLRKGDRARAESGRASAVSSLPNYISRGPSYGSRCKVLLAFEDNGSSKIGVRFDKSIPDGNDLGGLCEDDHGFFCSANHLLQVDGSGGDDLDKVAINEIFEVASNQSKSGALVLFIKDIGKAMIGNYEILKSKFESLPPNVVVVGSHTQLDNQKEKAQPGSLLFTKFGSNQT

SEQ ID NO: 195114 - protein, 126 aa, Glycine max
  Clone ID: PAT_MRT3847_18215C.1.pep
TEEKKRLLCTVMKEDEETQQNQQQITDSSLSTESRTSTPSDGAPPNSETLVLRSSLLHDLATHMQGSSTARKGGKAESKVSAQPPDEETVVKDAVEAPKKQTENRLQSFCSTSLSGVSPTSVSHSL

SEQ ID NO: 195115 - protein, 208 aa, Glycine max
  Clone ID: PAT_MRT3847_18216C.1.pep
MKMIHFLFLFALVSFTSHASVNDFCVADLKGPDSPSGYQCKPPNTVTVDDFVFSGFVAGNTTNTFNAALTSAFVTDFPGVNGLGVSAARLDIAKGGSIPMHTHPAATELLIMVEGQITAGFMTPTALYTKTLKPGDIMVFPQGQLHFQVNSGNGKATAFLAFSSANPGAQLLDLLLFGNTLPSDLVAQTTFLDVAQVKKLKARFGGRG

SEQ ID NO: 195116 - protein, 78 aa, Glycine max
  Clone ID: PAT_MRT3847_18217C.1.pep
SGNTRQQHSVQGEKSCIFPEDPGQLVDENCLKRKTAGEPDTQEKPNKGLRSKRFWLVPMSCTLQVGSDNGSNIWAPAL

SEQ ID NO: 195117 - protein, 54 aa, Glycine max
  Clone ID: PAT_MRT3847_18218C.1.pep
QYDHPSDLFLIELMVSFPVVVYVNKKSASIVCRFSSIRHGVLRQNLSTYPSPFA

SEQ ID NO: 195118 - protein, 329 aa, Glycine max
  Clone ID: PAT_MRT3847_18219C.1.pep
MVEVLLRASPPPLHSSYLRQCRTVSGRTLVKCSLEVPSKVLTKHVLSGLAASLIFISPANQTIAADLSRAPNNICQLASASENAVTSPFENEKGSNLMMMRGMTAKDFDPVRYSGRWFEVASLKRGFAGQGQEDCHCTQGVYTFDREAPSIQVDTFCVHGGPNGFITGIRGRVQCLSEEDLGKTETQLEKQEMIKEKCYLRFPTLPFIPKEPYDVIATDYDNFSLVSGAKDQSFIQIYSRTPNPGPEFIEKYKSYLANYGYDPSKIKDTPQDCEVMSNSQLAAMMSMSGMQQALTNQFPDLGLNAPIELNPFTSVFDTLKKLLELYFKQ

SEQ ID NO: 195119 - protein, 69 aa, Glycine max
  Clone ID: PAT_MRT3847_1821C.1.pep
GVNLRNVLLIIFKKRNVGCSIFPAIFRVIWNRFFQKKLFPLVVYHQLRVRGTLCCFLPPRMNGDAQRIL

SEQ ID NO: 195120 - protein, 65 aa, Glycine max
  Clone ID: PAT_MRT3847_18220C.1.pep
DIFGGPKQGSRPRVFNPPPNLKGTKFLGPRGGPREFRAGPGGGTNFPYGGGRPGGAPGGGGPPPH

SEQ ID NO: 195121 - protein, 174 aa, Glycine max
  Clone ID: PAT_MRT3847_18221C.1.pep
FCVHGGPNGFITGIRGRVQCLSEEDLEKTETQLEKQEMIKEKCYLRFPTLPFIPKEPYDVIATDYDNFSLVSGAKDQSFIQIYSRTPNPGPEFIQKYKSYLANYGYDPSKIKDTPQDCEVMSNSQLAAMMSMSGMQQALTNQFPDLGLNAPIELNPFTSVFDTLKKLLELYFKQ

SEQ ID NO: 195122 - protein, 151 aa, Glycine max
  Clone ID: PAT_MRT3847_18222C.1.pep
ACPYCYRGSRYPRVYEGCCLRCQNCDRSFHGVTVPSLPPLVPGQDAYYCCWGFFPMGFVVGSFGSPPQPEEEAAPSAAEAPPSPPPPPQQPASSLPNWMPVAAENGVGSVTPVAAATRLTRSGAAVPNGVGSGNGTGKKKRGRPRKYPLPS

SEQ ID NO: 195123 - protein, 52 aa, Glycine max
  unsure (1)..(52): unsure at all Xaa locations
  Clone ID: PAT_MRT3847_18223C.1.pep
SVWVVAAGAFFTHSVLLYRAGAEVPPLWSYPGGGLEPIVXECTFHAPCEISV

SEQ ID NO: 195124 - protein, 137 aa, Glycine max
  Clone ID: PAT_MRT3847_18224C.1.pep
MMSVKNFPEECWELVFRFIGHGRHLESLSLVCKQFLSITNRLQFSLTIHDPTIPLLPRLLLRFPRLRILDLSHLNGHHEALLHQISQSRLDLDLLNLSNQKTLSVDGLRELGSNMKNLRVLICSNIGSLRDSHLVVI

SEQ ID NO: 195125 - protein, 109 aa, Glycine max
  Clone ID: PAT_MRT3847_18225C.1.pep
KSIWSTVTDPRSDDNRESKTFHILKPTLRVTRANPAIYENVFHLLLRRNSHLPRLLKRLYRLCHRTPTLLMRATTPRPNPNIESRHNSQTHQRRQALDISPNILQGASL

SEQ ID NO: 195126 - protein, 108 aa, Glycine max
  Clone ID: PAT_MRT3847_18226C.1.pep
RQLWWTDHSHQDEHNTNALFSFLQLRPSLEHPLVTTHPESYSAGGSNSCLMKGTKCTELEHPKLIKFMGFSSRKDEISLAKCLIHLIKGKPPKIKTSDGNCLDAVFVQ

SEQ ID NO: 195127 - protein, 68 aa, Glycine max
  unsure (1)..(68): unsure at all Xaa locations
  Clone ID: PAT_MRT3847_18227C.1.pep
GXNXVXXRVRGWXSXKFKLYXXHITHSYXXKXQHXXQGFXPXLQAXEAXXXXXXXRAEFRAXVRXXAT

SEQ ID NO: 195128 - protein, 82 aa, Glycine max
  Clone ID: PAT_MRT3847_18228C.1.pep
KTPITDQVDSDAHLYGGPYFTPIKYRWKKHTGENAVDSVKLAKEQMNYQVGLQFYNGNYSLSMCIQEHNNFWDYKKFNIILL

SEQ ID NO: 195129 - protein, 79 aa, Glycine max
  Clone ID: PAT_MRT3847_18229C.1.pep
SADNLHVTPSFTGTGIPPPRFLFSAMTPKIKHKTPKNETITPISLTMTEGRADVDTTTQPTNKMYSTTNLNTKRKLTLS

SEQ ID NO: 195130 - protein, 68 aa, Glycine max
  Clone ID: PAT_MRT3847_1822C.1.pep
RMLTGHWSLGQWVRKVQTVCFIKRVLFMLEGDCPKEKSPAGLVMDGSFVHQKFPKYSQSGVRIFPINR

SEQ ID NO: 195131 - protein, 98 aa, Glycine max
  Clone ID: PAT_MRT3847_18230C.1.pep
RTHSFASSVFFPRFLFRGTHTSFFLSMFRVGLDFFYIYFEVISFFLIVTKQFSPTLMYAFLVNHRKPILFASTILNKGLRLSLFNSVCFCHCLLRESR

SEQ ID NO: 195132 - protein, 39 aa, Glycine max
  Clone ID: PAT_MRT3847_18231C.1.pep
FVRHELTYYEFTIKNGGPYICHLERHFVQKSITKYLRGK

SEQ ID NO: 195133 - protein, 74 aa, Glycine max
  Clone ID: PAT_MRT3847_18232C.1.pep
VVSFPFQALSNFPKPLPRMLPFIPPHFFLKLLVLVFIFPFCFRWRCLLSILQLPYMHLHPPLSLLSHSLLAYFP

SEQ ID NO: 195134 - protein, 86 aa, Glycine max
  unsure (1)..(86): unsure at all Xaa locations
  Clone ID: PAT_MRT3847_18233C.1.pep
HNNLSLCPHLFSLVAGTAIVVGGFILYRRSCKGDRXGVWRSVFFYPLIFTEHDLLMGMNEKSSRGNGGAFGKVYVVNXPSGELVAV

SEQ ID NO: 195135 - protein, 42 aa, Glycine max
  Clone ID: PAT_MRT3847_18234C.1.pep
LKVLLQFLAGINTHLSDHVWALTRHPSFEPPPRHRAFPFWPP

SEQ ID NO: 195136 - protein, 183 aa, Glycine max
  Clone ID: PAT_MRT3847_18235C.1.pep
KQGVFLIQCAVKWYLSTGRRPVPLVVAVLVFVAELNGVGVGMEELAKEVHAKVSTCRARYKELLETLVKVAQVLPWGKDVTVKNIVKNAPIVIQYMERKAMLKPGKKREGLDRAAVDLEDVVAECLRNDGEFEYGVDGMTKRKDSQYFSLESNAGRVGGGDSDGLQISPECLSLRIRSFWMKM

SEQ ID NO: 195137 - protein, 53 aa, Glycine max
  unsure (1)..(53): unsure at all Xaa locations
  Clone ID: PAT_MRT3847_18236C.1.pep
RWIPDRSMTYMHRPCYGTLRSVTLIRVDRIGPMVTGAEXPVMEAMHTPVYVKK

SEQ ID NO: 195138 - protein, 117 aa, Glycine max
  unsure (1)..(117): unsure at all Xaa locations
  Clone ID: PAT_MRT3847_18237C.1.pep
MLMIGFKLHCKRKHSSSGGQFQTRNTFSIPSSPNAEVEICSVYFGNAEFSYKELAEATNRFDLNKQIGDGGFGTVYNGKLKDGRXEVAVKHLYNHNYRRVEQFMNEIQILTRLRHRK

SEQ ID NO: 195139 - protein, 87 aa, Glycine max
  Clone ID: PAT_MRT3847_18238C.1.pep
GIRPEFLSRLTQVSEDLSSLFQQILEKYGLFFSVLSPSYQSDAGHCDNILGSNSNTLHQKNKFIPSQLTHYQVPLDPQTSSPETTFR

SEQ ID NO: 195140 - protein, 63 aa, Glycine max
  Clone ID: PAT_MRT3847_18239C.1.pep
FETPELSVSLSQSDSFLVWMNFFMLLVHGYDSMIVGSKKANKMPKKTSNNQNPYRRSSCPNFH

SEQ ID NO: 195141 - protein, 316 aa, Glycine max
  unsure (1)..(316): unsure at all Xaa locations
  Clone ID: PAT_MRT3847_1823C.1.pep
AIQFYDLQDRLGYDQPSKAVEWLIKSASDSISELPSLNNFPDTPKSDDHEKRANTDVAAGANMSLSKSGCSSTSETSKGSGLSLSRSDIRVKARERARERTTKEKEKEKNESHHHHSNVVVPHHPASSGRQQWCSSSSAAAAAPMDYFLXGLPLLEQQQHHHTITXHHHQYSSSGGGENQNHSSSDPHLQQQQHFSFIPDHLMSAVVTSSSHHQPSGSDYNLNFTMSSGLAGYNRGTLQSNSPSLLPHLQRFSPLDGSTVPFFIGAAPSAAVAAPAMENNTTTTNNHHHHQFSSGFDGSRLQLYYGHSDQKGKAKN

SEQ ID NO: 195142 - protein, 75 aa, Glycine max
  unsure (1)..(75): unsure at all Xaa locations
  Clone ID: PAT_MRT3847_18240C.1.pep
SCFXSWWVLIXLXLICILFNXXGQXTXXXLLXWIMXLLXCPIXSKXGXWXSXRQXXLXMVXCGRXSAAXCSAXAL

SEQ ID NO: 195143 - protein, 84 aa, Glycine max
  unsure (1)..(84): unsure at all Xaa locations
  Clone ID: PAT_MRT3847_18241C.1.pep
XEIGKMPTVGRVEESEVPTDHVDGHVGDKFASEKTNIAPESNAEEVPQEMTKQHNIDGTIEPVCAQDTGKEXISEDESEKXSNP

SEQ ID NO: 195144 - protein, 88 aa, Glycine max
  unsure (1)..(88): unsure at all Xaa locations
  Clone ID: PAT_MRT3847_18242C.1.pep
NQRNAEQDPEKRRNPGGRDXDPRGRDAXPEKKATRQEAENKHFFFAMEGFLGFAVXAAATGKGPLNNWATHLSDPLHTTIIDTFSSSS

SEQ ID NO: 195145 - protein, 57 aa, Glycine max
  Clone ID: PAT_MRT3847_18243C.1.pep
FPDEMSKKMSVKEAHEYVRGAVSRFIRASKEAIKLGADESAIVDMRSSLTTRSSVHN

SEQ ID NO: 195146 - protein, 673 aa, Glycine max
  unsure (1)..(673): unsure at all Xaa locations
  Clone ID: PAT_MRT3847_18244C.1.pep
MAMKLKYLSSIAEDVIKRCSQKLDTSVEKLVVDFEGGWHPEMGNYCRKLVEFCSGKAVSELCHNIEGNINDGSFSRLTYDMMLAWERPSYYDEEDTTENVAKEKEERKITLNTTQELDDIPLFYSDIMPLLVNNEPNVGEDAFVWLGSLVPLVADVSNGRFTFESLTAPTGNRLHFPAYDMFLKEMDKCIRHLQKHATPNGVELAEDEYILHVDGTASTQRVVRHIGTTSWPGRLTLTNYSLYFEASGVIRYEDALKIDLSKNVEQSVKPAATGPWGAQLYDKAIIYDSTDLSETVVLEFPELTSSTRRDHWPIXYFNIMFLHQFLSKXQINCLIKPLRLHSRTILGIVRLHAAIEMLRIXPPVPTKFLIFSLYNEIPKGDYVLAELADSLKKGNNGQSCSASSILRSMNISKSVDSDIIIDEASQADGSVNVVDDSPSLEAAIKQSREEEKEILIAKATTDELKEEGVTDSVLVITELLKPLKNAVPWFQEIFTWERPIITLAVLAASLMITYMEWVGKTFAVFLIWAIIKMLDARQKKIHDKSNEIVISRSSMASDQSTMESIVSAQHGLYTVHDMMQIANIAMLKIWSILISKADKHANLVMVAMSGLAILLAVIPFKFFLMALILQSFTMTLGKSSGSGTGNRRLREWWDSIPIVPIRVVDDPNTVDAK

SEQ ID NO: 195147 - protein, 151 aa, Glycine max
  Clone ID: PAT_MRT3847_18245C.1.pep
LGIVRLQAAREMLRISPPVPTKFLIFSLYDEIPKGDYVLEELADSLKKGNNGQSCSASSILRSMNISKTADSCIITDEASQADGSVNVVDDSPLLEAAIKQSTEEEKEILIAKATTEKLKDEGVIDSVLAITELLKPLKHVGPWFQEIFTW

SEQ ID NO: 195148 - protein, 157 aa, Glycine max
  Clone ID: PAT_MRT3847_18246C.1.pep
MEFQFLPRFYLLVSLSILFLAPFHAQAKIKVTYCDKKADYAVKVSGVEISPNPVVSGQAATFKISATSGKAIYGGEVVIGVSYVGVPVHTERIDLCEEVTCPVANGNFLISHTQTLPAITPPGPYSLKMTLKDDREEVLTCVKFNFKIVFGSFVSDM

SEQ ID NO: 195149 - protein, 108 aa, Glycine max
  Clone ID: PAT_MRT3847_18247C.1.pep
QWFHFSDHLATAGEIFVVLGQVSTDYMEWFFRISHPFITPTQAGDKPRHSPAPQHEEYIELGIPEVQVGEGRGPSKASDPPRHVVVRLVALMFYKMLFILKVVINVYL

SEQ ID NO: 195150 - protein, 45 aa, Glycine max
  Clone ID: PAT_MRT3847_18248C.1.pep
FRGGISMTRKQPEKLKDSNYCLKKPYLVHNKKCTFIFWPLHIKED

SEQ ID NO: 195151 - protein, 115 aa, Glycine max
  Clone ID: PAT_MRT3847_18249C.1.pep
FIQNKRRRYILMNAPISTKYCHCQFFIPIFYPKRTDLNLDSNLQLRRPDKRKNFKIQASTYDAHMIESTNQTADTTTALRRPRGTTEIIPTAAATIAVAATVCTATTAVDAMGMN

SEQ ID NO: 195152 - protein, 101 aa, Glycine max
  unsure (1)..(101): unsure at all Xaa locations
  Clone ID: PAT_MRT3847_1824C.1.pep
SKSQRTEPQXKEVEAQMETTPPQRTQDDDETPKGPKPXXKTPQPKNAHPKNTXGGTTPQREPPANPTTEGNTRASADTQRTQRTKGKNKKAPTRGTPEKTG

SEQ ID NO: 195153 - protein, 70 aa, Glycine max
  unsure (1)..(70): unsure at all Xaa locations
  Clone ID: PAT_MRT3847_18250C.1.pep
MTIRNIAIXTHEDDNHHDTLKETLDVFISTLIFEFDGSCYGIAYNKLNDNGAATLVGLISAYISHDFGLF

SEQ ID NO: 195154 - protein, 79 aa, Glycine max
  unsure (1)..(79): unsure at all Xaa locations
  Clone ID: PAT_MRT3847_18251C.1.pep
HRYIIFKIDEKSKLVTVGDEADPCESYXDLTVFLPDDDCRYAAFDFDFTTVDYCRMSTNFFIAWSATAFRIRAKILYAT

SEQ ID NO: 195155 - protein, 90 aa, Glycine max
  Clone ID: PAT_MRT3847_18252C.1.pep
YWYIAETGLSCELSCIFEIEFPAPVQTEQLEISIPKTTLFIVKLWGLSVTPPFTGLSLLMLFFSSGLKGNQSAIVHNFQYQENDDKMDLG

SEQ ID NO: 195156 - protein, 188 aa, Glycine max
  unsure (1)..(188): unsure at all Xaa locations
  Clone ID: PAT_MRT3847_18253C.1.pep
PRVRKKFGRVLGLGXGFGLFGGLGYLAFGEETKDIITTNLGPGVISVLVQLGLCVNLFFTFPIMMNPVNEVKXRRFCGSRYCLWLRWVMVLAISLVALLVPNFAVFLSLVGSSVYVVLSFVLPAMFHCMVFREELGWRCVLWDGPTPVFGFVIAVTGTFTSVMERFFGLPLRHDSAQNNLFGDNNFGC

SEQ ID NO: 195157 - protein, 83 aa, Glycine max
  Clone ID: PAT_MRT3847_18254C.1.pep
QLYPMVSCLHPLIPPHCNNLSMLRRRPNILLWIFLHSCQKSQLLQSLLLWPPPHHHCGMVNPAVTSNVLTTCPGPKTSVNLAT

SEQ ID NO: 195158 - protein, 80 aa, Glycine max
  Clone ID: PAT_MRT3847_18255C.1.pep
PACCFFNKKRNFCRRPSPQMFFGFPAALNEYPNAVYGCFFMTSLSFKFPFMGPTGSPPSKKSPFLPAALFMKAWRRKNKP

SEQ ID NO: 195159 - protein, 176 aa, Glycine max
  unsure (1)..(176): unsure at all Xaa locations
  Clone ID: PAT_MRT3847_18256C.1.pep
VAKRLENDYAPARXGFEFKNGRSYPVFDGIVVCAEFKXDVLLEAYAEEEERRQAEEKKRXKHRPLSRWYQLLSSIVTRQRLNNRYINNSLSSDKLTGVLCINNDESSATVCDNNDKSPNQRDQQVDKCDTNVDVSLSTSVKDHEHVFLKEYESFDEGTSLLTKRCQCGFSVQVEEL

SEQ ID NO: 195160 - protein, 78 aa, Glycine max
  unsure (1)..(78): unsure at all Xaa locations
  Clone ID: PAT_MRT3847_18257C.1.pep
SEARTKQTAXKXSTGGKAXRKQLXXKAARKXAXTTGGVKXPHRYRPGTVALREIRKYQKSTELLIRKHPFQRLVRELL

SEQ ID NO: 195161 - protein, 65 aa, Glycine max
  Clone ID: PAT_MRT3847_18258C.1.pep
MDPAVDPKLICEYELCILPTTMRSWSKLCPPISISFLSASARYPLYVLYPIQINRKMQSTQNRRS

SEQ ID NO: 195162 - protein, 61 aa, Glycine max
  Clone ID: PAT_MRT3847_18259C.1.pep
LQLERMKNENMLPSVDGQSHESSFPGLQRELMQLHEANQELGNIFPVFDKFSISGNALERV

SEQ ID NO: 195163 - protein, 67 aa, Glycine max
  Clone ID: PAT_MRT3847_1825C.1.pep
YIIPQNTNNSAQGGSYYIGLSHERVIKGDKSKFLQHRAFRVKPSTILWDLNGDPIQQLFLKHYGFAE

SEQ ID NO: 195164 - protein, 96 aa, Glycine max
  unsure (1)..(96): unsure at all Xaa locations
  Clone ID: PAT_MRT3847_18260C.1.pep
MAAAHEDVKLLGIVGSPFVSRDQIALKXTGVEYIFTGENLCSKSDLLLKYNPDHKMVTVHDHNEQAIAESLEIDEYIAETWKNNPILTYDPYQIAL

SEQ ID NO: 195165 - protein, 90 aa, Glycine max
  unsure (1)..(90): unsure at all Xaa locations
  Clone ID: PAT_MRT3847_18261C.1.pep
MEKEKHWISKSNSKVCKRCKQNYEPASNTXTSCRFHTSFFVCRRHDDQKRYYELGPDDPPYAAKFYDCCGAEDPEASGCTTNFHVSYDED

SEQ ID NO: 195166 - protein, 51 aa, Glycine max
  Clone ID: PAT_MRT3847_18262C.1.pep
VNFKIKSHFCFCKMMINLSLNVSHKFFIFLFMIIIEINKCINLSHFFTFKN

SEQ ID NO: 195167 - protein, 34 aa, Glycine max
  Clone ID: PAT_MRT3847_18263C.1.pep
NTRLFCPVSPSSKVLPRAGQHPLPQPSKAGLLIK

SEQ ID NO: 195168 - protein, 82 aa, Glycine max
  Clone ID: PAT_MRT3847_18264C.1.pep
NECSFIYNCFSGTRKRHLEVVEGDQTNDGCISIAEHHERTLAITTPFEIEDSYYVKEKRDNSNFFWWNPNVGFTLKPWPKEK

SEQ ID NO: 195169 - protein, 100 aa, Glycine max
  unsure (1)..(100): unsure at all Xaa locations
  Clone ID: PAT_MRT3847_18265C.1.pep
PRPASRLVAAPRKPELKLGVSFLVLPYRSKVCTIEETEKMPGKVISQEHILEYGRDCLEMHVGLXAVEPAEHALVVDDLIATGGTLCAAMDLLGFDAWCS

SEQ ID NO: 195170 - protein, 113 aa, Glycine max
  unsure (1)..(113): unsure at all Xaa locations
  Clone ID: PAT_MRT3847_18266C.1.pep
LILKXXGXXSDLXRXXLLXNXSLPFNIXPQTRVRWLNGSKNTLRXPWNGFSNXXAGHFEKKXKKELGGRAPFGSLSLRASPMISPKFRVRFGSAPVNPGWVGSKLNAHLELGI

SEQ ID NO: 195171 - protein, 308 aa, Glycine max
  Clone ID: PAT_MRT3847_18267C.1.pep
MKNANSNTKLILLHPYIQKQGSSNRLWLLAFISFFTLAFLATLIYTRDTTSSSSTTTSSTPLSSFANTPLPSTVINTLLHYASKSNDTFHMPHSDLKTISDVLRKCPSPCNFLIFGLTHETLLWKALNHNGRTVFIDENRYYAAYFEEKHPEIDAYDVQYTTKRSELKELIASTKEQVGNECRPVQNLLFSECKLGLNDLPNHVYEVDWDVILVDGPRGDWPEAPGRMSPIFTAGVLARSKKGGNPKTHVFVHDFSGKVEKVSGNEFLCKENLVEATHSLGHYVLEKMDDSSVQYCKNHSSGFASSSS

SEQ ID NO: 195172 - protein, 57 aa, Glycine max
  Clone ID: PAT_MRT3847_18268C.1.pep
IVSSNSKNFICACIAAPRIHAIFIHTIGIRWGEMPKVLISPNHWLLTFFLYNVKIAF

SEQ ID NO: 195173 - protein, 49 aa, Glycine max
  Clone ID: PAT_MRT3847_18269C.1.pep
PPQTSCENIRPKSSPPNCKNRMAPAPNQDSVVFFTPTTFASTPASPKMT

SEQ ID NO: 195174 - protein, 96 aa, Glycine max
  unsure (1)..(96): unsure at all Xaa locations
  Clone ID: PAT_MRT3847_1826C.1.pep
HXGSFXPKXTSHXSLXXSXXRXHPRXXXQIDLPNQTXXIXSXLXDRHXCXTXXQLSTLXLEDLLXVIXVSGRTSSNDAMDAEVXLPERNKTPNEMQ

SEQ ID NO: 195175 - protein, 73 aa, Glycine max
  Clone ID: PAT_MRT3847_18270C.1.pep
KFSATGKRIHSMRMGEFVKDFVQFRKPSSHLSSPPVDEIFTMGFNPPLTPFLSFFFPFNLSIVFRYSSHNFVK

SEQ ID NO: 195176 - protein, 476 aa, Glycine max
  unsure (1)..(476): unsure at all Xaa locations
  Clone ID: PAT_MRT3847_18271C.1.pep
VVITPLPAFLNLECGTGWTIGVGIESHGLYYLKPNLSWVCSAVTSPKLLHERLGHPHLSKLKIMVPSLEKIKDLFCESCQLGKHVRSSFRHVESRVDSPFLVIHFDIWGPNRVSSMSYRYFVTFIDEFSQCTRVFLMKERSEILSILTSFVNEIKTQFGKTIKIPMSDNAKEYFSSTISSFLSVHDILHQSSCPHTPQQNGIAERNNRHLFEIARTLLLHANVPGWHWGDAVLTACFLINRMPSSSIKNKIPHSILFPKEPLFHVDPHIFGCTCFVHNLSPGLDKLAAXAIKCVFLGYSRLQKGYRCYSPVHNCYYISANVTFFEEKLYLAPSMIEFNTLQEVFPIPYIGPLPSLQESKSTVDSTIDIPDNPPLEQTQRSPIVYRHRPLIPDAELKGNERPAESCPTPADNSTMDLPEENLDLPIAFRKDTRSTHNPYPIYNFLSYHCLSSSYHSFVSSLSSVSLLKNLCEALDHG

SEQ ID NO: 195177 - protein, 74 aa, Glycine max
  Clone ID: PAT_MRT3847_18272C.1.pep
FTSSSYIIGWFPVHRLISSSARVHAHVESRVMFMLYKVEQMQYVRIHRYSIQVYLVASCFITRRIDRSFAITLL

SEQ ID NO: 195178 - protein, 101 aa, Glycine max
  Clone ID: PAT_MRT3847_18273C.1.pep
ITRTYMIKHAFYKVYGAPKPPPHGEYSLSYIYDRLSDTINRTGVFHHHHSQSNFSASTLIITHLLTEPPSHTRRPSPYTSKPTNLTSPRNHPPGHSTTLHL

SEQ ID NO: 195179 - protein, 48 aa, Glycine max
  Clone ID: PAT_MRT3847_18274C.1.pep
MWLRTVILATLSASAAWGHYVSPPVVDTVHGKVLGKFVSLEGFAHPVA

SEQ ID NO: 195180 - protein, 109 aa, Glycine max
  Clone ID: PAT_MRT3847_18275C.1.pep
MASSSASPRPSAAAEHSRKILGFMAHAKQRKDSFIQFFAMTGILLLSMRSLSQKYKIHGLQEDIHALRVDHGSLTDRINNIKNDLLREASQDSTGLFASRLRHLFAEQH

SEQ ID NO: 195181 - protein, 77 aa, Glycine max
  Clone ID: PAT_MRT3847_18276C.1.pep
TVKRCDLCLIPTMFPFYLFSPWTETFHNNMIRRSVLKNKGSIFIYFIPFCCLIFCGDFWDKLTAVLKVTMFCHARAF

SEQ ID NO: 195182 - protein, 445 aa, Glycine max
  Clone ID: PAT_MRT3847_18277C.1.pep
MEKAIQRQRVLLEHLQPISSSSNFSSQTHQSTDLSASLCFAGNSSHGQTGGSDDDVVIVAAYRTAICKAKRGGFKDTLPDDLLATVLKAVIEKTNVNPAEVGDIVVGTVLAPGSDRGIECRMAAFYAGFPETVPLRTVNRQCSSGLQAVSDVAAYIKAGFYDIGIGAGLESMTVDRVNRLPNINPKVETFAEARDCLLPMGITSENVAQRYGVTRLEQDQAAVESHKRAAAATAAGKFKEEIIPVSTKFVDPKTGVEKKIIVSVDDGIRPNTNLADLAKLKPAFQKDGTTTAGNASQISDGAAAVLLMKRRVAVQKGLPILGIFRSFAAVGVDPAVMGVGPAVAIPAAVKSAGLELGNIDLFEINEAFASQYVYCLKKLGLDPRKVNVNGGAIALGHPLGVTGARCVATLLNEMKRGGKDCRFGVISMCIGSGMGAAAVFERGDF

SEQ ID NO: 195183 - protein, 78 aa, Glycine max
  Clone ID: PAT_MRT3847_18278C.1.pep
LGEQCVRNRICGAGWIGGHLWEASAPGGLGTFAAGAGKQPLRLPYAHNNATYSGYHHTFNSLGSDRSSYCVEGYESGS

SEQ ID NO: 195184 - protein, 63 aa, Glycine max
  Clone ID: PAT_MRT3847_18279C.1.pep
PPPPSLSCLLLKETSKKNDEGIINQQMKGNVYIMSPILLCFNLDPLILTSCIFSALFSGHKLK

SEQ ID NO: 195185 - protein, 64 aa, Glycine max
  Clone ID: PAT_MRT3847_1827C.1.pep
TREFLKIKQNKKLTSSAMVDRDRCLENCDSTGFRALAILSGRVYMLVMFLFLLFSLQRSFTLIL

SEQ ID NO: 195186 - protein, 92 aa, Glycine max
  Clone ID: PAT_MRT3847_18280C.1.pep
TAAGRPPKGEKNEPIHHFLSSVLLLVQIFRSSRRINPREIMSWYPLADAFAGDLFVWGGNHPPGFVAQPQTLPDGPRYLTVWPCTITWPDRD

SEQ ID NO: 195187 - protein, 116 aa, Glycine max
  unsure (1)..(116): unsure at all Xaa locations
  Clone ID: PAT_MRT3847_18281C.1.pep
XXXPSIXLHXXFXXPXXPXXXXXXXXXLHPXXXXHPXHPXHPXXXPXXSXXPXRXXXXXXXPQXXQPXXTXXXXSXPYTYXYLXPXXTXXXXTXAFPXXHLNLAXXXXSSCXXYXL

SEQ ID NO: 195188 - protein, 58 aa, Glycine max
  Clone ID: PAT_MRT3847_18282C.1.pep
NLAFHPFSTAACQSYKRDNISQNSHHHSHICEFDKVGHHHVTACLDWLKGRMYTCIFA

SEQ ID NO: 195189 - protein, 279 aa, Glycine max
  Clone ID: PAT_MRT3847_18283C.1.pep
MPRDLSRSRSPPYRRRHSPSPVGHRYSRRSRRDRSRSPYSSYSYSRRKSRSISPRGHRSPSTTPRRGRSRSPSAKRYRRHRSRSSSLSPTRKSSSPSLGSVEHKSATEKLKKEEEKKRRQLEAELKLIEEETAKRVEEAIRKRVEESLKSEEVQVEIERRLEEGRKRLNDEVAAQLEKEKEAAIIEAKQKEEQARKEKEDLERMLEENRRKVEEAQRREALEQQRREEERYKELEEMQRQKEEAMRRKKHEEEQERLNQIKLLGKNKSRPKLSFALGSK

SEQ ID NO: 195190 - protein, 57 aa, Glycine max
  Clone ID: PAT_MRT3847_18284C.1.pep
IYYTFTKHYSNIQRTTHSLKIWLGLPLFRVFCCFTGPYGLALLVPPPPPKEGGLIQY

SEQ ID NO: 195191 - protein, 171 aa, Glycine max
  unsure (1)..(171): unsure at all Xaa locations
  Clone ID: PAT_MRT3847_18285C.1.pep
MLGNGVVGILAESVNKWERRAPLTPSHCARLLHGGTGVSRIIVQPSTKRIHHDALYEEVGAEISQDLSQCGLILGIKQPKLEMILPDRAYAFFSHTHKAQKENMPLLDKILAERASXYDYELIVGDNGKRLLAFGKFAGRAGMIDLLRGLGXRVLSLGYSQPSCHLEHLHV

SEQ ID NO: 195192 - protein, 59 aa, Glycine max
  Clone ID: PAT_MRT3847_18286C.1.pep
NSPGGVFGYPKGKPFLGEGPSGVFFKTPPPPPPPPPPPPPPPPPPPPPPPPPPPPPPPP

SEQ ID NO: 195193 - protein, 41 aa, Glycine max
  Clone ID: PAT_MRT3847_18287C.1.pep
CCSSSCPQSTLKKDSHPKPSCTPNVLNRCKSCCNIERALRI

SEQ ID NO: 195194 - protein, 74 aa, Glycine max
  unsure (1)..(74): unsure at all Xaa locations
  Clone ID: PAT_MRT3847_18288C.1.pep
GCSVSDAPALVDEKTXFDVVIYEVPSNSXIAVINAASSFTNLALKDANEYIXWLPKKFKXRISKDESVDAKKHL

SEQ ID NO: 195195 - protein, 237 aa, Glycine max
  Clone ID: PAT_MRT3847_18289C.1.pep
MGVGGLIWQVEEIHFVGFLSKLLETKIMQVLRFKHGQIYSVGVSVFLGGNKPSRIGDFRGDISINFSCDPEISSKLVDIALDEMLRLQDEGPSEQDVSTILEIEQRAHENGLQENYYWLDRILHSYQSRVYSGDVGTSFEIQDEGRSKVRSSLTPSTAQFALKRILPFPSKNKYTVVILMPKASPLQLLKSVIQSARTNYGREAKILAGVTGLAVLAFSLWRRAQNNSRHLLSRAAN

SEQ ID NO: 195196 - protein, 268 aa, Glycine max
  unsure (1)..(268): unsure at all Xaa locations
  Clone ID: PAT_MRT3847_1828C.1.pep
AVPPTYADLGKSARDVFTKGYGFGLIKLDLKTKSENGLEFTSSGSANTETTKVNGSLETKYRWTEYGLTFTEKWNTDNTLGTEITVEDQLARGLKLTFDSSFSPNTGKKNAKIKTGYKREHINLGCDVDFDIAGPSIRGALVLGYEGWLAGYQMNFETSKSRVTQSNFAVGYKTDEFQLHTNVNDGTEFGGSIYQKVNKKLETAVNLAWTAGNSNTRFGIAAKYQVDPDACFXAKVNNSSLIGLXYTQTXKPGIKLTLSALLDARTSM

SEQ ID NO: 195197 - protein, 163 aa, Glycine max
  unsure (1)..(163): unsure at all Xaa locations
  Clone ID: PAT_MRT3847_18290C.1.pep
MNKQQQAYGYGNGQQADVPGYCCFHPREVGVGVCAHCLKDRLLLLLAVANNNKIDDDARRKSRSRSRSISLPKVFALGSSFLQRLDSRHHRGRGRDNNCYSDDDDATXXVASLDDSFISIKFEDNGKATWDSQSQHKAAAPARSSSTTTMVAVEHVKRVGVTR

SEQ ID NO: 195198 - protein, 58 aa, Glycine max
  Clone ID: PAT_MRT3847_18291C.1.pep
RRLVTFNRTRTPTHEISYSNTTSVTSYYIMVFHPKFKVYSLANHLSIPTFTQNLLQNN

SEQ ID NO: 195199 - protein, 71 aa, Glycine max
  Clone ID: PAT_MRT3847_18292C.1.pep
ELPSCTIGQSHCSFTNGGCFGPEGKIASGPKMAFLTLIKKMVLLSRPNMLITASFITQSSHLCWLRHMLTS

SEQ ID NO: 195200 - protein, 70 aa, Glycine max
  Clone ID: PAT_MRT3847_18293C.1.pep
EAAPPCANIIIVTRQSHILQEIQLKLINSFKYFYYSLWWESSISTFFNTSFIVLWMMIQKLAMQFLDENF

SEQ ID NO: 195201 - protein, 56 aa, Glycine max
  Clone ID: PAT_MRT3847_18294C.1.pep
NEELGTCPVRQIGGCSVFYMRISNVYLVIVVSDNANDACAIDVEVEAVALLRSDLG

SEQ ID NO: 195202 - protein, 86 aa, Glycine max
  unsure (1)..(86): unsure at all Xaa locations
  Clone ID: PAT_MRT3847_18295C.1.pep
MKTFIFLKNVLKLQTSNQKCLEMFVHAQCYQDSGNVLKWWLYRIKCVKQIIKWFKHVECPHSVGKKKMGIVVLKXPKEKKKKKEHP

SEQ ID NO: 195203 - protein, 140 aa, Glycine max
  unsure (1)..(140): unsure at all Xaa locations
  Clone ID: PAT_MRT3847_18296C.1.pep
EKERERVRNCFKFANPKFGKGGYGCLQGSRELRLHRQARRTGRAILSDSGINAERSATRRRTNCKAAKDPNKPKRPPSAFFDFMDDFKNVFNIXHPENKSSSAVGKATGAKCKTMSDAEKAPYVAKSDKRTVEHEKIMPA

SEQ ID NO: 195204 - protein, 66 aa, Glycine max
  Clone ID: PAT_MRT3847_18297C.1.pep
SIVHYQNFHGTSWPDSLALLFFDPNACWYELSIFFFPKSQTKCCYAATGVQFKIPSKSQISLIHQL

SEQ ID NO: 195205 - protein, 93 aa, Glycine max
  unsure (1)..(93): unsure at all Xaa locations
  Clone ID: PAT_MRT3847_18298C.1.pep
GLVGGSGRGGSPTTARISPAVXNNRSSDINKRIFSALXGKDKNNVFITKVVPFPVDLLDDLYVVNNEIMSSNATKPMLTRQLENCKSLIYLVN

SEQ ID NO: 195206 - protein, 41 aa, Glycine max
  Clone ID: PAT_MRT3847_18299C.1.pep
AFTLEIICTKELFSVCVPITVALTPPIDRFLARRKILKHGL

SEQ ID NO: 195207 - protein, 47 aa, Glycine max
  Clone ID: PAT_MRT3847_1829C.1.pep
EPCSDAWRLEFLERTGFRCDVVCVTGWCATPLQDAQVRLDSFVSSQG

SEQ ID NO: 195208 - protein, 80 aa, Glycine max
  Clone ID: PAT_MRT3847_182C.1.pep
ITLDISPCPTMELICDKGQVTVNSSREANVQEKLDAVRKTSVWGLFCYGEKKKRYMEDYVWIHIVNGLFCPRYLVIEKGA

SEQ ID NO: 195209 - protein, 497 aa, Glycine max
  Clone ID: PAT_MRT3847_18300C.1.pep
PTRPKGFIGEFNMPKNENPSSVEFQFQWLYTNGLLAIIFCFGLLVTALKSRRARTWRYGTGWLRGFIADYGVPMMVVLWTALSYTVPGKVPDGVPRRLISPLPWDAASLYHWTVVKDMGKVPVVYIFGAIIPALMIAGLYFFDHSVASQMAQQKEFNLQKPSAYHYDVLLLGIMTLICGILGLPPSNGVLPQSPMHTKSLAVLRRRMIRKKVVKSAKECIKQRRTNSELYGKMQEVIVDMDTDPTVKELENLKEAVMQSDSKDGAKEKFDPEKHIDEYLPVRVNEQRMTNLLQSLLVAVSILAMSVIKRIPTSVLWGYFAYMAIDSLPGNQFWERILLLFVTSSRRYKILEGSHASFVETVPFKTIAAFTALQLVYFALCFGVTWIPIGGILFPVPFFLLIIIREHLLPKMFKPNHLQELDASGYEEIIGAPHGSLRDKEPDTDTDGSSEDFYDAEILDEMTTNRGELKLRTVSSFNDRNHSFSEDGHTQVYPGNAV

SEQ ID NO: 195210 - protein, 84 aa, Glycine max
  Clone ID: PAT_MRT3847_18301C.1.pep
TYIIPATISHCERAQPKTTPSHTKSTMSTEHKYEGCGAFDKNSIKVELKWFEYEPKPFVDDDVKLEIQYSWICCSHLHTISYGC

SEQ ID NO: 195211 - protein, 55 aa, Glycine max
  unsure (1)..(55): unsure at all Xaa locations
  Clone ID: PAT_MRT3847_18302C.1.pep
XGFGSFSLXKHPLPXLSAXGTRAAAQALAKSHSSLLFLLQEKKTTLTFTTXAHTD

SEQ ID NO: 195212 - protein, 113 aa, Glycine max
  Clone ID: PAT_MRT3847_18303C.1.pep
CRTQHDTYLNLESQGLIGEFNMPKNENPSSVEFQFQWLYTNGLLAIIFCFGLLVTALKSRRARTWRYGTGWLRGFIADYGVPMMVVLWTALSYTVPGKVPDGVPRRLISPLPW

SEQ ID NO: 195213 - protein, 111 aa, Glycine max
  Clone ID: PAT_MRT3847_18304C.1.pep
GVPLLHIVSTITTIGFNVETVVLSNIGFTVRYDAGHDTIASWGRHYVPNARALIHDVHCADWPLFSEDTCQAHCMLNEDELRDAALLVFATKQDLPFAMDAAEITDTLGLH

SEQ ID NO: 195214 - protein, 58 aa, Glycine max
  Clone ID: PAT_MRT3847_18305C.1.pep
FVNGEGHFIMNSKLRLSQFRVRFFLLWRCVLYRGEFIFCWIYLFLIISNSIFYIYLFT

SEQ ID NO: 195215 - protein, 61 aa, Glycine max
  unsure (1)..(61): unsure at all Xaa locations
  Clone ID: PAT_MRT3847_18306C.1.pep
MIVFLLVLITWYYFYFIKNHNGHQEIMVGYSDSGKDVGRFTATWELXKAQEDVVAACNVLE

SEQ ID NO: 195216 - protein, 95 aa, Glycine max
  Clone ID: PAT_MRT3847_18307C.1.pep
LKDKTKTYLNLIFIITTVNIIFQMISKRMTTVKMFSLENHEIKLIYFSLKKLIYFFRSIFNSRPRHNILVAVLRIFVKWRREYFLVNIYSNRDNC

SEQ ID NO: 195217 - protein, 112 aa, Glycine max
  Clone ID: PAT_MRT3847_18308C.1.pep
PRVRPRLRTGWKNHLRGPPFGLGGAGLIKPVVGSKTLFFKGGPKPLHFKSPLVLQKPLANNSTSQIKFSFRRSRGNVIKDSDPSVHPRLLSSGVVGALHSHEIWLTISKDLL

SEQ ID NO: 195218 - protein, 190 aa, Glycine max
  Clone ID: PAT_MRT3847_18309C.1.pep
FAFIYCCGGLMRSKGDGKKKEGSCVGTKGFRAPEVLLRSQHQGHKIDIWSAGVTLLYMVIGKTPFTGDPGRNIKEIVKLRGSEEFWEVAKLHDRELSFPVELLDDRYLQSWDLEGWCKIHTKRPEFLEQIPKSLFDLIDKCLTVNPRNRLSAEDVLRHEFFDSLHESLRKQRMLHRHRALRSDAAASRAI

SEQ ID NO: 195219 - protein, 48 aa, Glycine max
  Clone ID: PAT_MRT3847_1830C.1.pep
RTSQRRHRSKHTHHLPHFFHHRLIRNSPLEVAIYKLSPLLRLSLTLGS

SEQ ID NO: 195220 - protein, 39 aa, Glycine max
  Clone ID: PAT_MRT3847_18310C.1.pep
GLVFLSQILVKVTPCMSVTCSIRCCNFMNFDCLCLVRAC

SEQ ID NO: 195221 - protein, 68 aa, Glycine max
  unsure (1)..(68): unsure at all Xaa locations
  Clone ID: PAT_MRT3847_18311C.1.pep
DPNVGRLFNQYLIVLXIGQMXXALFRATAAPGRNMIVSSTFGAFAVLAFIAVGGXVMSNNDIKSWWIW

SEQ ID NO: 195222 - protein, 49 aa, Glycine max
  Clone ID: PAT_MRT3847_18312C.1.pep
FGFPGLPLGNPQKKSHFFPLRPFSWKIKLSLSSLKGVQLEILGGFKWPS

SEQ ID NO: 195223 - protein, 131 aa, Glycine max
  Clone ID: PAT_MRT3847_18313C.1.pep
WSAADPSNTQTHPVTVSVLLVKEGMTYFFSGDYDGGQCKSGQHFKINVTYGQGLPKSLKSPEDAPSPASPVAADDESAPDTIVPSNFSHPKEESDDDKASDSDKQKSSSSISISMYAQLHIVLLGILLFLF

SEQ ID NO: 195224 - protein, 59 aa, Glycine max
  Clone ID: PAT_MRT3847_18314C.1.pep
CDMKTPRHIIKEVSDIFTRMDNFVPFGSISGAFKGNHTVSEQKFLIHMFSSTPHLLGVS

SEQ ID NO: 195225 - protein, 299 aa, Glycine max
  unsure (1)..(299): unsure at all Xaa locations
  Clone ID: PAT_MRT3847_18315C.1.pep
KDMGLLKYFLGIDVAQSSYGIVISQWKYALDILTETGMLDCLPSNTPMDPNVKLLSGQGEALEDLGRXCCLVDRLNYLTVTRLDITFAVGVLSQFLKDPTDSQWNATIRILRYIKNAPGHGLLYEDKGNGKVVCYFDADWPGSPSDKSSTSGYSVFMGENLISWRSKKQKIVARFSAEAECRVMAAAASEITWLRQLLQQIXIWRRXHTKLLCDNEAALHIASNPVFHEWTKHRLIVTLCXEKVLLGEIATKFVSSKDQRADMLRKFLKGSCVNDICNKLGSYDICSSLRGSVKYTFRI

SEQ ID NO: 195226 - protein, 86 aa, Glycine max
  Clone ID: PAT_MRT3847_18316C.1.pep
MASPTHATCVSFPFLSQDDEAVLMRRVQGPRPVPAHLPSPKKFLASCLVGEEEPWAESDIIPCQLQALLSKATWEHSRVTKPEHRG

SEQ ID NO: 195227 - protein, 107 aa, Glycine max
  unsure (1)..(107): unsure at all Xaa locations
  Clone ID: PAT_MRT3847_18317C.1.pep
DYLKVKKGRTNMLRRVEPYVEXNXPTXXSVRELIXKRGYXELNKQRIPLSNNRVIEEGLGKXNIICIEDLVHEIMTVGPHVKEANNFLWPFKLKAPLGGLKKKRNHT

SEQ ID NO: 195228 - protein, 106 aa, Glycine max
  unsure (1)..(106): unsure at all Xaa locations
  Clone ID: PAT_MRT3847_18318C.1.pep
NLPMGVGATMKLSSWASRKAPLMQCPVLLSSTTRSSQRETLRSRQRNRLARGGARLTGEGTYVTAHTPSVCAPPPLVCPLSRTSERMRHVSVPGPPASVEPXIRDR

SEQ ID NO: 195229 - protein, 36 aa, Glycine max
  Clone ID: PAT_MRT3847_18319C.1.pep
WFIHNQATDLIPDLYINNRFSPDTDLWRTILIVTVL

SEQ ID NO: 195230 - protein, 149 aa, Glycine max
  unsure (1)..(149): unsure at all Xaa locations
  Clone ID: PAT_MRT3847_1831C.1.pep
YSWGLTFVDSKRQSSLAGHNFTITGGVDTTRATVQFIMLADGDFXKRNFTRRSNVLAVAPEDMAGXWAQLHSVWCINVERQEAYLENLGEVLRELYLHSPXEARQLRWKALCRIEWLQKADVPTIAQIEEFHSMQKMMNAPESNDNIDL

SEQ ID NO: 195231 - protein, 103 aa, Glycine max
  Clone ID: PAT_MRT3847_18320C.1.pep
RVPLLGSPLEISMRFSFGERLPCNHQLSRTWTNRSADRGPSKASLGPGLALFSEGNMMKAVAYLELATSAGEKGADHVKNTGLHRVLSVSRDHAMHLANSWGA

SEQ ID NO: 195232 - protein, 57 aa, Glycine max
  Clone ID: PAT_MRT3847_18321C.1.pep
KTFFCPTKIFSNNFCNPPPFTKFKNIFAGKNFPLTFFFFHKALDFILQILKKRPLSF

SEQ ID NO: 195233 - protein, 99 aa, Glycine max
  unsure (1)..(99): unsure at all Xaa locations
  Clone ID: PAT_MRT3847_18322C.1.pep
MEGGEIRGQVVGGDWGAKKKVLVVGAIGGTGKRIVGQLLAKGLVVKVGVGAIARAKTPFSFANQFFKMGKADVTEGFVKLVEAMGDDXKAVVWATGFRP

SEQ ID NO: 195234 - protein, 68 aa, Glycine max
  Clone ID: PAT_MRT3847_18323C.1.pep
HQSSHTHTSPTHIITYSYFFIYNSTLFFSSYQSNKKFPLYHSSKQTLLFKLHNVKSSYLYQKIQTTHI

SEQ ID NO: 195235 - protein, 92 aa, Glycine max
  Clone ID: PAT_MRT3847_18324C.1.pep
VYDCLWDTDRQNRGRLRRRCPSKPRAGGEPDHIATEPSLSWSKSITTSRWDMSTSVYGKKTGATAATGQITSPNSTICGMNPNIISLASCQM

SEQ ID NO: 195236 - protein, 90 aa, Glycine max
  Clone ID: PAT_MRT3847_18325C.1.pep
FGSSFFWRFERTFNSVDSFAEIVDERKMPVHEPYPSAVLDEQVHQMLHNSRAELDAPSAASSLQGVGKSPNTIPPPVTLFPISSLIYVCA

SEQ ID NO: 195237 - protein, 92 aa, Glycine max
  unsure (1)..(92): unsure at all Xaa locations
  Clone ID: PAT_MRT3847_18326C.1.pep
MTTTKQFEVAFLFMPTETYKNPEVYLMRXGAPNHVVSNSTFXYYLSFLKKVKRTTGXIFYVHQIFEKNPNHVKNFGIXLRYYSLNGTHNMFK

SEQ ID NO: 195238 - protein, 392 aa, Glycine max
  Clone ID: PAT_MRT3847_18327C.1.pep
MSSVCAKQHKFYPSHQLLSPKKTLREIDIPPRKLLTRRAAACVGGTDVYSSEETMLQKFLPSNDSDEDDPYSSDHFRMFEFKVRRCTRSRSHDWTDCPFAHPGEKARRRDPRRYHYSGTVCPEYPRGGCSRGDACEYAHGVFECWLHPSRYRTEACKDGRNCKRKVCFFAHTPRQLRIFPSATSSPSSNDMPCKKNLNKLLNHASKSNNNNNNNCCLFCHCGASSSVSPTSTLFGMSHFSPPVSPSSSSSPPPSPLKPRSVVSPISPISRYSAVNMNPHHGVVSYKDMFAELVNSLEGLSFNEGSPVSGAKAPNFPWLDVSLEEQQQQQNPFIVSSFGCEDKQNQFIFSPPSIQTPTNGKFCRNRFMGNDNKVVGGADVNGPDLAWVNELLM

SEQ ID NO: 195239 - protein, 180 aa, Glycine max
  Clone ID: PAT_MRT3847_18328C.1.pep
MFSESGSSSFCFMGVSSNSKVFLSDKDLKGVINNMDPLVHKEGCQTLIQEDHQLIRLKQLSVQQEKEEEEEKQQRNSNIILTTKPVGPINLKLEIPSSSYVGSENDDDGLKTPTSSDHKIPVILECPCAPKKTKSKPAGTKRKSCRPRIVLDLYNDLESLFPVPYGVDLGGGVMNKRVKQ

SEQ ID NO: 195240 - protein, 598 aa, Glycine max
  Clone ID: PAT_MRT3847_18329C.1.pep
MGKKQNEIQKTGLGRALVKQHNQMIQQSKDKSRFYRKKFLESFTEVSDIDAVVEQSLEPLPELAAAASTTLISLEPGSVPDETTTPEEARKQQKQEEALHASSLRVPRRPPWTPDMSADELNASETQAFLTWRRSLARLEENKKLVLTPFEKNLDIWRQLWRVVERSDLLVMVVDSRDPLFYRCPDLEAYAREVDEHKRTLLLVNKADLLPVSIREKWAEYFRAHDILFIFWSAKAATAALEGKKLGSSWEDDNMGRTNSPDTKIYGRDELLATCETATEEIVDRRRNSGSSDAGPSNIKSPAENTAGSSSSSNVIVGFVGYPNVGKSSTINALVGQKRTGVTSTPGKTKHFQTLIISDELILCDCPGLVFPSFSSSRYEMIACGVLPIDRMTEHRESVQVVADRVPRHVIEEIYKIRLPKPKSYESQSRPPLASELLRAYCTSRGYVASSGLPDETRAARQMLKDYIDGKLPHYQMPPGASDEEQALEEPAGHDSVDLDASDSSAIEDSSDVESELAPNLEHVLVDLNSFDMANGLAPKNTTTVKKLKASHKHHHKKPQRKKDRSWRAGKAGNEDADGMPVARFFQKPANTGPLKVG

SEQ ID NO: 195241 - protein, 422 aa, Glycine max
  Clone ID: PAT_MRT3847_1832C.1.pep
MVRGLLNKLVSRSLSVAGKWQHNQLRRLNIHEYQGAELMSKHGVNVPRGVAVSSVEEARKVIKDLFPNENELVVKSQILAGGRGLGTFKSGLKGGVHIVKTDQVEDIAGKMLGQILVTKQTGPQGKIVSKVYLCEKLSLVNEMYFAITLDRTSAGPIIIACSKGGTSIEDLAEKFPDMIIKVPVDVFEGITDEGAAKVVDGLALKVADRNKSIEQVKNLYKLFVDCDCTLLEINPIAETADNQLVAADAKLNFDDNAAYRQKEIFSLRDTTQEDPREVTAAKADLNYIGLDGEIGCMVNGAGLAMATMDIIKLHGGTPANFLDVGGNASENQVVEAFKILTADDKVKAILVNIFGGIMKCDVIASGIVNAAKEVALKVPVVVRLEGTNVDQGKRILKESGMALITAEDLDDAAQKAVKAAYK

SEQ ID NO: 195242 - protein, 116 aa, Glycine max
  Clone ID: PAT_MRT3847_18330C.1.pep
QHFQSIDKNKKSSLGTQYFPKHFFSLSQDELPLTSSISAMPHKQTLFIVSLVLTTYIWVFNTSCCAKTRKYGLTQPSEDLYLLVSERILQLASHQHPRFLLFLLSKNDLFSSVAFY

SEQ ID NO: 195243 - protein, 120 aa, Glycine max
  unsure (1)..(120): unsure at all Xaa locations
  Clone ID: PAT_MRT3847_18331C.1.pep
MVKSNENGAVYAYVPTDLKTCYELVGERATDSIIPWSDGGDXLLFYDITHLYDTLLPTYCRHNSFSSFVRQLSIYGSRRIESDCYXLARENIVRCQKHMMKTIRRKTHSHNTDQQKALPL

SEQ ID NO: 195244 - protein, 70 aa, Glycine max
  Clone ID: PAT_MRT3847_18332C.1.pep
GVVVIWMGALVREIIYFLDLILRNEKRILLKKDKVAQGEEPSMLKAHKRRPFRGWVTHQGRNIERGRNQK

SEQ ID NO: 195245 - protein, 224 aa, Glycine max
  Clone ID: PAT_MRT3847_18333C.1.pep
TRESGGGADVESSGECIVEENLAPDEGAVVLGNEGPAQERRLVALQLSADHSTSIEEEVVRIKNEHPDDNRCIVNDRVKGRLKVTRAFGAGFLKQPKWNDVVLEMFRNEYIGTAPYISCCPSLRHHRLCPRDQFLILSSDGLYQYLSNQEVVSEVESFVEKFPDGDPAQHLIEELLLRAAKKAGMDFHELLDIPQGDRRKYHDDVTVMVVSLEGRIWKSSGKYP

SEQ ID NO: 195246 - protein, 72 aa, Glycine max
  Clone ID: PAT_MRT3847_18334C.1.pep
CIHLIYDRKIDLDIISSLIIIWGFSLRWSTSGGSHVLLHMQLKIAQNILDEWENRTLIQTKPHSPSVVFSQP

SEQ ID NO: 195247 - protein, 55 aa, Glycine max
  Clone ID: PAT_MRT3847_18335C.1.pep
LDQSLKSIKVTFRKKESRSKKDNLNLHSYCHLSPYEVYENKLTIGNYETDIYLCT

SEQ ID NO: 195248 - protein, 64 aa, Glycine max
  Clone ID: PAT_MRT3847_18336C.1.pep
ITHYTLIPILSITHTTTHISHNYKLTTIYHHIPRSLSYHHYPTQPYTFSYLLHKFYHLIQFTNY

SEQ ID NO: 195249 - protein, 61 aa, Glycine max
  unsure (1)..(61): unsure at all Xaa locations
  Clone ID: PAT_MRT3847_18337C.1.pep
KSNSAKTYPTKEATDYRCNTXKDNLIRASLLAKLDPYAVHVVTKFLYLTPSVFRRQILGLK

SEQ ID NO: 195250 - protein, 82 aa, Glycine max
  Clone ID: PAT_MRT3847_18338C.1.pep
MKNGTAFAGIASINAHPQCSNCLDMKNGTAQKEPRASFISELVIDHSATGGVKREQECVMCLSEEMSVLFMPCAHQVVCKTC

SEQ ID NO: 195251 - protein, 75 aa, Glycine max
  Clone ID: PAT_MRT3847_18339C.1.pep
ACDLKESVRKFIPERNGKELEKGTFSRGRKQNVLVRKAKIVKAPKVDLGILKEVHGDYSQYVGAREGKPSDGIGA

SEQ ID NO: 195252 - protein, 97 aa, Glycine max
  Clone ID: PAT_MRT3847_1833C.1.pep
MHCFACCLYTGHLLRILSMYTPPCCSHSQPHIYCVCILVQPPTGHTTSVVFSQLPLFSYAHEPCGSISRGSISPAKYCNLVKNKRFHSLPPRFQPDA

SEQ ID NO: 195253 - protein, 85 aa, Glycine max
  Clone ID: PAT_MRT3847_18340C.1.pep
TFRLHCSQERSLAPPSVTSVGQDESIGRIEIRNDHVLRNNSPVLQQNGLPPLVSALKASAEQNVASFHFPGHNRGRAAPASLTRL

SEQ ID NO: 195254 - protein, 51 aa, Glycine max
  Clone ID: PAT_MRT3847_18341C.1.pep
YFLDADKLLPLQSSFTDVYPCHQCSISISRHLYHYLMQSDILMFDNSMSIK

SEQ ID NO: 195255 - protein, 45 aa, Glycine max
  Clone ID: PAT_MRT3847_18342C.1.pep
VVTKYFIDCCFSSHKSQLIFEIHKVLEFLSNTQSSCTVSLNVFFV

SEQ ID NO: 195256 - protein, 118 aa, Glycine max
  unsure (1)..(118): unsure at all Xaa locations
  Clone ID: PAT_MRT3847_18343C.1.pep
HSSFFPKDVNTAVDPIKTNRTIQKVDXRPTGFKCGINYQAPSQVPVDDLATVQRALFMISNSTRVAEVFCRIYHKSDLMYATRAFVHXNVGEGTEEHEFYAARKDLTALENDYEKLGA

SEQ ID NO: 195257 - protein, 188 aa, Glycine max
  unsure (1)..(188): unsure at all Xaa locations
  Clone ID: PAT_MRT3847_18344C.1.pep
ARVARARRRGRGREAVPIQLPAGESPVGDARVQCHSEQLRLLGVYETQLGIYEASKMGRVXEWGPQDVLCAPISYAAYSCDSXQLIYATFCEXNIGVFEADXLRRXCXIAPSICLXPAGLRGRQGVCPLVGAWHPLEPNQVAGXLTDGSGKVRXPNEAXGKWGACPPTDNGILRWXTGSSSTTSDHTA

SEQ ID NO: 195258 - protein, 50 aa, Glycine max
  unsure (1)..(50): unsure at all Xaa locations
  Clone ID: PAT_MRT3847_18345C.1.pep
IEQVHCSGREKTVVXVTYCKRGPRLIKIIRCPIEFVEPDILRFKASLPIL

SEQ ID NO: 195259 - protein, 51 aa, Glycine max
  Clone ID: PAT_MRT3847_18346C.1.pep
KKNCEVLQQQRTNSNRLEHDKITSIYKLNSYPRENFWRLSLIGAKILILPK

SEQ ID NO: 195260 - protein, 123 aa, Glycine max
  unsure (1)..(123): unsure at all Xaa locations
  Clone ID: PAT_MRT3847_18347C.1.pep
ETYLLLPFSRRNGEKGKRRFVSGDGEEMTXIPGTSVEEAHNKLIVDLEKSVPTLAGIERPTDEKLPRRIIVDKPKTRCFTILPMEFNLVGRQKKIRSERCIMKKRDMLSCRVGSKPYSMEWTG

SEQ ID NO: 195261 - protein, 82 aa, Glycine max
  Clone ID: PAT_MRT3847_18348C.1.pep
SFLVAARLAARGVGPATVAAMPMKGRFPIRRTLQYLSQGNVVFKDSVKVMTSNYNTHGELGEGARKFVFFKIPQIQYKNPWV

SEQ ID NO: 195262 - protein, 133 aa, Glycine max
  unsure (1)..(133): unsure at all Xaa locations
  Clone ID: PAT_MRT3847_18349C.1.pep
MAPTLTCNSFNHSMAVFSKTHFSIPMLKELSLDTSPCVSHGSRTTKQRNTLMPIKASVAEVPPAEGDGASQKKKLRVLVAGGGIGGLXVFALAAKRKGLKXVVFEKDMSAIRGRGSLGGSIQIQSNALAALEL

SEQ ID NO: 195263 - protein, 39 aa, Glycine max
  unsure (1)..(39): unsure at all Xaa locations
  Clone ID: PAT_MRT3847_1834C.1.pep
PIHTRIYCREIRXLIWKHGSGRRRSLINGGHCEHRVIVV

SEQ ID NO: 195264 - protein, 78 aa, Glycine max
  Clone ID: PAT_MRT3847_18350C.1.pep
VHIIDPLLHQKVATGMLDRNGACSIHTRPIVSTSRIIITTYCPLSLRQQTPFLLKRLYTPHLGRYYSPRQDTSTFNSK

SEQ ID NO: 195265 - protein, 62 aa, Glycine max
  Clone ID: PAT_MRT3847_18351C.1.pep
CTTCPANCHVLQGFTAGGFIYIAVAGVLPQMNDQKTTLKSSVAQLIPLAMGMLVALGISLVE

SEQ ID NO: 195266 - protein, 124 aa, Glycine max
  unsure (1)..(124): unsure at all Xaa locations
  Clone ID: PAT_MRT3847_18352C.1.pep
LLMLSLDDAETXKGSMXDLRISNLNCLTRTQGRTILRSDLLXNSLTXGKSRASVDLQRTHRIKGMIKMVAPVGITENTGIALACAMNKTFRGRASSDIYTIXSHDCELWNPACXRTLTMSFNPN

SEQ ID NO: 195267 - protein, 74 aa, Glycine max
  Clone ID: PAT_MRT3847_18353C.1.pep
WLEVELGKFFPDGQKAKELEMGVYKIKNGDWKGGLFFQGIEIRPKRTPLNLSKGKCFLSRFFFFFFFSKGFFLR

SEQ ID NO: 195268 - protein, 358 aa, Glycine max
  unsure (1)..(358): unsure at all Xaa locations
  Clone ID: PAT_MRT3847_18354C.1.pep
GRVGGRVGRDAPSLDLVNWLSNRPEWKIMNGRDHFLVAGRITWDFQTLTEGESDWGNKLLYLPAKTNMSNLVFESSSRNANDFGIPYPTYFHPAKDDDVFTXQERMRRPREEVVDYRGXADSSDGRKSKRGGGHELDPKIGVRRSSDPNLRVSRMHLMXSVQAVIDKVTNLRKDIMEGRTXRTSLRRTVASTRCWMRDSARSGPHEWDPFFSKPTPGGVSVQVEAVRKRNVSIEERLSQIPEEEVRIMREEVIGLIPRLVYADPRSKLETLEDAFDVSVQAVIDKVTNLRKDIMEGRTDENFIEENSWKYALLDEGQREVGPHEWDPFFSKPKPGGDSDDLSAEAAKNSWKNEQRNQS

SEQ ID NO: 195269 - protein, 65 aa, Glycine max
  Clone ID: PAT_MRT3847_18355C.1.pep
LAPTPKLCFTNHDVSFFIKGWVGRPLTCELINSVLKSVPWLICCICSSYKEHALIFIIVFSTIFP

SEQ ID NO: 195270 - protein, 67 aa, Glycine max
  Clone ID: PAT_MRT3847_18356C.1.pep
FVQLGNFLVRHTVICTSQYGNVVGNGNKLVFHKSVAIVVESVVRVPVNYEKGIFSVVKDRGVNDLAQ

SEQ ID NO: 195271 - protein, 125 aa, Glycine max
  Clone ID: PAT_MRT3847_18357C.1.pep
DQTGKVKMRHRGDAEPPSQPQSSPSNSLPHRKKNRKRRATTSVSSETSYPNGPDQLNTHIHHATVVCQDKPKPEESKSAVVGEGFRFGELRQRSVNGRDSFGESAVTARGDGYVTEGKSVATATS

SEQ ID NO: 195272 - protein, 51 aa, Glycine max
  unsure (1)..(51): unsure at all Xaa locations
  Clone ID: PAT_MRT3847_18358C.1.pep
MGKTXPTXSXXXQKXXXXAKKMLXGFIAEKRCAPLXLXLAWHXXGTXDKXT

SEQ ID NO: 195273 - protein, 39 aa, Glycine max
  Clone ID: PAT_MRT3847_18359C.1.pep
TPMAAGEFENLKLLPSKQKTFFIKNKQQRKCYRRSRTQF

SEQ ID NO: 195274 - protein, 98 aa, Glycine max
  Clone ID: PAT_MRT3847_1835C.1.pep
GGFGFPNPVEVIGLLFLGESGKSQAPQKGGGENWKCPFWSLFNRGLPFPPPLYRLNFLRKPGIFSPLVFFIPGGMVKKGPWFRALPRGVAFKVEFLTF

SEQ ID NO: 195275 - protein, 54 aa, Glycine max
  Clone ID: PAT_MRT3847_18360C.1.pep
VIYFVFVVQLLFISRAFFLDFILFFVSLIILSIKSIGICIHSRGAAKIEAPPTR

SEQ ID NO: 195276 - protein, 86 aa, Glycine max
  Clone ID: PAT_MRT3847_18361C.1.pep
KNGITNTRMYFYNYLYTKRTVVDSTSHNKGLFLASNKVRHKEDRPSLKTFSSIRNIYFSLLLMNEINSTKISNIQTYFLFDNSANK

SEQ ID NO: 195277 - protein, 60 aa, Glycine max
  unsure (1)..(60): unsure at all Xaa locations
  Clone ID: PAT_MRT3847_18362C.1.pep
KRLWLFSPGCEAVTFENSVANDLLARDEAFFFIPFSSXESQXHHDPGPQPQSSHTSSLSL

SEQ ID NO: 195278 - protein, 42 aa, Glycine max
  Clone ID: PAT_MRT3847_18363C.1.pep
NARFCPEHFTFGLVALDLSAQSQFYSFRMSYQAPPSPIVVLK

SEQ ID NO: 195279 - protein, 111 aa, Glycine max
  Clone ID: PAT_MRT3847_18364C.1.pep
MSFYIGREAFKLWKRFYAETTTELNLLAENWKYLLAGIAFQYIHGLAARGVHYLHRPGPTLQDLGFILLPELGQEKAYISETLFTFIFLSFVLWTFHPFIFKSKKIYTALI

SEQ ID NO: 195280 - protein, 77 aa, Glycine max
  unsure (1)..(77): unsure at all Xaa locations
  Clone ID: PAT_MRT3847_18365C.1.pep
KXYLWTKKKDLYLXHKNRLVHLXXXNYFXVRXLNMAFFKPVNRXTXHSFXNXXEXYFXSYKIPXYXXILXKTFXXYE

SEQ ID NO: 195281 - protein, 337 aa, Glycine max
  Clone ID: PAT_MRT3847_18366C.1.pep
MGVPERDPLAQLSLPPGFRFYPTDEELLVQYLCRKVAGHHFSLPIIAEVDLYKFDPWVLPGKAVFGEKEWYFFSPRDRKYPNGSRPNRVAGSGYWKATGTDKIITTEGRKVGIKKALVFYIGKAPKGSKTNWIMHEYRLLDSSRKHNLGTAKLDDWVLCRIYKKNSSSQKVEANFLAMECSNGSSPSSSSHVDDMLGSLPEINDRCFTLPRVNSLRTMHQQDEKFGSPNMGSGFFSDWVNSTDLDSISEFESGCQTQRMVNYDCNDFFVPSLPPLGHVDYMVDAPLEEEVQSGVRTRRVDGPGHFQPNPDTRLLPGSGDPFGFGFIMGQQVGFGVRE

SEQ ID NO: 195282 - protein, 55 aa, Glycine max
  Clone ID: PAT_MRT3847_18367C.1.pep
SCIAGAPGCVRPLVRFITPPIYPLFEPLEDNKAGSFRNNNIKKLLLTGVAASFFV

SEQ ID NO: 195283 - protein, 340 aa, Glycine max
  Clone ID: PAT_MRT3847_18368C.1.pep
MGVPERDPLAQLSLPPGFRFYPTDEELLVQYLCRKVAGHHFSLPIIAEVDLYKFDPWVLPGKAAFGEKEWYFFSPRDRKYPNGSRPNRVAGSGYWKATGTDKIITTEGRKVGIKKALVFYVGKAPKGSKTNWIMHEYRLLDSSRKHNLGTAKLDDWVLCRIYKKNSSAQKVEANLLAMECSNGSSPSSSSHVDDMLESLPEIDDRCFTLPRVNSVRTMQQQDEKFGFQNMGSGFFTDWVNPTDLDSVSEFGSGCQTQGMVNYDCNDLFVPSVPPFGHSHVNYMVGAPPSEEEVQSGVRTQQADGAACFQQNPNARLLPGSGDPFGFGFIMGQQVEFGFRD

SEQ ID NO: 195284 - protein, 52 aa, Glycine max
  Clone ID: PAT_MRT3847_18369C.1.pep
YKITQILCGKTGWGEHCVSDGRKPCGKGMLIRRRQMGSRGIFIDQPKGEHVY

SEQ ID NO: 195285 - protein, 103 aa, Glycine max
  unsure (1)..(103): unsure at all Xaa locations
  Clone ID: PAT_MRT3847_1836C.1.pep
VSKEFVEKTVVLHRQDIKGCCDMRVRLCITDTLYRLGHGHYTSDXTNSTHHSSNRRREVDCQEKKALAXHRYAMLPDVDPGTSPIARTVAQLRFHKPMELTQH

SEQ ID NO: 195286 - protein, 69 aa, Glycine max
  Clone ID: PAT_MRT3847_18370C.1.pep
QNPTLIHRWGRRWIESDCHRSCRRRFPSRKVKFSKMTCNELRRTAPMSSCFSAWTPDHSPSMLRRLLMP

SEQ ID NO: 195287 - protein, 40 aa, Glycine max
  Clone ID: PAT_MRT3847_18371C.1.pep
LFMYSLSNYLFFITPSPLNSFCFYSIAGLALILLNILKPH

SEQ ID NO: 195288 - protein, 47 aa, Glycine max
  Clone ID: PAT_MRT3847_18372C.1.pep
NLPRSLEGAVMPVHIAVEGNILLIPFERDPEGRVHRLFSPQEKTHAS

SEQ ID NO: 195289 - protein, 186 aa, Glycine max
  Clone ID: PAT_MRT3847_18373C.1.pep
MGSKTEEVVDYTLMEGAVEKEGQHCWSIRREVKAVGELAFPIALTALIFYARSMVSMLFLGHLGELELAAGSLGMAFANITGYSVLSGLALGMEPLCSQAFGAKRVNVLSLTLHRCVMFLLLCSIPISLLWLNMSNILVDLLHQDPNITLMAHTYLLFSLPDLLTHSFLHPIRIYLRAQGVTHPVT

SEQ ID NO: 195290 - protein, 292 aa, Glycine max
  Clone ID: PAT_MRT3847_18374C.1.pep
MKIQCNVCEAAEAKVLCCADEAALCWECDEKVHAANKLASKHQRVPLSLSASHMPKCDICQEMVGYFFCLEDRALLCRNCDVSIHTANACVSDHQRFLLTGVRVGLEATERGASSSSVKSQSGEKMSDAKSSSISRNVSSLPQPSNANEVLPLQMQGVEEFPPSNFSGYTSGNVSQWPIEEFLGLNELSQYYNYMDGSSKADSGKLGDSDSSVLRSGEEDMDDDGFLGRVPDSSWTVPQIPSPPTASGLYWPKVPQYTSDSAMSVPDICFSHVRQPHHAQHNSNVSKRRRQL

SEQ ID NO: 195291 - protein, 66 aa, Glycine max
  unsure (1)..(66): unsure at all Xaa locations
  Clone ID: PAT_MRT3847_18375C.1.pep
TSKARVRSRQIMNVVTFNKALVNLADHXINFXAFXHKLVQFGEIQEKASKLMVSSAKFPNAMKKET

SEQ ID NO: 195292 - protein, 79 aa, Glycine max
  unsure (1)..(79): unsure at all Xaa locations
  Clone ID: PAT_MRT3847_18376C.1.pep
PXGGHTRSPFPYIFFSSSXKNRARSFYKSQSYNTLKSRSILPIEYIHPSTSARPCQCQTIYTKHYTLHYIRSHSRTPTQ

SEQ ID NO: 195293 - protein, 141 aa, Glycine max
  unsure (1)..(141): unsure at all Xaa locations
  Clone ID: PAT_MRT3847_18377C.1.pep
SKIALPKNTGGGTILRSELXANILTEGNSRACVDLQGTHRIKGMIKMVATDGIAENTGIALDCAMNSFYRGRASSCMYTMXILDCEXWNSVSSKAMTMXFNPNPCADAWRLEFVEAXTGFYCDIICATGWTAXPLQDVYVT

SEQ ID NO: 195294 - protein, 482 aa, Glycine max
  unsure (1)..(482): unsure at all Xaa locations
  Clone ID: PAT_MRT3847_18378C.1.pep
MGIVRGVLLDESVLLAESGDDKTVSLLRPGAESLIRTLFLSRTHSGISYGVGLPDDKASVLQKIASLYSLDCFILNDSVSEVMPGWSNTDDGSIIIYLISDKKEFLPKLSSYNWLVVVLNVGGESLCHNPNILQIENLEEFPLTICHLNKRSIGTNAVTVSYTMKPSRVEDFAKRGAFPLCPTQNGLMFVPLASKLPLSSQLKGVDIVLHKATDEILSIEDNNITFTQNIQALQRYLDQHQDFCVIDPLSNVYPLLDRLEIQQVLLGSVELNTEGKYLIXRGPIFLRLITFDEFDFATGLAEARLSLPCIVKPKVACGVSDAHKMTIVFKVDDFKNLSVPLPAVIQEYVDHSSTLYKFYVLGEKIFYAVKKSIPNADILRKSSNGDELKPLLFDSLKSMPTADSITSNEPIDLKLVTDAANWLRRRLQLTIFGFDVVIQEGTHDHVIVDVNYLPSFKEVPDDISIPAFWDAIRNKFDSRVSK

SEQ ID NO: 195295 - protein, 63 aa, Glycine max
  Clone ID: PAT_MRT3847_18379C.1.pep
KKNKKNKLKNLKKKKKKKEKKRKIGGPLSRLPEYIIGRATSCILFIVPYIQNSCPLAFQSSKL

SEQ ID NO: 195296 - protein, 159 aa, Glycine max
  Clone ID: PAT_MRT3847_1837C.1.pep
MASVVKNVLKSVREKGFGAFLRELKDEGYLRCLPDGNLLQTKIHNIGATLVGVDKFGNKYYEKLGDTQYGRHRWIEYAEKTRYNASQVPAEWHGWLHFITDHTGDELLLLKPKRYGVEHKENLSGEGEQYIYHSKGHALNPGQRNWTRYQPSHASGRRS

SEQ ID NO: 195297 - protein, 233 aa, Glycine max
  Clone ID: PAT_MRT3847_18380C.1.pep
MTGVVMVTKGGGCGGGGKRTRSARTAEEEEEQQNQLSLVALLLAAIRKSMVSCRVDPPEDVISTVHHMEIGWPTNVQHITHVTFDRFNGFLGLPYEFQVEIPARVPSASVSVFGVSAESMQCSYDPKGNSVPTILLLMQDRLYSQGGLKAEGIFRINPENSQEEHVRDQLNRGIVPDDIDVHCLAGLIKAWFRELPSGVLDGLSPEQVLQCNTEEESVELVKQLKPPESGLLS

SEQ ID NO: 195298 - protein, 92 aa, Glycine max
  unsure (1)..(92): unsure at all Xaa locations
  Clone ID: PAT_MRT3847_18381C.1.pep
MLSFIRSLKGMAQVFKQPXIDVTFAPXXXXPSCSKRLHHMVWCLLCVKAIPDEDXEFTKLLIGYQDMIGLLNVHIFARFYTQGPVILEATTL

SEQ ID NO: 195299 - protein, 98 aa, Glycine max
  unsure (1)..(98): unsure at all Xaa locations
  Clone ID: PAT_MRT3847_18382C.1.pep
MAVGENIQPLICDNATXMAKARFAINYAPRAVFSNIVCHPHHTLVIVDMHQKNAYVCDYAQSNKGIFTFKYPIXHLIVINRYDMKNIWPYTFYNELHF

SEQ ID NO: 195300 - protein, 355 aa, Glycine max
  unsure (1)..(355): unsure at all Xaa locations
  Clone ID: PAT_MRT3847_18383C.1.pep
PRVRLARGKKGRKECFCFRKDDSEVLSDNNVEQYDLVPLDSHVNFDLDELLKASAFVLGKSGIGIMYKVVLEDGLALAVRRLGEGGSQRFKEFQTEVEAIGKLRHPNIATLRAYYWSVDEKLLIYDYVPNGSLATAIHGKAGLATFTPLSWSVRVKIMKGTAKGLVYLHEFSPKKYVHGDLKPGNILLGHSQEPCISDFGLGRLANIAGGSPTLQSNRVAAEKSQERQRSLSTEVTTSILGNGYQAPETLKVVKPSQKWDVYSYGVILLELITGRLPIVQVGNSEMDLVQWIQCCIDEKKPLSDVLDLYLAEDADKEEEIIAVLKIGIACVHSSPRKRPIMRHVXDALDRLSIPS

SEQ ID NO: 195301 - protein, 76 aa, Glycine max
  Clone ID: PAT_MRT3847_18384C.1.pep
DRGQYQKHWHIALPKWKDGYYLSNYFATKTMPINSRTLNCNLNKTQYSGEKLNLLKTGGVPTIDFRKTTYLNYMPG

SEQ ID NO: 195302 - protein, 110 aa, Glycine max
  unsure (1)..(110): unsure at all Xaa locations
  Clone ID: PAT_MRT3847_18385C.1.pep
GFRLCACSVLERLMRPEHVWVIHSPADVETLGKHDYFSIISHPMGLGAVTTRLSKXWLRSPKEFAEDVRLAVRHPLTYNPQGQGVHSMAELLXSIFEVRWAIIAAAPIRR

SEQ ID NO: 195303 - protein, 104 aa, Glycine max
  Clone ID: PAT_MRT3847_18386C.1.pep
SPLNARRVWVWIIWGTATWPISCLPHRVTQITWLRILNQWMLVITVILPIHFLEEMYSELAHFNPSKLFLHKDSLLALQRFLHPWGLYLEETPILLGLGPPILC

SEQ ID NO: 195304 - protein, 96 aa, Glycine max
  unsure (1)..(96): unsure at all Xaa locations
  Clone ID: PAT_MRT3847_18387C.1.pep
ARNSARXXRRRQKGXPXPXHXXXEXSXQXXXXXXXPXIHXCXFXYXPSWXSFTXFAXXISVXXVXXXVXIXLGRXKLXXGXVFGXAXNXXDXGXXN

SEQ ID NO: 195305 - protein, 42 aa, Glycine max
  Clone ID: PAT_MRT3847_18388C.1.pep
LHLCPRSCISIDESALAAPINGARGEARRKQLIGECYNSRQL

SEQ ID NO: 195306 - protein, 88 aa, Glycine max
  Clone ID: PAT_MRT3847_18389C.1.pep
YYLLGPFLSFSPSKARDAVYGNRCHRTLKTLFSHASHEVRGNFLNGIFIYNFTPFRLFSSVLERNAFMWDPRFVDNFLNVFRQYQKKV

SEQ ID NO: 195307 - protein, 76 aa, Glycine max
  Clone ID: PAT_MRT3847_1838C.1.pep
KVYRRCLSHCIVQCVETDKLPQRVLHSCHTQPVEVSNKHAPPMIGVSSDHFCCRIKAFIAVLQRIRKLGLCKFVHC

SEQ ID NO: 195308 - protein, 69 aa, Glycine max
  Clone ID: PAT_MRT3847_18390C.1.pep
PSLADPCITPLPMENNNPSMLWSMDYIASSNEELDLEINLPIITTSSTNINLPLYVKRIPPPQSVNSEP

SEQ ID NO: 195309 - protein, 116 aa, Glycine max
  Clone ID: PAT_MRT3847_18391C.1.pep
PPATPLGFPKPLGNFWKGALLGFGLAFLQPCPQSLGPLKNFGPVWGFHASLAVFGKKSLSFLGNVVKAKSLLKGFSFGELGVGRLPKLGKTFSQNWDSCPPLGGRAVLPTSGLVDF

SEQ ID NO: 195310 - protein, 624 aa, Glycine max
  unsure (1)..(624): unsure at all Xaa locations
  Clone ID: PAT_MRT3847_18392C.1.pep
PASTHASDKSKLLISLRTDIFKGLASLFFDNTKRGKNVFLDWRTSKNNDKDLNEIIPWLEWMLSHTLLRSAENPQQGLDSFWVEQGGALLLSLMQSSQEDVQERAATGLATFVVIDDENASIDCGRAEAVMRDGGIRLLLXLQSWREGLQSEAAKAIANLSVNANVAKAVAEEGGIQILAGLARSMNKLVAEEAAGGLWNLSVGEEHKGAIAEAGGIQALVDLIFKWSSSGDGVLERAAGALANLAADDKCSTEVALAGGVHALVMLARNCKFEGVQEQAARALANLAAHGDSNSNNAAVGQEAGALEALVQLTCSPHEGVRQEAAGALWNLSFDDRNREAIAAAGGVQALVALAQACANASPGLQERAAGALWGLSVSETNSVAIGREGGVAPLIALARSEAEDVHETAAGALWNLAFNASNALRIVEEGGVSALVDLCSSSVSKMARFMSALALAYMFDGRMDEYALVVTSSESISKSVSLDGARRMALKHIEAFVLMFSDLQAFAAAAASSAPAALAQVTEGARIQEAGHLRCSGAEIGRFITMLRNPSSILKACAAFALLQFTIPGGRHAMHHASLMQSLGASRVLRGAAAAATAPLEAKIFARIVLRNLEYHQIEQALA

SEQ ID NO: 195311 - protein, 110 aa, Glycine max
  unsure (1)..(110): unsure at all Xaa locations
  Clone ID: PAT_MRT3847_18393C.1.pep
IMIDGFASSNCNIVGAVPWFHAYLTXTVNAVGSIFEAPIRAGRPIRVVTYPNTIAQIEPDMNPWIQLLSTTTNGDFVXGKDLALAKVNVACAAVGLTLTYTLTPLLEFGV

SEQ ID NO: 195312 - protein, 111 aa, Glycine max
  unsure (1)..(111): unsure at all Xaa locations
  Clone ID: PAT_MRT3847_18394C.1.pep
VLLTNSNSTYHYDACQLTGSXPHSXESIFPIXVCCPNNGSEMRISEWSKXTSWHLXSFLIDNPKQYTDYDILLRISHDFXIADNTLMPAISVSHATARSSENATILCMICT

SEQ ID NO: 195313 - protein, 72 aa, Glycine max
  Clone ID: PAT_MRT3847_18395C.1.pep
QPPSYRAQRPIRGKRDYDNDNDNKKHRHGTYHPPQQRSRPERPDPCGTRCTPTTWAEEKVRAMRRTEIVSHR

SEQ ID NO: 195314 - protein, 421 aa, Glycine max
  Clone ID: PAT_MRT3847_18396C.1.pep
MVSLCSFTSFACDNLSLSLSQSLKPSSLPLIHSFTLPRNTIRKKNGASVRPLFCALNNNNNNTALQYRTLGDSDLNISEITLGTMTFGEQNTEKEAHDILNYAFDRGINALDTAEAYPIPMKKETQGSTDLYIGSWLKSQPRDKIILATKVCGYSERSSYLRENANVLRVDAANIKESVEKSLKRLDTDYIDLLQIHWPDRYVALFGEFSYDYSKWRSSVPFVEQLQAFQELINEGKVRYIGVSNETSYGVMEFVHASKVEGLPKIVSIQNSYSLLVRCRFEVDLVEVCHPKNCNIGLLAYSPLGGGSLTGKYIDINSEAAKSGRLNLFPGYMERYNKSVAREATIKYLELAKKHGLTPVQLALGFARDRPFMTSSIIGATSVDQLKEDIDAFTTTERPLPAEVMADIEAIFKRYKDPAIL

SEQ ID NO: 195315 - protein, 108 aa, Glycine max
  unsure (1)..(108): unsure at all Xaa locations
  Clone ID: PAT_MRT3847_18397C.1.pep
TGGGGSGDAAXXVVGGGAAASXXGAXEXGANGGGGXSNSGDDRXEEGDXXXVGNRWPRQETLXLLKIRSDMDVALETQXKGSLXEEVLGTGRLGYHXNSRSQRERTLQ

SEQ ID NO: 195316 - protein, 89 aa, Glycine max
  unsure (1)..(89): unsure at all Xaa locations
  Clone ID: PAT_MRT3847_18398C.1.pep
DTATRENLLTTPTDNKLWQRXLKHYNRCKVGAVDECWPCYKGQPGPIYATPDHATICDLLWTPKGLGGDHEDAYMPHDITGDGPEKNTA

SEQ ID NO: 195317 - protein, 81 aa, Glycine max
  unsure (1)..(81): unsure at all Xaa locations
  Clone ID: PAT_MRT3847_18399C.1.pep
LILSSHYKIKQKQTINEGDWAVEETLVASSKQRKKRKEKTTQKVVVSDFTPKTKEXTMLGRMTVEEQRDKERGIVLLPSKN

SEQ ID NO: 195318 - protein, 49 aa, Glycine max
  Clone ID: PAT_MRT3847_1839C.1.pep
APALNPPVPLSTADFCNSHIVWASAFHLRIVQSMVLVPRYNYFGRVTHC

SEQ ID NO: 195319 - protein, 59 aa, Glycine max
  Clone ID: PAT_MRT3847_183C.1.pep
VPVRLVGRLRGPPRAVGGPFCAPAFVRPEGSRLVSSVGWCPGLRLPMCAPLCRLLAGGQ

SEQ ID NO: 195320 - protein, 77 aa, Glycine max
  Clone ID: PAT_MRT3847_18400C.1.pep
VRTRGGGSAGSEANVKGWGSMACGKRGGRGGGGHYGGGQNRGGKGGNGQGGGMTGGDRQGWARGSGGVDEAGQRKGA

SEQ ID NO: 195321 - protein, 52 aa, Glycine max
  Clone ID: PAT_MRT3847_18401C.1.pep
FYKTEKTFIPVRNILTLIDLLPYHRTTTTQNLITIPPMGRSSPLLTLPPMGN

SEQ ID NO: 195322 - protein, 77 aa, Glycine max
  Clone ID: PAT_MRT3847_18402C.1.pep
PLDYSVDTPYLYDYYKFCQNNAPDIGGENSKLLAFEVQTWDGNTTFICNFTDLTSSYHTIIDTNSGWNYPRGAAGET

SEQ ID NO: 195323 - protein, 103 aa, Glycine max
  Clone ID: PAT_MRT3847_18403C.1.pep
KCACCIVIQNLGTSGICHFFVEKIQLAKWGDKFQLPEHKNGVYFIWVGFIYIFDLLAPSSAVCLSLGKSVFFRREVSRDDKGLCYLQRESFDLLEVIALFLEP

SEQ ID NO: 195324 - protein, 75 aa, Glycine max
  Clone ID: PAT_MRT3847_18404C.1.pep
DSRKRCDMSVGKWDYDDADPIYDSEGGYLTYADTCQKNGRPDSDYEKWKGMPCWLTMPRFNALWFLGRMRRKRIL

SEQ ID NO: 195325 - protein, 136 aa, Glycine max
  Clone ID: PAT_MRT3847_18405C.1.pep
SGPQLLPENQFSKKGAKKRLEVKRGKKGWGEKRPPAKKPPKKRGGDRKPQRGGEQKRGGKHKKGGGQKEKLPGQKPKRTAQLKKRGTRGEGRQGDRPPKRGDGQPGRGPKRKAPKQPDKEKNPERGKRGKTPKEER

SEQ ID NO: 195326 - protein, 54 aa, Glycine max
  Clone ID: PAT_MRT3847_18406C.1.pep
CSIILKGPFIYTRLSLIPYTTIENTHLLIFQNKLKLSFTNINYFYSLTPYYKST

SEQ ID NO: 195327 - protein, 79 aa, Glycine max
  Clone ID: PAT_MRT3847_18407C.1.pep
MRSMASSASSRGIAAIVGVGPNLGLSIARKFAHEGYTVAILARDLGRLSRFADEIAREEKAQVFAIRIDCSDSRSVREA

SEQ ID NO: 195328 - protein, 96 aa, Glycine max
  Clone ID: PAT_MRT3847_18408C.1.pep
ISILCSSAEVESVQNHNQRESVLGAELWLVSSGHRSIITVKWYLCRLWVRLFQSKCGELVWIQGVDVKKGDSITSHQGTDHAIDLRSVSGLLQKRA

SEQ ID NO: 195329 - protein, 60 aa, Glycine max
  Clone ID: PAT_MRT3847_18409C.1.pep
GRGRALPLFSKSFCTWRIFPRKRVLYEERAHFIENAPTSTYSNELTGADPILLYFTYNNV

SEQ ID NO: 195330 - protein, 130 aa, Glycine max
  Clone ID: PAT_MRT3847_1840C.1.pep
PKTRISMAKIMESSWFKKGLEKPTITQNEDEELAPLDADGVFGACENGDPIEPAKNSKPCNNLNAFDIISYSSGFDLSGLFEETDRKKEERFTSDKPASIIISKLEEICRRLRLKVKKKDGGLFKLEGSK

SEQ ID NO: 195331 - protein, 221 aa, Glycine max
  unsure (1)..(221): unsure at all Xaa locations
  Clone ID: PAT_MRT3847_18410C.1.pep
MVAIMQQQQQQQQQQQNPSALVPFQLKNPQSSTTTTAAATPLRSPSAQSQLSSPLSVVPPLRQSPLSSHPVPVTSVEPALTAVPTCPLVRVRLSDIAPYEGAPAGPYLRAMEALCGSLLRHNAALIELGNEDTALMRCGLEGARLFFRSRAHLGSGKGSRGVXMYRAGRALEDWDSSPPCMADIFKCMGKASRSALSAMARHLRLRSDVFNHLLGDASLAC

SEQ ID NO: 195332 - protein, 36 aa, Glycine max
  Clone ID: PAT_MRT3847_18411C.1.pep
EFMLPPSLVHVYHRQLMAPFLFPFPGFFSKKKVSLQ

SEQ ID NO: 195333 - protein, 42 aa, Glycine max
  Clone ID: PAT_MRT3847_18412C.1.pep
LDLKIIYIINSILKYCGYRNIRNGKITHFKKLNSKSMLCLIV

SEQ ID NO: 195334 - protein, 67 aa, Glycine max
  Clone ID: PAT_MRT3847_18413C.1.pep
VTGTGKAMRRFLFLYNEARKFRKPHIPLAFPSPLAYSTSLNHTHNIGDSKFNLVDVSAQGGTKAEFA

SEQ ID NO: 195335 - protein, 58 aa, Glycine max
  Clone ID: PAT_MRT3847_18414C.1.pep
GLSERREEYIDEDELLNMPNLVDEMARGMQVSPLRITSYSSDDSPGNSDGDNLWSYTL

SEQ ID NO: 195336 - protein, 60 aa, Glycine max
  Clone ID: PAT_MRT3847_18415C.1.pep
KTRLSESYLSLSESMEFWGVEVKSGQSLKVDPVDYKSIHLTNACLGDVTNDKEGLPECPV

SEQ ID NO: 195337 - protein, 94 aa, Glycine max
  unsure (1)..(94): unsure at all Xaa locations
  Clone ID: PAT_MRT3847_18416C.1.pep
AAAEIAKKTHDSINDGVALVMKSATFTLGYETVLESPTNSRGRLIIIANNCPPLRKPESEYYALIANDGAHHYDGNNGEXFTACAKYYGQRCLT

SEQ ID NO: 195338 - protein, 77 aa, Glycine max
  Clone ID: PAT_MRT3847_18417C.1.pep
PPPRGEPGEFSRGTGGGEGNIPRAQDDIGLNPLIDCPGVASCAAPLRGRNIQEQDEEHLGRESGMTQRYPSRDRRLF

SEQ ID NO: 195339 - protein, 88 aa, Glycine max
  unsure (1)..(88): unsure at all Xaa locations
  Clone ID: PAT_MRT3847_18418C.1.pep
MRLMARISLGLRSNDWNPLQLRMWQPPKDFHVATCSDSAANXGRVRTRVDRLETPLAHVAKAGLTVLQKEEGKGQIEDDRGHQNTGER

SEQ ID NO: 195340 - protein, 93 aa, Glycine max
  Clone ID: PAT_MRT3847_18419C.1.pep
FCIQSYQSQISLPEIENLNSSTTFRLDMAVAVLRPARHNPMSDASLLTLCPFRSSLIANQCSFKTVSSVDRSLLPPRRKLRLDPCNYLYSPYE

SEQ ID NO: 195341 - protein, 47 aa, Glycine max
  Clone ID: PAT_MRT3847_1841C.1.pep
KPRGGSLMIQLILYNYQPLYPFTISPFQWIRHHPLQLILPIYLNSGK

SEQ ID NO: 195342 - protein, 98 aa, Glycine max
  unsure (1)..(98): unsure at all Xaa locations
  Clone ID: PAT_MRT3847_18420C.1.pep
QLSLARTRKSSVFKVLSAEKEQIHVVEGSRVDESYDASGTRILPLVSXVSNPNHKLLLGLADPPGAGISTLAHEVARRIYKLWPEKASSFDSQVQLPD

SEQ ID NO: 195343 - protein, 67 aa, Glycine max
  Clone ID: PAT_MRT3847_18421C.1.pep
TAARRQQKGAAARRQQKGAAARRQQKGAAARRQQKGAAARRQQKGAAARRQQKGPPQVRGGSPLCFT

SEQ ID NO: 195344 - protein, 309 aa, Glycine max
  Clone ID: PAT_MRT3847_18422C.1.pep
MEATFSSTTARGYWNQTRGSTEPLLLRVDEARDRKPSSLSIARPSKFVQLSLARTRKSSFFKVLSAEKEQIHVVEGSRVDELYDALVTRILPLVSVSSNPNHKLLVGLAGPPGAGKSTLAHEVARRINKLWPEKASSFDSQVQLPDVAIVVPMDGFHLYRSELDEMENPEEAHARRGAPWTFNPLRLLQCLKNLRMHGSVYVPSFDHGVGDPVEDDIFVNLQHKVVIVEGNYLLLEDGVWKEISSLFDEKWFIDIDIDKAMQRVLKRHISTGKPPDIAKQRIENNDRLNAELIMKSKKNADIIIKSIDF

SEQ ID NO: 195345 - protein, 424 aa, Glycine max
  Clone ID: PAT_MRT3847_18423C.1.pep
NCLRSWGRNRDLFHWSSWTCPLCRICEACRRTGDPSKFMFCKRCDGAYHCYCLQPPHKSVCNGPYLCTKHARCHSCGSNVPGNGLSVRWFMSYTNCDACGRLFTKGNYCPVCLKVYRDSESTPMVCCDSCQLWVHCQCDNISDEKYHQFQLDGNLQYKCPTCRGECYQVKNPEDAAREIWRRRNIAERDLIASLRAAAGLPTQEEIFSISPFSDDEDSGPLKLKSESARSFKFSLKNLANDSPKKKSSSKKTAKKKDSQLFMTSKIDTHNSCEGHSDIKSLHSLDDDKNDDIQSQRNEGPDVYSSPATGSLSQTEASFPINQPGILKQKFVDEVMVSDEERKPRVVRIKSNKALIPDSEEESGKHSLKTQNVKGKKLVINLGARKINVASSPRSDTSSCQKDQDPVTVNGNDDSFCWSCHYIFA

SEQ ID NO: 195346 - protein, 111 aa, Glycine max
  Clone ID: PAT_MRT3847_18424C.1.pep
LKPLKLVEGAVALSKSSTNFFGSISSEEVLNFLFMNNNISSKSSSKNSNVYRDTVTDWWKMQEASMQSRDWRDRSMLVSLSFRNTKIHSSQTRPICLHSNQLKEIWSCSSP

SEQ ID NO: 195347 - protein, 461 aa, Glycine max
  Clone ID: PAT_MRT3847_18425C.1.pep
MEGSAEDLGAPESWEVADLDESMNRLNLMVFSNNDSKQPHQRLADYNDDDAPLPPPPSSSCDEVSDDAINQVDQFLREAIQNPRERLSILRMEQDVENFIRDPTQQQLEFKQLPTSYLRLAAHRVAQHYSLQSMVLLDNSLPDGSGSRIIVRKTSECKLPVIRLADIPVKLSPENSAVMKVAIKQRPQKWTQILSNANSNSMKNNSSKSVEERKEEYNRARARIFNSSNNDGTVGGKPECESRQQDNSLHGSLVVPRVEDKSASVSDVTSGRGLVESSTNTNRARSRTEKEPVGRYRQNNRVAIFRDREVDRKDPDYDRNYDRYMQRFDPGFGFNGGSYAIQPMYTAVLNYNTEFPQLGSAHRPHLSAEHQPRPLPQHIPGPWAAQSTPAGIGYGHPETMMPPFNPNQVGAHSSSAMYLHSSQYPCQRPGMPFIHHEHVHQPFAQSHQPPPDASFGLARPR

SEQ ID NO: 195348 - protein, 136 aa, Glycine max
  Clone ID: PAT_MRT3847_18426C.1.pep
GVVSTLVSAILLKNHARIGKVMRLSAIANLPSVLSNPSHFLTLSCSSLLLILPLLSIQMYVWLDRTLSFSVAFSMVALGWIQGWTLGKMLLMSYSGPGVSDIMYDLETDPAVRTVEQAKFWPVHYGLCQLEPNRLE

SEQ ID NO: 195349 - protein, 76 aa, Glycine max
  Clone ID: PAT_MRT3847_18427C.1.pep
HRCFYCLYAQSASFELAHSTELIPLLKHSSVCGKRSHDSTDRFGEEASSFTLIFLGRGQSFNCFNFFAAHGFDFSS

SEQ ID NO: 195350 - protein, 54 aa, Glycine max
  Clone ID: PAT_MRT3847_18428C.1.pep
NLSLYRGHQCHIKRNSIYKWFGQYGEELGDYSERGSLLGARGLCCEGPFVRNES

SEQ ID NO: 195351 - protein, 43 aa, Glycine max
  Clone ID: PAT_MRT3847_18429C.1.pep
AELYLEFKLQLKLGRYNSDRNQTENPYREIRTGMSHEIMKEHK

SEQ ID NO: 195352 - protein, 202 aa, Glycine max
  unsure (1)..(202): unsure at all Xaa locations
  Clone ID: PAT_MRT3847_1842C.1.pep
MNGIGKLKSSSSELDLHIEDYLPSGSSVQQERHGKLRLCDLLDISPSLSEAARAIVDDTFTRCFKSNPPEPWNCAEASWMGXNVYLFPLWCCGVVVRYLILFPIRILVLALGWIIFLSAFIPVHSLLKGNDDLRKKIERCLVEMMCSFFVASWTGVVKYHGPRPSIRPKQVFVANHTXMIDFIILEQMTAFAVIMQKHPXWV

SEQ ID NO: 195353 - protein, 171 aa, Glycine max
  Clone ID: PAT_MRT3847_18430C.1.pep
MADGPASPGGGSHESGDHSPRSNVREQDRYLPIANISRIMKKALPANGKIAKDAKETVQECVSEFISFITSEASDKCQREKRKTINGDDLLWAMATLGFEDYMDPLKIYLTRYREMEGDTKGSAKGGDSSAKRDVQPSPNAQLAHQGSFSQNVTYPNSQGRHMMVPMQGPE

SEQ ID NO: 195354 - protein, 105 aa, Glycine max
  unsure (1)..(105): unsure at all Xaa locations
  Clone ID: PAT_MRT3847_18431C.1.pep
TLTTXTKSXXXALXXXXIXXXXXPXXXLXXXXXQKXXYHXXXPAHXXSYXSXXLXYSPXHTXXXNYXFXXXXFSXXXFXISXXXXXXXXFXXXXXXXXXXXHCXX

SEQ ID NO: 195355 - protein, 696 aa, Glycine max
  unsure (1)..(696): unsure at all Xaa locations
  Clone ID: PAT_MRT3847_18432C.1.pep
MAMIPLMMMILLLLFKFPSVVLATLKSDEANLELVFTYHKCNEELGNFTTETYSNNRNVLLSNMYSDKEIENGFYNSSYGEGPDKVYGIGFCRGDVKPDKCRSCLEKSSTLLTDRCPVQKEAIGWYDLCMLRYSNRSIVEQPVTDTDDIIKCSNTNATNKDRFDKELDDLVVRMRSRSAEGDSRLKFAEGEAPVQSSNETIHALLQCVPYLSHXNCTRCLEYAMSRISYWCDGKTGGWYLGRSCSLRYETYLFFELIFHDAPAPQPSQPAVTPTKDFPKKTNPSRNIIVIVVPVFAVAIVVVGLIVLIYNYFGARRPRHKPIQSEGDGEGDGEGEGELDNDIKTDELAQFEFATIKFATNNFSDANKLGQGGFGIVYKGTLSDGQEIAIKRLSINSNQGETEFKTEISLTGKLQHRNLVRLLGFCFAKRERLLIYEFVPNKSLDFFIFDPNKRGNLNWERRYNIIRGIARGLLYLHEDSRLQVVHRDLKISNILLDEELNPKISDFGMARLFEINQTEANTNTVVGTFGYMAPEYIKHGKFSVKSDVFSFGVMMLEIVCGQRNSKIRGNEENAEDLLSFAWKNWRGGTVSNIVDTTLKDYSWDEIKRCIHIGLLCVQEDINGRPTMNSVSIMLNSSSFSLAEPSEPAFLMRGKSQLPMIMLSGSEQYSEATKSSDSGSQFAQGSSNKAPITEPYPR

SEQ ID NO: 195356 - protein, 143 aa, Glycine max
  unsure (1)..(143): unsure at all Xaa locations
  Clone ID: PAT_MRT3847_18433C.1.pep
DPRRKNNTARSHQPAKRXDAGKXATATENSRPDAAXXXGAGETKDHAANKREKRHQRXAXXEESEQAPAHATSKAEAAARGRASDRDSHTANPQGSRHERSPGRPNNESGHAEKATKPSNGTRGPPTAAPTPKQTAAPEEAEA

SEQ ID NO: 195357 - protein, 80 aa, Glycine max
  unsure (1)..(80): unsure at all Xaa locations
  Clone ID: PAT_MRT3847_18434C.1.pep
ITIXSXAIPQGISXRQAXQPSLXXLGLYSSFXPPLIYAMMGSSRDLAVGTVAVGSLLMASMLGRVVNFNENPNLFLHLAF

SEQ ID NO: 195358 - protein, 200 aa, Glycine max
  unsure (1)..(200): unsure at all Xaa locations
  Clone ID: PAT_MRT3847_18435C.1.pep
MSSFTGARSKANANSEMTKANDTNLCPINTSTITSTSPDTSAKNDKKKKSILPKIFGSKRNGRGSDEETLKSSSAEEGDGVTLDLENKIETRRKAFLEAAPIMRKSFSERETSPGIEGLNLSNFERPMMTMETELLRIFVAAWNVGXPSYDLNLQDFLLVEGSADIYVLGYEHPCNKVKKKKITNERRRRRSIPPLHLKI

SEQ ID NO: 195359 - protein, 58 aa, Glycine max
  Clone ID: PAT_MRT3847_18436C.1.pep
FSFFMATTVLRWFWAFKGPPGFFHVFHLTICALICPQTPFLSPILLLLDRLSQPVPFG

SEQ ID NO: 195360 - protein, 146 aa, Glycine max
  unsure (1)..(146): unsure at all Xaa locations
  Clone ID: PAT_MRT3847_18437C.1.pep
LAGKRITLVVDSSDTMDKVEAKIQVEMGIPPGQHRLIFVGNQLRAGRTLSGYNIQKEXPLHLVWRLCGGIQIFGKTRTGKSIALQVESCHSVHNVKVKIPDKEGIPPDQQRLICAGKQLEDGRSLDGFNILKESTLHLVLRLRGGW

SEQ ID NO: 195361 - protein, 180 aa, Glycine max
  Clone ID: PAT_MRT3847_18438C.1.pep
QIKSHPTMLSLKKTLSLLLLSSLLTSTIAHDTFTCDHDKIVQHPGLLDIEEDMSSLHKKGPRVLQDATTSSDTSSTYSNIRIQAFFDYLEETAPSSFSSYMENQVLPPIIDYFQSALRVKYPVVGNLQLDSSINSICERPTPSVLISGVPADFFIYYDSDAVSGSQIANTMYCYLASGTK

SEQ ID NO: 195362 - protein, 50 aa, Glycine max
  Clone ID: PAT_MRT3847_18439C.1.pep
AQLSLLLEITRTTVRKMTVLVFVVAAGLVSWECDAYDMCSLRLTAGHGAR

SEQ ID NO: 195363 - protein, 107 aa, Glycine max
  Clone ID: PAT_MRT3847_1843C.1.pep
MNGIGKLKSSSSELDLHIEDYLPSGSSVQQERHGKLRLCDLLDISPSLSEAARAIVDDTFTRCFKSNPPEPWNWNGYLFPLWCCGVVVRYLILFPIRILVLALRWII

SEQ ID NO: 195364 - protein, 94 aa, Glycine max
  Clone ID: PAT_MRT3847_18440C.1.pep
RGPKLRGGPPMIPLGLEGERLFAPPPLFGPWAPRFFPGVVPKGSPIIPIFVVFEKGGLKIPPPFFVAFGAGPEGPFFAPEMGYPGGGGPKEIGV

SEQ ID NO: 195365 - protein, 51 aa, Glycine max
  Clone ID: PAT_MRT3847_18441C.1.pep
KITKLVKQIPLILVKFLYKKEHINLLRRKKPFTKSHQDGWTSTITTSTTQL

SEQ ID NO: 195366 - protein, 89 aa, Glycine max
  Clone ID: PAT_MRT3847_18442C.1.pep
IVTSSSSARRMNGLGYRVAAIPGAGPRQAFHTNPVRRNTGYGAASPEVKCARRRLAVHSHSTGGFGTIPQECVESTEECIHGEQHGSHS

SEQ ID NO: 195367 - protein, 128 aa, Glycine max
  Clone ID: PAT_MRT3847_18443C.1.pep
LLHLQKMATTTTTYAYGSSSQRSLGMVLALVSAVVLSPLYANSKSDRRYYESKWSSGGFVLPMVLAGLIIAIRTTSSSPSPRACSFLPSPEPSWVLRIGSSSWGLAGILVMLMLVLYWQASVQEFFWR

SEQ ID NO: 195368 - protein, 64 aa, Glycine max
  Clone ID: PAT_MRT3847_18444C.1.pep
GVLKSDDLTLLTASTWSKSFPLSLSLIFLISTTTKRSIIIPSTSLSTSTLNSEACKVQTLPPRP

SEQ ID NO: 195369 - protein, 258 aa, Glycine max
  Clone ID: PAT_MRT3847_18445C.1.pep
MAAATSSAVLNGFGSHFLCGGKRSHALLAASIGGKVGASVSPKRVIVAVAAAPKKSWIPAVKGGGSFIDPEWLDGSLPGDYGFDPLGLGKDPAFLKWYREAELIHGRWAMAAVVGIFIGQAWSGVPWFEAGADPNAIAPFSFGSLLGTQLLLMGWVESKRWVDFFNPDSQSVEWATPWSKTAENFGNSTGEQGYPGGKFFDPLGFAGAIKDGVYIPDADKLERLKLAEIKHARIAMLAMLIFYFEAGQGKTPLGALGL

SEQ ID NO: 195370 - protein, 194 aa, Glycine max
  Clone ID: PAT_MRT3847_18446C.1.pep
MDSFFVECCNCRLPGDYGFDPLGLGKDPAFLKWYREAELIHGRWAMAAVVGIFIGQAWSGVPWFEAGADPNAIAPFSFGSLLGTQLLLMGWVESKRWVDFFNPDSQSVEWATPWSKTAENFGNSTGEQGYPGGKFFDPLGFAGAIKDGVYIPDADKLERLKLAEIKHARIAMLAMLIFYFEAGQGKTPLGALGL

SEQ ID NO: 195371 - protein, 126 aa, Glycine max
  Clone ID: PAT_MRT3847_18447C.1.pep
AFCVFVRACKSMTKISIIITLLIAVTASCFVCVLLDRKIEGFYMVVALVTIIASAMVLAFRATMVTFITVLVLLTFAGFRRRVLIQQRWRIFLDVAWYLVSVIFRSEKGLLGLACATFISLFATYR

SEQ ID NO: 195372 - protein, 69 aa, Glycine max
  Clone ID: PAT_MRT3847_18448C.1.pep
VKTFDHTSTPQYAFKYFVYFNSSYPHVTAISLFTFTTQFLAAYDERLGDAGAPAIVELVVITAPLPLNM

SEQ ID NO: 195373 - protein, 38 aa, Glycine max
  Clone ID: PAT_MRT3847_18449C.1.pep
NGRPGLRRMIQQLQRVNFLHALNLSLSNAWSDAFSYAK

SEQ ID NO: 195374 - protein, 111 aa, Glycine max
  unsure (1)..(111): unsure at all Xaa locations
  Clone ID: PAT_MRT3847_1844C.1.pep
MHSLITGKTLCQAMAHSAFLLLANLQGFWPYSLGIITGVITTSKDLRHIFTENYSLMHKTKLPPRPKPWSMVGNLPKXLRNKTAHKWVRNLMKEMNTRFAWIRLRNSYVIP

SEQ ID NO: 195375 - protein, 78 aa, Glycine max
  Clone ID: PAT_MRT3847_18450C.1.pep
LYIFFVHHDIRHFPLHHPPYFNMADFLLSAMNRHPPLTTLIRWKKNAGSKFNYAKCDECINKPHSNYIFYLALSIRIQ

SEQ ID NO: 195376 - protein, 94 aa, Glycine max
  Clone ID: PAT_MRT3847_18451C.1.pep
SFQFLSLHFHIFLACPYGKAFSSFHLSLNLHTHTTTTTKKLFLQFVFAGSEFSTHWWQSCFVKAGENYREANFIILLGKKTCHHFHQHLKDVLQ

SEQ ID NO: 195377 - protein, 99 aa, Glycine max
  Clone ID: PAT_MRT3847_18452C.1.pep
HGVVIDHNHVIVSVSLASDRHRHIESLAVASPDSHYSLTVLAHLFSSLLSFISLSHVYASATSAASECMPSTLITVISLKYIHSDVDENDGKPFPQVKL

SEQ ID NO: 195378 - protein, 85 aa, Glycine max
  Clone ID: PAT_MRT3847_18453C.1.pep
KIQRPDKNYGDWNKYKETNKVKVDEPITLKLLSKILVFLLFSSHTSLSLFYLPLSHGVHISKIQATANPKLPSFQITLTSTHLGN

SEQ ID NO: 195379 - protein, 82 aa, Glycine max
  Clone ID: PAT_MRT3847_18454C.1.pep
PWGCCSPFFPLAQGFNFYPSSFVARFFENPRLDLNMAAFLFENKLPPYFFIILLGLGPFFVALLWILFFPVREGNRLFFNAL

SEQ ID NO: 195380 - protein, 163 aa, Glycine max
  Clone ID: PAT_MRT3847_18455C.1.pep
FIPLPASNFNEGSCSTDSPSGSTGPNDFADNIFSNAERGAAGILKNFDSSISPAKSSSPHSRYFPSSDIAHDSVVLPHSSGFQPSPSDGLLYRNRVVDVKRSGGGVFHFHPDTNIEHRKLDTTTSRSNCSSFRDTDSVQRAGSNHFNDRNSGVSYTNSRDRPD

SEQ ID NO: 195381 - protein, 139 aa, Glycine max
  Clone ID: PAT_MRT3847_18456C.1.pep
MPAAARRASSPSSASLSFATSQLAGLSLSAGVATPTAVALLPKRQQLQPIVARRVCPFTDKKTNRANKVSFSNHKTKKQQFVNLQYKKLWWEAGKRFVKLRLSTKALKTIEKHGLDAVARKAGIDLTRSEQEVSPSDEQ

SEQ ID NO: 195382 - protein, 482 aa, Glycine max
  unsure (1)..(482): unsure at all Xaa locations
  Clone ID: PAT_MRT3847_18457C.1.pep
MRNVLRSLRHLRPAFQRQDCVLISVNVAEEPPCHIGKSCHIHSSAFRVVDHAETNFKNHLFTTTTKPLSNDAAKLTNRETSKAGPLVEYERRIDNGELVEGDACQVDTLTELQRLYDELVDSADTCQLDRNSEKPVRSGWLWSRLLSHPSYSPVKGLYLYGGSSPGKTMLMDLLFDQLPSNWRKKRIHFHDFMLNVHSMLQKHKGLSDPLDVVAGEISDDAILLCLDEFMVTDVADALVLNRLFRHLFNKGIILVATSNRAPDNLYEGGLQRDLFLPFIAALKERCVVHEIGSSVDYRKMASGEQGFYLVGTDLSGFLKQKFQQLIGEGTATPQEVEVVMGRTLHVPLGANGCAYFPFEELCERPVGAADYFGLFRKFHTLALDGIPIFGLHNKSAAHRXMYENKARLLCTAEGSPQDLFEKILPIFEAKNMAPRTFSRSRKNDDSNLCVDNELGFAKDRPISRLTEINSKEYLQHHAAMLA

SEQ ID NO: 195383 - protein, 43 aa, Glycine max
  Clone ID: PAT_MRT3847_18458C.1.pep
TSHDIFFIDLSLEIEMRLHSDHWEIRTYIMSSVQKIKIKILFS

SEQ ID NO: 195384 - protein, 174 aa, Glycine max
  unsure (1)..(174): unsure at all Xaa locations
  Clone ID: PAT_MRT3847_18459C.1.pep
MRNVLRSLRQLRPAFQRQDCVLIIVNVAEEPPCHIGKSCHIHSSAFRFVDHAETNFKNHLFTTTTRPLSTDAAKLTNRETSKAGPLVEYERRITNGELVEGDACQVDTLTELQRLYDELVESADICQLDRNSEKPXRSGWLWSRLLSHPSYSPVKGLYLYGGVGTXKTMLMDLF

SEQ ID NO: 195385 - protein, 58 aa, Glycine max
  unsure (1)..(58): unsure at all Xaa locations
  Clone ID: PAT_MRT3847_1845C.1.pep
AASFSGGGVXCXXSVPALGPGKTCRKFRSAGEKFLHLDINMTNQRVSLLLKKRLTTPK

SEQ ID NO: 195386 - protein, 330 aa, Glycine max
  unsure (1)..(330): unsure at all Xaa locations
  Clone ID: PAT_MRT3847_18460C.1.pep
LASSAPSNWRKKRIHFHDFMLNVHSMLQKHKGLSDPLDVVAGEISDDAILLCLDEFMVTDVADALVLNRLFRHLFNKGIILVATSNRAPDNLYEGGLQRDLFLPFIAALKERCVVHEIGSSIDYRKMTSGEQGFYLVGTDLSGFLKQKFQQLIGEGTATPTPQEVEVVMGRTLHCPLGANRXAYFTFEELCERPVGAADYFGLFKKFHTLVLDGIPIFGLHNKSAAHRFVTLVDVMYENKARLLCTAEGSPKDLFEKIVTVSEAKNLAPRTSSRSRKNDDSNLCVDNELGFAKDRTISRLTEINSKEYLEHHAAMLAEKKERVDQNAVEA

SEQ ID NO: 195387 - protein, 100 aa, Glycine max
  unsure (1)..(100): unsure at all Xaa locations
  Clone ID: PAT_MRT3847_18461C.1.pep
CVLHDWSDEWCLKVLKNCYVAIPNDGKVIVEEVLPFEPLTTGAVKSISQFDVLMMTINPGAXGKERSEGEFMALAKGVGFISGIRYTCFVCDLWVMEFFK

SEQ ID NO: 195388 - protein, 221 aa, Glycine max
  unsure (1)..(221): unsure at all Xaa locations
  Clone ID: PAT_MRT3847_18462C.1.pep
MFMFLVSRVTKDSISRNRNAFASFAFSRCAHSLSFATVEAEEISGSRPAEVLNLVQGKWVGSSNWNTIADPLNGDSFIKVAEVDETGIQPFIESLSSCPKHGVHNPFKAPERYLXYGDISTKAAHMLSLPKVSDFFTKLIQRVSPKSYQQAFGEVYVTQKFLENFCGDQVRFLARSFGVPGNHLGQQSHGFRWPYGPVLLLFNSYQNSSAKCNPQYKYATL

SEQ ID NO: 195389 - protein, 124 aa, Glycine max
  Clone ID: PAT_MRT3847_18463C.1.pep
TMDMTALSNVTWRFFCNINTDQYTILPLKGWSQMSQRTKHVSHLQLLPTPTSFRPINPTKKFQLPDDIDNRAHFVHTSQRWCFTLSRCDSTLFFFFFFLLVPENHTYACSTFKKKGETEKKRRR

SEQ ID NO: 195390 - protein, 64 aa, Glycine max
  Clone ID: PAT_MRT3847_18464C.1.pep
DGGGVLSNERGVDIHELLGGERHCTHCGREPCGLDMGTSVMETAFVLIHRTCVGSGKKHHNIWS

SEQ ID NO: 195391 - protein, 143 aa, Glycine max
  Clone ID: PAT_MRT3847_18465C.1.pep
AKQNIKERKGAMGDYYESSKPNLGFRDTSVPYWCSNVLQAFENEGGPLLLLNWQIRFVFVVTCRSKNGSKLLYFRDSKCTISEPSHQRRNAQPFSRLRSSPELSDQLQVLAHLRFIAGVKKIQFLFMDSVLWFADAWVDAGIP

SEQ ID NO: 195392 - protein, 293 aa, Glycine max
  unsure (1)..(293): unsure at all Xaa locations
  Clone ID: PAT_MRT3847_18466C.1.pep
MFTIYRLLNRKSNSMFKLLVSRAARVSTPHNHNAFASFAFSRCAHSLSFATVEAEEISGFRAAEVLNLVQGKWVGSSNWNTVVDPLNGDSFIKVAEVDETGIQPFVEKLXNSAREGSSYAITSLVDISPYXDISTKAAHMLSLPKVSDFFTKLIQRVSPKSYQQAFGEVYVTQKFLENFCGDQVRFLARSFGVPGNHLGQQSHGFRWPYGPVAIITPFNFPLEIPVLQLMGALYMGNKPVLKVDSKVSIVMEQMLRLLHTCGLPAEDVDFINSDGKTMNRLLLEANPRMTLFT

SEQ ID NO: 195393 - protein, 117 aa, Glycine max
  Clone ID: PAT_MRT3847_18467C.1.pep
RVGPRVRATKTTEGGGSNRLFSHASSFQSSKQQTHNSSSSLPSALPFSKMAHLLAMVVEGVGGFVKTLWALQERRWSYTFDAVASAAVSVTMALVLCLLSIRTSYRHRRGDMLFASF

SEQ ID NO: 195394 - protein, 33 aa, Glycine max
  unsure (1)..(33): unsure at all Xaa locations
  Clone ID: PAT_MRT3847_18468C.1.pep
RXSXIXXNKXEGLIXXSLXXAXXDXXLYLLNRS

SEQ ID NO: 195395 - protein, 55 aa, Glycine max
  Clone ID: PAT_MRT3847_18469C.1.pep
QSHKEFGPPLIREIAPENNLVQFFKNKFFVKALKYSQLGANETKGLESKLIINLP

SEQ ID NO: 195396 - protein, 237 aa, Glycine max
  Clone ID: PAT_MRT3847_1846C.1.pep
MEGSKENCVPRIPLIPSSNLQGPRMKPLLHHRLPLGNISQNVNMPHSQVNKLDLSRKCTAHTIQHHFPQETKKQNLLAPNPSCKLDCDIVDIDDDDGDGSDDAVPVFVKHTEAMLDEIDKIEEVEMEDVEEEPVLDIDACDRKDPLAVVEYIDDIYSFYKDIENSSCVSPNYMTSQLDINERMRAILIDWLIEVHYKFELLEETLFLTVNLIDRFLERQAVIRNKLQLGGVTAMLIA

SEQ ID NO: 195397 - protein, 587 aa, Glycine max
  unsure (1)..(587): unsure at all Xaa locations
  Clone ID: PAT_MRT3847_18470C.1.pep
MAIATATLSLHFAKIPIRQTHSSSPIRHRIPSGRRLNLYYPRTSHRFACFGSKCSLTDTDVHLVHVTTDEDEAQGRGVVEPHCPVPFVKLNTDILETESLNLLAEATFVDTLLTALPVLSEEEQHALSATPAHPAGLHAFYASCLTANVVEQLWNFAWPSAIALIHPSLLPVAVMSFFTKVAIIVGGPLVGKLMDHFPRVSAYNCLTIVQAAAQLLSAAMIIRAHSVQPTSFSTLLLRPWFVILVSAGAIERLCGVALGVANERDWVVLLAGVNRPIALAQANAVLNRIDLLCEIAGXMLFGFLLSKFHPVICLKVASGLMMGLLPVTIVFNYLTNKLSTGVLDRPKPSQTCCRTFNEDSALDASSIVFKGLEAIKLGWKEYLGQPVLPASLAWVLLCFNVVRTPGGLLSACCTLRGLHPSIIGGFSGMCALMGVAATFVSSTLVKQFGILKAGAVGLVFQALLLSMAVAVYWSGTISHQSPLLTFLFLIILSRLGHMSYDVVGAQILQTGIPSSKANLIGTTEIAVASLAESIMLGVAIIANDPSHFGCLALLSLLSVVGAAWMFCRWLLNPTDEQKNLFSYDPQF

SEQ ID NO: 195398 - protein, 103 aa, Glycine max
  Clone ID: PAT_MRT3847_18471C.1.pep
LISTLFLSYLSSYLFNSLLNIPSALLPYSYSYPSHSLFEISLVSFIFCDSPLTTPISCFLALLSLRPLLSHHSLTTTTTTTTTTHSLSSLIFNSLQFLKLIKR

SEQ ID NO: 195399 - protein, 46 aa, Glycine max
  Clone ID: PAT_MRT3847_18472C.1.pep
PQHAPKRIIHQLVKLHAIDTAGTATTPRASLASRPTRTPTRPCRSR

SEQ ID NO: 195400 - protein, 167 aa, Glycine max
  Clone ID: PAT_MRT3847_18473C.1.pep
FAAAKPMDTEDFSFPKIGGTCAYSIDLPPLWNISPKDPSNPNQVPREGSKGDEKDCFEAKLISKGHRKSFSCVEDGKKITRVGHEAAPMDLLWEVFNEELSSATEFSSTSSREMVEFRCATTALTVAKTNKGLLQTKNRPGMVVIVKVLKKFFSLNNSHVKLFWQSD

SEQ ID NO: 195401 - protein, 40 aa, Glycine max
  Clone ID: PAT_MRT3847_18474C.1.pep
LYFKLLYPVSLLLNLHPYYILETSFWNVNLHFEIKMDYPK

SEQ ID NO: 195402 - protein, 92 aa, Glycine max
  unsure (1)..(92): unsure at all Xaa locations
  Clone ID: PAT_MRT3847_18475C.1.pep
TALSLPLPLPPNFPSFSRXRVVSAGGYSLSTAHPSRFLFLLFLTNQKKLKILPKTGNNRNGQLSKVWLSFLGFNGVQYQEEGEENQTKKKKD

SEQ ID NO: 195403 - protein, 89 aa, Glycine max
  unsure (1)..(89): unsure at all Xaa locations
  Clone ID: PAT_MRT3847_18476C.1.pep
EARQXPLNHHTSPRSRYPFLLFFYLSSFKSIKMAETFLFTSESGETRDNLTXVCDKXSXVVXEVCFEXDPXXKXXWEXXXKTXLVMVLG

SEQ ID NO: 195404 - protein, 71 aa, Glycine max
  Clone ID: PAT_MRT3847_18477C.1.pep
QYLERLSSNGKSIIKKKGATARLPKTENIPNYCYYSQDYPRPQKTQTAISQSNTELLTRSAIRFLFFRTSA

SEQ ID NO: 195405 - protein, 212 aa, Glycine max
  unsure (1)..(212): unsure at all Xaa locations
  Clone ID: PAT_MRT3847_18478C.1.pep
LRTALAIASLLNRTXVMPPLWCRIDRLWFPHPGVLDGSITRQPFLCPLDHVFEVNVMLXKELPKEEFGSGVDIREYSILDNPSLPSEVKMSWLDVQXLCKDGTQDCFASNNTTVGGVLKFPRHSNEETYMKVFLSFKDIKVIQFSSMQDAFSGFSDKEREDRFRKRVKRYTGIWCCVLDHTPGHIYYDMYWDEKPEWKPIPPQTSADDHPPW

SEQ ID NO: 195406 - protein, 106 aa, Glycine max
  Clone ID: PAT_MRT3847_18479C.1.pep
FPVCNKREECYIRMSSVFIYLFLITSAIQYQLRHQRSKTASLSRKMSASISPICNVGNLIQSMFFPLLHMNHIVSCLQQHPQCGYIFFTYESIHLGLDISWKPNHH

SEQ ID NO: 195407 - protein, 35 aa, Glycine max
  Clone ID: PAT_MRT3847_1847C.1.pep
CSDGGLTCVLYFHRTLIFKFSKIRNVISHLRYAME

SEQ ID NO: 195408 - protein, 66 aa, Glycine max
  Clone ID: PAT_MRT3847_18480C.1.pep
TIQFKDRRTHVRPQYFFTPIVLLHLHNSFEKLTIVSLLEQLNKLLNWYFVSLFHFISARHVMDWYL

SEQ ID NO: 195409 - protein, 210 aa, Glycine max
  Clone ID: PAT_MRT3847_18481C.1.pep
MSLSLIQGYSSAEDEDQPQPHDSDLEDSDDEAAAAANHPSLGDRSIFDHVPNPPSASGLPSAFDAFSEIAEPPQFLNNSVEEYNNNPSSRDADEQQGKHTNRRRRKDKKDLPTGAGVEAKPQLVGIHERVRSDINGSQAPTSAASGTSEGGKWAPTATNPNAEDAAELLRMCLQCGIPNTYSSARGMVCPVCGDRPSKDDTSTESKKKDQ

SEQ ID NO: 195410 - protein, 80 aa, Glycine max
  Clone ID: PAT_MRT3847_18482C.1.pep
VLLDDALKEQYDLILLPGGLGGAEAYAKSDKLMDLIKKQAEAHRLYGAICASAAIALEPHGLLKGKKVTSYPAMWNKLAD

SEQ ID NO: 195411 - protein, 184 aa, Glycine max
  unsure (1)..(184): unsure at all Xaa locations
  Clone ID: PAT_MRT3847_18483C.1.pep
MSLSLIQGYSSAEDEDQPQPHDSDLEDSDDEAAAAASWTAAANHPSLGDRSIFDHVPNPPSATGLPSAFDAFSEIAGPPQFLNNSVEEXHKPSRDADEQQGKHANRXARKNKKDLPTGAVVEAKPQLVGIHERVRSDINGSQPPTSAALGTSEGGKRVPTATNPNAEDAADSLRMCLQGGNSKT

SEQ ID NO: 195412 - protein, 74 aa, Glycine max
  Clone ID: PAT_MRT3847_18484C.1.pep
NGSHFKNLGVYGGQLKKKKAEGGQPKTRWDAKKKKKPGNKGGEEDLEENTGGEPHQEGGRATKPGEGCPQKQVL

SEQ ID NO: 195413 - protein, 59 aa, Glycine max
  Clone ID: PAT_MRT3847_18485C.1.pep
TKLNSMAGFLQHMNWKNLGFTKLIRFEKNPLFSNCRKSKKARTNRLSKNLPILNGKWNP

SEQ ID NO: 195414 - protein, 55 aa, Glycine max
  unsure (1)..(55): unsure at all Xaa locations
  Clone ID: PAT_MRT3847_18486C.1.pep
SRVTPRVRSTHRRSKWPYXENIRALGGMLTSLINTGDNRLTEKTTLTCRDLDTSA

SEQ ID NO: 195415 - protein, 56 aa, Glycine max
  Clone ID: PAT_MRT3847_18487C.1.pep
ESNRWPHHHVIAGPILLLASTSSIEDVWNGIKLASLSNSSVGLELNNNNHLSPFVV

SEQ ID NO: 195416 - protein, 67 aa, Glycine max
  Clone ID: PAT_MRT3847_18488C.1.pep
MELMVAKVHTPIIIVDLFEVYGNDYDRQHHGTTGGYAGDTGRPHGNIGGPYYGTNTADTGTGPRSGT

SEQ ID NO: 195417 - protein, 89 aa, Glycine max
  unsure (1)..(89): unsure at all Xaa locations
  Clone ID: PAT_MRT3847_18489C.1.pep
MAQXTFLFTSESVNEGHPDKLCXQISDAVLDACLEQDPDSKVACETCTKTNMVMVFGXITXKXXXVXYEKIVRDTCREIGFISDVFGDA

SEQ ID NO: 195418 - protein, 212 aa, Glycine max
  unsure (1)..(212): unsure at all Xaa locations
  Clone ID: PAT_MRT3847_1848C.1.pep
MEGSKENRVPPLPLIPSSNLQQGGGPRMKRLLHHHHRLPLGNISQNVMPHSHVNKLDLARKFTPHTVQHHFPQPHPQPQENKKQNLLAPTPSYQLDCDIVDIDDDDGDGSDDAVPVFVKHTEAMLDEIDKIEEVEMEDVEEEPVLDIDACDRKDTLAAVEYIDDIYSFYKDIENSSRVSPNYMNSQFDINERMRAILIDWLVEXVHYKFEAL

SEQ ID NO: 195419 - protein, 58 aa, Glycine max
  Clone ID: PAT_MRT3847_18490C.1.pep
TPMYCAFSLDACAPSSPMNKFQHTEQYSATQVVGNLAHCTLVSFYSLSTSSRKSRGSE

SEQ ID NO: 195420 - protein, 433 aa, Glycine max
  unsure (1)..(433): unsure at all Xaa locations
  Clone ID: PAT_MRT3847_18491C.1.pep
MAIITEEPEPEQPTHSRSQISPTKPNNNPFSFWFYFTLSVSLFTLFFVFTSSTLSPQDSKTWFLTLPSPLRHHYSNGRTIKVQTHPDETPLQVFTLQEGPTSSENILIVHGQGLSSYSYRHLAKSLAANGLHVTSLDLPGHGFSDNSVEVXSRASPTGVFGRSWYVYSEIQERGLFWAFDQMIETDQIPYGKSKAKIRKPIDLGPNDSFAWEKWWGGPQDGPMEGLWSVASAKQWSRERRPGPSAQKHASFSTHPGLLRAQEAAAPPITDDTSSVSTATXKSLLVIVRQRLPSSFGLEEWGEGLKGMPMQVMWSAGWSEEWSQEGHRVANALPQAGFLTHTGGRWAQEDAAVEIAEKISQFVLSLPKSVRKVEQESIPEHVQKMLDEAKSSGHDHHHHQSHDHGHGHDHYGDAHIHGANYMDAYGLGHGHHGW

SEQ ID NO: 195421 - protein, 89 aa, Glycine max
  Clone ID: PAT_MRT3847_18492C.1.pep
AQLHLYITKNSKYMAEFTASLFYLIQKTKPLIPSLLKYQIRTAWHESYDYNKNTAVLTKICMSHNVMHQYQLYMINIPIRKHHNYTLQQ

SEQ ID NO: 195422 - protein, 500 aa, Glycine max
  unsure (1)..(500): unsure at all Xaa locations
  Clone ID: PAT_MRT3847_18493C.1.pep
TYSTLREGNVTHHEYIQVGKGRDVGLNQISMFEAKIAAGNGEQTMSRDIYRLGHRFDFFRMLSCYYTTIGFYFSTLITVLTVYVFLYGRLYLALSGLEESLNQKRAIRDNKALQVALASQSVVQIGFLLALPMLMEIGLERGFREALSEFVLMQLQLAPVFFTFSLGTKTHYYGRTLLHGGAEYKGTGRGFVVFHAKFADNYRLYSRSHFVKGIELMILLVVYHIFGHGYRGVVAYILITVTMWFMVXTWLFAPFLFNPSGFXLVHDYTYWQKWNCNLGGIGVSPEKSWESWWEKEHEHLRHSGKRGIATEIILSLRFFIYQYGLVYHLSITDKTQSVLVYGLSWMIIFVILGLMKGVSVGRRRLSADYQLLFRLIVGSIFLTFLAIFIILIAVAKMTIKDIIVCILAVMPTGWGILLIAQACKPLIKKTWFWGSVRALARGYEVIMGLLLFTPVAFLAWFPFVSEFQTRMLFNQAFSRGLQISRILGGQSNERSSNHKE

SEQ ID NO: 195423 - protein, 99 aa, Glycine max
  Clone ID: PAT_MRT3847_18494C.1.pep
RFDFFRMLSCYYTTIGFYFSTLITVLTVYVFLYGRLYLALSGLEEGLNQKRAIRDNKALQVALASQSVVQIGFLLALPMLMEIGLERGFREALSEFVLM

SEQ ID NO: 195424 - protein, 146 aa, Glycine max
  Clone ID: PAT_MRT3847_18495C.1.pep
MKGVSVGRRRLSADYQLLFRLIEGSIFLTFLAIFIILILLANMTIKDIIVCILAVMPTGWGMLLIAQACKPLIEKTGFWGSVRALARGYEVIMGLLLFTPVAFLAWFPFVSEFQTRMLFNQAFSRGLQISRILGGHRCERSFNHKE

SEQ ID NO: 195425 - protein, 477 aa, Glycine max
  Clone ID: PAT_MRT3847_18496C.1.pep
MKKVPKNSCKSASHRLFKDKAKNRVDDLQLMFLDLQFARKESRTVDAVVLEEQVHQMLREWKAELNEPSPASSLQQGGSLGSFSTDICRLLQLCEEEDDASSPLAAPKPEPNDQTLQAGGKVMFQEGQQQHYFPLVDECKHSTSSVQNVAANNPDGHALEYHQFDLHQDYDHGLYTGFNGTGYCEEDAIPHISSYLPSICPPPSAFLGPKCALWDCPRPAQGLDWCQDYCSSFHAALALNEGPPGMAPVLRPGGIGLKDNLLFAALSAKAQGKDVGIPECEGAATAKSPWNAPELFDLSVLEGETIREWLFFDKPRRAFESGNRKQRSLPDYSGRGWHESRKQVMNEFGGLKRSYYMDPQPLNHFEWHLYEYEISKCDACALYRLELKLVDGKKNSKTKAANDSVADLQKQMGRLSAEFPHDNKRAAKGRAKINAKVGIGGVYPASHRVTPLNGTYEYGLAAPYDYLVDNMGDYYGT

SEQ ID NO: 195426 - protein, 24 aa, Glycine max
  Clone ID: PAT_MRT3847_18497C.1.pep
LEYLKKACLRHNNDMLLTYKRDHS

SEQ ID NO: 195427 - protein, 68 aa, Glycine max
  Clone ID: PAT_MRT3847_18498C.1.pep
VTLKSIDYGCGVLREYIGHRLCRLPSNCLPSVDSHSLLQSTRSTLAVETKSLANLLRLGTDSGEMTSL

SEQ ID NO: 195428 - protein, 72 aa, Glycine max
  unsure (1)..(72): unsure at all Xaa locations
  Clone ID: PAT_MRT3847_18499C.1.pep
IAWGVHQRTERQSSQTPCIALHVRYITTHTTIIRPXSSPEKSYRPNGTNFKACTSGIFTNALTHANIITNLW

SEQ ID NO: 195429 - protein, 50 aa, Glycine max
  Clone ID: PAT_MRT3847_1849C.1.pep
RLNLYLSLSLPSLSPSINVRVTLPDDAAARTRHGTFHHGPSNAATVPTCS

SEQ ID NO: 195430 - protein, 61 aa, Glycine max
  Clone ID: PAT_MRT3847_184C.1.pep
VCYCLRRNFVIYYYYYCARKEKCIFYKKKKKKKKKKKKKKKKKKKKKKKKKKKKKKKIPGA

SEQ ID NO: 195431 - protein, 114 aa, Glycine max
  unsure (1)..(114): unsure at all Xaa locations
  Clone ID: PAT_MRT3847_18500C.1.pep
MKKVPKNSCKSASHRLFKDKAKNRVDDLQLMFLDLQFARKESRTVDAAVLEEQVHQMLREWKAELNEPSPASSLQQGGSLGSFSTDICRXLQXCEEEDDASSQXACSKPEPMIR

SEQ ID NO: 195432 - protein, 83 aa, Glycine max
  unsure (1)..(83): unsure at all Xaa locations
  Clone ID: PAT_MRT3847_18501C.1.pep
MAEVKVLQHCFCRSGQPMPLEELYVCRECYTFXCSFCVNQEIESYFCTNCLENVLQSEAALLFNIFAKCFQCPFCPNTFPSIF

SEQ ID NO: 195433 - protein, 112 aa, Glycine max
  Clone ID: PAT_MRT3847_18502C.1.pep
QNSNPTLDCSQFPLPFLFGNYGFIIGSLRFQHPHFTFPFFGFKNLVFFLLFFSLCLFPFCFLDHSKHEEALINFFSCIPIFFIHHKFGPNYVHLQKHHFRVSHCYLAQNSLL

SEQ ID NO: 195434 - protein, 150 aa, Glycine max
  unsure (1)..(150): unsure at all Xaa locations
  Clone ID: PAT_MRT3847_18503C.1.pep
VTVTLRCSAAEEKEASTSTTSIIFNTVGRAHYAFDIYSLPIQQPPTPDRELRLTDGHFVNFNGHFLSXLPPTHSPPLQLVHVTERNDVVYTSTTTRRKRSVLESVTANRIQIPLLSDTTSTSQVSIKGKPNVTPDGEYLIYVSTRIDSPS

SEQ ID NO: 195435 - protein, 56 aa, Glycine max
  Clone ID: PAT_MRT3847_18504C.1.pep
VKPSKLTANEIASNVDSATTNRGGGKARIKDRPGLEKGGLTKYESPNWKETEPDVK

SEQ ID NO: 195436 - protein, 152 aa, Glycine max
  unsure (1)..(152): unsure at all Xaa locations
  Clone ID: PAT_MRT3847_18505C.1.pep
VRSRSHLVIFEEDHADVRMGEETLSPTNEPPEESLAATNEPPEEPIAATNQPPEEPIAATDHPHEEPIAATDXTSEEAITATSPVTDMQVEHNRNVAVTPPATAQAPHEDDYTSPNRRDCFNMPSSHNISIASLNTNIASERMHTLDYAVSP

SEQ ID NO: 195437 - protein, 80 aa, Glycine max
  Clone ID: PAT_MRT3847_18506C.1.pep
EYLAADVLELVPNTVRNNTKTRIVAMHIILVARNHVELSALMGSATIAIGGALANIYHNLMPKKVAVQGKPHTGSASQEI

SEQ ID NO: 195438 - protein, 68 aa, Glycine max
  unsure (1)..(68): unsure at all Xaa locations
  Clone ID: PAT_MRT3847_18507C.1.pep
RISTVSNRXXMKHQPTDYGRPFLFFFSSNIFLSLPNLTKGTFFSQNLSPPSLFHNINITSNLSNHLIL

SEQ ID NO: 195439 - protein, 123 aa, Glycine max
  Clone ID: PAT_MRT3847_18508C.1.pep
MLTVLTLHHNVGTKCSLVNERSAFLWHKRLCHISRERMEKLINNEILPDLDFTDLNICVGCIKGKQVKHTKKGATRNTQLLEIVHTDICGHSDVSSFGKERYFITIIDDYSRYGYVYLLPEIS

SEQ ID NO: 195440 - protein, 111 aa, Glycine max
  Clone ID: PAT_MRT3847_18509C.1.pep
RENNYWRLKNPSGEMEKPQTYGPIKMGGQWGPSNPTNGAHPPKYFLYPPPGAGAQHKGEKARYKRAEGHRLRAVSPRESQSLQAPNFYGAGHGLYATLTRTKVVKENCRIT

SEQ ID NO: 195441 - protein, 86 aa, Glycine max
  Clone ID: PAT_MRT3847_1850C.1.pep
DNGLQFTNRKLNEFPSGLNIKHRVTSVKHPQTNRRAEAANKVILGDLKKLLDGANGRWVEDLVEILWVNWCPPPPPNLQHMRPLFS

SEQ ID NO: 195442 - protein, 85 aa, Glycine max
  unsure (1)..(85): unsure at all Xaa locations
  Clone ID: PAT_MRT3847_18510C.1.pep
APVRKLGIRLERQSLPRGNELALDFATLRFTLWNNSDAXMRXQNAAVQAXXXVXNRXNXLQLXLXXQXHXXGLXAXLLXLFEPRX

SEQ ID NO: 195443 - protein, 125 aa, Glycine max
  Clone ID: PAT_MRT3847_18511C.1.pep
MVAFTEKQDALVFTPFEAFKANIPQYSVVFYTPILPDAPARKDLPSLLAYAADNPTDKPPEHARKDYRIAPNTPRSPPYSTNPDSPRPQAAAFFFSAPPPPPIHTPPAPPPPAQQHNPNPPLTLL

SEQ ID NO: 195444 - protein, 169 aa, Glycine max
  Clone ID: PAT_MRT3847_18512C.1.pep
MEKLDLATESSSSYPSNLWDCGSTLYDSFELNSFKRQLDSAIANSPIISRTLSMPHLPERSLHAPPEQPPTVMSRKSFKFSRSFHKLLRSVFKSNSKSSTTTTSLSFQVPEKYSKERFYVVYDKSGPVLSTIPEVPEFEIAALSPEISSFVGRSASERFTPTVIGISCA

SEQ ID NO: 195445 - protein, 58 aa, Glycine max
  unsure (1)..(58): unsure at all Xaa locations
  Clone ID: PAT_MRT3847_18513C.1.pep
ESGKRMEILELPSHPFYVGAQFHPEFKSRPARPSXLFLGLILAATGKLEAYISRQNGS

SEQ ID NO: 195446 - protein, 28 aa, Glycine max
  unsure (1)..(28): unsure at all Xaa locations
  Clone ID: PAT_MRT3847_18514C.1.pep
SQTCAHMLVDDGDLSIRASVAALXPNSE

SEQ ID NO: 195447 - protein, 270 aa, Glycine max
  Clone ID: PAT_MRT3847_18515C.1.pep
MVRFSNNVIGLLNFLTFLLSIPILVAGVWLSKQGATECERWLEKPVIALGVFLMLVSLAGLVGACCRVSWLLWLYLLVMFVLIVLLFAFTIFAFVVTNKGAGEVVSNRGYKEYRLGDYSNWLQKKVNNTKTWNRISSCLHSGKVCTEFQSKFLNDTVTQFYTEHLSALQSGCCKPAEECLFTYENSTSWTKPGNVTSYNNPDCDAWNNNQTVLCFNCQSCKAGFLQNFKTEWKRVAVVNIVFLVLLIIVYSIGCCAFRNNRRENWKGYSR

SEQ ID NO: 195448 - protein, 270 aa, Glycine max
  Clone ID: PAT_MRT3847_18516C.1.pep
WVRFSNNVIGLLNFLTFLLSIPILVAGVWLSKQGATECERWLEKPVIALGVFLMLVSLAGLVGACCRVSWLLWLYLLVMFVLIVLLFAFTIFAFVVTNKGAGEVVSNRGYKEYRLGDYSNWLQKRVNNTKTWNRIRSCLQSGKVCTEFQSKFLNDTVTEFYSENLSALQSGCCKPAEECQFSYVNPTTWTKPTNVTNQSNPDCDAWNNDPTVLCFNCQSCKAGLLQNLKTDWKRVAVVNIVFLVFLIIVYSIGCCAFRNNRRENWKGYSR

SEQ ID NO: 195449 - protein, 68 aa, Glycine max
  Clone ID: PAT_MRT3847_18517C.1.pep
RGSTPQNLGTTDHQEREREREKLKNLWSPTVLRLWPFGHEVLISHCRELERTRSNTQYRSYNDIKLRN

SEQ ID NO: 195450 - protein, 68 aa, Glycine max
  Clone ID: PAT_MRT3847_18518C.1.pep
GFKVAAVKILCPERGYDTQVGWKTHSHLPFLTKKLQYQCNTPGPAPYIFQRKETSTARCNLGSFCMGV

SEQ ID NO: 195451 - protein, 49 aa, Glycine max
  Clone ID: PAT_MRT3847_18519C.1.pep
NSDPKNYCPDSRTCRTCLNTHVLIKKNDLMCCYHCFLNNTKEILFIKYI

SEQ ID NO: 195452 - protein, 152 aa, Glycine max
  Clone ID: PAT_MRT3847_1851C.1.pep
AYCFNLKCQPLVVLSFCHWNTSGSGSEPRERTLYEREAEKALKLRNVEVGRAVMAEKPSAGHEGDLEVHTNVYAISMGPLDIYRYDVSIVGERGGERSGVLFTKKYKDDAIAVNRRDCCREVIQCFMNVHRDLVQHAKCLYNVPQSIMYTLK

SEQ ID NO: 195453 - protein, 43 aa, Glycine max
  Clone ID: PAT_MRT3847_18520C.1.pep
LVIKDVSLPYKYVSVCSTFSIYLFQPWFRVIDDEKLTRLGDSE

SEQ ID NO: 195454 - protein, 85 aa, Glycine max
  Clone ID: PAT_MRT3847_18521C.1.pep
MAFRLCVHRPATPSPSPSSPLGPIPLALLACPPASPSEPARPLAAAPSSLRASPPPGPPAPGAPCRRAPAGVASPACCSATSLRG

SEQ ID NO: 195455 - protein, 146 aa, Glycine max
  Clone ID: PAT_MRT3847_18522C.1.pep
MRTSCFLSLPPFTSNQPSIPPKHPQLSSVKNEACWKRQCVVMGVASIIGLEMCNSVAMAHEAIEIKTMPFSNQVVSNSNSYGGAKWSEKRMCPPWQGNSLETIVPENLPRPSARRRYEAVRSSSKTAPPLSAPIIVQSNKGSCFSM

SEQ ID NO: 195456 - protein, 56 aa, Glycine max
  unsure (1)..(56): unsure at all Xaa locations
  Clone ID: PAT_MRT3847_18523C.1.pep
AMTXITXXXLLSXSLLSLAFFFTLKYXXQRSRKXRXLPPGPXPXXIIGNXRSIXSL

SEQ ID NO: 195457 - protein, 176 aa, Glycine max
  Clone ID: PAT_MRT3847_18524C.1.pep
LLSGLNVNRVIFFIVRRHQVKRTLGQFTPAQWDKDEWHPLLGPWRFIQVLSLCIVFLTVELNTFFLKFCLWIPPRNSVVIYRLILWWLLAIPTIREYNSYLQDRKPVKKVGAYCWLSLAICIVELLICIKFGHGLYPKPMPIWLVIFWSGVGVTIVTFLLLWSWQLHRSLGNKKRR

SEQ ID NO: 195458 - protein, 426 aa, Glycine max
  Clone ID: PAT_MRT3847_18525C.1.pep
MESNGHVRVKRNDIIKENGHSHLSNNDDEHDPWTAWAYKPRTITLFVLIGCFLIWASGALDPERDASGDLVTSVKRGVWAMIAVFLAYCLLQAPSTVLIRPHPAIWRLVHGMAVVYLVALTFLLFQKRDDARQFMKFLHPDLGVELPERSYGADCRIYLPENPASRFKNVYETLFDEFVLAHVIGWWGKAILIRNQPLLWVLSIGFELVEYTFRHMLPNFNECWWDSIILDILICNWFGIWAGMHTVRYFDGKTYKWVGLSQQPNIIGKVKRTLGQFTPAQWDKDEWHPLLGPWRFIQVLSLCIVFLTVELNTFFLKFCLWIPPRNSVVIYRLILWWLLAIPTIREYNSYLQDRKPVKKVGAYCWLSLAICIVELLICIKFGHGLYPKSMPIWLVIFWSGVGVTIFTFLLLWSWQLHRTLGNKKRR

SEQ ID NO: 195459 - protein, 79 aa, Glycine max
  Clone ID: PAT_MRT3847_18526C.1.pep
KNLFSFFLLYACESVIELPGYLVDLTFYFLPKRMWQGSWWKSPVACLDLLDKSANEIAFSTNYKNNKECMYVNSMNVVE

SEQ ID NO: 195460 - protein, 310 aa, Glycine max
  Clone ID: PAT_MRT3847_18527C.1.pep
EEKKRSHIDLLATKGYGFEELMHILDEEVSLMEEMANKIVDFEMVVQQASQEIENLESSRGKVMKKLSITVSKFDELHHLSASLLSEVEKLQSQLLERDTEISFLRQEVTRCTNDALLASQMSNQSSDEIFEFLMWVDTIVSHDGVHDIHPDMKSNSKVHECKEILHKKLTSLLSELENLREVAESKDAMLQIERSKVEELSHKTVTLETSLHEKELQLNLLEGVEDTGKGAGTSSEIVEVKPAMNDWSPSGAFVTPQVRSLRKGNSDHVAIAVDVDPGSTSRIEDEEDDKVHGFKSLTTSTIVPRLLDL

SEQ ID NO: 195461 - protein, 455 aa, Glycine max
  Clone ID: PAT_MRT3847_18528C.1.pep
MSTMDSSSIYGVSHRHFLTLFLLFLLPLHSHSAFSHNSSSSSQINSNSILVALLDSHYTELAELVEKALLLQKLEEAVGNHNITIFAPRNQALERDLDPEFKRFLLEPRNLRSLQTLLMSHILPTRIASHHWPSDDLRHRTLSDHRLHLASKPSGHRTVDSAEILRADDVLRPDGVIHGIERLIVPRSVQEDFNRRRNLAAISAVLPEGAPEVDPRTHRLKKPAPVPAGAPPVLPIYDAMAPGPSLAPAPAPGPGGPKHHFNGERQVKDFIHTLLHYGGYNEMADILVNLTSLATEMGRLVSEGYVLTVLAPNDEAMAKLTTDQLSEPGAPEQIMYYHIIPEYQTEESMYNTVRRFGKVSYDTLRLPHKVLAQESDGSVKFGHGDSSAYLFDPDIYTDGRISVQGIDGVLIPPEEEEERTRRTTPLVKVAAPKPRRGKLMEIACSMFGSFGQVCQ

SEQ ID NO: 195462 - protein, 74 aa, Glycine max
  Clone ID: PAT_MRT3847_18529C.1.pep
LYISLNGTMCDTIIVYINSFIYILKMRRSIVIAIPLPLLSMENCLLFTQTIFSYFKTQGKLLLTHMKSAHTTET

SEQ ID NO: 195463 - protein, 65 aa, Glycine max
  Clone ID: PAT_MRT3847_1852C.1.pep
FTYDLLRAITYGLLDSLKSVAVSRTCTIIQIHNLRIGYIIKSQCCSINTKFEIRQIMIGRLGPTR

SEQ ID NO: 195464 - protein, 150 aa, Glycine max
  Clone ID: PAT_MRT3847_18530C.1.pep
ELSDKLEKNEKSLEETERSLFDLEEKHTQANATIMEKEFLISNLLKSEKALVEHAIELRADLENAASDVSNLFSKIERKDKIEEGNRILVQKFQSQLAQQLEDLHKTVAASVIQQEQQLKEMESDMHSFVSTKAEAIENLRMRVGKFKNM

SEQ ID NO: 195465 - protein, 37 aa, Glycine max
  Clone ID: PAT_MRT3847_18531C.1.pep
CFKAMLSTITPAYIFEHYKLLRDAGNGGVIDSFFSFF

SEQ ID NO: 195466 - protein, 41 aa, Glycine max
  Clone ID: PAT_MRT3847_18532C.1.pep
MKSLNSTANQESHVIGSTPFFRFFSFIFCFVILFLLLNYLN

SEQ ID NO: 195467 - protein, 301 aa, Glycine max
  unsure (1)..(301): unsure at all Xaa locations
  Clone ID: PAT_MRT3847_18533C.1.pep
MNIIAGAFKPPCKISICLADGSTPKQVRIKKENGQMVMVPLFQSQENIVGEVIIEPSNGKKVEHNGEKIELLAQIELYFDRGNFYDFRSLVRELDVPGNLYERKRYPFEFSTVEMPYESYNGINVRLRYILKVTISRNYVNNIVEYMDFVVRNYAPAPPINNSIKMEVGIEECLHIEFEYGKSKYHLKDVIVGKIYFLLVRIKIKTMELEVRRRESTGSGTNTYVETETLSKFELMDGVPVRGESIPVRLFLSPYELTPTXHNINNKFSVKYFLNLVLVDEEDRRYFKQQEITVYRLSENS

SEQ ID NO: 195468 - protein, 79 aa, Glycine max
  Clone ID: PAT_MRT3847_18534C.1.pep
KIKGFVNELASVGVPVHHKEYVEALLEGLPSDYASVVSVIESKKRTPSIAEIEALLYRHETRLMRYNKEAQVMNSASIN

SEQ ID NO: 195469 - protein, 187 aa, Glycine max
  Clone ID: PAT_MRT3847_18535C.1.pep
MRPLDEKETSAVFEKLFKFVGNNLKNIVENPSHEGPDSNPGRYCFRLHKNKIFYASESLVKRATNVARPNLVSLGTCIGKYTHGGSFHLTVQALNLLAANAKHKVWLKPQSEMSFLYGNHVLKGALGKLSENIAAGDGVVVFSMADVPLGFGVAAKSTLDCRKLDPNGIVVLHQADVGEYLRMEDEL

SEQ ID NO: 195470 - protein, 211 aa, Glycine max
  unsure (1)..(211): unsure at all Xaa locations
  Clone ID: PAT_MRT3847_18536C.1.pep
KGACGTVYKAMMKSGKTIAVKKLASNREGNNIENSFRAEITTLGRIRHRNIVKLYGFCYQQGSNLLLYEYMERGSLGELLHGNASNLEWPIRFMIALGAAEGLAYLHHDCKPKIIHRDIKSNNILLDENFEAHVGDFGLAKVIDMPQSKSMSAVAGSYGYIAPGXPLSCSGSEKCHSYLCGVALENATWKTTPLPPITGGEPFTWGRNPIR

SEQ ID NO: 195471 - protein, 144 aa, Glycine max
  unsure (1)..(144): unsure at all Xaa locations
  Clone ID: PAT_MRT3847_18537C.1.pep
LVLQLVLLATVSASFVIAYXAKDNPYHNKCVQRRNYERDYFRIHACHSRCNLFKVEKEECXEQWKTPRSRPXTQLPDEEHQHTAEMEEDEDDQARTIPCACTLPRQREEPEHSEEHEWSCTGERRRDKVSDDDDQDEAEVRDER

SEQ ID NO: 195472 - protein, 80 aa, Glycine max
  unsure (1)..(80): unsure at all Xaa locations
  Clone ID: PAT_MRT3847_18538C.1.pep
PQFLLLLTNKTYFSLIYILYTIYLYNTLILPLIITRHHILYISLFYPTLTFKLSKLLLTPXILPYLLLKNIHTILYFNFL

SEQ ID NO: 195473 - protein, 94 aa, Glycine max
  unsure (1)..(94): unsure at all Xaa locations
  Clone ID: PAT_MRT3847_18539C.1.pep
AYXSSVFGXXSAARMTEXGXHXINPXXVXSSTTCXCIXPXXTXTXPFSGXPXXPLXXSXGCNTYXGNPDXXXXTXXXLNXQXELINCXLRXXXX

SEQ ID NO: 195474 - protein, 49 aa, Glycine max
  Clone ID: PAT_MRT3847_1853C.1.pep
PQLHNKKFLVLSGKKLTDICSFFCYTRTGVWPATCWKLHMSVNFLVLNS

SEQ ID NO: 195475 - protein, 73 aa, Glycine max
  unsure (1)..(73): unsure at all Xaa locations
  Clone ID: PAT_MRT3847_18540C.1.pep
SEXFFLAEILTGVVVIFFSXLHXIVTLFFFFKCFKHVLWASFYPFICHKNFCSAGSYHTSNYWLLDALLTKPL

SEQ ID NO: 195476 - protein, 195 aa, Glycine max
  Clone ID: PAT_MRT3847_18541C.1.pep
VGKAVVGGISGVLAQVIASPADLVKVRMQADGQRVSQGLQPRYSGPFDALNKIVRAEGFQGLWKGVFPNIQRAFLVNMGELACYDHAKQFVIRSRIADDNVFAHTFASIMSGLAATSLSCPADVVKTRMMNQAAKKEGKVLYNSSYDCLVKTIKVEGIRALWKGFFPTWARLGPWQFVFWVSYEKFRKFAGLSSF

SEQ ID NO: 195477 - protein, 253 aa, Glycine max
  Clone ID: PAT_MRT3847_18542C.1.pep
MLCLRTPFCLSFSATKHLRQIQARPSRSCIKMASTKTVEHIVLFKVKEETEPSKVSDMVNGLGSLVSLDPVLHLSVGPLLRNRSSALTFTHMLHSRYKSKEDLEAYSAHPSHVSVVKGYVLPIIDDIMSVDWVADDLATASLVPPPGSAVRVSFLKLKEDADKDTVLGVVRGIPESFKQISEFSLGENFSPGRAKGFSIASLAVFPGPRELEAVDSNEELVNYQKDKVRDQIESVVVVDYVVPEPPPAQSASL

SEQ ID NO: 195478 - protein, 56 aa, Glycine max
  unsure (1)..(56): unsure at all Xaa locations
  Clone ID: PAT_MRT3847_18543C.1.pep
KQPVLGGKYIKGFFHNMNPGPVSLFHWTGKGNPWLEINXKKPCPLDSLWAPEDFFR

SEQ ID NO: 195479 - protein, 55 aa, Glycine max
  Clone ID: PAT_MRT3847_18544C.1.pep
AKKKNIFSSRISDSILIRKNCNYVPISEYIVDAEVNTSHKGLRTSGQTHLGDVWT

SEQ ID NO: 195480 - protein, 63 aa, Glycine max
  Clone ID: PAT_MRT3847_18545C.1.pep
RYPHQWGKCATLREDYCANILIALSFPLAAKGTGWNITILRIVHHTTLDVGYYVEGGTIWIRR

SEQ ID NO: 195481 - protein, 84 aa, Glycine max
  unsure (1)..(84): unsure at all Xaa locations
  Clone ID: PAT_MRT3847_18546C.1.pep
SEYKRKMPPKCWQVFIDITHRCLXYEPAKRPTMGEVEVELEHALWLQEXDITNTNGDYPLFSPPIIDMGVELESNMEEIDTRDA

SEQ ID NO: 195482 - protein, 66 aa, Glycine max
  unsure (1)..(66): unsure at all Xaa locations
  Clone ID: PAT_MRT3847_18547C.1.pep
MMDLYGGRTPNTGKNLASLCTNEQGAXRSGKPVHYKCSCLHRMVPSSMCHSGDFTAKNRTNREPIY

SEQ ID NO: 195483 - protein, 430 aa, Glycine max
  Clone ID: PAT_MRT3847_18548C.1.pep
TDVRDLSNDFGNTFMLDEEIELEQKMLRKTELSSSGRNDDEDDEMAVVQQDVQRLVIVTQNGDPKQRSRGGGKESICISNELASAINDGLYFYEQELKHRRSNRRKNNSDSRDRNIKSPSRNSGASNIKVFESIGGNCVEESGSNNSRRKHKVFHKQPSSLKQRFFSSNFKNHGTGRNSNGIISESPPSNSVGFFFASTPPENHGFKPSKLSSSPHGGLSGSSPHGVFSGSPHGVFSGSPHGGFSGSPPVGSMPKSFPPFQHPSHQLLEENGFKQQKYLKYHKRCLNDRKKLGIGCSEEMNTLYRFWSYFLRDMFVPSMYNEFKKLAKEDAAANYNYGIECLFRFYSYGLEKEFRDDLYKDFEQTTLDFYHKGNLYGLEKYWAFHHYRKVRGQKEPLNKHPELDRLLREEYRSLEDFRAKEKNVVKEYFN

SEQ ID NO: 195484 - protein, 62 aa, Glycine max
  Clone ID: PAT_MRT3847_18549C.1.pep
FPNALLESYVWQCQWFIMNLSPVITYGSASVEVWVLSVPHRVLWIATRNNNIWGCLVKLKFK

SEQ ID NO: 195485 - protein, 81 aa, Glycine max
  Clone ID: PAT_MRT3847_1854C.1.pep
TVIQSIEDRINRDDEGGAGGVRPQKKGNVKSRRTEIISIEIIRRVAYNRRHDPKLNKSQQRLELASGRVTPTSTELIIINI

SEQ ID NO: 195486 - protein, 99 aa, Glycine max
  unsure (1)..(99): unsure at all Xaa locations
  Clone ID: PAT_MRT3847_18550C.1.pep
CGGKKGLMSIPDDGTTASEFNEQWVHFCGPAKSMVRAGPSDLSFSEQCSICQKETVNVSRGSIXAYPFVRDGVVXKRLAFKGAHXDFVNGNFQSWHVKC

SEQ ID NO: 195487 - protein, 88 aa, Glycine max
  Clone ID: PAT_MRT3847_18551C.1.pep
NSTHASRTLPLLTTLTTFKFQHHSYYIQNCHHLLTFHQLLSYSFTYTQFNTCFQFQSLNNPFLLSNTLIYITTNHFLLLYHNITTLSL

SEQ ID NO: 195488 - protein, 51 aa, Glycine max
  Clone ID: PAT_MRT3847_18552C.1.pep
GPRRIRVQKGVHVSPTNRLDVATSDRLVSVLLGGSGRLDFYSLSFTEENIM

SEQ ID NO: 195489 - protein, 101 aa, Glycine max
  Clone ID: PAT_MRT3847_18553C.1.pep
GERKLLTDGKFNEGKTIPVSKISAHELHGDQIPLMAQEEMLANRACDLRTAVVSKNCRPKATAMHAGAIKIMIASDSRSDCNIADALFLADAFHTNTENAV

SEQ ID NO: 195490 - protein, 71 aa, Glycine max
  unsure (1)..(71): unsure at all Xaa locations
  Clone ID: PAT_MRT3847_18554C.1.pep
XAFXXXXLLICTVIXXXXIASAGXFYQDFXITWXDXRXXILNNGXLLNLXLXKASXSGFQSKHEYLFXTIG

SEQ ID NO: 195491 - protein, 52 aa, Glycine max
  Clone ID: PAT_MRT3847_18555C.1.pep
NLISLIIRICITVLTIIYTTLFQDVVCKQSRGYTFVVWNWLQHVHFTCSNIP

SEQ ID NO: 195492 - protein, 84 aa, Glycine max
  Clone ID: PAT_MRT3847_18556C.1.pep
AVSNLHKNTKKSFSETIKIMYYHFSERSGLKAPLIADDVYEIIMKNAARLDSEIIYDRDFDYDYFGFKTLERSYLLKVQGKVVE

SEQ ID NO: 195493 - protein, 47 aa, Glycine max
  Clone ID: PAT_MRT3847_18557C.1.pep
MVKVSIVKNAQLRLPPGLRLHPTDEDRVLQNLMRKAFCCPLPASIIT

SEQ ID NO: 195494 - protein, 59 aa, Glycine max
  Clone ID: PAT_MRT3847_18558C.1.pep
LNEGTIAAMAEWCGRLVASCHRHFVNGSPLWWHHRPPSRVYMTEFRPSAIDITAGIKIG

SEQ ID NO: 195495 - protein, 47 aa, Glycine max
  unsure (1)..(47): unsure at all Xaa locations
  Clone ID: PAT_MRT3847_18559C.1.pep
PXXIXSDLXDXVXXXVSAXQXQXLRRLSXIXENHLXLKTRXHKISPH

SEQ ID NO: 195496 - protein, 61 aa, Glycine max
  Clone ID: PAT_MRT3847_1855C.1.pep
LVQSSIPNVTCSGGIYQSLRINQQGVILWLFPFFFNMVLTIQLIQCVAYERVPSKILVYQT

SEQ ID NO: 195497 - protein, 58 aa, Glycine max
  Clone ID: PAT_MRT3847_18560C.1.pep
RIREFKTQILKGSSFPRFILVPGPKTHKIGGNIPRTEGFAENFFFCLPKRVRERGEQR

SEQ ID NO: 195498 - protein, 264 aa, Glycine max
  Clone ID: PAT_MRT3847_18561C.1.pep
MMSIFRQYTLDDSFSQVLVSPKFLKEYQIALTFASDYDDDGVPTNGVFRPTWDLTKVTPESITRFKDKNPDVDIKVFISIGNRGTQHPFKPLNNQTWIQNATMSLTSLINNLHVVHGIDVLYDHIDASPADFTECVGQLIRNLKENGVVSQASISPSSYPNQEYYPLLYSSVPFFVDWVDYQFQSEDQPVLEPTTLVKRYNELTKVYPKTKLFAGYSAENEDWATVSPFVFFLGAMDLLKKRSAPGVSIHYHNYYASEAPNNKD

SEQ ID NO: 195499 - protein, 77 aa, Glycine max
  Clone ID: PAT_MRT3847_18562C.1.pep
QTTGPVLGDNLSNKKCLKAKKKKINKVPTWFLGIILLTFLKSPKKNGDHYLTNSVPLNALSFLLTNQFFTRSPRKKF

SEQ ID NO: 195500 - protein, 43 aa, Glycine max
  Clone ID: PAT_MRT3847_18563C.1.pep
ARAHSHTQLSLSFTNTNTCPFSKLRGHIPKNPSPIKKNIYYLI

SEQ ID NO: 195501 - protein, 76 aa, Glycine max
  Clone ID: PAT_MRT3847_18564C.1.pep
DRVYFAIKIPASGGQGGGVFPSQSKPHIPHDNDNDGDVFLSLFSSHTLPIYSLMGSSLFLPNKNYPLLMRQKGEWV

SEQ ID NO: 195502 - protein, 57 aa, Glycine max
  Clone ID: PAT_MRT3847_18565C.1.pep
TENLILFSSQYDFPLISMTGPLPYLVLISRDERPSLPLPERACFLTSTVRKRVIGLF

SEQ ID NO: 195503 - protein, 109 aa, Glycine max
  unsure (1)..(109): unsure at all Xaa locations
  Clone ID: PAT_MRT3847_18566C.1.pep
MGHEYNRRGERQRLLPTLTRLPDPDVLLRYSEELKRVLTRFDANGYRKISAWEMDIVLQMIGSGVPSEELQRVMEDXLDTDDDGFINLSEVADLCRCHTEVGGDTEMHD

SEQ ID NO: 195504 - protein, 552 aa, Glycine max
  unsure (1)..(552): unsure at all Xaa locations
  Clone ID: PAT_MRT3847_18567C.1.pep
MAVSIGVGATKAISMAIAARHLGTKPYAAAATTTALALLSLHKPLFLPHSSPFSSRRAFCAATLRTADNRVQQFRRKLRVSEIKEGDGADVFGRNLVVQGWVRTLRIQSIVTFLDNNGGSCLSNMQCVLNSNAEGDEQFESDSFIQGASGWVKAVVVKSPKSNEEIRXGFNQIVLIGASDPSFLNKKERACTVFLTIKARLRARTNTFGVVARXVRNALAYATHKIFHENGFVWVSSPIITASDCEGAGEQFCVTTLIPSSHETTDSPVDAIPKTNDGLIDWSQDFFGKPAFLTVSGQLNGETYATALSDVYTFGPTFRAENSNTSRHLAEFWMIEPELAFADLNDDMACATAYLQFVIRHVLDNCKEDMEFFDAWINKGIIDRLSDVADKDVVQITYTEAIDLLSGANKKFEFPVKWGSDLQSEHERYITEEVFSGCPVIIRDYPKDIKAFYMRQNDDGRTVAAMDMLVPGIGELIGGSQREERLEYLEARLDDLKLNKDAYWWYLDLRRYGSVPHAGFGLGFERLVQFATGMDNIRDVIPFPRTPGSAEF

SEQ ID NO: 195505 - protein, 76 aa, Glycine max
  unsure (1)..(76): unsure at all Xaa locations
  Clone ID: PAT_MRT3847_18568C.1.pep
IHVLPQRTXPTMDLLKENLDLPIDLRKGTRSTRNPYPIYNFLSXHCLSSSYHSFVSSLSSISLPKNLCEALDHLGW

SEQ ID NO: 195506 - protein, 58 aa, Glycine max
  Clone ID: PAT_MRT3847_18569C.1.pep
TEYLPCSASNKVPLDQPPPISCFRWFSLSWFITVLFAWPTVISKPFLFQDSLVMYSTV

SEQ ID NO: 195507 - protein, 55 aa, Glycine max
  Clone ID: PAT_MRT3847_1856C.1.pep
GLRKKKLVGHYRRVIFVSFWCFWFFLYFFFFFFFFFFFFFFFFFFFVKGMITFVT

SEQ ID NO: 195508 - protein, 46 aa, Glycine max
  Clone ID: PAT_MRT3847_18570C.1.pep
KSSYIHLLQNYIHLKIHTYTHDHPSHLDHGASAYTHSRTCYPSPSL

SEQ ID NO: 195509 - protein, 301 aa, Glycine max
  unsure (1)..(301): unsure at all Xaa locations
  Clone ID: PAT_MRT3847_18571C.1.pep
MKKKMMASTAISLVFAALFLFSSVHSFYLPGVAPRDFQIGDPLFVKVNKLSSTKTQLPYDYYFLKYCKPKTILNNAENLGEVLRGDRIENSVYTFHMRKEQSCTVVCHETLDAESAKSFKEKIDDEYRVNMILDNLPVAVRRQRRDGGQSTTYEHGVRVGFKGNYQGSKEXEKYFINNHLSFRVMYHKDPETGSARIVGFEVTPNSINHEYKEWNDKNPQVTTCNKDTKNLMQGSTVPQEVDTNKDIVFTYDVSFKESDIKWASRWDTYLLMNDDQIHWFSIINSXMIVLFLSGMVAMIMM

SEQ ID NO: 195510 - protein, 103 aa, Glycine max
  Clone ID: PAT_MRT3847_18572C.1.pep
QERKKTQVEPHNNPEDEVTFTDSTQRLCPPKERKALNTIATKTTTNPHTNNNAAVTRNKTVPVGIHIGLVTIINRGIERMKTVMIMPARRRSMTRPSVTKRRS

SEQ ID NO: 195511 - protein, 513 aa, Glycine max
  unsure (1)..(513): unsure at all Xaa locations
  Clone ID: PAT_MRT3847_18573C.1.pep
QVNMILVNLPEADSRQXMDGCQSITYELGFRVGFKGNYQGSKEXKYFINNHLSFRVMYHKDPETGSARIVGFEVTPNSINHEYKEWNDKNPQVTTCNKDTKNLMQGSTVPQEVDTSKDIVFTYDVSFTESDIKWASRWDTYLLMNDDQIHWFSIINSLMIVLFLSGMVAMIMMRTLYRDIANYNQLETQDEAQEETGWKLVHGDVFRPPVNSNLLCVYVGTGVQIFAMTLVTMIFALLGFLSPSNRGGLMTAMVLLWVFMGLFAGYSSARLYKMFKGTEWKRNTLKTAFMFPGILFAVFFVLNALIWGEQSSGAVPFGTMFALVCLWFGISVPLVFVGSYLGFKKPAIEDPVKTNKIPRQVPEQAWYMKPVFSILIGGILPFGAVFIELFFILTSIWLNQFYYIFGFLFIVFVILLITCAEITIVLCYFQLCSEDYNWWWRSYLTAGSSALYLFLYSIFYFFTKLEISKLVSGILYFGYMIIVSYAFFVLTGTIGFYACFWFVRKIYSSVKID

SEQ ID NO: 195512 - protein, 63 aa, Glycine max
  unsure (1)..(63): unsure at all Xaa locations
  Clone ID: PAT_MRT3847_18574C.1.pep
ERSSPKLFGSVLCFPDAEPAPSGLPWFSSRFLLVLAGFASLCFISDLITFEYWMKKKNKKXFN

SEQ ID NO: 195513 - protein, 76 aa, Glycine max
  unsure (1)..(76): unsure at all Xaa locations
  Clone ID: PAT_MRT3847_18575C.1.pep
ARNSARAQLLGRXXVXXXEXXGXVXTSXWLTDYXQHSWPSXLLXEQPXXSXXVXXSXIXXYXFNMXTSFPDSKAXX

SEQ ID NO: 195514 - protein, 91 aa, Glycine max
  Clone ID: PAT_MRT3847_18576C.1.pep
SSHFLDELAKRERPPPQKGLRPTLQKNKGREGHPEKSTRGAQEKKDHPPEKGTPPPRGAAAKRRTPKGTGMFNSETRHLDKANRDPPTGQG

SEQ ID NO: 195515 - protein, 43 aa, Glycine max
  unsure (1)..(43): unsure at all Xaa locations
  Clone ID: PAT_MRT3847_18577C.1.pep
IEXHSVDTXRFDXXTAYPLKHQXYXSXTRPSSSKVEXMRTRKP

SEQ ID NO: 195516 - protein, 33 aa, Glycine max
  Clone ID: PAT_MRT3847_18578C.1.pep
SILILIHQRRQFKIHELLKSCVFVHVLPRFSLV

SEQ ID NO: 195517 - protein, 51 aa, Glycine max
  Clone ID: PAT_MRT3847_18579C.1.pep
VKKFFLIGGLVEKPRKLYLQGENQYWPNWGTTFVGNSILKPPNLVRWCFGS

SEQ ID NO: 195518 - protein, 117 aa, Glycine max
  unsure (1)..(117): unsure at all Xaa locations
  Clone ID: PAT_MRT3847_1857C.1.pep
MERGEGETGASADNSESGHGDDRCGGAGGRPRGPFRASKATRQAAATAGGAVYRGKEKIQKMLLARLTETVVMWLSDEQEFWGVLEDXSAPLTPLGLQHLILCKVINVEALAWGIRV

SEQ ID NO: 195519 - protein, 64 aa, Glycine max
  unsure (1)..(64): unsure at all Xaa locations
  Clone ID: PAT_MRT3847_18580C.1.pep
MVLDETIICDDKSEWIRNGDYSPSRFQTQAXAVNLNCGAKTQSNPEDTVRVLTKAENGVRVMVI

SEQ ID NO: 195520 - protein, 58 aa, Glycine max
  Clone ID: PAT_MRT3847_18581C.1.pep
QERPRSHTGRTIRHCQIELQLPPGVTFHRTDDERVNHYWCRRCAAQSVARPMIIEFDP

SEQ ID NO: 195521 - protein, 51 aa, Glycine max
  Clone ID: PAT_MRT3847_18582C.1.pep
ELITSLAKTRDIARHQWERCNSAHKLGTGRRARKQKSGKAGGALKERANPK

SEQ ID NO: 195522 - protein, 69 aa, Glycine max
  Clone ID: PAT_MRT3847_18583C.1.pep
YLVCCGLFSLPLIFFISGDQLCAMATSDPCSQFLLVWNKACVILFSGYRGLVGVAFSQVVPRVRLSCND

SEQ ID NO: 195523 - protein, 60 aa, Glycine max
  Clone ID: PAT_MRT3847_18584C.1.pep
RKTNLVAMTCLLNFEGFGVRKEYLHLQWHFCRLEFSWWYLEYAFIMNNSLSCSFPFVNSY

SEQ ID NO: 195524 - protein, 52 aa, Glycine max
  Clone ID: PAT_MRT3847_18585C.1.pep
EGEPYHCSGPMSVHMVHMRKRERNEIWKGVRALMEDSTLVVLIMSLKFRHVS

SEQ ID NO: 195525 - protein, 77 aa, Glycine max
  unsure (1)..(77): unsure at all Xaa locations
  Clone ID: PAT_MRT3847_18586C.1.pep
XTICALKLXSKXDXLLRTXLXVXLSILSLLXCFTNAQXSTNFYDRXCPNLXTIVXNXMEQAXXGXXRXXDSILRXFX

SEQ ID NO: 195526 - protein, 90 aa, Glycine max
  Clone ID: PAT_MRT3847_18587C.1.pep
YRGVWFPRLNKFSPWEKKEGGSSPFLVFPGPGSPLFFKNPPLFLFPFSPEIWGRVLGFSFWEVLRVFLAGRNWVFLKNPGGVSFRLFAGF

SEQ ID NO: 195527 - protein, 75 aa, Glycine max
  Clone ID: PAT_MRT3847_18588C.1.pep
PPPLVLSLPCFSFLRPSNNGTRYGIQNPKKICLALNSKVDSCSLLSIACFSPSFCRLRSRTRAESLDSTDSEFVR

SEQ ID NO: 195528 - protein, 42 aa, Glycine max
  Clone ID: PAT_MRT3847_18589C.1.pep
NLLKRLEPKMVKGAWVIELPKLKGRKRFNGKPLYVLVKNVEI

SEQ ID NO: 195529 - protein, 59 aa, Glycine max
  Clone ID: PAT_MRT3847_1858C.1.pep
QQYFYSNVDSGSLQNINLAPSMNQHNWLHRNHRTIMHRFSSIYFMIRRTTTIKMTISMN

SEQ ID NO: 195530 - protein, 55 aa, Glycine max
  Clone ID: PAT_MRT3847_18590C.1.pep
CNSYAATMNMASFMGIAYIFATVNFEQKNSKPIISSFPHGCANKLLDFVNSLNSM

SEQ ID NO: 195531 - protein, 467 aa, Glycine max
  Clone ID: PAT_MRT3847_18591C.1.pep
MENADVFLGLHDFLERMRQPSAAEFVKAIKSFIVSFSNNAPDPDRDSAAVQAFLAKMEADFRAHPLWAGCSEEELESAGEGLEKYVMTKLFARVFASLPDDVKFDDQLSEKMALIQQFIRPENLDIKPVFQNESSWLLAQKELQKINMYKAPRDKLVCILNCCRVISNLLLNASVASRENPPGADEFLPVLIYVTIKANPPQLHSNLLYIQRFRHQSRLVAEAAYYFTNMLSAESFISNIDAKAISMEEAEFDGNMEFARAMLSGISADTLDPGSPYQNDGQHPRAEPTKHKALNDNNDPALRTPSSVAKSESKKVTFANESLITKVPSLSDLENKGASMILKEDKLNEVFGEFPYLFASVGDLMVGDVEDLLNNYKQLVFKYVSLSKGLGISPTSLPPSNSQNNSEDHAETTIDSSDNGPLDDNSKSEESIDTTDDSSDKVTLEEQKIESDLPKDDLVAPEGDPPS

SEQ ID NO: 195532 - protein, 78 aa, Glycine max
  Clone ID: PAT_MRT3847_18592C.1.pep
LNKLVQEAINAKPTKIVFHLVLIAHIVLCCVLVDIAFAIAVLQKYIYIAIYDRTNCSSQWLCFFGVVWDKMEIMLNKV

SEQ ID NO: 195533 - protein, 186 aa, Glycine max
  Clone ID: PAT_MRT3847_18593C.1.pep
MMDLIPAMQRRTFPPRSRTLSRDFEESLLMKSCNKLDMSSSPTRIVILKPGPDSIRNHEENWTISSGTIQGRNSIEDFLEEVKERLKCELQGKIVKKGSVVRGSGIETPYNEKPSDPKLIARHIVKQVRESVTRDTDTTLLHSESTGSYKSEMQFNGPKLPEFFSRDTKKFLSKRQRNVVRREAHA

SEQ ID NO: 195534 - protein, 360 aa, Glycine max
  Clone ID: PAT_MRT3847_18594C.1.pep
MMYEQQQRFHHQQPMTMDTRRKKKGSSGGIEEADERLEIVDLSGMSLDSLPNPSLNLATICKLDLSNNNLLNIPESLTARLLNMVVLDVHSNQLRSLPNSIGCLYKLKVLNVSGNLIEYLPKTIENCRSLEELNANFNKLIQLPDTIGYELKNLKKLSVNSNKLVFLPRSTSHLTALRILDARLNCLRSLPEDLENLINLETLNVSQNFQYLDSLPYSVGFLLSLVELDVSYNKIRALPDSIGCLKKLQKISVEGNPLSSPPPELVEQGLHAVKEYLCQKMNAGHQSPTTNNKKSKSWVGRLVRYGTFNGIGQSRAAGAREEREAFIVPDYRPIDGLASPRYMGMFSPRRLFSPRTYFTN

SEQ ID NO: 195535 - protein, 186 aa, Glycine max
  unsure (1)..(186): unsure at all Xaa locations
  Clone ID: PAT_MRT3847_18595C.1.pep
TRTSLEIQSKEEEEEAEHRTQSKTRMLLILMKVGNKLIINPNTYATFIGLIWASIHFRWGVDMPDVVNQSIEILASGGLGMATFSLGLFMASSNRIIVCGPRMTLVAMGLKFLAGPAIMAVASIVIGLRDRMLKVAIIQAALPQGIVPFVFAREYNVNPGIXSTGVLLGMLMALPVALTYYLLLSL

SEQ ID NO: 195536 - protein, 295 aa, Glycine max
  unsure (1)..(295): unsure at all Xaa locations
  Clone ID: PAT_MRT3847_18596C.1.pep
IRLERSLKKSTDRGNNNNNGNYNNNHNHHANGEDNVLITPVPRFPDKSDDTEDMKICLSKVYKAEKVELSEDRMSAGSTKGYRMVRATRGVVEGAWYFEIRVVKLGESGHTRLGWSTEKGDLQAPVGYDGNSFGYRDIDGRDXKSALREKYGEEGYKEGDVIGFYINLPDGEQYAPKSSQLVWYKGQRYVYAQDSKEDPPKLVPGSEISFFKNGICQGVAFKDLQGGRYYPAASMFTLPNEPNCTVKFNFGPDFECFPEDFNERPIPRPMSEVPYLGFDNKVENEESNEKKSQKE

SEQ ID NO: 195537 - protein, 54 aa, Glycine max
  Clone ID: PAT_MRT3847_18597C.1.pep
KINLVKLLFSFIYLLLFLTIILEKEVFYKFLSYKISYHKCSHETYYNMLKTSLF

SEQ ID NO: 195538 - protein, 74 aa, Glycine max
  Clone ID: PAT_MRT3847_18598C.1.pep
RIEKPHPVYVPRDETFEEIKQDTFSAGRLKALFHTTYEFPTSTLSCPHEPHHVAPDLDEPYLYTRTERRGDVRV

SEQ ID NO: 195539 - protein, 141 aa, Glycine max
  Clone ID: PAT_MRT3847_18599C.1.pep
MVAALLAEIESGHIHQSSRDFLWWKPDPNGLFSTKFAYKVLQEAHNNANEDRASKIMWRLKIPPRASAFSWRLFKNRLPTRDNLRRRQVTLPSYSCPLCEHEEESVNHLMFNCSKTRSLWWEPMRWVNRVGPLPIDPKNHF

SEQ ID NO: 195540 - protein, 138 aa, Glycine max
  Clone ID: PAT_MRT3847_1859C.1.pep
LIAQIFSYLQCSFNYTKYLTTLAEFPYELSKMKNETLITKTKEPFNSFSYQTKTPPNANKVQKLGSRISESLLDIIPHCFPARLKTLLLRSHVNKREISSDAEEQTADDKYAAGHRHLPCRRRIRPQPDAWVDGDSGP

SEQ ID NO: 195541 - protein, 58 aa, Glycine max
  Clone ID: PAT_MRT3847_185C.1.pep
NHHNWESDDRRGPSTRTLSFNHRREKMIRENSSCFQLDSKLLRINLTLYTKLTLHFSI

SEQ ID NO: 195542 - protein, 47 aa, Glycine max
  Clone ID: PAT_MRT3847_18600C.1.pep
MSTFGAAANTNPNKSYEVAQPPPDSISSICVKSKTNILWTTSWDNQV

SEQ ID NO: 195543 - protein, 30 aa, Glycine max
  unsure (1)..(30): unsure at all Xaa locations
  Clone ID: PAT_MRT3847_18601C.1.pep
MLIGGEIFLIFCHNSSLFFKGPCXLLLFLV

SEQ ID NO: 195544 - protein, 55 aa, Glycine max
  unsure (1)..(55): unsure at all Xaa locations
  Clone ID: PAT_MRT3847_18602C.1.pep
FSTLFLAMALSLAEWEMELVQVRLVWGDIGDIVNFKSEEREGNQLPRKMSCYXQK

SEQ ID NO: 195545 - protein, 61 aa, Glycine max
  Clone ID: PAT_MRT3847_18603C.1.pep
PVPIPIGLLFLEKKIFPYLPFWGPSSYSPNFYFMGKGKGPLLIFLICNQIKAFGEKKKPHV

SEQ ID NO: 195546 - protein, 49 aa, Glycine max
  unsure (1)..(49): unsure at all Xaa locations
  Clone ID: PAT_MRT3847_18604C.1.pep
KFAELYETLVLENLPESFQSSFPSLPFPSLSERGDFDLKEXXESPYFFN

SEQ ID NO: 195547 - protein, 44 aa, Glycine max
  unsure (1)..(44): unsure at all Xaa locations
  Clone ID: PAT_MRT3847_18605C.1.pep
PLMNALELAQLPYLNMXLKETLRLYPAGAWLVTRECLYDVTING

SEQ ID NO: 195548 - protein, 141 aa, Glycine max
  unsure (1)..(141): unsure at all Xaa locations
  Clone ID: PAT_MRT3847_18606C.1.pep
GRWGPLLEQATFRNRHRLYLSEQTDGSVPNTLVKPRVAAEFNEEARSPFFKKYKTVLHPGEVNRIREFQQNSKIVATHTDCPEVLIWDVETQPNRHAVLGATTSRPDLXVLTGHKDNAEFALAMCPTEPFILSGVHRSSVV

SEQ ID NO: 195549 - protein, 454 aa, Glycine max
  unsure (1)..(454): unsure at all Xaa locations
  Clone ID: PAT_MRT3847_18607C.1.pep
VKEKEKVEERYTQWKSLVPVLYHWLGTHNLACSSLSCRWGPQLEQATYKNRHRLYLSEQTDGSVPNTLVIANCEVVKPRVAAAEHISQFNEEARSPFVKKHKTILHPGEVNRIREFQQNNKIVATHTDCPEVLIWDVETQPNRHAVLGATTSRPDLVLTGHKDNAEFALAMCPTEPFVLSGGKDKCVVLWSVHDHISTLAVETASNVKQGSKTGGNNTKATESPCIEPRGIYQGHEDTVEDVQFCPSSALEFCSVGDDSRLILWDARVGSAPVVKVDKAHNGDLHCVDWSPHDINFILTGSADNTIHMFDRRNLTSSGVGSPVYKFEGHDAAVLCVQWSPDKSSVFGSTAEDGILNIWDHDKVGKTTDSADSKASNAPPGLFFRHAGHRDKVVDFPWNASDPWTIVSVSDDCESSGGGGTLQIWRMXRDIIYRPEEEVLTELDKFRSHIFGCNS

SEQ ID NO: 195550 - protein, 63 aa, Glycine max
  Clone ID: PAT_MRT3847_18608C.1.pep
TIHGLAWEIICLSVNKPLPLGHCCLISECFVGKNRLITKQNQELSTNIVSVFSNFIKDRVFMA

SEQ ID NO: 195551 - protein, 52 aa, Glycine max
  Clone ID: PAT_MRT3847_18609C.1.pep
LTFQLLFFYYIIKNKHLMNFKIYVHPNQNLHTGKMEPNFYSKNSVQKHLKKI

SEQ ID NO: 195552 - protein, 129 aa, Glycine max
  Clone ID: PAT_MRT3847_1860C.1.pep
MADEANRTAFLEIQSRMIDTTGKIKQVQTQMRSKEAEKKRAFLTMEELKQVPDDTNVYKSIGRMFVLETKATLMNEQETKFKDGEASITALQSSKEYLEKQMAEVETNLRELLQQDPGLARQIMSMNVV

SEQ ID NO: 195553 - protein, 37 aa, Glycine max
  Clone ID: PAT_MRT3847_18610C.1.pep
GSSKNILLWLMPPTGCMSARLVTDIVDIQADSAGRAS

SEQ ID NO: 195554 - protein, 71 aa, Glycine max
  Clone ID: PAT_MRT3847_18611C.1.pep
IGSTSNLFDDAKDATHLQFEGFVVSHIHLFIQVSAPQSGIVKFQLGWAFQHLCSSPSMSWLITLCTISMCH

SEQ ID NO: 195555 - protein, 82 aa, Glycine max
  Clone ID: PAT_MRT3847_18612C.1.pep
SKAPFIAEYKGFHIDGCEASVNAKFCATQGKRWWDQAQYRDLDASQWRWLRWVRRKYTIYNYCTDRSRYPQLPPECRRNRDI

SEQ ID NO: 195556 - protein, 75 aa, Glycine max
  Clone ID: PAT_MRT3847_18613C.1.pep
DISQSPANPLACLAGLDGWCIRTAKGCNWRTSTDNSYVYAHARTLVTPLVQTYINFTGTPPLLVTSPYHCPCSTS

SEQ ID NO: 195557 - protein, 113 aa, Glycine max
  Clone ID: PAT_MRT3847_18614C.1.pep
AFSDVLPLPFSIFISKLHEYRFVFPSRLLLCFLFLPLFAFVCVFYFFTACSLFLLKLRFLSHKASIFISKFHVQRFVFLLSLSKLNFFCVPELSLSWFPRHFHFLSKKTSIFA

SEQ ID NO: 195558 - protein, 66 aa, Glycine max
  Clone ID: PAT_MRT3847_18615C.1.pep
NGSITVDFRIIDNKRYSKLCRSYLSVHCAPVSIFLRNLGLELFSICRNGVVFIIQLHNGHHPQERV

SEQ ID NO: 195559 - protein, 52 aa, Glycine max
  Clone ID: PAT_MRT3847_18616C.1.pep
MCTYTFSFMIFLGAYYMFFSESFSFHNLSLCAFSSVQRWYQWVSMNFTYTCL

SEQ ID NO: 195560 - protein, 66 aa, Glycine max
  Clone ID: PAT_MRT3847_18617C.1.pep
RSLQKGRSERQVPLDMLYKLAFVHDKMYNQRTFLTLECVRIKRVWDELRLGYHTYPAQEDIGPSLI

SEQ ID NO: 195561 - protein, 120 aa, Glycine max
  Clone ID: PAT_MRT3847_18618C.1.pep
MKQVFVAFLALQVVLVLTIMAADPAGKGYDCEKAKRSLKSCMEYLTGNVDSPSAACCNGVKELKASAPTKDEKIAECQCIEEALTPIPNFKQDRAIALPKECGVDVGFPIPKNFTCSSIS

SEQ ID NO: 195562 - protein, 55 aa, Glycine max
  Clone ID: PAT_MRT3847_18619C.1.pep
PIFISPVIFLGRVLFLRGGGGMSKELFFRGLYKEPVISPKKHCPCECEQNQMKNS

SEQ ID NO: 195563 - protein, 82 aa, Glycine max
  Clone ID: PAT_MRT3847_1861C.1.pep
RKPGTHAAGHANDHATEKKAVPLHTKKNAKKRGKKGKRRQSDRKTADKTNRRKPKGRETRRRRKSKGGTEKPNRGYGTNKKT

SEQ ID NO: 195564 - protein, 35 aa, Glycine max
  Clone ID: PAT_MRT3847_18620C.1.pep
GPKGASSWWDHMRAVSFNVGSSRIRSFYDVISIMI

SEQ ID NO: 195565 - protein, 97 aa, Glycine max
  Clone ID: PAT_MRT3847_18621C.1.pep
WLDLKYKRISSSHSKLSGVSESSIRRACMCLPAGQGVGRIIYVRPSHSRRSVYRGGRAFVKRYRLLGIVFDIKGWVPPGHGSSFFCLIRDFRHANFP

SEQ ID NO: 195566 - protein, 146 aa, Glycine max
  Clone ID: PAT_MRT3847_18622C.1.pep
MPDYLGADQRKTKEDEKDDKPIRALDEGDIALLKTYGQSTYSRQIKQVEDDIQQLLKKINELTGIKESDTGLAPPALWDLAADKQTLQSEQPLQVARCTKIINADSEDPKYIINVKQFAKFVVDLSDQVAPTDIEEGMRVGVDRNK

SEQ ID NO: 195567 - protein, 65 aa, Glycine max
  Clone ID: PAT_MRT3847_18623C.1.pep
LYLYANKLNGKISIDIKLPPQLDVLYMQSNSLYGLLTDYHTANMSKLHIIHLSDNSISPFAFSQN

SEQ ID NO: 195568 - protein, 67 aa, Glycine max
  Clone ID: PAT_MRT3847_18624C.1.pep
LPPHMGLEIPYEFRPIMRILTVHVPKVTTFSQCSELVEASPSEEMLLQECHTPTSTSTVAQTLLVCP

SEQ ID NO: 195569 - protein, 64 aa, Glycine max
  Clone ID: PAT_MRT3847_18625C.1.pep
RHSISDSSVLTCSFAILVQLSKYSLLLFVNLLRQLGSLLFYSIHSSSHNHPDLLGLSIQRKVLI

SEQ ID NO: 195570 - protein, 38 aa, Glycine max
  Clone ID: PAT_MRT3847_18626C.1.pep
WMRFLGLVIIIRTNWPSAWRTPGVSAAVRASVPAFLPV

SEQ ID NO: 195571 - protein, 82 aa, Glycine max
  Clone ID: PAT_MRT3847_18627C.1.pep
RGEAPLFLTRGKTTLIMGEIKKQKPLFCHHNNIYQWAETLVFSTETWPVLGTSTEKMARAPPENLPPLVQKQMGGCSFNNSS

SEQ ID NO: 195572 - protein, 142 aa, Glycine max
  Clone ID: PAT_MRT3847_18628C.1.pep
NDRSEKLEVSELNQQGASNGEGHQLDGHEDTGLSTEKSINTLNGNHIDKDGSAAEDVDACSLSAENNHSKSPELQICTPRREVELVALENEISDLNERLEALEFDHDLLEHLTNSLQNGNDGKQFIQDIAHRLHELRKIAIR

SEQ ID NO: 195573 - protein, 51 aa, Glycine max
  Clone ID: PAT_MRT3847_18629C.1.pep
KNKKAAFLLICDISWKLYPEGTPPFPPQGAPLGGFPNLSLDMGPGGENTFF

SEQ ID NO: 195574 - protein, 157 aa, Glycine max
  unsure (1)..(157): unsure at all Xaa locations
  Clone ID: PAT_MRT3847_1862C.1.pep
KEGHHKLYIYARPVEIYNEQVRDLLAEDKTDNKLEIRSCNDDGLSLPDAILHSVKSPTDVMTLIKLGEVNRAVSSTAMNNRSSRSHSVLTVHVNGKDTSGSSIRSCLHLVDLAGSERLDKSDVTGQRLKEAQVIXQSLSLVGDVITGLARKNSYIPY

SEQ ID NO: 195575 - protein, 38 aa, Glycine max
  Clone ID: PAT_MRT3847_18630C.1.pep
ILNLYSQDQTSNLKLSDHVWYSYHLRLHTVLYPHLYAT

SEQ ID NO: 195576 - protein, 190 aa, Glycine max
  Clone ID: PAT_MRT3847_18631C.1.pep
MAEDLTHIAQLLDQTLSPDATAVRTATAALDLISLTPHFPFYLLSISTGGGNQGQKIAAATYLKNLTRRTVDSTGVKPSNVSKEFKEQLMQALLQVELSVLKILVEVVRAIAAADFVKQNLWPELVPNLQSAIQNSHLTSGSNTKWSTVNALLGLHALLRPFQNFLNPKGAKEPVPPQLGLISKEDLEPL

SEQ ID NO: 195577 - protein, 74 aa, Glycine max
  Clone ID: PAT_MRT3847_18632C.1.pep
PIILERVDPAELSSRVELNTENEAILHSFHRVDSIQSGLGKAHLVPPGCSIVDALSKQGAMLESIMSVCVGLAP

SEQ ID NO: 195578 - protein, 95 aa, Glycine max
  unsure (1)..(95): unsure at all Xaa locations
  Clone ID: PAT_MRT3847_18633C.1.pep
FDTSGALPRTPHTXQQXYVKTXGXXXRHSLXSPXALNTTMTXRGXFPSXAPREXYXSPIXXTKXLXASXSHXSVHTQSLXSCVSHIXXCAHXXSP

SEQ ID NO: 195579 - protein, 75 aa, Glycine max
  unsure (1)..(75): unsure at all Xaa locations
  Clone ID: PAT_MRT3847_18634C.1.pep
GPLFPPCGTILVPVQCHAYDICPLRMNTGYGARTPEVKCASWXLAVKAHNIFGFETIPEKCVEAGMEYIHGEQYR

SEQ ID NO: 195580 - protein, 81 aa, Glycine max
  unsure (1)..(81): unsure at all Xaa locations
  Clone ID: PAT_MRT3847_18635C.1.pep
YNQAFEEKKIHLHTKVVKMYEASLAEIDSLVRAPGXIGLSKNSAEVQTFLEKLVRIHCPGSKVCISSILKVCLSLGVRLRL

SEQ ID NO: 195581 - protein, 49 aa, Glycine max
  unsure (1)..(49): unsure at all Xaa locations
  Clone ID: PAT_MRT3847_18636C.1.pep
KEGGKRGKALTHXQSQFVMGLLNVKSRGSKSRGNTAFRKPGAKITSAHH

SEQ ID NO: 195582 - protein, 58 aa, Glycine max
  Clone ID: PAT_MRT3847_18637C.1.pep
KTKRVIDCQSHKKVWARIGTMKTKPERQSVCGSNVDLLDSPQNHNPISATFLTQHHPI

SEQ ID NO: 195583 - protein, 47 aa, Glycine max
  Clone ID: PAT_MRT3847_18638C.1.pep
KGLGKISTGGQSTIRVFFFFPLTKYFGLDLGRMFCRFAYSKKPLSPS

SEQ ID NO: 195584 - protein, 81 aa, Glycine max
  Clone ID: PAT_MRT3847_18639C.1.pep
WSRSLSSSTYVVSPPLELGARPKSTIAAIHQCKQPLLRYPPPKESSPRYFHHFQPREKMGGVVGPGNNGAAAAGGAPSQTI

SEQ ID NO: 195585 - protein, 86 aa, Glycine max
  unsure (1)..(86): unsure at all Xaa locations
  Clone ID: PAT_MRT3847_1863C.1.pep
KIQLLAPPPFSRGGKKMGGEFVXVGPELLLRKKGLFFCWGGVPKIFFLLPNTGSPPPKGGPPPPGGESFVLFSPPKRVVFFCFAPP

SEQ ID NO: 195586 - protein, 45 aa, Glycine max
  Clone ID: PAT_MRT3847_18640C.1.pep
SLRASTLPFLLVKTYLRRIRNVYTDVQSSEFTSRLWECSRMMIFR

SEQ ID NO: 195587 - protein, 221 aa, Glycine max
  Clone ID: PAT_MRT3847_18641C.1.pep
TLLRVLAKPFSPFSNSVNAAKCCSICSQSVSHSHSVSVNETKMLLKLCDFGSACHVGDAEPAPYLVSRFYRAPEIMLGLPYDFGIDLWSVAVTLYEVYTGKIMFPGKSNNQMLKFMMDLRGKFPNKVIRKAVFKDQHFDYNCNFLYHETDKVTGKDKVTVLTNIKLLRNLPAELSGDQELDRDGFAKVDHFRSLLEQMTALDPSKRISCSDALKHPFIVEK

SEQ ID NO: 195588 - protein, 57 aa, Glycine max
  Clone ID: PAT_MRT3847_18642C.1.pep
YIHHHPSSNLSLTYLFTSLYPSHYNKSIQPFLKFYSYLNSIYFLTNLLNSSLQKNHP

SEQ ID NO: 195589 - protein, 81 aa, Glycine max
  Clone ID: PAT_MRT3847_18643C.1.pep
KSYLKKGGLFGWGKRYPQSTSNIIINNQFQPTLFFFFKFTTLIEPFSNPFFCGTLNNLCFRGPQQILPVPSQNLKVFKKPC

SEQ ID NO: 195590 - protein, 86 aa, Glycine max
  Clone ID: PAT_MRT3847_18644C.1.pep
HPAYDYKKTPERDFGMIAMHGLNKLLAYGALPMSSSLARRSLVHDDGCDFMNFGLRIDLRPHRINNKHFQIPTLSPNILHEAKPYS

SEQ ID NO: 195591 - protein, 204 aa, Glycine max
  unsure (1)..(204): unsure at all Xaa locations
  Clone ID: PAT_MRT3847_18645C.1.pep
IRIFNYDIFIIVNPFPDIVRELLNTWPEVCKLCDSSNTSPLYSAAVQDHLDVVDAILDVDVSCMFIVRKNGKTSLHNAARYXGVLRIVKTLIARDPGIVCIKDKKGQTALHMAVKGQCTSVVEEILLADPSILNERDKKGNTALHMATRKCRSQIVGLLLSYSAVDVNAINKQQETALDLADKLPYGDSALEIKEALAEYGAKH

SEQ ID NO: 195592 - protein, 53 aa, Glycine max
  Clone ID: PAT_MRT3847_18646C.1.pep
AGAQIFSEGGLDYLGNPNLVHAQSILAVLRLQDILMGLAEGYRINGLDGVGEG

SEQ ID NO: 195593 - protein, 94 aa, Glycine max
  unsure (1)..(94): unsure at all Xaa locations
  Clone ID: PAT_MRT3847_18647C.1.pep
SRVRGRVGGRVKLASEGLDYTTHLAVEGVAQTPDIVGERQYGLDAGTXNVVECQAVVNIVKSYVGRDALHMMLVHDIGDWTMNNDCDTILKMRE

SEQ ID NO: 195594 - protein, 64 aa, Glycine max
  Clone ID: PAT_MRT3847_18648C.1.pep
DSEVPWHLIAIAIFFTLIKLPGPYYPYWVRIIIPHFANGVLLRTLLFAILWYRRPKALKMLGSS

SEQ ID NO: 195595 - protein, 73 aa, Glycine max
  Clone ID: PAT_MRT3847_18649C.1.pep
RPVLILIFLLVRPSRPFSFCFRLLECEELWVVSPLTQPRDLVLVFLYLILLHFGSMHHKQIPVRCSKKKKKNR

SEQ ID NO: 195596 - protein, 75 aa, Glycine max
  Clone ID: PAT_MRT3847_1864C.1.pep
RREKKKGPWGENFQRDFFKIQKLNPPLGHKFKKKRTPVTKKGKKNLGTHTLGALGENTLYTWGGLENILSKIVWG

SEQ ID NO: 195597 - protein, 69 aa, Glycine max
  unsure (1)..(69): unsure at all Xaa locations
  Clone ID: PAT_MRT3847_18650C.1.pep
TVIMASGIKPSXXLFMALAPAGGHLVTSTDCYRQTRIFIHTSLPTTGIATTALDPAEDEASEFFLAAHK

SEQ ID NO: 195598 - protein, 37 aa, Glycine max
  Clone ID: PAT_MRT3847_18651C.1.pep
RLPYGCLKTSEWPLSVYRRNNSLLAERTKRCGQAHHT

SEQ ID NO: 195599 - protein, 182 aa, Glycine max
  unsure (1)..(182): unsure at all Xaa locations
  Clone ID: PAT_MRT3847_18652C.1.pep
SLESYNLWLLGLLGNGELLEARLVLDEMAAKDIEPNAYTYNIMVDGLCRNHMLSDAXGLMDLMMKNGVYPDTVTYSTLLHGYCSRGKVFEAKSVLREMIRNDCQPNTYTCNTLLDSLWKEGRTLEAEEMLQKMNEKCYQPDTVICNIVVNGLCRNGELNKARFLICLMESHRQLQLMDFAKL

SEQ ID NO: 195600 - protein, 90 aa, Glycine max
  Clone ID: PAT_MRT3847_18653C.1.pep
PKIASPNAIGTAQDSARIERVVSFYAGFSRGPAPQTKATGLLGRYQARYFNQKFPGPLVPAHGGIFFEGFRHEVFFPFPPPQKPPPLNGH

SEQ ID NO: 195601 - protein, 104 aa, Glycine max
  Clone ID: PAT_MRT3847_18654C.1.pep
CALFLPVTNSKGGVYGGPGGVQILKQIVEALFIIGWNLVVTSIICVVISFIVPLRMTEEELLIGDDAVHGEEAYALWGDGEKLSIYKDDTTHHGVVSSGATQVV

SEQ ID NO: 195602 - protein, 105 aa, Glycine max
  unsure (1)..(105): unsure at all Xaa locations
  Clone ID: PAT_MRT3847_18655C.1.pep
LKSVNLEQESSTFKETPVVIMSSENVLPRIDRYPYEGAXDFIVKPVKLSDVXRLKDYMXXKEVRGELTKKGRDPLELLDTSDSHITTVHFITLPSSLNSVIDLQT

SEQ ID NO: 195603 - protein, 80 aa, Glycine max
  Clone ID: PAT_MRT3847_18656C.1.pep
RTGHGAAGNTQSVPKRRTHSPDARYIFQSCDSARALLEICVNRLHPGGALKYLPWRYILWFTYASVLLLKALYSGAMLRA

SEQ ID NO: 195604 - protein, 57 aa, Glycine max
  unsure (1)..(57): unsure at all Xaa locations
  Clone ID: PAT_MRT3847_18657C.1.pep
PLERPLXXXFFFFFFLNQFNLIYYIYTEVLFKTFITFKSKPDXTFXQCLLYLYTKNF

SEQ ID NO: 195605 - protein, 73 aa, Glycine max
  unsure (1)..(73): unsure at all Xaa locations
  Clone ID: PAT_MRT3847_18658C.1.pep
DDPLIHIAYCLICHYXDIISNFHTPCSFNYILNYAYKKCVQHCCHDKXDISCHIFHHPYQPSYTALPPHSNPL

SEQ ID NO: 195606 - protein, 94 aa, Glycine max
  Clone ID: PAT_MRT3847_18659C.1.pep
MASLKVACAVSMNRMVEGAMNAPPMAQAIITCRQVCPDMFHCFSYPRSGRKPSQACCNGVKHLSSAANTTVDRQGACNCLKNPCNNMGQNLNAS

SEQ ID NO: 195607 - protein, 71 aa, Glycine max
  Clone ID: PAT_MRT3847_1865C.1.pep
MSKKKKKKKKKKKKKKKKKKKKPKKNKKKKKKKKKNRPPKRIKPNVPFHATSNPFKSVTKIQFTGRPLTTS

SEQ ID NO: 195608 - protein, 84 aa, Glycine max
  Clone ID: PAT_MRT3847_18660C.1.pep
FRLRVRRFEILINREHRLPHLKTGNKSNRYLIPGTYQVLPTYLCTISYGNENHSVCWSQTSGIICFATLRLSDEHSTIRYETLR

SEQ ID NO: 195609 - protein, 125 aa, Glycine max
  Clone ID: PAT_MRT3847_18661C.1.pep
KGFFGCPQDVVVSPPFVGDTRPSVFAAKAGIALNKNFVELVSWGAHEWGYSSRVIGLLVIVAKKFFLLRWFYHFVVVQLRFSVLGGQKFRRFNKSVSGPSVVNQERAFPSFLLPLLCGGWSFLDF

SEQ ID NO: 195610 - protein, 38 aa, Glycine max
  Clone ID: PAT_MRT3847_18662C.1.pep
KYFQLKPTWAHICLFLFTMTKFRGRLFLNRKDFFQKKK

SEQ ID NO: 195611 - protein, 93 aa, Glycine max
  Clone ID: PAT_MRT3847_18663C.1.pep
MSYLNRVWMAATVAVAQGHTDPGHKCKTALTSIHHNRSRLFSGGALSDLRPLSGVVGSDVAGSVAGSSDVENRVRQADDSLRKVMYLSCWGQG

SEQ ID NO: 195612 - protein, 155 aa, Glycine max
  Clone ID: PAT_MRT3847_18664C.1.pep
NLASAPCPTKGGLFYSFFSPPPPIQGGPGMAPPPLSKEDPGPPCWYLCASAPPPANKKHPGFFFSIGRALLFSKTPNFLSSVFFPPPRGAPPFFFFTKGGRTFFFGGGPFPREPKIFAGFLPFLYLGGTKKIFFFFAISRCFPFLKLFGCNWQNF

SEQ ID NO: 195613 - protein, 327 aa, Glycine max
  unsure (1)..(327): unsure at all Xaa locations
  Clone ID: PAT_MRT3847_18665C.1.pep
MALEAVVFPQDPFAYGCNKDYLYSLVGATPNYGNFQAAEEEKVLLGIINNNIEHNLYANWDSSSTSMLQNVKEQQWDSHSSPEACTVDQSMTTAPFPPPPPSSSVEATVTATSRRKRRRTKSAKNTEEIENQRRTHIAVERNRRKQMNEYLAXVLRSLMPSSYVQRGDQASIIGGAINFVKELEQLLQSMEGQKRTNQAQENVVGLNGSTTTPFAEFFTFPQYTTRGRTMAQEQKQWAVADIEVTMVDSHANLKVLSKKQPGQLMKIVVGLQSLMLSILHLNVSTLDDMVLYSISVKVEDGCRLNTVDEIAAAVNQLLRTIQEVTFS

SEQ ID NO: 195614 - protein, 37 aa, Glycine max
  Clone ID: PAT_MRT3847_18666C.1.pep
MSTKQGGKAKPLKKPKSDKKDYDKVDMANIQKNKEEE

SEQ ID NO: 195615 - protein, 151 aa, Glycine max
  Clone ID: PAT_MRT3847_18667C.1.pep
NEHPRVKVTYHDIEAIDPDYFKNLKWMLENDISDVLDLTFSIDADEEKLILYERTEVTDYELIPGGRNIKVTEENKHQYVDLVAEHRLTTAIRPQINYFLEGFIELIPRELISIFNDKELELLISGLPDIDLDDLRANTEYSGYSAASPVI

SEQ ID NO: 195616 - protein, 87 aa, Glycine max
  Clone ID: PAT_MRT3847_18668C.1.pep
MEFSHSKQWKEFEVSVTEGVEETNHTGGTKESGDMTMDDRGGDPSVDCHFIRDEYLTGNIAPTYALDPTHFNSLSCKLGISNLHAPT

SEQ ID NO: 195617 - protein, 70 aa, Glycine max
  unsure (1)..(70): unsure at all Xaa locations
  Clone ID: PAT_MRT3847_18669C.1.pep
RYNKRWWQXYNYVLSAARDARIRXXXGVLIFFALXNXXXNLKWXXSEXXHCPLAXXXTARRHEXXGXPVX

SEQ ID NO: 195618 - protein, 43 aa, Glycine max
  Clone ID: PAT_MRT3847_1866C.1.pep
LPCTDDIYRTHIAIHRLICMDPQLTVIQNNIGRRCWRSCRRWS

SEQ ID NO: 195619 - protein, 58 aa, Glycine max
  Clone ID: PAT_MRT3847_18670C.1.pep
MHAWFAAVADTRYAVVVPLIGVQGLRWALYNDKWQARVNQLKPLFEGTIHSSMLTVDN

SEQ ID NO: 195620 - protein, 80 aa, Glycine max
  Clone ID: PAT_MRT3847_18671C.1.pep
PSWSVIYRVIFRLQRGRIGDVREVVHENDGSRLKIPVVSQPGYNHHHIQGANSFHQPLIMLFTSIRHRANFIFRHCIPFC

SEQ ID NO: 195621 - protein, 57 aa, Glycine max
  Clone ID: PAT_MRT3847_18672C.1.pep
KEKRERRDFWGPPPLPDKKEIERRVLKKKKKVLLIRSPSEGLVEDQTEAKDMLTIKG

SEQ ID NO: 195622 - protein, 53 aa, Glycine max
  Clone ID: PAT_MRT3847_18673C.1.pep
LSHNLHIVTCFLVLTKFFAFDCSLLTYYDFGFMRCLMPNQLARYTQFLFRNDI

SEQ ID NO: 195623 - protein, 71 aa, Glycine max
  Clone ID: PAT_MRT3847_18674C.1.pep
MASKAALLLCLNGLFFTVVIPHMLHLIQPPKIPKNQLVPKLQSPKLASCPKDTIKFGVCADVLGLINVQLG

SEQ ID NO: 195624 - protein, 228 aa, Glycine max
  Clone ID: PAT_MRT3847_18675C.1.pep
MTLLILILLIIIIPSPSFSVTMQNSPTVLAVPPPRPATQINVIPIPPSFDGAPNSVFPSTFLPFPPPPPFAGPPSSVDLSPLEFLLALLAVVTIPALIYTFIFAFGCPSRRRRREPSYGEPSVASEVSHHQEFEIAAVADTEVKYRKEAHAKEIGGECPVCLSVFANGEEVRQLSACKHSFHASCIDLWLSNHSNCPICRATIAVTTTKTGDGDSHLSHREPDATNLV

SEQ ID NO: 195625 - protein, 90 aa, Glycine max
  Clone ID: PAT_MRT3847_18676C.1.pep
MSSTSRAWTWTVAASVGVVEALKDQGICRWNSVMRSAQQHAKHNMKSLSQTKKLSSQSSVMASAKLKDEKAKKSEESLRTVMYLSCWGPN

SEQ ID NO: 195626 - protein, 87 aa, Glycine max
  Clone ID: PAT_MRT3847_18677C.1.pep
KITTTNIRFKSTKNKTYSLPWFQKTIHNWDFDRIAIAVVAAISTTIVDTSIAISNHNLYNKNSPQLRFRSQRKGFSGVRAHASAHAS

SEQ ID NO: 195627 - protein, 90 aa, Glycine max
  Clone ID: PAT_MRT3847_18678C.1.pep
MSSTSRAWAWTVAAGVGVVEAMKDQGICRWNSVMRSAQQHAKHNMRSLSQTKKLYSQSSVMASAKLKDEKAKQSEESLRTVMYLSCWGPN

SEQ ID NO: 195628 - protein, 90 aa, Glycine max
  Clone ID: PAT_MRT3847_18679C.1.pep
MSSTSRAWTWTVAASVGVVEALKDQGICRWNSVMRSAQQHAKHNMRSLSQTKKLSSQPSAMASAKLKDEKAKKSEESLRTVMYLSCWGPN

SEQ ID NO: 195629 - protein, 85 aa, Glycine max
  unsure (1)..(85): unsure at all Xaa locations
  Clone ID: PAT_MRT3847_1867C.1.pep
KKVTKKKTRRAPPCLKCSHXGCTITPSHYAAPDFLLNGKHHFCQLFKEKGSYNHITKSAPNPQTNLAPAIKGKTPGAPKGGLPHT

SEQ ID NO: 195630 - protein, 47 aa, Glycine max
  Clone ID: PAT_MRT3847_18680C.1.pep
LQSCQRILLHRFAISGWLILDLFVEWAVKGVEQIVDDGAHVGLHGSS

SEQ ID NO: 195631 - protein, 90 aa, Glycine max
  Clone ID: PAT_MRT3847_18681C.1.pep
MSSTSRAWTWSVAASVGVVEALKDQGICRWNSVMRSAQQHAKHNMRSLSQTKKFSFQSSAMASAKLKDEKAKQSEESLRTVMYLSCWGPN

SEQ ID NO: 195632 - protein, 99 aa, Glycine max
  Clone ID: PAT_MRT3847_18682C.1.pep
VPFVEDRSSINGQESKYELVFSKKLSVPIFTGSRIVDIDGNSIHVILVDKSGGEVVAVPTSLGHPIKLEIVVLDGDFPAPNNNKEEYSWTSEEFNNHIV

SEQ ID NO: 195633 - protein, 68 aa, Glycine max
  Clone ID: PAT_MRT3847_18683C.1.pep
LDQKKKKKKKKKKKKKKKKKKKKKNKKKKKNKKKKKKKIKKKTDSLFKGTNFTYAYMKLNSSFITSLK

SEQ ID NO: 195634 - protein, 53 aa, Glycine max
  Clone ID: PAT_MRT3847_18684C.1.pep
PHPSCCLFYIYFKKISAVKLIFMFQCVLLLLRRGLLYSMLYLYSLNMLLFSVL

SEQ ID NO: 195635 - protein, 122 aa, Glycine max
  unsure (1)..(122): unsure at all Xaa locations
  Clone ID: PAT_MRT3847_18685C.1.pep
FVFSYEKNPMNHDARLDYIGGEECVGDKDRDREVYKRAIANVTAAEEKRYSQCYIYXVNNDALYEELWAGYMELSKDVFKESINQIPEHKXMFAKIWLVAAHFVIPLLNLKADRPILGNAIG

SEQ ID NO: 195636 - protein, 69 aa, Glycine max
  Clone ID: PAT_MRT3847_18686C.1.pep
PFSFLLEREKRVSTRKQLFGHVYFFTLKIQSCQCLAQSGLKGKKVKRIKGNQKTEKKFPSQKVRMTISG

SEQ ID NO: 195637 - protein, 57 aa, Glycine max
  unsure (1)..(57): unsure at all Xaa locations
  Clone ID: PAT_MRT3847_18687C.1.pep
RVQEKCQIAATLMGEWHPLIRPQSXPACPGGKNLVLDRILSSKQRLLCLTSSPPAQR

SEQ ID NO: 195638 - protein, 54 aa, Glycine max
  Clone ID: PAT_MRT3847_18688C.1.pep
VHTSFSHGNRLPSIHYPRKGYRDIRAWRLSHTHFPLDRTSYILSPVQPIWLGFV

SEQ ID NO: 195639 - protein, 54 aa, Glycine max
  Clone ID: PAT_MRT3847_18689C.1.pep
GQGFFPYFLKREGAPSYSKNIEAFEIFLHVFEHKSSTPPGQKGFQQRTPSSAMC

SEQ ID NO: 195640 - protein, 79 aa, Glycine max
  Clone ID: PAT_MRT3847_1868C.1.pep
TYLRRRRAAKMTVRFTSAAVVSQRHKGDHPDLWRHKLLATYRTCVSRSWRKVASINVISQHMRLLKGYMGGSLCLSIDR

SEQ ID NO: 195641 - protein, 127 aa, Glycine max
  unsure (1)..(127): unsure at all Xaa locations
  Clone ID: PAT_MRT3847_18690C.1.pep
LPQCLRWVANLLVWMREXKWGLVAIGSINQIPHSYLHQHRRCQPVKHTRTGKGVRKPPTLWRTKLLVYVRAICGLPWSSCNSARNVQVLIVLTPHSAVRYRYQAICPLNNNSAQLSTLALSTAIHHV

SEQ ID NO: 195642 - protein, 115 aa, Glycine max
  Clone ID: PAT_MRT3847_18691C.1.pep
VGGHKSTYNFKCRGRAWFLNPKPKRGEEQGENPSVPKKKKRGGGSYSWTPHPPKKKGRGPRDRGGPPPMAGKKKMTAITRKGQNPWGGPPKKRNAPDAKENHTSGRTGHWKPKCG

SEQ ID NO: 195643 - protein, 83 aa, Glycine max
  Clone ID: PAT_MRT3847_18692C.1.pep
QILKFYKISQLLNKEERKGNCSKDVLDGGKIKTTIEHRGDPIPNLVPKWTVQKQVIISFIIMTIVSAPFCRLLAAVSSRFGSS

SEQ ID NO: 195644 - protein, 95 aa, Glycine max
  Clone ID: PAT_MRT3847_18693C.1.pep
SSSLVSPPISPVGGFFLTVVSEYKGSVLLLIEQEETGFHIPAKGPSFGVWYPTLRKFDHLENGALLILPLTGGSWMSTGPLRRWVDMMIIVAFPL

SEQ ID NO: 195645 - protein, 85 aa, Glycine max
  Clone ID: PAT_MRT3847_18694C.1.pep
PASGFVPSSPHFLICGITFVSSSLIFPRLLSSLLLSQSISRKKKSSLFSFGSLLWFLKRVKDSVCVGSMGSCFSKITASIFAVWG

SEQ ID NO: 195646 - protein, 188 aa, Glycine max
  Clone ID: PAT_MRT3847_18695C.1.pep
MFSCGTKKSNVRSRREQGRDSTVVDSPVTPARTSFHDNAVPNRPTTGTPVPWAPRLSVLARVPQVNRTGKGDDTDPTKPVFVGEFPQVVRDEQSILLHNRIPAEDRVCGGIDKSTSLAWIICGNRVYLWCYLSPASSVKCAVLEIPLNDADVGRNHAGSWLLCVVNVMPRLWERIKCKTVQLCCCGFQ

SEQ ID NO: 195647 - protein, 49 aa, Glycine max
  Clone ID: PAT_MRT3847_18696C.1.pep
DLAIYQVIYILYVTCKHMLSPPPHNNLVNLVTNIHLITSWSRVSLQTRF

SEQ ID NO: 195648 - protein, 64 aa, Glycine max
  Clone ID: PAT_MRT3847_18697C.1.pep
KKQNGKTGFFLRGLKGPPPLKYKQRLGGRGHGPFFFFSYKNYFLGIISKEGPIPPPSGLEFMRL

SEQ ID NO: 195649 - protein, 191 aa, Glycine max
  Clone ID: PAT_MRT3847_18698C.1.pep
VLGEAVALAKKADYALVFTGHTTSWETEGQDQLSFNLPKDGSQDRLIAGVAAANTQTVVINSTGVAIAMPWLEEISGLLQTWFPGQEAGNSIVDVLTGKVNAEGALTCSFPKELTSAPAYGNFPGEYTGRQLTVKYAEGVFIGYRHYDTLPAEQLNFPFGHGLSYTRFDFSEFHVGAKSESEWTVSVNVKN

SEQ ID NO: 195650 - protein, 131 aa, Glycine max
  Clone ID: PAT_MRT3847_18699C.1.pep
HQRKMTDLDLSQTAIRALLTSMLFLLKLTYSDLSGCREIESLSVHIKSLRVLTLIGGPYLKELSVTSEKSTVLELPDTAIFALPTSIGHLLSLKEKLVSLHELPPFLSELYLNDCCKLVSMPELPPSGKEE

SEQ ID NO: 195651 - protein, 43 aa, Glycine max
  unsure (1)..(43): unsure at all Xaa locations
  Clone ID: PAT_MRT3847_1869C.1.pep
MTELXANHGXSAKGTENPFEYDXETVXXGGPXFXGFXFGVGLF

SEQ ID NO: 195652 - protein, 62 aa, Glycine max
  Clone ID: PAT_MRT3847_186C.1.pep
NAAAASVHLRSHSPQFSISVLQQGAVRPLVAISQSGPPRAKKKAQALFNQFESQSHGSFGRG

SEQ ID NO: 195653 - protein, 485 aa, Glycine max
  Clone ID: PAT_MRT3847_18700C.1.pep
MPQIMALLPKLPHQPQLLQTVCLTIGAYSKWLDSASCGLSVLPSVLDILMNGMGTSEECAAAAALAFRHICDDCRKKLCGCLEGLFHIYNKTVNGEGSFKLAREDSLHLVEALSMVVTELPPDDAKRALEALCIPVITPLQEAINQGPESLSKRPSRQLTVHIDRFAYIFRFVNHPQVVADAIQRLWPIFKAIFDIRAWDMRTMESLCRACKYAVRTSGRFMGLTIGAMLEEIQSLYRQHHQPCFLYLSSEVIKIFGSDPSCADYLKNLIEALFQHTTRLHLLLQEFTARPDIADDCFLLASRCIRYCPQLFIPSSVFPSLVDCSMIGITVQHREASNSILHFLADIFDLANSSVGEQFIPIRDSVIIPRGASITRILVASLTGALPKSRVDVVSYTLLALTRSYGMQALEWAKKSVLLIPSTAVTDVERSRFLKALSDAASGGDTNGLTVPVEELSDVCRRNRAVQEIVQEALRPLELNMVNVS

SEQ ID NO: 195654 - protein, 52 aa, Glycine max
  Clone ID: PAT_MRT3847_18701C.1.pep
APKAKEFPGLGTNLVTIKAAKVKTHYKAYTTQVHSNIIEWQSAGPGRLERRT

SEQ ID NO: 195655 - protein, 83 aa, Glycine max
  Clone ID: PAT_MRT3847_18702C.1.pep
TGKSFSPKKGIPYIASDYSKDRRWLRRTRPNKLDYQAVIPVDDSHRMSQNGCGDAAIEALVTACRAAPPLETGSLPCGSLPNH

SEQ ID NO: 195656 - protein, 57 aa, Glycine max
  Clone ID: PAT_MRT3847_18703C.1.pep
VEGKCSCSYVLVCYDYILRFCKTVIFFFSPNVNLKANKFLEIFPSKKKKREIERKRG

SEQ ID NO: 195657 - protein, 80 aa, Glycine max
  unsure (1)..(80): unsure at all Xaa locations
  Clone ID: PAT_MRT3847_18704C.1.pep
QTFVKTLTGETIILEVESSDAIDNVRAMMHDADGIPPDQQMLIFAGMHLEYRXPLGCYYIQQESSLHLVLPLPGGMHIFL

SEQ ID NO: 195658 - protein, 125 aa, Glycine max
  unsure (1)..(125): unsure at all Xaa locations
  Clone ID: PAT_MRT3847_18705C.1.pep
TAEXXPQTAGHRRTGEPRQPNKEDXGRXXXXGRDPAXXXHQANXXXRXNXGKTTPSGKRRDXKNXERPETPXXHHEENKTQDRGKGKDSXDXEKKXXXHQEXATPRXEKKXKPKRXRKAKKGAAQ

SEQ ID NO: 195659 - protein, 254 aa, Glycine max
  Clone ID: PAT_MRT3847_18706C.1.pep
HASAKESVMGSNEEMGLDQLPSALVATIMSKLDIASICSLASTSSTFRSCARHILSFLPTFHLLDIAPSGELLRPLLPPNPYLTNLKLDCAGLDDSAIGFLLKPSLHDLSLHNCADFSGRLLSEIGNRCNHLRSLYLGSVAEKRGRAIHISDLQELLTGCSHLEALILMFDVSLFLRHNFARVWASASEKLTSLEIGYISSVTVTELLSPNLGSQLPSNPAQPSILPSIQKLCLNVDYITDAMVGTISKGLMLL

SEQ ID NO: 195660 - protein, 69 aa, Glycine max
  Clone ID: PAT_MRT3847_18707C.1.pep
DEESRPRACPLLGPVLASLPTQRLLGKVALVPGGPFGIGKSFGRLFLIHGVKICLVVGQNTLGKQVVNL

SEQ ID NO: 195661 - protein, 111 aa, Glycine max
  unsure (1)..(111): unsure at all Xaa locations
  Clone ID: PAT_MRT3847_18708C.1.pep
WPVHGEQFYNEKLITEVRGIGVXVGAAEWTTTGFGERYQMLTRDSIQKAVRRLMDGADQALEIRRRAKHFQEKAKQAVRVGGSSHNNLTALIHDLIRLRDAKLPSPDTPKG

SEQ ID NO: 195662 - protein, 43 aa, Glycine max
  unsure (1)..(43): unsure at all Xaa locations
  Clone ID: PAT_MRT3847_18709C.1.pep
AVVTESXXXXNXXPXRSSARSXRXAKCSRLFNXXVEVWRMXRI

SEQ ID NO: 195663 - protein, 74 aa, Glycine max
  Clone ID: PAT_MRT3847_1870C.1.pep
ITTAAFVLLLQLVPLLLAGRPLAFLVRCLGHSNHNNTSPYSIGFYKSAIRSVYVTASTFGSCYIYSYFVSDRLA

SEQ ID NO: 195664 - protein, 46 aa, Glycine max
  Clone ID: PAT_MRT3847_18710C.1.pep
MCHQMLVKKKKKKKKKKKKKKKKKKKEKKKKKNKSFKKTKIRRRRF

SEQ ID NO: 195665 - protein, 88 aa, Glycine max
  Clone ID: PAT_MRT3847_18711C.1.pep
YGCEKTTEGGGWLYYLLCCPRVKSKPFSLLSNLFRELGFWMPRHRTQDSVWEWHVFPLTYFVISHSTCLLLLKSAMGICPNYSLRGIG

SEQ ID NO: 195666 - protein, 45 aa, Glycine max
  Clone ID: PAT_MRT3847_18712C.1.pep
KHNLPFPLYQGWKNGFSLASGPLSLCHCLPSAIIFYINFVMPFYQ

SEQ ID NO: 195667 - protein, 60 aa, Glycine max
  Clone ID: PAT_MRT3847_18713C.1.pep
AILMGRQILIKCRLKIDSGEGFNWGPPLKLWVAMSCLKRVSCSPTPQKFRVYCLGIPFFF

SEQ ID NO: 195668 - protein, 112 aa, Glycine max
  unsure (1)..(112): unsure at all Xaa locations
  Clone ID: PAT_MRT3847_18714C.1.pep
XRXLGFSGAAALFFLFCXLLXGXGXXXPXLPXXFAFGXAYAPXWVPTRXPWEPXSFLHVCXXYGPWVRSGKCIFASPLAFSFVAAXRSASRLWDCVXFSPFSCPLWLLFTYL

SEQ ID NO: 195669 - protein, 191 aa, Glycine max
  Clone ID: PAT_MRT3847_18715C.1.pep
LDDNVKGRRRTDFLSVYVGTRRYRAPALLRISSVVASACEVCSVAGFLGACMSSDPLFPGKDYVHQLRLITELLGSPDDASLEFLRSDNARRYIRQLPQYRKQKFSARFPNMLPEALDLLEKMLIFDPNKRITVDEALCHPYLSSLHNINDEPVCPRPFSFDFDQPTCAEEHVKELIWKESVKFNPDPPCQ

SEQ ID NO: 195670 - protein, 136 aa, Glycine max
  Clone ID: PAT_MRT3847_18716C.1.pep
MITKKKQEQLLLFIIIFVLGKITFFIPTTNAQVNHHECRQTCGSSKPVPYPFGFSSGCAIRLKCTAGVASVGEFPVKVNTDSMIVSIEAQCNRPFDSLHHLFSHKYAPTSRNVILLENCTGTPLPCFIPETLVRTH

SEQ ID NO: 195671 - protein, 164 aa, Glycine max
  Clone ID: PAT_MRT3847_18717C.1.pep
MPYYIQRLYRLCKASFSPNGPVSEEAVAKVCEKLEKIKPSDVGLEQEAQVVRNWSGQMPECNGNHQQPPPIKYLHLYEDDSFSIGIFCMPPSSIIPLHNHPGMTVLSKLLYGSVYVKSYDWIDFPGPTDPSEARAAKLVKDTEMTAPTATTVLYPTLGGNIHTF

SEQ ID NO: 195672 - protein, 69 aa, Glycine max
  Clone ID: PAT_MRT3847_18718C.1.pep
KQRSKIRSLNLKSFRSSRGRKIIVKKGGEKRRKEKAQCHVHPSSSNPFCFFLQILFFFSWVFAGCSNQS

SEQ ID NO: 195673 - protein, 56 aa, Glycine max
  Clone ID: PAT_MRT3847_18719C.1.pep
LNLEKGQFFVMQENHQLSPLLLGKSECSTAHRHMIALSKAQIKETNQKCLQLPLII

SEQ ID NO: 195674 - protein, 65 aa, Glycine max
  Clone ID: PAT_MRT3847_1871C.1.pep
AQIPLILLTPDSICPTNSWHSCISYFNPFQIICVPLGSFGTYEVETYFVITLYPIWSNGLKRFGI

SEQ ID NO: 195675 - protein, 186 aa, Glycine max
  unsure (1)..(186): unsure at all Xaa locations
  Clone ID: PAT_MRT3847_18720C.1.pep
AGFDGTTHXSGADYKAFAPISGSSXDECREVVLQALKLNESCPHQNCTFGGIWDGGRGSGQKILFGTSSFYYLPTEIGIIDLNKPNSKIHPVDLEIEAKRACETKLEDAKSTYPNLAEDRLPYVCLDIAYQYALYTDGFGLDPWQEITVANEIEYQDALVEAAWPLGTAIEAISSLPKFDRLMYFI

SEQ ID NO: 195676 - protein, 198 aa, Glycine max
  Clone ID: PAT_MRT3847_18721C.1.pep
LYNFLCLAFAQAVARGLKDPSFRVIQNHFAISGNLGEVAAKEEVWEVVAQLVGLSLGILILDTPGLVKSYGVISLTWLSMRLLHLWLCYESLSVLQFNTINIKRARILVKSHVLHSTVPGCTDSNREVNILAWSQFMKPKIIFGLPLEKMDGVERSYFMVEALIKLYASEKYILMVNQQTEDLRFYVSFKVGATMYRY

SEQ ID NO: 195677 - protein, 93 aa, Glycine max
  Clone ID: PAT_MRT3847_18722C.1.pep
CIFLDDDYSVKIAGFGLINSNFYYGSHLHKNYEAFDICKNDVYDMGVLLLEIISGSNQLDSPTLALQHVRAGKFEEILDPFLCYDEQPHYRQE

SEQ ID NO: 195678 - protein, 89 aa, Glycine max
  Clone ID: PAT_MRT3847_18723C.1.pep
MAKPGRGRRSPSGSVSGSSSRSSSPSDSRSSSRSRSLSRSRSPSRSRSSSPSSCSSSRSSRSRSPPPQRRRSPADATRRGRSPPPQSKR

SEQ ID NO: 195679 - protein, 71 aa, Glycine max
  Clone ID: PAT_MRT3847_18724C.1.pep
MAKPGRGRRSPSGSVSGSSSLSPSDSRSSSRSRSLSRSRPPSRSISSSPSSSSSSRSSRSRSPPPQRRRRV

SEQ ID NO: 195680 - protein, 423 aa, Glycine max
  Clone ID: PAT_MRT3847_18725C.1.pep
MAKPGRGRRSPSGSVSGSSSRSSSPSDSRSSSRSRSLSRSRSPSRSRSSSPSSSSSSRSSRSRSPPPQRRRSPADATRRGRSPPPQSKRASPPPRKPSPVRESLVLHVEKLSRNVNEGHLKEIFSNFGEVISVELAMDRTVNLPKGYGYVQFKTRGDAEKALLYMDGAQIDGNVIKARFTLPPRQKVSPPPKASAVAPKRDTPRADNASADVDKDGPKRQRESSPRRKPPPSPRRRSPVPRRAGSPRRPDSPRRRADSPRVRRRLDSPYRRGGDTPPRRRPVSPGRGRSPSPPRRLRSPARLSPRRIRGSPGRRRSPPPPPRRRSPPRRPRSPPRRSPIGRRRTRSPIRRSARSRSRSFSPRRGRPPVRRGRSSSYSDSPSPRKVSRRSKSRSPRRPLRGRGSSNSSSSSSPPPPPPPPTRKP

SEQ ID NO: 195681 - protein, 100 aa, Glycine max
  Clone ID: PAT_MRT3847_18726C.1.pep
CHIQSCSISGKINGNTILFFREIDSLVSFSTDQIDSIATSSVFAPRLLPYVFPAVQSQFLHGPLDISLSHDILWGHFLPFLSQHSRPAQKFLPIYHESYL

SEQ ID NO: 195682 - protein, 86 aa, Glycine max
  unsure (1)..(86): unsure at all Xaa locations
  Clone ID: PAT_MRT3847_18727C.1.pep
LNFPNNNINIGGRVRSVLDVDCGVASFXRYPLFFNGITMVLAPXNDVHQNQIQFAXEREFPHYLGVWGPQKLLNPSNQFDLANCPA

SEQ ID NO: 195683 - protein, 589 aa, Glycine max
  Clone ID: PAT_MRT3847_18728C.1.pep
MASTRDKDEAEHQRGYWRWSKQDFLPEESFQSWSNYVSALSQTRLRFKDRLLARSDDATETEELKKQSEHDMKRCLNWWDLIWFGFGAVIGAGIFVLTGQEAHDHAGPAIVLSYVASGFSAMLSVFCYTEFAVEVPSAGGSFAYMRVELGDFVAFITAGNILLESVIGSAAVARSWTSYFTSLLNRPKDSLRIKTSLKEGYNLLDPIASVVLVIASVITIISTRKTSVLNWLASAINTAVIIFVIVAGFLHADTSNLTPFLPYGAKGVFQAAAIIYFAYGGFDHIATMAEETKNPSRDIPIGLVGSMSMITVIYCLMALSLSMMQKYTEIDTGAAFSVAFQNVGMRWAKYVVAFGALKGMTTVLLVGRLAQARYITHIARCHMIPPWFALVHSKTGTPINATLLITIASATIAFFTGLKVLSSLISVSTLFVFMMISVALLVRRYYVRGVTPRENLLKLVIFLVLIIASSIGISAYWGLRPNGWFGYSVTVPIWFMATLGMSLFLTQQRVPRVWGVPLVPWLPSLSIATNVFLMGSLEYEAFIRFGVCTVVMLIYYLLFGLHATYDMAHQQEKLPSKVEHTQTVKNEVS

SEQ ID NO: 195684 - protein, 300 aa, Glycine max
  Clone ID: PAT_MRT3847_18729C.1.pep
MLALSRGLVSRLQRVAVDSSPLPLRSLSSDAAAIRSRIIEPKPSVMTPNSKRTGLIAVKCGMSALWDKWGARIPITVLWVDDNIVSQVKTPEKEGFCALQIGCGHKKDKHLTKPEVGHFRAQGVPMKRKLKEFPVTEDALLPVGTSLNVRHFVPGQYVDITGITKGKGFQGVMKRHGFSGGPASHGNSLAHRTLGSVGHLTSHGKVFKNKKMPGRMGGDQRTVKNVWVYKIDPARNLMWVKGQVPGATGNFVFIKDAVYEKPDISLLPFPTYFVPEDEDIDNLKPLVAELGDVDPFMVTD

SEQ ID NO: 195685 - protein, 119 aa, Glycine max
  unsure (1)..(119): unsure at all Xaa locations
  Clone ID: PAT_MRT3847_1872C.1.pep
YVPRDILNISILYALTGTAGDNXRGNKTDYTTKKDYRKXXRYVQCATPQRTLYCFDIHXTTNLANDYNSYRVTXRLLXHAHTRAIIVRLTELNTLIRHETSQVIFKDLDIDTIQQHYNV

SEQ ID NO: 195686 - protein, 96 aa, Glycine max
  Clone ID: PAT_MRT3847_18730C.1.pep
KGGAPKKQPGGELFQFGLKFSHLCVYIQKIFQKSVDLFWEVFSPNPRPKKIFFFPSPWFQIALGFPLIFGAQSHSPAKNIKYKQKKIIQKKKKKKK

SEQ ID NO: 195687 - protein, 177 aa, Glycine max
  unsure (1)..(177): unsure at all Xaa locations
  Clone ID: PAT_MRT3847_18731C.1.pep
MLALSRGLVSRLQRVAVDSQLSLRFLSSDAAAIRSRIIEPKPSAMTPNSKRTGLIAVKCGMSALWDKWGARIPITVLWVDDNIVSQIKTPEKEGFYDLXIGCGHKKDKHLTKPEVGHFRAQGVPMKRKLXEFPVTEDALLPVGTSLNVRHFVPGQFVDISGITKGKGFQGVMKRHGF

SEQ ID NO: 195688 - protein, 57 aa, Glycine max
  Clone ID: PAT_MRT3847_18732C.1.pep
PTGNFGFFFFIKDAVYEKPDISLLPFPTYFVPEDEDIDNLKPLVAELGDVDPFMVTD

SEQ ID NO: 195689 - protein, 77 aa, Glycine max
  unsure (1)..(77): unsure at all Xaa locations
  Clone ID: PAT_MRT3847_18733C.1.pep
GSSLIVFTNDFTRPFCSGKSARSKDLRCHLSSSHDLLNFELRVSDXCHAVTAFATSDLLRSEIVDDDADPRAQTLFL

SEQ ID NO: 195690 - protein, 68 aa, Glycine max
  Clone ID: PAT_MRT3847_18734C.1.pep
MVCFCFLVDQTKKVKRSKPVAGSCSRCGGGASVADMITQTRFCFVPFYWKSWKAIMCTFCGAMLKSYR

SEQ ID NO: 195691 - protein, 101 aa, Glycine max
  Clone ID: PAT_MRT3847_18735C.1.pep
NSARGLDEAKCVHRDHVSAVMDVDYSPTGREFVTGSYDRTVRIFQYNGGHSKEIYHTKRMQRVFAVKFSGDGSYVISGSDDTNLRLWKAKASEQLGVIVPR

SEQ ID NO: 195692 - protein, 79 aa, Glycine max
  Clone ID: PAT_MRT3847_18736C.1.pep
LHYSGNAGLESAVNWIVEHENDPDIDQMPLVPANTKIEAPKPLLTPEEMKAKQQELRERARKKKEEEEKRMEREREKGS

SEQ ID NO: 195693 - protein, 65 aa, Glycine max
  Clone ID: PAT_MRT3847_18737C.1.pep
MQSQVKHALVVKVMGRTGSRGQVTQVRVKFLDDRNRHITRNVQGPVREGHILTLLESETEARRGR

SEQ ID NO: 195694 - protein, 59 aa, Glycine max
  Clone ID: PAT_MRT3847_18738C.1.pep
EARLCIISKSHESGCHQIYMVMAQSGPMSMSLMARAAMEFAIFFGLRCDSKLSSRNARS

SEQ ID NO: 195695 - protein, 105 aa, Glycine max
  unsure (1)..(105): unsure at all Xaa locations
  Clone ID: PAT_MRT3847_18739C.1.pep
LGIRLVLTYNENANWIKKGKMCALFINEPDAXAGRLGRTTQYTAXMAMENATPNXTHVATSAPKWRMSGMHAGESNPREHIIGDCNDXSTLCGRIIRDGRMENFY

SEQ ID NO: 195696 - protein, 233 aa, Glycine max
  Clone ID: PAT_MRT3847_1873C.1.pep
MGTACFPTNNVVLKPQNLSGNFSTLCDNATQLKVSQDALSSTEQSLSSSPRVIGEHDLLIVGPGVLGRLVAQKWRQEIPGSQVYGQTVSTDHHNELIQMGINPSKKWTEATHTFPNVIYCAPPSRTPDYAGNVRLAALSWNGEGSFLFTSSSAPYDCNDNGPCDEDSPVVPIGRSPGVDVLLKAENVVLDNLDQFYKADRGAHNYYLEKRIVDSRPDHVLNLIHYEVRMPFHL

SEQ ID NO: 195697 - protein, 286 aa, Glycine max
  unsure (1)..(286): unsure at all Xaa locations
  Clone ID: PAT_MRT3847_18740C.1.pep
SSLRISIILISSINQGFAKYVEWSANMMEEEAKRKLKTSELQAKKNRLKIWTNYVPPATNSKAIHDQNFTGKVVEVVSGDCIIVADDSIPVRSPLAERRVNLSSIRCPKXGNPRRDEKPAXYAREAKEFLRTRLIGRQVNVQMEYSRKVGPADGSAVPSGASEARAMDFGSVFLPSTVKADGDDAPSSVPPAGSQQNGVNVGELIVSRGFGTVVRHRDFEERSNYYDALLTAESRAISGXKGIHSAKDSPAMHITDLTTASAKKAKDFLPFLPRSRKIPAVVEYGL

SEQ ID NO: 195698 - protein, 183 aa, Glycine max
  Clone ID: PAT_MRT3847_18741C.1.pep
MNMIKAGHRYSEDVYVMMQENQHIATSHYVRMYVRETKEEVQEIANTRLGRRGMACTVKLNEWLCDYGQFQALRLPCSHAIAACAFCNLNYDDFVDPVYKLENIFKVYQHHFHSLGSEDTWPQYLGPHFMSDPSKRRQISGRPATTRIHNEMDESIPNRLKKCSLCKTEGHNQSNCPYKQVHN

SEQ ID NO: 195699 - protein, 41 aa, Glycine max
  Clone ID: PAT_MRT3847_18742C.1.pep
QHMDKTREVICILCDRPHHALLHLSFSILTDVHYNTLHTLP

SEQ ID NO: 195700 - protein, 49 aa, Glycine max
  unsure (1)..(49): unsure at all Xaa locations
  Clone ID: PAT_MRT3847_18743C.1.pep
KHSAGIILSKXEIELEHRIKIFTQTSQDFESLVLSLPRSKPHIFRITRI

SEQ ID NO: 195701 - protein, 158 aa, Glycine max
  Clone ID: PAT_MRT3847_18744C.1.pep
MLLNLSHASFQQENMKAGKVYSKFNCRYLIPFSKQLSMKFCSTSVASFLFVIVIFFPLAIADLSSDKQALLNFANAVPHRRNLMWNPSTSVCSSWVGITCNENRTRVVKVRLPGVGLVGTIPSNTLGKLDAVKIISLRSNLLSGNLPADIGSLPSLQY

SEQ ID NO: 195702 - protein, 98 aa, Glycine max
  Clone ID: PAT_MRT3847_18745C.1.pep
FSFLSISSWILLLIILPHHHFILLTLPAGYLEIGESAMEGAIRETREEANADVEVISPFAQLDIPLIGQTYIIFLARLKKPHFSPGPESSECLLFSLN

SEQ ID NO: 195703 - protein, 162 aa, Glycine max
  Clone ID: PAT_MRT3847_18746C.1.pep
MDSSSDHSPPSSLHSPGDVQNVKFCQWCGGPTKHEIPDGVERLRAICTSCGKITYQNPKMVVGCLIEHDNKVLLCKRKIEPSYGLWTLPAGYLEIGESAMEGAIRETREEANADVEVISPFAQLDIPLIGQTYIIFLARLKKPHFSPGPESSECLLFSLNEI

SEQ ID NO: 195704 - protein, 192 aa, Glycine max
  Clone ID: PAT_MRT3847_18747C.1.pep
LEFANSVSWETVEAEAFLLLSCLSTPSRICWRQIMFQRRIFSNVSFGSCPMGWLGRLLFFYPTQSLKHPTPLPFYCCVFPSYNPIIVPKKTSIPDCPVECNQLAISRVSQHTQLSTVKTEVSGDVVSPSKSPDGKRKSILSKAQRHREVVLFTQQRLLIDLETLAPHEHESMREAAKNTFELLNVIGVDYKQ

SEQ ID NO: 195705 - protein, 362 aa, Glycine max
  Clone ID: PAT_MRT3847_18748C.1.pep
FQDIEKDEFGKVTSFKLHNLVHDLARSVTEDVCCVTEGNDGSTWTERIHHLSDHRLRPDSIQLHQVKSLRTYLLPHQRGGALSPDVLKCYSLRMLHLGEMEELPSSIGDLKHLRYLNLSGGEFETLPESLCKLWNLQILKLDHCRSLQMLPNSLIILKYLQQLSLKDCYKLSSLPPLFAWLSSPRGLTKYFVGKERGFLLVELGALKLKGDLEIKHLGKVKSVKDASDANMSSKRLNKLTLSWDRYDEEWELQENVKEILEGLCPDTQQLQSLWVGGYKGDYFPQWIFSPSLMYLRIEGCRDVKALDEALQHMTVLHSLSLYYLRNLESLPDCLGDLPLLRELAIAFCSKLRRLPTSVRLQT

SEQ ID NO: 195706 - protein, 73 aa, Glycine max
  Clone ID: PAT_MRT3847_18749C.1.pep
FCKKNGTSITSSSASTSLHQAPVPESISIRNTMEKINGINTCNLKVEQLFMKEKIQKVKSLTYVVEISEWIWP

SEQ ID NO: 195707 - protein, 366 aa, Glycine max
  Clone ID: PAT_MRT3847_1874C.1.pep
MMGTACFPTTNVVLKPQNLSGNFSTLCDNFRCLRFLTPKPPHLRSSHSKLGNRVKLTSFSMSKATHLKVSQAALSSTEESLSSSPRVIGEHDLLIVGPGVLGRLVAQKWRQEIPGSQVYGQTVSTDHHNELIQMGINPSKKWTEATHTFPNVIYCAPPSRTPDYAGNVSSCLMNSCIDVDCQLIRLAALSWNGEGSFLFTSSSAPYDCNDNGPCDEDSPVVPIGRSPGVDVLLKAENVGAFGLFTVPFLSKNKHGIKALSKIGAYDGDKIGANFGMLPHQDAASLSVAILKKKFRGQIFLGCDNHPLSRQEMMDLVNKSGKFSKKFDEFTGTDGPLGKRLNNTKTCQVVGWKPKYPSFIHFLESSM

SEQ ID NO: 195708 - protein, 55 aa, Glycine max
  Clone ID: PAT_MRT3847_18750C.1.pep
IITPFFGSKLEKKPLQLFPQTLLIFCTEQPPGYLNRTLDLFSCISMTTLFIKNPP

SEQ ID NO: 195709 - protein, 257 aa, Glycine max
  unsure (1)..(257): unsure at all Xaa locations
  Clone ID: PAT_MRT3847_18751C.1.pep
MPEFCVTGGTGFIGSYLVKALLEKGHTVRTTVRNPEDVEKVGFLTELSGAKERLRILKAELLVEGSFDEIVKGVDGVFHTASPVLVPYDENVQLWYAYAKTIAEREAWRIAKENGMDLVVVNPSFVVGPMLAPQPTSTLLLILSIVKGMKGEYPNTAVGFVHINDVIATHLLAMEDPKTSGRLICSSTVAHWSXIIEMLRAKYPSYPYENRCSSQEGDNNPHNMDITKISQLGFPPFRTLEQMFDDCIKSFQEKGFL

SEQ ID NO: 195710 - protein, 252 aa, Glycine max
  unsure (1)..(252): unsure at all Xaa locations
  Clone ID: PAT_MRT3847_18752C.1.pep
MMQLQQHHQEVEEAEEEASNSSSHHHNKASPSPSFSSYSSETLAEIAARVIEELRRDPSSLSVDDDDDALFPPWENQNDSFVPQNDKPAEQNDENDDDDDDFEFAFVSRDFTSPVSADDIFHNGRIKAMYPIFGVVXPQTTPFRALFRIIYNNNIANSTPRRRLPLRKLMYEEGETASCSSSTEESVDITILRPVHGAVFLYTPNCSRRAQKQSAPPGSTSALSKRRSRDARSTSHSGTPLGVSGKRPTRRQ

SEQ ID NO: 195711 - protein, 81 aa, Glycine max
  Clone ID: PAT_MRT3847_18753C.1.pep
VGMGSTAALYFVGGAVSLMVLLGCRVLSLLLEDTVSWKRLFLMVKTNLPNSDSGWFKPWLPAGTLLWYDCTNANVACLGGV

SEQ ID NO: 195712 - protein, 85 aa, Glycine max
  Clone ID: PAT_MRT3847_18754C.1.pep
LSLVHKPPHDLGSPLFNFFFYPPTFFKSPCPRALKKQFLALPFLGHGGFYFNPGKKNIMPQPPLPLGQFGWGLIWEGMLTPPFLG

SEQ ID NO: 195713 - protein, 132 aa, Glycine max
  Clone ID: PAT_MRT3847_18755C.1.pep
LQKRKNLVYTTTTTDHILYIPHPNLPTHFPSFHPIPFFFFLFLFSQLVRKKKGTESHYNSGKRKKETMMHQQQEVEEEEASPHNKASPSPSFSSYSSETLAEIAARVIEELRHEPSSLFDDDDDALFPPWEN

SEQ ID NO: 195714 - protein, 71 aa, Glycine max
  Clone ID: PAT_MRT3847_18756C.1.pep
GSSSQLHFSPVIVTSPASPHSVFAPSSSVSLAFPCFPLMITSKRVHRFFKFRALVLSLIYSNHSLCLVNAQ

SEQ ID NO: 195715 - protein, 92 aa, Glycine max
  Clone ID: PAT_MRT3847_18757C.1.pep
FLCLGFFLLKSYSSSLSFSGYVNSESSTLTSFFLILSFSTSSTLFSFALFSSHCSLTDSFLVTFVIAGLDSRSSSPFWGPSNVLTLDSLAGA

SEQ ID NO: 195716 - protein, 123 aa, Glycine max
  unsure (1)..(123): unsure at all Xaa locations
  Clone ID: PAT_MRT3847_18758C.1.pep
SGLRECPLHTGAFITGHDHHLNDRRLRKIPTRDLAINWPTQATHPTTWNAGLAVVISTLILLSDKXCSGLFYNTLTDIGAHTTYGLMCDGMAHAFNLLXACFTCPNMCCRHVNRFISLRSFLH

SEQ ID NO: 195717 - protein, 52 aa, Glycine max
  Clone ID: PAT_MRT3847_18759C.1.pep
TDVSFALSTAAVGPGIRRPDASTSYRSDLAGVYGIAVLVNCIPTIHTTYTGA

SEQ ID NO: 195718 - protein, 229 aa, Glycine max
  unsure (1)..(229): unsure at all Xaa locations
  Clone ID: PAT_MRT3847_1875C.1.pep
PRVRKWSQELPGSQVYGQTVTTDHHNELIQMGINPSLKWTEATHKFPNVIYCAPPSRTPDYAGNIRLAALSWNGEGSFLFTSSSAPYDCNDNGPCDEDSPVVPIGRSPRVDVLLKAENVVLEFGGCVVRLAGLYKADRGAHNYFLEKGVVDSRPDHILNLIHYEDAASLSVAILKKNFRGQIILGCDNHPLSRXQEMMDLVYKSGKFSKNLTXFTGTDGPLESRANNTS

SEQ ID NO: 195719 - protein, 129 aa, Glycine max
  Clone ID: PAT_MRT3847_18760C.1.pep
HASAHASGGKLMKVKHKYRIATNLTISEKRRCSSLVLLEGRPKDSPKAEKTGVHILSKSEIDAELSKMKGVTPQEAAAAAAKAVAEAEAAIAEAEAAAREADAAEAEAEAARVFAKAAMKALKCKTLRV

SEQ ID NO: 195720 - protein, 298 aa, Glycine max
  Clone ID: PAT_MRT3847_18761C.1.pep
MGAPKQKWTAEEEAALKAGVVKHGAGKWRTILTDPEFSSILRMRSNVDLKDKWRNINVTAIWGSRQKAKLALKKNLLPSTKIDNNHLALSTVVQRDKEVANPKPLAVSSGTSPNSKEKISKLQNFQLDNLILESIIKLKEPRGSDQAAIAAYIEDQYCSTPTLRKLLSTKLKHMVASGKLMKVKHKYRIATNLTISEKRRCSSLLLLEGRPKDSPKAEKTGVNILSKSEIDAELSKMKGVTPQEAAAAAAKAVAEAEAAIAEAEAAAREADAAEAEAEAARVFAKAAMKALKCKTLRI

SEQ ID NO: 195721 - protein, 68 aa, Glycine max
  unsure (1)..(68): unsure at all Xaa locations
  Clone ID: PAT_MRT3847_18762C.1.pep
MASEAAPHFVLFPLMAQGHMIPMMDIAXILVHRNVIVTVVTTPHNAARFTSIIDRYIESGFPIRLVQL

SEQ ID NO: 195722 - protein, 117 aa, Glycine max
  unsure (1)..(117): unsure at all Xaa locations
  Clone ID: PAT_MRT3847_18763C.1.pep
ALTNLFPSACISLWHLYVLVFNFQVIDLRTQLSYFKKVSXVLRQELGDAETTTLLAKAVYLINIGTNXYLVSLTENSSVFTAEKYVDMVVGNLTTVIKVYIRGYLKVCLDKPIQKHF

SEQ ID NO: 195723 - protein, 240 aa, Glycine max
  Clone ID: PAT_MRT3847_18764C.1.pep
MASRLALRFRSHLLRTASLLQTLPPPPLSLHRLLSTSRRAPPRSKKSVDIGARARQLQTRRLWTYALTFGGLAGFVVIVLNNFQDQLVFYVTPTEALEKYATNPTKARFRLGGLVLEGSVVYPASSPEVEFVVTDLISDMVVRYEGSLPDLFREGHSVVVEGLVKPFTEEIRKEVSVKNVSEKARKIECYFSATEVLAKHDEKYMPKEVAAAIEKNKKIIEDAATATVAAAATAEGPKTP

SEQ ID NO: 195724 - protein, 138 aa, Glycine max
  unsure (1)..(138): unsure at all Xaa locations
  Clone ID: PAT_MRT3847_18765C.1.pep
IFRWRASSDIYTICSQDCELWNPACTKAMTMSFXNPNPCADAWSSELLKRTGIHWDIIXVTGWTATPNQEXVKLQNDWKILLFRNVSPETYWVLNPQNPIVLKKEDGKTVFPPGTSRRVKRXMPLSIRGGAGAKNAYF

SEQ ID NO: 195725 - protein, 96 aa, Glycine max
  Clone ID: PAT_MRT3847_18766C.1.pep
MDKDKSLGLPPPSGRYSGYSPTRSVFNVKSEPSPSSSSTTSYPPLALGTTSSESSHFGHGMSTDSSGFSHDISRMPDNPPRNRGHRRAHSEILTLP

SEQ ID NO: 195726 - protein, 249 aa, Glycine max
  Clone ID: PAT_MRT3847_18767C.1.pep
MASGLALRFRSHLLHTASLLPSSLLHHPPIQPSPPHLSLHRLLSTARRTPPRSKKSVDISARARQLQTRRLWTYALTFGGLAGFVVIVLNNFQDQLVFYVTPTEALEKYANNPTKARFRLGGLVLEGSVVYPASSPEVEFVVTDLISDIVVRYEGSLPDLFREGHSVVVEGLVKPFTDEIRKEVSAKNVSEKARKIECYFSATEVLAKHDEKYMPKEVAAAIEKNKKIIEDAATATATATVAMEGPKTP

SEQ ID NO: 195727 - protein, 70 aa, Glycine max
  Clone ID: PAT_MRT3847_18768C.1.pep
WRIQVIGQRYRNRTRNRIISNAGSCMKRQLYNMVDKQLVCLFASIHNLLKYALLSALSPIKYQGTCWTQY

SEQ ID NO: 195728 - protein, 195 aa, Glycine max
  Clone ID: PAT_MRT3847_18769C.1.pep
MAFTVAIGSGVAIIPCGNTTTAIPYTRGGGHRTRRKLHLHVARAKKPLNGDDVSIYTELLKTEVSVFENKPLGDNDAALKFVEKIDRQFQYPDFWEGSQWDWLGIFVKFSPIIGVAVAACLAIYGCFTFHEPPKEMREAAERLYSVQSGVESSAESGLESSADSSVESGKVIEEPDAYDSDVFDSNPTEVAPSLE

SEQ ID NO: 195729 - protein, 105 aa, Glycine max
  unsure (1)..(105): unsure at all Xaa locations
  Clone ID: PAT_MRT3847_1876C.1.pep
TSEGYTPSPSEDWTSSPSEGYTPSPSEDYTSSPXEGYTPSPLEDCTSSPSEGYTSSSSEGCSPSPSKDYTSSPSNGDTSSTSEGCMPSPLEAYASSLSVGSISTP

SEQ ID NO: 195730 - protein, 59 aa, Glycine max
  Clone ID: PAT_MRT3847_18770C.1.pep
SALHNLDPADELTSRLESKDIGEGPRRTRTANNTCPGPDVSYGDKDYGGACDGIIAASR

SEQ ID NO: 195731 - protein, 149 aa, Glycine max
  unsure (1)..(149): unsure at all Xaa locations
  Clone ID: PAT_MRT3847_18771C.1.pep
TSIAFAVSMVSQFMHAPGHEHLEAAFRILRYLKGSPGRGLYXKPWTSSGRKGYTDADWAGSVTDRRSTSGYCTFVGGNLVSXSKKQSVVARSSAEAEFRALAHGICETLWVKKLLQELKVHSSPPIKLYCDNKSAISIAHNPVLHDRTK

SEQ ID NO: 195732 - protein, 73 aa, Glycine max
  Clone ID: PAT_MRT3847_18772C.1.pep
YSCSFTHNQISQTPHTHKKPQFSMHNQIKTNVSHYSNFYHMGHPSLFVGRTDHSPYQITDQNTKLSTRSHQIT

SEQ ID NO: 195733 - protein, 49 aa, Glycine max
  Clone ID: PAT_MRT3847_18773C.1.pep
RFKLFYSHGTSCLRGPSLGHWAYPKFHTSLFYRMYIVTTICDSYTKSTL

SEQ ID NO: 195734 - protein, 297 aa, Glycine max
  Clone ID: PAT_MRT3847_18774C.1.pep
MGSKILPKWASKPCVMGIDEAGRGPVLGPMVYGCLYCSQSYLKTLSTLSFADSKTLKEEKREELFETLKLNDSIGWDVDVIDPRELSAKMLKKNKINLNEISHSSAMGLIDRVLKMGVLLTEVYIDTVGDAGKYEMKLSNSFPSIKFVVAKKADSLYPVVSGASIVAKVTRDRALREWVLDETAENMQRNFGSGYPGDPQTKSWLEDHKHHIFGFPSLVRFSWGTCNSYFKDAAEVLWESDNLDEDGGGSNNKNGKRQLKLSNVGFTTSKRSEEIESSGKGRCRFFQARKLEHLTYF

SEQ ID NO: 195735 - protein, 95 aa, Glycine max
  Clone ID: PAT_MRT3847_18775C.1.pep
HAYLGVDDGDETSAEAITLDVERVPVDALRQSLEVAGGVVTTTVEEAVAVAVALADDTLASVGALEELDVLVTVTISGASVAAGASLKTEDELCA

SEQ ID NO: 195736 - protein, 46 aa, Glycine max
  Clone ID: PAT_MRT3847_18776C.1.pep
NFNLKDWKHAPNGLYDIILCYCCCGVPWYGFFCVPYYCGCFGGPYY

SEQ ID NO: 195737 - protein, 113 aa, Glycine max
  Clone ID: PAT_MRT3847_18777C.1.pep
VEKKAFLDIAFFFEEDDKDYVTRKLDAWGFHGASGVEVLQQKALITISDNRIQMHDLIREMGCDIVRQESIICPRRRSRLRDNEEVSNVLRQNLGTDEVEAMQIDVSGIKNYL

SEQ ID NO: 195738 - protein, 62 aa, Glycine max
  Clone ID: PAT_MRT3847_18778C.1.pep
KKSHSSLRPSFKNPPKFIVAIILFFKGSGKQKLILTFKNSQAFTKKNFLKIGPLYKGKRFFL

SEQ ID NO: 195739 - protein, 217 aa, Glycine max
  unsure (1)..(217): unsure at all Xaa locations
  Clone ID: PAT_MRT3847_18779C.1.pep
TRHYVLVHGACHGAWCWYKLKPRLESEGHKVTVLNHAASGINMKKIEDVDTFSEYTEPLLQLLDTIPSNEKVVLVGHSLGGMSIAIAMEKFPEKVAVGVFLAAFAPDVEHRPSYVLEKYNERTPSEEWLDTEFCQCGNKTLIVCGPKFLSYKLYQLCPIEDLELAMTWARPSSYVIEDLSKEKKXAPNEEYGSIPRVYIVVLRPWNPLNTHTDESKG

SEQ ID NO: 195740 - protein, 65 aa, Glycine max
  Clone ID: PAT_MRT3847_1877C.1.pep
SRCFIKILWNISKNINSTHVCMNKTWLRLFSQVRRIMHRVQSLSNYSNAQHEMRMSILNIHHDDY

SEQ ID NO: 195741 - protein, 90 aa, Glycine max
  Clone ID: PAT_MRT3847_18780C.1.pep
NTLPAEKLDELKRVHEQIIMDKDLSKRGKIYVKANIVFETFAQQLVDSQEEKEEHQAITSQEKDGLTIIFKKNSKVEIHKKKCHQPKKHP

SEQ ID NO: 195742 - protein, 59 aa, Glycine max
  unsure (1)..(59): unsure at all Xaa locations
  Clone ID: PAT_MRT3847_18781C.1.pep
QAEVPTDSXMIFDTPKSLFPXQASLXHIRYKVMILXEKHDQXTKCXSSVFXXXNXTXEX

SEQ ID NO: 195743 - protein, 269 aa, Glycine max
  unsure (1)..(269): unsure at all Xaa locations
  Clone ID: PAT_MRT3847_18782C.1.pep
MATLEVQKQPKRPKYRESSVSPSVNPQRRTPEAESPSSYSHRTRFSPIMDFFHSSSPTSNHDSFPSSFSKFNSALTAGLLNPLSPPPDKTRSSPTLFEIMASEPDVPHRPPPLIPPTPNPYPNKPLILDPHALLMQRISELLVSRSPGNQFNDAVSSDIKLTLTSKDGTCVSMNLHRQILVAHSRFFSVKLSDRWTKHQQELQRSPVPYEVEIADCDDVEVYIETXRLMYCKDLRKKLMREDVSRVLGILKVSAAIGFDAGVLSCLEYL

SEQ ID NO: 195744 - protein, 58 aa, Glycine max
  Clone ID: PAT_MRT3847_18783C.1.pep
LKNHTMNEIKKKILYFIFFIYKKYLKINNKINKKILKIILLILFHIFLFLKQRCKNIN

SEQ ID NO: 195745 - protein, 124 aa, Glycine max
  Clone ID: PAT_MRT3847_18784C.1.pep
CFHHSGSAVLRSILDLGTRVAIVTRYCSTTTQRGSAGSYVCAPRAVSLATIISAHHRVYQTPTVTALLRCVSCAAPAATRSGQIPPATSRPHLGAFAPYPGAGESLTTLLVRCGVAYSLSDVAS

SEQ ID NO: 195746 - protein, 61 aa, Glycine max
  Clone ID: PAT_MRT3847_18785C.1.pep
LQILSMGFKNNTNLYFQPQNFLDLKTPPFPFFLPQHKIPCPKKKINGNTNNSFDILIPHPL

SEQ ID NO: 195747 - protein, 96 aa, Glycine max
  unsure (1)..(96): unsure at all Xaa locations
  Clone ID: PAT_MRT3847_18786C.1.pep
XXXPXXXIFXXLXSXXXXFKIXXHFLFXFXFSLXFXPXIXXXXXXXXIXXXXPXXXXFTXXXSXQQLXXLPXTSLXNXNXXYIHSXPNSYLLXXLL

SEQ ID NO: 195748 - protein, 77 aa, Glycine max
  Clone ID: PAT_MRT3847_18787C.1.pep
MLQCEGFSSKLRYDFEIPNSENVRNWVVNVVLKFHDDPTVNESKIGVFLKQVWWDAGKRKDFERRSGKTKMRPERDT

SEQ ID NO: 195749 - protein, 160 aa, Glycine max
  Clone ID: PAT_MRT3847_18788C.1.pep
KEPVGQHPIKRIYVSLTAGLPNSKKARYAASRYKVIEILAGGSCSLVEWKLETGRTHPIRAHAKYLGVPLLGDEVYGGTKSMVFSLLRPRTPISLHSKIVKMVSRLDRPCLHALTLGFQHPHTGEQVHFSCEPPADFAEILSQLRRIGSETVSFSKRSNL

SEQ ID NO: 195750 - protein, 62 aa, Glycine max
  Clone ID: PAT_MRT3847_18789C.1.pep
EFGPRDGNSESVEKKKMRIILFFKIIINIVTDEEEMRIILFFKTIIHIIMVKTRHCFVNKIS

SEQ ID NO: 195751 - protein, 58 aa, Glycine max
  Clone ID: PAT_MRT3847_1878C.1.pep
MSSGDPEDREVAEGTGRREEEDTGEQVAPMVKFKKVPVTTGKEEEHAILDLKSKFYGF

SEQ ID NO: 195752 - protein, 154 aa, Glycine max
  Clone ID: PAT_MRT3847_18790C.1.pep
QHTIKRIYVSLTAGLPTPVAGRVEVPVGRDPNNRIRMTAVAGPVNSRKARHAASRYKVIEILAGGSCSLVEWKLETGRTHQILHDTTLRKWFMIRTYAKYLGVPLLGDEVYGGTKNMVFSLLRPRTPISLHSKVVKMVSRLDRPCLHALTLGFQ

SEQ ID NO: 195753 - protein, 52 aa, Glycine max
  Clone ID: PAT_MRT3847_18791C.1.pep
MVSLTLQKRLSAIVLKCGRRQVWLAPNEVNEISMANSRHNIRKLVTDPVIIT

SEQ ID NO: 195754 - protein, 156 aa, Glycine max
  Clone ID: PAT_MRT3847_18792C.1.pep
MAVANLQRLSSQAHRLPSLSFFSKSLIYRRTSSSTKKVADRIVRLSAIDFVGKKHEVVGLAGQTLLKALINTGLVDPESHRLEEIDACAAHCEVNIAQEWLDKLPPRSYDEEYVLVRNSRARALNKHSRLGCQVLLDHDLEGMVVALPEPRPWDTS

SEQ ID NO: 195755 - protein, 49 aa, Glycine max
  Clone ID: PAT_MRT3847_18793C.1.pep
EKHRAQETSLHCIIRHQALDVGSCDFYSYSCEHTKWSLLHALACKKPRG

SEQ ID NO: 195756 - protein, 102 aa, Glycine max
  Clone ID: PAT_MRT3847_18794C.1.pep
QQKKTNPDSHIHSFHQLSPKSILTSQYYHVWQYRFFLLLTIHSFLHSTDPAPAPLLSSLVWQDQQTERKKILPFASVPEKITFLSIPHVLYSCYSQHHMFES

SEQ ID NO: 195757 - protein, 158 aa, Glycine max
  Clone ID: PAT_MRT3847_18795C.1.pep
MAVANLQRLSSQVHRLPSVSFFSKSLISRTSTSSSSTKKVADRIVRLSAIDFAGKKHEVVGLAGQTLLKALINTGLVDPESHRLEEIDACAAHCEVNIAQEWLDKLPPRSYDEEYVLVRNSRARVLNKHSRLGCQVLLDHDLEGMVVALPEPRPWDTS

SEQ ID NO: 195758 - protein, 57 aa, Glycine max
  Clone ID: PAT_MRT3847_18796C.1.pep
ASDLLDYSEPSSRVFFFDNILLLVVPTAAICFSKGMIPLETIKRDMTTLGFITKKPF

SEQ ID NO: 195759 - protein, 84 aa, Glycine max
  Clone ID: PAT_MRT3847_18797C.1.pep
CHYDDSLKHCHLRPHEENGNGSLRPQHYGAQLLHRNRGRRLKAELMERVSYCFLFISLIFPFCFLFIKSPGAYPNNHSGKQVPT

SEQ ID NO: 195760 - protein, 397 aa, Glycine max
  Clone ID: PAT_MRT3847_18798C.1.pep
CIESDDLTTNTHTHSTASSPAVSGLTEVDNRDKENLDLCSSGLKDNKEINGLQERFVLPSPEKISPCPTQSSASSSKTMKLTRSRSCKASLMRDPFSDWFDQEEMIQNTPPIGRPGGLQRKTYTLNYNPNAERLSWAGYENSLGRASDAQNMKSSTYNGSYKDNSLAPVRKEKNDLESSNMQANLEVQETGMESDVTTKKFKDVGLDPLQSEEEKQLEWPSEFKRLQKEIIELWNACNVSLVHRTYFFLLFKGDPSDSIYMEVERRRLFYLKQTFDQGNQTVEDGLTPESSKRYLRGERQMLSKQMQKKLSKSERENLYNNWGIRLSSKNRRLHLAHRLWSESDDLEHIRESATIVAKLVGSVEPDQAFKEMFGLNFAPRRTRKKSFGWTASMKNIL

SEQ ID NO: 195761 - protein, 57 aa, Glycine max
  Clone ID: PAT_MRT3847_18799C.1.pep
CAPIHSIFCNSTILTLNKQTVHMWKTRGLAISIGRQQMIQIHSTCTTHINFHATVIC

SEQ ID NO: 195762 - protein, 105 aa, Glycine max; identical to SEQ ID NO: 195729
  unsure (1)..(105): unsure at all Xaa locations
  Clone ID: PAT_MRT3847_1879C.1.pep

SEQ ID NO: 195763 - protein, 117 aa, Glycine max
  unsure (1)..(117): unsure at all Xaa locations
  Clone ID: PAT_MRT3847_187C.1.pep
MLLTRLEFNSHMVHKRFVPSDGRAIIGQVADVGRFDXPLLRAAHAGHTFIVQRXSGPSVRGVAINPVEHPLGEGNLQQFGHPRTVTPDAPPAQKVGLIAASSTGRLRAHSCFGSRYR

SEQ ID NO: 195764 - protein, 68 aa, Glycine max
  Clone ID: PAT_MRT3847_18800C.1.pep
LFSALGLAQQNLSGRLSPGMGEPTNLQSVLLLNKGIFGRIPAAIGSLEKLPTLDISHNAFSGEIPSSL

SEQ ID NO: 195765 - protein, 69 aa, Glycine max
  Clone ID: PAT_MRT3847_18801C.1.pep
MLRARFPLLLLGLVFLASVSVSFGIAYWERENPKHNTCLQSCNSERESYRKQACHARWDLLKVERVECE

SEQ ID NO: 195766 - protein, 72 aa, Glycine max
  Clone ID: PAT_MRT3847_18802C.1.pep
RRNVVDSQLRRRKHRALSARWLTSVCPKPARLIDYREGIAAPDTHCPHVLNSSLIPSGNAANFCFPFVIRFL

SEQ ID NO: 195767 - protein, 320 aa, Glycine max
  Clone ID: PAT_MRT3847_18803C.1.pep
MTKLKELIGIMKDKASQGKAAILSKRATLSLLRATSHDSYAPPTCDHISMLLSSGDGSRATSSAAVHLLTHRLQTTQSSAVALKCLIVVHHVIKRGSFIMRDQLPYSGGGRNYLNLSKFRDKSNPVCWELSSWVRWYAKHVEQLLWASRIVGFLPTEKERVSGLTNGELLRETEALLTVLEGIGNIPDAASMEGNKLVSEIATLVEEDGVATLSEVFVRVNEFRERLAMGCLGFGEVVELVYVLNRLDRCKEILVMVVITEKQRLWDLVRELKVKVEKMEVYREEGKRTLTTHRATKSDRFALTFLNSVDLGRFPSARFL

SEQ ID NO: 195768 - protein, 88 aa, Glycine max
  Clone ID: PAT_MRT3847_18804C.1.pep
NPDDIKTKQLIRFSVYGFHQKEISFNYITRGCRLLINRTGDDHAKQLNLMIIILTASSLLFRSLLQFLQNRIPQSLIPSTNQITHPGG

SEQ ID NO: 195769 - protein, 52 aa, Glycine max
  Clone ID: PAT_MRT3847_18805C.1.pep
LDILKGIWIDRSHLQRSSSNWVSASSDLSPFCSTEMAWAVVAHLSALVSTVN

SEQ ID NO: 195770 - protein, 70 aa, Glycine max
  Clone ID: PAT_MRT3847_18806C.1.pep
SVIYASMSNLVMITSNFTNKPILVLTLFFVGCIKLVLFCYFYFCNLENYNDPFAGSLFFFVLKNVNCPPF

SEQ ID NO: 195771 - protein, 99 aa, Glycine max
  unsure (1)..(99): unsure at all Xaa locations
  Clone ID: PAT_MRT3847_18807C.1.pep
ITLIILILESIIFIEKAMLVPTSLLFLVFSFLNILNWWDSPLSYVVQELVRYRQDFLSPDFLSLFSLGMIWPSQIILXVSFIDIFGGGLFGKVGDEGLT

SEQ ID NO: 195772 - protein, 66 aa, Glycine max
  Clone ID: PAT_MRT3847_18808C.1.pep
IQFRINNIRICLFLITCEINSVLRLTTLSSGMCYMLPKWSRDLDIFYSHGRAIFIPKNEQLGTTVI

SEQ ID NO: 195773 - protein, 75 aa, Glycine max
  Clone ID: PAT_MRT3847_18809C.1.pep
RFSNSFISIKFEENGVASWEKSNTTAISNMSKKVRVESQVLDKDAKESKSVVEHGKSNNAFRWRKRMGRLVHFIP

SEQ ID NO: 195774 - protein, 158 aa, Glycine max
  Clone ID: PAT_MRT3847_1880C.1.pep
HSMAAMREMIFRIAVMQPVHIDPESIKPPKRRNVKISKDPQSVAARHRRERISERIRILQRLVPGGTKMDTASMLDEAIHYVKFLKKQVQTLEQAGANTSPHSNTNSPNNHVVGAAGFPLGMSSNYSNNSSVNYSSLLMKGGCQPCQMFGSTSKQLLS

SEQ ID NO: 195775 - protein, 129 aa, Glycine max
  Clone ID: PAT_MRT3847_18810C.1.pep
AWPPRTVRLWIPLSKRPPPPPPPPPPPPPPPPFFFFFFFFFFFFFFFKKKKKKGFFCPQILHLPGSKKGGKILTHPPQKNFFFSFFFPQNTFFFRKKKPQFLGAPPPPPVGTFLFSKIPGGKIGGGAFL

SEQ ID NO: 195776 - protein, 62 aa, Glycine max
  Clone ID: PAT_MRT3847_18811C.1.pep
TGRPALAPIKIIAFGWHARVLQHECDHLDGTLYVDKMLPRSFKTVDNMELPVAQGCPKLAPR

SEQ ID NO: 195777 - protein, 67 aa, Glycine max
  Clone ID: PAT_MRT3847_18812C.1.pep
LYDATTSLTIHNTISALEASLSPPDPTNCIQPYPEKDTFCTPHFFIDYELPPHDDKTLPLDIIPAAH

SEQ ID NO: 195778 - protein, 71 aa, Glycine max
  Clone ID: PAT_MRT3847_18813C.1.pep
DLRIDSENRENGRVTSEASFTTHLLQSSRLVGCYPRHFAFSTLFILGDGCSILSYLIFLFSFLFIIFFINS

SEQ ID NO: 195779 - protein, 146 aa, Glycine max
  Clone ID: PAT_MRT3847_18814C.1.pep
FICPPGPPGAPGAPGQPGTGGGQPQPGEPGPPGPNGQPGQPGQPGAPGQPGQPASPPPTEPAPAGPPGEAGAPGQPGQPGAPGQPGAAGQPGPKGPPGGPGQPGNGGAPGQPGQPGQPGNPGERGICPKYCAVDGGVFFEDGTRRR

SEQ ID NO: 195780 - protein, 66 aa, Glycine max
  Clone ID: PAT_MRT3847_18815C.1.pep
GNLMELVDRRLGSDFNENEVMMMIKVALLCTNTTSNLKPTMSSVLNMLERKTMIPEFGSDPSEIMD

SEQ ID NO: 195781 - protein, 505 aa, Glycine max
  Clone ID: PAT_MRT3847_18816C.1.pep
MDQRHGPQPLPESDTIGNDSHPKTQLTKETERVVESLSDAESRHRELRSSDKPCSDSNLETLGAGVTSSVETLAVQHRSDDLQGSSTAPNSGGKAESKETVESPEKETIERGAVQPLQTQTENRLQVSVCSIPLSDLSPTSVTQSLSIVSSPTVQKQKISTPKVNNTHVPEVDRKNPSGRKTLSAVSVARTSASDGYNWRKYGQKQVKSPTGSRSYYRCTHSDCCAKKIECCDDSGHVIEIVYKSEHSHDPPRKTNSIRENKFLSSSEPIVENSVPEQPIKVLKDADPSISSKESLQEAPCSTDKKRQNTSNISGNGKVILKEEHVNEPVPKKRMKKGDLTDMDSPVKPGKKSKFVVHAAGDVGISADGYRWRKYGQKMVKGNPHPRNYYRCTSAGCPVRKHIETAVDNSDAVIITYKGVHDHDMPVPKKRHGPPSAPLVAAAAPASMNSLQVKKPDSPQNKKISTQWSVDTEGELTGEALELGGEKAMESARTLLSIGFEIKPC

SEQ ID NO: 195782 - protein, 76 aa, Glycine max
  Clone ID: PAT_MRT3847_18817C.1.pep
LYKLIGRSLVISLLLMFILFCYCFSSSLRLVVEQLVCICLYPGSTCLKQFASCGPNVEFIGIILFSRSWRVPVAFW

SEQ ID NO: 195783 - protein, 118 aa, Glycine max
  unsure (1)..(118): unsure at all Xaa locations
  Clone ID: PAT_MRT3847_18818C.1.pep
KHHANSKEAXXDRNXXXXXXPXXGXXPXGXXKGDXXXEDPXGXKEQXXQXRAAGGDGGXGXXXGGSXXXKGXKQXEGRAXRXXXQRXQEXGXARXAXTARQQGGGNRGERXNNPKAGG

SEQ ID NO: 195784 - protein, 40 aa, Glycine max
  unsure (1)..(40): unsure at all Xaa locations
  Clone ID: PAT_MRT3847_18819C.1.pep
XXTGGQPXMXPVWXXXPLGFRQRXKSXNXADANXTCVXCC

SEQ ID NO: 195785 - protein, 49 aa, Glycine max
  unsure (1)..(49): unsure at all Xaa locations
  Clone ID: PAT_MRT3847_1881C.1.pep
YHHGRCQYXSCLMSQHXIHLVSWFCRAHXNNKTGLPLWACNDNGMGKPR

SEQ ID NO: 195786 - protein, 87 aa, Glycine max
  Clone ID: PAT_MRT3847_18820C.1.pep
EYKAQKLPWVLYHEPQGSGPMFAHPNGMSDLFIKSLFRAKKAFFLLVPASDKLPAYILVPVYSGPVSAFKFPVLGNFLFTRTLYVSL

SEQ ID NO: 195787 - protein, 226 aa, Glycine max
  unsure (1)..(226): unsure at all Xaa locations
  Clone ID: PAT_MRT3847_18821C.1.pep
VRPDRINLIIGSGGKKVKSIIEESGVDTIDTEDDGTVKIFAKDLPSLEKSKAIINSLTMVPTIGDIYRNCEIKSIASYGVFVEIAPGREGLCHISELSSGWLPKAEDVFKVGDRIDVKLIEINEKGQLRLSHRALLPDTEASPKDGLVEEKTEQSKDKSSTPXSQPLLKGVQRMILCFLLKSLSGDWSALPWISLSLTKTRQRRVATKQLVSVSGKDESSLVSGEA

SEQ ID NO: 195788 - protein, 71 aa, Glycine max
  Clone ID: PAT_MRT3847_18822C.1.pep
RDAGSNYSAPSLLNTECTSNPFRSKGAEKSSWETKSNSNKTSSWGAAVDKTGIASYADQSCGLGKGGGSLG

SEQ ID NO: 195789 - protein, 81 aa, Glycine max
  Clone ID: PAT_MRT3847_18823C.1.pep
LDTTCVSFYSHAVPFRAPLWGPSFPVVSFCFFLWPPPLRREQKCFPLYFNGPPLKKGGKPFFSFQKKNSPQKKKSIKRHDK

SEQ ID NO: 195790 - protein, 80 aa, Glycine max
  Clone ID: PAT_MRT3847_18824C.1.pep
PGNTPCGAKMLHFETLLKLIITSSNAIASSGWERYDSSSLIKTNLGLSSYIRILAYRPHVITRLLISRSKPAHVRRRYLL

SEQ ID NO: 195791 - protein, 123 aa, Glycine max
  Clone ID: PAT_MRT3847_18825C.1.pep
FPPHPLGWKSTLSLFCCLDTPNVAPKGKFFAFFSPWAGPDPPAIELKPGIALLGPVDGIFFFFFSQFYPVPGPPLGHCFFSPSFGGPPPFGAPGGGVFPRFPFLTGKGFAPRVGFSAPRAPKK

SEQ ID NO: 195792 - protein, 55 aa, Glycine max
  Clone ID: PAT_MRT3847_18826C.1.pep
SEATVLLHELNGFSFYFCFFYFPYCAVCAHSNPFCRLLTRTDAWADAWADAWVDP

SEQ ID NO: 195793 - protein, 70 aa, Glycine max
  Clone ID: PAT_MRT3847_18827C.1.pep
LRISVVLLYNTAISAYRSFLESVDYLERSLPPIDKDTLSYNPNHYASPEFLHPSEAPALVSPGQDKCQLN

SEQ ID NO: 195794 - protein, 60 aa, Glycine max
  Clone ID: PAT_MRT3847_18828C.1.pep
VRWFKNVIRGGGLINDCPLFPCICCLLQIALYWFLNGTGEQTMDIDAISGTIPPVSVPRK

SEQ ID NO: 195795 - protein, 62 aa, Glycine max
  Clone ID: PAT_MRT3847_18829C.1.pep
KERLREIWRGVRLTTNGSVTHAPSRLPTDRRRVEHHRLPKRSAVYATSQLALIIMGVSLEEA

SEQ ID NO: 195796 - protein, 64 aa, Glycine max
  unsure (1)..(64): unsure at all Xaa locations
  Clone ID: PAT_MRT3847_1882C.1.pep
ASLRGXYIMPLQGMGLNRIRYISPENPFYMLDCYSVYARDFQSIIQNESPRHLESDNLDISFSI

SEQ ID NO: 195797 - protein, 34 aa, Glycine max
  Clone ID: PAT_MRT3847_18830C.1.pep
LMAVQPQKMPHEYASVFYSVIMARFLSILVPLKS

SEQ ID NO: 195798 - protein, 117 aa, Glycine max
  Clone ID: PAT_MRT3847_18831C.1.pep
MYSFGILVLEILTGRRPTDEIFKDGHNLHNHVKFSISNNLLQIVDPTILPSELERTAGSEKLGPVHPNAEKCLLSLFRIALACSVESPKERMSMVDVLRELNLIKSFSPFEVRGRLS

SEQ ID NO: 195799 - protein, 107 aa, Glycine max
  unsure (1)..(107): unsure at all Xaa locations
  Clone ID: PAT_MRT3847_18832C.1.pep
GEAPADKTPGVNQYGIKAFGEAFEALPMAPPEKKGGLPIRPLSPVKFPPIKDNNPPFGVDCNNVGPNNMREQNVFXALVGKHHHLFLVTQVVNMILKIHDVFSPFGC

SEQ ID NO: 195800 - protein, 322 aa, Glycine max
  Clone ID: PAT_MRT3847_18833C.1.pep
MDSSTTTSTDSEVAYDIPPILKVYKNGRIERLEGVEVAPPGLDPETNVESKDIVISEKDGLSARLYIPKTTYAPQQKLPLLVYFHGGAFIIETPFSPNYHNLLNNIVSKANVIGVSVHYRRAPEHPVPVAHEDSWSALKWVASHVGENGVEEWLKNHADFEKVFFAGDSAGANIASYLGIRVGLEGLPGLKLEGVVLVHPYFWGTEPLECEVEQAEGAAKVHQLWRFTCPTTTGSDDPIINPGQDPNLGKLASGRVLVFVAEKDLLKGRGLYYKELLEKSDWSGVVDVVETKDEGHVFHMLDPNCENAKALLNQIVSFIKQD

SEQ ID NO: 195801 - protein, 124 aa, Glycine max
  unsure (1)..(124): unsure at all Xaa locations
  Clone ID: PAT_MRT3847_18834C.1.pep
RLELGIELEADPHIPITDPYMWDXDHGENYRPTRTFNSDTNARLKLYPHXESLLSKSREDHVTGKPKTIFCEHLHERRDSSRDSGRYXLCRHMPRCYFAMSGSSWCYYYTRATEWGRWMLKCST

SEQ ID NO: 195802 - protein, 62 aa, Glycine max
  unsure (1)..(62): unsure at all Xaa locations
  Clone ID: PAT_MRT3847_18835C.1.pep
DIPHSARDLTCWDSDKTLPHQYSLTIAFYANRIPETNQYYPERAPINXRVLLKPKHITERNY

SEQ ID NO: 195803 - protein, 75 aa, Glycine max
  unsure (1)..(75): unsure at all Xaa locations
  Clone ID: PAT_MRT3847_18836C.1.pep
MFAMERSVKNSANRLVYQDLVTGDDVLSDSLRYKEILXGMLWEVEGKWVCKGAVDVDIGVNTSAEGGGEDEGVDD

SEQ ID NO: 195804 - protein, 167 aa, Glycine max
  Clone ID: PAT_MRT3847_18837C.1.pep
FFKTGKVNRAFIAQAGAIPHLRNLLSSPNAVAQENSVTALLNLSIFERNKSMIMEEEGCLGSIVEVLRFGHTTEARENAAATLFSLSAVHDYKKRIADNVGAVEALAWLLQEGTQRGKKDAVTALFNLSTHTENWLRMIEAGAVKAMVVALANEGVAEEATGALALI

SEQ ID NO: 195805 - protein, 219 aa, Glycine max
  Clone ID: PAT_MRT3847_18838C.1.pep
TAVEGGVRCVCQNGYVGDGFANGTGCLQACIKDGKEAYGSDCYIKRHDQRKFVMIAGIIGPVLIVASLVVLFYLLKRPTKPGMFDTEQAYYQNITIPKACKTRLFSLHELEEATKGFEEGQKLMHDNNGTIFAGVLGDGSHIAVHKLKCEKNDLIQVLSQIEVLSSVVHRNMARILGCCIESGNTLVVYEYTSNGTLEEHLHQSKGQQLRLDWYSRLTI

SEQ ID NO: 195806 - protein, 628 aa, Glycine max
  Clone ID: PAT_MRT3847_18839C.1.pep
RLVTQEDGPEVDGELTQLTRGVDGSSTKALPTIWLEVMRFFTNPHKPMILALSRPDPKKNITTLLKAFGECRPLRELANLTLIMGNRDDIDEMSSGNASVLTTVLKLIDKYDLYGQVAYPKHHNQSDVPEIYRFAAKTKGVFINPALVEPFGLTLIEAAAHGLPMVATKNGGPVDIHRALNNGLLVDPHDDIAIADALVKLLSEKNMWHECRKNGWKNIHLFSWPEHCRTYLTRVAACRMRHPQWQTNNPEDDKAVEEEESFNDSLKDEHDMSLRLSIDGDLAAASGGTGLDMQDQVKRILSKIRKTDSGSNGNGGGNINMLLDNVTSTSTSTNTSKYPLLRRRRRLIVIALDLYDNNGAPEKKMIEMVQKIIKAVQLDPQTARVTGFALSTAMPVIETVEFLTSGNVQVNEFDALICSSGSQVYYPGINTEEGKLLPDPDYEVHIDYRWGCEGLKKTIWKLMNGDENSPIEEDLKSSNAHCISYKIKDLSKAKKVDELRQKLRMRGLRCHPMYCRGSSRMHVIPLLASRAQALRYLFVRWRLNVANMYVILGETGDTDYEEMISGTHKTIIMKGVVSKGSEELLRGPGSYQRDDIVPNESPLVASITETTHENIANALKQLSKSGGI

SEQ ID NO: 195807 - protein, 118 aa, Glycine max
  Clone ID: PAT_MRT3847_1883C.1.pep
TDELTEGEIQTSFVIPKEDRDKNRNSVEVSLVTVKNRRSFVKKRALDSEKSKIETPSSAILREDRVKNCNSERWKLRRSVACCNLEPVKFHVVSKELLQSFLQLTSPPLFSALLSCVE

SEQ ID NO: 195808 - protein, 54 aa, Glycine max
  Clone ID: PAT_MRT3847_18840C.1.pep
LFFPENFIDIQECLFNKLFVQKPLILLYYYFYNIPIPYLQYFPSPNLHSLIFPY

SEQ ID NO: 195809 - protein, 31 aa, Glycine max
  unsure (1)..(31): unsure at all Xaa locations
  Clone ID: PAT_MRT3847_18841C.1.pep
VLINTTLDIWVIGQVKYXDISKSYIQPCLSI

SEQ ID NO: 195810 - protein, 61 aa, Glycine max
  unsure (1)..(61): unsure at all Xaa locations
  Clone ID: PAT_MRT3847_18842C.1.pep
LNLESISHLFXSKXTLFTFVTLKRANGTQHFSIKLFSPIIIYKLISLFLLIFPIFIPITIF

SEQ ID NO: 195811 - protein, 252 aa, Glycine max
  Clone ID: PAT_MRT3847_18843C.1.pep
RLREDDRRIRLREDDRRASSLKLLLVIGLLVCSILFAVAAIIKARALKKASEARAWKLTAFQRLDFTVDDVLDCLKEDNIIGKGGAGIVYKGAMPNGDNVAVKRLPAMSRGSSHDHGFNAEIQTLGRIRHRHIVRLLGFCSNHETNLLVYEYMPNGSLGEVLHGKKGGHLRPYTRYKIAVEAAKGLCYLHHDCSPLIVHRDVKSNNILLDSNHEAHVADFGLAKFLQDSGTSECMSAIAGSYGYIAPGTVEF

SEQ ID NO: 195812 - protein, 1010 aa, Glycine max
  Clone ID: PAT_MRT3847_18844C.1.pep
MRVLVLFFLFLHSLQAARISEYRALLSFKASSLTDDPTHALSSWNSSTPFCSWFGLTCDSRRHVTSLNLTSLSLSGTLSDDLSHLPFLSHLSLADNKFSGPIPASFSALSALRFLNLSNNVFNATFPSQLNRLANLEVLDLYNNNMTGELPLSVAAMPLLRHLHLGGNFFSGQIPPEYGTWQHLQYLALSGNELAGTIAPELGNLSSLRELYIGYYNTYSGGIPPEIGNLSNLVRLDAAYCGLSGEIPAELGKLQNLDTLFLQVNALSGSLTPELGSLKSLKSMDLSNNMLSGEVPASFAELKNLTLLNLFRNKLHGAIPEFVGELPALEVLQLWENNFTGSIPQSLGNNGRLTLVDLSSNKITGTLPPYMCYGNRLQTLITLGNYLFGPIPDSLGKCESLNRIRMGENFLNGSIPKGLFGLPKLTQVELQDNLLTGQFPEYGSIATDLGQISLSNNKLSGPLPSTIGNFTSMQKLLLDGNEFSGRIPPQIGRLQQLSKIDFSHNKFSGPIAPEISRCKLLTFIDLSGNELSGEIPNQITSMRILNYLNLSRNHLDGSIPGSIASMQSLTSVDFSYNNFSGLVPGTGQFGYFNYTSFLGNPELCGPYLGPCKDGVANGPRQPHVKGPFSSSLKLLLVIGLLVCSILFAVAAIFKARALKKASEARAWKLTAFQRLDFTVDDVLDCLKEDNIIGKGGAGIVYKGAMPNGGNVAVKRLPAMSRGSSHDHGFNAEIQTLGRIRHRHIVRLLGFCSNHETNLLVYEYMPNGSLGEVLHGKKGGHLHWYTRYKIAVEASKGLCYLHHDCSPLIVHRDVKSNNILLDSNFEAHVADFGLAKFLQDSGASECMSAIAGSYGYIAPEYAYTLKVDEKSDVYSFGVVLLELVTGRKPVGEFGDGVDIVQWVRKMTDSNKEGVLKVLDPRLPSVPLHEVMHVFYVAMLCVEEQAVERPTMREVVQILTELPKPPSSKQGDLTITESSLSSSNSLESPTTASKEPKDQHPPQSPPTDLLSI

SEQ ID NO: 195813 - protein, 83 aa, Glycine max
  Clone ID: PAT_MRT3847_18845C.1.pep
PILGGEDFDNRMVNHFVQEFKRKNKKDISGNPRALRRLRTACERAKRTLSSTAQTTIDFYSTITRARFEELNMDLFRKCMEPV

SEQ ID NO: 195814 - protein, 444 aa, Glycine max
  Clone ID: PAT_MRT3847_18846C.1.pep
HEGGGTFDVSLLTIEEGIFEVKATAGDTHLGGEDFDNRMVNHFVQEFKRKNKKDISGNPRALRRLRTACERAKRTLSSTAQTTIEIDSLYEGIDFYSTITRARFEELNMDLFRKCMEPVEKCLRDAKMDKRTVHDVVLVGGSTRIPKVQQLLQDFFNGKELCKSINPDEAVAYGAAVQAAILSGEGNEKVQDLLLLDVTPLSLGLETAGGVMTVLIPRNTTIPTKKEQVFSTYSDNQPGVLIQVYEGERTRTRDNNLLGKFELSGIPPAPRGVPQITVCFDIDANGILNVSAEDKTTGQKNKITITNDKGRLSKEEIEKMVQEAEKYKSEDEEHKKKVEAKNALENYSYNMRNTIKDEKIGGKLDPADKKKIEDAIEQAIQWLDSNQLGEADEFEDKMKELESICNPIIAKMYQGGAGPDVGGAMDDDVPAAGSGAGPKIEEVD

SEQ ID NO: 195815 - protein, 77 aa, Glycine max
  unsure (1)..(77): unsure at all Xaa locations
  Clone ID: PAT_MRT3847_18847C.1.pep
SSRTVLPGGQAVITSFSLGKNLLLTTTXLAGCTRMGWLMGYLNLQFLRMLQHQKACTVSGLSFCGVWLSPGASISAA

SEQ ID NO: 195816 - protein, 93 aa, Glycine max
  unsure (1)..(93): unsure at all Xaa locations
  Clone ID: PAT_MRT3847_18848C.1.pep
KSMYIKISRRKAERSXXXAVFSPLNKGMEQEFWCLKRCPFPEQPRGNHSFPVTPMFCSLSLDTSSPSLPMNDFLHGDPLLPSHHVSHLFSPAH

SEQ ID NO: 195817 - protein, 41 aa, Glycine max
  Clone ID: PAT_MRT3847_18849C.1.pep
FVCHLGTILCLWDQWAHPPYRIFKSFNTRTLDIRCITGPKP

SEQ ID NO: 195818 - protein, 75 aa, Glycine max
  Clone ID: PAT_MRT3847_1884C.1.pep
RLYFCLFSDAGAWKYVEQNRRAYFNTMQVTFFLSHPLTLVINFAFMNSSICMLLSKIDMFFHYVYITYMIVCLLF

SEQ ID NO: 195819 - protein, 54 aa, Glycine max
  Clone ID: PAT_MRT3847_18850C.1.pep
RRVANITLYCQIQMSLWHFFFTGFLTWRNSTHAPRSLVYIKVYTFFFLTVCSVQ

SEQ ID NO: 195820 - protein, 119 aa, Glycine max
  unsure (1)..(119): unsure at all Xaa locations
  Clone ID: PAT_MRT3847_18851C.1.pep
MDHGSRSRMLLLHGPSHSTRGDGKYLRHMLSLSLTPIDEDYPITRWYKSTGCLLQDNWPITWVSLLWIGEMLGLFAYKKAQGQDNXAYEVMGHXVCMVKGAPESLSLNMAIILLPVCRN

SEQ ID NO: 195821 - protein, 45 aa, Glycine max
  Clone ID: PAT_MRT3847_18852C.1.pep
IPIFYLYYLIISTLKLSLHPLILSSNHLTNSLYISPFISSNYFIK

SEQ ID NO: 195822 - protein, 157 aa, Glycine max
  Clone ID: PAT_MRT3847_18853C.1.pep
MEFQSLSRFYLLLSLTILFLAPFHAQAKTKVTYCDKKADYPVKVSGVEISPDPVESGKPATFKISATSSKAIYGGEVVIGVSYVGVPVHTERIDLCHEVSCPVANGNFLISHTQTLPSITPPGPYSLKMTLKNDRDEVLTCIKFNFKIVFGSFVSDM

SEQ ID NO: 195823 - protein, 123 aa, Glycine max
  Clone ID: PAT_MRT3847_18854C.1.pep
HACVENDNPRAYIYIYIYIYISSTRWGETRIPLRIHRLHGTTGQKESYYAENSTSVVYPYSILVHQITISTSDMLYKSSELIVLGDRNTNKILLFTLPHLYLKQLFALDDRIQAVMQMIMAPT

SEQ ID NO: 195824 - protein, 95 aa, Glycine max
  Clone ID: PAT_MRT3847_18855C.1.pep
PFLGVWNSWNFLALPPLLADYLLRGWWLTQGLSVPAMFFAICSLTALSHECAAHVIWGNSIRAPVNIFTSYQIGVHAALGCNSFPVRVGIAHMIP

SEQ ID NO: 195825 - protein, 74 aa, Glycine max
  Clone ID: PAT_MRT3847_18856C.1.pep
YARLTFKTIFLNLYSNKIKFVLETNLNMLLLSQKYGIFFSCFIMKCSDWFFGYPFDLIVCEYCYFIFLTVQVSK

SEQ ID NO: 195826 - protein, 279 aa, Glycine max
  unsure (1)..(279): unsure at all Xaa locations
  Clone ID: PAT_MRT3847_18857C.1.pep
VSLGSSSTSTSSGSTGSGSGRNGNNNAVSKRSHSGELSGSSETNSPTRVSKPGHRRSNSGQSQRSPSSSSSAVNSPPLNVLPAGNICPSGRVLKAATAAVAPSRSSRSDVLGSGTGNYGHGSIMRGGKGGGGGGGGGGDVRIAGESAKGVDPEEVKRIGNEEYKRGHFVEALCLYDRAIAMSPGNAAYRSNRAAALTGLGRLPEAVKACEEAVGLDPNYGRAHQRLAMLFLRLGQVEDARKHLCYPGLQLDPAELQKLQIVESIXQCGDVRRILDWKGY

SEQ ID NO: 195827 - protein, 70 aa, Glycine max
  Clone ID: PAT_MRT3847_18858C.1.pep
GEPFFLSRSKLRIHRVVGYMIVHSIASSPKSKRILIFLLLIGCSIEVLAVFKRGPQKKNPVDKEEKKEIG

SEQ ID NO: 195828 - protein, 63 aa, Glycine max
  Clone ID: PAT_MRT3847_18859C.1.pep
PSKRRPIKDFSFKWLATWLGIPEMSPLSKTRFCLASVSFSYKYSLIFNFSVLAWGEIFYCNES

SEQ ID NO: 195829 - protein, 90 aa, Glycine max
  Clone ID: PAT_MRT3847_1885C.1.pep
LTTILSLGFCFFGKKKALNPSKPPPKDRLMGPQNIPKSRKRFSGPGVKNTPLCRGFSIKPNQGPPGKNYFWLKPHFPGGLSYFYTHSPNN

SEQ ID NO: 195830 - protein, 180 aa, Glycine max
  unsure (1)..(180): unsure at all Xaa locations
  Clone ID: PAT_MRT3847_18860C.1.pep
FWKLVGDMRSAGFEMEAATFVKELGRFCKRRMVKDAVELYEFAMGGANKPTVQCCVFLLRKAAAGKELDTDLFSRVLKVFTGNGNVSTDSVANAVLKYLTNVGRTGEWIKVLKEMEDCGTVAGGSLQSKNAYKLRAAGNKEHAHEFMNRIEVSGSNLYRKTXESLIHGYCVAANFDKAFE

SEQ ID NO: 195831 - protein, 97 aa, Glycine max
  Clone ID: PAT_MRT3847_18861C.1.pep
NMSEGKPHTNLKSKMLFTFQQNITQREEKKIPQFRAKPVNKHVGVMLFFLHFQDSPVFFFFNSASITICKRGLKFSVKQLTDPVGHLNLPENFLATL

SEQ ID NO: 195832 - protein, 134 aa, Glycine max
  Clone ID: PAT_MRT3847_18862C.1.pep
MAEQSDKDVKYYTLEEIQKHKDSKSTWVILHHKVYDLTKFLEEHPGGEEVLREQAGGDATENFEDVGHSTDARELSKTYIIGELHPDDRSKIAKPSETLITTVESNSSWWTNWVIPAISALVVALMYRLYMAED

SEQ ID NO: 195833 - protein, 149 aa, Glycine max
  Clone ID: PAT_MRT3847_18863C.1.pep
QSSFPILTTVTISALETESVQVNAVQGYTFSSNLLGGSGRIIPESVIYSYGTVLLDLLSGKHIPPSHHTMGKRRKLNIIQNDGQSQAKEQSIESSTEVNQNNNSILEENAQFEEEQHIQEDSHVQSHTSLESASESSTDKKKTRGYTHM

SEQ ID NO: 195834 - protein, 93 aa, Glycine max
  Clone ID: PAT_MRT3847_18864C.1.pep
PQLPPLFFVLKIKVFKKVVGVKKEKLKRFFYPPKKYIKLVIPCNKTKMPPPPFKKKKKLPPPEVAKNWGPPRFPPMKKNMCHFFPITLSKKAM

SEQ ID NO: 195835 - protein, 102 aa, Glycine max
  Clone ID: PAT_MRT3847_18865C.1.pep
ASHVDHKFTSQKMLKAHLSDVPEPRTVRGNECVTKHTDGHKLCSSLNITVRLSQGIRRGLEWACYTLDDRLGMIPITYPPLEASLKYCGWSRVMVPLGPKKQ

SEQ ID NO: 195836 - protein, 102 aa, Glycine max
  unsure (1)..(102): unsure at all Xaa locations
  Clone ID: PAT_MRT3847_18866C.1.pep
MLKKVIRDSRQTMAATQEDVKLLGIVGSPFMSRDQIALKEQGVEYXNLLEQNLCSMSDLLLKYNLDHKKVTVHDHNEQAIAXSLLRFEEYIXETWKNNPIWT

SEQ ID NO: 195837 - protein, 377 aa, Glycine max
  Clone ID: PAT_MRT3847_18867C.1.pep
LQSLLAESGDNSHLLLSILVKHLDHKNVAKKPILQIDIINTTTQLAQNVKQQASVAIIGAISDLIKHLRKCLQNLAEASSNGNDAYKLNAELQSALEMCILQLSNKVGDIGPILDLMAVTLENIPITTIIARSTISAVYQTAKLITSIPNVSYHNKAFPDALFHQLLLAMAHPDCETQIGAHSVFSMVLMPSMFSPWLDHKTKIAQKAQNDSFSTQHETFSGAENLNGKLEEGKAIASVNGKKYVIHPYHRYSFSPKLTDGKDDRSSLRLSSHQVSLLLSSIWVQATSVENGPANYEAMAHTYSIALLFSRSKVSNYMALARCFQLAFSLRSISLDQERGLQPSRRRSLFTLASYMLISSARAGNVPDLIPKVKASL

SEQ ID NO: 195838 - protein, 64 aa, Glycine max
  Clone ID: PAT_MRT3847_18868C.1.pep
LRKQGNKQTTDDHAFNILGAERGCEYKLLCLGLERVREVFAMSLASFFVLGFGLPLQIVKRIKY

SEQ ID NO: 195839 - protein, 34 aa, Glycine max
  unsure (1)..(34): unsure at all Xaa locations
  Clone ID: PAT_MRT3847_18869C.1.pep
CXNLSPLQSXTVTEXTEISDDDDXKXSXCXRIXK

SEQ ID NO: 195840 - protein, 50 aa, Glycine max
  Clone ID: PAT_MRT3847_1886C.1.pep
LILKLVAKYNIGGGYVRYKCDPAGYTVFIAGMEIHVFEKDSFVVVDFVIC

SEQ ID NO: 195841 - protein, 62 aa, Glycine max
  Clone ID: PAT_MRT3847_18870C.1.pep
ILMNAVLSLKRGYYFPLEKENSKPFLGAFAPGKIKIFNPLGLSPMQKLDLIHLLNLILFSLP

SEQ ID NO: 195842 - protein, 20 aa, Glycine max
  Clone ID: PAT_MRT3847_18871C.1.pep
DKKVSAIMHRVRILTRAFMG

SEQ ID NO: 195843 - protein, 121 aa, Glycine max
  unsure (1)..(121): unsure at all Xaa locations
  Clone ID: PAT_MRT3847_18872C.1.pep
MVQFIRQEGDEKANEISVYSEKEFTIKKLHFVXADNKNIMLEYERRDPQIEIPKKIEYSMQLNACRIKVLQAQYDMIRYMKEAAFNELQNVSHHMHANLLSHHHHEYRNLLKDLIVHCLLR

SEQ ID NO: 195844 - protein, 81 aa, Glycine max
  Clone ID: PAT_MRT3847_18873C.1.pep
PQLPPWTWGRSFPSLSFSPTRGCWHLLAKVPCSFIAVSTYAGYGSWPKRFGVHVALRVVCRVLRPESLPDRCWAFPFENFH

SEQ ID NO: 195845 - protein, 107 aa, Glycine max
  Clone ID: PAT_MRT3847_18874C.1.pep
MESGGRFYSVDEFRLDPKWLIDPNHLFVGPQIGEGAHAKVYEGKYKNQTVAFKIVHKGETTEDIAKREGRFAREVAMLSRVQHKNLVKVGIWLRLFLILIIGSVVCC

SEQ ID NO: 195846 - protein, 352 aa, Glycine max
  Clone ID: PAT_MRT3847_18875C.1.pep
MESGDMFYSVDEFRLDPKWLIDPKHLFVGPQIGEGAHAKVYEGKYKNQTVAIKIVHKGETTEDIAKREGRFAREVAMLSRVQHKNLVKFIGACKEPVMVIVTELLLGGTLRKYLFSMRPKCLDRHVAIGFALDIARAMECLHSHGIIHRDLKPDNLLLTEDQKTVKLADFGLAREESLTEMMTAETGTYRWMAPELYSTVTLRQGEKKHYNHKVDAYSFAIVLWELLHNKVPFEGMSNLQAAYAAAFKNVRPSAENLPEELAVILTSCWQEDPNARPNFTQIIQMLLNYLYTVAPPEPMIPSRIFSSENTVLPPESPGTSSLMAKRDDTGDTPRAKDEIKPNGFLCCFSQCY

SEQ ID NO: 195847 - protein, 139 aa, Glycine max
  Clone ID: PAT_MRT3847_18876C.1.pep
MILSADQGKKKKQKKKEMESGGRFYSVDEFRLDPKWLIDPNHLFVGPQIGEGAHAKVYEGKYKNQTVAFKIVHKGETTEDIAKREGRFAREVAMLSRVQHKNLVKFIGACKEPVMVIVTELLLGGTLRKYLLSMRPKCL

SEQ ID NO: 195848 - protein, 343 aa, Glycine max
  Clone ID: PAT_MRT3847_18877C.1.pep
IKSVGTQEVLVQVLAFVPLMFMCICTYYSLFKIGTLVFYSLTPRGTSSVSLLMICSMIARYAPPISYNFLNLIRLGSDKTTIFEQRMGNIDNAVPFFGDKFNRIYPLIMVIYTLLVASNFFDRVFDSLGSWKRYVFETEAEDMDGFDPSGLIILQKERYWLEQGGNVGEQVVPLVRNFNGIDVESSDNIMVKNGVEMKGNSALVNKETDGNLPKTLKEETRRYSSSREAISSKYAAVRQQSELTSAKVSLLDHGNAHSSNAAGTSGLASTWQTMTTGFRSFGANLGGKGFLPIRQTQEAKMSRVSSSESLDDIFQRLKRPALDQNIDNDKDYLKRGNISGPSR

SEQ ID NO: 195849 - protein, 38 aa, Glycine max
  Clone ID: PAT_MRT3847_18878C.1.pep
GAHRNYHVMVSQVPTATEAVHGSRPILIIPTLLMHTLV

SEQ ID NO: 195850 - protein, 64 aa, Glycine max
  Clone ID: PAT_MRT3847_18879C.1.pep
VTGWKAFRMQHTNYHMRSQASMDQRKENKRQCWSLLVPLKVTNTRLWLLSKIKDVRICAKTKLT

SEQ ID NO: 195851 - protein, 215 aa, Glycine max
  unsure (1)..(215): unsure at all Xaa locations
  Clone ID: PAT_MRT3847_1887C.1.pep
MDTSTLGVDPKKRKTSTVENAVNLQARETLDHEIARMFYASGLPFHLARNPHYRKTFGYAANNKINGYQPRGYNKLRTTLFQNERRHVENLLQPIKNAWSQKGVSIVSDGWSDLQRXLINFMVVPESGPMFLKAIDCSNEIKDNDFIAKHMREVIMEVGHSNVVRIVMDNAAVCKAAGLIIEAEFPSIYWTSCVVHTLNLALKNICAAKNTEKKK

SEQ ID NO: 195852 - protein, 48 aa, Glycine max
  Clone ID: PAT_MRT3847_18880C.1.pep
VGRKKTNVMFIGDGKGKTVITGKKNVIDGMTTFHSASFGTVPFHLLAS

SEQ ID NO: 195853 - protein, 153 aa, Glycine max
  unsure (1)..(153): unsure at all Xaa locations
  Clone ID: PAT_MRT3847_18881C.1.pep
MSLKENVAKTGNTEDNASQMWTLCKHAFYDLTHVSPVVFLFLLKECYYYGTCKASTKFRALQHQVHLVLSNDPKPEPATFIVQCMYVSPLFEDHSQGFTHLIISALRRFLKRSTTTTEDSLEVKDLVAHLLVDIIWGQIDHDEKIVMKLLEIX

SEQ ID NO: 195854 - protein, 50 aa, Glycine max
  Clone ID: PAT_MRT3847_18882C.1.pep
QKITNSMMWRLDPRQLLERQSLRVYPIIPSKFRGIYQGLKIRIPRSTKFM

SEQ ID NO: 195855 - protein, 25 aa, Glycine max
  Clone ID: PAT_MRT3847_18883C.1.pep
PNQEAQARTKSNNVNAIVLYYESCL

SEQ ID NO: 195856 - protein, 90 aa, Glycine max
  Clone ID: PAT_MRT3847_18884C.1.pep
DHVAAILINFFEQCQSDPGYWNKISDAGLRRIHERYTWKIYSERLLTLAGVYGFWKHVSKLEKRETRRYLEMFYILKFRDLVKSIPLAVN

SEQ ID NO: 195857 - protein, 66 aa, Glycine max
  Clone ID: PAT_MRT3847_18885C.1.pep
CLGLLCYLMTTEKLFGEDKTRFSLSQQWVRQRPCTLLMVISMLQMGIHHATLLLGIPTLLQGHKWE

SEQ ID NO: 195858 - protein, 113 aa, Glycine max
  unsure (1)..(113): unsure at all Xaa locations
  Clone ID: PAT_MRT3847_18886C.1.pep
STGTRSCFSDRWTDLHLSANPALSSTRDQXIVKKVQKSHLVRYSRSENKEIVALFNLTKYIXNTVSIHLSSSYQGCDMVSEGELDSYNKISFLNQDPIALLEGVVPLACIQYA

SEQ ID NO: 195859 - protein, 42 aa, Glycine max
  Clone ID: PAT_MRT3847_18887C.1.pep
GHTRVCRKMYIQIWESSYLTCKLRCITYFSVDLRFGIEDLRL

SEQ ID NO: 195860 - protein, 64 aa, Glycine max
  Clone ID: PAT_MRT3847_18888C.1.pep
AARRRQKGPLPEPSSRSTTPQVGAGRGTTAAWRRPAAGNRCITITPEVHLSSLMEVRALHMTCG

SEQ ID NO: 195861 - protein, 157 aa, Glycine max
  Clone ID: PAT_MRT3847_18889C.1.pep
RREHKEICFIIMYPNQALSSGSYAEMMSGTSLIPHDYSETVGGGQNEVKFITAMGETVTMHSINGHSNAANGDPSCNSFGGDCHVVLRTQMGMADSEQNVNCQGLSLSLGTLMPSNACVSPFQYQYHDTGLLPLMNDYPNPKGAMSFKNDEGNNLHR

SEQ ID NO: 195862 - protein, 116 aa, Glycine max
  Clone ID: PAT_MRT3847_1888C.1.pep
GEEKRRTNGFFFSFFRCPRKGSGFFTSPGDPQIFFFTPPNFGWNKPFNTVQNLGEKRNPFNPGEEEEEEKGTRFSTWPGGEIIQMVPARPGAEKKDQGRKCPPGGRIKDICSHERS

SEQ ID NO: 195863 - protein, 51 aa, Glycine max
  unsure (1)..(51): unsure at all Xaa locations
  Clone ID: PAT_MRT3847_18890C.1.pep
SLVVPRVLLTPKPGLPTSGGFKAXPGVLNNXPXGLNSWNETSSFQTLNRST

SEQ ID NO: 195864 - protein, 90 aa, Glycine max
  unsure (1)..(90): unsure at all Xaa locations
  Clone ID: PAT_MRT3847_18891C.1.pep
CVEAXKXYIHGEQYRSDYKTGNQQAYLYARDLEVHPKDTWXFRIDGTAPSNMPYYKKHGYGAEKLNSTPDDEWVNKGNAPALPETPKKHN

SEQ ID NO: 195865 - protein, 118 aa, Glycine max
  Clone ID: PAT_MRT3847_18892C.1.pep
RTEQVCPKCEGSGQEFEEPCPTCKGKGTENKTVKLEVTVPEGVDNEQQVRLAGEGSPGVNGGPHGDLYVVFRVKPSNTFERDGDDIYYNLDISFSQAALGDEIKIPTLKSNVVLTIPA

SEQ ID NO: 195866 - protein, 37 aa, Glycine max
  Clone ID: PAT_MRT3847_18893C.1.pep
KTSCSKPCYSTPFPKNEISSNTHVNWYKQESILNYPL

SEQ ID NO: 195867 - protein, 101 aa, Glycine max
  unsure (1)..(101): unsure at all Xaa locations
  Clone ID: PAT_MRT3847_18894C.1.pep
LLVGPDPNDNGGLLXSIAALGPHGAGKAFANKIVAGDHLVTVETPKLCAGHLTAEPWMPIKVNRLHAERHLPSGAADDTETCLSGQGGIVKSGVKATVVTG

SEQ ID NO: 195868 - protein, 88 aa, Glycine max
  Clone ID: PAT_MRT3847_18895C.1.pep
RVYFLTKPRERMGKHNFSYLLMYCFYRERDRKCWGSSADSVVSPPDDIIVDGRHECRSRRQWRHKLSAPGYVRDSSVVSIALPLRTRA

SEQ ID NO: 195869 - protein, 96 aa, Glycine max
  Clone ID: PAT_MRT3847_18896C.1.pep
IWREESKATLFINRFLTQQRQLSRDYSYLWHKYDRRIKGPMLWKIHSSRGPSSLRVVHSITNKVRVHSKCTRQGGVSLCRNGRVFFGSIKTGREIV

SEQ ID NO: 195870 - protein, 36 aa, Glycine max
  Clone ID: PAT_MRT3847_18897C.1.pep
NLRVLLSPINGFIASSRQDELLSLIAKYVSVQNNRG

SEQ ID NO: 195871 - protein, 110 aa, Glycine max
  unsure (1)..(110): unsure at all Xaa locations
  Clone ID: PAT_MRT3847_18898C.1.pep
HPGDNVGFHVNNVAVXDLKRGYVALYSKDDPAKEAANFTAHVIIMNHPVQIGYGYAPVFDCHSTYIAVLFAELWTLFVRRSVNELDKDHKLWKNGDSVFVIMIPAQLLVI

SEQ ID NO: 195872 - protein, 62 aa, Glycine max
  Clone ID: PAT_MRT3847_18899C.1.pep
KFLKKKKKKKKKKKKKKKKKKKKKKKKKKKGRRFKRIKANIRWHETKKFLKRGTKIKFRGSK

SEQ ID NO: 195873 - protein, 72 aa, Glycine max
  Clone ID: PAT_MRT3847_1889C.1.pep
KKKKKKKKKNKKKKKGGQKKGKGAYSTRACNKKNSYIKKHGLPFIGTQFKLPGLGKQRFFLGKPKCNPLAFL

SEQ ID NO: 195874 - protein, 62 aa, Glycine max
  Clone ID: PAT_MRT3847_188C.1.pep
MGRVHGSLARAGKVKSQTPKVEPQEKKKTPKGRAKKRLTYTRRFVNVTMTGGKRKMNPNPTS

SEQ ID NO: 195875 - protein, 862 aa, Glycine max
  unsure (1)..(862): unsure at all Xaa locations
  Clone ID: PAT_MRT3847_18900C.1.pep
MDPNTRLDHALFQLTPTRTRCDLVVVGGGVSERLASGLLEPFLSHLKSAKDQISKGGYSITLRPPGGHPHWFTKATLQRLVRSINTPAVLERVVTIVREIVQIEGEFQSSERSNLEAKTYGGIKFADEQDSFGAVQEVAVEPCICLLDSFVHRVQSKTSLEKEITYARAXVARYYANVGQLHADPADAFGASRLXEACINFLELCKQKNEDKLWIDEIVVMQSSPQPELHYPANPKQFLAGEDDTSSKLNGIVDASISESTPSHANGRAQIPMSWPNHLPQYMHNFQERAEAESPLWIDWYLYPGMQVPSSYYPGNMQWPSNMEDPHIVHDRDKDYHKSSYKKKKKKHSQTLQQSHHSSTEHHHKKKHGKKSSRKVVIRNINYITSNGDGEKGSVTEGSLSNEEEFINGDSLKQQVEEVVGSFERRNKSSSRHRKKQHIAKHSGKLNGSNDADSNGMKGNNNWDAFQNLLLRDDDSTPDTEEQPMKSNEFNHEPDFSKTRAVSNDSFVVTERGFDGEVQNRVDNFKDGKDAPSLMKKNINTDEAMLFSQRNDKSGSYSMSNLSGNGPESSLTKCQTEEDWFIINQSGKPGNVDQNRDFSMFDGISVSSSATDSFHVEKNRKDIVTDDSFMIQARSSEDQFNSQSAADLSLVSDIVGATEFMNSTQEGSHNKNETLNSHEPDDLFMVLDRDSTLEQSLAPWSMEMDYDNNISSNEANRKLSEVETDKNHSSNLEGTDTKTPGVKNGKVSSKEAKPKALNASLGKSKSNITSRSKASPGSKTRVTKSKSEKEEEKRKKKEELMIQRQKRIAERSASKKTGTKTSLTSAKKENPKIHPSNEETKKLQKPVIRNSTIERLATARVS

SEQ ID NO: 195876 - protein, 50 aa, Glycine max
  Clone ID: PAT_MRT3847_18901C.1.pep
RNTYLIKVLSEISLSVNIYIYIYICICIYIFLFIYIYYELEGSFVQEFIC

SEQ ID NO: 195877 - protein, 47 aa, Glycine max
  unsure (1)..(47): unsure at all Xaa locations
  Clone ID: PAT_MRT3847_18902C.1.pep
PHVDHMVMNLPASARQILDAFMGFTHMKYWXGCLPWIHCYLLIRATE

SEQ ID NO: 195878 - protein, 52 aa, Glycine max
  Clone ID: PAT_MRT3847_18903C.1.pep
PVKTRFFNFPLNKNPHYFLLSCHTFILMRGYFKEIGPFIPFFNPYAEKGPLL

SEQ ID NO: 195879 - protein, 67 aa, Glycine max
  unsure (1)..(67): unsure at all Xaa locations
  Clone ID: PAT_MRT3847_18904C.1.pep
RPRCETSNTKFCCCNNYSCAQPRHFCRACTRYXTRGGPLRNIPDGGGCRKNTRVKRTTHGDSSASCC

SEQ ID NO: 195880 - protein, 183 aa, Glycine max
  Clone ID: PAT_MRT3847_18905C.1.pep
NKPARPQVGGRSVVNKDITQLVEVRPDNERFLRLLEILGEWYEKGKIVIFVHSQEKCDSLFKDLLTHGYPCLSLHGAKDQTDRESTISDFKSNVCNLLVATSIAARGLDVKELELVINCDVPNHYEDYVHRVGRTGRAGRKGCAITFISDEDARYAPDLLKALELSEQIVPNDLEALAGSSMA

SEQ ID NO: 195881 - protein, 230 aa, Glycine max
  Clone ID: PAT_MRT3847_18906C.1.pep
TPTHNSDSTEATCENGTSLIGHDHGSDDASQINHKVKENEASGLPGLVGKDSPDELFDVPFVGVLGEEKHTLDFSPILVSCSSGKPQVSPLGEQSCNASQCEAVSLRNESKNEPGCTSSAAGHIIVGHRADKGSSKWQSKGKRNSRHTSKNIKHASRKYVDTDPQSSAYLSGIGISDGIYQGACQKVDWNGMGAPNTSYKCTSQVKCKPVAVGQLEGFRDLNKHIKGTTT

SEQ ID NO: 195882 - protein, 48 aa, Glycine max
  Clone ID: PAT_MRT3847_18907C.1.pep
HKPEYIMVYDISMQFLIENLASSHVSTLFLVCVWIPTTINFSSQNHNE

SEQ ID NO: 195883 - protein, 117 aa, Glycine max
  Clone ID: PAT_MRT3847_18908C.1.pep
MEQLRPPPLSGRQLSLAARLNSMVAQSRIGKYFRVAERNTTFTTELRAGTATFLTMAYILAVNATIIADSGGTCSVSDCIPLCSDPKTPLSKCPTHLLTRPGLSCKYPPVNPGYAAC

SEQ ID NO: 195884 - protein, 87 aa, Glycine max
  Clone ID: PAT_MRT3847_18909C.1.pep
RSGYLLCYWRCMVSLGDNKTMLFFAISCNFNNVKIYEQFCLSFIHFHAFSSQLYQFYSFAREERFLWLVIAGQGHLPPHSLRLLFPT

SEQ ID NO: 195885 - protein, 106 aa, Glycine max
  Clone ID: PAT_MRT3847_1890C.1.pep
KGAGGLELGMMLSTTFIGRLQKLYHNFSKQPSRRKQELEKKKKKNPPVFFFKKKKMGGILGGANLWEIPLNYIQIYKGAYLVKGGFSLFGGPFFSKNPPTFPIGGG

SEQ ID NO: 195886 - protein, 134 aa, Glycine max
  Clone ID: PAT_MRT3847_18910C.1.pep
MALSFREERDTFGAIQVPSEKLWGAQTQRSLQNFDIGGPRERMPEPIIRAFGVLKKCAAKVNMEYGLDPNVGEAIMQAAQEVAEGKLNDHFPLVVWQTGSGTQSNMNANEVIANRAAEILGHKRGEKFVHPNDH

SEQ ID NO: 195887 - protein, 83 aa, Glycine max
  Clone ID: PAT_MRT3847_18911C.1.pep
RPSLQNLIFFSTFLSNPIPLTSSYLMSDHNHEISTSADDGNDSLNGHIISTTVGGKNGKPKQVFFCETHFSCKQLLRFFFFRY

SEQ ID NO: 195888 - protein, 170 aa, Glycine max
  unsure (1)..(170): unsure at all Xaa locations
  Clone ID: PAT_MRT3847_18912C.1.pep
KTHVQVTVGGSPGRFALPVFKLKRSSIMPGKVNPTQCXALTMVCEVIGNHVAVTVGGSNGHFELNVFKPMIASCLLHSLRLLGDSSASFEKNCVRGIQANRERISKLLHESLMLVTSLNPKIGYDKAAAVAKTAHKEGCTLKEAALKLGVLSSEDFDKLVVPEKMLGPSD

SEQ ID NO: 195889 - protein, 46 aa, Glycine max
  Clone ID: PAT_MRT3847_18913C.1.pep
HSGFLSTHKDHLFARSLALQPVTKILRERESLNPLVTRINSPTLLL

SEQ ID NO: 195890 - protein, 495 aa, Glycine max
  Clone ID: PAT_MRT3847_18914C.1.pep
MAFYVLSRRLSAGSNSTTLLALRFVSSSRSFSSSFREERDTFGPIQVPSDKLWGAQTQRSLQNFDIGGPRERMPEPIIRAFGVLKKCAAKVNMEYGLDPIVGEAIMQAAQEVAEGKLNDHFPLVVWQTGSGTQSNMNANEVIANRAAEILGHKRGEKFVHPNDHVNRSQSSNDTFPTVMHIAAATEINSRLIPSLKTLHDTLNSKSVEFKDIVKIGRTHTQDATPLTLGQEFSGYTTQVKYGIDRVIGTLPHMYQLAQGGTAVGTGLNTKKGFDAKIAAAVAEETNLPFVTAENKFEALAAHDAFVETSGALNTIAASLMKIANDIRLLGSGPRCGLGELILPENEPGSSIMPGKVNPTQCEALTMVCAQVMGNHVAITVGGSNGHFELNVFKPMIANCLLHSLRLLGDSSASFEKNCLRGIQANRERISKLLHESLMLVTSLNPKIGYDKAATVAKTAHKEGTTLKEAALKLGVLCSEDFDKLVVPEKMLGPSD

SEQ ID NO: 195891 - protein, 84 aa, Glycine max
  Clone ID: PAT_MRT3847_18915C.1.pep
NKILNLKWIVQEAKKNNQCNTQDHVWIRCIHTQHVSRTFLSLLFLHHTLPHILLTLFLHFLLPHCCCPHIFNTGRIIHDGPNSI

SEQ ID NO: 195892 - protein, 69 aa, Glycine max
  unsure (1)..(69): unsure at all Xaa locations
  Clone ID: PAT_MRT3847_18916C.1.pep
XVXXSXEIXXXXRRXLXTTYXXGAXXLSVXXYLLTHFXRNQQXIEAEGSRXXXFXXLCGWRIXXXXPXX

SEQ ID NO: 195893 - protein, 65 aa, Glycine max
  Clone ID: PAT_MRT3847_18917C.1.pep
SKIKSFPVNTRQKFPFWKFNLFVLPIPGPLILEANYLIMVQNGGKAPPNYLPGRALLAHSFWEVG

SEQ ID NO: 195894 - protein, 86 aa, Glycine max
  Clone ID: PAT_MRT3847_18918C.1.pep
NTNFPYSKKKNTFLFFTICRKALILSCTEALKKFGESTQLETTLCPLPAKNISLDTNHHNAIKTLRPYLYDPRPKGIKHCLLEGRL

SEQ ID NO: 195895 - protein, 44 aa, Glycine max
  Clone ID: PAT_MRT3847_18919C.1.pep
CLRSNHVHHLECFKDRDYKVKGQIINFKVYYEFNNICSRSSFPQ

SEQ ID NO: 195896 - protein, 141 aa, Glycine max
  Clone ID: PAT_MRT3847_1891C.1.pep
MAKVGKLTKLKSAIKRWPSLTRLSRNSSSVSSNKGVSGKGTSLNSSKEHEHEQEQLRAVYVGKSRRRYLVNSEVIDHPVFQELVDRSCSSNSSSSHHHDDDGVVVVSCEVVLFEHLLWMLESEETKLGSMDELVEFYSCAC

SEQ ID NO: 195897 - protein, 66 aa, Glycine max
  Clone ID: PAT_MRT3847_18920C.1.pep
RGYKIILYFSCKHLCRCDQLNPLFLRPIDKTFFCLVTSNIRTIYFFSLKEGTHKRSPLGLQQQSRW

SEQ ID NO: 195898 - protein, 139 aa, Glycine max
  Clone ID: PAT_MRT3847_18921C.1.pep
YAFRAYLSFLVLLLAALILSPQVLANYENPPVYTPLTEKPPVYQPPVEKPAVYKPPYANPPIYKPAVEKPPLYKPAVEKPPVYKPTVEKPPWYKPPAEKPPADKPPDEKPAVYKPPIEKPAVYKPPDEKPPAYNPPVEK

SEQ ID NO: 195899 - protein, 151 aa, Glycine max
  Clone ID: PAT_MRT3847_18922C.1.pep
PRVRPHQVFVKMPARNFSVHTPRRSPRFLPQQNHDTPNPKSAKLSVSANKSEKCAVGSRRSPRLNNVEEQSPPLRRSPMLNNEPVGKQLKGTRVKKGGVTATKENRVVSDEGFGGGKKKERNRKRVEVETQESVVFGRGGLVGGIKEGRET

SEQ ID NO: 195900 - protein, 102 aa, Glycine max
  unsure (1)..(102): unsure at all Xaa locations
  Clone ID: PAT_MRT3847_18923C.1.pep
DFGIGAKLITINNLCAYGLDPGISRSRFWGTIPQYIXQQTVINQMATVRTPLNFEFSKQSFCQFSIDLLGXRILVDKTGDWITLIQNSPISNLLRAAARKKG

SEQ ID NO: 195901 - protein, 154 aa, Glycine max
  unsure (1)..(154): unsure at all Xaa locations
  Clone ID: PAT_MRT3847_18924C.1.pep
MAFIQLVRYFLQGLVEVIKEHGENVEHQLCVKHLYGYWKNKYPGAHMKELMWMAARATTTPDWQKAMLQIKNYDEEAWNDLQKLXPACWTRSAFKVNTKCDLQVNNMCEAFNNVIMDYRHKPIITLLEGIRFYISSRIVKLRAALMRHEGSICP

SEQ ID NO: 195902 - protein, 61 aa, Glycine max
  Clone ID: PAT_MRT3847_18925C.1.pep
YNNFYWTHYHIIASLFAPFRFDEKLVGFNRYGVLLIENEKHRYWAALYIKVLSSPKYNKLY

SEQ ID NO: 195903 - protein, 103 aa, Glycine max
  Clone ID: PAT_MRT3847_18926C.1.pep
IFRLDTTLDVFLGATKPSLDLFNPTIIVLIIGNRLTINMPMRPRLPILTNTIRIPHPKRGIQLHLKPCSQGVVILKRVLLIQDTLPIIHNEKVIICCRTRNCP

SEQ ID NO: 195904 - protein, 69 aa, Glycine max
  Clone ID: PAT_MRT3847_18927C.1.pep
LYMYSLLSSSTPASRSIRFSSVVVSSPSPHVVPFVNGSEIRMFREFHSHVNMIGIWLFKFLHKVSALRF

SEQ ID NO: 195905 - protein, 57 aa, Glycine max
  unsure (1)..(57): unsure at all Xaa locations
  Clone ID: PAT_MRT3847_18928C.1.pep
LCNXFXWWLXSIXQALCFATWLFLRLNEVAVIYVMYELTSIIANLLSITSIYXYLAM

SEQ ID NO: 195906 - protein, 70 aa, Glycine max
  Clone ID: PAT_MRT3847_18929C.1.pep
IHSGFPKGNPIFHWYNRLFTTPLTIFQKKFFKKAYLTGLGKPTWKFPEAKTGGFAPMKTLAKIPASIPLV

SEQ ID NO: 195907 - protein, 78 aa, Glycine max
  unsure (1)..(78): unsure at all Xaa locations
  Clone ID: PAT_MRT3847_1892C.1.pep
EESMIVACTAYRKPXGIRLRAHXFYLLSLVAPFSSPSVXPLLXSKMAFLXQRXXEWVXXAWSGVTRXVEERGXXGGGE

SEQ ID NO: 195908 - protein, 73 aa, Glycine max
  unsure (1)..(73): unsure at all Xaa locations
  Clone ID: PAT_MRT3847_18930C.1.pep
LRGNTLIPVTNIITWTTGFLSRTAHIAHLEEQNLTLKERLLFMGKKLDDMRRRVHFLEPAGSVNHGGEGAXVR

SEQ ID NO: 195909 - protein, 65 aa, Glycine max
  Clone ID: PAT_MRT3847_18931C.1.pep
SQFNLIFHVLVRDTNALAKIRTYKSLLTWHGVCYSNIHSFGFRKEIFQYITPFSFSIFPFIASTS

SEQ ID NO: 195910 - protein, 35 aa, Glycine max
  Clone ID: PAT_MRT3847_18932C.1.pep
LVPAVYKGYGFILETSHLTQDVICIIRLSSLLILL

SEQ ID NO: 195911 - protein, 105 aa, Glycine max
  unsure (1)..(105): unsure at all Xaa locations
  Clone ID: PAT_MRT3847_18933C.1.pep
LIISSTAGHVIKCKAAVAWDARNPFVIEEVKVALPQAGEVRLXDALXSPCHTDVYFWEANGDNRDDLRGFSDEAGRIVESVRXDVTHRKVEDHALTVFTEESMDC

SEQ ID NO: 195912 - protein, 85 aa, Glycine max
  Clone ID: PAT_MRT3847_18934C.1.pep
CHITNIMGEDHPPGLRLSPTVEELVAFYLHYMLEGQRIAITLATARFIPSFDFTIFSASLSTFTSLPVLSYSSSNTTLHSLSLIS

SEQ ID NO: 195913 - protein, 53 aa, Glycine max
  Clone ID: PAT_MRT3847_18935C.1.pep
DTHAVDETLVTSGELSLLEITHAVLLLNIDTSDTHSKLMPKCSHMQARIATYF

SEQ ID NO: 195914 - protein, 74 aa, Glycine max
  Clone ID: PAT_MRT3847_18936C.1.pep
IHGCQMIKVTWLRWLYNHCEKSVSLCSQLVVRVELKVTTLSDLKPTLPKNQLACMQTNHLQPQEACSELSWSTY

SEQ ID NO: 195915 - protein, 71 aa, Glycine max
  unsure (1)..(71): unsure at all Xaa locations
  Clone ID: PAT_MRT3847_18937C.1.pep
AHFEESMKYARRSVSDADIRKYQAFAQTLQQSRGFGSEFRFADSTSSGGXAATASDPFASAGGADEDDLYS

SEQ ID NO: 195916 - protein, 80 aa, Glycine max
  unsure (1)..(80): unsure at all Xaa locations
  Clone ID: PAT_MRT3847_18938C.1.pep
HXXXSLLQNTQCKSSTHSXIYYLTLITKKQSNPTQIRTFNTLLINNTFNPNLNKFLIPIISLFTQKTARSMTFXVTIPLT

SEQ ID NO: 195917 - protein, 79 aa, Glycine max
  Clone ID: PAT_MRT3847_18939C.1.pep
FVLYSLTGTYISEYEPPSLCCGRFIRWVWGPQYETNNSRTKFIMIMNFTLPTSTSPLTSTLSLIDIPNSLLWEQIDCFY

SEQ ID NO: 195918 - protein, 100 aa, Glycine max
  Clone ID: PAT_MRT3847_1893C.1.pep
EAPFGRGGDVFWGPFNTAPKGRGWVPTPGGIFVTPPPLLNGLLKGRLLGFWGICLKGGGGGGFYIFGPFPGWPQAPFFCPFLGKKKKKKKKNTKTRKPQP

SEQ ID NO: 195919 - protein, 78 aa, Glycine max
  Clone ID: PAT_MRT3847_18940C.1.pep
SYEVRKCTSRLRCGACSLSVCCTTTRCRAATSHRVHLQVTRASLCRLPLQERSSDAHRTPKAWWQLRNMSADAQWSHA

SEQ ID NO: 195920 - protein, 146 aa, Glycine max
  unsure (1)..(146): unsure at all Xaa locations
  Clone ID: PAT_MRT3847_18941C.1.pep
TQRRAGAEVKALKEVEDMRKLLDALPLTDGRYRRYCIEDIEAATNYFSELHKIGEGGYGPVYRCYLDHTPVAVKVLRPDASQGKXQFQQDVXTKIGTRLLFLHQTKPEPLVHRDLKLGNILLDQNYVSKISDVGLARLVPAVAENV

SEQ ID NO: 195921 - protein, 38 aa, Glycine max
  Clone ID: PAT_MRT3847_18942C.1.pep
MCGRGGTRMGYNAKYDDMLGISKNASEDDIKKAYKKAA

SEQ ID NO: 195922 - protein, 39 aa, Glycine max
  Clone ID: PAT_MRT3847_18943C.1.pep
PSVIVCDCSLASSLMAEDVAAQVTGRRLKPSELGYSRGC

SEQ ID NO: 195923 - protein, 53 aa, Glycine max
  unsure (1)..(53): unsure at all Xaa locations
  Clone ID: PAT_MRT3847_18944C.1.pep
MITAIATYSKSQLYHMRCISAIKVXNGGILALHYSKTKAQAPAQKPPKFYPAD

SEQ ID NO: 195924 - protein, 56 aa, Glycine max
  Clone ID: PAT_MRT3847_18945C.1.pep
IKIDTETFGDFVRPLGGCGARGPARGGGTPGGFYGKGGGSGYNGQGRGRGMPSRPL

SEQ ID NO: 195925 - protein, 59 aa, Glycine max
  Clone ID: PAT_MRT3847_18946C.1.pep
PTFFCIMYHIRWPMLLIANGYYGLKCVYPRHINALTFIVHSCLVSRINAPASNNSYKIT

SEQ ID NO: 195926 - protein, 35 aa, Glycine max
  Clone ID: PAT_MRT3847_18947C.1.pep
MTMILVQKNKCDHHCYILDDLDMIHPSNDHGIPPY

SEQ ID NO: 195927 - protein, 97 aa, Glycine max
  unsure (1)..(97): unsure at all Xaa locations
  Clone ID: PAT_MRT3847_18948C.1.pep
FLLCVLNALSQEKGKPPPKFXLXRFNWALLLWXLTLNLQVASVFLLIFPMFVVPSLFFARVVSIKKFSGYVAPLGRVARGPGFWPFDLNLFILEFSV

SEQ ID NO: 195928 - protein, 57 aa, Glycine max
  Clone ID: PAT_MRT3847_18949C.1.pep
GVKSKNPVRVLNKNIRIGGNPKPSLRAREIKKKKFFIAEPKFNSPGRGKQKLYWENP

SEQ ID NO: 195929 - protein, 175 aa, Glycine max
  Clone ID: PAT_MRT3847_18950C.1.pep
EFLVLPTRSCFLGFDYSSAKMGPENEQVEYSVQEDGKVFKPKMRVKVNQELLQLSKSGFANREGKQIYDFFLALAACNTIVPLVVDTSDPMVKLIDYQGESPDEQALAYAAAAYGFMLIERTSGHIVVNIHGEKQRFNVLGLHEFDSDRKRMTVILGYSNNSVKLFFKGAEYIHV

SEQ ID NO: 195930 - protein, 65 aa, Glycine max
  Clone ID: PAT_MRT3847_18951C.1.pep
SSISRISLSIPAIQEHLRLGMNLIKNIKCNMAAESMLQVPRLITQLLLFPFERGFDHGSNLSHIL

SEQ ID NO: 195931 - protein, 128 aa, Glycine max
  Clone ID: PAT_MRT3847_18952C.1.pep
RFPLFCGAFFPAIGVRSLFRGPGHFVFGPMWVTRWGFFWGTGAQIAGALYAWARAKRMVPANPKGWFWQTFALGRFSWGLLFKRPRKWVSFCRFLGQFRSGLGNQTCFLSLACQMQTPLPHNIFPFLG

SEQ ID NO: 195932 - protein, 143 aa, Glycine max
  Clone ID: PAT_MRT3847_18953C.1.pep
PRVRPRVRIRAAAGFFFFFFFFFQGILFLHSIYLLFFFLFFSFYFILIYLFFFLYFVCFTFSFFSIFFLALFSLDHLLLKTEANFKHHHNNVNIDIFSFMAFIFLVRVVMIYIWDFFITSFVLDKICMLLEVNIDLSMLLQVH

SEQ ID NO: 195933 - protein, 145 aa, Glycine max
  Clone ID: PAT_MRT3847_18954C.1.pep
CEFSLITIKKKKKKKKKKKKKKKKKKKKKKKKKKKKRGGPVKRNKNKKKQTGGALFKEKGFLTGGGGAKFFFWGPQKNLAGAAFKNLGKGKTLGFPNLRGGGKPPFFPRGEKKKRANGTPFQKGHQPGGGRGPPPLGPLNGGGGG

SEQ ID NO: 195934 - protein, 57 aa, Glycine max
  Clone ID: PAT_MRT3847_18955C.1.pep
NPLLDISVVVSDAFLETYGINSRGAMPVAVKHLAMCAYLDTNLRISYLDAWATSDLV

SEQ ID NO: 195935 - protein, 91 aa, Glycine max
  Clone ID: PAT_MRT3847_18956C.1.pep
AQVILCLSLQSIWDCICRLPCLAVHIFGHYLLVKRYNEVVLIIFTVSHVLYIFVSSTKMHCNISEIWIYYQWFIIVLLAIHCLLVVPKIMV

SEQ ID NO: 195936 - protein, 161 aa, Glycine max
  unsure (1)..(161): unsure at all Xaa locations
  Clone ID: PAT_MRT3847_18957C.1.pep
HXNKSLAFFDPTTLQPIQYSTGSVRTSNTWVNPNSKNPGPNHSQPNAMLTSLTSQRNGQADTTWIPNSGASFHVIGDSPSSTLAINNNSSTVMSNFVSSSLSIANLWHARLGHPNDHVMKLVLTHCNIPSSNKNSTGLVLLVVWVNLIYYLFMFLLLFILL

SEQ ID NO: 195937 - protein, 39 aa, Glycine max
  Clone ID: PAT_MRT3847_18958C.1.pep
LRLRYPRRPRTIARQLDSPSRRLFFYFLFPFQLSQYSST

SEQ ID NO: 195938 - protein, 51 aa, Glycine max
  Clone ID: PAT_MRT3847_18959C.1.pep
ITLNSWKRLTNCCTSDTKQENNVGNDHDRDSVATPRRLGQRCKSLLSSDAW

SEQ ID NO: 195939 - protein, 55 aa, Glycine max
  Clone ID: PAT_MRT3847_1895C.1.pep
TRCFGVRFLDPFFFKSPETNSRGPEIFVNFFLKVVDLPFPFQLWGERILISFEGW

SEQ ID NO: 195940 - protein, 114 aa, Glycine max
  Clone ID: PAT_MRT3847_18960C.1.pep
HFTVTCKTFRLTRFTTTLLRISFFFFFSFVLPSMISSSQRNRSRGIVFITTILTTTTDLSLLRGILAKIRISPLRLLTTTLLLILLPFKNTTNINSRRGDSRRGYALHRFNVSK

SEQ ID NO: 195941 - protein, 50 aa, Glycine max
  Clone ID: PAT_MRT3847_18961C.1.pep
KVVGPENIIQCLCLHNITDSPQRYTIINYRLLHNNTEIHKLSMIINPPGP

SEQ ID NO: 195942 - protein, 63 aa, Glycine max
  unsure (1)..(63): unsure at all Xaa locations
  Clone ID: PAT_MRT3847_18962C.1.pep
MASSVMASVALRPAPFTVERSSVIGLPSISRNSASCRVVASGWQXMIMTDIPDGINGCMSLTE

SEQ ID NO: 195943 - protein, 149 aa, Glycine max
  Clone ID: PAT_MRT3847_18963C.1.pep
GSGPGFSFPSSSFSASSGRTLLAPWVPNTNISSGSFKIVAVEEKKEIEETHPTDMDRWKGLAYDISDDQQDITRGKGLDDFLFQAPQDAGTHYAEMSSYHYLSTGLRLFLDNNMDGYYIAPSFMDMLVAHITKNFVALPTSRFFFFGCG

SEQ ID NO: 195944 - protein, 295 aa, Glycine max
  unsure (1)..(295): unsure at all Xaa locations
  Clone ID: PAT_MRT3847_18964C.1.pep
MRRRPVAGVLPDQMEKANTKNPNSRLCFLASLSVFFWFLLLYFHFAVLRHQPTNPNPVVPITLQPQQPRKNLGFPEKISQPEKPTFPFDRALRTADNKSDPCGGRYIYVHDLPSRFNEDMLKHCRSLSLWTNMCKFTTNAGLGPPLENVNGVFSDTGWYATNQFAVDVIFSNRMKQYQCLTRDPSVAAAFFVPFYAGFDIARYLWGYNISMRDAASLDLVNWLMNRPEWKIMNGRDHFLVAGRITWDFRRLTGKESDXGNKFLMVPSEMNFLLVVANLDLKLDFLPPTLLSFISR

SEQ ID NO: 195945 - protein, 80 aa, Glycine max
  Clone ID: PAT_MRT3847_18965C.1.pep
ASLMPSYNGILTISCIRTLTQIALKLSGFIPLDRVYGLVKPFRDIKALWQVRIEASRALLDLEFHCKGMDSALLLFIKYI

SEQ ID NO: 195946 - protein, 69 aa, Glycine max
  Clone ID: PAT_MRT3847_18966C.1.pep
RITTHLKPTNQYKGLLDHQINPEIDNICIKGGLKDLLTRKMKNKEQKGRLTSILRNIFLLNRISMVWSA

SEQ ID NO: 195947 - protein, 71 aa, Glycine max
  Clone ID: PAT_MRT3847_18967C.1.pep
KPGPLGPSRMFLQKAIAYGGSNLARLGELGGKLLPYFPINRGRSEGESGSAVLVLRDHLKLVRKIVSVKKI

SEQ ID NO: 195948 - protein, 99 aa, Glycine max
  Clone ID: PAT_MRT3847_18968C.1.pep
GLPCSHLPRVHPSKRYQHHQWNHHNHSTYPFRNNHCSLHFESQQLNAHQSHTTLKHGKKRRIIENNSQLSQYPKTQTCDTKKRTTLSQSIRARVGARVR

SEQ ID NO: 195949 - protein, 122 aa, Glycine max
  unsure (1)..(122): unsure at all Xaa locations
  Clone ID: PAT_MRT3847_18969C.1.pep
SEGNDLEGGGTKYIXIDITAXGGIRAAETEKERRTLTEAHTDRERERGIETRISTPLRMRDIGERERERQKLDTYAEIKMCVGIYRERAVEEDLPEGHAVKNGENKDAVEGGIKRERDEEEE

SEQ ID NO: 195950 - protein, 56 aa, Glycine max
  Clone ID: PAT_MRT3847_1896C.1.pep
VVPSHGAPSPREPVTDTPTLAIKQVPMSRLHFMFMGKRQEPGRSKFRFTPPFYIVS

SEQ ID NO: 195951 - protein, 243 aa, Glycine max
  unsure (1)..(243): unsure at all Xaa locations
  Clone ID: PAT_MRT3847_18970C.1.pep
MASESGQSPNPSWFTPKRLLMIFCLINMLNYVDRGAIASNGVNGSLATCTDSGICTGGSGIQGDFNLNNFQDGVLSSAFMVGLLIASPIFASLAKSXNPFRLIGVGLSVWTLAIAGCGSSFDFWSIAICRMLVGVGEASFISLAAPFIDDNAPDAQKTAWLATFYMCIPAGTALGYVYGGIVGSQFNWRVAXWVEAIXMLPXXILVXVIKPLQLKGFAPLESKQTLTYTETNVSETGDDDTLA

SEQ ID NO: 195952 - protein, 68 aa, Glycine max
  Clone ID: PAT_MRT3847_18971C.1.pep
QGFKNQIFYSKAYYPESCQSLLCRPRKHPLAMILLFKKGNFFGHTFPYLENTLLTHATCRGDALSFTK

SEQ ID NO: 195953 - protein, 72 aa, Glycine max
  Clone ID: PAT_MRT3847_18972C.1.pep
LNLYLLILITQFFYNWVYKFVYIFLHIILKNYSITHNKRSIKLSYLLYKRNKYLILLPSVVFSSGSSGSSRA

SEQ ID NO: 195954 - protein, 110 aa, Glycine max
  Clone ID: PAT_MRT3847_18973C.1.pep
FLSLLQRAHCFLYQSFCVFVLFWWCNGSIYFLAYCMQRRWKNTLKLRFLSQKSFEFYLKQTWLPCPSVFIFFVSLFLTIQQPQPSPTSCICLFYDISQDKTLIFFIQPSL

SEQ ID NO: 195955 - protein, 129 aa, Glycine max
  unsure (1)..(129): unsure at all Xaa locations
  Clone ID: PAT_MRT3847_18974C.1.pep
KLSXHMLHYVNTTGSGQQTLGEGGXDMTEGAGPYGLTATLARRALLAEYHAGVPYIXKELPVGIGTRGIGLADYESPEGFGENAHRSHSAHIAGTSASFRDGQSDTTLARVKGKMSAFWGHLVHRWPTM

SEQ ID NO: 195956 - protein, 164 aa, Glycine max
  Clone ID: PAT_MRT3847_18975C.1.pep
ESFAKMNMHDEPKPTPEPNIQATVVDSEYPPVGNHDQFVPHLSAATQTQYPSAESHDQFNQETTSTNINRNLVNPTETGQTFNTITTTIEEKPLYEAKTDEVISPKDVIASEAGSGEKDAIKDKVVTNKEQQKIGDASNMSGSTAQHGKNIAHSLTEKLAPVYD

SEQ ID NO: 195957 - protein, 96 aa, Glycine max
  Clone ID: PAT_MRT3847_18976C.1.pep
MNADNGSRDAKLDNQHAKDKEKEELTENMNKLHIEGSSSGSGSSSFRRKPVIIIVVGMAGSGKTTLMHRLVCHTHLKDIRGYVVNLDPAVMTLPYA

SEQ ID NO: 195958 - protein, 90 aa, Glycine max
  unsure (1)..(90): unsure at all Xaa locations
  Clone ID: PAT_MRT3847_18977C.1.pep
WCVPPPPVXXGCLRVLLPSVSCCGXFXXCXSLXGXRLKEKNFQIRKKELSSNPDALSDXWSPPCVLFLVPWASXXFXWGCSFXSGFPXXR

SEQ ID NO: 195959 - protein, 122 aa, Glycine max
  unsure (1)..(122): unsure at all Xaa locations
  Clone ID: PAT_MRT3847_18978C.1.pep
MLILWFCSILKAKDKEKEELTENMNKLHIEGSSSGSGSSSFRRKPVIIIVVGMAGSGKTTLMHRLVCHTHLKDIRXYVVNLDPAVMTLPYAANIDVRDTVKYKEVMKQFNLGPNGXNLTSLN

SEQ ID NO: 195960 - protein, 405 aa, Glycine max
  Clone ID: PAT_MRT3847_18979C.1.pep
MDAGNGSGDAKLDNTPTQMDSDSGAQAKDKEKEELTENMNKLHIEGSSSGSGSSNIRRKPVIILVVGMAGSGKTTLMHRLVCHTHLKDIRGYVMNLDPAVMTLPYAANIDVRDTVKYKEVMKQFNLGPNGGILTSLNLFATKFDEVISVIEKRADQLDYVLVDTPGQIEIFTWSASGAIITEAFASTFPTVVAYVVDTPRSEDPTTFMSNMLYACSILYKTRLPLILTFNKVDVAAHQFALEWMEDFEAFQTAASSDQSYTSTLTQSLSLVLDEFYNNLKSVGVSAVSGVGMEAFFNAVEASAEEYMETYKADLDKRREEKQRLEEDRRRESMDKLRRDMEKSGGETVVLSTGLKNKEASKSMMDEEDEEGEDEEMDDDDDLGIYTEEEDAIDEDEDEEIDRFGF

SEQ ID NO: 195961 - protein, 83 aa, Glycine max
  Clone ID: PAT_MRT3847_1897C.1.pep
MEGRTENSNDTTCPKKSRSLDLKSLYKSKWTENTAKTNLKRIGNSSGGGDEKRKKKKARKEVSLSSLENGDGSRELKLGLSQR

SEQ ID NO: 195962 - protein, 308 aa, Glycine max
  Clone ID: PAT_MRT3847_18980C.1.pep
MDCRICVATGGDLWVRVGGGREIGGGFSHESEHDLALMVSDFLENGSSGAESWCSSDSDTGHSDFAQLAERIQICKLSVAQHESDLLSVVHSLIRSMNETNLQVMNSGPCYASCIRFYLVKLMRLSGYDAGVCASKWQGSGKVPGGDHEYIDVVVDNNSGSSEQLIVDIDFRSHFEIARAVDSYDRILNSLPVVYVGSFTRLKQFLGIMEEATRSSLKQNSMPLPPWRSLAYLQAKWQSPYERYTHSEGNIVSSSDCFDHKQCCGHLKRLQSCLQSGIEIERMLKPRNIESNWRMKPERWRHPLFRPL

SEQ ID NO: 195963 - protein, 101 aa, Glycine max
  Clone ID: PAT_MRT3847_18981C.1.pep
LGVGGGGGGGGGGGGGGAGGGGGGGGGENKVKFGPTNQSPVSFIGLTPIFPNFFFNPLTGVCGMDICFQKKNNPPKKVFTPILEGGTKNFFFPPRGRILGQ

SEQ ID NO: 195964 - protein, 37 aa, Glycine max
  Clone ID: PAT_MRT3847_18982C.1.pep
PLVHSHFPYLDLPPKSYTGLRVSIFREIDSCITHSLL

SEQ ID NO: 195965 - protein, 55 aa, Glycine max
  Clone ID: PAT_MRT3847_18983C.1.pep
PCLNYDPGVRTTKSPERIPCLNKQKKGSHSHVPSRALTEKSRVVFSPLPLFSCHR

SEQ ID NO: 195966 - protein, 69 aa, Glycine max
  Clone ID: PAT_MRT3847_18984C.1.pep
EFKRTLKGIRSELEQNSVYRVVEFHPRQRNPSCLKRGKNIKCSGKSYRGSYHYDRLVVEILCQKNKQYN

SEQ ID NO: 195967 - protein, 78 aa, Glycine max
  Clone ID: PAT_MRT3847_18985C.1.pep
RTSERVGICQRVQVESIMKEFNGWIADLEVEDVPCAGRKFIRYRPMGQLKVDWTKFLYPQNGLPNDKEALSLSWIAIS

SEQ ID NO: 195968 - protein, 73 aa, Glycine max
  Clone ID: PAT_MRT3847_18986C.1.pep
PWELICLQQTNSFSILQTSVLIQHFHYYHSTHIHTYRRRLHILIKLPSTNILILLFKTAPLIIGLYICNPLIT

SEQ ID NO: 195969 - protein, 140 aa, Glycine max
  unsure (1)..(140): unsure at all Xaa locations
  Clone ID: PAT_MRT3847_18987C.1.pep
GSRKAVNYIWHYADAMYNLGAAYGEMLKFDMAIVFYELAFDFNAHCAEACLNLGVIYKDRENLDRAVEGYQLALSIKPNFSQSLNNLGVDYTGQGXVDAAACMSEKAITAYPAYAEAYSILXAVYRDAGDIARAIMPYEQ

SEQ ID NO: 195970 - protein, 77 aa, Glycine max
  Clone ID: PAT_MRT3847_18988C.1.pep
PSTRPLKVPWGRLILLTVGLHYPNPQLGEPFCVVVHRQILSSYRDVGASHDGVAPNGVKGTVDFVAPATIPEIAGTS

SEQ ID NO: 195971 - protein, 73 aa, Glycine max
  Clone ID: PAT_MRT3847_18989C.1.pep
TNNHSHNGAYNMPTFLKGIYSIINKRVNQSRFHPKKRIIKMVICIILQLKLRLFRRLQMKIERKLNKTVTCFL

SEQ ID NO: 195972 - protein, 75 aa, Glycine max
  unsure (1)..(75): unsure at all Xaa locations
  Clone ID: PAT_MRT3847_1898C.1.pep
GKSYHPVRADYQKAREKAKKNPIRLSFDKTGRSRMLTKGWNGSGTXDRSSMTGGPCRAIKHPYELAHGANSGLDM

SEQ ID NO: 195973 - protein, 91 aa, Glycine max
  unsure (1)..(91): unsure at all Xaa locations
  Clone ID: PAT_MRT3847_18990C.1.pep
XGXXKWXXXSLPFPXSAXXVPSXXXFXXLGMXEXGSVXXXVGFXXFLGXASCKRELVNXEGYRAVTPELGNGKNXGGXFHGSGENPXRGXS

SEQ ID NO: 195974 - protein, 82 aa, Glycine max
  Clone ID: PAT_MRT3847_18991C.1.pep
PKLSSTSRQEDTGGLRVATFRLIADHERCTSERRRDMTSTDTTSLSMNMRSEAGYAAACEDDTFVEAVDMVVVVAVAVVDTV

SEQ ID NO: 195975 - protein, 134 aa, Glycine max
  Clone ID: PAT_MRT3847_18992C.1.pep
IVRCEHADERYVQSVKERVRMSSLLLDKLVQKGCTNVMGNLSDQEGAEQQRKKGALQALEAQKEEANEAAVELNKVVESYSTQMSQDWYMVSSSTVDPPVFQGVLCRDLPVVGNLLSQAGFNRSRPVKYVALSC

SEQ ID NO: 195976 - protein, 51 aa, Glycine max
  Clone ID: PAT_MRT3847_18993C.1.pep
VWYHTQHKNTATSSHKAPIHTDTITSLHSCIVAWSRLVLISHLTYSIATIN

SEQ ID NO: 195977 - protein, 58 aa, Glycine max
  Clone ID: PAT_MRT3847_18994C.1.pep
EGEDTRILPIHYPNNYFSLGPGEPMTIKISFEAPSGVSPCVTLGGWNYQGQTIHEALF

SEQ ID NO: 195978 - protein, 446 aa, Glycine max
  Clone ID: PAT_MRT3847_18995C.1.pep
MASNGDAVHPHPSKKIKLFSNSINSTNSSFITHAEIESEFSHHHPTVARLNNGAFGCCPASVIAVQREWQMKNLRQPDHFYFNDLKKGLLHSRTIIKNLVNAEHVDEISLVDNASTATAIVLQQAAWAFQEAKFQKGDVVLVLHYAYGAVKKAIEAYVVRAGGTVIEVPLPFPVTSNDDVVNEFRKALERGKSRGNRIRLAVIDHVTSMPSVVIPVKDLVKICREEGVEQVFVDAAHSIGCTRVDMQEIGADFYTSNLHKWFFCPPSVAFLYARASSKARDLHHPVVSHEYGKGLAVESSWTGNRDYSAQLVVPAVMEFVKRFEGGIEGIRKRNHDLVVEMGEMLVEAWGTHLGSPSHMSASMVMVGLPPSLGIGSDSDAQKLRTRLRDEFDVEVPIYFRGGEDGSVTAYARISRQVYNKVEDYYKFRNAVNQLVQDGFTCALLSA

SEQ ID NO: 195979 - protein, 44 aa, Glycine max
  Clone ID: PAT_MRT3847_18996C.1.pep
SFERKVKSEMVEPILINLTTSSIILCSRAKYKGLHLPRSRSSSN

SEQ ID NO: 195980 - protein, 89 aa, Glycine max
  Clone ID: PAT_MRT3847_18997C.1.pep
TKTTEGEGGISCNNRPNRPEPRGRPQGSSIPHVSQRPKHIQMPHQARVLPITGKTPSRNRHQPRSIEMRPKRPMRRKGRNGPTKTWWPG

SEQ ID NO: 195981 - protein, 82 aa, Glycine max
  Clone ID: PAT_MRT3847_18998C.1.pep
ISSFRWGNSCSIMYVTYLAQVSNLLQSINCEKIKIPYDFYTHCSHLFASASATLFTRFCFLFLYGTLQVYYLHSLGSSIPCS

SEQ ID NO: 195982 - protein, 65 aa, Glycine max
  unsure (1)..(65): unsure at all Xaa locations
  Clone ID: PAT_MRT3847_18999C.1.pep
XXXRXQXPXVXXGXXXIXXXXCXXPVXAPSAXXIRXHCIXHXNRXDILAXXXXNXXXXXXXSLXL

SEQ ID NO: 195983 - protein, 70 aa, Glycine max
  Clone ID: PAT_MRT3847_1899C.1.pep
LVFGAGFMLMQRSGCLGGALVSRPSLSGFCLLPCRFWAVFPAAFFVSPCGCLVFSYKVYRARPFSLSRAA

SEQ ID NO: 195984 - protein, 78 aa, Glycine max
  Clone ID: PAT_MRT3847_189C.1.pep
TERVGGYDERAHGADSRIQGGDQNSSMKPTGYLPHKKGINIEGQMMGADGIKPPQGEGDDNPPHWMPPVTPRTHRRYF

SEQ ID NO: 195985 - protein, 218 aa, Glycine max
  Clone ID: PAT_MRT3847_18C.1.pep
MSPRVRPRLREETEGGETVIINSYIISLSHVFFALAPPLPSTTTIFDSAFSDSSFVVTGRIMEPMDIVGKSKEDASLPKATMTKIIKEMLPPDVRVARDAQDLLIECCVEFINLVSSESNEVCNREDKRTIAPEHVLKALQVLGFGEYVEEVYAAYEQHKLETMQDSLRGGGKWSNGAEMTEEEALAEQQRMFAEARARMNGGAIASKQPDADQSLDS

SEQ ID NO: 195986 - protein, 76 aa, Glycine max
  Clone ID: PAT_MRT3847_19000C.1.pep
TYGYSRILLNLRHVIILDPYSHSVMITAGIVYASYRQWFKGLCNIDHNCALVCKNIGFYVGMYTSFCRCYICTKIC

SEQ ID NO: 195987 - protein, 213 aa, Glycine max
  Clone ID: PAT_MRT3847_19001C.1.pep
NAPVISLLGAKVEVGKKECVPQRLSLQNGKATEPAIELTMSRAGSVLGMTPTVPFNHSSVFGYNGVASASVTPAMSFSSAMYGSGGTIPYMVDSRGAPVVPQVGGSSSTVLSSYSQPPIFMNMTGTQLGMNGFGPSRPNLDLNSGFMIEGGNRDTLAARQFFFPGQGRAVEEQVRSMPQPSSSGVSGKRKEPDSGLEPYPFIYKHPQPPGSSF

SEQ ID NO: 195988 - protein, 49 aa, Glycine max
  Clone ID: PAT_MRT3847_19002C.1.pep
NLITKSEACHVRGPGVVIGIVPKSHVMLVFQILKWYFSYRSFTCELVTQ

SEQ ID NO: 195989 - protein, 133 aa, Glycine max
  unsure (1)..(133): unsure at all Xaa locations
  Clone ID: PAT_MRT3847_19003C.1.pep
YTVSDQCYPEWAPVNCRGHRLPIHITXGNYIRKQDVSIEYDACTIPNDIGSLVDANVXNHKHIVAFHVAVSIXKTXYASLIPYVXPVVHALSAEVYFDFFTEEHDCQDIVAHIGELKSSVYVPLPTKTNTIES

SEQ ID NO: 195990 - protein, 320 aa, Glycine max
  Clone ID: PAT_MRT3847_19004C.1.pep
MAVVTSNGKRRQHWPSANYHFPSPNSKRPRVSTMSQNHAQSLLSSTSIISRISKYPETKPPLHREVHAPCRPRKFDSPAFNRSFHYPRKEEISYDKGNVLSKNYQRAKNSALASIRFGEKGKEVIEVDADSSKGMVSEDSSVEGDGREHKWQEPGDLVVTYLNDLDAHDDMHAVPQHQSNSHSTLQHHNSYLTPRTAPRLGLGAALEGSGQRRSSRQLLRPKKELVEEVPLEPFIPLTKEEEVEVAHAFSTNRKKILVSHEKSGIEISGEKFQCLRPGAWLNDEVINVYLELLKERERREPQKFLNCHFFSTFFYKKLIS

SEQ ID NO: 195991 - protein, 54 aa, Glycine max
  Clone ID: PAT_MRT3847_19005C.1.pep
MDIKYEPRMPLLAHVSITRKTRTALTIIHNLSNCYNQSLPRQTLAAAPATTWTT

SEQ ID NO: 195992 - protein, 55 aa, Glycine max
  Clone ID: PAT_MRT3847_19006C.1.pep
TDYAPCKIQCTVSTKTTRFSGLRPTACLEDRNTLSFSTQQGKARTGHRHYNSPTR

SEQ ID NO: 195993 - protein, 353 aa, Glycine max
  Clone ID: PAT_MRT3847_19007C.1.pep
MARLSLLIFAFCAVAVAVAVAGSSFDDANPIRLASDLESQVLDVIGQSRHALSFARFARRHGKRYRSVDEIRNRFRIFSDNLKLIRSTNRRSLTYTLGVNHFADWTWEEFTRHKLGAPQNCSATLKGNHRLTDAVLPDEKDWRKEGIVSQVKDQGNCGSCWTFSTTGALEAAYAQAFGKNISLSEQQLVDCAGAFNNFGCNGGLPSQAFEYIKYNGGLDTEEAYPYTGKDGVCKFTAKNVAVRVIDSINITLGAEDELKQAVAFVRPVSVAFEVAKDFRFYNNGVYTSTICGSTPMDVNHAVLAVGYGVEDGVPYWIIKNSWGSNWGDNGYFKMELGKNMCGVATCASYPVVA

SEQ ID NO: 195994 - protein, 94 aa, Glycine max
  Clone ID: PAT_MRT3847_19008C.1.pep
KKGPLKRGPTPLPLFGPPSGKKKNKKIFFPAFKKKRKLGGVGSGPPVPKFPPGKLPQFSLGPLWETKIFFLSWPPPTPFKGLGWGAPNFGKPMG

SEQ ID NO: 195995 - protein, 171 aa, Glycine max
  Clone ID: PAT_MRT3847_19009C.1.pep
MAQSLKGIKGGGGSIKLGTTGTISSLMTRELDHISSASKKQVSSARSKTQTLPVSVPCGSTSTTQKRLQQRKSSVEAGSSGSSKNTNRRVPGNGMPQKTKTNSRNTQRIPMLGSDKCSVVRTPERGKNDKKIPNIVEIVDIKCGNAEKAWATPLASRLKKLGFSKLSESII

SEQ ID NO: 195996 - protein, 91 aa, Glycine max
  unsure (1)..(91): unsure at all Xaa locations
  Clone ID: PAT_MRT3847_1900C.1.pep
GSKXXSGITGAGFITLAATLAVVPDIPVAGMVLILGIDRFMSECRALTNITGNGVACVVISAWERELDRAKLARVLSGDRSDEGVPATPAV

SEQ ID NO: 195997 - protein, 69 aa, Glycine max
  Clone ID: PAT_MRT3847_19010C.1.pep
MERIHVSVRAKPLSQDEAKTSPWRISGNSISIPNLSKFEFDQIFSENCATAQVFEARTKDIVEAAVRGF

SEQ ID NO: 195998 - protein, 54 aa, Glycine max
  Clone ID: PAT_MRT3847_19011C.1.pep
DVHCDSTVLRLLSCHEDSKILCLYAFLGLKFLCHLHFEDFNIFSRLRFQKTTMS

SEQ ID NO: 195999 - protein, 110 aa, Glycine max
  Clone ID: PAT_MRT3847_19012C.1.pep
LPTPALIFFTTAVVYFGTDIRGLWFVITSQSGFGNRRSFFGPVGLCKIESLQLQADIPAYFYTPLFSQNAKDSCSLCFTSSTGVLRTKKKVCITNTLAELFFLKKVFRVN

SEQ ID NO: 196000 - protein, 89 aa, Glycine max
  unsure (1)..(89): unsure at all Xaa locations
  Clone ID: PAT_MRT3847_19013C.1.pep
RMLXYNLARXQKLHIXMAIAFWLLSLGIVFAFISXXGFGTCXLWWRXQTHIXTSXFFXMLKNRHFIEEVLLLETLKKVPNSRGTPRLAY

SEQ ID NO: 196001 - protein, 54 aa, Glycine max
  Clone ID: PAT_MRT3847_19014C.1.pep
EFELCTRGSSRVDLQTRVGRPQPLTTLTSTYSRANLPCRLACVVIISTNSMPFC

SEQ ID NO: 196002 - protein, 41 aa, Glycine max
  Clone ID: PAT_MRT3847_19015C.1.pep
FMQKMPIRTLYQTLDYNLNFFLSIIGNHFRLLSARLVSNTL

SEQ ID NO: 196003 - protein, 53 aa, Glycine max
  Clone ID: PAT_MRT3847_19016C.1.pep
PYPLLTESPQIKTSPIKLKLLDNYLLHTPNNPSLIFKINIGPTPHNISICSFI

SEQ ID NO: 196004 - protein, 187 aa, Glycine max
  Clone ID: PAT_MRT3847_19017C.1.pep
MPVTLKACYTVKPLETTWCGRVSLSEWDQTGNVTHGPIIYFYRTPSQESNNNSIASTLKDSLSRVLVPFYPLAGRLHWINNGRLELDCNAMGVQFIEAQSSSSFEDLGDDFSPSSEYNYLVPTVDYTLPIHGLPLVLIQLTNFKCGGVSIGITLSHAVVDGPSASHFISEWARLARGEPLQTVAFHD

SEQ ID NO: 196005 - protein, 196 aa, Glycine max
  unsure (1)..(196): unsure at all Xaa locations
  Clone ID: PAT_MRT3847_19018C.1.pep
PTRPGCNSDEVDELTRMRYACQFGXEKIINSDLKRKDGLCPLTPEETALTLRALDIGQSIQIYIAAGEIYGGDKRMASLAKNYPKLVRKETLLEPSDLQFFQNHSSQMAALDYLVSLESDIFVPTYDGNMAKVVEGHRRYLGFKKTILLNRKLLVDLIDRYHDGILNWDEFSSAVKEVHADRMGGATKRLVIPDRP

SEQ ID NO: 196006 - protein, 166 aa, Glycine max
  Clone ID: PAT_MRT3847_19019C.1.pep
MAKHSVAMAKKRWPIMLAAFLSVSTVTVLLMRSNNSDSCNTNHFTVAQDNQIRSPVQLTNAASSPLIFMKSKLVLMVSHELSLSSGPLLLMELAFLLRGVGSDVVWISNQKPSEHDRVVYSLESKMLDRGVQVLSAKGENAIDTALKADMVILNTAVAGKWPGCHS

SEQ ID NO: 196007 - protein, 87 aa, Glycine max
  Clone ID: PAT_MRT3847_1901C.1.pep
NMEGKREFEALRSHSLKQSSTALVTGFIHNLIAPSRSGFASFASQSTRTQTHTHTHTQRKRGILRERERETGRQREKGALQVMIDTM

SEQ ID NO: 196008 - protein, 68 aa, Glycine max
  Clone ID: PAT_MRT3847_19020C.1.pep
AREAKSVCSAPCPLGQLYQNLGPRILGKRIWGLPRAYAGRLRLFLSDKIQYPDLGRPCELDQQSHKLC

SEQ ID NO: 196009 - protein, 234 aa, Glycine max
  Clone ID: PAT_MRT3847_19021C.1.pep
FTCPTTMQELWDDSVTPNTTLYRLIHMWFSQKYLLMKKRSEDVQGRASELLETLKKVKSQARVQALKELHQLVASHATARKTVIDEGGVSVVSSLLGPFTSHAVGSEVIGILVTLTLDSESRKNLLQPAKVSLMVDILNEGSIETKINCTRLIESLIEEKDFRSEVISSHSLLVGLMRLVKDKRHSNGVCPGLSLLRTICLHKEVRNLLVSIGAVSQLVELLSGMEPDCTELAL

SEQ ID NO: 196010 - protein, 66 aa, Glycine max
  Clone ID: PAT_MRT3847_19022C.1.pep
KGLPPKGDSGVICQPLLKPNLGKLSQRPLSQKGVNRIKVTLLPPPCKGKASPRERDPPLKNKKFFG

SEQ ID NO: 196011 - protein, 211 aa, Glycine max
  Clone ID: PAT_MRT3847_19023C.1.pep
MKKASAMHCALLRFWVPLLLLASFSFAPSVLAKAEISGNEVNTHGKVVSEELTKSSLKEQNEEEKFKGFFPKPIPIIKPISKPIPIIKPIPKSIPIVKPIPIPIVKPIPKPFLIVKPIPNDEEKFKGVFPKPIPIVKPIPKPIPIVKPIPIPIYKPIPKSVPIVKPIPIIKPILKPNPIVKPIPKLIPIVKPIPNPLRVKKSIPAFGSEEF

SEQ ID NO: 196012 - protein, 258 aa, Glycine max
  Clone ID: PAT_MRT3847_19024C.1.pep
MKKASAMHCALLRFWVPLLLLASFSFAPSVLAKAEISGNEVNTHGKVVSEELTKSSLKEQNEEEKFKGFFPKPIPIIKPISKPIPIIKPIPKSIPIVKPIPIPVYKPISKPIPIVKPIPKPFLIVKPIPNDEEKFKGVFPKPIPIVKPIPKPIPIVKPIPIPIYKPIPKSVPIVKPIPIIKPILKPNPIVKPIPKLIPIVKPIPNPLRVKKSIPAFGSEEFLKPKPFFEKPIPKLPLDPKFKKPLLPPLPIHKPIPTP

SEQ ID NO: 196013 - protein, 136 aa, Glycine max
  Clone ID: PAT_MRT3847_19025C.1.pep
MLEEEEPVVLHLKLKKRVPIVHDFKKTRIADEEAWQVLKAEVFNSSERFEFAKVRFEEMLEKERKAFHDCVLEHLERIDECKTLLKEIKVAMDRCEKKNTNLKCSLRFFSKVVAHVRVLEANMLHALKYYKELDKD

SEQ ID NO: 196014 - protein, 75 aa, Glycine max
  Clone ID: PAT_MRT3847_19026C.1.pep
LLCNTTFIFSFQLKRLTPCSTPFILRLLPAYSVHLHLILSSLLTFLFSGKELRAVSVVAKRMTFLWLLKVEDPMV

SEQ ID NO: 196015 - protein, 128 aa, Glycine max
  Clone ID: PAT_MRT3847_19027C.1.pep
GKNPKKPQTPRGENPVGGYPLETKPKEKGWGLAFYKQTPPSQSKYTNFFFHWATNHIFLKLKKKAKQIKSGGTQMGDKFPFKNTNFCHGGVWDRLLKTQWSLNTFKNNPLGYNFTLGNNGLTTLGGIS

SEQ ID NO: 196016 - protein, 58 aa, Glycine max
  Clone ID: PAT_MRT3847_19028C.1.pep
GLKKPPWIFLKALLKPPGFLPAPFLKRGSSQAWPTFPTPPYLFYFPTFCSPEAKALTY

SEQ ID NO: 196017 - protein, 82 aa, Glycine max
  unsure (1)..(82): unsure at all Xaa locations
  Clone ID: PAT_MRT3847_19029C.1.pep
CCXCEGEAXXXGPMVXETXXDLXFRDXVMXXCHXXXXXXXXXXVLXSLVTRXVRNXQVFCSGCLXLPFXXXERXQYXLKEAF

SEQ ID NO: 196018 - protein, 38 aa, Glycine max
  Clone ID: PAT_MRT3847_1902C.1.pep
DALSEKPFTREFKLSSYPNVLHVNKLVSMPRSYTLNHS

SEQ ID NO: 196019 - protein, 80 aa, Glycine max
  unsure (1)..(80): unsure at all Xaa locations
  Clone ID: PAT_MRT3847_19030C.1.pep
LFLFSFCPRLFLCLFVSFFLGACFVLFRLRALWCCPFRCXPLPVGLFPFFAFWCWLGVFXSLLXLFFGVRPLLLSLVPAF

SEQ ID NO: 196020 - protein, 117 aa, Glycine max
  unsure (1)..(117): unsure at all Xaa locations
  Clone ID: PAT_MRT3847_19031C.1.pep
KYIHPQSDHQISVEPSCRTPKRIALSSQXKIMGCTLMPHIVYXSDKNTRPHLPNGFLRFVEHQETYXSLLMMHDKTYXAEIGLHASTRKTKDIVEIGGLVDVVLTSKTLILRLQEDE

SEQ ID NO: 196021 - protein, 200 aa, Glycine max
  Clone ID: PAT_MRT3847_19032C.1.pep
MGLCTVQPITLSKLPNASSFLPKPKPSLPQSYTPSAAHLSRSVCLRNLSPKATSSEEERSSGGSQFFNEKRDGVIILEDVKEDNNKNEFDKTVIEDTKQDLFDDDGQGLSFDLLDKLNFDTDDTGSIVVYGGGALVALWLTSAVIGAIDSIPLFPKLLEVVGLAYTVWFTSRYLLFKQNRDELGAKIEELKGQIFGSEDN

SEQ ID NO: 196022 - protein, 197 aa, Glycine max
  Clone ID: PAT_MRT3847_19033C.1.pep
MSTTLSNLPNASSFLPKPKPKPSLPHPQTPLTHSAVLLSRSICLRNLLPKATSSEERSTGGSQFFNEKRDGVIILENVKEDNKNDFDKTVIEDTKEEELSDDGQGLSFDLMDKLNFDTDDTGSIVLYGGGALVALWLTSAVIGAIDSIPLIPKLLEVVGLAYTVWFTSRYLLFKQNRDELGAKIEELKGQIFGSEDN

SEQ ID NO: 196023 - protein, 42 aa, Glycine max
  Clone ID: PAT_MRT3847_19034C.1.pep
HAVRKKKKKKKKKKKKKKKKKKKKKKKRKKRNKGKKAGVRRS

SEQ ID NO: 196024 - protein, 66 aa, Glycine max
  Clone ID: PAT_MRT3847_19035C.1.pep
IRLEAIKTGWVHPNINLENPDEGVDTNVLVGSKKETLDIKAAMSNSFGFGGQNSSIIFAPFKCNRF

SEQ ID NO: 196025 - protein, 82 aa, Glycine max
  Clone ID: PAT_MRT3847_19036C.1.pep
AKPSNKGNIILFHFFTSTRACVHSPFSTMASSAQFSTTLVVLCLFQFLAGNHLYSLIFFFVLNMLTFVIFNSSSWICNWVIF

SEQ ID NO: 196026 - protein, 65 aa, Glycine max; identical to SEQ ID NO: 159300
  Clone ID: PAT_MRT3847_19037C.1.pep

SEQ ID NO: 196027 - protein, 57 aa, Glycine max
  Clone ID: PAT_MRT3847_19038C.1.pep
GTGLRFSWSYRKRAHAYIILIFIGITDTFVNYLHKPRNLALYPPVTNKFSLVSLILS

SEQ ID NO: 196028 - protein, 382 aa, Glycine max
  Clone ID: PAT_MRT3847_19039C.1.pep
HIFVITHATDEGEGDDDEGELANDIKTDDQLLQFDFATIKFATNDFSDANKLGQGGFGIVYKGTLSDGQEIAIKRLSINSNQGETEFKNEILLTGRLQHRNLVRLLGFCFARRERLLIYEFVPNKSLDYFIFGTSNKRVNLNWEIRYKIIRGIARGLLYLHEDSRLNVVHRDLKTSNILLDGELNPKISDFGMARLFEINQTEASTTTIVGTFGYMAPEYIKHGQFSIKSDVFSFGVMILEIVCGQRNSQIRDSEENAQDLLSFAWNNWRGGTVSNIVDPTLKDYSWDEIRRCIHIGLLCVQEDIADRPTMNTVLLMLHSSSFPLAEPSEPAFLMRRKSSLPMIMLSGSEQYSEVTRSSDSGSQYAQGSSIVKTPTTEPYPR

SEQ ID NO: 196029 - protein, 832 aa, Glycine max
  unsure (1)..(832): unsure at all Xaa locations
  Clone ID: PAT_MRT3847_1903C.1.pep
MMAVSSACKDGSKVALDNGKYVRYTPEQVEALERLYHECPKPSSLRRQQLIRECPILSNIEPKQIKVWFQNRRCREKQRKEASRLQAVNRKLTAMNKLLMEENDRLQKQVSHLVYENSFFRQQTHNNNATLATTDTNTSCESVVTSGQRNLTPQQHPPRDASPAGLLSIAEETLAEFLSKATGTAVEWVQMPGMKPGPDSIGIVAISHGCPGVAARACGLVGLEPTRVVFSSCNFAVEWMSMQLAPAQNLFLLQSMHLSLMMRPFYLLSTSLLEDGSFVVCERSLNNTQNGPAMPPVQHFVRADMLPSGYLIRPCEGGGSQPWPDNMFVVSXCSVQRVSLALSPSRXVLTMLSTYHLALLRHKHLLDGSVTATGSXSWGRTSKXVKAVNPFSSLFGITQMQFCAALXSMLESDGIDDVTLLVNSSPSKMMGVSLVYNNNGFPSVSSSVLCEFPQIMQQNVPPAILLRFLREHRSEWADSSIDAYSAAAIKAGPCSLPGARSGGFGGRVILPLAHTIEHEEFMEVIKLENMGYYRDDMSIPGDVFLLQLCSGVDEHAVGTSAELVFAPIDASFSDDAPILPSGFRIIPLDSGTDAASPNRTLDLASALEVGTTANKAASDNSAHSGSTKSVMTIAFQFAFEVHLQENIATMARQYVRSIIASVQRVSLALSPSRFGSHNAFHLPPGTPEAQTLARWICNSYRFYLGVELLKCEGSESILKSLWHHSDAVLCCSLKALPVFTFANQAGLDMLETTLVALQDITLEKIFDDNGKKTLCTEFPQIMQQGFMCIQGGICLSSMGRPVSYERAVAWKVLNEEESAHCICFMFINWSFV

SEQ ID NO: 196030 - protein, 82 aa, Glycine max
  Clone ID: PAT_MRT3847_19040C.1.pep
TPPLFNPMNPFPNPWPVFFFFSRAPQTPPFKPWGGRPQTLKAAQNALAFRAKFQSLAPLGKFPGGGVSGEPQKGFFVQTSPP

SEQ ID NO: 196031 - protein, 56 aa, Glycine max
  Clone ID: PAT_MRT3847_19041C.1.pep
LCLWFSFKYQVCLKFYGRHFMCRPFFNTCHRRLCGNILVLRDQIQDCLLSDGEDKT

SEQ ID NO: 196032 - protein, 47 aa, Glycine max
  Clone ID: PAT_MRT3847_19042C.1.pep
HHPIILIYTYSLITFTSSNNTSFYLPKNFSQSLILSHLITSLLNSIN

SEQ ID NO: 196033 - protein, 81 aa, Glycine max
  Clone ID: PAT_MRT3847_19043C.1.pep
PTRPISLSFMEFINLDPLNNKGPKWRLLNLWGFNFKTVCLLPNHTTSRLLTGAALPFHIFLTPTLALLMHILLLQTFKYHT

SEQ ID NO: 196034 - protein, 56 aa, Glycine max
  Clone ID: PAT_MRT3847_19044C.1.pep
IKKDQIQFFYSIFLGRGKPFLARICFFGGLFFVGQRMNPLERFKNTMVHFFFFWMG

SEQ ID NO: 196035 - protein, 135 aa, Glycine max
  unsure (1)..(135): unsure at all Xaa locations
  Clone ID: PAT_MRT3847_19045C.1.pep
MVTPLVKHKIVKKRTKKFVRHYSDRLVRLNQKVSWRRPHGIDSRVRRRFKGNMLMPKIGYGTNKKFKHVLPNGLLKFSINNVRELDLLLMHNRKYAAEIAHNVSIRNRKAIXERAAQLNVKVINGNAKVRTEETE

SEQ ID NO: 196036 - protein, 113 aa, Glycine max
  unsure (1)..(113): unsure at all Xaa locations
  Clone ID: PAT_MRT3847_19046C.1.pep
VSYLPGLFHPRMVFMLSXMPTWAAXLRRSSGXAIMVGTATWYLDCYQLPSNSLLTIVRPCSVRWYGPAYIPWLDGFCTACATCHRRCSYPRAQLDRGGHHTRLNLRSVIDITG

SEQ ID NO: 196037 - protein, 141 aa, Glycine max
  unsure (1)..(141): unsure at all Xaa locations
  Clone ID: PAT_MRT3847_19047C.1.pep
DIRLFLRVGQEAIARIXVEHIIQERNTWAAYDIVETICEFARARVPIIENHKECPTVLPEDLASIIIAAPICAHVPHLLHIRDLLTAKYAKEYASAVYEITADSVRDLPIIEEHYVRAPSGEVIPYVLKGDASTPEIPWDS

SEQ ID NO: 196038 - protein, 54 aa, Glycine max
  Clone ID: PAT_MRT3847_19048C.1.pep
SNAKLKAPQFGQGNKHYCSVPRVMTKFIPSKAIARINIYLASSWALKDLRTLLH

SEQ ID NO: 196039 - protein, 93 aa, Glycine max
  Clone ID: PAT_MRT3847_19049C.1.pep
FGVIITPCSSSSSSCYVISSTSTYTDIHKKTNFLVGPLQFKHNGAPFLRYINWVLCNFSLLPCGSIIKHQTLCALRGGLLRKYLGLLQFCLCS

SEQ ID NO: 196040 - protein, 419 aa, Glycine max
  Clone ID: PAT_MRT3847_1904C.1.pep
RFGFEGKRVHPMPFPDSSVPVQPRPMDPKKDIAVYGYGSVAWKERMEDWKKKQSEKLQVVRHEGGKDSDELDDPDLPKMDEGRQPLWRKLPISSSRINPYRIIIVLRIAILCLFFHYRILHPVNDAYALWLTSVICEIWFAVSWILDQFPKWSPILRETYLDRLSLRYEKEGKPSELADIDVFVSTVDPMKEPPLITANTVLSILAVDYPVEKVSCYVSDDGAAMLTFEALSETSEFARKWVPFCKKFCIEPRAPEWYFAQKVDYLKDKVDATFIRERRAIKREYEEFKVRINALVALAQKVPEDGWTMQDGTPWPGNNVRDHPGMIQVFLGQNGIRDIEGNELPRLVYVSREKRPGYDHHKKAGAMNALVRVSAVISNAPYVLNVDCDHYINNSKALREAMCFMMDPTSGKKICYLQF

SEQ ID NO: 196041 - protein, 74 aa, Glycine max
  Clone ID: PAT_MRT3847_19050C.1.pep
PPPSLWGPLSIPTGPIHFFFWLKILSVFKPKIFFPPKNVIPLFPYPLQASLFMKKCFPPMKPSQKIPISPTPPL

SEQ ID NO: 196042 - protein, 102 aa, Glycine max
  Clone ID: PAT_MRT3847_19051C.1.pep
PRVRPRGRQRVRPLGRNVNGSLMHAMHPRLLPTPYKATQSSHHNAIATAQATCQASRPGPPLVGTAVQRGEPVPHACEHALLTDSVQRACGGATRTSHRRGY

SEQ ID NO: 196043 - protein, 51 aa, Glycine max
  Clone ID: PAT_MRT3847_19052C.1.pep
PIRFDALVAALPISVSGEEAQLKRISELQAENDAIGQELQKQLEAAEKELN

SEQ ID NO: 196044 - protein, 140 aa, Glycine max
  Clone ID: PAT_MRT3847_19053C.1.pep
PIRVEPIFYLLCHVLHYVSCLLSSILNFFIGSLISGLLKYTWFLLQFDALVAALPISVSGEEAQLKRISELQAENDAICQELQKQLEAAEKELNQVHELSTQASDYWLNFKKPYEIEISTCVPGNGRRMILPQSWDYCRE

SEQ ID NO: 196045 - protein, 47 aa, Glycine max
  Clone ID: PAT_MRT3847_19054C.1.pep
ENKIFIFLNNFKVIILYCYSVWLKYIIYFSHHAKIFIYLYHVRDQNV

SEQ ID NO: 196046 - protein, 56 aa, Glycine max
  Clone ID: PAT_MRT3847_19055C.1.pep
RPFFFFFNICVRNMGNVAIRFYTTTTTQPITFSGFELTPPPPVLLKERLHPPHQQG

SEQ ID NO: 196047 - protein, 56 aa, Glycine max
  unsure (1)..(56): unsure at all Xaa locations
  Clone ID: PAT_MRT3847_19056C.1.pep
GDLRKPTLXTWLSSVYAWXFIPERSVGLEPKFPSPLQYTILFLFFFFRESQKRVLA

SEQ ID NO: 196048 - protein, 277 aa, Glycine max
  Clone ID: PAT_MRT3847_19057C.1.pep
MATSIGIMDSAYFVGRNEILSWINNRLQLNLSRIEEAASGAVQCQMMDMTYPGVVPMHKVNFDAKTEYDMIQIYKVLQDVFNKLKIEKHIEVGRLVKGRPLDNLEFLQWLKRYCDSVNGGIMNENYNPVERRIKGGKDRNVKSLKSSKSLQTNTMNHSGSGDSLRSKQLRSSGGADGVNSSAEIQALSKQVSDLKLSVDHLEKERDFYFAKLRDIEILCQASELENDPMSLAIKKILYAADAKGSALDEAQEYLNDVINGDEDEAEAEAEAEVETEA

SEQ ID NO: 196049 - protein, 85 aa, Glycine max
  Clone ID: PAT_MRT3847_19058C.1.pep
TALLKELREAIMQRHYLARARRTWWEKLQTVCLENHSWDWDAGELVQGLVIRRGVYVIASARHDVVEQRTILNLVRAPDCVGINL

SEQ ID NO: 196050 - protein, 80 aa, Glycine max
  unsure (1)..(80): unsure at all Xaa locations
  Clone ID: PAT_MRT3847_19059C.1.pep
XAELLMRCLRVRHCHLEILQERNSFYSESNTACCVLLISTMLGILSKMQFKLRATPILILYVLPFFGIYCEIKYAIHFWK

SEQ ID NO: 196051 - protein, 168 aa, Glycine max
  Clone ID: PAT_MRT3847_1905C.1.pep
MQGIEDQKIQQNEPVGSIAPRYEADRIQQIGNPWSTGLFDCHENQTNAVMTAFFPCVTFGQIAKVRVGGGLSCHLGSFIYLLMMPALCSQWIMGSKYRTKLRKRYNLVEAPYTDIVSHIFCPCCSLCQEFRELKIRGLDPALGWNGILAQQQSDQTLKNPPLNQVMSK

SEQ ID NO: 196052 - protein, 93 aa, Glycine max
  unsure (1)..(93): unsure at all Xaa locations
  Clone ID: PAT_MRT3847_19060C.1.pep
MISAGGRDAIKGLGLGLGLGAGRREMVESELEEGEACSFQNHEDYDATVDPDVALSYIDEKLQDVLGHXQKDFEGGVSAENLGAKFGGYGSFL

SEQ ID NO: 196053 - protein, 69 aa, Glycine max
  Clone ID: PAT_MRT3847_19061C.1.pep
VSDPIATSCNVYDLHLRLSTESISFRSPFLMHKFPLRCLSNPWFKAHGMVLAPDTFNDWMSLQKSDVYS

SEQ ID NO: 196054 - protein, 36 aa, Glycine max
  unsure (1)..(36): unsure at all Xaa locations
  Clone ID: PAT_MRT3847_19062C.1.pep
FGAXLFKLGFTXYKXSLSLVFVIQIESNXKYEXSSX

SEQ ID NO: 196055 - protein, 148 aa, Glycine max
  Clone ID: PAT_MRT3847_19063C.1.pep
MYEMLRGGMVRVVCGSSNEDETECQNMRFKVKEGDAFLVPRFHPMAQMSFNDGPFVFLGFSTSAAQREQEQAKREQERRERRRQEEEDEEEPTRWERRGRREKGKSPEGVEWEQEEARRQQAESDRQVEEQSHRNSFEGRRALKIRNV

SEQ ID NO: 196056 - protein, 52 aa, Glycine max
  Clone ID: PAT_MRT3847_19064C.1.pep
KTTVSLSFSNQSNMNESFFNLYSAKKFQTVLRTCVYCMLESLKCIQQPQVKE

SEQ ID NO: 196057 - protein, 267 aa, Glycine max
  Clone ID: PAT_MRT3847_19065C.1.pep
VHVGFVENLIVFYFLYQILRLIRNWICELEQEAKREREEEKARMEKERERKGEEEAEREEEEARREQEWRRKKEEAAAKREQEKRERRRQEEEAKKWAEEKAEREQEQATREAEEAQREQEQAKREAAQREQERAKREQERRRREEVAGKGEEEEEHAGRGHERRKEEEETARREQEQEQAERQQQKREKRRQKEEQGEGEEEEEEDEEEPTWWERRERRKQKGKSPEEGVEWEQEQATREAEEAQREQEQAKREAAQREQERGKRE

SEQ ID NO: 196058 - protein, 696 aa, Glycine max
  Clone ID: PAT_MRT3847_19066C.1.pep
MEPRKASPLSWVLIFFLTISLWGVKVSSEEHHHHGKSKEGPVVERDQRRTLLVTEFGEITAIDIKEGQKELPYHLQFITLEPNSLFLPVLLQADMVFYVHTGSGKLTWANDDGTSTIRLREGDVCSLNEGSVFYIQSNLEAERRKLRIYAMFTNTDDNTYDPSIGAYSRINELVKGFDKKIMQAALKVPEDLIEAIINKTETPAIVHAVPEKRNIVQELEASFLKNFLGVGSNSKKLETYNIFEHDPDFKNPIGWSTAVTKKQLKSLKRTNIGFLMVNLNMGSILGPHWNAKATELTVGVDGEGMVRVVCGSGNENETECQNMRFKVKEGDAFLVPRFHPMAQMSFNNGPFVFLGFSTSAKKNHPQFLAGKGSVLHILDKKILARSLGVSNRTIDELLRSPEDSIIFRCSSCAEEEEKIMKEEEEEEESKKEEEERKKKEEEEEEEEKKKKEERKREEEEAKRQQEEREKKRGEEEAKREREEEKARMEKERERKGEEEAEREEEEARREQEWRRKKEEAAAKREQEKRERRRQEEEAKKWAEEKAEREQEQATREAEEAQREQEQAKREAAQREQERAKREQERRRREEVAGKGEEEEEHAGRGHERRKEEEETARREQEQEQAERQQQKREKRRQKEEQGEGEEEEEEDEEEPTWWERRERRKQKGKSPEEGVEWEQEEARTASREGEKKTPRE

SEQ ID NO: 196059 - protein, 57 aa, Glycine max
  Clone ID: PAT_MRT3847_19067C.1.pep
VNSGCPSGPPKKKKKKKKKKKKKKKKLKKKKKKKKKKKKKKKKKKKKKKKKKKKKKN

SEQ ID NO: 196060 - protein, 204 aa, Glycine max
  Clone ID: PAT_MRT3847_19068C.1.pep
MAAASRKSRSAVIGSLSSTPRFCNSHFHSYSPSSSSYSSAFASSTSSFTSRSSTFFHRSSSPTRVNLCGSSAPSVRFSLDRSVSPNRSISVAPRTGVSRQSGGPHHHQQKRTCMCSPTTHPGSFRCSLHKKSHAPAPAPYSPHRLNARRSAMTNSLVRIRGVEGDLVKRALAALIRPSSHQQRRRGDFHPRPSRLSVMSKAEDL

SEQ ID NO: 196061 - protein, 138 aa, Glycine max
  unsure (1)..(138): unsure at all Xaa locations
  Clone ID: PAT_MRT3847_19069C.1.pep
XXXXXRXXXXRRXRXEKGXXEXXXXXKXXEKEXXKXXXXKKEXXXXXXXXEXXXRXXXEEXNFFFIXXXXXWXXDVGXLEXFKRVGKKFEEIEKKXIEKKKDEKLRXRYGEDKMXXNLVYXFSEEGLIFRGVXKSIFI

SEQ ID NO: 196062 - protein, 106 aa, Glycine max
  Clone ID: PAT_MRT3847_1906C.1.pep
EVNDINDLAGNSPFLTWPNNINDHEDLTYLKLDNDKDECHPSCIGKLTMKGRGGLFLRYTYNGCIDILRSFGVLIFVYKHVVRVSTNISRLPAPLMLLILEVTATI

SEQ ID NO: 196063 - protein, 203 aa, Glycine max
  Clone ID: PAT_MRT3847_19070C.1.pep
MEKMAAASRKPRSAVIGSLSSTPRFCNSHSTSSSSSSSAFASSTSSFTSRSSSFFHRSCSPTRVNLYGSTAPSVRFSLDRSVSPNRSISVAPRTGASRQSSSPHHQQKRTCMCSPTTHPGSFRCSLHKKSHAPAPYSPHRLNARRSAMTNSLVRIRGVEGDLVKRALAALIRPSSHQQRRRGDFYPRPSRLSVMSMAERGHLN

SEQ ID NO: 196064 - protein, 97 aa, Glycine max
  unsure (1)..(97): unsure at all Xaa locations
  Clone ID: PAT_MRT3847_19071C.1.pep
MAAASRKSRSAVIGSLSSTPRFCNSHFHSYSPSSSSYSSAFASSTSSFTSRSSTFFHRSSSPTRVNLCGSSAPSVRFXLDRSVSPNRSISVAPRTGV

SEQ ID NO: 196065 - protein, 156 aa, Glycine max
  Clone ID: PAT_MRT3847_19072C.1.pep
RETARREKSNHIVMYQIQLVSEGLLERHHRRRTFLALLQVPVSLGDLKIDPHQLLSTKGNLKGLKKKKPSPLRRSGRTRSQSSTGYSDSKSSGSVSSDPKPKKEKSVKQLIFEAKEVNGTEQHDLGTPQVKVKRMNARMYRSLFHYQRKEPNRSIT

SEQ ID NO: 196066 - protein, 102 aa, Glycine max
  Clone ID: PAT_MRT3847_19073C.1.pep
QVSVVKRNAKLARNTQSTSTARCLFINTGGVPFSFMIATVRTTILMYVFHIITTAKFHFMLRDYIVYGNVICIVIITTRNTRYRSIIYLTMLIYTNYTNSGK

SEQ ID NO: 196067 - protein, 80 aa, Glycine max
  Clone ID: PAT_MRT3847_19074C.1.pep
MVFTCSEKEESMAMGPERSKPLHNFMLPCLKWGGQRHLRCTKHPSDSSSADAAGDRRSPAPREFDSPPPPLTNADTRTRL

SEQ ID NO: 196068 - protein, 105 aa, Glycine max
  Clone ID: PAT_MRT3847_19075C.1.pep
KGQWMNLSITKSYKISSREFNYKFKNSSGARYHDYSNGSTKSQPQVLGKIILEGQKKKKTPRTLRWNVRVQTQKRKKICYYGMGGFDPFFFRFSSIKNRSKLATP

SEQ ID NO: 196069 - protein, 86 aa, Glycine max
  unsure (1)..(86): unsure at all Xaa locations
  Clone ID: PAT_MRT3847_19076C.1.pep
MAVKPYXPHWTCANLILVSLVEKDIKFAVAPVDVTRVEQKAPEFLXLQMLGVVTVIXDGEYTLYESRALLRCDAKIYSSQGVELVR

SEQ ID NO: 196070 - protein, 335 aa, Glycine max
  Clone ID: PAT_MRT3847_19077C.1.pep
MATVLRTPTFRPPPPPRAAKSPKPSRFAVVSFRQSTTCGRKPSSLLSSLPFPNVPSLRFVRFVPFAFDGDTEAPQVQEPEVQVLDPSDGAVGVNDSASDNEVSDADETFASPFLLLLQSYKEALANNDEVKIAELESSLKSVEDEKIELEVKIASLSEELSVEKDRILRISADFDNFRKRTERDRLSLVTNAQGEVVESLLPVLDNFDRAKTQIKVETEGEEKINNSYQSIYKQFIEILNSLGVEPVETVGTPFDPLLHEAIMREDSDEFEDGIIIQEFRKGFKLGERLLRPSMVKVSAGPGPAKPEQEAPQEEHGNTEISEDSKQNEGSTETES

SEQ ID NO: 196071 - protein, 80 aa, Glycine max
  Clone ID: PAT_MRT3847_19078C.1.pep
GIEKEAKKRKRLADDFVHLLHSTKDFTVSSKWEDCRPLVEDSQEFRSIGDESLCKAVFEEYIAQLKEEAKENERKRKEER

SEQ ID NO: 196072 - protein, 125 aa, Glycine max
  Clone ID: PAT_MRT3847_19079C.1.pep
FPCVRPRVRSFLASDSPRIQMRTLSLSLSPITAQHRIGVQGFFAPIWILLPSRRSLRIDNAFLACTVSARDPDQAQKNAMLTWITYSLVWLCSGSLNKMAMSEGLLADGQRELLKIARQYAENLS

SEQ ID NO: 196073 - protein, 107 aa, Glycine max
  Clone ID: PAT_MRT3847_1907C.1.pep
IIYLTTLHNVTCNLYQKEDYYRLKDKRGGKTWMNKCPSDWTIMHLFPLGVTTPINPNPFPFCRLLAAVLEPNYHPISNIPIQTNSILISHTLNTFPNFLFSQQSQPQ

SEQ ID NO: 196074 - protein, 96 aa, Glycine max
  Clone ID: PAT_MRT3847_19080C.1.pep
PPNAHHVPVFCVVTRGAFSRPLPGGFVSNVEKVLHGLYSLPARVFSSPPVPLRAKENGKVVVFKKNLLGTQGEIPPFWKKFFLERKKTNAQMNGVC

SEQ ID NO: 196075 - protein, 197 aa, Glycine max
  Clone ID: PAT_MRT3847_19081C.1.pep
KKLFVSGKKKLKMGSKWMWLILHFASVLVFVWGDRTILKVEGPMLLDNSQRYEGSFISKAVNFLWQPGESGYQHVWPDMEFGWQIILGTIVGFFGAAFGSVGGVGGGGIFVPMLSLIIGFDAKSLTAISKCIILVSARILPVYTFSHSLRSLDFPCGYYCCLRWTAHCEKTNHLIWESISYHLYSSLYNICQCSLIR

SEQ ID NO: 196076 - protein, 480 aa, Glycine max
  Clone ID: PAT_MRT3847_19082C.1.pep
SFLTRKKKLKMGSKWMWLILHFASVLVFVWGDRTILKVEGPMLLDNSQRYEGSFISKAVNFLWQPGESGYQHVWPDMEFGWQIILGTIVGFFGAAFGSVGGVGGGGIFVPMLSLIIGFDAKSSTAISKCMIMGAALSTVYYNLNLRHPTLNMPIIDYDLALLIQPMLMLGISIGVVFNVVFPDWIVTILLIVLFLGTSTKAFFKGVETWKKETIMKKEAAKRQESNGSGAEVEYKPLPSGPNGANEKDTKEQEVTIIENVYWKEFGLLVFVWVSFLALQIAKENYTTTCSTFYWVLNLLQVPVSVGVTAYEAAALFSGRRVIASTGEQGKDFTVLQLIIYCVFGVLAGVVGGMLGLGGGFVMGPLFLELGVPPQVSSATATFAMTFSSSMSVIEYYLLKRFPIPYALYFVLVATIAAFVGQHIVRKLIILFGRASLIIFILASTIFVSAVSLGGVGIVNMVHKIQNHEYMGFEDLCKYGS

SEQ ID NO: 196077 - protein, 99 aa, Glycine max
  Clone ID: PAT_MRT3847_19083C.1.pep
GGIYRKQMQKKTQRHHPLRNKAKEEGASPPKTALHKKPDEDASMEEKKQRTGEHQIEGINQAKKTHSQPNLIKLSYIKRTTSVTHTYKYRPDRSPEKLS

SEQ ID NO: 196078 - protein, 249 aa, Glycine max
  unsure (1)..(249): unsure at all Xaa locations
  Clone ID: PAT_MRT3847_19084C.1.pep
INDTSSHVDLAVTLQRTPETSEVYYCIENVYWKEFGLLVFVWVSFLGIQIAMNQTSKCSTIYWVLNMLQIPISVGVSGYEAASLYKGRRQIXSVGDQGKTFTSQQLTIYCIFGVLAGIVGGLLGIGGGFVMGPLFLELGVPPQVSSATATFAMTFSSSMSVVEYYLLKRFPVPYALYFIAVAAISAIVGQHIVRKLIDVLGRASLIIFVLAFTILVSAVSLGGVGIVAMVKKIENHEYMGFDDLCTYDS

SEQ ID NO: 196079 - protein, 141 aa, Glycine max
  unsure (1)..(141): unsure at all Xaa locations
  Clone ID: PAT_MRT3847_19085C.1.pep
VVSEVEYTPIPSGPGSDIAKDTRNEEVSMLENVYWKEFGLLVFVWVSFLGIQIAMNQTSKCSTIYWVLNMLQIPISVGVSGYEAASLYKGRRQISSVGDQGKTFTSQQLTIYWIFGVLAGIVCGLLGIGGGFXMGPLFLSW

SEQ ID NO: 196080 - protein, 57 aa, Glycine max
  Clone ID: PAT_MRT3847_19086C.1.pep
KIFTEKRQINKNCSLNRLFKVDGFRYLWKGQSTYRWGDKSWEEKVSLNTFSISRLGI

SEQ ID NO: 196081 - protein, 290 aa, Glycine max
  Clone ID: PAT_MRT3847_19087C.1.pep
LEDLVEVVPEPISKWQDVGPDHFNILDAFYAEPQRYAYTFQNYVFVTRVMQERESSAGIKPLRLMERSVFSDRMVFVRAVHEANWMNGMEISIYDSWFDPVVSSLPGLIPDGFIYLRASPDTCHKRMMLRKRTEEGGVSLDYLCDLHEKHEGWLFPSQSGNHGVLSVNQLPHHIDNSLHPDIRDRVFYLEGGHMHSSIQKVPALVLDCEPNIDFSKDIEAKRQYARQVAEFFEFVKKRNEVSSKEGSSQAQPQVLLPHEGGLWLPDGKPFPREALKSLDFRQAATSFMSG

SEQ ID NO: 196082 - protein, 319 aa, Glycine max
  Clone ID: PAT_MRT3847_19088C.1.pep
PGSTHASAFREVVVSLDGNVVGAVWPFSVIYTGGVNPLLWRPITGIGSFDLPSYDIEVTPLLGTLLDGKSHSVGFSVTNAVNVWFVDANLHLWLDGKSSRTEGGVVDLVAKPLVESLVSDFEGLNGKFWTSARRSVLSAGWVRSSYGNVTTSFVQDFVFNNSMVMGKNGNQQIVNQVILFNDSVHANLPSPFVEDTYRKFSLYLDTDEVDQGDDTYLSVSNVTLGFDVDMSTSSAFGFSKSSLKNVQDAQGTMVIKGNLVVRGLGETQQDYSYTSDGYCYSRKVGSSNYTILYDKVRHSCNKRSHSHLGPHSIKKLFIL

SEQ ID NO: 196083 - protein, 260 aa, Glycine max
  Clone ID: PAT_MRT3847_19089C.1.pep
MSSRLDECLLEVDGYGDGDGKAKPKFLIRNLSRVSEDGVPILKGINLEIPEGVIVGVIGPSGSGKSTFLRALNRLWEPPSASVFLDAQDICHLDVLSLRRNVAMLFQLPALFEGSVADNVRYGPQLRGKKLSDDEVRKLLLMADLDASFMDKSGAELSVGQAQRVALARTLANSPQVLLLDEPTSALDPISTENIEDALVKLNKNQGMTVIMVSHSIKQIQRIAHIVCLLVDGEIVEVLNPHNLSQANHPMAKRFLQLSS

SEQ ID NO: 196084 - protein, 94 aa, Glycine max
  Clone ID: PAT_MRT3847_1908C.1.pep
RYEALNIAGFLDTNLIIISPDNEQVSLPTATIDGPAPPVGALSRALARLNTSSKFHQLRDLAKGITKQIGSRAYEFTSKLDSYLRGMVGGAGAC

SEQ ID NO: 196085 - protein, 61 aa, Glycine max
  Clone ID: PAT_MRT3847_19090C.1.pep
RSISLKQCLSKYQSNSQQVQPLDRFKLKLVRCHQSPGQTNNQLLLPSHPHHSNHHLKAQEN

SEQ ID NO: 196086 - protein, 111 aa, Glycine max
  unsure (1)..(111): unsure at all Xaa locations
  Clone ID: PAT_MRT3847_19091C.1.pep
FLDELNCSILAMYGSQAKILRLNLRSSNELQTPFLFANSSPGIDIAKLKGSRLKHPTPVGHPEEAGTCVTRNIXEDSVSKSDSTTSVYLGYEQNPLYEGQGPEKRTDESSN

SEQ ID NO: 196087 - protein, 288 aa, Glycine max
  Clone ID: PAT_MRT3847_19092C.1.pep
MASSRFSSIFLLSIILTISKFALGGNFYEDFDNLFGDVRVDIKDEGQSMTLTMDEYSGSGIVSKNEYLFGRFDMKIKLVPGNSAGTVTAFYLSSQGSNHDEIDIEFLGNLTGDPYLLSTNVYADGVGGREMQYYLWFDPTEDFHTYSIDWNPDRIIILVDDIPIRVMLNRQTIGVPFPTSQPMRLYTTLWNGDSWATRWGAVKLDLSNAPFIAGFKHFNANACIAKEGGASCKGFNRGIFRDLDQESKKKMRKVQSKWIVYDYCRDLRRYAHGLPFECRKENLLDQSK

SEQ ID NO: 196088 - protein, 73 aa, Glycine max
  unsure (1)..(73): unsure at all Xaa locations
  Clone ID: PAT_MRT3847_19093C.1.pep
KDADMNNGELKHLSALLPNIEQTYIRHICQPSXSVMKLSPLIEIYKLIRHKLLAFEPHMELVHVHFNHQKRMH

SEQ ID NO: 196089 - protein, 80 aa, Glycine max
  unsure (1)..(80): unsure at all Xaa locations
  Clone ID: PAT_MRT3847_19094C.1.pep
MAAASSMALSSPSLAGKAVKLGPSAPEVGRVSMRKTVSKQVSXRSPCYGQDLVKFLSPFSRETGVHLELCISYSRQVGSL

SEQ ID NO: 196090 - protein, 137 aa, Glycine max
  Clone ID: PAT_MRT3847_19095C.1.pep
MGTFQTLRKAYGALKDSTTVGLAKVNSEYKELDIAIVKATSHVEYPPKERHVRKIFYATSAHQPRADVAYCIHTLAKRLSKTRNWIVAIKTLIVIHRILREGDPTFKDDLINYARRGRFLQISNFKDDSSALAWDCS

SEQ ID NO: 196091 - protein, 98 aa, Glycine max
  Clone ID: PAT_MRT3847_19096C.1.pep
MKKEDTVKLISAEGFEFVVDKEAAMVSQTIHNMLTSPGSFAERQHGEVTFPEISTTILEKICQYFYWHLQFASGKETEFPIEPELTLELMMAANYLHT

SEQ ID NO: 196092 - protein, 98 aa, Glycine max
  Clone ID: PAT_MRT3847_19097C.1.pep
MKKEDTVKLISSEGFEFVVDKEAAIVSQTIHNMLTSPGSFAERQHGEVTFPEISTTILEKICQYFYWHLQFASGKETEFSIEPELTLELMMAANYLHT

SEQ ID NO: 196093 - protein, 139 aa, Glycine max
  Clone ID: PAT_MRT3847_19098C.1.pep
MEWKLRKPLLRSEAMAGSGSSMLYSFLLFTVILSLQEMYRGKLASSELYTILGGFVSSILFLVLLTFIGNLQETIGARTGWGAVIVAEAVALIAASTVHRVCITTCFLFSAALLYEVNKISGSALSTSDSRIKKQSGRA

SEQ ID NO: 196094 - protein, 50 aa, Glycine max
  Clone ID: PAT_MRT3847_19099C.1.pep
GGFIETPKEEGVSPIFSGLTMLVLEALAFGLFLKGKENYVESKHPLLKKN

SEQ ID NO: 196095 - protein, 57 aa, Glycine max
  unsure (1)..(57): unsure at all Xaa locations
  Clone ID: PAT_MRT3847_1909C.1.pep
FRYRAFDELEGIEVAWNQVKVADLLRNSDDLERLYSKVHLLKTLKHKNILXFYNSWG

SEQ ID NO: 196096 - protein, 94 aa, Glycine max
  Clone ID: PAT_MRT3847_190C.1.pep
SSSSVPPGAFLLLSPSACLSVLCSPAACLGVFLLLCVSSACSLGFGGLVSPVCRLVLFWSAGGVPALSLSLPPPVPSLGGFHLWVTRVSCRLRP

SEQ ID NO: 196097 - protein, 142 aa, Glycine max
  Clone ID: PAT_MRT3847_19100C.1.pep
NKTKCFELSEIAGHVGEFSADRCGSRFIQQKLETATTEEKNMVYQEIMPHALALMTDVFGNYVVQKFFEHGLASQRRELANKLLGHVLTLSLQMYGCRVIQKAIEVVDLDQKIEMVQELDQLCCPGKSIMITYSLDFSMPQL

SEQ ID NO: 196098 - protein, 107 aa, Glycine max
  Clone ID: PAT_MRT3847_19101C.1.pep
ICSSFRLVPFVSQTTYENFRYRAERRINVFNRGCLNNFLEVFCTKVKPSRNNFRAFAREEVPPRPLAPIIPRDREDLGGDHRPKVEADLDIGEDLLKISQRRNIEEL

SEQ ID NO: 196099 - protein, 232 aa, Glycine max
  Clone ID: PAT_MRT3847_19102C.1.pep
DETKRKFLDWPKRFNIINGIARGLLYLHQDSRLRIIHRDLKTSNVLLDANLHPKISDFGLARSFLGDQVEANTNRVAGTYGYIPPEYAARGHFSVKSDVFSYGVIVLEIVSGKKNREFSDPEHYNNLLGHAWRLWTEGRALELLDEVLGEQCTLSEVIRCIQIGLLCVQQRPEDRPDMSSVGLFLNGDKLLSKPKVPGFYTEKDVTSEANSSSANHKLCSVNELSITILDAR

SEQ ID NO: 196100 - protein, 76 aa, Glycine max
  Clone ID: PAT_MRT3847_19103C.1.pep
ISGLLCGIVRVTFMDLSWGYGQKWLIHVLLYVLLCAFHGPHSKLTSQGLIYSFGPVPSKEVIKYISMGHVSFLWSK

SEQ ID NO: 196101 - protein, 55 aa, Glycine max
  Clone ID: PAT_MRT3847_19104C.1.pep
RTTSIKKFIFLTFFKSCPNHTGDMFVPLVISLFSPTSVGSPPVFRSKCRFNCASF

SEQ ID NO: 196102 - protein, 98 aa, Glycine max
  unsure (1)..(98): unsure at all Xaa locations
  Clone ID: PAT_MRT3847_19105C.1.pep
LNPGGIYDGKNCPSPEGNNPFVLLVGXGSPDGVNYWKAKNSWGKNWGKNGYIWIQKNPGNLLGGGGKKYFASSPPKKESETLGSARVKGHPKVDPSPL

SEQ ID NO: 196103 - protein, 43 aa, Glycine max
  unsure (1)..(43): unsure at all Xaa locations
  Clone ID: PAT_MRT3847_19106C.1.pep
ARVRLLGXVVQSTQHNKTSLFLSRTHALLGEVKTHNPNHQTVR

SEQ ID NO: 196104 - protein, 53 aa, Glycine max
  Clone ID: PAT_MRT3847_19107C.1.pep
LLLIFLENILYINLAVNNQTVVPTKWTIYCLIDVGIFSIVTVSQLGNVWHNIF

SEQ ID NO: 196105 - protein, 52 aa, Glycine max
  Clone ID: PAT_MRT3847_19108C.1.pep
FHDLDRDPKARGGQAYCTFRVANLDHIYLLFRPNHMSVFILLEDPGQSDYRK

SEQ ID NO: 196106 - protein, 116 aa, Glycine max
  Clone ID: PAT_MRT3847_19109C.1.pep
NPPKKLNFQIQKNKNASPPFPKKTRNWVPPPLKKRRKKPSPGPFPEWNWGDTPPEKPKRVSLKWITPQKNFPLQEPYKGGSRWGTPKNKPLVFFWGFPNPSILSPRDPGFYKKAGP

SEQ ID NO: 196107 - protein, 110 aa, Glycine max
  Clone ID: PAT_MRT3847_1910C.1.pep
MAFLSSLVLLLAAVILSRQGLAHYENPTEYMPTTEKPPGYRPAVEKPPVYKPPVENPPVYKPAGEKPPAYKPAVEKPPVDKPPVEKPPVYKPLGEKPPVYKPPVEKPPVY

SEQ ID NO: 196108 - protein, 40 aa, Glycine max
  Clone ID: PAT_MRT3847_19110C.1.pep
THKYYDKTLYGSNSKVWDLSPILKLWDSSVGFICFWAFQL

SEQ ID NO: 196109 - protein, 59 aa, Glycine max
  Clone ID: PAT_MRT3847_19111C.1.pep
FFRERLFLKEFKICSNLWLLIDSLRTGVVQMVFYTLSVRGSIDCVACYGWGWELFPPLK

SEQ ID NO: 196110 - protein, 64 aa, Glycine max
  unsure (1)..(64): unsure at all Xaa locations
  Clone ID: PAT_MRT3847_19112C.1.pep
SLIQSNNPXTTYKXEQYHHHRRIXIRXPRXISXXXXRASCXMSKGRYVMLXVDLCNWGRGIDDV

SEQ ID NO: 196111 - protein, 203 aa, Glycine max
  Clone ID: PAT_MRT3847_19113C.1.pep
MDANGEARLINGYGSKQVSQFLNANMKKPKVVSGDDDLPKRDDIGERRRKHELRVLAGAGIRTEDDDGDDQMTDLGPNEVTDEEDDGGSGDSENEFYKQVEQLRAAKLAAKVETYSRNTSVFSLPEIVKGKRHIFFQIEKNRGLTRNRNKAKKNPRKNYKLKHQKAVKNRKGQVQSIKRPTAPYGGESSGINAAISRSIRFKS

SEQ ID NO: 196112 - protein, 350 aa, Glycine max
  Clone ID: PAT_MRT3847_19114C.1.pep
KLLDQIKQLDTKLPFELEDILKGNNGLEKVVNSDNENAPTTADSIIKNQEQPLVSAKSTEETVPNKQFEMQKLETSKNSVQKTRKVKPQKDHIGAQSLEMLKVRASLEEKLKNKGLYSSIAPKPSNALKRLKPVNGMLETYDDFNDDTMDANGEARLINGSVSKRVSQFLNANMKKPKVVSGDDDLPKRDDIGERRRKHELRVLAGAGIRTEDDDDDQMADLGPNEVTDEEEDGGSGDSENEFYKQVEQLRAAKLAAKAETYSRNSSVSSLPETVEGKRHISSQIEKNRGLTRNRNKAKKNPRKNYKLKHQKAVKNRKGQVQSIKRPTAPYGGESSGINAAISRSIRFKS

SEQ ID NO: 196113 - protein, 137 aa, Glycine max
  Clone ID: PAT_MRT3847_19115C.1.pep
LRGRFRWIIIYAHSVIVNLKLLPTYFTCGKIMPIWWEFLSWIKEEKVFHCRPLDNFLQHFSSAVSKDANRRRTMWWIAVTTSIWRLRNDIIFQNQTFDITRLTDNTLFLLWTWLRGWERKFQIPYYSWSSNMSIAFS

SEQ ID NO: 196114 - protein, 117 aa, Glycine max
  Clone ID: PAT_MRT3847_19116C.1.pep
RGFPSSNYRPRYFPFSFQQLASIILVKLRIMGEAENSGLNQWVHSLSIILGCLDHKKAEACSITLVPEQLRRSKEEAYTPHVVSVGTPPQGKENGPTIHGRDQATLHALSPLSMQKW

SEQ ID NO: 196115 - protein, 393 aa, Glycine max
  unsure (1)..(393): unsure at all Xaa locations
  Clone ID: PAT_MRT3847_19117C.1.pep
PRVREASPKILLAKPGLVTGGPVAGKFGRGGGGDDDSTQLRSRLPSAASLNLLSDSWDFRIDRFLPFLTENTDFTVIGVIGSPGVGKSTIMNEIYGFDSTSPGMLPPFAIQSEETRAMARHCSTGIEPRISTERIILLDTQPVFSASVLSEMMRPDGSSTISVLSGETLSAELAHELLGIQLAVLLASICHIXLXVSEGIHDDSMWHLMLTVDLLKHGISDPSLMTSLSQSSSSGXEKDKLPEHEEYMATPVFVHTKLQDQDFTPSNSVQLRKALMQYFRPSYFVREHTENKPEEHVSSSPVHGSQMDSNMIKFYAIPLKKKDENPRAQHESYVSALWKLRDQILSMKSPSFTRPVSEREWLKNSAKIWELVKSSPTILEYCRTLQHSGMYGR

SEQ ID NO: 196116 - protein, 210 aa, Glycine max
  unsure (1)..(210): unsure at all Xaa locations
  Clone ID: PAT_MRT3847_19118C.1.pep
RLHSAPFSSSVCSIPQPSLRLLGFPHRSLSPCKSLFTLLSFVTQQKCLLLIAIAFGKCWQFLTENTDFTVIGVIGSPGVGKSTIMNEIYGFDSTSPAXGMLPPFAIQSEETRAMARHCSTGIEPRISTERIILLDTQPVFSASVLSEMMRPDGSSTISVLSGETLSAELAHELLGIQEPFXLAVLLASICHIVLXXVSEGIHDDSMWHLM

SEQ ID NO: 196117 - protein, 84 aa, Glycine max
  Clone ID: PAT_MRT3847_19119C.1.pep
SVAAVDSEPSAEWPEEALPCGRQRVWRSSSWSAPRAAFAASGAVRLVRMPPRLRYVSARRYGLLPMICTRNGKRAKRNKTRVFS

SEQ ID NO: 196118 - protein, 58 aa, Glycine max
  Clone ID: PAT_MRT3847_1911C.1.pep
TTQVKKHLVNKIFLHFLGSCIPVPNHFPFNKHIWTLSSIYSQHLIFRSVHMLAVDMFL

SEQ ID NO: 196119 - protein, 138 aa, Glycine max
  unsure (1)..(138): unsure at all Xaa locations
  Clone ID: PAT_MRT3847_19120C.1.pep
AYDGITYIATYSGGVHCMHVWPPVGNNKFDTISYLPDLDDAQLSKEVEYLLRKGWIPCLEFQLEHGFVYREHNMSPIYYDGRYWTMWXLTMFCFTDATRLLKELQQAIMCXPNGFIRIIGCFIFAPVAGLMLLGFEPY

SEQ ID NO: 196120 - protein, 99 aa, Glycine max
  Clone ID: PAT_MRT3847_19121C.1.pep
SVESFRRVIKRFIDQVELNIGFVQKKREEVPFSPKDQQSVESFLQVEKRNGNTPFTQYYKSIMNKASSRKSISNRKSSGKGKKKMQHPNGNIDVVATES

SEQ ID NO: 196121 - protein, 103 aa, Glycine max
  Clone ID: PAT_MRT3847_19122C.1.pep
MLTRLARRRSIRFRLSDFVYLCPPEALKLFSALKMADWGPVVIAVVLFVLLSPGLLFQMPARGRVAEFGNMQTSGASILVHAIIYFGLITIFLIAIGVHIYTG

SEQ ID NO: 196122 - protein, 52 aa, Glycine max
  Clone ID: PAT_MRT3847_19123C.1.pep
YFIYSGILHEGVYARSHGGLSQTRSYHSSLQSVTCPSISLKNCYLSLTSVPQ

SEQ ID NO: 196123 - protein, 122 aa, Glycine max
  unsure (1)..(122): unsure at all Xaa locations
  Clone ID: PAT_MRT3847_19124C.1.pep
LSRSNCPRSCHQSLSLSLWSTWVVVRHNLCSLCGKLPVCDDNVVGLEQLRDHNHVISTDSLQLRQRVMAPSPVAQRAEEALAQRDISQPXTSEIRTQGYCALCTGTSAQSGGLIKIRTRIST

SEQ ID NO: 196124 - protein, 42 aa, Glycine max
  Clone ID: PAT_MRT3847_19125C.1.pep
TDPLDSYANTTLSNNQQQADCHYSSVLLHSNLIQTSVVSRSC

SEQ ID NO: 196125 - protein, 133 aa, Glycine max
  Clone ID: PAT_MRT3847_19126C.1.pep
DIYSFGMCMIEIFTSEFPYSECSNPAQIYKKVTSGKLPEAYYRIHDLEAQKFVGKCLANVSERLSAKELLLDPFLATEQLDSPLPSPTLPKKQTPTLNFTALLAKELPPPKSYQTNDTHMPITGSMNEENDIE

SEQ ID NO: 196126 - protein, 57 aa, Glycine max
  Clone ID: PAT_MRT3847_19127C.1.pep
SHGSYGQYFAHGVSTPHGKFHHHGKPGKFQHGKHGKFCKHGKLGHFGKHGGGFQKWK

SEQ ID NO: 196127 - protein, 91 aa, Glycine max
  unsure (1)..(91): unsure at all Xaa locations
  Clone ID: PAT_MRT3847_19128C.1.pep
MAKTLLFTSEXSVNKGHHDKLYDQISNAVLDARLEQDPDSKVACETCTKTNLIMVLGEITTNANVDYXKIVRDTCKNIGSVSHDERLDAYN

SEQ ID NO: 196128 - protein, 88 aa, Glycine max
  unsure (1)..(88): unsure at all Xaa locations
  Clone ID: PAT_MRT3847_19129C.1.pep
CPFDFHQFCYQGQSLPALSSVKSVQYTSAGPTGGRHFANHNSSALASNASATEAAAFDPLIXKKVWTRWPENNHFYEAVVTDYNPADV

SEQ ID NO: 196129 - protein, 69 aa, Glycine max
  Clone ID: PAT_MRT3847_1912C.1.pep
KKNFCGLGGVHPMVFRAVQRHFLWGQCSPQATIRRAGFLFRKGNLFIKNTPCCLVAQKILVPPLEKKPG

SEQ ID NO: 196130 - protein, 57 aa, Glycine max
  Clone ID: PAT_MRT3847_19130C.1.pep
KMYMEMEQINHHMCRINKLGLISSCIFSGMLQPLVFCQPIISSTIYDFPFSSSYALK

SEQ ID NO: 196131 - protein, 71 aa, Glycine max
  Clone ID: PAT_MRT3847_19131C.1.pep
MDQVGRKESEYQIKGGGDNEDSMSMSVACGVINTVDWRGRPSNPNVHGGTRASAFVLGLQACEIMAIAAVG

SEQ ID NO: 196132 - protein, 62 aa, Glycine max
  Clone ID: PAT_MRT3847_19132C.1.pep
LGLATVSLISTSMLSPLIAFWSQWNHTHTRWSLFGGLMPSGASMFRCEVCSFYAHCVGTSDH

SEQ ID NO: 196133 - protein, 169 aa, Glycine max
  unsure (1)..(169): unsure at all Xaa locations
  Clone ID: PAT_MRT3847_19133C.1.pep
TNGYNAARTLCNCLLFLTETDFTQTFNHTNTGXTMELLASTLLIFMQMHRSDYTDMLLRIMLQIDDDHTLAHLDNAWLNXTVAGLHIHDADLILRDMSQRYQCTSXLLDDTAVCCMHMGNYYETATLSVDAFNTDAIDPHTLAIVGGCCLPLICSSFTSCSFMNSLTLS

SEQ ID NO: 196134 - protein, 137 aa, Glycine max
  unsure (1)..(137): unsure at all Xaa locations
  Clone ID: PAT_MRT3847_19134C.1.pep
LAGSTHAPFRTCAQPAATVGAAGSTGMSAVWPENRSFTRPGDSDIGAKRSPINDMCAYGRNPGISRSXVFRATMPQSITQXTVWNQMATVRTPLNFESSKQSCXQNSIDLLRGGMIADKTGDRITLIQXNSPISSLD

SEQ ID NO: 196135 - protein, 71 aa, Glycine max
  Clone ID: PAT_MRT3847_19135C.1.pep
KGWGLAFQACGEQLLVVGGQRGPKGEAIVLRSRGPKAGVPHGPLDWPVLGVKEPVGGFGDKWAVLGCLNDF

SEQ ID NO: 196136 - protein, 153 aa, Glycine max
  Clone ID: PAT_MRT3847_19136C.1.pep
GRENYLKAVIKETFRLHPPITILAPRESTQNTKVMGYDIAAGTQVMVNAWAIARDPSYWDQPEEFQPERFLNSSIDVKGHDFQLLPFGAGRRACPGLTFSMVVVELVIANLVHQFNWAIPKGVVGDQTMDITETTGLSIHRKFPLIAIASPHA

SEQ ID NO: 196137 - protein, 73 aa, Glycine max
  Clone ID: PAT_MRT3847_19137C.1.pep
NQLAPSPFGPLIAPPPKKKKGESPLAKITCGSAKKTVEQVHGLMSQVFKALLFNPVPQANKTCPKAFGPEPMI

SEQ ID NO: 196138 - protein, 160 aa, Glycine max
  Clone ID: PAT_MRT3847_19138C.1.pep
MPHSFGLRSRTRHMFAVPFGEHGPTHLSTYMINFKLGDIVDIKGSGKVHKGMPHKYYHGKTGRVWNVTPRAVGVEVNKQVRNRIIRKRIHVRVEHIKKSTCQQDFINRRKENDKKRREAAQKKQSVSLKRQPATPAAGKELKVDLSKVELVKPIRFELTY

SEQ ID NO: 196139 - protein, 92 aa, Glycine max
  unsure (1)..(92): unsure at all Xaa locations
  Clone ID: PAT_MRT3847_19139C.1.pep
GSTHITXEXVKKEIGDLLTEYVDSGDXLEACRXIRXXGVSFFHHEVXKRALIXAMEXRSAXPLMXKLLKEAAXEXLVSPSXXXKGFSRLAEX

SEQ ID NO: 196140 - protein, 310 aa, Glycine max
  Clone ID: PAT_MRT3847_1913C.1.pep
MASLSLSLSTPTTPTSLSFTSSSIFFSSHQFHTHNNSFKSNSFPVLPSKKPLSISCKASPPLPVLNFSGERVGESFLDLRSAPPDTARAVVHRAVVTDLQNKRRGTASTLTRGEVRGGGRKPFPQKKTGRARRGSNRTPLRPGGGVIFGPKPRDWSIKINRKEKRLAISTAVASAAASAVVVEDFAAEFAEKPKTKEFIAAMKRWGLDPKEKAMFLMTEVPENVRLSSRNIGTLKMHTPRTLNLYDILDADKLVLTQGAVDYLNQRYGGDYQGSDDEDEEEEEEGYEEGEEEGVVDGEEGPDAGDSDVVN

SEQ ID NO: 196141 - protein, 109 aa, Glycine max
  Clone ID: PAT_MRT3847_19140C.1.pep
QKISPLEAKEKILMSSGCLKFTSVSTTIVFISTTKHILLFKKLLNLNLTNYSTIIKSNSSHTLHKNHLYSFILPHMTPMYRYSSVATYTVSMPSQKLEFIGAILHEWLL

SEQ ID NO: 196142 - protein, 57 aa, Glycine max
  Clone ID: PAT_MRT3847_19141C.1.pep
ATTHSEAKLYGTAVGIFTRLCLYLYLSDATFSSSTYIFLFSFLRFIAPFCRLLAAVK

SEQ ID NO: 196143 - protein, 428 aa, Glycine max
  Clone ID: PAT_MRT3847_19142C.1.pep
MERVIGGKFKIGRKIGSGSFGEIYIASNMDTSEIVAIKMESKKTKHPQLLYEAKLYSILQGESGIPSMKWCGTDGDNNVLVIDLLGRSLEDFFVYCGRKFSLKTVLMLADQMLTRIECMHSKGFLHRDIKPDNFLMGLGRKSNQVYIIDFGLAKRYRDPNTNKHIPYRENKSLTGTARYASCNTHMGIEQSCRDDLESLGYVLMYFLRGSLPWQGLKAATKKEKYDNICEKKLSTPIGMLCKSYPAEFATYFHYCQSLTFDQHPDYGYLKRLFRDLFKREGYDSDYIFDWTILKYQQAQQTKKQNQSSPSTAVPSSLEPVVMEKHKGVNDSAHVTVTKMLANLERPSARARVQPKPSNVQNLDAKNHTEKHGVNNSPSTSSAIPKSSTENVSKPERPTGTSNLGRVFGSNARVSSSWIPSLRRISSAK

SEQ ID NO: 196144 - protein, 47 aa, Glycine max
  Clone ID: PAT_MRT3847_19143C.1.pep
KVIFTEKSTIFKKVTKNHDNKQPSLYHKGSQSKFLKPLDNHLKNVDN

SEQ ID NO: 196145 - protein, 270 aa, Glycine max
  unsure (1)..(270): unsure at all Xaa locations
  Clone ID: PAT_MRT3847_19144C.1.pep
MVTPEKSLSTALNARTIGSGNETIVLCHGFGTDQSIWXDKIIPLLAENYTLVLFDWPFSGAVTDKSLYDHAKYTSFEPYADDLITIIDEMDLKCVTFVGHSMSAMIGCIASTKKPELFKRLILVTASPRYINTDDYEGGFESSDIEQLVSTIESQYENWISIYAPIAVDPNDVASVDKFHNCLKSMGAEVAISLAKTVFYSDYRDMLEKVQIPCTIIQSSNDMAVPLNIGHYLEEXIXXXSTLEIIDMIGHFPHLTAHLKLVEVLKGVLR

SEQ ID NO: 196146 - protein, 114 aa, Glycine max
  Clone ID: PAT_MRT3847_19145C.1.pep
SYGGASTLLLNLCMAFPGMQKKLKGRYDMKDKRGITHMGRGWGGGVGPIHNRALYKYGGPTCRGSKPHGMGGLGDPLFFLPNNSKKKTDPTNLQFERERKNNCGNNETIYPLKP

SEQ ID NO: 196147 - protein, 101 aa, Glycine max
  Clone ID: PAT_MRT3847_19146C.1.pep
KKRLHRPARHFFFLFHFHFSVLLFFIHGFPSAPLPTALPKPAATTTTTTTTTTAATNQKLQAINLIILSIFYLFIEIPNHFPSFPPFILPTLFDILFIFTI

SEQ ID NO: 196148 - protein, 76 aa, Glycine max
  Clone ID: PAT_MRT3847_19147C.1.pep
KEEECIHVSTMPKAIGPINQGPSNNTDVYSMHPFPHNSDIAILYAKHQTTSLSKKTTALKARDPDSKQLTIQEYET

SEQ ID NO: 196149 - protein, 86 aa, Glycine max
  Clone ID: PAT_MRT3847_19148C.1.pep
KVQKHRNSDDDERRKLLQNLRGRVEKLSKLCKVSANDEEDSESEEGIHDNGVTNHLIGGRNEVPQNKYGVFLPRQGAQPGVKNTVR

SEQ ID NO: 196150 - protein, 110 aa, Glycine max
  Clone ID: PAT_MRT3847_19149C.1.pep
LHTNISLSLSLWHGCQTQSPRHTNTTHDRPTLNATTTNTYYCQPARTLTRHSQRDPAPAHQPQLYHAKPQPTALPDSHNRIQHHTRRPQTQEHRTTTQSAHIPDPKQGTH

SEQ ID NO: 196151 - protein, 70 aa, Glycine max
  Clone ID: PAT_MRT3847_1914C.1.pep
AQKSEAYFMRYRGQFHIRREGWTDYRARIGLINLDKNKYGTPIYRFVGGFSNKDIVAQKISANIAGDLDL

SEQ ID NO: 196152 - protein, 163 aa, Glycine max
  Clone ID: PAT_MRT3847_19150C.1.pep
LDLTQPKIKGYNLFTLIDHFHSRGLYRSIFLSIMEGEESLQRFSPEVMIQDPNIGNANSLLPPVVLFHGTGDYSIPSDASKTFAEALKRVGVTAESILYEGKTHTDVFLQDPMRGGKDDMFEDLVAYIHSGDADARARDATAPPRRRLVPEFMLKLAHSVSPF

SEQ ID NO: 196153 - protein, 78 aa, Glycine max
  Clone ID: PAT_MRT3847_19151C.1.pep
CILKKLGAKFTPEMIGKGFKEAPFGKYPLQNGFIRKVKIFKAPKFDLGKLMGVHGDSPKNVGPKGESPFNKPLAKEPP

SEQ ID NO: 196154 - protein, 498 aa, Glycine max
  Clone ID: PAT_MRT3847_19152C.1.pep
RDPHGEENHEQDSKEMTDESNQREAEKEEHGKIQEETSSENQAQDGGKIEEEHREENYAGDNASSAVDNKSQDDTSDESSKTEEESDKKEKNEFESQKNGTETTEVADSTVTTTNSQGNENQTQSENDSQKSVTSESKWQQQEQNNPTKVEESGVETHTTEALENEDNSKVEDSNARSTTQKTEDSSSNSDASEEKAETHDSNATNGEDKNKDTSTNSAQDENTSNNYVQEGNVASSNNDNKDASQDVQLTSSDTSSEQKKDESLNLESNTDSAQNDNENSDQSNKNSDGSANDNKDASQSYTSSEQNKEGSSNSDNNASKSDTSSDQNNKEGSSNSDNNASQSDTSSDQNNKEGSSNSDNNASQSDTSSEQNNKEGSSNSDNSNDANQNGSNSNENANDNGNASHEAQNNADAGQGNNEATVESKASENEGGAQNETVESQKEEESAHSGGDSNSNLNDQGSSDHSITQEDKESRVDLGTLPQSNAENNNIEVTAAE

SEQ ID NO: 196155 - protein, 63 aa, Glycine max
  Clone ID: PAT_MRT3847_19153C.1.pep
QLNLVIITEFSYDNITRILPICAFSDFESHTTHFNQVQTMLNESFCFEQFCSWEPFCRLLAAV

SEQ ID NO: 196156 - protein, 73 aa, Glycine max
  Clone ID: PAT_MRT3847_19154C.1.pep
CSNMEWSSTNHPPEVFGIREWQSSSGKTDSDNEKSSVLGPACFGCLKDPSSISSASKERFCTMITCRTGLNKE

SEQ ID NO: 196157 - protein, 77 aa, Glycine max
  Clone ID: PAT_MRT3847_19155C.1.pep
VQECLGLWIQECWLRIEARDCHGLRMQQGLKLRAQWVTVLITSPKLILILMMMITPSGLHCSKISNQLDFVLSFLFW

SEQ ID NO: 196158 - protein, 36 aa, Glycine max
  Clone ID: PAT_MRT3847_19156C.1.pep
WICIDNINVSSCCYLPMLNCHTKWVMRSTEAIYMRL

SEQ ID NO: 196159 - protein, 55 aa, Glycine max
  Clone ID: PAT_MRT3847_19157C.1.pep
LRKNKHMNRIPATNSKELLVLWLCKFYENCSVPFKTFLLCKKRKKKHLSLIILEY

SEQ ID NO: 196160 - protein, 126 aa, Glycine max
  Clone ID: PAT_MRT3847_19158C.1.pep
MQKKKEKKMGLKNNMVVLKVCLVLLFLVGGTTSANLRLSKLGLLMKSDHHQHSNDDESSKPCCDQCACTKSNPPQCRCSDMRLNSCHSACKSCICALSYPAQCFCVDITDFCYEPCKPSEDDKENY

SEQ ID NO: 196161 - protein, 60 aa, Glycine max
  Clone ID: PAT_MRT3847_19159C.1.pep
LPRDPTRIAAHTHRTTKLLQMLVFFSFNHTLFQVTHILSPLNHFQSFATFWKMCIFVEIA

SEQ ID NO: 196162 - protein, 114 aa, Glycine max
  unsure (1)..(114): unsure at all Xaa locations
  Clone ID: PAT_MRT3847_1915C.1.pep
HARVRKLGIRLEYGCEKTTEGGXXXXXXXFXIXXXXSXGXRXGLPXXLSXXLSRXCXXVGPXDSXXXPXXGXPYXXAGMXXQMXXVXXXXXSXTNXXXXXLXXHXRQRLRCLMX

SEQ ID NO: 196163 - protein, 936 aa, Glycine max
  unsure (1)..(936): unsure at all Xaa locations
  Clone ID: PAT_MRT3847_19160C.1.pep
RDGLGSGLDGAGGTICSSRSNGVKVVEADGAPLVDTXASHAMIRLFRVVHPLYKGLLQRLLLNLCAHSETRTSLVKILMDLLMLDVRKPASYFSAVEPPYRLYGCQSNVMYSRPQSFDGVPPLLSRRILETLTYLARHHPFVAKILLQFRLHPPALREPDNAGVAPGKAVMVVEDEINAGYISIAMLLGLLKQPLYLRSIAHLEQLLNLLDVIIDSAGSKSSSCHKSQISTEAVVGTQFSAPEVXSDTAFRRSSALDNSRKQVKVLDLVENRNKECPEHKMYYNFRLGNYFXICSLLAQEGGRDFAYNLXSDVMKKHIGIAPIHCQLFVTHLAEAVRNLTSSAMNELRAFSEAMKALISTSSTDGAAILRVLQALSSLVTSLAEKENDGLTPALSEVWGINSALEPLWHELSCCISKIEAYSESASEFSTSSSTSVSKPSSVMPPLPAGSQNILPYIESFFXVVCEKLHPAQSGASNDTSVPVISDVEDASTSGTPLKTSGPAMKVDEKHAAFAKFSEKHRKLLNAFIRQNPGLLEKSLSLMLKTPRFIDFDNKRSHFRSKIKHQHDHHHSPLRISVRRAYVLEDSYNQLRMRSTQDLKGRLTVHFQGEEGIDAGGLTREWYQLLSRVIFDKGALLFTTVGNESALQPNPNSVYQTEHLSYYKFVFRLVGKALFNENLVDAFFTXDSTGTSIWYERTEVTDYELIPSGRNTKVTGENKLQYVDLDATYRIATASGQNLFCIREGFNQIIPRLLIDGIKNKELEILISVFPEMHFIDLTLLFELKGMRFLEGFNELIPRELISIFNDKELELLISGLPDIDLDDLRANTEYSGYSGASPVIQWFWEVVQGLSKEDKARLLQFVTGTSKVPLEGFSALQGISGSQKFQIHKAYGSPDHLPSAHTCFNQLDLPEYPSKQHLEERLLLAIHEASEGFGFG

SEQ ID NO: 196164 - protein, 173 aa, Glycine max
  Clone ID: PAT_MRT3847_19161C.1.pep
MASPTLSLWPQKPTIVLFLICVSFSYSVEEAITSSKKLDQPVFPPPAYTEIKCASCPCGDTCGEQLPPPPPPSPPPPCQSPPPLLPSPPPPPPQSPPPPKFPSCPQNCNPLPPPPPPRFVYVPVPGVPKPYTWVYYYSAAENRGVGFLVLAGLGGLSMATLLLDDIMKLKLYF

SEQ ID NO: 196165 - protein, 53 aa, Glycine max
  Clone ID: PAT_MRT3847_19162C.1.pep
ILKLSDTSRRVFLEDLLRKQNPKPPSLLKITLCLYTCPLLTSQTPLPSFVWAP

SEQ ID NO: 196166 - protein, 162 aa, Glycine max
  Clone ID: PAT_MRT3847_19163C.1.pep
EGDEEKYNGRNPGNNLKRKESGGGKSALDEMMREEEKKKEKINRKDYWLHEGIVVKVMSKVLAEKGYYKQKGVVRKVIDKYVGEIEMLESKHVLRVDQAELETVIPQVGGRVKIVNGAYRGSIAKLLGVDTDNFCAKVQIEKGAYDGRVLKSVEYEDICKVA

SEQ ID NO: 196167 - protein, 91 aa, Glycine max
  unsure (1)..(91): unsure at all Xaa locations
  Clone ID: PAT_MRT3847_19164C.1.pep
ARNSARAVDEANLGXXXXVXXXXGXXXXXXXXTXECKXXXGANGXSDGKLXVRYXTKXDXQPNPDXLKIGXVKSXALXXXVEAYXXANXHY

SEQ ID NO: 196168 - protein, 109 aa, Glycine max
  unsure (1)..(109): unsure at all Xaa locations
  Clone ID: PAT_MRT3847_19165C.1.pep
IVVKVMNKVLXKGSHNQKGVVRKVIVKYVGEIEMLESKHVLRVDQAKLETVIPQVGGRVKIVNGAYRGSIAKLLGVDTNNFCAKGHIEKGVYDGRVLKAVEYEALCKVA

SEQ ID NO: 196169 - protein, 64 aa, Glycine max
  Clone ID: PAT_MRT3847_19166C.1.pep
FFFFFFFFFFFFGKHKLGYWVPFFWVKNKNGHFFVKNHTFFLKTIGHLLVKSFPMKINCGNGLS

SEQ ID NO: 196170 - protein, 252 aa, Glycine max
  unsure (1)..(252): unsure at all Xaa locations
  Clone ID: PAT_MRT3847_19167C.1.pep
CHKLAAKVGSVVGQIVEERKRDGGFVGKNDFLXTLLSLPKEERLADSDLVAILWEMVFRGTDTVAILLEWVMARMVLHQDLQKKAREEIDTCVGQNSHVRDSDIANLPYLQAIVKEVLRLHPPSPLLSWARLAIHDVHADKVLVPAGTTASVNMWAISHDSSIWEDPWAFKPERFLKEDVSIMGSDLRLAXPFGAGRRVCPGRALGLATAHLWLAQLLRHFIWLPAQTVDLSECLRLSMEMKTPLRCLVVRR

SEQ ID NO: 196171 - protein, 44 aa, Glycine max
  Clone ID: PAT_MRT3847_19168C.1.pep
GLHVRSPSLSASILNLNERGTAYSVYLPVASGVERHSILVSSFF

SEQ ID NO: 196172 - protein, 47 aa, Glycine max
  Clone ID: PAT_MRT3847_19169C.1.pep
KAHLSMKNTKSLLRNPLLNFSTRRTLGIGIINIFYMTPFACLTGTST

SEQ ID NO: 196173 - protein, 70 aa, Glycine max
  Clone ID: PAT_MRT3847_1916C.1.pep
NVLLPLILLIIRSIKFCLKLLFPVLVNSINVNLNLLQLILYLSFFFSFLYYNFNHNSLSSDKHMMILLLV

SEQ ID NO: 196174 - protein, 98 aa, Glycine max
  unsure (1)..(98): unsure at all Xaa locations
  Clone ID: PAT_MRT3847_19170C.1.pep
GIFTYEDETTYPGAPATLDSALCTDAYNDLKNAVEAVWSGENLFGNXRPGTIVKITVLEDGKNVWVFHKIESVDEADLVYRYNGAGGSMLSDTMVNIT

SEQ ID NO: 196175 - protein, 78 aa, Glycine max
  Clone ID: PAT_MRT3847_19171C.1.pep
HTLLTMFLLYMSSVVRRQYDVILPPSFEFLNCVKKCFYLDLQRMLSWFNAVQTQSYITWFSDSQEALLMLLSRGVLNR

SEQ ID NO: 196176 - protein, 109 aa, Glycine max
  Clone ID: PAT_MRT3847_19172C.1.pep
ILWNGLLGVFKFAKVAVGTAAKAAYLAVLSGKGVTPIIEAADSVAAVEKVGVVSLISPVSVGGVASLELLEVKEVPGFLASVPAVPVAVYYIFQVVNFFLPGVSVLSFL

SEQ ID NO: 196177 - protein, 52 aa, Glycine max
  Clone ID: PAT_MRT3847_19173C.1.pep
MPPDSSELDLDDPDIEFVEVDPTGRYGRYKEVLGKGAFKKVYPFIGSDFFYA

SEQ ID NO: 196178 - protein, 56 aa, Glycine max
  Clone ID: PAT_MRT3847_19174C.1.pep
KEWPKLHPREPSFILRGEDLTIPLIKRQYLRFVFALDKSSKQREERERVKGFPILN

SEQ ID NO: 196179 - protein, 33 aa, Glycine max
  Clone ID: PAT_MRT3847_19175C.1.pep
WSSRSGSCRRSATFKGEVGIYAERMHYSGIELP

SEQ ID NO: 196180 - protein, 39 aa, Glycine max
  Clone ID: PAT_MRT3847_19176C.1.pep
VGFPFTTEPLYLLDKWGMLCGLKSMLALLFSRTEVALVR

SEQ ID NO: 196181 - protein, 93 aa, Glycine max
  Clone ID: PAT_MRT3847_19177C.1.pep
AKFFGPFNYPSQTIYNGATGNPYAATYGTFPPQRPAGITQQPFFIPVDNLGPFGYRFSGFYSGQASYGLFGYRNGGPSTYPPPYSVDETPSRG

SEQ ID NO: 196182 - protein, 59 aa, Glycine max
  Clone ID: PAT_MRT3847_19178C.1.pep
SLHIAPFFCVVVAMCVVEESHFFCVVMKDDNADLIARLGYYEMVLWFIDHSEEKDSGFC

SEQ ID NO: 196183 - protein, 48 aa, Glycine max
  unsure (1)..(48): unsure at all Xaa locations
  Clone ID: PAT_MRT3847_19179C.1.pep
TIRXIALHLVIXTWEXHHXIXXXMFNFILGXGXRHIFRKLXRXASVXF

SEQ ID NO: 196184 - protein, 108 aa, Glycine max
  unsure (1)..(108): unsure at all Xaa locations
  Clone ID: PAT_MRT3847_1917C.1.pep
RXRSSDRFYFLHHHYCRGTGSVLREQSPPSFDKSQHREPSKIRSIVHYLTKATHGREVTHLLSLIGWPLINIGLTTLMVLDGKVKALLSLQGNRIRVAMIALNLMDIA

SEQ ID NO: 196185 - protein, 28 aa, Glycine max
  Clone ID: PAT_MRT3847_19180C.1.pep
RKSATYQFCDGLQEDKAIECSLTASIHV

SEQ ID NO: 196186 - protein, 45 aa, Glycine max
  Clone ID: PAT_MRT3847_19181C.1.pep
PIHSPINSIRKGKNESGLRYRVLEAIGPKVIRFCRINYNLYHNLF

SEQ ID NO: 196187 - protein, 66 aa, Glycine max
  Clone ID: PAT_MRT3847_19182C.1.pep
YQYTYSNSHNTPSTYELISHKVRHKHSYPLSGKLICLPISRVTGEFSDSLLSGFNYIITLNTLSYI

SEQ ID NO: 196188 - protein, 56 aa, Glycine max
  unsure (1)..(56): unsure at all Xaa locations
  Clone ID: PAT_MRT3847_19183C.1.pep
PSSXLIQMKPLFVVQPEGKTETALKKTNFIFLLINEEAQTPNLASKDYHMTSIWYW

SEQ ID NO: 196189 - protein, 240 aa, Glycine max
  unsure (1)..(240): unsure at all Xaa locations
  Clone ID: PAT_MRT3847_19184C.1.pep
MFPPSVDLLSLRLVSSMEAYHQLQLHGRNYFTGFSRFRWIPWQVLLCLRRADGNPFCWWLKKAQGIHNVEGDKNYKAYMNPDYFDAHLTPLGWQQVDNLRKHVRDSGLINTIDLVIASPLMRTLQTTVGVFGGEGYTDKTDVLPLMVANAGNSYRAAISSLNSPPIVTVELCREHLGVHPCDRRRSVSEYQFLFPAVDFSLLDSDEDTWWKANVRETKEELAARGXKFLNWYEFVIIRNF

SEQ ID NO: 196190 - protein, 25 aa, Glycine max
  Clone ID: PAT_MRT3847_19185C.1.pep
LNSLINQCILDDILYFQWIYYLIYL

SEQ ID NO: 196191 - protein, 218 aa, Glycine max
  unsure (1)..(218): unsure at all Xaa locations
  Clone ID: PAT_MRT3847_19186C.1.pep
ELTAPFVYFTSIINSATSYLLVRFFTGFSLATFVSTQFWMSSMFSAPVVGSANGLSGGWGNLGGGATQLIMPLVFSLIRDIGATKFTAWRIAFFVPAMFQMLTAFSILIFGQDMPDGNFRRLKKSGEKAKDDFSRVLYHGVTNYRGWILALTYGYCFGVELTIDNIIAEYFYDRFNLKLTLLGIXAARLGLAYIFSKAGGGIYLDVWRKRXMKGKLWA

SEQ ID NO: 196192 - protein, 52 aa, Glycine max
  unsure (1)..(52): unsure at all Xaa locations
  Clone ID: PAT_MRT3847_19187C.1.pep
NRIFSRYHXFFFSPAATLXFGTAELPXPXLLXFVILNCNRQALXDQKFPSVL

SEQ ID NO: 196193 - protein, 82 aa, Glycine max
  Clone ID: PAT_MRT3847_19188C.1.pep
EEEEKIKIKKNWNNKKIADAKAVASTGMDKAKTAPIVGAHKVKSVTSAGLKWVTNHYHKRTSKCNSHTHMRLGQFHIHSFGK

SEQ ID NO: 196194 - protein, 62 aa, Glycine max
  Clone ID: PAT_MRT3847_19189C.1.pep
NLLLWTFIIRYYSGCTHLGVDTHTTWMLDAHDLLTHMMILEIVVPEAAMNTLDMAHIALFNI

SEQ ID NO: 196195 - protein, 37 aa, Glycine max
  Clone ID: PAT_MRT3847_1918C.1.pep
PTRPLAGYCWMCTQNISRTVMYNGSVIITLVNKFALC

SEQ ID NO: 196196 - protein, 537 aa, Glycine max
  Clone ID: PAT_MRT3847_19190C.1.pep
HEDWCISRQLWWGHQIPAWYVTLEDDVLREFGAYNDHWVVAKNEEEAQKEASQRYNGKQFHLSQDPDVLDTWFSSGLFPLSVLGWPDDTEDLKTFYPTSVLETGHDILFFWVARMVMQGLKLGGDVPFTKIYLHPMVRDAHGRKMSKSLGNVIDPIEVINGISLEGLHKRLEAGNLDPRELATALEGQKKDFPNGIDECGADALRFALVSYTAQSDKINLDIQRVVGYRQWCNKLWNAVRFAMSKLGDDYIPPANLIPEVLPFSCQWILSVLNKTISKTVNSLESFDFSQATTAVYSWWQYQLCDVFIEVIKPYFTGNDPKFASKRRFAQDTLWFCLDNGLRLLHPFMPFVTEELWQRLPSPRECERAESIMICDYPSTVEGWNNERVENEMDIIESTVKSLRSLAKESRDRRPAFVLCRAPVVTEIINSHQLEIVTLANLSSLTVITERDAVPSGYADAVVNENLSVYLELQGTNSAEAEGKIKKIDELKKQIERLEKIMNAKGYEEKVLPNIREKNQEKLDSLKLLLGEMAGLTL

SEQ ID NO: 196197 - protein, 131 aa, Glycine max
  unsure (1)..(131): unsure at all Xaa locations
  Clone ID: PAT_MRT3847_19191C.1.pep
MVWGSVWRIVAYNMTDLHEKETMDTLDLXSPILGYGHSDEELVMDSIICFXIARRDTTYAALTWVFWLXSLHHKVEEEVDHEVMEDYACYTPGYDEVKDMGYTHSMVRESMKLTPAESHDTIEEGGDYSYP

SEQ ID NO: 196198 - protein, 52 aa, Glycine max
  Clone ID: PAT_MRT3847_19192C.1.pep
ATNYSTFRGSRLRAFSVVDQELTRPTKRVQNNVTNDVTTIQLLKSGLDFKIH

SEQ ID NO: 196199 - protein, 81 aa, Glycine max
  Clone ID: PAT_MRT3847_19193C.1.pep
VMTIAFEFAFESHMQEHVTSMARQYVRSIISSVQRVALALSPSHLSSHAGLRSPLGTPEAQTLAHWICNSYRFVKFTVFAY

SEQ ID NO: 196200 - protein, 44 aa, Glycine max
  Clone ID: PAT_MRT3847_19194C.1.pep
FNIDKIKILSCIYKGVSVIWWIIYNIILLSVYQYGVERGRGNGN

SEQ ID NO: 196201 - protein, 130 aa, Glycine max
  unsure (1)..(130): unsure at all Xaa locations
  Clone ID: PAT_MRT3847_19195C.1.pep
PRSGFSFVGVECPTDEKLPGGRNFGSALTRSVTIFAMVDNLXLRDKLLKLQRIGMKKRDKLSWQARVNPYSMEWTGXANKGLTKGNDILCRDCAKNDGLFTKRGLSKMGYMINSVRGGDEKVMRERTHLL

SEQ ID NO: 196202 - protein, 105 aa, Glycine max
  Clone ID: PAT_MRT3847_19196C.1.pep
TQNLHKKAVPKKQADMLSPNSFTFIPPNPIFFLLSAPINFPPSHESEQEFEPPKEEKKNPLQKKTHYSELPAVTNKPNQKQTRPRNKLQSFSLETKQKVTKLNRN

SEQ ID NO: 196203 - protein, 86 aa, Glycine max
  unsure (1)..(86): unsure at all Xaa locations
  Clone ID: PAT_MRT3847_19197C.1.pep
KHIYSSLIEIPEEGVRKVLSYXESSASCDIEALVHDRSDEPIGGTSFALLVEIGSHGEDTGSVEPCLITATRDALGSCTMAVHEPT

SEQ ID NO: 196204 - protein, 119 aa, Glycine max
  unsure (1)..(119): unsure at all Xaa locations
  Clone ID: PAT_MRT3847_19198C.1.pep
VEKAKGRKEEVVTXESTIYLHMRLHGCTFKKKAPKAIMEIMIFAQKAMGTNDVRVYVKLTNFVWRHXIRSVPRRIRVRIARMRNDYEYSDEELCSIVTGVEIPIDELTVLRTKGFDDED

SEQ ID NO: 196205 - protein, 77 aa, Glycine max
  Clone ID: PAT_MRT3847_19199C.1.pep
SSNLFLNRTIGDININIRRLFNTNYLSRSAHTVLSCILKYLIFNLCFTCEILIIEDINVIESLEIVILMSIMKDLKY

SEQ ID NO: 196206 - protein, 168 aa, Glycine max
  Clone ID: PAT_MRT3847_1919C.1.pep
MSCDIRFAKFQSSSNPILQVKTEGQMLVERENFKRMQIENNNSDFIGGIFEIIRTIKDPEHPYTLEQLDVVNVNDIQVQEKKGKMYATVYWKPSVPTCAFTIHIGLAILVKLERNFGSMNNSIKLKLLIKPGTHKQQKIIDKQLNDKERIIAAKENENLMSSIEGLIS

SEQ ID NO: 196207 - protein, 88 aa, Glycine max
  unsure (1)..(88): unsure at all Xaa locations
  Clone ID: PAT_MRT3847_191C.1.pep
SFIRTHPKLSRIFFSPPTSNLLSDSLSRXLLNSINHALNDRVTPXILDIINXLINVLQKGVHFLKYVNVIAHTRILFTIIVNPVTTPP

SEQ ID NO: 196208 - protein, 193 aa, Glycine max
  unsure (1)..(193): unsure at all Xaa locations
  Clone ID: PAT_MRT3847_19200C.1.pep
GNFEYPPLVFVHGSYHAAWCWAEHWLPFFXSSSGHDCYAISLLGQGESDSPPDSVAGTLQXTHARDVADFICRNIGSPPVLVGHSFGGLIIQYYISNLGSDELKEDLYPKLKGAVLVXSVPPSXVGLRYIFPIVTRSLAAKAFQTSLSLCRETFFSATMEDHEQKRYRAPFLYVWRQFSQPLWRIMLLEDIKS

SEQ ID NO: 196209 - protein, 65 aa, Glycine max
  Clone ID: PAT_MRT3847_19201C.1.pep
GLTIHYPLYILTLFPTFYSLIKVLFDHQILFGWIKDKKRLFYLLAVPNKPERGVGPKKKVKYLAG

SEQ ID NO: 196210 - protein, 59 aa, Glycine max
  Clone ID: PAT_MRT3847_19202C.1.pep
QRTVEGKLKASSMISTPAVTTFNRATDGMVAPFTCLNYIAGFPTRKTNYDYSSIAINNG

SEQ ID NO: 196211 - protein, 60 aa, Glycine max
  Clone ID: PAT_MRT3847_19203C.1.pep
NLFYLRINPTSSGPEIFALDKKNLVLFFQIIGPVLYYTFSPSYIPNIYNALIFNGLNTCC

SEQ ID NO: 196212 - protein, 37 aa, Glycine max
  Clone ID: PAT_MRT3847_19204C.1.pep
DIFYVLNLKILREILLLFEQWCLLDFGYGAGLTSHHP

SEQ ID NO: 196213 - protein, 42 aa, Glycine max
  Clone ID: PAT_MRT3847_19205C.1.pep
FHLSYTIARGGGSIRALCSHALRPLTSVYAYVKCYHFFRSVL

SEQ ID NO: 196214 - protein, 89 aa, Glycine max
  Clone ID: PAT_MRT3847_19206C.1.pep
SKMVPPGSSIPGRFPSEGCHVRIAVWKNFKGPLQRSWFFPMHFKEAWFNALLPMLSGKPGPRSQVHWVFKIIGHVEPFIVELWRSQHLM

SEQ ID NO: 196215 - protein, 175 aa, Glycine max
  Clone ID: PAT_MRT3847_19207C.1.pep
MAETAVDKSQSLAEEYYVKDKQTAVVEKPVEVKEVENPEEAASEEPVAEKTVEETTPVAPAVAQESSEVTPPPAEESTEEQSSGNVDENSGNEDVAEETPEIKLETAPADFRFPTTNQTRHCFTRYVEYHRCVAAKGEGAPECDKFAKYYRSLCPGEWIDRWNEQRENGTFPGPL

SEQ ID NO: 196216 - protein, 41 aa, Glycine max
  Clone ID: PAT_MRT3847_19208C.1.pep
VQPVISCQFFVSRPIVTSCQCRVSPPRFPSSHSFQIWSHSL

SEQ ID NO: 196217 - protein, 43 aa, Glycine max
  unsure (1)..(43): unsure at all Xaa locations
  Clone ID: PAT_MRT3847_19209C.1.pep
NXIRTEPXQSVLQSXXXRLIKPXGXXXIIGQRGTTRRHSXTTX

SEQ ID NO: 196218 - protein, 82 aa, Glycine max
  Clone ID: PAT_MRT3847_1920C.1.pep
PHPLVQVLHVPLPLLTPKAPSYLSGSILPGQPATFLARPSIHMIPASPIHSRPFRFHPVPRAVLYMILLTAPASAGPGPGPG

SEQ ID NO: 196219 - protein, 372 aa, Glycine max
  Clone ID: PAT_MRT3847_19210C.1.pep
MASLMSTILMQRSSSTSLAAGRLFSTTTATIIDSPSLAQRIRDLPKDLPGTNIKKHVSQLIGRTPLVYLNKVTEGCGAYVAVKQEMMQPTASIKDRPAYAMITDAEEKNLITPGKTTLIEPTSGNMGISMAFMAAMKGYKMVLTMPSYTSLERRVTMRVFGAELILTDPAKGMGGTVKKAYELLENTPNAHMLQQFSNPANTQVHFETTGPEIWEDTNGQVDIFVMGIGSGGTVSGVGQYLKSKNPNVKIYGVEPSESNVLNGGKPGPHHITGNGVGFKPDILDMDVMEKVLEVSSEDAVNMARVLALKEGLMVGISSGANTVAALRLAQLPENKGKLIVTVHPSFGERYLSSVLFQELRQEAENMQPVAVD

SEQ ID NO: 196220 - protein, 193 aa, Glycine max
  unsure (1)..(193): unsure at all Xaa locations
  Clone ID: PAT_MRT3847_19211C.1.pep
ISGFLSESLLTSHLGSLTMDESEDGRKETSXMKVVQTVSERTATPVLNGDIPDDICLKDSLNAARNATHAADRIYQVFRMQSFQRKQLALYEDDEFGLSDQQALSLLASKACRSGQGEGLANAAAIQIQTKFRGWTKRKEFLIIRQRIVKIQAHVRGHQVRKQYKPIIWSVGILQKVILRWRRTGSGLRGFRP

SEQ ID NO: 196221 - protein, 129 aa, Glycine max
  unsure (1)..(129): unsure at all Xaa locations
  Clone ID: PAT_MRT3847_19212C.1.pep
DFAGKTVLNQLNGWVRRTGAPVKGGTNMRRTVKRAPQRIRYGPDGPKNLGPXKRRFRXYLTGEFLGVYGWGIVGQXADPESFSRNWGLVVVKRNWXCLGAFGVTFPVFLXKNGVKFVGAYGSKVFYFIF

SEQ ID NO: 196222 - protein, 223 aa, Glycine max
  unsure (1)..(223): unsure at all Xaa locations
  Clone ID: PAT_MRT3847_19213C.1.pep
MAFPPPHGFTFNTTHEEDHHHLPPTSLNPFPSLPPQHFQGGASFMLKRSMSFSGIENKCDEVLHGDDELSDDGIFPCGGFTFNTTHEEEHGHYPPTDLGALLALPPQLLQGGALGLQPRQVAIWFQNRRXARWKTKHLEKEYEVLKKQFEAVKADNDVLKVENQKLQAELQAVKSRDWCEAGMMSHKKETEGSWSNGSDNSLEINLDHSRTLGLNSPISSQKG

SEQ ID NO: 196223 - protein, 83 aa, Glycine max
  Clone ID: PAT_MRT3847_19214C.1.pep
PQMRMPMIAMVKILKKASFMWARCPPLDQDHYWASFILTNPSVLIVIGSPSLKCLLEKSCFSLGVVATLFEPKRPWVVFPPVM

SEQ ID NO: 196224 - protein, 42 aa, Glycine max
  Clone ID: PAT_MRT3847_19215C.1.pep
SNLSLSVIPVTYVQAITKYGGPVHLCNNAEPSRGSYGTKNPR

SEQ ID NO: 196225 - protein, 145 aa, Glycine max
  Clone ID: PAT_MRT3847_19216C.1.pep
LAGRPQNEDLSLKVEAAYYSAGTLILSDASPSTMPSLLVLNRDSSTQSSPSGNLGTSTRSSRALRESVSSLPVEGRMLSVADVLPLPDTAATVQSLYSEIEFGGYESSMESCERVSGKLWARGDLATQHILPRRRIVVFSTMGMM

SEQ ID NO: 196226 - protein, 56 aa, Glycine max
  Clone ID: PAT_MRT3847_19217C.1.pep
PAQCCSVSWASGWLFDIASEVSIILVYLHNRSYRRVFTDQCSVSDQYAVTQLSQPR

SEQ ID NO: 196227 - protein, 229 aa, Glycine max
  unsure (1)..(229): unsure at all Xaa locations
  Clone ID: PAT_MRT3847_19218C.1.pep
MTHGIHGEKRWYALIVLCLGVLMIVLDSTIVNVALPSISTDLHFTETALVWVVNAYLLTFGGCLLLGGRLGDLYGQRRMFLAGLVVFTLASLACGLAQSQTMLIAARAVQGLGGAVVSAVSLSLIMNLFTEPGERARAMGVYGFVCAGGGSIGVLLGGLLTSSLSXRWIFLVNLPIGIAVYAMCAALLPRMRAPAGAARLDVAGAITVTGSLMLAVYGIVGGNEAGWLS

SEQ ID NO: 196228 - protein, 70 aa, Glycine max
  Clone ID: PAT_MRT3847_19219C.1.pep
RLGFESGLCAPHKKFSVSPFQTLIAPRGRCGQCGCSRQASVCMHMRAHGENPYRRASHHRLFVLLGSQNS

SEQ ID NO: 196229 - protein, 80 aa, Glycine max
  Clone ID: PAT_MRT3847_1921C.1.pep
LTLHSPEYPPVVFFILSNYITIILLFLRVNSLLGRSLTALIKLYRVQCSFHLPIFCSSVLWILSDIMQQVKQITSPKNNM

SEQ ID NO: 196230 - protein, 76 aa, Glycine max
  Clone ID: PAT_MRT3847_19220C.1.pep
HIMDLTGALCGFQLVLTYLDGRQLLIELHPGDVGQPDPYLAMPDEGMPMYQSSFMRGKLYIHYTVHVPDSLNTDQA

SEQ ID NO: 196231 - protein, 58 aa, Glycine max
  Clone ID: PAT_MRT3847_19221C.1.pep
VNGQRDLFLSFHPLGFQNCKVERAFLYLPSKRKPNWEKDFYFLISWKIIKEGGLFPRL

SEQ ID NO: 196232 - protein, 70 aa, Glycine max
  Clone ID: PAT_MRT3847_19222C.1.pep
FYSIYFETLLFTKFIILVRDSLHMSCRTLMFSYSFHTHPWSKTTPKNAEFCLATTACPTLIISRNGSLGY

SEQ ID NO: 196233 - protein, 93 aa, Glycine max
  unsure (1)..(93): unsure at all Xaa locations
  Clone ID: PAT_MRT3847_19223C.1.pep
VQLEVNIPAQATRKLQGDKVKESXVDLFEVNVVVXYMGIINISQEYTVKKKLKHACKSLQYDPMIISVVEPKTYGKRFINFMEKKVFPKPKTS

SEQ ID NO: 196234 - protein, 69 aa, Glycine max
  Clone ID: PAT_MRT3847_19224C.1.pep
HASTTSKLLMRWFNVVHASVPESRVCQKCGRERLRKTAPIIEDTVHNRNRSVHREATKVSAERVFLHCS

SEQ ID NO: 196235 - protein, 84 aa, Glycine max
  Clone ID: PAT_MRT3847_19225C.1.pep
HAYEGFKITVTDPDTALRTITREAKETGPDCQEVTKVEPAESEEVKDSFVNNIKRPMTPQPLKIKAYIEMKCLQFKRVLPIKEA

SEQ ID NO: 196236 - protein, 91 aa, Glycine max
  unsure (1)..(91): unsure at all Xaa locations
  Clone ID: PAT_MRT3847_19226C.1.pep
KRTWLLAPEDRSGVAYAHFSVEIPVINVAGPDNVDGHKIEMPVKNEEACDNGALFQEADDGVDQQLVVXMTRLAXEFFALAPGEKLSHDMG

SEQ ID NO: 196237 - protein, 63 aa, Glycine max
  Clone ID: PAT_MRT3847_19227C.1.pep
MARDRKNQNLVIGRTGYLGKFIGETNGQACQPTFLLVKESNLFKPGKSTLNGHFKRPGGKSGL

SEQ ID NO: 196238 - protein, 88 aa, Glycine max
  Clone ID: PAT_MRT3847_1922C.1.pep
GSRRIGKGLTFNLLSLTHTLSLRRSSFVISRRFFTVLASVELLPRRFPADRYDVSCDGSQTIHTKPRPLNFRASLVPRDAVRRRARLL

SEQ ID NO: 196239 - protein, 73 aa, Glycine max
  unsure (1)..(73): unsure at all Xaa locations
  Clone ID: PAT_MRT3847_19230C.1.pep
TLNDLMNIARVPPAGKQVDLHPRWQQXAKLHAFCESKGVHLSGYSPLCLPGVFKSDILKNPVVIEIAEKLWKT

SEQ ID NO: 196240 - protein, 80 aa, Glycine max
  Clone ID: PAT_MRT3847_19231C.1.pep
YSFSELAYTIKSNHKFYLYSFLLFSFLNIIFIAPFLSYLFLYNYHFTSHLPHHFIISTFIIKFYYLLHLPQPLFIKYLFQ

SEQ ID NO: 196241 - protein, 39 aa, Glycine max
  Clone ID: PAT_MRT3847_19232C.1.pep
FFFFFFFFFFFFFFFFFFFFFFFFFSPLHMFLFIIDFIG

SEQ ID NO: 196242 - protein, 230 aa, Glycine max
  Clone ID: PAT_MRT3847_19233C.1.pep
CDSHSPLHSRSLYSFFLYTSNSQIASRNHDVTLPAHPSVGTGQLCLRCAPRTAAIGAVRYGYLPKWPTIALRLPPPAKCGGAWERSGEKKVVAPRPRSVGRFAAESGRESGNRLAEVMLAAAVTVVMGAGNRVLYKLALVPLRNYPFFLAQLATFGYLILLFFFCSNVFASFFVLVELMNRRCLTLVLISVGVNNFNFDVLNSFFFLKNRIYFLKLKKTSVKQLIQCLFF

SEQ ID NO: 196243 - protein, 33 aa, Glycine max
  Clone ID: PAT_MRT3847_19234C.1.pep
GYSGQIKLLYTIKSVFNAIIYRELELKSIYLNT

SEQ ID NO: 196244 - protein, 140 aa, Glycine max
  unsure (1)..(140): unsure at all Xaa locations
  Clone ID: PAT_MRT3847_19235C.1.pep
LRRIRVHSVRIVGGAMMLSGRSLLSLVDRQVNRRARLICMLSRAVSKECFSVXCALRASCALRXCLLEASRRLKGTDSLTRLTQCVSDSRSFSSAASSPPTPGPVPGGVGARFNRHPLALFWWAVVVPRPGPGLRASPGS

SEQ ID NO: 196245 - protein, 91 aa, Glycine max
  Clone ID: PAT_MRT3847_19236C.1.pep
HLCNVLISRYFVLTASDLEEWYRNPESFHHEQDMVQWTEKLRPCAEALYIVLFETNSQLLGPVVVSLLQESMNNCPTPVTEITPALLLKDA

SEQ ID NO: 196246 - protein, 551 aa, Glycine max
  unsure (1)..(551): unsure at all Xaa locations
  Clone ID: PAT_MRT3847_19237C.1.pep
MLMMTEGNNSSCGSGSGVQHHTTSSSSSPAQSRQQRQKVEVYNEILRRLKDSGNEEAMQPGFHDQLWAHFNRLPTRYALDVNVERAADVLMHKRLLHLAHDPANRPSIEVRLVQVHPTSNGNSADTFESDDPGIESGQSXFKVLKQTEYTHMHEITISTDDKPKLLSQLTHASAALLSEIGLNIQEAHAFSTTDGFSLDVFVVEGWPHEETEKLKAALERGVLKKIERQVKSSPQSVSSVDKPDQAKMKSELDYLTIPTDGTDVWEIDPKHLKYGTQIASGSYGELFKGVYCSQEVAIKVLKADHVNSELQREFAQEVYIMRKVRHKNVVQFIGACTKSPRLCIVTEFMSGGSVYDYLHKQKGFFKFPTLLKVAIDVSKGMNYLHQHNIIHRDLKAANLLMDENCTVKVADFGVARVKAQSGVMTAETGTYRWMAPEVIEHKPYDHKADVFSFGIVLWELLTGKLPYEYLTPLQAAIGVVQKGLRPTIPKNTHPKFVELLERSWQQDPTLRPDFSEIIEILQQLAKEVGDGEERHKDKSGGLLSVLRRGHH

SEQ ID NO: 196247 - protein, 70 aa, Glycine max
  Clone ID: PAT_MRT3847_19238C.1.pep
FSLLIRDHETLQRSFPLCQRLWPKCTRGVMLDNPLFRKGMKTKNSTFLKWHGRWTSKRLKLMKVPLEGRT

SEQ ID NO: 196248 - protein, 40 aa, Glycine max
  Clone ID: PAT_MRT3847_19239C.1.pep
GEDELIPPQSSLYTLQGRKKTVNIKGCTMVSLNYNYNINY

SEQ ID NO: 196249 - protein, 43 aa, Glycine max
  Clone ID: PAT_MRT3847_1923C.1.pep
YYVKAPAVVQVCMQAGAQIPEEYKPMMRLDIIIPDPEEARMIA

SEQ ID NO: 196250 - protein, 191 aa, Glycine max
  unsure (1)..(191): unsure at all Xaa locations
  Clone ID: PAT_MRT3847_19240C.1.pep
AEGLFKFPPLLKVAIDVSKGMNYLHQHNIXHRDLKAANLLMDENCTVKVADFGVARVKAQSGVMTAETGTYRWMAPEVIEHKPYDHKADVFSFGIVLWELLTGKLPYEYLTPLQAAIGVVQKGLRPTIPKNTHPKYVELLERSWQQDPTLRPDFSEIIEILQQLAKEVGDGEERHKDKYGGLLSVLRRGHH

SEQ ID NO: 196251 - protein, 152 aa, Glycine max
  Clone ID: PAT_MRT3847_19241C.1.pep
HNIAHVWLNTVNSINWAYRTESSTFVPLQTVKVADFGVARVKAQSGVMTAETGTYRWMAPEVIEHKPYDHKADVFSFGIVLWELLTGKLPYEYLTPLQAAIGVVQKGLRPTIPKNTHPKYVELLERSWQQDPTLRPDFSEIIEILQQLAKEV

SEQ ID NO: 196252 - protein, 257 aa, Glycine max
  unsure (1)..(257): unsure at all Xaa locations
  Clone ID: PAT_MRT3847_19242C.1.pep
GIQRQLSSSSSWVHHQGTVSSSSPAHSPAQRRQLWLYEEIFNEMLGRLKDSGHQPGMQPGFHAHFKAHSNRLQRRYALDVNVERAADVLMHKRLLHLAHDPANRPSIEVRLVQVYPITDGNSADTFESDDPGIESGQSSSKYSSRQSIHPPPAFGSSPNLEALALEANNSEEDIEEEQSVHANVQYSRPMHEITISTDDKPKLLSQLTALLAEIGLNIQEAHAFSTTDGFSLNVFXVEGWPYEETEKLKAALESEVL

SEQ ID NO: 196253 - protein, 732 aa, Glycine max
  unsure (1)..(732): unsure at all Xaa locations
  Clone ID: PAT_MRT3847_19243C.1.pep
ASLALLRRKLIITRTTLSYSHVRARAFSAGNNKHRIEKILVANRGEIACRITRTARRLGIQTVAVYSDADRDSLHVATADEAIRIGPPPARLSYLNGASIVDAAIRSGAQAIHPGYGFLSESADFAKLCEESGLTFIGPPASARMPNXRKSISCWLEIRLGAAACSLYGILCHHSESIIKLSVEWDLSGIMNMVXGSSKIMKLTITYHHXGRYLIETGENGSPVLEVKAIYVKDNYFRVEAGGVINDVNVAVYSKDQIRHIHIWQGSCHHYFREKLGLKLSEVEESQHKANVETSANPQGTVVAPMAGLGDXGSDEFYFMEVKTRLLVEHPVTEMIVGQDLVEWQILVANGEALPLSQSQVPLSGHAFEARIYAENVQKGFLPATGVLHHYHVPVSSAVRVETGVKEGDKVSMHYDPMIAKLVVWGENRAAALVKLKDSLSKFQVAGLPTNVNFLQKLANHRAFANGNVETHFIDNYKEDLFVDANNSVSVKEAYEAARLNASLVAACLIEKEHFILARNPPGGSSLLPIWYSSPPFRIHHQAKRRMELEWDNEYGSGSSKIMKLTITYQPDGRYLIETEQNGSPVLEVKSTYVKDNYFRVEAAGVINDVNVAVYSKDQIRHIHIWQGSCHHYFREKLGLELSEDEESQHKPKVETSANPQGTVVAPMAGLVVKVLVENKTRVEEGQPVLVLEAMKMEHVVKAPSSGYVHGLQLMVGEQVSDGSVLFSVKDQ

SEQ ID NO: 196254 - protein, 47 aa, Glycine max
  Clone ID: PAT_MRT3847_19244C.1.pep
GRVGKKNLKNSKKKKKKKKKKKKKKKKKKKKKKKKKKKKKKKGGGPF

SEQ ID NO: 196255 - protein, 214 aa, Glycine max
  Clone ID: PAT_MRT3847_19245C.1.pep
PTRPGLRQGDPLSPLLFNIVAEGLNGLLSKAIEKRLYRGFLVGTNKVEISLLQYADDTIFFGEASMENVRTIKAILRAFELASGLKINFAKSSCGAFGVSDLWISDAANYLHCSLMSFPFNYLGLPIGANPRRCQTWDPIITKCERKLVRWKQRHLSFGGRVTLINSVLTSIPIYFFSFFRVPKKVVNKLTRLQRNFLWGGVSEQNKIAWIRWE

SEQ ID NO: 196256 - protein, 65 aa, Glycine max
  unsure (1)..(65): unsure at all Xaa locations
  Clone ID: PAT_MRT3847_19246C.1.pep
TPKMSDGIAIFFPLRTPICLNPGSTLEIHFWRGCGSTKVWXEWGVPLPGWSPMHTSNGRSNWVGF

SEQ ID NO: 196257 - protein, 105 aa, Glycine max
  Clone ID: PAT_MRT3847_19247C.1.pep
KCPRTVRFTLIYSLPQYECFGLAFSTPVSHVNRGPGGVINLPHSEQDTETHPRDQHFVHDLGLGIRILLGLWTIYNTATCPYKRGICSRAKPNRTFLLAQRFRDC

SEQ ID NO: 196258 - protein, 80 aa, Glycine max
  unsure (1)..(80): unsure at all Xaa locations
  Clone ID: PAT_MRT3847_19248C.1.pep
FQATVGFSKPNKLVIPQFLEWYSLGFPKNLXILLDWVCLHFPIEVRKEAIDCLQKREKKPLSQLVQIMPYEFSFRCLLPQ

SEQ ID NO: 196259 - protein, 100 aa, Glycine max
  Clone ID: PAT_MRT3847_19249C.1.pep
ISPHAPVAASIKKGELRERPHSLREENRKGRLLRLSNDSHAYAWRGGELFRGTVPFQRARLFGEARAASDPDEALFAPVDKTDRVPPLRTYQGPPRALGV

SEQ ID NO: 196260 - protein, 89 aa, Glycine max
  Clone ID: PAT_MRT3847_1924C.1.pep
KLTSIKLIILIIIKTHLLTFHNPTPNTLLIQFFKKLPQYNPHSNCKTLYLPPPHITKHLPLSYTLTILSYNLSYSHIIILKYFISFFLN

SEQ ID NO: 196261 - protein, 56 aa, Glycine max
  Clone ID: PAT_MRT3847_19250C.1.pep
LTTEIRRLAFRMCFRPRFCVHGCHRFLETRKCPPRLPRNCTQRSTAHCLLEPILLD

SEQ ID NO: 196262 - protein, 62 aa, Glycine max
  Clone ID: PAT_MRT3847_19251C.1.pep
LRIRLRAREDQEHIGHWVNGAGYACASDKRSSPLDHNTPEPRRPVDLSASAFPSVAVLHTYH

SEQ ID NO: 196263 - protein, 51 aa, Glycine max
  Clone ID: PAT_MRT3847_19252C.1.pep
SVQKLNTLLIKNYHLIIYHQIINIFIIFIKTNHNITYLTFNTQPRFNLLSS

SEQ ID NO: 196264 - protein, 233 aa, Glycine max
  Clone ID: PAT_MRT3847_19253C.1.pep
GKSGIRLDWIRRLKIALGAARGLDYLHELANPPIIHRDIKSTNILLDERLIAKVSDFGLSKPLGEGAKGYITTQVKGTMGYLDPEYYMTQQLTEKSDVYSFGVLLLELITARRPIERGKYIVKVVKGAIDKTKGFYGLEEILDPTIDLGTALSGFEKFVDIAMQCVEESSFDRPTMNYVVKEIENMLQLAGSSPIFSASASVSTSSSYNNATKISLHPYNNEYFDSSVVLPRA

SEQ ID NO: 196265 - protein, 60 aa, Glycine max
  Clone ID: PAT_MRT3847_19254C.1.pep
LYTYTNNYVENLIHVNLHIPATTSTIILLTKDSIMTTSNTSSERKTHLSSYTYNTGHSSP

SEQ ID NO: 196266 - protein, 70 aa, Glycine max
  unsure (1)..(70): unsure at all Xaa locations
  Clone ID: PAT_MRT3847_19255C.1.pep
MASLSSLXLLLAALXLSXQVLANYENXPVYKPPTEKPPVYKXPVEKPPXYKPPXEKXPVXKXXXEASAWG

SEQ ID NO: 196267 - protein, 30 aa, Glycine max
  Clone ID: PAT_MRT3847_19256C.1.pep
RPPLSLLKGKSLIAFIPDYPKTRKPIQLQV

SEQ ID NO: 196268 - protein, 61 aa, Glycine max
  Clone ID: PAT_MRT3847_19257C.1.pep
PVNDHGCCAICWAFSAIGSVYRIHHILTRDLTALSQHQLVDCGTPYYQRCSRRLMDYASAS

SEQ ID NO: 196269 - protein, 97 aa, Glycine max
  unsure (1)..(97): unsure at all Xaa locations
  Clone ID: PAT_MRT3847_19258C.1.pep
XTYLXXXXXXXXXFXSXNLXFXXSXXFXXXPFFXXITFSSXXHLXXSPNPQISXTLQXFINNHNXHLIXXXKQLINXSNSNXIHXSSILIPTYSSPS

SEQ ID NO: 196270 - protein, 230 aa, Glycine max
  Clone ID: PAT_MRT3847_19259C.1.pep
MAPRDINRSNVVVVAGARAAALLSDQFFLGLRITNSSKKLTLMAPRDINRSNVVVAGGSNPTRKEIRYRGVRKRPWGRYAAEIRDPGKKTRVWLGTFDTAEEAARAYDAAAREFRGAKAKTNFPTHAELTHAAARSPSQSSTLDSSSPPTPPLDLTLAAPLAAGGALVFPVARPVVFFDAFERAEVRASFDLPVAAFSDSDSSTVMDYERGSRRRVLDLDLNVPPPPEVA

SEQ ID NO: 196271 - protein, 39 aa, Glycine max
  Clone ID: PAT_MRT3847_1925C.1.pep
FVSSIYGPGCYFLFLFRLIEEFNHSVMLPPQKIHYLLCV

SEQ ID NO: 196272 - protein, 91 aa, Glycine max
  Clone ID: PAT_MRT3847_19260C.1.pep
IIVLEDTKEYISYVSKEEAKTQDRRPFDLLVILNPKLEKKGKRTALFFEGCLRCPSLLPLIALSDYQFTFCARYNSGFEMRSRSYCIPVIT

SEQ ID NO: 196273 - protein, 53 aa, Glycine max
  unsure (1)..(53): unsure at all Xaa locations
  Clone ID: PAT_MRT3847_19261C.1.pep
AFASRXXXPNLNYVWAXTKXAWSXMVATGXNXRHETXXTXMXXSTHTVXXQKX

SEQ ID NO: 196274 - protein, 98 aa, Glycine max
  Clone ID: PAT_MRT3847_19262C.1.pep
FFQSRAQKYNSTVFRANMPPGPFIASNPNVIVLLDAKSFPVLFDVSKVEKRDVFTGTFMPSTQLTGGYRILSYLDPSKPRHEQLTRLLFFLLKSAKRR

SEQ ID NO: 196275 - protein, 165 aa, Glycine max
  Clone ID: PAT_MRT3847_19263C.1.pep
MVLSWTKGRVFRRARKGKELKYSGGDMEIEIAIPTHFRCPVTLDMMKDPVTVSTGITYDRDSIEKWIESGNRTCPVTKTELTSLDDMIPNHAIRRMIQDWCVEHRSHGIERIPTPRIPVTPYEVADTCTRILSAAQHGDENKCVELVRKIKAWGKESERNKRCIV

SEQ ID NO: 196276 - protein, 49 aa, Glycine max
  Clone ID: PAT_MRT3847_19264C.1.pep
PEVHCIQHLFRKRISLGPRNAVKSYLSASGFVVLLQRVGGSVEPAQSVP

SEQ ID NO: 196277 - protein, 110 aa, Glycine max
  unsure (1)..(110): unsure at all Xaa locations
  Clone ID: PAT_MRT3847_19265C.1.pep
ARSQESSDSSKQSFCKVEIDLLGGGRCVHKSANRDRLIQNARVGYHARVVGWKKGSXMVMTEICARAVPKKCDSSXTLTSVMNHXNRTEHFAACKWTKTQPHSWELIFPI

SEQ ID NO: 196278 - protein, 418 aa, Glycine max
  unsure (1)..(418): unsure at all Xaa locations
  Clone ID: PAT_MRT3847_19266C.1.pep
LNLCAHSETRTSLVKILMDLLMLDVKRPVSYFSKVEPPYRLYGCQSNVMYSRPQSFDGVPPLLSRRILETLTYLARNHLYVAKILLQCWLPNAAIKEPDDARGPTRPYGCEKTTEGESNDGYIAIAMLLGLLNQPLYLRSIAHLEQLLDLLDVIIDSAGNKSSGKSLIPTNPSSAPQISAAEADANADSNNLPSADDASKVDGSSKPTVSGINVECELHGVLSNLPKAELRLLCSLLAQEGLSDNAYNLVAEVMKKLVAIAPTHCELFVTELAEAVQKLTSSAMNELRVFSEAMKALLSTSSTDGAAILRVLQALSSLVTLLTEKENDRGTPALSEVWEINSALEPLWHELSCCISKIESYSESASEISTSSSTFCVXPFWCNASTSCWLSNILPYIESFFVXCEKLHPAQPSDSHEL

SEQ ID NO: 196279 - protein, 114 aa, Glycine max
  unsure (1)..(114): unsure at all Xaa locations
  Clone ID: PAT_MRT3847_19267C.1.pep
EDGHNDHFSFTKALKIFPDGISGKXCRVPCRWWLTXHLSNSQVESQYXGGDVQLLAGKXTCASFMYGREFSYVVTVYSHLGQENDKELPLLLDERRGNSFGFYKKIQEIFTHIS

SEQ ID NO: 196280 - protein, 77 aa, Glycine max
  unsure (1)..(77): unsure at all Xaa locations
  Clone ID: PAT_MRT3847_19268C.1.pep
RRKALRGLGRPSIECIVGPAYRSMEDLXNLTLECMSVISLNMCHGTREWHRDVIMKIKKFNEDKGLCVTRMIDTCGW

SEQ ID NO: 196281 - protein, 86 aa, Glycine max
  Clone ID: PAT_MRT3847_19269C.1.pep
LFKSYFSNVKFYLMKSRVLLLNMQDHRVYDFEVLNATKFYGVLGPMSRCMRCVNFWKQPTVASTIFKKLSWFYMFETCVQAHLVNI

SEQ ID NO: 196282 - protein, 61 aa, Glycine max
  unsure (1)..(61): unsure at all Xaa locations
  Clone ID: PAT_MRT3847_1926C.1.pep
FSPPNITPXAAHTGGAHLWKKPRTYPSKEKRHKGRQDITRPTPLISSQDTHKIHQERRYQP

SEQ ID NO: 196283 - protein, 49 aa, Glycine max
  Clone ID: PAT_MRT3847_19270C.1.pep
ILYKHEHWIYHPEWSAELILDPVYLVNDAHVKFLDHFNRLTCEHERDLD

SEQ ID NO: 196284 - protein, 293 aa, Glycine max
  Clone ID: PAT_MRT3847_19271C.1.pep
AKLGITEYIDAMRKANPDLLWAIDKNKRGIFSHAILNRRKDVFRLINRVNGRKEIIKCRADAFGNNLLHLAAYLGPSSDLDRRSGAALQLQRELQWFKVVENIVHPKCKEEKNSDGKKPREIFSESHLEMVKAGEKWAKDTAGSFTLVGTLITTIMFAAAFTVPGGNHQETGAPIFLHDHIFTLFIIADAISLFTSSTSVLIFIGILTSRYAEKDFLKTLPLKLLCGLVTLFLSVVAMMVAFCASLAMMLKGYQRLIIAAMSLASIPVIVLVPSQLRLFLEIFNSTMNATYIK

SEQ ID NO: 196285 - protein, 65 aa, Glycine max
  Clone ID: PAT_MRT3847_19272C.1.pep
NEYTHSYLNNLFCTTMPQILRQTQTPLYLMGFLVESNVKIYLFSLKNPYFYFFGSQRGERWGFTI

SEQ ID NO: 196286 - protein, 86 aa, Glycine max
  Clone ID: PAT_MRT3847_19273C.1.pep
LKPRVTPLSIWSTPIVPTLTTMRCCPAYNLQAAGVHIDTKYWSGIYTYTVVENYNVYIIRNYAVAVITTSVNALTCTFPQHPLVLY

SEQ ID NO: 196287 - protein, 79 aa, Glycine max
  unsure (1)..(79): unsure at all Xaa locations
  Clone ID: PAT_MRT3847_19274C.1.pep
IKSSLCNLKLYSHKKKVNSYWVLFIRVYGRTSKWSRYWEGLILAAHXLTVAQASYGLQPPKFAIIIYNSPQTLKIFKGP

SEQ ID NO: 196288 - protein, 146 aa, Glycine max
  Clone ID: PAT_MRT3847_19275C.1.pep
SKEEVSKYQIHHHPPLILFPMALPCRYCSCGQFYNFLAVSLMPYNQYLWHPMCHTHELCVLFPWTMENKMWAGLFVDPAFFFVWFSKEEHIMMLSCVCRAMLMFVSSSFIHRSQTSHTFESSKRDHALLISWCLRFLKEGQIALEP

SEQ ID NO: 196289 - protein, 57 aa, Glycine max
  Clone ID: PAT_MRT3847_19276C.1.pep
DVAEKCTRVALKCVHVDPDKSPNMGRVAGKISKFYLTSRIWSDSIKMPDMTVSLGPR

SEQ ID NO: 196290 - protein, 94 aa, Glycine max
  Clone ID: PAT_MRT3847_19277C.1.pep
PQWEFHSHTEVSYNITYCFLSPHMNLSVSDIRAFSSLSYCSGSISPNHTTGEFSVGEFQFFKSCHGSIWNCTRVSLLLSSSDINSFSFLEGRVV

SEQ ID NO: 196291 - protein, 81 aa, Glycine max
  unsure (1)..(81): unsure at all Xaa locations
  Clone ID: PAT_MRT3847_19278C.1.pep
SSDHGVIASEPSAAAAAIPREPLDLMTAXQLVLRKSLAYRGLSRILTERAKVIDKHPALLCVLAXYCDQPDYVKXLKALCA

SEQ ID NO: 196292 - protein, 61 aa, Glycine max
  Clone ID: PAT_MRT3847_19279C.1.pep
SSFNFTAANNITALYSGGILTVTITYPTSQLRNVLPFLVLPGIGTVPSLPANLTVISSLQF

SEQ ID NO: 196293 - protein, 59 aa, Glycine max
  Clone ID: PAT_MRT3847_1927C.1.pep
ARGLYMMTLKIPQVFLKPLQVMWDATVFGMFNEDFPLYINHEDLFEIAYSSQCLSISII

SEQ ID NO: 196294 - protein, 323 aa, Glycine max
  Clone ID: PAT_MRT3847_19280C.1.pep
MSTSPSGSTLGKATAVMKSLNFYLSDHPAIVTFRWSHDLCWGSTWSFLFSSIASYVVVSIFLHLTLAFLLRRGRPVPLGPIPALHSLSMSVISATIFAGLLVSAAAEIKETRWLWRRYKTPLQWLLCFPLGTRPSGRVFFWSYVFYLSRFLHMLRTVLVVLRRRKLVFFQLFYHAISTFMSFLWLEFSQSFQVLAILFTTLAFSVMYGYRFWTSVAARGACLPLVLNCQIALLGCNLVCHVAVLLLHFLTGGCNGIGAWVFNSVLNGAILLLFLNFYVRMYLARRRKRKGVVIDHRCENDNNIARSSVLGAGKEPHSNKVKSN

SEQ ID NO: 196295 - protein, 59 aa, Glycine max
  Clone ID: PAT_MRT3847_19281C.1.pep
KTERGMKLSVMRIEIRFSLQRRKKVINATLSLSLSISLYLQFLLPMFPQHPPSVVFSQP

SEQ ID NO: 196296 - protein, 81 aa, Glycine max
  Clone ID: PAT_MRT3847_19282C.1.pep
KRKKLFIFYQGSWALYIGKKKGGKGGLDPPNEIISSSTSLFNGFLIRLARTTKRGIQGKLTNPKKYPCPFLKRTTLQLKAH

SEQ ID NO: 196297 - protein, 49 aa, Glycine max
  Clone ID: PAT_MRT3847_19283C.1.pep
TAARRRQKGMRITNEPTASAIAYGLDQTGTSVRETNGELSEPGGETLDV

SEQ ID NO: 196298 - protein, 74 aa, Glycine max
  unsure (1)..(74): unsure at all Xaa locations
  Clone ID: PAT_MRT3847_19284C.1.pep
AELTFPDSMVLLSAPFVTNVEPSXPAPSSNSRWSAPESRILNKSXGLPPLTLPKLSLVPQKVKICIQAWSNVAK

SEQ ID NO: 196299 - protein, 71 aa, Glycine max
  unsure (1)..(71): unsure at all Xaa locations
  Clone ID: PAT_MRT3847_19285C.1.pep
SIGNIPNGGRSRGCKLTYACMLRNNCYIVTPIFNSLPDGIQLLDXIKPXITQLNRLASHSILAIWRNIKKA

SEQ ID NO: 196300 - protein, 58 aa, Glycine max
  Clone ID: PAT_MRT3847_19286C.1.pep
MATVVPTSEEDAALSVVRFASELAWADAGPEVAEPQVSRLCTEAEEFIVIGKWLELAS

SEQ ID NO: 196301 - protein, 87 aa, Glycine max
  Clone ID: PAT_MRT3847_19287C.1.pep
TPVAKIGPNTTGRARSRQPFSHVTSSSGSALSLPSIARSQSEEDAATTTACGFYSACVVVIIISYMILVLILWFSFMPLLCLCIRHE

SEQ ID NO: 196302 - protein, 81 aa, Glycine max
  Clone ID: PAT_MRT3847_19288C.1.pep
CFRLAFGVVRWLCFPWGVLCILGVFGLASFGVALGVSCGSGCVCRWVRGPVAPGSLVLGGVLFWRFLGCFRPGCFVCPRPF

SEQ ID NO: 196303 - protein, 164 aa, Glycine max
  unsure (1)..(164): unsure at all Xaa locations
  Clone ID: PAT_MRT3847_19289C.1.pep
MSLPSPVSTVVSAAAPYDRAKAVKEFDETKVGVKGLIDSGIRTIPPFFVHPPETLADLKRGAEPGSVQEIXHGGVVEKVRLAASTVGFFQVVNHGIPEELLRRTLAAVKAFHEQPAEERARVYRKDIGKGVSYISNVDLFQSKAASWRDTIQIRMGPTVVDSSE

SEQ ID NO: 196304 - protein, 61 aa, Glycine max
  Clone ID: PAT_MRT3847_1928C.1.pep
RAHGYPLFCSKGKNTPLSFFYIWNKPSQNKEFYPPKFPLGCPPGKLINSPIVVLQIPFFCY

SEQ ID NO: 196305 - protein, 162 aa, Glycine max
  unsure (1)..(162): unsure at all Xaa locations
  Clone ID: PAT_MRT3847_19290C.1.pep
LRSVAHNVNQPLYKDWLEGNYCFDIKSRSRLEKVSSTKAHFVSGKTFXYDIIGAGSHSSXDYPEKEDHXRPKKIDAXLRQTIDPQYNEGQAQMETNSFKLSLDDVETSNRPMLDLKISQSKIALXQNTVGGTIXRSDLLANCLTEGNIRASVDLQRTHRIKE

SEQ ID NO: 196306 - protein, 36 aa, Glycine max
  Clone ID: PAT_MRT3847_19291C.1.pep
MSSIVITQYESIRAHSPRSLRACLVSQCFTNLNNDG

SEQ ID NO: 196307 - protein, 115 aa, Glycine max
  unsure (1)..(115): unsure at all Xaa locations
  Clone ID: PAT_MRT3847_19292C.1.pep
MKKFVLKLDLHDDKXKQKALKTVSTLSGIDAIAMDMKEKKLTVIGTVDPVTVVSKLRKYWKADIVAVGPVKEPEKKEDPKKAEAKKEGEKKEEEKKEEEKRKEEKEDDEKKDPAN

SEQ ID NO: 196308 - protein, 229 aa, Glycine max
  Clone ID: PAT_MRT3847_19293C.1.pep
SSTTTFCLCTKATRILLALVYRPKVLEYNESGEPKATRILLALSWLKQALMNNPGYNKPVVERQEAAQILLEASGDYKTEPILSNVDPEVYEAHKHKLEPDLAKRAEHYFSENMRVLKGVEAWAMGRLKDFGMLITASGRSSIQNYECGCEPLIQLYEILLRAPGVLGARFSGAGFRGCCLAFVEADLATEAASFVRSEYLKVQPELASQISKDTAVLICESGDCARVI

SEQ ID NO: 196309 - protein, 93 aa, Glycine max
  Clone ID: PAT_MRT3847_19294C.1.pep
MKKFVLKLDLHDDKDKQKALKTVSTLSGIDAIAMDMKEKKLTVIGTVDPVTVVSKLRKNWKADIVAVGPVKEPEKKEDPKKVEAKKEGEKKEE

SEQ ID NO: 196310 - protein, 123 aa, Glycine max
  Clone ID: PAT_MRT3847_19295C.1.pep
GAPRAILVFRSSAIGLLGAFSFPPLGFPVPIERRGVGATKLRNIFGRSNRPLASRGPPPRKKCLPESHVMKGGPPPRVPGAGTKVVKPFFLGGTPVFSVVNPRFFRPFFPFLERSLLIVLGLP

SEQ ID NO: 196311 - protein, 85 aa, Glycine max
  Clone ID: PAT_MRT3847_19296C.1.pep
FAWCMYSVYVHVNIIVRRIHKLDEGYHRVLVRSKELAVLHEIKIPSHRCSHYDGVTRWSSSCGATYAQSLGGSLPGCHWWSSTTS

SEQ ID NO: 196312 - protein, 48 aa, Glycine max
  Clone ID: PAT_MRT3847_19297C.1.pep
APAKKLNLRRENHHFFSHFTHLSGPSLTPPIPKCHKGNPRKFLISWGG

SEQ ID NO: 196313 - protein, 139 aa, Glycine max
  Clone ID: PAT_MRT3847_19298C.1.pep
ILIPGSYYFQHPKSEIAGAKFCSSDLDDGSSELSLGSTEGNNEDYSRKTIHWSGRENTGRGRNKEKKIKKDRKNLETGENLNKHLNDIKEASSGTDDGKNLSFIKSNFVTDFADAKNSRSSYKGSRMKSTKLLLEKGIW

SEQ ID NO: 196314 - protein, 212 aa, Glycine max
  Clone ID: PAT_MRT3847_19299C.1.pep
MEMASSSFILGSDFKCMFSSRNTKTMSGFGALRHPHPNGLFSKCFHFHTLSTRTVSGTTKMVSDVYVGGVTSFRVNSKMYTKLDSCLVIPPTPNRAKPRAIVKFLGGAFIGAVPEVTYGYLTELLAKEGFLVVVVPYNVTFDHSQAAKQVYERFQACLGTILTSGIFSENKLPAQLEDLPLFSIGHRLVVCLMLSIILTGINVMKRNIFLVC

SEQ ID NO: 196315 - protein, 76 aa, Glycine max
  Clone ID: PAT_MRT3847_1929C.1.pep
MKISEVVDEFSTIPNLNCQGRWGPWQELDDGEFKDSQHWSRGSEDLENEGDDNGLKVDKLTTHRPHCRLKHRSPMR

SEQ ID NO: 196316 - protein, 62 aa, Glycine max
  Clone ID: PAT_MRT3847_192C.1.pep
GVLNPGPPQGKLWRFWAPKKWKKIRALFPDWVPSILSPVIPVAPLKTSPIIVAPFFANVSLP

SEQ ID NO: 196317 - protein, 79 aa, Glycine max
  Clone ID: PAT_MRT3847_19300C.1.pep
GIVFDQSGTRTFWHPPWGPLAQVPSSRAMAIIGTETNTTTMEHPVNHQNMEICIEDQTDLSSIVRRFVNVLIMFRIMSA

SEQ ID NO: 196318 - protein, 67 aa, Glycine max
  unsure (1)..(67): unsure at all Xaa locations
  Clone ID: PAT_MRT3847_19301C.1.pep
KVVSSSNNRAATATKILSFLMLLAVSAWXADATIXSSMXQAAIAALLPPYLPSMMAAVCENTALQPY

SEQ ID NO: 196319 - protein, 53 aa, Glycine max
  Clone ID: PAT_MRT3847_19302C.1.pep
FRNTILLPKQPWLLHFRTELRCCHHCLRGLMLLYPWLGFDLAPDILLRQLCYA

SEQ ID NO: 196320 - protein, 59 aa, Glycine max
  Clone ID: PAT_MRT3847_19303C.1.pep
MSWQAYVDDHLLCDIEGNHLTHAAIIGQDGSVWAQSTDFPQVSFPFSFTLFPSRISIYC

SEQ ID NO: 196321 - protein, 148 aa, Glycine max
  unsure (1)..(148): unsure at all Xaa locations
  Clone ID: PAT_MRT3847_19304C.1.pep
FXXXXSAEXGSXXXXRXXXXXXCXIXXEXCYXXSXXXLVXSRQCARAXXXXXMXXVXHXXKXLRXGXXTHSXXXXXCVXFXXRQCXXRXXXXXXXSXDMXXSXXXQCXXXXESSTLTVXXXSLXDXXXVXXVXXXXXXSXXVXXIXXD

SEQ ID NO: 196322 - protein, 52 aa, Glycine max
  Clone ID: PAT_MRT3847_19305C.1.pep
YHKRHLLFPKLEIQPPFFIEIYIHHSYKSPSSTIQTPIHLHHHIISIKIYIS

SEQ ID NO: 196323 - protein, 103 aa, Glycine max
  Clone ID: PAT_MRT3847_19306C.1.pep
FKIDHGANSLQRSCAGVLLIPDVLIDVSYVMNSAITGKQFVWRRTSSSHLISLFVMSYMPFNDHVLSARIMLHLTLVGNISCMVKLGQWSNMGLEPVHTQYRT

SEQ ID NO: 196324 - protein, 128 aa, Glycine max
  unsure (1)..(128): unsure at all Xaa locations
  Clone ID: PAT_MRT3847_19307C.1.pep
MTNDGARAAPDDFGRAAARLAVAQLCDAAGFHGATASALDAFADVAVRYLLDLGRTAXSHANHAGRTQCTVFDAIRGMEDLEAPRAFAGAGGIREIINFVESAADEIPFAQPISNFPVVQETTPHHPE

SEQ ID NO: 196325 - protein, 64 aa, Glycine max
  Clone ID: PAT_MRT3847_19308C.1.pep
VCEIWIPFFLLLIINEHNVTYYIYIVYAYYTAQNKEDTARIRAYMLGNYETTLAKVEMWNTHYE

SEQ ID NO: 196326 - protein, 84 aa, Glycine max
  Clone ID: PAT_MRT3847_19309C.1.pep
FNIIPLKQGSKCIQINFLMVQDVDHDSRCSSYKIDLDAFGSLIQYNSIEAKFEFLLKTNDMNIFTVLQTSLVVQQHLLHDLIGW

SEQ ID NO: 196327 - protein, 75 aa, Glycine max
  Clone ID: PAT_MRT3847_1930C.1.pep
FGFGCFESAWIHQHTNLLQMQGVVIKMIVETQYPQKYNLLKEYHQLTRPKMHLITGTCIPRGYLKSTNNYKERTK

SEQ ID NO: 196328 - protein, 109 aa, Glycine max
  Clone ID: PAT_MRT3847_19310C.1.pep
MKKLKNYYMHLRHHHTAERKWVFPLAIGSLLSLFLLFLATLTSPEGTPILPFYRSITAASYSVFVESKLRPLPVFRPPPPPRLAYLVFGSKGDGAAVTRVLLALYHPIN

SEQ ID NO: 196329 - protein, 29 aa, Glycine max
  Clone ID: PAT_MRT3847_19311C.1.pep
RGLHCLLSYRAKVPISGVAITGASRISCI

SEQ ID NO: 196330 - protein, 113 aa, Glycine max
  Clone ID: PAT_MRT3847_19312C.1.pep
SWSSNNKFFGNPSRKPKVVAGGDPPPLFNCSCFRGSMRYWGPWNSFPPPQFLPEIFAPFEDFFPPPPKPFRKAQRTKRGLKPHPPQMTRPEFPFSPPEFFPESTSNGPGPGEV

SEQ ID NO: 196331 - protein, 200 aa, Glycine max
  Clone ID: PAT_MRT3847_19313C.1.pep
MATIGHNNLNAKLVLLGDMGAGKSSLVLRFVKGQFLEFQESTIGAAFFSQTLAVNDATVKFEIWDTAGQERYHSLAPMYYRGAAAAIIVYDITSSDSFTRAKKWVQELQKQGNPNMVMALAGNKADLEDKRKVTAEEARVYAEENGLFFMETSAKTASNVNDIFYEIAKRLPRAQPAQNPAGMVLVDRPAEGTRAASCCS

SEQ ID NO: 196332 - protein, 200 aa, Glycine max; identical to SEQ ID NO: 196331
  Clone ID: PAT_MRT3847_19314C.1.pep

SEQ ID NO: 196333 - protein, 176 aa, Glycine max
  Clone ID: PAT_MRT3847_19315C.1.pep
TDSWEKPARVWKVFPCLCCCIVPEFVLDSGTSLSLSLFLQISKPSLSLLAITSECSFFLFAKFVCEEGGRDSRSCFLRLPNYLLFCEVTERLKMGGDDSGLESDNFDWNTEDELEIQNYNSSSSCLTLPNGDAVTGSGEASSSAVLANSKVLDHFVSMGFSREMVSKVIQEFGEEN

SEQ ID NO: 196334 - protein, 117 aa, Glycine max
  Clone ID: PAT_MRT3847_19316C.1.pep
GKNKRGKAKFFGEKFPKYSGGQIWGARNFSNGKKGKGKRGEGPNLFGTGPCNTGGNPDQKGRVYQGPAPTIFGKKNFFKKTFVLGQRLENRAGELWGGKLEHPKNGAPRSPRGVRPG

SEQ ID NO: 196335 - protein, 78 aa, Glycine max
  Clone ID: PAT_MRT3847_19317C.1.pep
VLCRGRDSRSCFLRLGGRVGFCEVTERLKMGGDDSGLESDNFDWNTEDELEIQNYNSSSSCLTLPNGDAVTGSGEVSF

SEQ ID NO: 196336 - protein, 74 aa, Glycine max
  unsure (1)..(74): unsure at all Xaa locations
  Clone ID: PAT_MRT3847_19318C.1.pep
VAEDMFHWQATIIGLQNRPYAGGGFLVTIHFPSKYPFKPPKVAFRNKVFHPNINSNGNICLDILKEXGSPALTI

SEQ ID NO: 196337 - protein, 54 aa, Glycine max
  unsure (1)..(54): unsure at all Xaa locations
  Clone ID: PAT_MRT3847_19319C.1.pep
QIGGSLDMWRGSPLCVVIARHVRHFCIHRWLIVGFIFSIXEFLGVLGCWRLLNT

SEQ ID NO: 196338 - protein, 1048 aa, Glycine max
  unsure (1)..(1048): unsure at all Xaa locations
  Clone ID: PAT_MRT3847_1931C.1.pep
RLAVLALFAYYAIGLWYPVWLVKHVISDFSKTIRVFMVLMVSANGAAKTLTLAPVFIKGGRVMRSVFDLLDRRTEIEPDDQDATPVPDRLRGEVELKHVDFSYPTRPDMPVFRDLSLRAKAGKTLALVGPSGCGKSSVIALIQRFYDPTSGRVMIDGKDIRKYNLKSLRRHISVVPQEPCLFATTIYENIAYGHESTTEAEIIEAATLANAHKFISGLPDGYKTFVGERVVQMLRGQKQRIAVARAFVRKAELMLLDEATSALDAESERSVQEALDRASSGKTTIIVAHRLSTIRNANLIAVIDDGKVAEQGSHSQLLKNHPDGIYARMIQLQRFTHSQVIGMASGSSSSTRPXTTKEKASHSNDITSYRIISHIPIIIIGIFVLTXYSLCIIPTPPFSSYSRMYLLVFMNVTKEMTKYRNEIEMDEXCSSLLKLAFKEQASSFWRLAKMNSPEWLYALIGSIGSVVCGSLSAFFAYVLSAVLSVYYNPDHRYMIREIEKYCYLLIGLSSTALLFNTLQHFFWDIVGENLTKRVREKMLMAVLKNEMAWFDQEENESARIAARLALDANNVRSAIGDRISVIVQNTALMLVACTAGFVLQWRLALVLVAVFPVVVAATVLQKMFMTGFSGDLEAAHAKATQLAGEAIANVRTVAAFNSETKIVGLFTTNLQAPLQRCFWKGQISGSGYGVAQFALYASYALGLWYASWLVKHGISDFSKTIRVFMVLMVSANGAAETLTLAPDFIKGGQAMRSVFELLDRRTEIEPDDQDATLVPDRLRGEVELKHVDFSYPTRPDMPVFRDLSLRARAGKTLALVGPSGCGKSSIIALIQRFYDPTSGRVMIDGKDIRKYNLKSLRRHISVVPQEPCLFATTIYENIAYGHESASEAEIIEAATLANAHKFISSLPDGYKTFVGERGVQLSGGQKQRIAVARAFLRKAELMLLDEATSALDAESERSVQEALDRASSGKTTIIVAHRLSTVRNANLIAVIDDGKVAEQGSHSQLLKNHPDGIYARMIQLQRFTHSQVIGMASGSSSSTRPKDDEREG

SEQ ID NO: 196339 - protein, 61 aa, Glycine max
  Clone ID: PAT_MRT3847_19320C.1.pep
MSENKTMMMDEDMGFCGDVDMYIATLGEWDITIRENEPKVIEDDDYNHEKNDVNDLMRMMW

SEQ ID NO: 196340 - protein, 55 aa, Glycine max
  Clone ID: PAT_MRT3847_19321C.1.pep
PKNSLFLTKPFNIPNFLLCPILGPLKGFFFIFPPKLFGAGTTNHKWLINFHAPFF

SEQ ID NO: 196341 - protein, 57 aa, Glycine max
  Clone ID: PAT_MRT3847_19322C.1.pep
VEKIGGDIGQNMDVKRSDDMTIRSLQQSPKRRPDRKLADFQVRTCSSMRISLISSCS

SEQ ID NO: 196342 - protein, 303 aa, Glycine max
  unsure (1)..(303): unsure at all Xaa locations
  Clone ID: PAT_MRT3847_19323C.1.pep
KIMVMVNLGMLHYVLDHVYGAFMHRTKMSTPFFSRGWGGTKLEMLERVIKQLFPEVEGHNWPPSMIELTVWETKMASLREGVXRTPCEEQLLGALPPVFYTARAPVLPRGAXRFCVSDLLLLGRPNLETAPRPLHWVCLDAGFSKMGLCGLSMGGVHAAMVGSLHPTPVATLPFLSPHSAVVAFCEGILKHGTAWEALRKDLAAQKVAMTLEEVRERMRNVLSLTDVTRFPIPKNPNAVIFVAATDDGYIPKHSVLELQKAWPGSEVRWVTGGHVSSFILHNDEFRRAIKDGLDRLPWKESHL

SEQ ID NO: 196343 - protein, 62 aa, Glycine max
  Clone ID: PAT_MRT3847_19324C.1.pep
DAMYRSPNLHNCKGGLVKCFDGKLPEYIKFARQALINSDRFSLYGRNWCVFLGFSLKKRCKV

SEQ ID NO: 196344 - protein, 380 aa, Glycine max
  Clone ID: PAT_MRT3847_19325C.1.pep
MVQAQPLQHVGNGAGKEDQAYFDPSAPPPFKIANIRAAIPKHCWEKNTLRSLSYVLRDVLVVTALVAAAIGFNSWFFWPLYWPAQGTMFWALFVLGHDCGHGSFSNSPLLNSIVGHILHSSILVPYHGWRISHRTHHQNHGHVEKDESWVPLTEKVYKNLDNMTRMMRFTLPFPIFAYPFYLWSRSPGKEGSHFNPYSNLFSPGERRDVLTSTLCWGIMLSVLLYLSLTMGPLFMLKLYGVPYLIFVMWLDFVTYLHHHGYKQKLPWYRGQEWSYLRGGLTTVDRDYGWINNIHHDIGTHVIHHLFPQIPHYHLIEATKAAKAVLGKYYREPQKSGPLPLHLIKYLLHSISQDHFVSDSGDIVYYQTDSQLHKDSWTQSN

SEQ ID NO: 196345 - protein, 128 aa, Glycine max
  Clone ID: PAT_MRT3847_19326C.1.pep
LIPDLVISLEGLTSSDSNKLGKGTEITPEENPQLLDLDVFLTVVYMNEGALFLPHFNSKAILVLVINEGETNIELDGIKEQHHRQQQEEQPLEVRKYKAELSEPDIFVIPTGYPVVVNATSDLNFFAF

SEQ ID NO: 196346 - protein, 41 aa, Glycine max
  Clone ID: PAT_MRT3847_19327C.1.pep
THNSRLRMRCMFSSLCITLEYTCVNHMLYILIYYIHFFSWT

SEQ ID NO: 196347 - protein, 176 aa, Glycine max
  unsure (1)..(176): unsure at all Xaa locations
  Clone ID: PAT_MRT3847_19328C.1.pep
GSRADSGGDLAGIICSISHEPLNLISEDLQSVSICVHVFHELCLRQWLEYSSKGKKHTCPICKQGCRASDACWLYFQSVGDANDSVKPQKSFELEEDAXFLRREVNVSGLNSQVEGQTKELEGLNEKLCTCKEQAKIEIALKNEVLNKKASIPASNEIRGEILCSLLFYFGQVNYL

SEQ ID NO: 196348 - protein, 123 aa, Glycine max
  unsure (1)..(123): unsure at all Xaa locations
  Clone ID: PAT_MRT3847_19329C.1.pep
ACRIGVVRMELRSSMPAVDAARERDQVNLASFCTKKIQKGKLSELVDPSLGFESDQQVXRMLTSVAGLGFRCVLRDNGLKPSMDEVLEALTRIQSGKYESENLQKGDDVGGGGVTSSTSSTEQ

SEQ ID NO: 196349 - protein, 83 aa, Glycine max
  Clone ID: PAT_MRT3847_1932C.1.pep
RQDRRDEDDYYVMQWRKFRAGTRFGKAPRYESQRELIKDSTRQEPDHFNFKTRARHNTTEKAQARGQSHNNTNHKYRFIVQGF

SEQ ID NO: 196350 - protein, 311 aa, Glycine max
  unsure (1)..(311): unsure at all Xaa locations
  Clone ID: PAT_MRT3847_19330C.1.pep
SRRKRWRTPAATSGGDLAGIICSISYEPLNLISEDLQSVSICVHVFHELCLRQWLEYSSKGKKHTCPICKQGCRASDACWLYFQSVGDANDSVKPQKSFELEEDAXFLRREVNVSGLNSQVEGQTKELEGLNEKDITLCTCKEQAKIETALKNEVLNKKASXQLQMKSEELEKSTLECFRLKESNMALTKELAALKLXDISDLDIDEEEVLKLAALGKXANSKDTVDILKRSLVVMRNRSYKQLMAKCNILGRGEAWYSKKLXKAKEKITKLKERVQELETLTEAKENEYLSLQTFIKRTKQPNFDTQIWN

SEQ ID NO: 196351 - protein, 273 aa, Glycine max
  unsure (1)..(273): unsure at all Xaa locations
  Clone ID: PAT_MRT3847_19331C.1.pep
HASAKCNXLGRGEARYSKKLXKAKEKITKLKERVQELETLAEAKENEYLRSLKLSKITKTSKNLEENIKSDSEVLTACKFSSKEQSKQISIPKSGIDLTANNNSKSFQSFKIENSNVTKNKTSPRVDIDIDMANISASAMDEDVTLQANIIQPMVNIRKESPLTLSNSAPGSICFSGGLLGPDGTHRYLGKWCKRGQNSEPSSAKRSSDGDLIAVGADGRGGRIKVLRTSSQILSGGKENLLSSKRSKLGVKTSGLQSQGCLQIEHFFGRVSQ

SEQ ID NO: 196352 - protein, 46 aa, Glycine max
  Clone ID: PAT_MRT3847_19332C.1.pep
TAARRLQKVTIKLTIYHWGWLHLKVLNPTIQTLCPSHLTSKPICTS

SEQ ID NO: 196353 - protein, 82 aa, Glycine max
  Clone ID: PAT_MRT3847_19333C.1.pep
LHKDIIPAAFHSRRSFHLAFNGLKPVYYSFQARSNPGNGILPFFPVVYGGKVGAQSITPMSTRKHLASTCVSPYLSCKRKIL

SEQ ID NO: 196354 - protein, 76 aa, Glycine max
  Clone ID: PAT_MRT3847_19334C.1.pep
IANLSCARKDLGWYWKNVMKEQPMPQAIKDLVEDSQASAAGKKDLFIRDFDVKPNVILYHTHVVSMKQKHKPFLQN

SEQ ID NO: 196355 - protein, 243 aa, Glycine max
  Clone ID: PAT_MRT3847_19335C.1.pep
KNGNHQSFYTVVPNQPTPKGRLWLSNSDQTARPAHTPNLYIYKAKHNIIEYDIEKMIDSLSIILVYYYPVAGRLSVTESGRMEVDCNAKGVTLIEAETVKTIDDFGDFTPSESVKEELVPVIDYHSQPIEEIPLVFVQVTRFKGDKEQQQGLAIAVAVSHPVADGSAWIHFINTWAKVNRGDMLGLNDMPFIDRTILKSSSSLSSLSPPPSPRFDHPELQPLPFILGRSDSTEEAKKKTQLLC

SEQ ID NO: 196356 - protein, 55 aa, Glycine max
  unsure (1)..(55): unsure at all Xaa locations
  Clone ID: PAT_MRT3847_19336C.1.pep
HALVRKLGIRLEXIXXFSXFSXFXXXXQQXCXVAEXVXXVXXRDEXRGIXRCSXX

SEQ ID NO: 196357 - protein, 56 aa, Glycine max
  unsure (1)..(56): unsure at all Xaa locations
  Clone ID: PAT_MRT3847_19337C.1.pep
PXXMLSPTXYXQSTXNRXKXIKGLXRTXESXDXGXDPXIYPPRSFVHXSVSPNLXA

SEQ ID NO: 196358 - protein, 59 aa, Glycine max
  Clone ID: PAT_MRT3847_19338C.1.pep
INFWILLNYNLLNSIVFYKIIMRSIMFRSPLKAGLFVNGFNNFTSCSNNYKLRRNHTML

SEQ ID NO: 196359 - protein, 70 aa, Glycine max
  Clone ID: PAT_MRT3847_19339C.1.pep
PFNQEPASVAFSALNLAMHFHGWVSFFILIHYKLPLKDGKKAYYEYAGLWHMYGLLSLNSWFWSAVFHSR

SEQ ID NO: 196360 - protein, 65 aa, Glycine max
  unsure (1)..(65): unsure at all Xaa locations
  Clone ID: PAT_MRT3847_1933C.1.pep
GIXSQGFNXWXFNMXSXCHESFCCGEGKYGCRXLQDMPQXSIIKTXSLKAKTCSXXXXXAXVXWX

SEQ ID NO: 196361 - protein, 52 aa, Glycine max
  unsure (1)..(52): unsure at all Xaa locations
  Clone ID: PAT_MRT3847_19340C.1.pep
XHXXXXGCEXERXRESESRALHFSXSXRDXXQKQTETEHKSALLSCVMGRVV

SEQ ID NO: 196362 - protein, 47 aa, Glycine max
  Clone ID: PAT_MRT3847_19341C.1.pep
HEEEKPAFSSLLASSGLPCIVNYLPIIQNTNLPKLRIKFICSLFNCF

SEQ ID NO: 196363 - protein, 41 aa, Glycine max
  unsure (1)..(41): unsure at all Xaa locations
  Clone ID: PAT_MRT3847_19342C.1.pep
NASGIRSHLQRXGENPNPEPQQPPASRSAGSSSVQPCHQLL

SEQ ID NO: 196364 - protein, 100 aa, Glycine max
  unsure (1)..(100): unsure at all Xaa locations
  Clone ID: PAT_MRT3847_19343C.1.pep
PNXXFXSHHPXXLIKIDQFHSFFNXFQPXNTPYIXYTPFQNQXXXXTFPXXNXNYXXNHFPPXQQXFHSIIPPPXXYLTPFPFPKNXXYFPYXNXXYKNL

SEQ ID NO: 196365 - protein, 67 aa, Glycine max
  Clone ID: PAT_MRT3847_19344C.1.pep
IRISFCIGCKKYFLIKLSLLQLKIHEVDFRPHLNPTKTIQPPKQQSQPDTPTTTDYLSPTSTGLPLI

SEQ ID NO: 196366 - protein, 67 aa, Glycine max
  unsure (1)..(67): unsure at all Xaa locations
  Clone ID: PAT_MRT3847_19345C.1.pep
GLVGXXTRKSVYIFCSMYNFDPFGIITGAFQGSHGSYEPDFLIAVWYLXXSSXSTAVSIYFGNIVFY

SEQ ID NO: 196367 - protein, 816 aa, Glycine max
  unsure (1)..(816): unsure at all Xaa locations
  Clone ID: PAT_MRT3847_19346C.1.pep
MDDELLELQRQFEFAQQAKSSIRLSERNVVELVQKLQQLQIIDFELLHTVSGKEYITLDQLRNEMVSEVKKIGRVSLIDLADATGVDLYYVEKQAQSVVTEHRELMLTQGEIMSESYWDSIAEEINERLQECSQIALTELAAQLNVGLDLVSTMLEPRLGTIVKGRLEGGQLYTPAYVARVGAMVRGAVRGITVPTNLTVVWSSLQQLLQDIDGTSGLAVEGSFFQSLFNGLVKEGKVLGSLRAGVHWTPAVFAVAQREFVDSFFSQNSFITYEXLHKLGIPQPIQFLQSRYPEGKPLVTTFVHSSMIEMLDASTEDALDRGSWSDSLSLLPSSFTPQDASKMLSLCQSVQNALKSNKAHIFGDFYVLSSSFIKDICDRVVKELETLGVSGCADSTMHADVQVPNEAKVGHESGRLNDIVSDGGANRHADKGSKKKKGKATGNAVANLSESGADNQEQTLTKSKRGQKRGKDASSQTSDSKTGSKKESLKVKEDNPSPSEDWIMQKITALVSDFEEQGIDDPETILRPLANQLRPTIISSWMEKKKALLTNNAERMKRLLDNLQKKLDESFLNMQLYEKALELFEDDQSTSVVLHRHLLRTVAAPMVDMLLQNLDEHNKLKNGHEVQEAPNSESVSLSPGDRTAICKSFPGALANKALAVVEALEGKSVEIFMAAFRMVTEESGLPLKKLDKKLERTLLHSYRKELTSQVSAETDPVSLLPKVVSLLYIQVYHKALQAPGRAISVAISHLKDKLGESACKILTDYQTATVTLLTLLAASPGDEEDCASDRILSKKELLESQMLDLKSLVLSTSQSS

SEQ ID NO: 196368 - protein, 44 aa, Glycine max
  Clone ID: PAT_MRT3847_19347C.1.pep
HRCVISYFVTDYTDPAFQHNTASWVTICGWMLQGGCPSQIANLS

SEQ ID NO: 196369 - protein, 55 aa, Glycine max
  Clone ID: PAT_MRT3847_19348C.1.pep
AIRWGNQIREPNPVIRRGIEGLYYSKWHLTPGLKAINERLAGQIGPIGIGGESKS

SEQ ID NO: 196370 - protein, 100 aa, Glycine max
  Clone ID: PAT_MRT3847_19349C.1.pep
YCFCCFFLYCFFYCFCLFVKGKIKKERRALDKTLENMPHVRRGPDLRTGRDTQKRSAVNLAQDLHASDARLFMGKRKNGNRTKIATKNIMALGKGWARTV

SEQ ID NO: 196371 - protein, 47 aa, Glycine max
  Clone ID: PAT_MRT3847_1934C.1.pep
EPGIIRAHILHIVFGVTIILILYLIMMVIRMRRITLTRVPTPRSVDI

SEQ ID NO: 196372 - protein, 119 aa, Glycine max
  Clone ID: PAT_MRT3847_19350C.1.pep
ICFADYKKSLQAPTADKKLEMASSSFLCLCLMFAFVVACFARGIPTDQPPVLYGDTHKNPSTSNIEHHQWSGDKVTHPISTHVKFSSFTENSERILTEVDYDGPHTHPNPPPHAQKFRL

SEQ ID NO: 196373 - protein, 52 aa, Glycine max
  Clone ID: PAT_MRT3847_19351C.1.pep
TQPTLTTLHTKKLVKCGGAHFYGPRTWAGTESLHQYPTTLVYLDPLGIHVII

SEQ ID NO: 196374 - protein, 321 aa, Glycine max
  Clone ID: PAT_MRT3847_19352C.1.pep
MQVDGFQPFHYANCSDEGEEAVPVTNASSAMHARASELTISFEGEVYVFPAVTPEKVQAVLLLLGAQEMTNSAPTSDILLQQNYQEKAEAAVRKLEMKLEKRRASSMDKIMNKLRLLGLNRMHRKNGQFASLKEDYKSPAENWDSSNGTPCPDSTERRCQHCGISEKSTPAMRRGPAGPRSLCNACGLMWANKGTLRDLSKAARIAFEQNELDTSADIKPSTTEAEHSFAKQDKEGSPEETKPVQMDSSRSPEKTNDQFIIGTAESVTDNLSIQVENHALSLHEQDTLEDLADASGTEFEIPAGFDDQVDIDDSNMRTYWL

SEQ ID NO: 196375 - protein, 104 aa, Glycine max
  unsure (1)..(104): unsure at all Xaa locations
  Clone ID: PAT_MRT3847_19353C.1.pep
SHLSIHICTXESPSRVTHTLAFEKEFSCHLSTLERQLHIIYSFREAFKRAYIHKVLDHLFNIYTSYLKGPFSSYLSYTYTYMVNNIFTQTKQTSWCSPKNQPLA

SEQ ID NO: 196376 - protein, 125 aa, Glycine max
  Clone ID: PAT_MRT3847_19354C.1.pep
ETYKLIIFMLLNRLTICKLATRKFLTHMVGHVFKVILYMKLLCMILRYALNHIAAEFKCVYYVVKNSSRCGCIMRTTHGLPCACELARYVVGTIPLGTIHMFWRRLNFSDHGLSEPEVNITEEMK

SEQ ID NO: 196377 - protein, 138 aa, Glycine max
  Clone ID: PAT_MRT3847_19355C.1.pep
EEDEQELNISTTPILCCCCCWLKKEKKNTNTKKKLANIIDITFFSLRPLFLVSHRTRVWYCLSLSSFFLGESSVVVRSLINFASSSKFVNLTSRSTLLIAFSACSFCKLFSLIDVGFFSRSLLSVYISRVYLYVDLKS

SEQ ID NO: 196378 - protein, 61 aa, Glycine max
  unsure (1)..(61): unsure at all Xaa locations
  Clone ID: PAT_MRT3847_19356C.1.pep
FHCYYKVGNTSARLFTEAKNHACPIFHGGNVSHLHKLLSIESSSQALXVGDXHYGDILRSK

SEQ ID NO: 196379 - protein, 56 aa, Glycine max
  Clone ID: PAT_MRT3847_19357C.1.pep
KMSRCHVSLNKISLPWVFFHDRVNFGSSSMRLPCNECLRLLSPYNAPLSLSIYTHF

SEQ ID NO: 196380 - protein, 51 aa, Glycine max
  unsure (1)..(51): unsure at all Xaa locations
  Clone ID: PAT_MRT3847_19358C.1.pep
XXHSXXRXRGXRSTSAMAIXXPSRXVATVGXHSLRXIXAXXADLXHRNVVA

SEQ ID NO: 196381 - protein, 136 aa, Glycine max
  unsure (1)..(136): unsure at all Xaa locations
  Clone ID: PAT_MRT3847_19359C.1.pep
MKPVFCGNLDFDARQSDVERLFRRYGKVDRVDMKSEEIIXSALVLPFCIPSAFIAFSFLMTFAQCSISNMFQHRNHDDFATVAGFAFVYMEDERDAEYAIRRLDRTEFGRKGRRIRVEWTKQERDSRRSGGDSRKS

SEQ ID NO: 196382 - protein, 54 aa, Glycine max
  Clone ID: PAT_MRT3847_1935C.1.pep
IKGPKNLSYMDTRANLQGVKKGFVDWAITVGKEDASRQWKKLLGLGLYFWPFTR

SEQ ID NO: 196383 - protein, 59 aa, Glycine max
  Clone ID: PAT_MRT3847_19360C.1.pep
MKPVFCGNLDFDARQSDVERLFRRYGKVDRVDMKSGLDYLESWNVHALLGWMCFSAFLF

SEQ ID NO: 196384 - protein, 61 aa, Glycine max
  Clone ID: PAT_MRT3847_19361C.1.pep
ARNSIMNITDNENTRCDSWATQYSLKILNHKVALEWALSAKDPQTPPSFPIVTMIITIKLL

SEQ ID NO: 196385 - protein, 261 aa, Glycine max
  Clone ID: PAT_MRT3847_19362C.1.pep
MKPVFCGNLDFDARQSDVERLFRRYGKVDRVDMKSGLLGKLEWFAFVYMEDERDAEYAIRRLDRTEFGRKGRRIRVEWTKQERDSRRSGGDSRKSSSNSRPSKTLFVINFDPVNARTRDLERHFDSYGKILNIRIRRNFAFIQFESQEDATRALEATNLRFKFMDRVITVEYAIRDDDDRDRRNGYSPDRRGHDSPDGRYGRGRSPSPYRRGRGSPDYGHGSNPSSRPDPRGSPKYERAESPINNGRYDSRSPPPRERSRS

SEQ ID NO: 196386 - protein, 117 aa, Glycine max
  unsure (1)..(117): unsure at all Xaa locations
  Clone ID: PAT_MRT3847_19363C.1.pep
PRVRACAAVGLTSSYTPTSLLESGLQKDRGLIGEFYGRMINVCDNDNHPQEKDLSVGNYLLDTKFCSRWVKVCFTQAQFVCGKTFKYDVIGAGIHSXEDLSAMGDQDXPKEIDARLR

SEQ ID NO: 196387 - protein, 148 aa, Glycine max
  Clone ID: PAT_MRT3847_19364C.1.pep
MPTKLSHQIKAPMILNLILVLICVTTPIKGEKSRKLDEVTNGNEKCTPCEGGYTPSPPIEYLSPPPPIEYFSPPPPIVYPSPPPPSPKKPPTKYCPPPPSSAYLYMTGPPGNLYPVDENFSGASSNRHHSFAVFLPLLVGLLCMMAFW

SEQ ID NO: 196388 - protein, 136 aa, Glycine max
  unsure (1)..(136): unsure at all Xaa locations
  Clone ID: PAT_MRT3847_19365C.1.pep
WSTAPTFNTSSNLSLKLLDSGNLILSAPNGLVLWQSFDSPTDTWLPGMNLTRFNSLTSWRTQTDPTPGLYSLRLKPPFFGEFELVFNDTVSYWSTGNWTDGKFLNIPEMSIPYLYSFHFLSPFSPAAEXGFSERAS

SEQ ID NO: 196389 - protein, 64 aa, Glycine max
  Clone ID: PAT_MRT3847_19366C.1.pep
LNTSHYICELNLNNYAWSIWGARLNRVFLRGDQPLLMLKPDYLSLNHSLRTTDTSHTITLKTLS

SEQ ID NO: 196390 - protein, 80 aa, Glycine max
  unsure (1)..(80): unsure at all Xaa locations
  Clone ID: PAT_MRT3847_19367C.1.pep
MPPVQNMYGRAQQPSCWDRVKYGFMMGACVGLASGGLFGGFRALSMGLLXRELISSLTKVMVQGGGTFGTFMAIGTAIRC

SEQ ID NO: 196391 - protein, 59 aa, Glycine max
  Clone ID: PAT_MRT3847_19368C.1.pep
FPRRQFRFCLLPRFVSMSTCFKWVVVWSIKCPSMLFVMGLFELFYKLLCFIHVIFSPFY

SEQ ID NO: 196392 - protein, 152 aa, Glycine max
  Clone ID: PAT_MRT3847_19369C.1.pep
GSRSVPKATQHRQSSCPQSQRVTNQKVLEIKDQIIRARAYLGFATPSSNSHLMKELKLRIKEMERAVGEATKDSELSRSALQKTRHMEASLSKANCVFPDCTAMAAKLRAMNHNAEEQVHSHQREATHLVHLAARTTPKGLHCLSMQLTADY

SEQ ID NO: 196393 - protein, 60 aa, Glycine max
  unsure (1)..(60): unsure at all Xaa locations
  Clone ID: PAT_MRT3847_1936C.1.pep
RPSVSDFMGLLQISGLFLICGLVATAGLHGAESGXPATGSVRWIAVAYEVKRVLRDSSRA

SEQ ID NO: 196394 - protein, 112 aa, Glycine max
  Clone ID: PAT_MRT3847_19370C.1.pep
LVLADPPPCFPLKPVCFKFVAGPENFRAVVPPYGFWSFKESCPSVFPHLLGVGGRFSGPWAFLGQHRKKVILFARAVNGRGGNQKLLWGPCPVFLGPPLPPVAFKNFCGAPK

SEQ ID NO: 196395 - protein, 93 aa, Glycine max
  Clone ID: PAT_MRT3847_19371C.1.pep
FYSQIFSNSKKVLFTSLQNQTFASCCNHLYFFFSLFHVKTTNKPRQWLHIQTHIYLPNSLTFHNLYKSAIKRKRGISANSQSLAWTILMKMSS

SEQ ID NO: 196396 - protein, 111 aa, Glycine max
  unsure (1)..(111): unsure at all Xaa locations
  Clone ID: PAT_MRT3847_19372C.1.pep
FSFXXRFSXXXXXXFPSXPLSSFAXFXXXSXLXXXVXXXXWXXLXXAXXXXFXFXFXXGXSXXXVVFXLFSFFXCXLXXXXCXXCDXCXVXXXXVVXSRAEFRAXVRVXAX

SEQ ID NO: 196397 - protein, 60 aa, Glycine max
  Clone ID: PAT_MRT3847_19373C.1.pep
MDSFVVECCNCRLPGDYGFDPLGLGKDPAFLKWYREAELIHGRWAMAAVVGIFIGQAWSG

SEQ ID NO: 196398 - protein, 75 aa, Glycine max
  Clone ID: PAT_MRT3847_19374C.1.pep
SSRSSRSSRLEPIRLELFSHCPPLNLGRPSSCRSKEALSQISFSTYWTLIETDLSRLPRPTVDLARLLHFWLWWL

SEQ ID NO: 196399 - protein, 107 aa, Glycine max
  Clone ID: PAT_MRT3847_19375C.1.pep
GKFSENIIFVTFSKTPQLKIIVERLFEHCGCQVPDFQSDEDAVNQLGLLLRQIGRSSVLLVLDDVWPGSEALVEKFKVQIPEYKILVTSRVAFSNFGPPWYLKTTRS

SEQ ID NO: 196400 - protein, 137 aa, Glycine max
  Clone ID: PAT_MRT3847_19376C.1.pep
KPRESRPLLSLLPPTISRRLCLSLGPSKSNESAPPLATSMSLCYAIEVTLTTSPSTSASVSLPRRCAIVPQQLRVVLAQRRRGCPHGLSFYFCFSESSPPLPLRRRATPTSGHLCTTPSRSPSPSPSPSTSPFSNKV

SEQ ID NO: 196401 - protein, 44 aa, Glycine max
  Clone ID: PAT_MRT3847_19377C.1.pep
IIRLWSPRGALIVYVCFWVIITTWCSGASPYPRNDGFESSVSAN

SEQ ID NO: 196402 - protein, 134 aa, Glycine max
  unsure (1)..(134): unsure at all Xaa locations
  Clone ID: PAT_MRT3847_19378C.1.pep
MIVACHCEGTGWXFWGDGNLKSKFWGRSIQLDPVGILTLEFDDGEVCQWSKVTTSIYNLILGKLYCDHYGTMRIQGNQDYSCKLKFKEQSIIDRNPHQVHGIVQDRNGKILATLLGKWDDSMFYINGDYSGKGK

SEQ ID NO: 196403 - protein, 137 aa, Glycine max
  Clone ID: PAT_MRT3847_19379C.1.pep
KQRKMNGDDDKGLLWKLPVVKSDHFGKVGPAFGIGAGCGLGFGLGLLGGVGVGPGIPGFQVGFGFGAGCGVGLGFGYGVGKGIAQDDNKRYSNVGNPFRGSRSIISEDDITALVDDLVINTKKLIKATSKEIDKWRR

SEQ ID NO: 196404 - protein, 54 aa, Glycine max
  Clone ID: PAT_MRT3847_1937C.1.pep
GLYCSLRIIKPKKVKSMQMHISCTLFRLRTQLGFLRIIFRQATMRSCFLVCVSA

SEQ ID NO: 196405 - protein, 89 aa, Glycine max
  Clone ID: PAT_MRT3847_19380C.1.pep
CLLGFVLGESFCNGAVVKLLSLSNFSQFAEHGPFFKSLNLGKPRTERPFFEWSNPHFYGVALCRRGFNPGWLFKEMGQSLNCQNGTPPF

SEQ ID NO: 196406 - protein, 340 aa, Glycine max
  unsure (1)..(340): unsure at all Xaa locations
  Clone ID: PAT_MRT3847_19381C.1.pep
MGGVTSSMAATLGFFPPNPPSYKVVTDDMTGLLLLTPFPHRENVEIQKLPTRRGTEIVALYIRHPMATSTVLYSHGNAADLGQMYELFIQLSIHLRVNLMGYDYSGYGQSSGKPSEQNTYSDIEAAYKCLEESYGAKQEDIILYGQSVGSGPTLDLAARLPQLRAVVLHSPILSGLRVMYXVKRTYWFDIYMNVEKKENXCNLELYHEYLRHLRKFISSVEKPPSXGVSVRRSIDRQVEQSRGSTDCFETPRKSTDQRDKPRKSTDRTDKLKFHEFKFNNTEKLEKIRVQFDQMERSRRSVEYNDKSRSIEFQDKSRRSVDVQFERPRKSIDWLYRIRAS

SEQ ID NO: 196407 - protein, 125 aa, Glycine max
  unsure (1)..(125): unsure at all Xaa locations
  Clone ID: PAT_MRT3847_19382C.1.pep
GTIDCFIWSEECVTRTYCVVNAQNPLVLNRWMGKLTIRQGTSPSDKTMPFSIAGGAGAKNAILMNMPNAGLLMWRYSVGDLVFXEPKMTHPYIKLTXSFFIAXGNMVDDTIKFEACPHXLVQSGE

SEQ ID NO: 196408 - protein, 94 aa, Glycine max
  unsure (1)..(94): unsure at all Xaa locations
  Clone ID: PAT_MRT3847_19383C.1.pep
PLVRVSGFSGLAMAGKHVGLGLLAWLAGISXNHLYYIMFYINVLTLLFFFYSSSLTFLLPFSLLFFIIFSYIFCFLSCLILFFYFFFYHILFFL

SEQ ID NO: 196409 - protein, 147 aa, Glycine max
  Clone ID: PAT_MRT3847_19384C.1.pep
PFMDAAVKPETEYAAVSTDQPRKVSVVNGYIVYTRAKRSLDSCNGFSEHAELKDNAEVEVKTENGECEKLKNESTEVVARTRKRSRRSALEAKVECCDQMVVSETEQVVANGGSGINGALGAPRNKMELKMSKKIVVNRKPMTVKKL

SEQ ID NO: 196410 - protein, 71 aa, Glycine max
  Clone ID: PAT_MRT3847_19385C.1.pep
TFNDKSGKTEYKFRIGGIKIIKTQFWRQNLIETKNQPHSFFDWANLCVPVPLKKQQGFPQIILVTTCFATS

SEQ ID NO: 196411 - protein, 52 aa, Glycine max
  Clone ID: PAT_MRT3847_19386C.1.pep
MLQPYEISIGLKEHSNPVTPKAYTPKSPSGPLPPDSDTAHELYNTHDLTLVF

SEQ ID NO: 196412 - protein, 540 aa, Glycine max
  Clone ID: PAT_MRT3847_19387C.1.pep
MATRRLSLLLSRSLSSTSFQAASLLHSLGRNSGKWGNFNRFSTAAAVEDLITPQVPITYTKHLINGQFVDAASGKTFPTYDPRTGEVIAQVAEGDAEDINRAVSAARKAFDEGPWPKLTAYERCKIILRFADLVEKHGDELAALETWNNGKPYEQSATAELPTFVRLFRYYAGWADKIHGLTVPADGNYHVETLHEPIGVAGQIIPWNFPLLMFAWKVGPALACGNTVILKTAEQTPLTALYVAKLFHEAGLPPGVLNVVSGYGPTAGAALASHMDVDKLAFTGSTETGKVVLGLAAQSNLKPVTLELGGKSPFIVCEDADVDQAVELAHFALFFNQGQCCCAGSRTFVHEHIYDEFLEKAKARALKRVVGDPFKKGVEQGPQIDVEQFQKVLRYIKSGIESKATLECGGDQIGSKGFFVQPTVFSNVQDDMLIAKDEIFGPVQTILKFKDIDEVIRRSNATHYGLAAGVFTKNVHTANTLMRALRVGTVWINCFDVFDAAIPFGGYKMSGIGREKGIYSLNNYLQVKAVVSPVKKPAWL

SEQ ID NO: 196413 - protein, 43 aa, Glycine max
  Clone ID: PAT_MRT3847_19388C.1.pep
VHELPNVAQEFQVQAIPPFVLWKKGKEVPKVVGPKKDQPQKKI

SEQ ID NO: 196414 - protein, 115 aa, Glycine max
  unsure (1)..(115): unsure at all Xaa locations
  Clone ID: PAT_MRT3847_19389C.1.pep
MALFGEGDKRRILXTRPHRTNAHTCHXSETNCLHWTKTLLTRLLTNLPIIYCEGNTLLKTYVVFSPYAXEAYINVPKEKRTXGYEISLTLNWAGEAKDSPGTSLSRSPYPGNPYI

SEQ ID NO: 196415 - protein, 126 aa, Glycine max
  Clone ID: PAT_MRT3847_1938C.1.pep
IPTGKNLCHIYRQERAGPLKSFNLSNRGILTSIGGGMQNPQIGDLTPSGIKAPRDRTLGFETTIWDFGKATEKVPPNKILTDFSLPGGIAQTQKPYRGGCYHQSFLRNSSPPPEVSLLLRGEPALP

SEQ ID NO: 196416 - protein, 179 aa, Glycine max
  Clone ID: PAT_MRT3847_19390C.1.pep
RKELVGTPSRYAKWLMNFQYCNDIYVKLNGSLKSGVDDSLHTNGEVSFDDKELHSDLNLPFWSQCEHHLLPFHGVVHIGYFIPKGFHPVEKSLLQSIVHFYGFKLQVQERLTKQIAETVSPLLGGNVIVVVEASHTCMISRGIEKFGSNTSTIAVLGRFSTDLAARTSFLESIPNATSL

SEQ ID NO: 196417 - protein, 180 aa, Glycine max
  Clone ID: PAT_MRT3847_19391C.1.pep
MQTSQKHPSSAGAHFYHQPVQGIYQMLQSNLCQDSSSQGTSVSFETCKEQYFTLESCPAPTNDFMDCDDSPSYASVSSKRTPFSPQGSQSCYSDHHQSSDNTYGSPISGLSSVDDRHQLKHKLRELEISLLAPEESDITDSCGCCVVKGGLHGSSQLAKHNWVQIADNIAQFDLKEPSGM

SEQ ID NO: 196418 - protein, 52 aa, Glycine max
  Clone ID: PAT_MRT3847_19392C.1.pep
GLSHSSPAQTQWIRSLSLRHGQRVWEAPEDAHCSMDWSLDYLCGAFASRLSA

SEQ ID NO: 196419 - protein, 201 aa, Glycine max
  Clone ID: PAT_MRT3847_19393C.1.pep
CGVPFEFRSAAISGCEVVRGNIEVLPGEALAVSFPYVLHHMPDESVSTENHRDRLLRLVKRLSPKVVTIVEQESNTNTSPFFHRFVETLDYYTAMFESIDVACPRDDKKRISAEQHCVARDIVNMIACEGVERVERHELLGKWRSRLSMAGFKQCQLSSSVMVAIQNLLKEFSQNYRLEHRDGALYLGWMNRHMATSSAWR

SEQ ID NO: 196420 - protein, 51 aa, Glycine max
  Clone ID: PAT_MRT3847_19394C.1.pep
DLYDFATGLTSDNVDAPPSVIHLTSTVISQFPSVSIMVYLLRLTLTYLLFL

SEQ ID NO: 196421 - protein, 363 aa, Glycine max
  Clone ID: PAT_MRT3847_19395C.1.pep
LAVSDDDVPTARGWIDNVLGKLVSVSGDPIQRLGAYLLEGLRARLESSGNLIYKSLKCEQPTSKELMSYMHILYQICPYWKFAYISANAVIQETMANESRIHIIDFQIAQGTQWHLLIQALAHRPGGPPSLRVTGVDDSQSTHARGGGLWIVGERLSDFARSCGVPFEFHSAAISGCEVVRGNIEIRAGEALAVNFPYVLHHMPDESVSTENHRDRLLRLVKSLSPKVVTFVEQESNTNTSPFFQRFVETLDYYTAMFESIDVACPRDDKKRISAEQHCVARDMVNMIACEGVERVERHELFGKWRSRLSMAGFKQCQLSSSVMVATQNLLKEFSQNYRLEHRDGALYLGWMNRHMATSSAWR

SEQ ID NO: 196422 - protein, 49 aa, Glycine max
  Clone ID: PAT_MRT3847_19396C.1.pep
ERPYIVNQCPDSSSHCEYLRFPLHRTNPPLCGRYSKMILQHPIHALVDT

SEQ ID NO: 196423 - protein, 100 aa, Glycine max
  Clone ID: PAT_MRT3847_19397C.1.pep
NTSEGAANRFKCPIYWVVERFLEHHKNEPFSDYYLWASSLPFYNHNRYVFLSICSTNYNEGRCYFYQCLRAIFSVKCDRSAHEISHRITILHIHIIEALI

SEQ ID NO: 196424 - protein, 327 aa, Glycine max
  Clone ID: PAT_MRT3847_19398C.1.pep
MQTSQKHPSSAGVHFYHQPVQGIYQMLQSNLCHDSSSQGTSVSFETCKEQYFTLESCPAPTTCFVDCDDSPSYASVSSKRTPFSPQGSQSCYSDHQQSSDNTYGSPISGLSSVDDGHELKHKLRELEISLLGPEQSDSCGCCVVKGGLQGSSQLAKHNWDQIAENVAQFDLKGVLRVCAQAVSDDDVPTARGWMDNVLGKMVSVSGDPIQRLGAYLLEGLRARLESSGNLIYKSLNCEQPTSKELMSYMHILYQICPYWKFAYISANAVIEEAMANESRIHIIDFQIAQGTQWHLLIQALAHRPGGPPSLRVTGVDDSQSIHARGGG

SEQ ID NO: 196425 - protein, 79 aa, Glycine max
  Clone ID: PAT_MRT3847_19399C.1.pep
LKPAGAGNSDSSTVRFGLTTAQKCMSAALSKEDTRPPPGGGVKDVFFFYERMRSRFYGGGRSPPNALVLVTRSPNYSSL

SEQ ID NO: 196426 - protein, 79 aa, Glycine max
  unsure (1)..(79): unsure at all Xaa locations
  Clone ID: PAT_MRT3847_1939C.1.pep
XXFCGFDVNPPXVEEPRTIXPLXYQIRPLNSXIFSXTXXLSMXACSWSQETIFSFXEFLIKRSGKVEVQYLHDYAGIST

SEQ ID NO: 196427 - protein, 102 aa, Glycine max
  Clone ID: PAT_MRT3847_193C.1.pep
MANTRRILHLVVRFVAFAATFCAAIIMAASHERGSISTMSFEAKYTVFPFFEYFLVVNSVATVYGFLVLFIPTENLLWQPVVAVDLVHVLKPSLMVSCDPYD

SEQ ID NO: 196428 - protein, 100 aa, Glycine max
  Clone ID: PAT_MRT3847_19400C.1.pep
TRPLKNTFSVTTITVFNILMNEAVTQDVRAAANGIAVTLMSISKAVAPAVAGIIFSWAQRRQTAAFLPGDHLVFFILNIFTFIGFVFTFRPFFVRGSAKH

SEQ ID NO: 196429 - protein, 102 aa, Glycine max
  Clone ID: PAT_MRT3847_19401C.1.pep
MDRVAKLASQKAVVIFSKSSCGMCHAIKRLFYELGVGPTIYEVDEESRGKEIEWCLMRLGCNPSVPAVFIGGKFVGAPNTVMTLHLNGSLKKMLRDAGALWL

SEQ ID NO: 196430 - protein, 52 aa, Glycine max
  Clone ID: PAT_MRT3847_19402C.1.pep
LSFHQTVCREGFRASIPLSVIDWSSEVSLAYPTAVCKIVRTRYLALLTLGYG

SEQ ID NO: 196431 - protein, 67 aa, Glycine max
  unsure (1)..(67): unsure at all Xaa locations
  Clone ID: PAT_MRT3847_19403C.1.pep
DVLIFGKTCEWSLRLVXGXXXLFDKDXDGCIXSKXVGSVMRXVGXXXSEVEVQDMINEVDVMVMEHG

SEQ ID NO: 196432 - protein, 80 aa, Glycine max
  Clone ID: PAT_MRT3847_19404C.1.pep
AKGSIIPSIPLCPLPSLIIHIVIVVYNASSSTLRVSFAKCVLRIWAYSDFPVPFPFKCCIQYTDSSRVNSKLISKHRELD

SEQ ID NO: 196433 - protein, 79 aa, Glycine max
  Clone ID: PAT_MRT3847_19405C.1.pep
AKTKQYWSWSQRCFLLVVWTIRLVQKFNFSASCLSLSLSRYVMQCWQPLLTHGTRDETRIKLLTHCSQLLKFGRIRKFL

SEQ ID NO: 196434 - protein, 40 aa, Glycine max
  Clone ID: PAT_MRT3847_19406C.1.pep
SGQQNPALYEFVAPSLMVEGPLRLMQVSTPGAIPLTISGC

SEQ ID NO: 196435 - protein, 66 aa, Glycine max
  Clone ID: PAT_MRT3847_19407C.1.pep
LFATQPFLCAKFKFNTFLFPCLYHVLTYQNSSRYRITGHKRVKDFQCYRVIVYGIKLKSLCVVPYQ

SEQ ID NO: 196436 - protein, 60 aa, Glycine max
  Clone ID: PAT_MRT3847_19408C.1.pep
FSKAITHNLQYSSCTKHHQHYDILYIKNLNAQSHKLGLDGANSFNLKWGLSGRVAWEGFE

SEQ ID NO: 196437 - protein, 167 aa, Glycine max
  Clone ID: PAT_MRT3847_19409C.1.pep
NVASCNSYPLSIHLSFFIEFFPSSIPLIQNQIPHSLLPSRDSNPNLSISSAIERIAKKLHSLGITEPLTSSSEIHVLFPHDLPKRHVGHTFEPRWSMPLKPVPIPGTGIAALSKSEVRKQKKLRVEESRRRKELVPTQMELSLSDSEIRHLTTLGFTTKKKGDTRQQ

SEQ ID NO: 196438 - protein, 45 aa, Glycine max
  Clone ID: PAT_MRT3847_1940C.1.pep
GCQWVSSVKCLTKACDSSVSTERIESLCNRRLTLQAKQVIRVHEV

SEQ ID NO: 196439 - protein, 47 aa, Glycine max
  unsure (1)..(47): unsure at all Xaa locations
  Clone ID: PAT_MRT3847_19410C.1.pep
LVVAILMPAFCTLCXYXSVXMXPYKLPDHSSAFQLLXXXLQITGDXC

SEQ ID NO: 196440 - protein, 109 aa, Glycine max
  unsure (1)..(109): unsure at all Xaa locations
  Clone ID: PAT_MRT3847_19411C.1.pep
KENPSWIGQTSSCRTKSTISPRQTPVPXTXXXQAGTIRXXGXIVXXGXPCKVVEVSTXKTXKHXHAKXHXVXIDIXTAKKLEDIVPSSHNCDVPHVNRTDYQXIDIAED

SEQ ID NO: 196441 - protein, 133 aa, Glycine max
  Clone ID: PAT_MRT3847_19412C.1.pep
MASVCKSDCVKDSHRPLRPTFVNRHKWPESEVEFVKTVNSNIHAKPKGAVDSFSCRQMYLRSYKFSREKVGVREKTLKCFNKLKERVVCVRNKLNLKSKYKVLVRAKDVTFAAFSIFQSFLPCSAKVDVLHDF

SEQ ID NO: 196442 - protein, 116 aa, Glycine max
  Clone ID: PAT_MRT3847_19413C.1.pep
MAAQENNFQDYLPVMANKLGGDGLIDELCNGFDLLKDSDKGVITFESLKRNSYLLGLQGLSDEDLRSMVLEGDFDGDGALNQMEFCVLMFRLSPELMEGSKMWLEQVLQQELKDYF

SEQ ID NO: 196443 - protein, 77 aa, Glycine max
  unsure (1)..(77): unsure at all Xaa locations
  Clone ID: PAT_MRT3847_19414C.1.pep
LALILCSRSSSLQYRIAPVMSEXLDGETDPLETALKELRERQTPFTSLRYLTDTLFEDCXGDELNGENSWEMQASGD

SEQ ID NO: 196444 - protein, 115 aa, Glycine max
  Clone ID: PAT_MRT3847_19415C.1.pep
MAAQRNFQDYLPVMANKLGGDGLIDELCNGFNLLKDSDKGVITFESLKRNSALFGLQGLSDEDLRSMVLEGDFDGDGALNQLEFCVLMFRLSPELMEGSKMWLEQVLQQELKDYF

SEQ ID NO: 196445 - protein, 51 aa, Glycine max
  Clone ID: PAT_MRT3847_19416C.1.pep
NKFVQPNFLVSSQNKIFNIKSIYRFDYDLFSNYVAECSLLVVHNQLHGHNC

SEQ ID NO: 196446 - protein, 533 aa, Glycine max
  unsure (1)..(533): unsure at all Xaa locations
  Clone ID: PAT_MRT3847_19417C.1.pep
SGCNPLPPEIWLLPKYAPIHPGKMLCYCRLVYMPMSYLFGKRFVGPITGLIISLREEMYNQPYDQIDWNNARSTVAKEDLYYPHPLIQDMLWACLHHVAEPLLNCWPFSMLREKALEVAIDHIRYEDENSGYLCIGSVEKVLCLIARWVEDPNSEAYKLHLARIPDYFWLAEDGLKIQSLGSQLWDATLAIQAIISCDLSEEYGPTLRKAHHFVKASQVLENPSGNFKAMHRHISKGAWTFSMQDQGWQVSDCTAEGLKAALLLSQMSPDLIGEKMEDERFYDAVDVILSLQSGNGGFPAWEPQRAYRWLEKFNPTEIFKDTLIEMEYVECTSSALQGLALFRKLYPKHRRKEVDLCISKAIRYIEKTQNPDGSWLVXWGICYTYGTLFSVKGLTDCGKNYRNSPALRKACXFLLSKQLPNGGWGESYLSSQNKVYTNLKGNRANLVQTSWALMSLIDAGQVEIDPTPVERGIRLLINSQMEDGDFPQQEITGVFMRNCTLNYSSYRNIFLIWALGEYRRRVFTHKSQILSST

SEQ ID NO: 196447 - protein, 88 aa, Glycine max
  Clone ID: PAT_MRT3847_19418C.1.pep
VPKLQSARLVSDVRANQYKEENKNKNKKSLVVALFKAFSYSSVSFLSSFPCFHYFSSLLSRTTPQHKQSKKSSTNGGLQSRRRLRLPL

SEQ ID NO: 196448 - protein, 96 aa, Glycine max
  Clone ID: PAT_MRT3847_19419C.1.pep
GKNYRNSPALRKACKFLLSKQLPNGGWGESYLSSQNKVYTNLKGNRANLVQTSWALMSLIDAGQVSKQKSSSILVLILYEFNCHSLYQSEIICDDC

SEQ ID NO: 196449 - protein, 87 aa, Glycine max
  unsure (1)..(87): unsure at all Xaa locations
  Clone ID: PAT_MRT3847_1941C.1.pep
PFAPPAVHPYPGGHLHPHPGPHPHPDPAYVYHSPAPASKKPYYYHSSPPAGHHHPYPHVDPHPHAYSPPPPKEXYYYDSPPPARHPH

SEQ ID NO: 196450 - protein, 52 aa, Glycine max
  Clone ID: PAT_MRT3847_19420C.1.pep
NSARAKIPRASRKAIIPKKVTKNANDFRGNFYDSLVGNDHNFNLGGRNKGDE

SEQ ID NO: 196451 - protein, 97 aa, Glycine max
  Clone ID: PAT_MRT3847_19421C.1.pep
KPRVYISPPFPSFWRLGFVLKKDKGPPPLWGKTPLGGKLKSPVFFPKRGGLGFPPGGQNFQFRFLLPNWPFLLKWFPKFFGPPGPTKVFKAGENFFF

SEQ ID NO: 196452 - protein, 78 aa, Glycine max
  Clone ID: PAT_MRT3847_19422C.1.pep
QGWEPGGSRGVFLSFPPRGTAMLFWAFNHHCLVLGEESSFFVMGGGFFVRNGFFFCSRVLCVPERGIKGPHRIKKPPQ

SEQ ID NO: 196453 - protein, 47 aa, Glycine max
  Clone ID: PAT_MRT3847_19423C.1.pep
VYKNGDEEVAMLLLMELAYLWSYYYLIYLFFVFVSILLKKMFRNILM

SEQ ID NO: 196454 - protein, 46 aa, Glycine max
  Clone ID: PAT_MRT3847_19424C.1.pep
AGRELPHFLFTPKILILALTHLPKQPIYTLYNHTFFLSRNILKKSF

SEQ ID NO: 196455 - protein, 87 aa, Glycine max
  Clone ID: PAT_MRT3847_19425C.1.pep
APALSGHQLEALDCCEQHARCAYELFDKDRNTPIVIEDLASELVLDPSIPVHVALHDCIHHTDGNINVLGFALLLHNMPIQNLAKGQ

SEQ ID NO: 196456 - protein, 121 aa, Glycine max
  Clone ID: PAT_MRT3847_19426C.1.pep
PTLLQAPPLQIYYYGQGHPMNPNLIHVKHNLIDTLLPTTPHADHPTLPGLPHHTSDRFTPTTTSYLPLLQVHPRPYPITTSFDTSSATTADKTDPNTHCLFLFCQASIGGSLGAAVKLTPR

SEQ ID NO: 196457 - protein, 75 aa, Glycine max
  unsure (1)..(75): unsure at all Xaa locations
  Clone ID: PAT_MRT3847_19427C.1.pep
XAYDNXFAXGXXXKTXRXTXLILKLXSSXGXFEIGLQXXATAPPFXTXXXVRSXCRXLCSSXCXXXPXHXRXXXS

SEQ ID NO: 196458 - protein, 75 aa, Glycine max
  Clone ID: PAT_MRT3847_19428C.1.pep
SNIFRRNFLSFAPVCKLARMCRTLTFDHYNLAVVMISQTLKRMIPSIMLNQLEILVLIKLLVHPLPLLTKILTMT

SEQ ID NO: 196459 - protein, 56 aa, Glycine max
  Clone ID: PAT_MRT3847_19429C.1.pep
KVAFNCSICLIFNMLHTFITLTMGSRKIRFQINHRECRNKIFEETLTHPPSGVTGP

SEQ ID NO: 196460 - protein, 196 aa, Glycine max
  unsure (1)..(196): unsure at all Xaa locations
  Clone ID: PAT_MRT3847_1942C.1.pep
XRXXLGQVLTIGFTXGIXPFPKFXGETIGLGPXXKLNPXPXXXFXFKKGXPWGKXXFXXXWFGKKTFXXTXXKLFFWXXPLKNXGVXFPPKRGPPLXFAKXPKNFFWGIKPLXXLXGXKIPELGXPFLXLPXFXXXXGVFWEGTLXFXXXXFXSXHXXGXXXIFXGCTXRXXDFXNFVXGGVPVXGLPKSLXFLXI

SEQ ID NO: 196461 - protein, 33 aa, Glycine max
  Clone ID: PAT_MRT3847_19430C.1.pep
QKVQGCIFCLMYPLNKWFKFFYKKKPQTKKYWM

SEQ ID NO: 196462 - protein, 102 aa, Glycine max
  Clone ID: PAT_MRT3847_19431C.1.pep
HTHANVTCLGFRIGEFSRAQRGRKRNARLELLSRSYMMMVVMGFASQGTTMASFPKAEKKSDFETWGGSFSEKKMKRNTTKVLCCVVWCLGFGFSELHSVHD

SEQ ID NO: 196463 - protein, 363 aa, Glycine max
  Clone ID: PAT_MRT3847_19432C.1.pep
MDWWVSMPKIELHAHLNGSIRDSTLLELARALGDKGVIDFSQVEHVILKNDRSLSEVFKLFDLIHVVTTDHSSITRITKEVVEDFAFENVVYLELRTTPKKNDSLGMSKRSYMEAVLEGLRAVRSVDVAFIPYSEEPRNLSSPLLSDASEKCNGNTRKKIFVRLLFSIDRRETTEAAMETVMLALEMRHFGVVGIDLSGNPAVGEWITYLPALKFAREQGLYVTLHCGEVSNSNEIHNMLEFLPHRIGHACFFEEEHWRRLKSSNIPVEICLTSNLRTLSVPTIDAHHFVDLYNAKHPLVLCTDDSGVFSTSLSNEYKIASSSFGLGQKELFELSKNAIEFMFADNVVKEDLRKTFNSAAKNL

SEQ ID NO: 196464 - protein, 186 aa, Glycine max
  Clone ID: PAT_MRT3847_19433C.1.pep
ACRKTTIDRPMKPGRLKRQQQVLADDRAEIPLIPEDQLAAPLAAVKLAESGDFPRLLIALTLRPRLARATDASGMTALHWVCSKSTAPPRVVLTVARAHPAAAATRNLAGLLPLHLAVRKGLVLETIQALLHVYPNAIEMRTPDGKTSLMLAKKRPVASSAVLTLLEVLEAHARTGALPSVVLPTS

SEQ ID NO: 196465 - protein, 72 aa, Glycine max
  Clone ID: PAT_MRT3847_19434C.1.pep
YLNYNKDLRLFYFLKNKSNCHSYLICNDNMGFTYDFLSKYLNSFFILYRRGFFFFFCQPRAINYEKYSTSSC

SEQ ID NO: 196466 - protein, 123 aa, Glycine max
  unsure (1)..(123): unsure at all Xaa locations
  Clone ID: PAT_MRT3847_19435C.1.pep
PLVRKSLWEGTHLVLSCWSRVEICXKDFWSDICAIPCGFTITVISNSIFSETLMRYSYEQLLLQAKAPSMLLQSFKNYVSLCLHXMDTVISRHVYHQDLLYXVSKMNSYLACHDITISDRVDT

SEQ ID NO: 196467 - protein, 73 aa, Glycine max
  Clone ID: PAT_MRT3847_19436C.1.pep
STNTSPRWPLAQPMRLLGHNGEINTIQGNLNWMQSREPSLKSPVWRGPENEIRPFGNPKGSNSTNLDSASELL

SEQ ID NO: 196468 - protein, 63 aa, Glycine max
  Clone ID: PAT_MRT3847_19437C.1.pep
KCCCNFLCALHVSKTVFSCSYVIRLITIRLCKYNCVNFHLTSPYRYDSFRPFHLKGRPQAVYY

SEQ ID NO: 196469 - protein, 56 aa, Glycine max
  Clone ID: PAT_MRT3847_19438C.1.pep
YAVSLTIACDLQSTNLHLLESEHRQSLHVEPEGELAIRRNHRIREEPCDGANSSYS

SEQ ID NO: 196470 - protein, 94 aa, Glycine max
  Clone ID: PAT_MRT3847_19439C.1.pep
PRVRYDRRPTPKFSSSFYPSSFHNHHIHHSPLSFISFTPFFCFLLFLIFFPCSSVSLFSLGFQSLPFLLPFQLPYQFKPSFHSISSPRFPVFSL

SEQ ID NO: 196471 - protein, 90 aa, Glycine max
  Clone ID: PAT_MRT3847_1943C.1.pep
SGDKGRLGPPRQKMGSQHSLGDPREQQRRAPKSVLQHWGREQTQDPGNPLLPSFACLPEQGLRFGCCDRPGAGEGQGRRISEVPPNFAPD

SEQ ID NO: 196472 - protein, 69 aa, Glycine max
  Clone ID: PAT_MRT3847_19440C.1.pep
VSVWILHLIALQHKDIGKEKRAHYDNYVIVAMRNIFFLISQRAQGWEQLGGTEIMSLKHNHACYCVVVT

SEQ ID NO: 196473 - protein, 404 aa, Glycine max
  Clone ID: PAT_MRT3847_19441C.1.pep
NIHLFSWPEHCRTYLTRVAACRMRHPQWQTNTPGNDIADEESFNDSLKDVQDMSLRLSIDADLAGLSSGPDMQDQVKRLLSRMKKPDSGGSNDTDGGNKMPDNVTGKYPLLWRRRRLIVIALDLYDNNGAPDKKMIQIVQRIIKASQLDPQNARVSGFALSTAMPIRETIEFLKSGNIQVNDFDVLICSSGSEVYYPGTYTEDGKLLPDPDYEAHIDYRWGCEGLKKTIWNLMNTAEGEDKKSSSPIVEDSKSSNAHCISYKIKDLSKAKRVDDLRQKLRMRGLRCHPMYCRGSSSMQVIPLLASRAQALRYLFVRWGLNVANMFVFLGETGDTDYEELISGTHKTIILKDVVSNGSEGILRGPGSYHREDVVPNESPLVASISETTEDKIANTLKELSKSGAM

SEQ ID NO: 196474 - protein, 60 aa, Glycine max
  Clone ID: PAT_MRT3847_19442C.1.pep
KKKKKKKKKKKKKKFKKKKKKKKKKKIKKKAILNNKIHIKKNIQNRDKKKLKINLKRVHL

SEQ ID NO: 196475 - protein, 82 aa, Glycine max
  Clone ID: PAT_MRT3847_19443C.1.pep
DIPQGGAFEYSGLALGAEHGCAIRESNGSVVCWGGNGQFSVSNVTEGVSFEVIVSGSNFVCGLTTNNLTVVCWGPGWSNGSR

SEQ ID NO: 196476 - protein, 60 aa, Glycine max
  Clone ID: PAT_MRT3847_19444C.1.pep
QVRWITDWDALLLMGFIHEAMDCHKGRIQLAFNGVNLDPLPTFRYFIFGFQIEILDSCSS

SEQ ID NO: 196477 - protein, 33 aa, Glycine max
  Clone ID: PAT_MRT3847_19445C.1.pep
NPSDPYPLIHRPIGDSSTHLKLSCSYLLSLIGF

SEQ ID NO: 196478 - protein, 239 aa, Glycine max
  unsure (1)..(239): unsure at all Xaa locations
  Clone ID: PAT_MRT3847_19446C.1.pep
HASGLVAGLNAQLRLVRRGRLRVTFRPVLGWLETHANPALSVHGVRIDLAWFHATSSGYCHYGLMVYALEEGYPATGGSTDGALRTEERSRVQSVNKEHLGLAISRAHLSPDGRIEDNYMRRQMHGAALDVNNLQMLDKKRDIFYLLSFILQNTKPVGHQDLVGLVISMLLLGDFSLVLLTLLQLYSISLVDVFLXVVILPFGILLPFPVGXNALFSHGPXRRSAGLARLYALWNLHPS

SEQ ID NO: 196479 - protein, 172 aa, Glycine max
  unsure (1)..(172): unsure at all Xaa locations
  Clone ID: PAT_MRT3847_19447C.1.pep
MHLSPHNTKPVGHQDLVGLVISMLLLGDFSLVLLTLLQLYSISLADGFLVLFILPFGILLPFPVGINALFSHGPRRSAGLARLYALWNLTSFMNVVVAFLCGYIHYNSQSSSSKRHPSIQPWSIMDESEWWIFPAGLVLCKLFQSQLINWHVANLEIQDXLYSNDFELFWQS

SEQ ID NO: 196480 - protein, 344 aa, Glycine max
  unsure (1)..(344): unsure at all Xaa locations
  Clone ID: PAT_MRT3847_19448C.1.pep
ELKARPSVRFPLSLPFGGDGSYMAPFTLHNDNILTSLMSQSVQPTTWYRLVAGLNAQVRXRRGRLRVTFRPVLRWLETHANPALSVHGVRIDLAWFQATNTGYCHYGLMVYALEEGYPATGGSADGALRTEERSRAYHHDAWSMRRLMNGAALEVINLQMLDEKRDIFYLLSFILQNTKPVGQHWDLVGLVISMLLLGDLXLVLLTLLQLYSISMXDVFLVVVILPFGILLPFPVGINALFSHGPRRSAGLARLYALWNLTSFINVVVAFLCGYIHYNSQSSSSKRHPSIQPWSIMDESEWWIFPAGLVLCKLFQSQLIXWHVANLEIQDRSLYSNDFELFWQS

SEQ ID NO: 196481 - protein, 491 aa, Glycine max
  Clone ID: PAT_MRT3847_19449C.1.pep
MASSKTTNPTTTTTQLEPLPPPQQRHPPPPHHQLQQHHHHHHHHQQIHDHHQISFGMMQSSSSFSSIPGNYLISKDSGAYDLGELDQAFFLYLDGQADPSSVQDQRQNSSSGMRPPTLNIFPSKPMHVEPSSSKAKANIELVSPQTSGSKRPSEPSMELANPRNETASAPQPPKPVKRESNRKGPTSSSEHEGPKTPDPKTLRRLAQNREAARKSRLRKKAYVQQLESSRIRLNQLEQELQRARTQGMFLGGGALLGGEQGLPVTMNTISTEAAMFDVEYARWQEEHHRIVCELRAAVQEHLPENELRLFVDNCLAHYDQVMNLKSLVAKTDVFHLVSGTWKTPAERCFMWIGGFRPSELIKIIVRQIEPLTEQQILGICGLQQSTQEAEEALSQGLEALNQSLSDTITSDSLSYPPNMANYMGQMAVAMNKLSTLEGFVRQADNQRHQTIHRLHQILTTRQAARCFLAIAEYFHRLRALSSLWLARPRQE

SEQ ID NO: 196482 - protein, 56 aa, Glycine max
  Clone ID: PAT_MRT3847_1944C.1.pep
KIFFYGSQSTLLHSENLTSYMADTLPLLTTCNLLCIWLLKIQEAFWYSLKPYLPNI

SEQ ID NO: 196483 - protein, 157 aa, Glycine max
  Clone ID: PAT_MRT3847_19450C.1.pep
HLVSGMWKTPAERCFMWIGGFRPSELIKIIVSQIEPLTEQQILGICGLQQSTQEAEEALSQGLEALNQSLSDTITSDSLSYPPNMANYMGQMAVAMNKLSTLEGFVRQADNLRHQTIHRLHQILTTRQAARCFLAIAEYFHRLRALSSLWLARPRQE

SEQ ID NO: 196484 - protein, 72 aa, Glycine max
  Clone ID: PAT_MRT3847_19451C.1.pep
QCLEQRFPTHCIRPKLEPPSILKRAYDGKITYYHPLPEEGGRPQGLHAVHVPRYVKAPGSFAQILAHRIMLL

SEQ ID NO: 196485 - protein, 202 aa, Glycine max
  unsure (1)..(202): unsure at all Xaa locations
  Clone ID: PAT_MRT3847_19452C.1.pep
ASATLFVAKPPLQANGKGCSEYSGLLSSSCCLPFSRKSSEDDHSVIAFHTYAAGSSGGCNKGVTKATLKVAIIGLGRMGRNFLRCWHGRKDYSLDDIAINDTGGVKQASHLLKYDXILLTSYADDKPAGSDIISVDGKEVIVVSDRHPANLPWKDEGIDXVIEGTWVLVDRXGAAKHILTGANKVVITAAGXGDILTYVGGV

SEQ ID NO: 196486 - protein, 95 aa, Glycine max
  Clone ID: PAT_MRT3847_19453C.1.pep
CSDLNSHSITNRVTGFLTHHTRAIVPTPTTCSPRARTQARTLTRIVTKHSQLRITPNPVGDQTMYIDVVHAHYVGGHQAIYWIYYHHGDEPSKRR

SEQ ID NO: 196487 - protein, 62 aa, Glycine max
  Clone ID: PAT_MRT3847_19454C.1.pep
PIRPHVRIIIKNPQYPYNSNTKSYKTTTKRATNKTTIQHMIRSLHTNDIYLLSRHNIRKHYL

SEQ ID NO: 196488 - protein, 105 aa, Glycine max
  Clone ID: PAT_MRT3847_19455C.1.pep
MNFNITQMKRCNIFSGEWIPYSKGPYYDNETCDLMIDQQNCMKFGRPDREFLKWRWKPDECELPLFDATLFLELVRGKSMAFVGDSVGRNQMNSLLCLLSHVSNH

SEQ ID NO: 196489 - protein, 40 aa, Glycine max
  Clone ID: PAT_MRT3847_19456C.1.pep
NICHCFKYSNMKFHILINLKLGIIFLILFILPATAKSMYS

SEQ ID NO: 196490 - protein, 68 aa, Glycine max
  unsure (1)..(68): unsure at all Xaa locations
  Clone ID: PAT_MRT3847_19457C.1.pep
LCFXLXRRXPTKLGTVIXIGLGXXYXCVGXVYKKXHVEIIANDXQGXRINPSWVXXTDSXRLIGXXAR

SEQ ID NO: 196491 - protein, 67 aa, Glycine max
  Clone ID: PAT_MRT3847_19458C.1.pep
ISASPFSDGLRSLQRCFHNRDVLSLGFQRLERTCGCSCYGSVLELHHASCPQSQRFRQWLRVSISST

SEQ ID NO: 196492 - protein, 117 aa, Glycine max
  Clone ID: PAT_MRT3847_19459C.1.pep
ESMLEVFLGSQARLQHAPIRGTCHPCRHGHFVRASRYNIHVLSPGRKMTSYAFLRRPRAHSLRTARWARERAPCGPEPQSCSGCPYLLRDHPLGGRGEAKAKNLWEQTLLHKQTKTR

SEQ ID NO: 196493 - protein, 65 aa, Glycine max
  unsure (1)..(65): unsure at all Xaa locations
  Clone ID: PAT_MRT3847_1945C.1.pep
WTDYLRPDLKRGLLSEYEEXMVIDLHCXIWNRRSKIGSNLLGRIXNWVKIIWKXQLKKKLKKMGI

SEQ ID NO: 196494 - protein, 41 aa, Glycine max
  Clone ID: PAT_MRT3847_19460C.1.pep
DHLRVPLLYLACGVFGGLWISLAIISFKDLKTSIIDFSNPD

SEQ ID NO: 196495 - protein, 164 aa, Glycine max
  Clone ID: PAT_MRT3847_19461C.1.pep
ARGQKPFKLRTEQRGKLKEEEFVKKVQEMMTEEEKMRIPIAQGLPWTTDEPECLLKPTVKESTRPIDLKLHSDIRAIDRAEFDQQVAEKMNFIEQLKLEKERQQKLEEEEEIRRLRKELIPKAQPMPYFDRPFVPRRSMKHPPIPREPKFHMPQHKKIKCLVME

SEQ ID NO: 196496 - protein, 399 aa, Glycine max
  Clone ID: PAT_MRT3847_19462C.1.pep
MGATTAIAALSLHCFSKSHTHFSPFRTLPRLTCSFSSSIKFNISFAPPKPKPKPEPDASNEPDGPLLIPWIVRGEDGNLRLQSEPPPSLLNAIATAQTGTKKDNKQTKTTAATATNTTKPQKARSTAPPQHSKAARRFYNQNIKESSAARLSKVLAASGVASRRSCEELIFEGKVTVNGTVCNTPQTKVDPAKDVIYVNGNRLPKRQPQKVYLALNKPKGYICSSGENESKSVISLFDDYLNSWGKKHPGVPTPRLFTVGRLDVATTGLIIVTNDGDFAQKLSHPSSNLSKEYIATIDGLVHKRHLIAISEGTTVEGVLCVPDVVELLPRQPEMQRTRIRIVVHEGRKHEVRELVKRAGLEIHSLKRVRIGGFRLPPDLGLGKYIELNKTNLNALGWKS

SEQ ID NO: 196497 - protein, 86 aa, Glycine max
  Clone ID: PAT_MRT3847_19463C.1.pep
NIIVYNTQRGVVVDLLVKALKGIEIPLLVLSVALVSLQIATVTCFLMDGIDDDARYPHNPYGYCYQNSPYSPPVDTEYAHDDNDEN

SEQ ID NO: 196498 - protein, 68 aa, Glycine max
  Clone ID: PAT_MRT3847_19464C.1.pep
NGAIFGKATKLLTSLNLNFRPSPHQIHYLYIYPYLFLFFFCYLFYFPIVIEFLQSLSFFIIQMAKSIN

SEQ ID NO: 196499 - protein, 94 aa, Glycine max
  Clone ID: PAT_MRT3847_19465C.1.pep
PRRLGPKMESRFRSIFLACPGILPAFYAPFFFFVKGGILPPKIRSYKGCKRVFFTFLQLLKQFPCCSVPPPLSRTFFCLRGSHENQNMFFSILS

SEQ ID NO: 196500 - protein, 88 aa, Glycine max
  Clone ID: PAT_MRT3847_19466C.1.pep
LYSLLGLPYLEALQRWFTVKAGYHQAVDANCRFLAYSSHTPGDLWKTLRKIKTLQKCQNLAWTACKNILTVMVNLKSRGTNVDENDRA

SEQ ID NO: 196501 - protein, 197 aa, Glycine max
  unsure (1)..(197): unsure at all Xaa locations
  Clone ID: PAT_MRT3847_19467C.1.pep
MEDSVSSSNMNATNVAQAIHTALDWASTPNARQNAVAFLDSIKNGDVRVLANTSFLLVKKSWSSEIRLHAFKMLQHLVRLRWEELRPAEHKNFANLSVDLMSEIADPCENWALKSQTAALVAEVVRREGLNLWQEMLPSLVSLSSKGPIEAELVAMMLRWLPEDITVHNEDLEGDRRRLLLRGLTQSLXXNXPLYTY

SEQ ID NO: 196502 - protein, 88 aa, Glycine max
  Clone ID: PAT_MRT3847_19468C.1.pep
MSIKFYNIQSSGKKKGTMSERAPTTLEQVVYMAKLAEHAKRHEEKVEHMANDCNYSESEELTREHHNREWAYYKNVVLSQRAYEFIML

SEQ ID NO: 196503 - protein, 105 aa, Glycine max
  unsure (1)..(105): unsure at all Xaa locations
  Clone ID: PAT_MRT3847_19469C.1.pep
PTSGVWYTIDPFINDXASGMLAICIIQPVDLINVMIQIYRRSIARVTATMLDNDGYAAYNNGLCKXPLKNATYTTARMVSFIISTYKTIDANDLNPLPLYQTPLC

SEQ ID NO: 196504 - protein, 62 aa, Glycine max
  Clone ID: PAT_MRT3847_1946C.1.pep
VMLDLWILREHSQIPHQSTTYRNHPQEIKCRAVPQFSGSMGKKASWFSAIKKIFFTAHSNLV

SEQ ID NO: 196505 - protein, 115 aa, Glycine max
  Clone ID: PAT_MRT3847_19470C.1.pep
ARLVIWNFLIFVQVELSIYSHILSFFFVNYEGTMNWARMIHLMLQSSMTVVGLKTLKLLAAQPIFMSLMMKTDVISHLTISIGQFTIIVVSFLPLYMFPDSSSAPCFVMHKLSLM

SEQ ID NO: 196506 - protein, 134 aa, Glycine max
  Clone ID: PAT_MRT3847_19471C.1.pep
GFFFCWGEKKQGFQGGGELKIWVFFKNSGKKGLGEFVKNGPPLFVGGPGPIFFGGANPPPPWVFYAGQKGGLLIFFFLALLPAHPRFCSPGKQGIFWFLINFGLGFFPLKKKKKKKKKKKKKKKKKKKKKKKPP

SEQ ID NO: 196507 - protein, 48 aa, Glycine max
  Clone ID: PAT_MRT3847_19472C.1.pep
PLLNFMGATSDCSMLHSAKQCLEFGSLGASACLLLLCMRGVFRGFKDN

SEQ ID NO: 196508 - protein, 62 aa, Glycine max
  unsure (1)..(62): unsure at all Xaa locations
  Clone ID: PAT_MRT3847_19473C.1.pep
KAGXWNHVLRHALKKNTKPTLIFLFPHFNSTMFTSNIITIILFTIFIINTFIIILSIISTIF

SEQ ID NO: 196509 - protein, 68 aa, Glycine max
  Clone ID: PAT_MRT3847_19474C.1.pep
AIGVIFLIYDIIIIIIIIILLKIAKDTWSSHLVIMEVAVCPRVQKPNLETTGRKILCTGSYKDLWGVL

SEQ ID NO: 196510 - protein, 81 aa, Glycine max
  unsure (1)..(81): unsure at all Xaa locations
  Clone ID: PAT_MRT3847_19475C.1.pep
MQPMPMNIHLDIDGLTRIILTEPXGSSTEVLLYGRPIITWYNHPMEEHLFMSTYAYKKQHRSITGRISPCLARLGDLKSLE

SEQ ID NO: 196511 - protein, 207 aa, Glycine max
  unsure (1)..(207): unsure at all Xaa locations
  Clone ID: PAT_MRT3847_19476C.1.pep
MGLTIQYLEASVAAIIGIILVSYFIKRATAGSARKPPAAGGGWPLIGHLHLLGGSTQPPYITLGSLADKYGPIFSMRIGVHHAVVVSSWELAKECFPFCRLLASVRPKFTAAKILGYNYANFGFTPYGDFWRVMRKIAASELLSTARFELLQRIRDSEMQISLKELYRTWVDKRGVSDDLLVEMKQWFGDVNLNVILRMILGKRYXA

SEQ ID NO: 196512 - protein, 636 aa, Glycine max
  Clone ID: PAT_MRT3847_19477C.1.pep
QSIFVLRERFFALGQVVQREYKILNLLDFTSKRKRMSVIVRDEEGNIILFCKGADSIIFDRLSKNGKMCLEATTRHLNEYGEAGLRTLALAYRKLDDQEYSDWNNEFQKAKTAVGSEREAMLEQVSDIMERELILVGATAVEDKLQKGVPQCIDKLAQAGLKIWVLTGDKMETAINIGFACSLLRQGMKQICITMNSDSVTNDGKEVIKGNILNQITNASQMIKLEKDPHAAFALIIDGKTLTYALEDDVKHQFLGLAVGCASVICCRVSPKQKALVTRLVKEGTGKTTLAIGDGANDVGMIQEADIGVGISGVEGMQAVMASDFAIAQFRFLERLLVVHGHWCYKRIAQMICYFFYKNIAFGLTILYFEAFAGFSGQSVYDDWYMILFNVFLTSLPVISLGVFEQDVPSEVCLQFPALYQQGPKNLFFDWYRILGWMGNGLYSSLVIFFLVIIIFYDQAFRANGQTTDMAAVGTTMFTCIIWAVNCQIALTMSHFTWIQHLFVWGSITTWYVFLLLYGMLPPQYSKSAYQLLVEVLAPAPIYWAATLLVTIACVLPYLAHISFQRCFNPMDHHIIQEIKYYKKDIEDQHMWTRERSKARHETKIGFTARVEAKIRQFKGKLQKKQQSSLGAFSPS

SEQ ID NO: 196513 - protein, 172 aa, Glycine max
  Clone ID: PAT_MRT3847_19478C.1.pep
GQIADMAAVGTMMFTCIIWAVNCQIALTMSHFTWIQHLVVWGSITTWYIFLLLYGMLPPQYSKSAYQLLIEVLAPAPIYWTATLLVTIACVLPYLAHISFQRCFNPMDHHIIQEIKYYKKDIEDQHMWTRERFKARQVTKIGFTARVEAKIRHFKGKLQKKQQSSLGALSPS

SEQ ID NO: 196514 - protein, 55 aa, Glycine max
  Clone ID: PAT_MRT3847_19479C.1.pep
ANEIKTRAPPRFINFRPPKKNFKKKISCKIGPSRMSQKKLDKRFPFSVNGRVKSY

SEQ ID NO: 196515 - protein, 59 aa, Glycine max
  Clone ID: PAT_MRT3847_1947C.1.pep
ALSFFFFFFFSTFIFQRKTIRGGGVETAGNIKIPSPLTITSLAIAEQETLYKSACHTRL

SEQ ID NO: 196516 - protein, 90 aa, Glycine max
  Clone ID: PAT_MRT3847_19480C.1.pep
TRLHKLSSSIRKGEKMKQCNTYHVSILSYSQVLSCFLSRCLSLPIILLICYFIHLHLILSTKQSLKVKNEVIKLKSRQVTTTKKATKVSM

SEQ ID NO: 196517 - protein, 111 aa, Glycine max
  Clone ID: PAT_MRT3847_19481C.1.pep
SASPTVANPPLFFSYNSFSIVVLSASFFPCAAVPKPLFICPNLQLFCLAFSELIDKILTLCSTTSSAASVPPFFFFFLLISSPELIYKTLTRCPTSPTDTEPPFFSNSFFI

SEQ ID NO: 196518 - protein, 79 aa, Glycine max
  unsure (1)..(79): unsure at all Xaa locations
  Clone ID: PAT_MRT3847_19482C.1.pep
MWHTQIVHSIDKLGLWHRLPVFFGLLYLGIRRHLQQQYNLFNVGTTPVGIRFNPSDXSYRTDDGKYNXPFNEVAGSQGS

SEQ ID NO: 196519 - protein, 55 aa, Glycine max
  unsure (1)..(55): unsure at all Xaa locations
  Clone ID: PAT_MRT3847_19483C.1.pep
GIFPIQVQIYGLRVLRDSMIXNLTLDKLNFDFQAGCSKMTPKAKPSNSSIWCIPD

SEQ ID NO: 196520 - protein, 70 aa, Glycine max
  Clone ID: PAT_MRT3847_19484C.1.pep
SSMKKHSTGPMLWMMHHRTTDIENHFNFVQGIKRWMRLRTYNLLLLIEELQWSWLVLHAIMLLGAGKPSL

SEQ ID NO: 196521 - protein, 87 aa, Glycine max
  unsure (1)..(87): unsure at all Xaa locations
  Clone ID: PAT_MRT3847_19485C.1.pep
RLVLXPSXCXPGRVGXAXXGPXLXLPXPXXGXLCPLLXXXXWLAVAAFXXAGSXPFFXLXXVVXXFXRXVLFLXRSFCVXCCLGLFL

SEQ ID NO: 196522 - protein, 71 aa, Glycine max
  Clone ID: PAT_MRT3847_19486C.1.pep
HRFNIKSNIPHPHNITLILQFLLLLYYYKNYQPFQQYINNYYIKNIYSYNYIYYNIKTHTNFLFLNHHLLS

SEQ ID NO: 196523 - protein, 66 aa, Glycine max
  unsure (1)..(66): unsure at all Xaa locations
  Clone ID: PAT_MRT3847_19487C.1.pep
MCSYSQVNGQPTXKTPDHLLNTICGQRGLKGYSATDCDXHGVLFDNQHYTKTPDEASVEADKAGLD

SEQ ID NO: 196524 - protein, 186 aa, Glycine max
  unsure (1)..(186): unsure at all Xaa locations
  Clone ID: PAT_MRT3847_19488C.1.pep
MESKNPARFTLGKQSSLAPERHNKEAELQKDGEAVDQGVRLMYSAFEGDVDGIREALESGVSVNYKDIDNRTALHVAACEGFTDVVDLLLQKGAEVDPKDRWGSTPLADAIFYKKXDVIKLLEKHGAKPLMAPMHVNHAREVPEYEINPKELDFTNSVEITKGTFCSALXGRGTKGAVKKLGXDVI

SEQ ID NO: 196525 - protein, 425 aa, Glycine max
  Clone ID: PAT_MRT3847_19489C.1.pep
MPAPPANAGLGVAAMSYIAVDYLRHLSPVWHSRLQPALWSLLALAAVVRVPSYRHWSAEFRSAIPFIASMFFMLAALLYEMISVRSVTAVLGLDWHLNTPPLPDTGQWLLLALNEKLPSPIVEILRARIIGLHHYLMLFMMLAFSVLFDSVKAPGLGLGARYMFTMAVGRLLRAITFASTILPSARPWCAGSRFRVPGYPHRWAQKYYVPYATDHDAISRVIKVDTAYVDIGKPVGDYQPNWGSMSFLIDFMRPTVSEGPSWYSLLKKAGGGCNDLLYSGHMLVAVLTAMAWTEAYGGFSSALVWLLVMHSAQREIRERHHYTVDCIVAIYVGILLWKMTGFIWSREATSSNRRLNKFEKIQSRLIQASKDSDIDEVRELLKEFELSSEESKNQIGIKYARLFRSATIVFALTIVVLAFTLTSDG

SEQ ID NO: 196526 - protein, 149 aa, Glycine max
  unsure (1)..(149): unsure at all Xaa locations
  Clone ID: PAT_MRT3847_1948C.1.pep
ETFIILFFLCISVRIQNSKLCSWLVIGIAAYWWRMFGSQTPNLQKLAIKILSLTCSASGCERNWSVFEQIHSKKRNRLEHKKLHDLVFVKYNHQLKQRYNARDEIDPISLNDIDVCNEXLVGEMDQDDDNDAGNNLVFEDDDALNWATV

SEQ ID NO: 196527 - protein, 295 aa, Glycine max
  Clone ID: PAT_MRT3847_19490C.1.pep
TAASRRQKGGHSLHNDLRVLKLDHVRVIDTSYIFQSLDGSIHKRPSLNSLCQAVLHHEVREKGAPHNCLDDAKAAMDLVLAKIKHGVDKEFPIALVQEHVPESELAKLLLHKIPNTVNIETLHKILPGNFKIELKPSRKGQGANYSAFAIFRSPPEADGAYENVQGSQLKDTYGHPQKLVTFRLSTGLSVNLFVRKMVTEEPNDQTPSKRALQINEAVDVSKKAKMDPKIEEDASAGFGKGDTDAHSKEIEALNQQLKQSEMVIESLRKQLTQKDFEISMLHKMISSKKKKKQTV

SEQ ID NO: 196528 - protein, 490 aa, Glycine max
  unsure (1)..(490): unsure at all Xaa locations
  Clone ID: PAT_MRT3847_19491C.1.pep
MESKNPARFTLGKQSSLAPERHNKEAELQNDGEVVDQGVSLRCWGFAGLVPGSCEEVAEGESVNDTDVQSVRLMYSAFEGDVDGIREALEQNGTEDDPNDRWGSTPLVDAIFYIQNDVIKLLEKHGAKLLMAPMHVNHAREVPEYEINPKELDFTNSVEITKGTFCIALCRGTEDAVKKLGEDVISDEEKVKAFRDGTFLIEKRRGTKFAVKKLGEDVISDEEKVKAFRDELALVQKIRHPNVVQFLGAVTQSSPLMIVTDYLATGDLHDFMNNIEALKPSTAVRLGYLKFMKFYFFNYIVNKXCIFMDYPLKSMFNWDSGHLKVADFGVSKLLAVKEDKPLTCQDTSCRYVAPEVFRQEEYDTKVDVFSFALILQEMIEGCPPFSAKQDDEVPKVYAAKERPPFQAPAKRYSHGIRELIEECWNENPAKRPTFRQIITKLESIYNTIGHKRHWKVRPLKCFQNLEALLKRDHSNGSSRGGSSRSTSSRI

SEQ ID NO: 196529 - protein, 46 aa, Glycine max
  Clone ID: PAT_MRT3847_19492C.1.pep
TFPYTISPNFPHQKKSPKFTLASSKILHIQKLYHKLIYIISHFTTN

SEQ ID NO: 196530 - protein, 65 aa, Glycine max
  Clone ID: PAT_MRT3847_19493C.1.pep
RNTKIDMEFLKGFRFYIGQEITYVSITKYGSFGIYGFWHLSRSLIYGCPPSLSSYMPYLWRVIGM

SEQ ID NO: 196531 - protein, 66 aa, Glycine max
  Clone ID: PAT_MRT3847_19494C.1.pep
HASAHASVERMFGHIDGGNGSKTSVTVDRECVSPLNSLCAECIPNEEGKPCAFPYLKVIKIVAFRL

SEQ ID NO: 196532 - protein, 61 aa, Glycine max
  Clone ID: PAT_MRT3847_19495C.1.pep
KGFVYPLQGIYPNEGPIQKIKSLNGFDDGNPLTNLLWGIPTSSYDEEFGHGKPCWFGHYCP

SEQ ID NO: 196533 - protein, 94 aa, Glycine max
  Clone ID: PAT_MRT3847_19496C.1.pep
TKEASTTLKAAEARMLVNLGGACAANRLYGAHKSRESHPTIPVTGNRLMYALTYRGVMAILMHPHALADGQVGPDMTYPCELMGAASIGKSDES

SEQ ID NO: 196534 - protein, 111 aa, Glycine max
  Clone ID: PAT_MRT3847_19497C.1.pep
KFGFIKKIGQVHIGGPGGNPIFGQQMSSRKDYSLAATDVVDTKVKELLKRAPSRATRIISTHIKILLKQARLLIEKETVDGEKFMSLVTDGKAENTCCIIIHASHRNMFVL

SEQ ID NO: 196535 - protein, 46 aa, Glycine max
  Clone ID: PAT_MRT3847_19498C.1.pep
MAGPVSSLGYVNTERKFLKHIRDNVHGNILLEPIFLSFMDTEQFQR

SEQ ID NO: 196536 - protein, 61 aa, Glycine max
  unsure (1)..(61): unsure at all Xaa locations
  Clone ID: PAT_MRT3847_19499C.1.pep
STSSXITFXLNXXFNDXNXLXCHXXXGXTXXPYXHYLEXXXILXXXGXFVTCXNSPXXINX

SEQ ID NO: 196537 - protein, 66 aa, Glycine max
  unsure (1)..(66): unsure at all Xaa locations
  Clone ID: PAT_MRT3847_1949C.1.pep
KNARLRELVNLVVVAGDRRXVSTHLLEKALMMKXYGLILTYPVIGQCRWMYSQMNRVRNRELYRVI

SEQ ID NO: 196538 - protein, 87 aa, Glycine max
  unsure (1)..(87): unsure at all Xaa locations
  Clone ID: PAT_MRT3847_194C.1.pep
HIFVKTLTCKTITLRVLSSDTLYNVKANTPYXEGIPPHQQRLFFACIQRWDWRTLADLNILKESPSSFVSLLSGRLQIVLHNFAGNT

SEQ ID NO: 196539 - protein, 51 aa, Glycine max
  Clone ID: PAT_MRT3847_19500C.1.pep
PDPYPIDLINECITLNCQTRNITIRMWVAYIVLGNALLGYSGELFSSLMLA

SEQ ID NO: 196540 - protein, 69 aa, Glycine max
  Clone ID: PAT_MRT3847_19501C.1.pep
GLYSHCKHWNNTHHLNTNFHYFLLQTRLVKNTATLSHTLTVNNYGQMYALKRNKVEHSGLARYQPEHYT

SEQ ID NO: 196541 - protein, 229 aa, Glycine max
  Clone ID: PAT_MRT3847_19502C.1.pep
MSEATTSACETGLNLHNLLHNRKREDAEPQELDEYLIYLPPELCELKVIGFSKDIGSSISLLPSIMHRLGNLLVAIELKHMLSSSFPEAAEISAIRVLEALTTEKCQERFSLERLEVHADAFLKFAVARHFFLMHDSLHEGDLTKRRSNAVNNSNLFKLAIKRNLQVYICDQTFDPTQFYALGRPCPRLCSNETKESIHFCLNSVKEQGKVTETQCNKNHHWLHRKTIA

SEQ ID NO: 196542 - protein, 89 aa, Glycine max
  Clone ID: PAT_MRT3847_19503C.1.pep
NVEKPKAWKRELIADQNTFEDYYEPICTKSIHQGALLQLFLPKNRSLRNPFAGFELSSSVFHFFLEWTDSGIITWLLGGGVVEICFSVT

SEQ ID NO: 196543 - protein, 456 aa, Glycine max
  Clone ID: PAT_MRT3847_19504C.1.pep
MQLVHSDEPAPERRDSPEKPDDPNADTDSLDPGTDDGAALDVTGKSVEFPAAENAGDSAESLYVYKNVYSLIPKSVSRLARLRTLKFFGNEINLFAPEFGNLTALECLQMKISSPGIGGLQLHTLKGLKELELSKGPPRPSAFPILTEISGLKCLTKLSICHFSIRYLPPEIGCLKKLEYLDLSFNKMKTLPAEISYLKGLISMKVANNKLVELPAAMSSLSRLERLDLSNNRLTSLGSLELASMHRLQELNLQYNKLLGIFQIPSWICCNMDGNDKARCKDDCSSSVEMDLYESNFQENDETLSDGPHNTSSSMLTSSSSSSRCFASRKSGKRWKRRHHLQQKARQERLNNSRKWKAVDHDDQLLSKKIHRISEPENHDSLASESCAEIVSENGSLDDNNKRISSERAVNDNAIDNDNNDEVITEKQFSGEDCCTTESKDEKEESLCSLDKRSEQ

SEQ ID NO: 196544 - protein, 57 aa, Glycine max
  Clone ID: PAT_MRT3847_19505C.1.pep
DNHPWAGQWSIVGPLVTLEQFRASAHQARHPPSLGAPRGCYIWLSFPQAIITWESCA

SEQ ID NO: 196545 - protein, 61 aa, Glycine max
  Clone ID: PAT_MRT3847_19506C.1.pep
KSNSGGADDNHGGKVSTVPKKTATDGTTFMQEIMARFKLQGIKTVPEIIKTRHKCMRKLQL

SEQ ID NO: 196546 - protein, 90 aa, Glycine max
  unsure (1)..(90): unsure at all Xaa locations
  Clone ID: PAT_MRT3847_19507C.1.pep
CEDFAIYCKTGLLEIGQRGPAVSIIRGPPGGGLSSPLRKGTTNXLXKATTAGGVYCGRRDKADHGIRPKRVKGRVEPLTPRVAPGLLPMG

SEQ ID NO: 196547 - protein, 42 aa, Glycine max
  Clone ID: PAT_MRT3847_19508C.1.pep
YCCRSLMMCQLASWWCCINQLTQSSMILVNDKMRDCDFIMVF

SEQ ID NO: 196548 - protein, 449 aa, Glycine max
  unsure (1)..(449): unsure at all Xaa locations
  Clone ID: PAT_MRT3847_19509C.1.pep
LGFLFSSNNVDATMFTLSSYRSLSFKRSXLVAFFTRGILRKLKIIVAIGLIVCMIVGFLSGVIFFSYKIGVEGKDAVISLKLHVEENNYAERIGVKKWMDENDVAGMVDSYTTKIYETVSDQIDGLALQYNMTEFVTGIKHFVISNPVNYSAPAKVLMTPSPYAEKFLSLKTRVRNREWSQIYTEADSILRELVITRXEDLVEKAKGFAFKGMDVSQRIFTSSRTVLGSSTKFMFSIANSIISGAAEVFNFVSQSMVFIWVLYYLITSESGGVTEQVMCMLPISNSTRDRCVEVLDKAISGVLLATAEIAFFQGCLTWLLFRLNKIHFLYMSTVLAFISPLLPIFPSWLATIPAALQLVLEGRYIMAIVLSIIHLFLMDYGASEILEDVPGNSAYLTGLSIIGGMTLFPSALEGAIMGPLITTVMIALKDLYAEFVLQEPKDKSKQKAS

SEQ ID NO: 196549 - protein, 94 aa, Glycine max
  unsure (1)..(94): unsure at all Xaa locations
  Clone ID: PAT_MRT3847_1950C.1.pep
HPDWVLNVGWAPHLGVPXFTRGRGSQGGKVIFWAVAKKGGQWEGQVFNYFHPPVWRGLWSFPGKKLVVGDGNPHVALWKETVNGGWPQGAPMEP

SEQ ID NO: 196550 - protein, 65 aa, Glycine max
  Clone ID: PAT_MRT3847_19510C.1.pep
LAKYFFFLFTFYLFFHHKSLNLFFPSIEFGMAGGGGGDLPPWKEAAPSRPTITLPSRSGSMENPF

SEQ ID NO: 196551 - protein, 202 aa, Glycine max
  Clone ID: PAT_MRT3847_19511C.1.pep
MNPEYDYLFKLLLIGDSGVGKSCLLLRFADDSYLDSYISTIGVDFKIRTVEQDGKTIKLQIWDTAGQERFRTITSSYYRGAHGIIVVYDVTDQESFNNVKQWLNEIDRYASENVNKLLVGNKCDLTANKVVSYETAKAFADEIGIPFMETSAKNATNVEQAFMAMAAEIKNRMASQPVNNARPPTVQIRGQPVNQKAGCCST

SEQ ID NO: 196552 - protein, 43 aa, Glycine max
  Clone ID: PAT_MRT3847_19512C.1.pep
VMEPEGVIDRYWNESDDIIYDMNLLQLLLSGIYAYRLDKSYDK

SEQ ID NO: 196553 - protein, 52 aa, Glycine max
  Clone ID: PAT_MRT3847_19513C.1.pep
SPQRVNPRKKVPQVFSKVNGFANPRKVNLVSPCLGCHLKRPIPYLEFPLKEF

SEQ ID NO: 196554 - protein, 95 aa, Glycine max
  Clone ID: PAT_MRT3847_19514C.1.pep
SYSTQYLESDKLDEQTNITCMMQQVSHSSSTVKSLPCKILMWFLDQIIRKRKRKSRTTKVKQLNMSCACVILMIVGFISQIGITLLNILVFKLVS

SEQ ID NO: 196555 - protein, 206 aa, Glycine max
  Clone ID: PAT_MRT3847_19515C.1.pep
LHAKTPNIMENKENINEWQQIEQFPELSEWNMVVINENYLVGDQASSTNNELSLLQIVPTTVTDPEVDGTSSPLTVSSSEGETAPLDWRVRVVSEAKKVLKVRLEGVRERVVGVASKVGNWAMCAGAFWSFTQVAGAAAAAAVLLSLVYVGIRRRRRRVGRRNVVVDPWVYLLKEKDEKISQLLFQIAQLNEMLSSRRKVLVHQIN

SEQ ID NO: 196556 - protein, 64 aa, Glycine max
  unsure (1)..(64): unsure at all Xaa locations
  Clone ID: PAT_MRT3847_19516C.1.pep
XXCEKTTEGGRTVETTLATEGGLCLAKEEKRIKKQARERATWVCFCCELRSLNLSLLLTQSNSN

SEQ ID NO: 196557 - protein, 79 aa, Glycine max
  Clone ID: PAT_MRT3847_19517C.1.pep
TRPVRMVCLPWIYLVDQVRKSEVRGIEDCGSRIFLIMYGLSLLPSQWNRNFDRYMDSIKFYKSKFSIGVASNFLIKLSM

SEQ ID NO: 196558 - protein, 70 aa, Glycine max
  unsure (1)..(70): unsure at all Xaa locations
  Clone ID: PAT_MRT3847_19518C.1.pep
HANNHTYKSFLTFYLTFKNLLNLTNHFSLIXTNLSNTIFYLFLLPSPIHNSKTSLLILLFFSPFTTLLFS

SEQ ID NO: 196559 - protein, 63 aa, Glycine max
  Clone ID: PAT_MRT3847_19519C.1.pep
TKMSGRSQKTTARFIRISPKGEQGLQRPTQLVFVFKGSNWIPKRLYQLNNLYYWPPFIPGELG

SEQ ID NO: 196560 - protein, 142 aa, Glycine max
  Clone ID: PAT_MRT3847_1951C.1.pep
MNGSRKYTDRIEHPVCYSPHYVDIDTELNSIPRSFGNHISIRRQLQLIEEEEQGRSLELKKRSLAQLPFAQKYFFSSPHFGFSMDESRISDDHFNFQPAEESFSFPLHAKSRHTDSNYSDEDSNQGLNLPDSPFAFPLDSGM

SEQ ID NO: 196561 - protein, 76 aa, Glycine max
  Clone ID: PAT_MRT3847_19520C.1.pep
MMESYLNENFEVKSKNSSEEALQRWRRLCRVVKNPKRRFRFTANLSKRGEAAAMRRTNQVSFLFTIYFSMLQSYFR

SEQ ID NO: 196562 - protein, 137 aa, Glycine max
  Clone ID: PAT_MRT3847_19521C.1.pep
KKNTPGAPKRKGPGTGGRRFQEKKGKDRVSPGKKGQKAKREKRRKAPKKGTQPVPNKGKRAQRGGQTEGENISPQEKQRSRMEPKPKSPHKKKKGKPQRKGKKKNHGGSEHPRRGRTGKDGAHGGPASKRLPNKRRI

SEQ ID NO: 196563 - protein, 106 aa, Glycine max
  Clone ID: PAT_MRT3847_19522C.1.pep
SCESKGFKRRKSQVFLFNNLAKNKNQPRGVKMALGANGVEQGGNKLKDCPYFWGPKGGGVFFFKIWLGRSQVFCFFAVPTRRGQKKGGKNIFCPPGKKFKGGFFFV

SEQ ID NO: 196564 - protein, 42 aa, Glycine max
  Clone ID: PAT_MRT3847_19523C.1.pep
KINHPSAYVGRGTLQLIRSAPGSHQHVLIRQIQSILLHLKPL

SEQ ID NO: 196565 - protein, 158 aa, Glycine max
  Clone ID: PAT_MRT3847_19524C.1.pep
SKDETSDTPTKEETESPASAPAPATAPSGRRLSVQDRINLFENKQKENSGGRAPELRRLSSDVLRRWSSASDMSIDVGSGDKKDSDSPLPTPASSVSQTKSVVVSEDKDQNDNKLEKFAKTDQGSSQETGKVSVFDEAKNGGFKDQVGSGGGFSETTL

SEQ ID NO: 196566 - protein, 82 aa, Glycine max
  Clone ID: PAT_MRT3847_19525C.1.pep
KPGPGFPWINQPSKGKFLVQKLPPGPFNLEPNLGKTQTPKVLFFPSFFKEPHWSRFGKILNLNYFYWHFFDQPTCWTANKPA

SEQ ID NO: 196567 - protein, 65 aa, Glycine max
  Clone ID: PAT_MRT3847_19526C.1.pep
STKFRAILLLSLHSSPSSSKLLSMASYGGEFLLDSSSPRRGISSLSSLAIPVPFIFQEAKESNKH

SEQ ID NO: 196568 - protein, 35 aa, Glycine max
  Clone ID: PAT_MRT3847_19527C.1.pep
RTDARIRSRTRPFKTKVYKPTPLTRIQSTSQAKND

SEQ ID NO: 196569 - protein, 83 aa, Glycine max
  unsure (1)..(83): unsure at all Xaa locations
  Clone ID: PAT_MRT3847_19528C.1.pep
PPRKAFGKMCVKKYGQKIPFKSNLXKKGGPANPLEVLKWALTPLGGLVGANPKRRGMTHLTVGQKKPLPNLPSLLAWGFSKGT

SEQ ID NO: 196570 - protein, 85 aa, Glycine max
  Clone ID: PAT_MRT3847_19529C.1.pep
LSILGSTILILECWVHTSMPKEKRKQDQARFWKLFEEGDDIEYELGLGTIIWKQTKYLLYSRFSSQFCLRKWMRKFSLFDLQLTL

SEQ ID NO: 196571 - protein, 54 aa, Glycine max
  Clone ID: PAT_MRT3847_1952C.1.pep
AGYSRPQEYVSLLKSNDPVGFNNVDVLAWGSIGQGVALYILAPPSKGYDPAFFG

SEQ ID NO: 196572 - protein, 39 aa, Glycine max
  Clone ID: PAT_MRT3847_19530C.1.pep
IFFSCFPNFSNEFFSSKTHLLSSSFLLKKLFFNPPNQKS

SEQ ID NO: 196573 - protein, 474 aa, Glycine max
  unsure (1)..(474): unsure at all Xaa locations
  Clone ID: PAT_MRT3847_19531C.1.pep
MSLGYAEKLSYIEDVGNVGMVEYFDPSHVLREKIDQLAIMIKKSKHLVVFTGAGISTSCGIPDFRGPKGIWTLQREGKALPEASLPFHRAAPSMTHMALVELEKAGIXKFVISHNVDGLHLRSGIPREKLAELHGNSFMETCPSXALRYFRDFEVETIGLKETSRRCSVAKCGTRLKDTVLDWEDALPSKEMNPAEKHCKQADIVLCLGTSLQITPACNLPLKALRGGGKVVIVNLQKTPKDKKASLVIHGFVDKVIAGVMDQLNMQIHPFVRIDLFQIILVQALSNDERYVNWTLQVASVHGQKAALPFIESVEISFLDREDYKAAILDKQPFRLKRFSXRSYNKAFEMVLKLNFSDGCGCSSLEIDVPVDFKVSTDCFDFDKDYIFQKLRDKAVLESRCGQNAVIERKAILTPRSDVTTYAIVTNVVQYSKTCKAALDSLSNGDFKKRKASVTGTGSSRKRSKGSSKCKREC

SEQ ID NO: 196574 - protein, 56 aa, Glycine max
  Clone ID: PAT_MRT3847_19532C.1.pep
IVKLGFFITYIFYLDISLVDVEFRFFPPIFQPRYKTSFCTTAVPYPMFHILPNTLR

SEQ ID NO: 196575 - protein, 85 aa, Glycine max
  unsure (1)..(85): unsure at all Xaa locations
  Clone ID: PAT_MRT3847_19533C.1.pep
RKHLVDPTLLRLIKKVNQKKKMKVKDLRRSRKCLRKRKLKGEEEXEILMALIDLKVVSRVLRMSELSEEQLHWCEEKMSKVRVLD

SEQ ID NO: 196576 - protein, 293 aa, Glycine max
  unsure (1)..(293): unsure at all Xaa locations
  Clone ID: PAT_MRT3847_19534C.1.pep
MTTMLTNEHGLSLNLKETELCLGLPGGGSEVETPRATGKRGFSETVDLKLNLQTKEDLNENLKNVSKEKTLLKDPAKPPAKAQVVGWPPVRSYRKNMMAVQKVSNEEVAEKTTSSTIANSGAFVQVSMDGAPYLRKVDLPMYKSYIRLIXCLGQNVQLLHHGYLWGPRNDIFMNDSKLMDLPPSSEYVPPHQNTDGDWMLVGDVPWEMFVVVMQPPGEIMNGSETIGPCVQNIGKMQKQKGKLAQYNVLREIPYATGPMEQIISPTSATLWSGMLLVECVWCLAFCSYKDCVV

SEQ ID NO: 196577 - protein, 56 aa, Glycine max
  Clone ID: PAT_MRT3847_19535C.1.pep
AQHGHRNSSSHLVLDGDAPSGGPLRGGAGAGPVRGFERRKPSPRRRGSGGPGLSSI

SEQ ID NO: 196578 - protein, 66 aa, Glycine max
  Clone ID: PAT_MRT3847_19536C.1.pep
PPSMDDKGDIPTSIGHGIFSYQMASVDPSCSTVRHLNPRVALLGAQFPFLLIQSAPWQSSLASIST

SEQ ID NO: 196579 - protein, 56 aa, Glycine max
  Clone ID: PAT_MRT3847_19537C.1.pep
DSGRHLIRKELIASRLYTMLHVLLIVVTEMTMAWIHFSALLRKEVARLRTLARNVS

SEQ ID NO: 196580 - protein, 89 aa, Glycine max
  Clone ID: PAT_MRT3847_19538C.1.pep
TISTWAVSNNYDREEGICDVQDMNAATIKREQPGADKQNKEIAVKTDDAGEDYSNPRHNYTNLNPILNAYETSNVPNNSVGSMQIPAEH

SEQ ID NO: 196581 - protein, 105 aa, Glycine max
  Clone ID: PAT_MRT3847_19539C.1.pep
IMFRIIRAFLPALQQNACASCDIWSISNLFLTYITHKISKFPDASVICLTPSTNLDELKIYLLWISSISFCNETLSPANVLFEWMPGVFYLSSFGLLLLHHVLTL

SEQ ID NO: 196582 - protein, 85 aa, Glycine max
  Clone ID: PAT_MRT3847_1953C.1.pep
KAWAKWIPHCHQGNGPDIWFFFFAPKGVPTPSTSEPNGCWNGQWTHFLYFMGPALNGKKLEAFVSSLGVKNNVVLGFPGLCKGFV

SEQ ID NO: 196583 - protein, 84 aa, Glycine max
  Clone ID: PAT_MRT3847_19540C.1.pep
MAYEITEIKKIGIGLIGFGLFFTFLGIILFFDRGLLALGNIFSLAGVGILLGWRSTWALFTNRANFKALFSPSLFITKLSALKS

SEQ ID NO: 196584 - protein, 157 aa, Glycine max
  Clone ID: PAT_MRT3847_19541C.1.pep
MQPTSGGGGLARFRSAPASWLESVLLKEEEEEEDPLSFTQLLSTIDDAPSHSQHQLYGAALSNKDKTPEIFMLEDSVPCRVRAKRGCATHPRSIAERVRRTRISDRIRKLQELVPNMDKQTNTADMLDEAVAYVKFLQKQIEELSEHQRRCKCVVQE

SEQ ID NO: 196585 - protein, 67 aa, Glycine max
  unsure (1)..(67): unsure at all Xaa locations
  Clone ID: PAT_MRT3847_19542C.1.pep
TTFXKAQDDHDMRVVDLKIQTKTLSTCQDRFIEKIKRKSGCSHHILDNRKLNPLFLKQKRQILHSIT

SEQ ID NO: 196586 - protein, 65 aa, Glycine max
  Clone ID: PAT_MRT3847_19543C.1.pep
QHFSTPHVGIYLTWPMSLSTSNFTSTSINSSTSTLFHLSSTSLSKDSYASNQHNPILMFIYTTTS

SEQ ID NO: 196587 - protein, 74 aa, Glycine max
  Clone ID: PAT_MRT3847_19544C.1.pep
ITTKHMLPTVLRMAGDPVANVRFNVAKSLQKIGPILDNSTLQSEVKPILEKLTQDQDVDVKYFAQEALTVLSLA

SEQ ID NO: 196588 - protein, 150 aa, Glycine max
  Clone ID: PAT_MRT3847_19545C.1.pep
MEETTSTIIMAALSTLTPSQFSDLTRSIISATNHHHRRLSSLLSSPTLFSLTLHHLHTLTLPQKTLLIARHLLSSLHLLTATSPPLSTTTRQRDLDAALLLLLLCETHNHNPHALEAPFSEWRKNLSKVFSDSLVTVSRNTPSKLYDDLR

SEQ ID NO: 196589 - protein, 83 aa, Glycine max
  Clone ID: PAT_MRT3847_19546C.1.pep
ILSAILMLDTENARSMQSQRLKVLTDWNTDETSPYRNTVLWRGGGDMGALFPDEPVASAKQTIVQERLQLVALALLPFTYCGP

SEQ ID NO: 196590 - protein, 100 aa, Glycine max
  Clone ID: PAT_MRT3847_19547C.1.pep
LKHDQLKMELTEGHVFQGWHEGAIEFPPTYKYRLNSVDYLGCDQQHVSRKRRSPAWCDRIIWFGKGMKQIQYNRSESKLSDHRPVRAMFTADIRVAGTCK

SEQ ID NO: 196591 - protein, 124 aa, Glycine max
  Clone ID: PAT_MRT3847_19548C.1.pep
GAQALGPQNRALQRGVKRKLPLLRSVFFQGTFFKPNFWPQERPAPKALGQNLSKNKLKPTFGPPFGNPPLVGHPERPHPQDPAPNLFGGPLPRPSLPLCYFPTFQFPSLWKGQAKKTFFFNHFF

SEQ ID NO: 196592 - protein, 222 aa, Glycine max
  unsure (1)..(222): unsure at all Xaa locations
  Clone ID: PAT_MRT3847_19549C.1.pep
PSSLWSDLSMDFITGLSASQGYTTIMVVVDHYSKGTHLGPLLTHYTAHKAAVLFMDTVCKHHNFARSIVSDRDPIFISGLWHELFHISGTKLRFSTAYHPQTDGQTEVINRILEQYLRAFVHDHPQHWFKFLSLAEXCYNTSVHSGIGFSPFEXVMYGKPPPALPLYSAGTSTVEAVDAILHSLATIHHTLTCRLQKYQDSMKRIADSHRRDLTFNIGDWVY

SEQ ID NO: 196593 - protein, 115 aa, Glycine max
  Clone ID: PAT_MRT3847_1954C.1.pep
AKKIFSPGGRRFFGPGGPPANPRGREFVGVRGHRFFRPKKSFLFGGGGNFLLFFPPPKKFLKFPPGKKYEKGFFFHRFQKAYPFCAFLVGGPKSQGWTWWGYSKKRLLVGWAFNF

SEQ ID NO: 196594 - protein, 237 aa, Glycine max
  unsure (1)..(237): unsure at all Xaa locations
  Clone ID: PAT_MRT3847_19550C.1.pep
MRMLPVCSATPSYSTSSQIPLFGGLHPIRKDLESRCVAEEGVHLASQYGAHSLRNSFAVQATKTVLGSFSSTSESGYLTSTWGYSPVLTDGHHSLSNGEVRHMESYHLSTVPDELADFAEQATEGSNTLVTPAQPETLSAADIMPENFTSSPSSINVDNESLASTKASVGDLVAGFNESFNASINEGQNALRSSLDTATSFVDSIVKTATDXVDNTFSKAFSSVDQQGELAIKINQL

SEQ ID NO: 196595 - protein, 56 aa, Glycine max
  Clone ID: PAT_MRT3847_19551C.1.pep
DLYVIFTSHLSLLFLGANNYHLLTNDLRVAFDISSITHSIYHVLRINIYFSLNPWS

SEQ ID NO: 196596 - protein, 71 aa, Glycine max
  Clone ID: PAT_MRT3847_19552C.1.pep
FTQLFKSFEIIGALWMDPLEAQTGPIRFLMPCNPMSSTLSSLHLLDKVSSSLYVLRCDKVRYSDRSIREVW

SEQ ID NO: 196597 - protein, 90 aa, Glycine max
  Clone ID: PAT_MRT3847_19553C.1.pep
ADGICSSSSGGNSTTRKMVAPGIMMLLLIFSTVVLSQKWVCGTFPPAYGVCSQCSSLCTACGKHIFSFFASPRVCVSLYLRGYERFVLFF

SEQ ID NO: 196598 - protein, 66 aa, Glycine max
  Clone ID: PAT_MRT3847_19554C.1.pep
MDSTSPSFLLSLAYTPIFYTTSHNLKSDPKPEETHTLRSTKRRDLQFILFFTFLCPALPQLSTSHP

SEQ ID NO: 196599 - protein, 73 aa, Glycine max
  Clone ID: PAT_MRT3847_19555C.1.pep
QRACLCILIHGVYSNPVRGSSFHQQESTQVVHLRTAQSVLSAAPLSKFTYQLPENKNASASRTQGQHFPSRQQ

SEQ ID NO: 196600 - protein, 45 aa, Glycine max
  Clone ID: PAT_MRT3847_19556C.1.pep
VEESVVVGNDKDTSAESVHGICQRLDSGDSMPAGRLVVLRHARTI

SEQ ID NO: 196601 - protein, 54 aa, Glycine max
  unsure (1)..(54): unsure at all Xaa locations
  Clone ID: PAT_MRT3847_19557C.1.pep
RRSCSGGRKRRRXXTRGTGLXDPGRXKEKEEXLRGXGXAXGTRXSRKGXYTRRE

SEQ ID NO: 196602 - protein, 67 aa, Glycine max
  Clone ID: PAT_MRT3847_19558C.1.pep
NTQFRSLQNSHVPLLSCHVCGTRFSFPCFFLFYLLYSILFSLFPLFFTFFCFNKLIELCLFFLWHLL

SEQ ID NO: 196603 - protein, 105 aa, Glycine max
  Clone ID: PAT_MRT3847_19559C.1.pep
KQTFPPIVFCFQGPPIGWVCAPFFLRVNFFFKRPPMENPAFGRLNFYGAFLNTPLFFFFVPLLGLKSLKKRVVCFYILLRFWVKKVKKKSLFFFFKFFLLFQNGV

SEQ ID NO: 196604 - protein, 52 aa, Glycine max
  unsure (1)..(52): unsure at all Xaa locations
  Clone ID: PAT_MRT3847_1955C.1.pep
KPPGTHEVVMIRAIGIEDNTXLXSIDPSVILTYNAQDKKSTVQEDAGCKPQW

SEQ ID NO: 196605 - protein, 68 aa, Glycine max
  unsure (1)..(68): unsure at all Xaa locations
  Clone ID: PAT_MRT3847_19560C.1.pep
YGLKLREATLGXAKPDFEDENRRLAQLLREAGKTRDTEAKSLEDLIDPGSQSTNKEGAKRRTALGFKI

SEQ ID NO: 196606 - protein, 88 aa, Glycine max
  Clone ID: PAT_MRT3847_19561C.1.pep
RPAVTADGIGFIRTRGGLIGDDGYGLNFKFRGPLSGLLLLRLGLLLRGRREDAEGRIRIPLLCDTDLLGVRYPPLVFFYCRRDGVERN

SEQ ID NO: 196607 - protein, 77 aa, Glycine max
  Clone ID: PAT_MRT3847_19562C.1.pep
PIVTYSPLAVSSPISMEACLLAAAILNFMKDLLSSQGGQDNIFHRGIQSRRTAAMRDAYTTATRRTRRKKRSYERFV

SEQ ID NO: 196608 - protein, 90 aa, Glycine max
  unsure (1)..(90): unsure at all Xaa locations
  Clone ID: PAT_MRT3847_19563C.1.pep
MFASLIFSGDNRYTETSVFNCRDLDILVVYYTIAPQFRKALPHYIRWHARSFGGYILPSFVTADIIRNSALXNCHSSIVFYDGRYKLWTK

SEQ ID NO: 196609 - protein, 42 aa, Glycine max
  Clone ID: PAT_MRT3847_19564C.1.pep
DVAVSSTKALKHNSVWLARSVMSVRSWLKRPIPSPSGTRHKS

SEQ ID NO: 196610 - protein, 109 aa, Glycine max
  Clone ID: PAT_MRT3847_19565C.1.pep
MLFPKLFFLCMLASILANICNFMFAKTVFMCVVSVSAPPAENDNPNKKGMNVAVIILLSILGSTILILGMSGTYKYWQKRKREQDQARFLKLFEEGDDIEDELGLGTII

SEQ ID NO: 196611 - protein, 585 aa, Glycine max
  Clone ID: PAT_MRT3847_19566C.1.pep
MAFIGAVKFLLQYLVLLCLLNYLPLSQGKQNWNEGYPFIRRASSLGYNGKSGGYDYIIVGGGTAGCPLAATLSQKFKVLLLERGGVPFNNPNVSFLHNFHITLADTSPTSASQYFISTDGVLNARGRVLGGGSSINAGFYTRADPRFIRKVGWDTKLVNESYPWVEKQIVHRPKFSDWQRAVRDGLLAAGVSPFNGFTYDHKYGTKVGGTIFDRFGRRHTAAELLASANPHKLTVLIHATVQKIVFDTKGKRPKATGVIFKDENGKQHEAYLGNDRQSEVIVSSGALGTPQLLLLSGIGPKAELQKLNIPVVLDNQFVGKGMADNPMNTIFVPSKRPVQQSLIETVGITNLGVYIETSSGFGQSKDSIHCHHGILSAEIGQLSTIPPKQRSQEAVKAYVKSKRDIPVEAFRGGFILSKVANPWSTGELKLKNTNVEDNPAVTFNYFSHPYDLRRCVEGIRLAIKVVQSEHVTNYTLCERETAEKMLNLSVKANINLIPKRPNDTKSVEQFCRDSVITIWHYHGGCHVGKVVNSEHKVLGVDRLRVVDGSTFSESPGTNPQATVMMMGRYMGLKILRDRLGKLAGI

SEQ ID NO: 196612 - protein, 58 aa, Glycine max
  Clone ID: PAT_MRT3847_19567C.1.pep
FGQLSCEQFLNVMSILRSVSYPHCDDFLRGVVWWLHPPFFLFTNVVEAGSLIDSSSNV

SEQ ID NO: 196613 - protein, 61 aa, Glycine max
  Clone ID: PAT_MRT3847_19568C.1.pep
SVDLAQILGSVREDLRGVRCDRGGAAVSYAIDCVCVCHRETESVCVCVCFAIGEEKETEED

SEQ ID NO: 196614 - protein, 321 aa, Glycine max
  unsure (1)..(321): unsure at all Xaa locations
  Clone ID: PAT_MRT3847_19569C.1.pep
MASRGYFFVLLHAFVFAALATSAFSQLSPNYYDFSCPKALSTIKSVVEATVKKEHRMGASLLRLHFHDCFVNGCDGSVLLDSTSSIDSEKKATPNFKSARGFEVIDDIKKAVDEACGKPVVSCADIVAVAARDSVVALGGPTWKVELGRRDSTTASRKAANANIPAPTFNLSQLITNFKNHGLDEKDLVXLSGGHSIGFARCVFFRNHIYNDSNNIDPKFAKRLKHICPKKGGDSNLAPLDKTGPNHFEIGYYSNLVQKKGLLHSDQELFNGGYTDALVRQYSYGHVAFFEDFANSMIKMGNTRPLTGNQGEIRVNCRKVN

SEQ ID NO: 196615 - protein, 49 aa, Glycine max
  Clone ID: PAT_MRT3847_1956C.1.pep
YYEEMGKPTPKVEVMRHLKSRHYTDAKDFSGECESVVMIAIGQSTTTFS

SEQ ID NO: 196616 - protein, 113 aa, Glycine max
  Clone ID: PAT_MRT3847_19570C.1.pep
HRLYLGISLIVSMLHCIVIRRINPRLLSLISLCQKLPIAEKDKRTISFTRILALSSELSESRTDTTTHYVALRAFNSANKMVVHCMCIVTYIPPTEPETNLKFLNAYNRPIPT

SEQ ID NO: 196617 - protein, 72 aa, Glycine max
  Clone ID: PAT_MRT3847_19571C.1.pep
PKEGGGSQEVTKAPLTKSPAPVIRARQFASEPVQTGLVVIDSTKRLGRWHGGLILGARLSAGAVPYITSELD

SEQ ID NO: 196618 - protein, 193 aa, Glycine max
  Clone ID: PAT_MRT3847_19572C.1.pep
NLSQKPKNITHYIFTDSDMAVVDDLGQIFHDHPNFHVALTFRNNKAQPLNSGFIAVRGTPEAILRAKLFLQEVLKVYTTKYKNASRMLGDQLALAWVVKSKPHFDASRFAKAPAFSEDIGGTSVLFLPCSLYNWTPPEGAGQFHGMPLDVKVVHFKGSRKRLMLESWNFYSSSLEVSDMLCLILGSGRTKYDF

SEQ ID NO: 196619 - protein, 76 aa, Glycine max
  Clone ID: PAT_MRT3847_19573C.1.pep
ENSCEVASCTMFCFYVHFFYKKNCICVCLGIRYPHYLFVWLELFIVCVQFLCYNALHILKKRSKLVWMFLYKKKKG

SEQ ID NO: 196620 - protein, 117 aa, Glycine max
  Clone ID: PAT_MRT3847_19574C.1.pep
QSEQIWKLKSNGTLVNGHSGMCATVEHVLAEGYPNRIRSWIATGRKGETYVAFFNLSNEKTTISASIIDLAIVHPGRRKFILCSGNEMWSGRTIRTNNMFSAEVPGHGCALFVLQCS

SEQ ID NO: 196621 - protein, 69 aa, Glycine max
  unsure (1)..(69): unsure at all Xaa locations
  Clone ID: PAT_MRT3847_19575C.1.pep
NVFCANILALATIDVFALYGGPFHSAESVTFDGLVSRACYVNGRLTHPTINMNXVNSLFAASGLTTTDM

SEQ ID NO: 196622 - protein, 39 aa, Glycine max
  Clone ID: PAT_MRT3847_19576C.1.pep
KWPYSGACGGAHCTLNRELSGVNELIPLQMSNTLTFTED

SEQ ID NO: 196623 - protein, 59 aa, Glycine max
  Clone ID: PAT_MRT3847_19577C.1.pep
FCSFMNFGMWVYVHLRIRMGEIVYFIFCFFVLFVFTIVSCCLTLVCLDMVVEPTFDRQF

SEQ ID NO: 196624 - protein, 63 aa, Glycine max
  unsure (1)..(63): unsure at all Xaa locations
  Clone ID: PAT_MRT3847_19578C.1.pep
GSPRSIKDSHKKGSSTXGVIIDHNMALFFSGGVRKVLKPPVSVRVRKNQLNPEGVVCKPNRCS

SEQ ID NO: 196625 - protein, 100 aa, Glycine max
  unsure (1)..(100): unsure at all Xaa locations
  Clone ID: PAT_MRT3847_19579C.1.pep
MSLGETACSYAALILHDDGISVTAXDKMSTLVGTAKVQVDTYWASLFGKLAEKKNLGDLIANAPSGGAPVAVAAAPVAASGGGGAAAAAPAAEEKKKVSR

SEQ ID NO: 196626 - protein, 53 aa, Glycine max
  Clone ID: PAT_MRT3847_1957C.1.pep
RVDPFPVAFLGVLFGVKNEIFSSLATNHMLPQNNQICQSLKFWVYKCHLASVN

SEQ ID NO: 196627 - protein, 114 aa, Glycine max
  Clone ID: PAT_MRT3847_19580C.1.pep
MSLGETACSYAALILHEDGISVTADKISTLLETAKVQVDTYWPTLFAKLAEKKNLGDLIANAAGGGAPVAVAAAAPVAASGGGGAAAAAPAAEEKKKEEPEEESDDDMGFGLFD

SEQ ID NO: 196628 - protein, 48 aa, Glycine max
  Clone ID: PAT_MRT3847_19581C.1.pep
FQFEGFYMFRMLLLCFFTIIALIPHLADNSRGTQTTSGGQFCAYCMFS

SEQ ID NO: 196629 - protein, 123 aa, Glycine max
  unsure (1)..(123): unsure at all Xaa locations
  Clone ID: PAT_MRT3847_19582C.1.pep
ADPPLSTHAHTSATPKHGRGHGGKPPKKHKXGKTPKTPTGPXAKPPATTPPREKPPDTNPPKAKPPATNPPTENPPDTNPARAKPPETDPPAEXPPTEKPPGQHPPKPNPPXTPTPPPEKGGN

SEQ ID NO: 196630 - protein, 68 aa, Glycine max
  unsure (1)..(68): unsure at all Xaa locations
  Clone ID: PAT_MRT3847_19583C.1.pep
MQGGKXXXQSFXVTAXNIGASXKAXMEXXXGKSRXXXXEXXXRXPMXKXLXTQXXEAKMSQAELDKXX

SEQ ID NO: 196631 - protein, 280 aa, Glycine max
  Clone ID: PAT_MRT3847_19584C.1.pep
MLRRRLSVLSTSITRSSNYSKPSLGYPSIQSHPFQLPHSPSAYQIISPNAFPDFQGFRAYSLLSLNDLRDKVPRKQPTRKGRGIGSGKGKTAGRGHKGQRARKGIKLGFEGGQTPLRRRLPKRGFKNPFSLTFQPIGLGKIAKFINAGKIDSSELITMKTLKDAGVLGKQMKDGVRLMGRGSEQIKWPIHLEVSRVTVRAKEAVEAAGGSVRRVYYNKLGLKALVKPEWFEKKGRLLPKAARPPPKQKDKVDSIGRLPAPTKPFPFLVEASKDLPVQHLS

SEQ ID NO: 196632 - protein, 87 aa, Glycine max
  unsure (1)..(87): unsure at all Xaa locations
  Clone ID: PAT_MRT3847_19585C.1.pep
MAALMISFPAVTTVNRAGAGMDVPFTGLKYMDGFPSMMSNIDITFIVSNGGXVQCMLDRSPYGKKKFETLFHLPDLDDAQLVKEVLF

SEQ ID NO: 196633 - protein, 86 aa, Glycine max
  unsure (1)..(86): unsure at all Xaa locations
  Clone ID: PAT_MRT3847_19586C.1.pep
TNQFGTIATVDHQSXEVLNYHHVFVRDFVPSALAFLMNGEPYIVMNFLLKTLYFHCSXKRVYLFKLGESVMPSYFXVLYDSIRKHI

SEQ ID NO: 196634 - protein, 125 aa, Glycine max
  Clone ID: PAT_MRT3847_19588C.1.pep
FEQCHYPKEPYVCKYVSLIDFLIHTTHNAELLVEKEAIVHELGSDQDLATLVNGLCKHVVTNSTCYHQIMKAVNEHYNNDWKWAMGTLRWVYFRDPWRSSSTLVGVAVLVFTIFNFYRVTDLLFW

SEQ ID NO: 196635 - protein, 114 aa, Glycine max
  Clone ID: PAT_MRT3847_19589C.1.pep
HKSLMAEAPCRSSSRKGKSKVVKDHCLVITESDVDAAQNLSGSKRSRSMDEEKGEEVGQRLSNIIMAKIQEIFGNDIDIEVFPTKKQRRYRSLVSIYMVTRPVNAGNDRLRVKA

SEQ ID NO: 196636 - protein, 126 aa, Glycine max
  Clone ID: PAT_MRT3847_1958C.1.pep
MATSLSATGCVGSSFYGSWGTSIVGEDYTMLAKSVPSQVRMGKGKPTRLQPMMKNVNEGKGIFAPLVVITRNIVGKKRFNQLRGKAIALHSQVITEFCKSIGADGKQRQGLIRLAKKNGEWLGFLA

SEQ ID NO: 196637 - protein, 88 aa, Glycine max
  unsure (1)..(88): unsure at all Xaa locations
  Clone ID: PAT_MRT3847_19590C.1.pep
HLVSARAEPATSRIHQERVPPDDDVRGEXWVQVVSWEXRAXVYXNFXTKEECEYVXDXXKXNMHKXSVVDSEXGKSXDSTVVQNWQRK

SEQ ID NO: 196638 - protein, 162 aa, Glycine max
  Clone ID: PAT_MRT3847_19591C.1.pep
MSHAGLWLPPQFLAGDPDTTLSNSDFSFPSEFPYEFGLSSPESSDDGEEDFFAGLSRRLGQTSLHETRKQLSSTVSEIPRKTQGLVGSPQSTLAGIGSWSGRSAVSGDGSPNGYSRVPSPSTTPFDENNDPWEVIYAAAVQIARMKMNNNNHRVPAQYDFHN

SEQ ID NO: 196639 - protein, 79 aa, Glycine max
  unsure (1)..(79): unsure at all Xaa locations
  Clone ID: PAT_MRT3847_19592C.1.pep
HPPLELDFFFPGALIHCPLPREKGFCRPFRLGVQTLKWPGFRPFRRRRKLPRLLAIXWXFGPTAAGGRRPVLALLGPPL

SEQ ID NO: 196640 - protein, 91 aa, Glycine max
  Clone ID: PAT_MRT3847_19593C.1.pep
DVDGARKGKFTLCYEDEFERECETTVTEERDGRGREWWESWETLLKLRRGENQNGWYTCQDLTALNGSVVRLWDGTFTTQPSDNTSCVLVW

SEQ ID NO: 196641 - protein, 75 aa, Glycine max
  Clone ID: PAT_MRT3847_19594C.1.pep
PPPPPVTTPHPPRQHPTSLTPVNPPPITLTHTPLSYYYRTLAPVHGIRFSPGYFVSIISGPLFLVYSKQSPYSYS

SEQ ID NO: 196642 - protein, 255 aa, Glycine max
  Clone ID: PAT_MRT3847_19595C.1.pep
ARRRSFWDPVIRKFEAKLSKWNQRHISMAGRITLINAVLTALPLFFLSFFRAPSAIIHRISTIQRQFLWGGKPDGRKIAWMSWRQCCTPKHMGGLGIRDIQSLNKALLFKWKWMMFHQPDQLWTRILNSKYNGWRGLEHGPRKQYFSTWWADLRAIFQHQNVINADNQIRWKLGRGDKFLFWEDPWGDEGVPLSDQFPELFSISSQRDLTVAEVGSWTENGWVWNMVWRRHLFDNEVQIASKFIDHIHQIRLINN

SEQ ID NO: 196643 - protein, 93 aa, Glycine max
  Clone ID: PAT_MRT3847_19596C.1.pep
MDSEDFRSILESAGVDVWAFMDAAIAVASVDHPDELKRRRDRIVERLYASSALPQCRNCDPGAGEIRTQSSPSAEEEKDPYGGFMDEEQKKIL

SEQ ID NO: 196644 - protein, 79 aa, Glycine max
  unsure (1)..(79): unsure at all Xaa locations
  Clone ID: PAT_MRT3847_19597C.1.pep
MATAMIAWAAVTTADRADPRMHAPFTGLKSMAGFTTRKTNHDISSIATNAVRVLCMHEWTPVLMKKYETLYXLPDLDDP

SEQ ID NO: 196645 - protein, 69 aa, Glycine max
  Clone ID: PAT_MRT3847_19598C.1.pep
GGGSFPKFWFYPTLFPGFQIWLTLGPLENFWFNPKISPPIALRGQKTFQSLFFFSKGFPGLFGGFPTSP

SEQ ID NO: 196646 - protein, 164 aa, Glycine max
  unsure (1)..(164): unsure at all Xaa locations
  Clone ID: PAT_MRT3847_19599C.1.pep
GSRGLAVHGVTKFSDLTPAEFRRQFLGLKPLRFPAHAQKAPILPTKDLPKDFDWRDKGAVTNVKDQGACGSCWSFSTTGALEGAHYLATGELVSLSEQXLQSGGVQKEKDYPYTGRDGTCKFDKTKVAATVSNYSGVPLDEEQIAANLVKNGPFAVAINAVFMQ

SEQ ID NO: 196647 - protein, 173 aa, Glycine max
  unsure (1)..(173): unsure at all Xaa locations
  Clone ID: PAT_MRT3847_1959C.1.pep
RQSAGTYHHFQLSPQPTQSDDRFPLHHFGWAVGTTEGKCDILEFENVGLNGCVGASGLDLGGLSACXVTLRAWRLDGRCSELSVKAHSLKGQQCVHCRLIVGDGYVTITKGESIRRFFEHAEEAEEEEDDDSVDKDGNELDGECSRSQKHAKSPELARECMLDAATVIFKEQV

SEQ ID NO: 196648 - protein, 204 aa, Glycine max
  unsure (1)..(204): unsure at all Xaa locations
  Clone ID: PAT_MRT3847_195C.1.pep
WRVFREGVLLKKRAVEEEGELLPGCEDAEERQLFEALMLELDSEMGVEILRHYEGMCXVHEKREEEVAAWNEKIQDFLRGKKGGVWRLXELGVRRRAYKIKKAXNAHYMRRNFEWEAKYINDFKTLWDQDERGIRRLVRKREEAITEDCPPPPECYTLRANADDNEDEEFDENYXDDWDGEHEEDGNDGDDGENGLFLGMTTMT

SEQ ID NO: 196649 - protein, 338 aa, Glycine max
  Clone ID: PAT_MRT3847_19600C.1.pep
MARYSFLLALLLLLFAAVSSAADDILIRQVVPDAVGEAAEKEEDHLLNAEHHFASFKAKFGKKYATKEEHDRRFGVFKSNLRRARLHAKLDPSAVHGVTKFSDLTPAEFRRQFLGFKPLRLPANAQKAPILPTKDLPKDFDWRDKGAVTNVKDQGACGSCWSFSTTGALEGAHYLATGELVSLSEQQLVDCDHVCDPEEYGACDSGCNGGLMNNAFEYILQSGGVQKEKDYPYTGRDGTCKFDKTKVAATVSNYSVVSLDEDQIAANLVKNGPLAVGINAVFMQTYIGGVSCPYICGKHLDHGVLIVGYGEGAYAPIRFKNKPYWIIKNSWPRGPNSL

SEQ ID NO: 196650 - protein, 127 aa, Glycine max
  Clone ID: PAT_MRT3847_19601C.1.pep
KKMVNVGNIFPPPPPKTKGGFFFRMVFGGFFPQNSGRVPVSGGASFAFCPPQTFGGGAAWFNTLVPFGRAALGGPLSAFENPNNKGGGIGKINPLGGAPPGGAPPGLFKNVAKNNLGAHEDNLAKGG

SEQ ID NO: 196651 - protein, 371 aa, Glycine max
  unsure (1)..(371): unsure at all Xaa locations
  Clone ID: PAT_MRT3847_19602C.1.pep
MARHSLLLALLLFAAVATAAMAVAASDADDILIRQVVPDVGEAEEEDNLLNAEHHFASFKXKFAKTYATKEEHDHRFGVFKSNLRRARLHAKLDPSAVHGVTKFSDLTPAEFRRQFLGXLKPLRFPAHAQKAPILPTKDLPKDFDWRDKGAVTNVKDQGACGSCWSFSTTGALEGAHYLATGELVSLSEQQLVDCDHVCDPEEYGACDSGCNGGLMNNAFEYILQSGGVQKEKDYPYTGRDGTCKFDKTKVAATVSNYSVVSLDEEQIAANLVKNGPLAVAINAVFMQTYVGGVSCPYICGKHLDHGVLLVGYGEGAYAPIRFKNKPYWIIKNSWGESWGENGYYKICRGRNVCGVDSMVSTVAAIYPSSH

SEQ ID NO: 196652 - protein, 46 aa, Glycine max
  Clone ID: PAT_MRT3847_19603C.1.pep
PLFLLLNFSFLVCFVPPALIFWICSTSIVPSFGLVQLKGGFASIII

SEQ ID NO: 196653 - protein, 75 aa, Glycine max
  Clone ID: PAT_MRT3847_19604C.1.pep
LLLWILILLGNVGSAELLCYCAHCAYDAPFLGLSTILGTSIVTSMSSCTKQNAGAQGCTKELYHSNGRDLIMIGQ

SEQ ID NO: 196654 - protein, 94 aa, Glycine max
  Clone ID: PAT_MRT3847_19605C.1.pep
ACPSDIRCLRDQWCRSVCRILIMDQRGVRKQTACAAMSSYMLICVPVHVVSSFGSINGCRRRVMVVLRGSLRRALSHAMRPSPLVCNSNAFCFY

SEQ ID NO: 196655 - protein, 78 aa, Glycine max
  Clone ID: PAT_MRT3847_19606C.1.pep
QTDYYTFTWLMLLTTHSTMNREDMYIAQQVIRYMHKSLSYICYSACELTRRNVHLLKYVITLWPQLTAHDAIGSNNCL

SEQ ID NO: 196656 - protein, 57 aa, Glycine max
  Clone ID: PAT_MRT3847_19607C.1.pep
SNFLFTEHGFKFMLGKHHFTCFHSTFPLPKSTRVFVCLDLSTSIVRGKAQFRSFLVR

SEQ ID NO: 196657 - protein, 89 aa, Glycine max
  Clone ID: PAT_MRT3847_19608C.1.pep
RPAPRWPPWTQRFFPPFPGPPSPKSLLENMMGFPPMPYFLLTPSRDVKSGKLFVPFWPQFKVEREPVPFPKGVVNKYLRLGSPPPFWGF

SEQ ID NO: 196658 - protein, 73 aa, Glycine max
  Clone ID: PAT_MRT3847_19609C.1.pep
YNGGIFNRHENRPVLQGAYLRPRGHPYDGRFLNRRIKLNPKVRGKTLGNTCPGPIIRVRAVYGDKPLSYPGYP

SEQ ID NO: 196659 - protein, 58 aa, Glycine max
  Clone ID: PAT_MRT3847_1960C.1.pep
VLICAMQSSHNRRPVPRPYYASITDSRTSGSQAMKPYEKIKNLIFHGDCVCMVECLNL

SEQ ID NO: 196660 - protein, 116 aa, Glycine max
  Clone ID: PAT_MRT3847_19610C.1.pep
MHKSTTLDSNDTKDKAEFPPVEIGTRGTVASLIMQEIEYFSRIGSNSQRNKSQITEVSSSISTSSTTTIVSKVEESTKKKRGSSKLLPSMCSMVDVSDSGRPNGTSAFSYRNLKSD

SEQ ID NO: 196661 - protein, 504 aa, Glycine max
  unsure (1)..(504): unsure at all Xaa locations
  Clone ID: PAT_MRT3847_19611C.1.pep
MSALSNSSSSHGNSFLKMPAIKFTKLFINGDFVDSISGRTFETIDPRKEEVIARVSEGDKEDIDIAVKAARQAFDSGPWPRLPGSERAKIMMKWADLVDENIEELAALDTIDAGKLYYINKVAEIPSATNALRYYAGAADKIHGDVLKMNGDFHAYTLLEPIGVVGHIIPWNAPSLSFFIKVSPSLAAGCTMVLKPAEQTPLSALFYAHLAKLAGIPDGVLNIVPGFGPTAGAAISSHMDIDAVSFTGSIEVGREVLQAAAWSNLKPVSLELGGKSPLIIFNDADIDKASELALFGIMSNKGEICVAGSRVFVQEEIYDEFEKKXVEKAKSWVVGDPFDPKSXQGPQADRNQLEKILSYIEHGKREGATLLTGGNTVGNKGYYIEPTIFSNVKEDMLIARDEIFGPVLALMKFKTMEEAIKSANNTKYGLAAGIVTKNLDTANTMSRSIRAGIVWINCYFTVGSDVPFGGYKMSGFGRDLGLQALHKYLQVKSVVTPIHNSPWL

SEQ ID NO: 196662 - protein, 82 aa, Glycine max
  Clone ID: PAT_MRT3847_19612C.1.pep
TKCEEDPTERNLSQPTHAKKASSSGLIKDGLGAMLQQAPLLILCKSNFKVVAVTSCCNPFGGYDHTAPPYFILFCLQEGEQY

SEQ ID NO: 196663 - protein, 293 aa, Glycine max
  Clone ID: PAT_MRT3847_19613C.1.pep
MFAYRVLSRSSATLSRSFTLFSVSRNSQPFSTNLSNNFNSLLHPSPNKLIPVQTNFLNSMNPSLTSRFGFSSTASHEHASEGAKVSDQSEQAEAADQTKESDVESECDLSRDDLIKLVAEKEQLLKLKHKEIEKMQDKVLRTYAEMENVMDRTRREAENSKKFAIQNFAKSLLDVADNLGRASSVVKDNFSKIESPEESSEAAQLLKTLLEGVEMTEKQLAEVLKKFGVEKFDPTNEPFDPHMHNAIFQIPDASKAPGTVGVVLKAGYKLYDRVLRPAEVGVTQEVEDNKAAE

SEQ ID NO: 196664 - protein, 71 aa, Glycine max
  Clone ID: PAT_MRT3847_19614C.1.pep
VIDGGPIITRPFVTVTYTKWVPLSFLPFTTTSFPSTPFPSYIVTNTHHSLSRHPFVPQTYTLSAHHIPRND

SEQ ID NO: 196665 - protein, 61 aa, Glycine max
  unsure (1)..(61): unsure at all Xaa locations
  Clone ID: PAT_MRT3847_19615C.1.pep
MTHCSHPTEQGPYFVNDYTEPTTLIFTDLDFHTLYNMYRAAITXFIATLLFLYITELTIIG

SEQ ID NO: 196666 - protein, 140 aa, Glycine max
  unsure (1)..(140): unsure at all Xaa locations
  Clone ID: PAT_MRT3847_19616C.1.pep
FENGKHYPIREARGDVEYKGFLIPKGWKAMPLFRNIHHNPEYFPEPKKFNPSRFEGAXVAPKPNTFMPFGSGVHACPGNELAKLETLIMIHHLVTKFRWEVVGSKCGIQYGPFPLPLNGLPARCWRESYQLEKAAREENA

SEQ ID NO: 196667 - protein, 81 aa, Glycine max
  Clone ID: PAT_MRT3847_19617C.1.pep
GLEKLILADGSPVTLSLADGLNKLSMLQSIVLDGCPVTSEGLRAIGNLCISLRELSLSKCLGVTDEALSFLVSKHKDLRKL

SEQ ID NO: 196668 - protein, 681 aa, Glycine max
  Clone ID: PAT_MRT3847_19618C.1.pep
PRVRTAARRRQKGHVAWQGNFEAWVQDPLHVRPIAHAIWDPHFGQPAVEAFTRGGALGPVNIAYSGVYQWWYTIGLRTNGDLYTGALFLLFLSTISLIAGWLHLQPKWKPSVSWFKNAESRLNHHLSGLFGVSSLAWTGHLVHVAIPGSRGEYVRWNNLLSILPHPEGLGPFFTGQWNLYAQNPDSNSHIFGTPQGAGTAILTLLGGFHPQTQSLWLTDIAHHHLAIAFLFLVAGHMYRTNFGIGHSIKDLLEAHTPPGGRLGRGHKGLYDTINNSIHFQLGLALASLGVITSLVSQHMYSLPAYAFIAQDFTTQAALYTHHQYIAGFIMTGACAHGAIFFIRDYNPEQNEDNVLARMLDHKEAIISHLSWASLFLGFHTLGLYVHNDVMLAFGTPEKQILIEPIFAQWIQSAHGKTSYGFDILLSSTNSPAFNAGRSIWLPGWLNAVNENSNSLFLTIGPGDFLVHHAIALGLHTTTLILVKGALDARGSKLMPDKKDFGYSFPCDGPGRGGTCDISAWDAFYLAVFWMLNTIGWVTFYWHWKHITLWQGNVSQFNESSTYLMGWLRDYLWLNSSQLINGYNPFGMNSLSVWAWMFLFGHLVWATGFMFLISWRGYWQELIETLAWAHERTPLANLIRWRDKPVALSIVQARLVGLAHFSVGYIFTYAAFLIASTSGKFG

SEQ ID NO: 196669 - protein, 62 aa, Glycine max
  Clone ID: PAT_MRT3847_19619C.1.pep
NQENQSFGSNLCLDTAAVKSASPSSQGRILKSLDDSVETESYLEIRETFKCTRNLKQALEKT

SEQ ID NO: 196670 - protein, 54 aa, Glycine max
  Clone ID: PAT_MRT3847_1961C.1.pep
KKFPLINDNFWGRGSKNHWERHLKRAHWRPQKQTCWAHDDARPKFRVYLPVLAT

SEQ ID NO: 196671 - protein, 112 aa, Glycine max
  unsure (1)..(112): unsure at all Xaa locations
  Clone ID: PAT_MRT3847_19620C.1.pep
IDVLVQNSQXRGECFGRITIEAMAFRLPVLGTAAGGTVEIVVNRTTGLLHPVGKEGVTPLAKNIVNLATHVERRLTMGKKGYERVKERFLEPHMAQRIALVLKEVLRKGSHN

SEQ ID NO: 196672 - protein, 170 aa, Glycine max
  Clone ID: PAT_MRT3847_19621C.1.pep
GARARAESARAENQDYGIHGERVRTACWGYLCQSGGMELKEVLPKLSSQTLHALLTSNDLWIPNEEKRFELALHTFLAKSANCKVEHHAHGISGTESATSVHADSGSSKGKSVTDSCTSKRLETGMGKMSLKTDLEDPSTPSLLVKLADPFADFNDWVSVSNERFNKLHM

SEQ ID NO: 196673 - protein, 89 aa, Glycine max
  Clone ID: PAT_MRT3847_19622C.1.pep
SFLTMASQSHNIKIHDHFSVSPPSATATSLSLKFFDLFWLRFHPVERISSTRFQHPNQTHPFSIPKSFQSSKPLSLTPSNTFPLSPASG

SEQ ID NO: 196674 - protein, 65 aa, Glycine max
  unsure (1)..(65): unsure at all Xaa locations
  Clone ID: PAT_MRT3847_19623C.1.pep
MSLIPSIYGGAMSNSIDXYQRDMRDHVKELHVHTSSECAEKSGTVMARVDWKVRHEVHVVKAGIP

SEQ ID NO: 196675 - protein, 182 aa, Glycine max
  unsure (1)..(182): unsure at all Xaa locations
  Clone ID: PAT_MRT3847_19624C.1.pep
NDWLYLREGTFLPKPQYRKKKASQSSEFSVRGNSVRGNTSMEPPAMLMPCLAPSRSVKETIQEVKMVQIWGNMMRYCEMRGKELLDANVLTASDLYEWMKGKNNNEAAIVGVGLPCYSLLQTLVFSIKANSCGVLLLDDFEITYLNRPKGXVLDWFFNPVMVLKEQIRVIKFGGKLKLKILW

SEQ ID NO: 196676 - protein, 39 aa, Glycine max
  Clone ID: PAT_MRT3847_19625C.1.pep
ATHLMGSPNGTYPSFKDQVQESRIIIKCENLPPNFLMVQ

SEQ ID NO: 196677 - protein, 216 aa, Glycine max
  unsure (1)..(216): unsure at all Xaa locations
  Clone ID: PAT_MRT3847_19626C.1.pep
LPYCDCYVRRXHQADRVIGTLLGSVLPDGTVDIRNSYAVPHNESXSNRYSTGLGVTGGSALIHEFYSREVPNPIHLTVDTGFTNGAGTIKAYVSNNLSLGERQIAAQFQEIPLDLRMVEAERIGFDMLKATAVDKIPSDLEGMEASMQHLLVLIDDIYKYVNDVVEGLVAPDNKIGRFISDAVGSLPKLSPSVFDKLANDSLPDHLLLLHLSSITR

SEQ ID NO: 196678 - protein, 73 aa, Glycine max
  Clone ID: PAT_MRT3847_19627C.1.pep
KRTFFFLGLGHSFKSPPQRGFTRLEISSPSQERPQEKLTMLLVPPFLIMCLSKDKLKLPVKFIPNFHSIQKKK

SEQ ID NO: 196679 - protein, 184 aa, Glycine max
  unsure (1)..(184): unsure at all Xaa locations
  Clone ID: PAT_MRT3847_19628C.1.pep
MAASDRTVLQFSSSSSSSQSLSAKVHPLVIFNICDCYVRRPDQADRVIGTLLGSVLPDGTVDIRNSYAVPHNESIEQVALDIEYHHNMLISHQKVNPKEIIVGWYSTGLGVTGGSALIHEFYSREVPNPIHLTVDTGFTNGAGTIKAYVSNNLSLGERQIAAQFQEXPLDLRMVEAERIGFDML

SEQ ID NO: 196680 - protein, 289 aa, Glycine max
  Clone ID: PAT_MRT3847_19629C.1.pep
MAASDRTVLQFSSSSSSSSQILSAKVHPLVIFNICDCYVRRPDQADRVIGTLLGSVLPDGTVDIRNSYAVPHNESIEQVALDIEYHHNMLISHQKVNPKEIIVGWYSTGLGVTGGSALIHEFYSREVPNPIHLTVDTGFTNGAGTIKAYVSNNLSLGERQIAAQFQEIPLDLRMVEAERIGFDMLKATAVDKIPSDLEGMEASMQHLLVLIDDIYKYVDDVVEGRVAPDNKIGRFISEAVGSLPKLSPSVFDKLVNDSLQDHLLLLYLSSITRTQLSLAEKLNTAAQIL

SEQ ID NO: 196681 - protein, 49 aa, Glycine max
  Clone ID: PAT_MRT3847_1962C.1.pep
TPIISLIMYIPQYLAITPLYYYHYHPIQNYLSPLNTPTNLTYYPNSSLM

SEQ ID NO: 196682 - protein, 132 aa, Glycine max
  unsure (1)..(132): unsure at all Xaa locations
  Clone ID: PAT_MRT3847_19630C.1.pep
GPPRAPFLXLGPPKTGPPRAPFRVLVPEPPNLSLDTGAPRYPFRTPKGRAAKGPYLIWGPPKQGPPRASFKVSNPRAPVAPSGPPRAGPPRARFTAWGPPKAGPPKAPVSTWGPPRPGPPKAPVLISGRKFF

SEQ ID NO: 196683 - protein, 279 aa, Glycine max
  Clone ID: PAT_MRT3847_19631C.1.pep
MSISLPVSMATTIHSLPYSLLKLKPPSLTPSLFRRTLFPNSTLNAAPKRTVSSTTFSLTLTNGTCKTRHVAAKSSEADTGNTSTSLTQTVFGVLHLAVSLGLILAVDKFLKQAFVAAAIKFPSALFGMFCIFSVLIILDSTVPAAATAFVSFFEPAFMFIQRWLPLFYVPSLVVLPLAVKDIPAASGAKIGLILVGGWLATLCVAGYTAIAVRKAVKTELVDAEPMGKPAPFSSLEVWTWTAVLLISFVSALFYPTALGTSARTCLPFLLAATVLGYRL

SEQ ID NO: 196684 - protein, 55 aa, Glycine max
  unsure (1)..(55): unsure at all Xaa locations
  Clone ID: PAT_MRT3847_19632C.1.pep
MSKVSGVISRQVLPACGSLCFFCPSLRARSRQPVKRYKKLIAVIFPRNXEEGPND

SEQ ID NO: 196685 - protein, 49 aa, Glycine max
  Clone ID: PAT_MRT3847_19633C.1.pep
RLLLGHLHVPCSRLEVPLAHISCGLLGGCLNWSLEGCGLVPHPLKIWPK

SEQ ID NO: 196686 - protein, 45 aa, Glycine max
  unsure (1)..(45): unsure at all Xaa locations
  Clone ID: PAT_MRT3847_19634C.1.pep
FLVVLIKEGQNNFNWLCINQKLLPYHMIQMYNNKVTTDLGKTLKX

SEQ ID NO: 196687 - protein, 167 aa, Glycine max
  Clone ID: PAT_MRT3847_19635C.1.pep
MSSLTYLSLEHNSLSGFLPLHIGLENLQELYLLENKLCGNIPSSLSNASKLNYVDLKFNKFDGCFPCSLGNLRYLQCLDVAFNNLTTDASTIELSFLSSLNYLQISGNPMHGSLPISIGNMSNLEQFMADECKIDGKIPSEIGNLSNLFALSLYHNDLSGTIPTTIS

SEQ ID NO: 196688 - protein, 160 aa, Glycine max
  unsure (1)..(160): unsure at all Xaa locations
  Clone ID: PAT_MRT3847_19636C.1.pep
MVGASWFRTLWKIRRKDDTNSEKAVIGVLAFEVASLMSKLVNLWQSLSDKQVAKLREELTNSVGIRKLVSDDENFIVRLISLEMLENMAHVAESVARLGKKCSDPSLKDFENAFDELITFGVDPYRWXFTSKKMEKKVKRMEKFISTNATLYQEMELLAD

SEQ ID NO: 196689 - protein, 142 aa, Glycine max
  Clone ID: PAT_MRT3847_19637C.1.pep
MVGASWFRTLWKIRRKDDTNSEKAVIGVLAFEVASLMSKLVNLWQSLSDKQVAKLREELTNSVGIRKLVSDDENFIVRLISLEMLENMAHVAESVARLGKKCSDPSLKDFENAFDELITFGVDPYRWGFTSKKWKKGKKDGK

SEQ ID NO: 196690 - protein, 146 aa, Glycine max
  unsure (1)..(146): unsure at all Xaa locations
  Clone ID: PAT_MRT3847_19638C.1.pep
MVGASWFRTLWKTQRKDDTNSEKAVIGVLAFEVASLMSKLVNLWQSLSDKQVAKLREEITNSLGIRKLVSEDENFIVRLISLEMLENMAHVAESVARFGKKCSDPXLKDFENAFDDXFTFGVDPYPWGFTFKXMEKKVKRMEKLYQ

SEQ ID NO: 196691 - protein, 600 aa, Glycine max
  Clone ID: PAT_MRT3847_19639C.1.pep
MVGASLFRTLWKTQRKDDTNTEKTVIGVSVFEVASLMSKLVNLWQSLSDKQVAKLREEITNSVGIRKLVSEDENFIVRLISLEMLENMAHVAESVARFGKKCSDPSLKDFENAFDELITFGVDPYRWGFTFKKMEKKVKRMEKFISTNATLYQEMELLADLEQTLGRMKAYTESDGPNLIDYQKKVAWKGLEVKNLKANSLWNRTYDYTVLVLARSLFTIFSRINNVFGIQEIIDIGKTKNRSALNSDHANGSRSVSELLQPSVQPSSKVRARFASGPLGDFAATSRPNAQVNKASMFPSDGGGSSTKSGLISAKNRSLKFFSGPLGKNSKKPVPDNGTNKNSKIWNFHGNSTTANGKEIHTRQSRLTQVEPFKGFVPADSSLVIDSHSSPNDVHLAIRNPNEPKANLVTPGKEVHRPQSTFNYLCRLKPPSESLGAASLALHYANVIIMIEKLATSPYLIGVDARDDLYNMLPRRLRSALRTKLKPYSKAMAAAVYDAGLADEWTEAMTGMLEWLAPLAHNMLRWQSERSYEQHCFVSRANVLLVQTLYFASQEKTEAIITELLVGLNYVWRYAKELNKKALLDCGSDGVDNGYSQLNG

SEQ ID NO: 196692 - protein, 44 aa, Glycine max
  Clone ID: PAT_MRT3847_1963C.1.pep
LGLLTQHIYFDNRASVLSSNLTHRFRSSNNTMIINNGRNIVYGK

SEQ ID NO: 196693 - protein, 77 aa, Glycine max
  Clone ID: PAT_MRT3847_19640C.1.pep
FNTLDIPILLTFLLQLIIHLLSLASANILFLSLTYLTKLYAQPDLLIHIIPDLTIHIIVLSVLTSALDPRLSAALPE

SEQ ID NO: 196694 - protein, 80 aa, Glycine max
  Clone ID: PAT_MRT3847_19641C.1.pep
SFYSVPFGGASIQLDGSFCCIILHANVCTKIKTIIIIQHIIWWFCSFIKFLLQLEKVFSYLPQFKKKNTFLVSLLKSLKK

SEQ ID NO: 196695 - protein, 110 aa, Glycine max
  unsure (1)..(110): unsure at all Xaa locations
  Clone ID: PAT_MRT3847_19642C.1.pep
STLTCECLSHKTNIRKRVVKDAKEAQKPSNTGLLDGLNKGHDVTKKELPPRAGEQEGKTGEREHCVREQRDRERKLSAELGRYKRXKVAKRKLGTHKRAKKKREEKASVL

SEQ ID NO: 196696 - protein, 159 aa, Glycine max
  Clone ID: PAT_MRT3847_19643C.1.pep
MGSEGSTVVVPRNFRLLEELERGEKGIGDGTVSYGMDDADDIYMQSWTGTIIGPPGTVHEGRIYQLKLFCGKDYPDNPPTVRFQTRINMTCVNQETGVVEPHLFPMLANWQRECTMEDILMQLKKEMISPQNRKLAQPPEGNEDGRIDQKGLALRCCVM

SEQ ID NO: 196697 - protein, 86 aa, Glycine max
  Clone ID: PAT_MRT3847_19644C.1.pep
TKVGAIFALKASFRVCSESRVTIPTRLDMPVSPLFIIMVTAVAPFSATALSRARSSMAPSGPQSSLCVHDICVTGPKLDSPIDSSP

SEQ ID NO: 196698 - protein, 129 aa, Glycine max
  unsure (1)..(129): unsure at all Xaa locations
  Clone ID: PAT_MRT3847_19645C.1.pep
MAPKGLIFLAALCFSALALSRCLADDNGLVMNLYMESCPHAEDIIKEHVKLMYKRRKNTALSWLRNIFHDCAVQRCDAXLVLDSTRRGLSDKETYSISGLRTFRYIETIXEALERGCPGVVSLADILVL

SEQ ID NO: 196699 - protein, 57 aa, Glycine max
  Clone ID: PAT_MRT3847_19646C.1.pep
SLSIISDSLLRSGLPTLVLRRSITLKLMTVFIVCSQKVVPGAKSLKFPSNNLFYKIK

SEQ ID NO: 196700 - protein, 67 aa, Glycine max
  Clone ID: PAT_MRT3847_19647C.1.pep
AQGMSGRQQQRLGSALSQHSTRDHGTTRGHRICLQQQCSLRTHDYVLWPRGGKSMFYFRCIQHQCED

SEQ ID NO: 196701 - protein, 50 aa, Glycine max
  Clone ID: PAT_MRT3847_19648C.1.pep
NSKNASQLYSFPCMCCNINMTPCHTHVMIHLAPTKDIPEKDLPKETCELE

SEQ ID NO: 196702 - protein, 47 aa, Glycine max
  Clone ID: PAT_MRT3847_19649C.1.pep
QSSEFYCEHCSINAWRLWGFRQRRGVEPGLLFTWKSVQCQLKEFVMG

SEQ ID NO: 196703 - protein, 96 aa, Glycine max
  Clone ID: PAT_MRT3847_1964C.1.pep
MATKIFSLLMLLALSACVANATIFPQCSQAPIASLLPPYLPSMIASVCENPALQPYRLQQAIAASNIPLSPLLFQQSPALSLVQSLVQTIRAQPLQ

SEQ ID NO: 196704 - protein, 53 aa, Glycine max
  Clone ID: PAT_MRT3847_19650C.1.pep
IIKLEENMIVNLSVREGVREKLMRCKEVMIESDVERVFYKMICSEVGTEERSV

SEQ ID NO: 196705 - protein, 209 aa, Glycine max
  Clone ID: PAT_MRT3847_19651C.1.pep
TPPSRSTTRPILCISDHNRNDDKAHSASVAPIVIIRGLTSVKGLEGDELLDTLVTYLWQIHGVDYYGMIETNEAKGFRHVRPEGTAHEVVAGKSGSEWEKKLDLFWQGRLNGQDPLEVMTAKEKIDAAAMEVLDPYVRKIRDEKYGWKYGCGAMGCTKLFHATEFVLKHLKLKHPELVVEQTSKVREDLYFQNYMNDKDAPGGMPIMQQ

SEQ ID NO: 196706 - protein, 100 aa, Glycine max
  unsure (1)..(100): unsure at all Xaa locations
  Clone ID: PAT_MRT3847_19652C.1.pep
AYECIYIEWSMLKSLLSLYYEKHVYIKKXKNRESRKDQKTTANKHISTYRGYYQKYLNTTKHNYIPNSSNTGKSFYIFLKNVNSHGDLVICFINYSHATT

SEQ ID NO: 196707 - protein, 71 aa, Glycine max
  Clone ID: PAT_MRT3847_19653C.1.pep
VDLNNVQIFFIYFTVVTFKEISVTIATNHSLSNVGKTGTIKNYKLHNREAQTKILIVYMTLKISSHTYARF

SEQ ID NO: 196708 - protein, 79 aa, Glycine max
  Clone ID: PAT_MRT3847_19654C.1.pep
MDSAVLACTHVSVLPVSHVLETLTYLGNRGHELWDPLVLTSASFLSQLPVDSSSVDFVTLSWLSVDCPVDQLIHDQLRV

SEQ ID NO: 196709 - protein, 52 aa, Glycine max
  Clone ID: PAT_MRT3847_19655C.1.pep
ERLEGKLDRNATNWMLVLGCMIRVALPSLKDGLFRQKLALHVKKKKKGGRRL

SEQ ID NO: 196710 - protein, 75 aa, Glycine max
  Clone ID: PAT_MRT3847_19656C.1.pep
LFMKDDVTCNSRAQINTITHSHIVEFNFLFSCFVLLMSCFNFFHCLYLNQIRINTRIEPGLKQEIVLPQVLYIQV

SEQ ID NO: 196711 - protein, 57 aa, Glycine max
  Clone ID: PAT_MRT3847_19657C.1.pep
FYQNTGSTKINYCEFRTGFHIPNKHLKISPFPHHGEINQFFSKRAFHSNETLWNFFF

SEQ ID NO: 196712 - protein, 246 aa, Glycine max
  Clone ID: PAT_MRT3847_19658C.1.pep
MFEPQQLYTRAKTEEFDLESGETLYPGLSVGENQLRWGFIRKVYGILSAQIVLTTLVSVTTVFYTPINDLLKGNSTLLLILLFLPFIFLIPLLKYQQKHPHNYILLALFTVSISSTIGVTCANTDGKIVLEALILTSAVVSSLTGYAFWASKKGKDFSFLGPILFTSLITLILTGMMQMFFPLGPTAHAIYGAIGAMIFSGYIVYDTDNLIKRFTYDEYIGASVTLYLDILNLFLSILRILREANN

SEQ ID NO: 196713 - protein, 100 aa, Glycine max
  unsure (1)..(100): unsure at all Xaa locations
  Clone ID: PAT_MRT3847_19659C.1.pep
GEPAVGVNNRNGNNRSVFKLLVPSLNTQPTWEVLDAXAAPENKTVHLATLMKKNGKIIAXELQIKMIKRLKDTIKLSDAYNIQILKDYFLNQKPNDPLYY

SEQ ID NO: 196714 - protein, 81 aa, Glycine max
  Clone ID: PAT_MRT3847_1965C.1.pep
FPVKNLRGLKWGKKGFIRIRRIIGEPRETSGIYTGAFFPPKKKKNPFPLKKWESFLPYSSQIPRVWLCPLFLGTNGTFFKK

SEQ ID NO: 196715 - protein, 67 aa, Glycine max
  Clone ID: PAT_MRT3847_19660C.1.pep
PVLLGACCVLHNICEMRDEEMDPHWKFEIFDDEMVAENNVRSNAAEQARDQIAHYLLHHGRAGTNFL

SEQ ID NO: 196716 - protein, 145 aa, Glycine max
  Clone ID: PAT_MRT3847_19661C.1.pep
MDRKKKITAMEYLVTMVRVSVLNDALKSMYNAEKRGKRQVMIRPSSKVIIKFLLVMQKHGYIGEFEYVDDHRAGKIVVELNGRLNKCGVISPRFDVGVKEIEGWTARLLPSRQFGYIVLTTSAGIMDHEEARRKNVGGKVLGFFY

SEQ ID NO: 196717 - protein, 35 aa, Glycine max
  Clone ID: PAT_MRT3847_19662C.1.pep
LIPTGAVTGNHSSRDSGGNNGCHAKGDRPHTLASP

SEQ ID NO: 196718 - protein, 187 aa, Glycine max
  Clone ID: PAT_MRT3847_19663C.1.pep
LELLPTPSSEPSPKKPPPKRTSTKDRHTKVDGRGRRIRMPALCAARVFQLTRELGHKSDGETIEWLLQQAEPSVIAATGTGTIPANFTSLNISLRSSGSSMSVPSQLRSSYFHNSNFSLQPRRSLFLENTNTPSTTTTLLHFQSNNNNAIFQPKHELRESSSLDLSSENNNEEGYFGRIRRPLEQDL

SEQ ID NO: 196719 - protein, 51 aa, Glycine max
  Clone ID: PAT_MRT3847_19664C.1.pep
VLLLFETALLTWGCSLDEPNTFGNRIHTMLNLGLSIDQDAGEPDAQMPPPE

SEQ ID NO: 196720 - protein, 71 aa, Glycine max
  Clone ID: PAT_MRT3847_19665C.1.pep
GCPVYSTLVLSPVSYLHYKNRSFILLLFLDTPPIALSPRTLIGYVLFLRKYITFRVLYTPPPPPSEEDVIQ

SEQ ID NO: 196721 - protein, 58 aa, Glycine max
  Clone ID: PAT_MRT3847_19666C.1.pep
VFFFFSSFFLFFFWGQILNIFFYKKKQYFYKKKKKKKKKKKKKNKKKKKKKKKKKKKK

SEQ ID NO: 196722 - protein, 100 aa, Glycine max
  Clone ID: PAT_MRT3847_19667C.1.pep
SSSFQHYSCPGHFMTTLPTLKNYIWTILSRSFLNCINNSTQKGSHHLISYSSSLMATSTANSFNFDNTSMRVHRRTRAPAREEHERAILREFNNDHRHRC

SEQ ID NO: 196723 - protein, 95 aa, Glycine max
  Clone ID: PAT_MRT3847_19668C.1.pep
PTRPITRNFTLSARYITWRGITKQLRIMALLSGSTFCTTFLSHKNFGFTYSAKSSFVGCKLPLTKLTLSSCHRTLMPASSIIRWLQEYTTGTLVT

SEQ ID NO: 196724 - protein, 145 aa, Glycine max
  Clone ID: PAT_MRT3847_19669C.1.pep
MLRKSKRSKKRVSHAISNLMPHASSQGHSKPMELPLQPSELAQPCAPPVVLVPSSISVTQDPVLPSDPSSIPVNQDPVLPSDPSSIPVNQDLVSPSDSSSIPANQDPSSIAVNQDPVSPSDSSSIPVNQDPVSPSDPSSSPILKI

SEQ ID NO: 196725 - protein, 78 aa, Glycine max
  Clone ID: PAT_MRT3847_1966C.1.pep
SLITCGRNQWSHEPYLTRWRTCWSIMKRFYRNLHWKYYKQNVLLMGQLKHLLRHAVWAYGCAYVHDMVDDTSPGSITN

SEQ ID NO: 196726 - protein, 46 aa, Glycine max
  Clone ID: PAT_MRT3847_19670C.1.pep
HASDIVQSMHRLYVTIFPFSKCAKIIIQFVNLVFFKYFVLLTLFPY

SEQ ID NO: 196727 - protein, 61 aa, Glycine max
  Clone ID: PAT_MRT3847_19671C.1.pep
LTFCIFKIEIYAICCMFRAAEVDITRGNSGDVSTAVRSKDDVKMLMSQMHDLSFMLENNLS

SEQ ID NO: 196728 - protein, 38 aa, Glycine max
  Clone ID: PAT_MRT3847_19672C.1.pep
FTCTIGTLVELNKANELFYLSHKLVDLYPSNPVSRFAV

SEQ ID NO: 196729 - protein, 217 aa, Glycine max
  unsure (1)..(217): unsure at all Xaa locations
  Clone ID: PAT_MRT3847_19673C.1.pep
MINGFCSPFVNLGCEYSMGSIRGIKKRKKADNKDGPDASATSFDWWHHFSLRISGPLARSKNIEKFESVFKISRKTFNYICSLVEEDMLARASNFVDLNGNRLSLNDQVAVALRRLSSGESLSTIGESFRMNQSTVSQVTWKFVETMEERGLHHLSWASTEMEMEEIKSKFENIRGLSNCCGAVDSTHIMMTLPSVDALNKCVXLDREKNCSMVLQA

SEQ ID NO: 196730 - protein, 54 aa, Glycine max
  Clone ID: PAT_MRT3847_19674C.1.pep
SIKVVLPYNILQEMRMITNQVEIVSKRSFLSENAMLNFFIFIQIFHFNVRASDH

SEQ ID NO: 196731 - protein, 158 aa, Glycine max
  Clone ID: PAT_MRT3847_19675C.1.pep
MPPMGRRRKVAPKSSLSTEPPLKQQQPKPENPPQEYEEVEEEVEEEEVECEKTTEGEKEEERKMEKQQQQAPSKETKAQSDESVKESSTEGLPMEDSPYVKYKDLEDYKRQGYGTQGHQEPKTGRGAGATEAPTLSGAAVSSDAQVAATDAINSKGVP

SEQ ID NO: 196732 - protein, 63 aa, Glycine max
  Clone ID: PAT_MRT3847_19676C.1.pep
ENHFLAGPVEEEKEAAPNMEAPENRQDNPLNKRRENPAQLSHQIPIPKIGGEWHILKLRIKKN

SEQ ID NO: 196733 - protein, 65 aa, Glycine max
  Clone ID: PAT_MRT3847_19677C.1.pep
FSRSGVGSDGRYSLSTDHPYYYPHLPFLTIQTRSNIYPKHSLLSFSITASCSAVHTKILLRPITI

SEQ ID NO: 196734 - protein, 82 aa, Glycine max
  Clone ID: PAT_MRT3847_19678C.1.pep
IISIPAMSPLHEAPFGISIGETRRRGTSIGADDAQSHIMDDHILCTLSLECLPLFLFRQIENQVFSIFYFCWVLLDRGEECI

SEQ ID NO: 196735 - protein, 135 aa, Glycine max
  Clone ID: PAT_MRT3847_19679C.1.pep
MAASASNSTLHSPTTPNTTFVQADPSNFRAVVQKLTGASDDPSAPKLPLTLPSRLAAAQSHHRPAVGGEVIGPKKPNFKLHERRNAAAKKLDLPIDRAMSMMMMTSPTSSVVRNRTPTTLESMNMMMMMMLAVSH

SEQ ID NO: 196736 - protein, 46 aa, Glycine max
  Clone ID: PAT_MRT3847_1967C.1.pep
VPAQVDFPMRPCLSTALEFGPTTLFQRNPVLCTLSPPHVQWSGCPK

SEQ ID NO: 196737 - protein, 64 aa, Glycine max
  unsure (1)..(64): unsure at all Xaa locations
  Clone ID: PAT_MRT3847_19680C.1.pep
HXSSMAXXPSPPSPYFXFXQXXSSXXLXCFTMLEVKTTXQEXHXLXACXLXRXPLGXXRDIXXY

SEQ ID NO: 196738 - protein, 461 aa, Glycine max
  unsure (1)..(461): unsure at all Xaa locations
  Clone ID: PAT_MRT3847_19681C.1.pep
MAQGRNIHDSQRMSEKNIQVTNKKVQEIKDQVILAKAYLKIAPPSSNLRLRDLEQLTREMELAVGEATQDSDLSTSALQKMRHMEASLSKVYRAFQTALLWVLSFIQCLRRLKFGSRQVRSQRHQATYLVHLAARTAPKGLHCLSMRLTAEYFALRPEERKLPNENKIYSXNLYHYAVFSDNVLACAAVVNSTVSNAKKKEKLVFHVVTNSLNFPAIWMWFLLNPPGKATVHIQSIENFEWLPMYNTFNKHNSSDPRYTSELNYLRFYLPDIFPTLNKILLFDHDVVVQQDLSGLWNANLKGKVIAAVGTCQKGGTSFHRRDMLINFSDPFIAERFDANACTWAFGMNLFDLQQWRRHNLTALYHRYLQMGSKRPLWNIGSLPLGWLTFYNKTKVLDRRWHILGLGYDSGVDKNEIEGAAVIHYDGIRKPWLDIAMGRYRSYWTKYMNFDLPILQRCNLQA

SEQ ID NO: 196739 - protein, 67 aa, Glycine max
  Clone ID: PAT_MRT3847_19682C.1.pep
RLDPASEFWFFFKKNRLSNREKEKGMVKIMEAGPITWQRHDPAWKHVQMFKNGDKEQLKCIYWLKIV

SEQ ID NO: 196740 - protein, 55 aa, Glycine max
  unsure (1)..(55): unsure at all Xaa locations
  Clone ID: PAT_MRT3847_19683C.1.pep
MQGGKNAGESIKETATNIGASPKAGMEKTKAXVQETAERLTARDPVQTELATQKT

SEQ ID NO: 196741 - protein, 202 aa, Glycine max
  Clone ID: PAT_MRT3847_19684C.1.pep
VCCDLNGGKWRWRCGGGSPSAPVKQYLQEFSKLFQYYLDKSTPHAPYRWIGTFVIASIYVLRVVYVQGFYIVSYGLGIYLLNLLIGFLSPLVDPELDPSNAPMLPTKGSDEFKPFIRRLPEFKFWYSFTKALCIAFVMTFFSMFDVPVFWPILLCYWVVLFVLTMRRQVAHMMKYKYIPFNLGKQKYSGKKSSASSSGSRAD

SEQ ID NO: 196742 - protein, 198 aa, Glycine max
  Clone ID: PAT_MRT3847_19685C.1.pep
MQKTSGNIIGHFLGGLYYYLRRCMFAILSVGPVPSHIAFIMDGNRRYAKKRNMEEGDGHKAGFTALMSILRYCYELGVKYVTVYAFSIDNFKRKPNEVQSLMELMREKIEELLQQESLINEYGVRLHFIGDLQLLTEPVRASVEKAMRVTAHNNQRVLLICVAYTSRHEIVHAVQECCKEKWNEVQASKEAKLTNGAF

SEQ ID NO: 196743 - protein, 196 aa, Glycine max
  Clone ID: PAT_MRT3847_19686C.1.pep
MEASGGGGGGASPSAPVKQYLHDFSKLFQYYLDKSTPHSTYRWIGTFVIASIYVLRVVYVQGFYIVSYGLGIYLLNLLIGFLSPLVDPELDPSDSPLLPTKGSDEFKPFIRRLPEFKFWYSFTKALCIAFVMTFFSLFDVPVFWPILLCYWFVLFVLTMRRQVAHMMKYKYIPFNLGKQKYSGKKSSASSSGSRAD

SEQ ID NO: 196744 - protein, 176 aa, Glycine max
  Clone ID: PAT_MRT3847_19687C.1.pep
MEGSGGGGASPSAPLKQYLQEFSKLFQYYLDKSTPHPPYRWIGTFVIASIYVLRVVYVQGFYIVSYGLGIYLLNLLIGFLSPLVDPELDPSNAPMLPTKGSDEFKPFIRRLPEFKFWYSFTKALCIAFVMTFFSMFDVPVFWPILLCYWVVLFVLTMRRQVAHMMKYKYIPFNLGK

SEQ ID NO: 196745 - protein, 95 aa, Glycine max
  unsure (1)..(95): unsure at all Xaa locations
  Clone ID: PAT_MRT3847_19688C.1.pep
SFVRFIMKKMDKLNCEVGINPYSMXWTGSATRERGKGNDVLCGDYAXIDGLMTNQXMSRMAYTINXLCGGDEKMMHERTHTLTACLSRMVVSKKD

SEQ ID NO: 196746 - protein, 198 aa, Glycine max
  Clone ID: PAT_MRT3847_19689C.1.pep
MEGSGGGGGSGGGSPSAPVKQYLQEFSKLFQYYLDKSTPHALYRWIGTFVIASIYVLRVVYLQGFYIVSYGLGIYLLNLLIGFLSPLVDPELDPSNAPMLPTKGSDEFKPFIRRLPEFKFWYSFTKALCIAFVMTFFSMFDVPVFWPILLCYWVVLFVLTMRRQVAHMMKYKYIPFNLGKQKYSGKKSSASSSGSRAD

SEQ ID NO: 196747 - protein, 71 aa, Glycine max
  unsure (1)..(71): unsure at all Xaa locations
  Clone ID: PAT_MRT3847_1968C.1.pep
PFKCATESQWYGPDRTTYXGANSGEPPSYLTGELPHFYRWDTDGIGANPXTFPKNPELEGIQCRPLMLGIK

SEQ ID NO: 196748 - protein, 226 aa, Glycine max
  unsure (1)..(226): unsure at all Xaa locations
  Clone ID: PAT_MRT3847_19690C.1.pep
MSNQVVKVRRDTIAACMTCPLCGKLFREATTISECLHTFCRKCIYDKITDEEIECCPICNIDLGCVPLEKLRPDHSLQDVRAKVFPLKGRKVKAPEVVTSVPLPARRKERSLSSFVVSTPRVSTQAAMTGRRTKPTRKASGLRSTSFSIEKPIKKEEDLLEDRPDSSSSPDTSYKFAQNSGQSISPCEGSQSIPYKGSENGAEPWDAKLDLWKPXNFLIEVASRSK

SEQ ID NO: 196749 - protein, 165 aa, Glycine max
  Clone ID: PAT_MRT3847_19691C.1.pep
VHCKQQQQQPLHHHQFITMEHTNYNDVHCEETIVNVPFSWEHKPGLSKVTTHGQTGTSMVLQPPPCSSSGSGSDHRYKVEEESQILRAVQTSLRISSFRMESQKEEDPFVEAYKKCTQSPFIHEQSDRVQKNIRSWPTIRKYVNIFSCKHSDDVCGNKAVHTYKS

SEQ ID NO: 196750 - protein, 69 aa, Glycine max
  Clone ID: PAT_MRT3847_19692C.1.pep
DKRGGFPRPVGINKALVFYAGKAPNGEKSNWIMHECGLADVDLFRRKKNSYRLYYWVLYRFYILKCAID

SEQ ID NO: 196751 - protein, 44 aa, Glycine max
  Clone ID: PAT_MRT3847_19693C.1.pep
EKESRQRAEKRWHVKLVLRNLKFCLLKIIIYSDILMLKLCFFSN

SEQ ID NO: 196752 - protein, 124 aa, Glycine max
  unsure (1)..(124): unsure at all Xaa locations
  Clone ID: PAT_MRT3847_19694C.1.pep
TQNRIVHAAAAWHLVDLMYPSAGMVXKAVAVLANLAQLXEGRNALXQTNVRLPALDEVADLDSAKGKVTASAALLHLCLHNPILSLWVLQQGCCPPLVTLSLSGTLWAEYHAYALLTQCKRQRP

SEQ ID NO: 196753 - protein, 78 aa, Glycine max
  unsure (1)..(78): unsure at all Xaa locations
  Clone ID: PAT_MRT3847_19695C.1.pep
WTLVKINRYFCSSVALANSPILDIYFFYLLTLHFMFILFLXXSCCKVKVSCAMVGTCCFLPAGFPTSVISTERPIRKT

SEQ ID NO: 196754 - protein, 174 aa, Glycine max
  Clone ID: PAT_MRT3847_19696C.1.pep
MSFSRTPSVTMKLRMECCGKLRGSGLLEQVGRASCRCRHSKTKLLITYQKRPSFKKTMAVNKVTLVASVMACMLITCSYAESTLSCDQITIWLTPCIPYGVLGGNVSSLCCQGVYSLNAAYKSAEDRRGACQCIKDRAACIPGIDYTRVNQVGPRCGSKCPFKVYPSTNCSAVP

SEQ ID NO: 196755 - protein, 113 aa, Glycine max
  Clone ID: PAT_MRT3847_19697C.1.pep
PNHNPINNVFFSLPRRTRQLGLQVSLTTRSPPTTTRSSLLCSTTTFFYPTPSLPPTPNYFTCPLTSSCQTTWLTPPPLNLSLPTESLLSVKLSTTAFLDLFNPIIKLYHFNNT

SEQ ID NO: 196756 - protein, 102 aa, Glycine max
  Clone ID: PAT_MRT3847_19698C.1.pep
ALHSSLGVVDWSCHYRPASDSSTNLSFDASLQQTSSGLYSFSHGQDYRPTLLGFFFASTLRVLPAIISLPLSLLTSCLILNSLIPVTTILRLKEEGMAIPSF

SEQ ID NO: 196757 - protein, 103 aa, Glycine max
  Clone ID: PAT_MRT3847_19699C.1.pep
HAWRLWTEERVLELLDELLGEQCAPLIVIRCIQVGLLCVQQRPEDRPDMSSVVLMLNSDTSLPKPKVPGFYTEIDVTSDANSSSANQKLHSVNELSITILDAR

SEQ ID NO: 196758 - protein, 242 aa, Glycine max
  Clone ID: PAT_MRT3847_1969C.1.pep
MTTTRVAICLCFAFLYYAAEGAKVSFNNKCSYTVWPGTLTGDQKPQLSTTGFELGPGASNSVDLPSPWSGRFWARTGCSNNNGRFSCATADCASGQVACNGAGAIPPATLVEITVAANGGQDFYDVSNVDGFNVPMSVTPQGGSGDCKTSSCPKNINSVCPAELQVKGSDGNVIACKSACEAFKEDRYCCTGPNNTAETCPPTNYSQIFEEQCPDAYSYAYDDKSSTFTCSNRPDYAITFCP

SEQ ID NO: 196759 - protein, 239 aa, Glycine max
  Clone ID: PAT_MRT3847_196C.1.pep
MSGPECCSNPPVLNPNAGAGHVEKLAGLNSYLSGSPNSIAILLISDIYGYEAPNLRNIADKVAAAGYYVVVPDFFHGDPYNPENASRSIPVWLKDHGTDKGSEAAKSIIEALKSKGVMAIGAAGFCWGAKVVVELAKSRLIQAAVLLHPSFVSVDDIKGVDTPTAVLGAEIDKMSPPELVKQFEQVLTAKPGVDCFVKIFPKVSHGWTVRFNPKDAETVKAAAEEAHQDMLNWFAKHLK

SEQ ID NO: 196760 - protein, 182 aa, Glycine max
  Clone ID: PAT_MRT3847_19700C.1.pep
ERFDHINTPCDLQSQASGVSDYGSEPNSYVPSPSPRKMGCRISTNRAAGFDVFLGSGGNVNTFDACQKDGDGSSTLTETDEDYDDASSMNSFSGFFGNGNDHNSIHRRVMELDIEIPHEGKEKHEEERVKNDELKIENNAEDFRVKINAYEQELRIVNEKLRVSEEEIGKLKIELEKYRSME

SEQ ID NO: 196761 - protein, 68 aa, Glycine max
  Clone ID: PAT_MRT3847_19701C.1.pep
FWEEWVPLFWTLLTRSKRPPMFLELSDNCFYSIQRAGMNYINKDNAVIPATYYSITPRIILHAQPLWT

SEQ ID NO: 196762 - protein, 142 aa, Glycine max
  Clone ID: PAT_MRT3847_19702C.1.pep
YGCEKTTEGDDMQLNISISSPPVIQVTYQDIGATIFVDITIDVLEDGEVMPVACISVEISASCAVEIEGNNIAGWLRLQTFSAYLKWSKIGKLHVRLIQSLMSSVLKTVVLPYLNFKLKRGFPLPIIDGYGFQNAIILYNHP

SEQ ID NO: 196763 - protein, 40 aa, Glycine max
  unsure (1)..(40): unsure at all Xaa locations
  Clone ID: PAT_MRT3847_19703C.1.pep
PNXVGQIDGPDGSLVILSICACNVXGNGGDCEVXGNVKXX

SEQ ID NO: 196764 - protein, 81 aa, Glycine max
  Clone ID: PAT_MRT3847_19704C.1.pep
LHLRLRFGIPVEHCFHGVAAGRASEWGEVLELQGNTCFRHNLIPLPESSPPSPRATPSRRGSGFGVSTFNEPRDVRGRGRS

SEQ ID NO: 196765 - protein, 56 aa, Glycine max
  Clone ID: PAT_MRT3847_19705C.1.pep
RDHSSKLSKPKLGFNYTPVARTTGPSSLSALALNFPVLKNRTFIKFEKGTFPVTRI

SEQ ID NO: 196766 - protein, 83 aa, Glycine max
  Clone ID: PAT_MRT3847_19706C.1.pep
GPLRAANHRAAPPPSFTATATCKPFCDTYSEFAPSTGDDRESPGPPLNRGPPQGRPPPRNRTPPPPPNPPPALRPARRAECRA

SEQ ID NO: 196767 - protein, 123 aa, Glycine max
  Clone ID: PAT_MRT3847_19707C.1.pep
MWPSAEMLSNIKEASQSVVSTRRPWRVFLDPSSLSLPSSISETTTRLAHNLTYFLFNYALLLLLVFLLTLLRHPFPLLLFLLLSAAWYFLYFSRDDLPIAIIPLSLVTLVALFATGAWLYLLL

SEQ ID NO: 196768 - protein, 175 aa, Glycine max
  unsure (1)..(175): unsure at all Xaa locations
  Clone ID: PAT_MRT3847_19708C.1.pep
FLFLVRSCCFVVGVGLRRWRKRGGFDLNLDVWVGSVGVSVCDLLGLFLCWVGGGGRGGVRWFNSFIFYFFSLKFIVAXXXKXXXXXXXXFXXXXXXXXXXXXXXXXXXXXXXXXXXXXXXXXXXXXXXXXXXXXXXXXXXXXXXXXXXXXXXXXXXXXXXXXXXXXXXXXXXXXX

SEQ ID NO: 196769 - protein, 149 aa, Glycine max
  unsure (1)..(149): unsure at all Xaa locations
  Clone ID: PAT_MRT3847_19709C.1.pep
MATVSSEFLSHCLPLGTNSKRAWLPNPSNTVITCRIPLLNEDNPSKRRLNNNNNNKGHTRVTSSDTRPQQQHYDFRDTHHMKALNRLCKTGKYTEALYFLEQMVKRGYKPDVILCTKLIKGLFTSKRTEKAVRVMEILXQYGDPDSFAY

SEQ ID NO: 196770 - protein, 122 aa, Glycine max
  Clone ID: PAT_MRT3847_1970C.1.pep
PRSSTGFWIGGFSSWRLRSLGPHRTRWWKLARRTWLLFLLRYRVVATPSVTLAAVNRDSADARCSKPHSSLSSCRNSRSFSWMLRPPGGCCDITPQTPSERMELRRRRNFMIGLSWKEGWAR

SEQ ID NO: 196771 - protein, 135 aa, Glycine max
  Clone ID: PAT_MRT3847_19710C.1.pep
IPLWMLKHLLRNTRTSMNVSFLTHPDMPRNRAKLSIKLTTPTAMISIMIPTLLSTMIFKALSPSWVVNRNETSACFTLSLNSRTMGGKCKRQHLGLTSRDTDCVWTITTGMRLCLYNYVPQHLYGRIDADCFRRT

SEQ ID NO: 196772 - protein, 84 aa, Glycine max
  Clone ID: PAT_MRT3847_19711C.1.pep
DFSQQRGGENTFFSCEPGGVIQKQTYSHLYPSPRGCCLLQKPHRLGNPPHFFSGVPGGHWLETCPLPKLTLGASVLNLRWPNRV

SEQ ID NO: 196773 - protein, 78 aa, Glycine max
  Clone ID: PAT_MRT3847_19712C.1.pep
MGGGNAQKSKMAREKNLEKQKAAAKGSQLDSNKKAMSIQCKVCMQTFICTTSEVKCKEHAEAKHPKSDLYVCFPHLKK

SEQ ID NO: 196774 - protein, 78 aa, Glycine max
  Clone ID: PAT_MRT3847_19713C.1.pep
MGGGNAQKSKMAREKNLEKQRAAAKGSQLDSNKKAMSIQCKVCMQTFICTTSEVKCKEHAEAKHPKSDLHVCFPHLKK

SEQ ID NO: 196775 - protein, 59 aa, Glycine max
  unsure (1)..(59): unsure at all Xaa locations
  Clone ID: PAT_MRT3847_19714C.1.pep
YVKTDIYYSFXPQRPFRFISRGPNNYSQGPIFLIWCFPPSIVIIPEKKKDPIPKPTTAP

SEQ ID NO: 196776 - protein, 49 aa, Glycine max
  Clone ID: PAT_MRT3847_19715C.1.pep
VSQSASVNAVLSASPTIQGSSVNDYLNDELYGMRTETHVHVTIGLCYKG

SEQ ID NO: 196777 - protein, 386 aa, Glycine max
  Clone ID: PAT_MRT3847_19716C.1.pep
MFSSLHAKTIMKTPKRHSPPPNSSLRVESDSGEIVTRFKNGRRRRIKIKRMKYTCQTKIRVRNDAGAGGVSQLLAVDSEGEKREIHENVEISLSLASSSSEEEERLSSKQNDGVLSYGSASVIGSRKEMEDAVSEEIGFAAKCDFFAVYDGHGGAHVAEACKERLYRLVAEEMGSSASHVEWDGRGVMQGEAAQAGGGGTGNAAVRTVGSTAVVAVVAAAEVVVANCGDCRAVLGRGGEAVDLSSDHKPDRPDELIRIEEAGGRVINWNGQRVLGVLATSRSIGDQYLRPYVISKPEVTVTQRSSKDEFLILASDGLWDVMSSEVACQVVRKCFHGQIRRVCDGVGNHQNRATEAADLLAEIALAKGSRDNTSVIVVELRGTVTTD

SEQ ID NO: 196778 - protein, 283 aa, Glycine max
  Clone ID: PAT_MRT3847_19717C.1.pep
METTQLDYNTKKTNPTSPTRLKLFGFSVHHEDIMDEDEVAHDDVADSTTKVTSSTSPSSPSDSPDSSVAGAGPPSSADRKYECQYCCREFANSQALGGHQNAHKKERQQLKRAQLQASRNAAVSFVRNPMISAFAPPPHLLAPPGTVVVPAAPPSWVYVPPRAAPPPFHVSVSHGCAFPSAHGNSNNNGFSSSSSNNSNNVTITTGVKSAGAGMFPYVGVVGDSSSLALSTVQVQARAHHARIDGPSLSRFSKGDSGPKFDDAWGLDLHLSLAPAAPSSLGSA

SEQ ID NO: 196779 - protein, 44 aa, Glycine max
  unsure (1)..(44): unsure at all Xaa locations
  Clone ID: PAT_MRT3847_19718C.1.pep
MRDLNTYLSVAPEASTLWVGALARLXKKINRFFPNALIFPFFSF

SEQ ID NO: 196780 - protein, 106 aa, Glycine max
  Clone ID: PAT_MRT3847_19719C.1.pep
PYGIKGGQAFRERVYAFGRKRKGKGVFPFVDKNGGKVEGYRPIYGPQGWFPTGDVYPGGTTGLAIWAGAPPGFLAGGAPLGYHPRGLGPKTLPNEGFSPNLGPGTI

SEQ ID NO: 196781 - protein, 103 aa, Glycine max
  Clone ID: PAT_MRT3847_1971C.1.pep
MENYVKVQETLDLTQMSTLINPRVFLSSFTICTAKCLTRAFKMILNSYCCIPLSVSDFEGGIIVGIENMREKVIHVPQGSKSPTQLLAIRTLYSTKAIKGFID

SEQ ID NO: 196782 - protein, 114 aa, Glycine max
  Clone ID: PAT_MRT3847_19720C.1.pep
VDLSRNKLEGDASVLFGSEKRTEMIYLAHNLFAFDFGKVRVPKVLDSLDVGHNRLYGTLPKGLTSLKNLYRFDVSYNKLCGEIPRGGKLQEIDESFYANNKCLCGSPLPSCKRF

SEQ ID NO: 196783 - protein, 177 aa, Glycine max
  Clone ID: PAT_MRT3847_19721C.1.pep
IVAGVSDSETSRIELQVVSRVNSNNNNNLSSNNDNGENGINDEWERSPLVGGMRFGEVVVDEGMSPLVEMSGVGENEEEGEGVRRKIGERGIKFGLGDFVFYSVLVGRAAMYDLMTVYACYLAIISGLGCTLILLSMCRKALPALPISIALGVLFYFLTRLLMEPFIVGTATNLMMF

SEQ ID NO: 196784 - protein, 455 aa, Glycine max
  Clone ID: PAT_MRT3847_19722C.1.pep
MFNLAKLLSHRSHRITFVNTHHNHNRLLQFTDLPSFHTQFPDFLFASITDGIPSDNPRKGALINYLPMLITPSARSLVAKEFRELFSRLLEKNGDQWQQPSCIIVDGLMSTIVMGVAQEFRIPVIAFRTYSATCTWVTIFMSKLAKEGAQQLRSNQDAENLKSASANIPGLENLLRNCDLPPDSGTRDFIFEETLAMTQASAIILNTFEQLEPSIITKLATIFPKVYSIGPLHTLCKTMITTNSTSSPHKDGRLRKEDRSCITWLDHQKAKSVLYVSFGTVVNLSYEQLMEFWHGLVNSLKPFLWVIQKELIIQKNVPIELEIGTKERGFLVNWAPQEEVLANPAVGGFLTHCGWNSTLESIAEGVPMLCWPSITDQTVNSRCVSEQWKIGLNMNGSCDRFVVENMVRDIMENEDLMRSANDVAKKALHGIKENGSSYHNLENLIKDISLMKVRN

SEQ ID NO: 196785 - protein, 83 aa, Glycine max
  unsure (1)..(83): unsure at all Xaa locations
  Clone ID: PAT_MRT3847_19723C.1.pep
KTITLXVESSDTIXNVXAKXXDXXGXPXDXXRLXFAXXQLXDGXTXXXYXIXXESTLHLVLRXXGGXKSLSRLSLXRPSPLRW

SEQ ID NO: 196786 - protein, 82 aa, Glycine max
  unsure (1)..(82): unsure at all Xaa locations
  Clone ID: PAT_MRT3847_19724C.1.pep
PHAICRPVFKCFKALGDYIETLPHXDAXNGCYCSMVPEWEYSYIDYNCLKAPLKNISKFRELNESPPMASTSLGLRREVNTL

SEQ ID NO: 196787 - protein, 145 aa, Glycine max
  Clone ID: PAT_MRT3847_19725C.1.pep
MPPPPVHPYPDALPTPTAVSPHPHPHPPYVYHSPPPPPKKPYYYHSPPPPVHHHPYPHLHPHPHPNPPPPTKKPYYYHSPPPPVHPHPYPHPDPHPHPYPHPYPQPQYYSPYAHHSGPPPPNTPYKSPSPPPTVGPAYIPHSGYH

SEQ ID NO: 196788 - protein, 76 aa, Glycine max
  Clone ID: PAT_MRT3847_19726C.1.pep
INFLLRVFLDNIVCSCELIWLVHGIFFNFVGLFPKCCCLIWDFCTYYVLFSFFCQVYVIIISFFLHFWKFLLFFIN

SEQ ID NO: 196789 - protein, 55 aa, Glycine max
  Clone ID: PAT_MRT3847_19727C.1.pep
HYAIVYQIYGVNWYGPKSLGCHFNMRRAFPSGSHHIWSHPLTGQDTVSIRDKVCP

SEQ ID NO: 196790 - protein, 47 aa, Glycine max
  Clone ID: PAT_MRT3847_19728C.1.pep
SRSTPRPPTRPPTRPPTRPLPSLIRGVIFHNFAKNLLHTTSKCLILS

SEQ ID NO: 196791 - protein, 69 aa, Glycine max
  Clone ID: PAT_MRT3847_19729C.1.pep
QTRLLPTTLEESGSFSLSAVGNFSKTCICDWIFNYSLWYQELAPTTGNGTAIAIAGVASYPFIKARTEV

SEQ ID NO: 196792 - protein, 51 aa, Glycine max
  Clone ID: PAT_MRT3847_1972C.1.pep
SDDETSKSISGKVNLFFFHKGTNLNLVHWTSIKQWRRLNYFLPIGRAPLLF

SEQ ID NO: 196793 - protein, 44 aa, Glycine max
  Clone ID: PAT_MRT3847_19730C.1.pep
HTADLYLINNRFETTFQPEASYMHHTPHNNLVGIARHYKFDVEH

SEQ ID NO: 196794 - protein, 86 aa, Glycine max
  Clone ID: PAT_MRT3847_19731C.1.pep
VMLFVLSIASISFSDAPCRRSLFSSTLVANRFPSSLTFFSSGRSWAFRSSHPSAYINGSPASRQITPDPIRLGVPLKNLRDVWFSI

SEQ ID NO: 196795 - protein, 101 aa, Glycine max
  Clone ID: PAT_MRT3847_19732C.1.pep
NPGPNFGTWIFFFFFFPPLKKDLPWLLKGTATNIFQIFPITWIWFISNLDKKGPNPKWASLHGALFGPLTPGGGPRVPLFNFGFGKIPVLNLAGSRGENLT

SEQ ID NO: 196796 - protein, 69 aa, Glycine max
  unsure (1)..(69): unsure at all Xaa locations
  Clone ID: PAT_MRT3847_19733C.1.pep
QGNVCSQXTNSCXFXXXXSKTKTKPLSVXXANTXYVVTLXYSTTLLALITPFTFXSLXHCXLLXLFLXL

SEQ ID NO: 196797 - protein, 134 aa, Glycine max
  Clone ID: PAT_MRT3847_19734C.1.pep
KKIPLSPTEIKKKKDRTDRPYKQYGQPEMENETRPVTGGAPFKGPMFTPGGLQENSFFLGAPILIFWAVFLKRGEGKTPGLPKFNGLEKIPLFPGWGKTKRPPPVRLSKIWPTLMGKGDPPFTGDLSAGGGVFP

SEQ ID NO: 196798 - protein, 325 aa, Glycine max
  Clone ID: PAT_MRT3847_19735C.1.pep
MAEGLVLRGTMRAHTDVVTAIATPIDNSDMIVTASRDKSIILWHLTKEDKTYGVPRRRLTGHSHFVQDVVLSSDGQFALSGSWDGELRLWDLAAGTSARRFVGHTKDVLSVAFSIDNRQIVSASRDRTIKLWNTLGECKYTIQDGDAHSDWVSCVRFSPSTLQPTIVSASWDRTVKVWNLTNCKLRNTLAGHNGYVNTVAVSPDGSLCASGGKDGVILLWDLAEGKRLYSLDAGSIIHALCFSPNRYWLCAATEQSIKIWDLESKSIVEDLKVDLKTEADATSGGGNANKKKVIYCTSLNWSADGSTLFSGYTDGVVRVWAIGRY

SEQ ID NO: 196799 - protein, 60 aa, Glycine max
  Clone ID: PAT_MRT3847_19736C.1.pep
KKTKLISTLGFTIHAPSFSPTKNNIIDKLSQNPYHEYYTYSLHPLQFLPTLNYSNSSNKF

SEQ ID NO: 196800 - protein, 95 aa, Glycine max
  Clone ID: PAT_MRT3847_19737C.1.pep
KHDTQVLQKVEGEKKKRSRRFIHFIFGPYGDTPLSCPLPFTSLHTVYMLLSAWFRLPLHLSRTSCCSISSPPLRRTLFLSSSGSFLDHVAQAPPR

SEQ ID NO: 196801 - protein, 435 aa, Glycine max
  Clone ID: PAT_MRT3847_19738C.1.pep
KALISLVDALTGKVVSTGPSSEDGNCILEGDFEEESETWMPEEFKSNIVREREGKKPLLTGDVILYLKDGIGMVGEISYTDNSSWTRSRRFRLGARVVDNFDGVGIRDAKTESFIVRDHRGELYKKHHPPSLSDEVWRLEKIGKDGAFHKRLSREKILTVREFLTLLNLDPAKLRSILGTGMSAKMWEVTVEHARTCVLDTTRHVYFPSNSQEPGVVFNAVGQVTGLLSECEYVTVEKLTETEKADAQNSVTAALRQGEKYTTFEDEDSLMDGSSHLTNVLYSPSSPKTEGSSAILAPQKTGGFNYPPASASSPDIMSSIYSVGGTSSLDDYCLPNFDSMGLRYDQTLSFPVQVSNSLICDTDSMAHAFSDEDHLQFFDTDLQSHVQADLQGAIDSFMLARPTANGGAQRRWRKVCNVLKWFMVRKRGNQIQVRL

SEQ ID NO: 196802 - protein, 68 aa, Glycine max
  Clone ID: PAT_MRT3847_19739C.1.pep
WSSPSDDHSVQKKVIIRIQIGFWCVQEEPIDSLTMASVVLTHNSSLGSLQEPNQLAFYIHSSAGPCKL

SEQ ID NO: 196803 - protein, 60 aa, Glycine max
  Clone ID: PAT_MRT3847_1973C.1.pep
QEIHMSTVNLINQLNLTRHMKMVIESYCYYQFLFHCHTWMLENIIKGDLRLNNISESHAE

SEQ ID NO: 196804 - protein, 303 aa, Glycine max
  Clone ID: PAT_MRT3847_19740C.1.pep
RTAARRRQKGESATSSSSWTMNIATNTTFINFPFQLSPLASRACHQRATLSLSFPPLPLSKPAMSSAAPVTELSDESDFESLLSPDGHISICGFGSLLSERSARSTFPDLANFRTARLNRFRRVFAHVAPVFFERGIAKPETMEISSLSVEPCEGETLVVTVFEIRKSEIPDFIKREVEFRFLAVLPETLDGKAFDFPAVLCARYSDEEFFDNRCKGNKEIYFQQYGRWNIDKIWRDDVLPCRVYLRHCVLAAKNLGETAYNNFVDHTYLADRKTTIRDYLATTGSGIMEEQPPESLKHRYGG

SEQ ID NO: 196805 - protein, 53 aa, Glycine max
  Clone ID: PAT_MRT3847_19741C.1.pep
SGSVRVAKALSMSNWVWYPSIGKHHPDIVDNLMSCTKLTLVRCALLRDKVRCM

SEQ ID NO: 196806 - protein, 168 aa, Glycine max
  Clone ID: PAT_MRT3847_19742C.1.pep
LLLCFVIIKKIYRSSGRAMLHKRAKVEFHPLGVIGAIVSWNYPFHNIFNPMLAAVFSGNGVISEHASWSGCFYFRIIQSALAAIGAPEDLVEVITGFAETGEALVSSADKVIFVGSPGVGKMIMSNAAETLIPVTLELGGKDAFIVCEDVDVDLVAQIAVRAALQSSG

SEQ ID NO: 196807 - protein, 165 aa, Glycine max
  Clone ID: PAT_MRT3847_19743C.1.pep
HIKPNNIVLDDNMKPKLTDFGISVLGPRFMSKPKPIKVDSVVGTFGYLAMEHLTDLTVTDKTDVYSFGMVLLEVVCGRKYVTTELEKPVEEKIDPNIKGKIAPECWQVFIDITRKCVKYEAHERPTMGEVEVELEHALSLQEQADITNPIIGEYTLLSKTIINLI

SEQ ID NO: 196808 - protein, 102 aa, Glycine max
  Clone ID: PAT_MRT3847_19744C.1.pep
LENNTKSTYGHEMDREEYLRKCSNMKCQRVQVDESFVPALQDEVMEVEHLLAEPRNVHASLDGSLDSHTTLNDKDDLELEVLDGLLDDVEIDDLEGTGGFAG

SEQ ID NO: 196809 - protein, 56 aa, Glycine max
  Clone ID: PAT_MRT3847_19745C.1.pep
VDQRRARDSSCHTKHSFNGTCRKEPHFWGMGRNTGDTLVTTHSSKLTQQHEPNSLC

SEQ ID NO: 196810 - protein, 98 aa, Glycine max
  Clone ID: PAT_MRT3847_19746C.1.pep
EPVLHRKPRERLSKMTSLPCVPCHLMWYIVCENWLKFTHTQGNVGQRGCVLAKLALLSLLKILLPLVLAKEMYVGSLLRSPYVKQSMEIYSQKNLVEI

SEQ ID NO: 196811 - protein, 506 aa, Glycine max
  Clone ID: PAT_MRT3847_19747C.1.pep
KTTVISLLRFVTLFWRFWPFSVSNIRTNFSLSLFNSTLGGHEMDREEYLGKCSNMKCQRVQVDESYVHALQDEVMEVEHLLAEPRNDHASLDGSLDSHTTLNDKDDLELEVLDGLLDDVEIDDLEGTGGFAGACEEYFLDFGFADKFEEVLGSGPFEGSLLQISSSESHSSGLSGSSIVGGVLESTKVPIAKSECKNDSLDETITYEAHGAFRNNPSQPSKVNCRYNISLDIQHLQELENNRHLAAGILTCKKEKGPVEKGQPAVPREKRFRKPTQRYIEEFSNSRSKEKAPTAVTKTEYLSDSSCDVLHIRIKALKKSPSEKSSNENRDVMLPELQVHKGRPKKEKLEYDIESFPLESEDEWLTSKRSRRKDRRKHQKMWTLPEVLKLVEGISEYGVGRWTDIKRFLFSSTSYRTPIDLRDKWRNLLRASSAQKSTREAEQNDELALRPLPFNVVHRVQELAKIHPYPRERGSKRLRVSQAGSSVIAKDSPPLSLSKRNVRRKFT

SEQ ID NO: 196812 - protein, 86 aa, Glycine max
  Clone ID: PAT_MRT3847_19748C.1.pep
VSGKPGRLRAPVRGSRHDPRFQFRYGNHASPGYKMRTAGRRVTETKATVYPEPLQMPGPCYTRCTTMTTTTTTTAGRMTLWMTWRM

SEQ ID NO: 196813 - protein, 125 aa, Glycine max
  Clone ID: PAT_MRT3847_19749C.1.pep
ECGLEHFWGTWITNGEAPPPALWGRFITTLNGSPPCSIPETTTWRPSPNQISKTKMLVTAFLYRGGGTDDTLGPSQKLTRMHSEIAGRISFQSSFCGNGESPALTVKPHAREKKALGGAATTGGT

SEQ ID NO: 196814 - protein, 122 aa, Glycine max
  unsure (1)..(122): unsure at all Xaa locations
  Clone ID: PAT_MRT3847_1974C.1.pep
KRTNQKKSPKSXXKNDENGGQQRKTKTPRDKTPKVGAGRQQEXTTMKQHSRTTDTNHRRTQERSADNNQERRPQQRKLGNENEKTKRNNEPTRKPNEHERESTDRENAMAKNDARPDTNQRE

SEQ ID NO: 196815 - protein, 51 aa, Glycine max
  Clone ID: PAT_MRT3847_19750C.1.pep
RNSDRASSEDMAEMHSMHQRPIYDGQHLEDGETPCCTQLLSTAKYLYTMDT

SEQ ID NO: 196816 - protein, 58 aa, Glycine max
  Clone ID: PAT_MRT3847_19751C.1.pep
SRASRAESARAFKIDMYVFLSSALSDVLLSLSSYPLFSGLSQLFDSGLKLSLPIQSRI

SEQ ID NO: 196817 - protein, 136 aa, Glycine max
  Clone ID: PAT_MRT3847_19752C.1.pep
IVDEFGNLFSWSLIASHLPGRTDNEIKNYWNSHLSRKIYTFHGKTTSKGIITLPPRRKRGRTSRWAMKNKNQKGSSSTQQQQQQIHHHLNNEVAVPLPPKPPLETEKYLSTNIILMEEQVDGSSTASTITNPGPAG

SEQ ID NO: 196818 - protein, 302 aa, Glycine max
  Clone ID: PAT_MRT3847_19753C.1.pep
MKGFQSDLSSAVRLNIGGKKFCTTTDTLTQREPDSMLAAMFSGRHTLCQDPDKGYVFVDRDGKHFRHILNWLRDGVVPTLEESQYSELLREAEYYQLLGLIDGIHSVLNKKNEDDEFHTELTRTDIIKCIQSEKVRFRGVNLSGLDLSKLDLSYVDFSYACLKNVFFSRANLQCAKFRDVDAEGSIFHNATLRECEFTAANLRGALLAGACLQSANLQDACLVDSSFCGADLRTAHLQNADLTNANLEGAVLEGANLKGAKLNKANLKGANLQRAYLCRVNLRDTELEGARLDGANLHGAIR

SEQ ID NO: 196819 - protein, 62 aa, Glycine max
  unsure (1)..(62): unsure at all Xaa locations
  Clone ID: PAT_MRT3847_19754C.1.pep
ISRIRRAPPPSDCNILPAKHALIPGPEXGAPPVQKVNALWPGSFVLQNLSERITVPSVNTRC

SEQ ID NO: 196820 - protein, 107 aa, Glycine max
  Clone ID: PAT_MRT3847_19755C.1.pep
DETFSPKKPTPKKKPDKKKEPKKKSAKKNGQGHREKTPAPGPKAGGPRPQAVRQKNTTMGPPGRKPKRGTGKAKPPGGKTPREKQKGPYTPKRKKKDRKNKAKKKNL

SEQ ID NO: 196821 - protein, 59 aa, Glycine max
  unsure (1)..(59): unsure at all Xaa locations
  Clone ID: PAT_MRT3847_19756C.1.pep
RSXGFRHRRKLEQPFPCXXCGGRKTLTFVXSLLKQXHXGEDDAGDDEPXLQDXNTVAQF

SEQ ID NO: 196822 - protein, 113 aa, Glycine max
  Clone ID: PAT_MRT3847_19757C.1.pep
KDYMSCFTGKSVILNSFTPYDVLRTLVSHCYDSWDTEDQRWCYSVIIKLKLAYHVTCWMATATYHPCWSEADLASIASRRQTLMHSCTKHCTGSYSSVHTQTSAYKHASHLKQ

SEQ ID NO: 196823 - protein, 154 aa, Glycine max
  Clone ID: PAT_MRT3847_19758C.1.pep
MSRRMVTNQDAEAAAPGAGAAVDPMRLASRWRRSRPEWNCASAELEAEPSELNTVNSSGLFSVVSTDKLSVKYLGSHHHGHDVGVVQADRPAPTRRAVYYFEMGVRNAGYKGQTSIGFTSESFKMRRQPGWETNSCGYHGDDGHLYRGQGKGES

SEQ ID NO: 196824 - protein, 162 aa, Glycine max
  Clone ID: PAT_MRT3847_19759C.1.pep
MKRVKKLYPFLVLPNRPKPLQIFMAVMFLYLLFTTFEIETSLGFRTRFVSVSSLLGNEDQHQRTHSSKASNFPSQGVFQGSLHRKALQGLQKVSTLSFIEALNDTTVEENMFSELHKAARHAWVEGKRLWEQVESVKETMNVARFKAENLSDSGQHSISLSG

SEQ ID NO: 196825 - protein, 56 aa, Glycine max
  Clone ID: PAT_MRT3847_1975C.1.pep
QPFYSKSHHSIHKICWRNLLCPNVICLTQQFRFSFWHANSRVIFSQYKQISRSFLA

SEQ ID NO: 196826 - protein, 166 aa, Glycine max
  Clone ID: PAT_MRT3847_19760C.1.pep
ARGKFETGADIVGGKELIEEIASGKNKLKVDKCFSTPGMAPHLGKIAQYLRKRRLMPDKKLGTLTSDIAGQLKELRQGRVEFKMESKSILHVGLGKVSYKEEALRENISAFMNAVLLAKPAGLKKTSKYAGYVLSVHVSSTMGPGLPVSIQSISKAADNYKKMHVV

SEQ ID NO: 196827 - protein, 49 aa, Glycine max
  Clone ID: PAT_MRT3847_19761C.1.pep
LNLSACFNVGKALPFCPLHSDCTSVKKDDLYGPLRWYPQGFNRHVLLND

SEQ ID NO: 196828 - protein, 72 aa, Glycine max
  unsure (1)..(72): unsure at all Xaa locations
  Clone ID: PAT_MRT3847_19762C.1.pep
ERYPIGTAAYGGGDKVYKEAPPVSLFEPVELKLWYFYMSXVFANIVATFLVPFITILTCLGCQQGNPFKSAF

SEQ ID NO: 196829 - protein, 470 aa, Glycine max
  Clone ID: PAT_MRT3847_19763C.1.pep
MDNFEDATEPVSPSGRFFNTTVLCAYVFGFLESEVPIEFSQAKYLFEDVFLPVNPHFSSIMVRDEEGEMKWKRVEVKFEDHVKIPTFPENESLELYDQYFDDYVTKILMERTPQDKPLWEIHVIKYPTSNAAGTLIFKLHHALGDGYSLVGALLSCLQRADDPSLPLSFPSRKSSASSSPSKKGFFRLFSSTLFSFFNSISDFGWSIVKSSIVEDDETPIRSGEEGVESLPCVISNISFDLDQVKKIKSKLGVTVNDVITGAIFYGIRLYMQEIDNKAGKANSTGLVMLSTRNIGSYQSIQEMMKADSKSPWGNHISFLHVPIPKLSQASLSNPLEFVWKAQKIIKRKRKSFTVFLIEWLLDMELKLRGHEAVAKHIYGTLRNSSVVVSNLIGPIEPMALANHPVKGLYFTMTGGPESINIAVISYTKTLRITLKTQKGFIDEKKFKFCVVKAFEVISKAAMEIPNKIRG

SEQ ID NO: 196830 - protein, 66 aa, Glycine max
  Clone ID: PAT_MRT3847_19764C.1.pep
IQRWWIELELGFGNQQGYHNVILPQEKDVCYCIVVIERGVEEELEVVYAVTRHERRVAFSWSDSPP

SEQ ID NO: 196831 - protein, 278 aa, Glycine max
  Clone ID: PAT_MRT3847_19766C.1.pep
MEPNFNNNPKMLQKKWLSTALNVRSQGSGSETIVFAHGYGTDQSIWEKITPSFAENYRVVLFDWPFSGAVKDPSLYDPLKYTSLEAFADELITLMDQMDLKAVTFVGHSMSGMIGCLASIKRPELFKRLILLGASPRYINTDDYEGGFTSSDIEQLLKNIEFNYENWVSAFSLLVVDPNDEPSVNKFRECLKKMRAEVPASLAKTVFYSDYRDILEKVETPCTIIQTSSDIVVPHKAAVYMESKIKGKVTLEVVDTKGHFPQLTASLQLVDVIKGVLG

SEQ ID NO: 196832 - protein, 74 aa, Glycine max
  Clone ID: PAT_MRT3847_19767C.1.pep
PHSLPPESFQNLILELSTFPRIDDPLLQETPSELVECRSGASVRGHVELYLPVRQGSSRRCQSLDGGAPNGLAL

SEQ ID NO: 196833 - protein, 134 aa, Glycine max
  unsure (1)..(134): unsure at all Xaa locations
  Clone ID: PAT_MRT3847_19768C.1.pep
GEMIFPKEKGGPKKGFXKXSFERGKQTSGELRFPGEKPKQPPPFDVFLGVSQNFKIGGNPXKPAFFFPQAKARFFKKEKFLAKLGGRVFFSKGFVFHPKKEIRPAPRLKKFSLFKKFPPSLLRIVKKREGGVFF

SEQ ID NO: 196834 - protein, 209 aa, Glycine max
  Clone ID: PAT_MRT3847_19769C.1.pep
RLADSDMAAILWEMVFRGTDTVAILLEWVMARMVLHQDVQKKAREEIDTCIGQNSHVRDSDIANLPYLQAIVKEVLRLHPPGPLLSWARLAVHDVHVDKVLVPAGTTAMVNMWAISHDSSIWEDPWAFKPERFLKEDVSIMGSDLRLAPFGAGRRVCPGRALGLATTHLWLAQLLRHFIWLPAQPVDLSECLRLSMEMKTPLRCLVVRR

SEQ ID NO: 196835 - protein, 151 aa, Glycine max
  Clone ID: PAT_MRT3847_1976C.1.pep
PRAEFGTRQPFPSGSFFEKGGMPYCQSCFQGTFSSKCAGCGNMASGQLINALGQKWHSQCFCCSYCRRPFNGLPYFEKDGKPYCEQHYHTSAGSICAGCRTAIVGRCVDALGQKWHPEHFVCSYCMNPLSGGGYTEQHGSPYCQECFANLF

SEQ ID NO: 196836 - protein, 109 aa, Glycine max
  unsure (1)..(109): unsure at all Xaa locations
  Clone ID: PAT_MRT3847_19770C.1.pep
GCGFSWSCRLFCFFRRPLAKGRCFCWFVXSVLPRLAGSAALSLLCLVGVSFXGAVAGSLWAGSSCRGFCVPFSVRPSCWFPFLGFGRSGGVSFRASFLFSPPLRTRRLG

SEQ ID NO: 196837 - protein, 104 aa, Glycine max
  Clone ID: PAT_MRT3847_19771C.1.pep
PFSRPLELPPKKFTFPTSFFFVKPFLFSFFWAGGFPRGWFFFPVSKGAPLNLKSFPPLQIFSKGLKVLPSPQPNWSGPNLFFWGVLWTFFGKRPVFFFCFPPLV

SEQ ID NO: 196838 - protein, 50 aa, Glycine max
  Clone ID: PAT_MRT3847_19772C.1.pep
PMCKHLGLLNKAFGAVKKATKCLLKPWTPQVMFTKGIYAPPLVMQILLSP

SEQ ID NO: 196839 - protein, 130 aa, Glycine max
  unsure (1)..(130): unsure at all Xaa locations
  Clone ID: PAT_MRT3847_19773C.1.pep
GPYFNLCVPMVVLATGPAIRGGVLDKPGIENVTPGRECECDLQNSRSSAPTYRVILHNDRLNKREYXLQVLMKVIRGMTLDNADNLMQEAHYIGSSVVIMCDQAYAEDHCMHLRCIGLLMSIEPAYGGRS

SEQ ID NO: 196840 - protein, 38 aa, Glycine max
  Clone ID: PAT_MRT3847_19774C.1.pep
DPVIIYVECRLLHSINRIRRAHLSCVLLQSLKHPHEYY

SEQ ID NO: 196841 - protein, 89 aa, Glycine max
  unsure (1)..(89): unsure at all Xaa locations
  Clone ID: PAT_MRT3847_19775C.1.pep
RSQHTDFVYGGPVQLRFPNAIGSKTSLYSCPFLCSCELYVSFIGFLCYDXDXXTXTTLIXTQXXASXGSXXXXGXXPKKNXGXAKXEXG

SEQ ID NO: 196842 - protein, 95 aa, Glycine max
  Clone ID: PAT_MRT3847_19776C.1.pep
GKKIFFFPLGGGPYNWEPGNNSPGKKTFPNGSHFASEGVLPIKPPGGLLKFFFSFLFGGVCFFFFWGPNRVLAGTPKFFKKGVFWATPPKPARVK

SEQ ID NO: 196843 - protein, 45 aa, Glycine max
  Clone ID: PAT_MRT3847_19777C.1.pep
VSLPCPYPIANNPKNGFIFCMVVYLGVFKDGHSRKIALGEINTWI

SEQ ID NO: 196844 - protein, 149 aa, Glycine max
  unsure (1)..(149): unsure at all Xaa locations
  Clone ID: PAT_MRT3847_19778C.1.pep
IFFALFLFSAFTSLYLPSAITDVLLHNECNPLQNGGPYYILSDITTFGGIRASPTVNEXCPLTVVQSRNELDKGIGTPISCPYRIRFIAEGDPLSLKFDSFAAIMLRVGIPTERSAVDDLPERPDVQICENIHAMHGWSRLERAPDDES

SEQ ID NO: 196845 - protein, 101 aa, Glycine max
  Clone ID: PAT_MRT3847_19779C.1.pep
PDPGGGLEMTCSLSLYYGEGIFFWELWKVGNFGRGGLGFFGQKGFIPFMAFLGWVWGEILTPPPGWGREKFQTWGRFLPRGGGKFFDSLGGSLLVGGGPLG

SEQ ID NO: 196846 - protein, 298 aa, Glycine max
  Clone ID: PAT_MRT3847_1977C.1.pep
MAAVSLRLLCFLFFLCFTITSQAAQTCDNDTGNYTVNSTYHNNLNTLLSSFSSHKEINYGFYNFSHGQDPDRVYAIGLCRGDQKPDDCLKCLNNSRVSLAKEWRNQKHAIDWGIECMLRYSNRSIFSLMETQPMVELVYTLDVKGSVEQFNEALQSLMRNLTRTAASGDSRLKYATASTPAPSFQTIFGYTQCTPDLSSEDCTKCLEEAISKIPECCSGKAGGNVLKPSCRIRFDPYVFYGPTLKLDSDAPSVSTNKTSSSPGKSNNTSRTIIAIAVPVASVVLALSLFCIYLTVRKP

SEQ ID NO: 196847 - protein, 59 aa, Glycine max
  Clone ID: PAT_MRT3847_19780C.1.pep
ESSWGNYGLSRTEGLGLCTVWCVCSYGQSQRRVKECIHSHTHYRLNIVRGVLSVTVEVA

SEQ ID NO: 196848 - protein, 139 aa, Glycine max
  Clone ID: PAT_MRT3847_19781C.1.pep
QFKLFIHFVTVIIMAAEHVLRLLDSFWFEASILSSKIPPTNPISHDHNKVVEEVLPLDDAKLLLVPTPTLEVRSYSDQNLDSTTCLLCDYSPSPNSVLTPQRLRTIPSEREIREFSSGNHGKEGMSNKRKQKGFGHGRR

SEQ ID NO: 196849 - protein, 78 aa, Glycine max
  Clone ID: PAT_MRT3847_19782C.1.pep
SWGISLQVMQMAFIIGGYSLGGADLLRRAMGKKKPEEMAKHREIFAEGAAKNGLTREKSDEIFDLMEKFAGYGFNKSH

SEQ ID NO: 196850 - protein, 100 aa, Glycine max
  unsure (1)..(100): unsure at all Xaa locations
  Clone ID: PAT_MRT3847_19783C.1.pep
AFCFMGPKKKDSGEEEQNATPVSTKDAPPHVVETPVSSPFFTNPVFNREPIPKNHHRELLKWILEKKRKVKPKAPEEKRKIFXKKALLKKFIGSKPLPSV

SEQ ID NO: 196851 - protein, 154 aa, Glycine max
  unsure (1)..(154): unsure at all Xaa locations
  Clone ID: PAT_MRT3847_19784C.1.pep
MVPAPFLTNTYDVLERSQXTDQAIXSCGESDNTFLXAWKHADFAXDWLAKYFXHNILSYYGRQRKSLYXFLDIVPDKWEFSNEHFWRGLNDLLSEIKRQMTEPDSCXHPTEAXKSGEGCIYHVNSGSDDXGSTLTWSSFSGSMIQGSEETLTTA

SEQ ID NO: 196852 - protein, 142 aa, Glycine max
  unsure (1)..(142): unsure at all Xaa locations
  Clone ID: PAT_MRT3847_19785C.1.pep
GPLGGPRGPPGKPGPGPGRAPPFPIGGPIKPWGGPXKTGPRGKKKSPPNKKQNPXPEPQRVKPGGPKGGARGPXGGAPPAPLPGGKPAVPRGKTNRPTPGKKRVTPRGQGGFFFAPGGGAIFKGPTPPGPEKFPPRPPNGFA

SEQ ID NO: 196853 - protein, 50 aa, Glycine max
  Clone ID: PAT_MRT3847_19786C.1.pep
NPNLSKPYIWRQGKIIRLLRTSGTLSGISDCLSGTHAAWFYSSIGCGVAW

SEQ ID NO: 196854 - protein, 158 aa, Glycine max
  Clone ID: PAT_MRT3847_19787C.1.pep
MAEEHRCQAPRFCANNCGFFGSPATHNMCSKCYRDFQLKEQQSSNAKMVLNQSLVPPPPPSVISQPSSSSAPAADPASAVVVDAPRAAEELKAPQQNRCMTCRRRVGLTGFKCRCGMMLCGTHRYPEQHACEFDFTHASGEQIAKANPVVKGEKLEKI

SEQ ID NO: 196855 - protein, 87 aa, Glycine max
  Clone ID: PAT_MRT3847_19788C.1.pep
LERLLQNRAQSCNCHALARMTRPFQGEVLQKSCPHVTLLATVTCFMMNVLQLTLLGELCIRRYSQIGILLNIHWYLSLRLSLYLSIS

SEQ ID NO: 196856 - protein, 158 aa, Glycine max
  Clone ID: PAT_MRT3847_19789C.1.pep
MAEEHRCQAPRFCANNCGFFGSPATQNMCSKCYRDFQLKEQQSSNAKMVLNQSLVPSPPPAVISQPSSSSSAAVDPSSAVVDDAPREAEEVKAPQQNRCMTCRRRVGLTGFKCRCGMMLCGTHRYPEQHACEFDFKGMGREQIAKANPVVKGEKLDKI

SEQ ID NO: 196857 - protein, 49 aa, Glycine max
  Clone ID: PAT_MRT3847_1978C.1.pep
CSSVEQDAFSGLVKLFFHRHLAAENVICLFNEQLFHGNICLKFSRVKLE

SEQ ID NO: 196858 - protein, 158 aa, Glycine max; identical to SEQ ID NO: 196856
  Clone ID: PAT_MRT3847_19790C.1.pep

SEQ ID NO: 196859 - protein, 85 aa, Glycine max
  unsure (1)..(85): unsure at all Xaa locations
  Clone ID: PAT_MRT3847_19791C.1.pep
IGEGSGKIERVGLSGKCALEFQVEPGHWSVVPQFFVVAQILGEEGIGSCCMVSYXKPLFEELGGRGSIGRALFPLVHLASIRVDS

SEQ ID NO: 196860 - protein, 45 aa, Glycine max
  Clone ID: PAT_MRT3847_19792C.1.pep
HKKIYIHHRKVMFALLRYFVSKYQFCFFRCYRNITLSLYAIYIND

SEQ ID NO: 196861 - protein, 46 aa, Glycine max
  Clone ID: PAT_MRT3847_19793C.1.pep
RGVVAAPQFSLYLPLSVSHKFTDLGFGVSTPVLRSRFCHRRGHQVI

SEQ ID NO: 196862 - protein, 58 aa, Glycine max
  Clone ID: PAT_MRT3847_19794C.1.pep
NITVATQYIEFCYTFYTHLLLRIHLLPNHLNTLLNPPQIQIQIQFYLNLMYDSSYCLH

SEQ ID NO: 196863 - protein, 56 aa, Glycine max
  Clone ID: PAT_MRT3847_19795C.1.pep
CSSSSVLLKWNINFQMAISLEFDHYTTTHSHYTIALNLGTTTQHITLIYIYQTQYH

SEQ ID NO: 196864 - protein, 81 aa, Glycine max
  Clone ID: PAT_MRT3847_19796C.1.pep
MAGAVSTVSGELKPSILDRVRAAPPPPDSSLLLATRPPRQAVSYLTCSKLCAICFVAGAIFGYSLRGRVKRWASKILKKLS

SEQ ID NO: 196865 - protein, 106 aa, Glycine max
  Clone ID: PAT_MRT3847_19797C.1.pep
PTRLNPREDTTEGGAEKKASPEHHERRNKQPTRRPPQEQGAQRQKPRTKRGPENAQGRQNGTKQRRPNQRQTENQPTEHNKDTQGEAQTEKGSDKKRTRDRQAQRH

SEQ ID NO: 196866 - protein, 75 aa, Glycine max
  unsure (1)..(75): unsure at all Xaa locations
  Clone ID: PAT_MRT3847_19798C.1.pep
KLRAPIIICQKVIALLAYQRLKINPSEXLSPFCLRLLYRHIFKLLNYKQHFCIIQSLIFFGNPFFFLNPPLCSMP

SEQ ID NO: 196867 - protein, 61 aa, Glycine max
  Clone ID: PAT_MRT3847_19799C.1.pep
EFIFVLSSEKSVIMFSSVVIEVIGLLSLVWSTQPLKIDKEVMFQKHGSLVNIFLSQEQVVR

SEQ ID NO: 196868 - protein, 76 aa, Glycine max
  Clone ID: PAT_MRT3847_1979C.1.pep
KRSKIQSYFGNSMLGVRHLFTFLCVTLKEFYKQWHFSTNLRYTGYNFTHSYVQRGVFIISIISIITHVRTKFVTGF

SEQ ID NO: 196869 - protein, 93 aa, Glycine max
  Clone ID: PAT_MRT3847_197C.1.pep
AGKVKKENLCIVRTSHCNASDVCDDEYIMGILCACSPDGTSISSICCYLFHSFFLLLFSEMLPFCGAPILEVSSVNLSTTVHGRGVNLVYFAL

SEQ ID NO: 196870 - protein, 106 aa, Glycine max
  Clone ID: PAT_MRT3847_19800C.1.pep
FSATMEDHVVRRYQELMKESSRMPLFDLRKLNASLPVPSVPNCPFKILVLGAKDDFIVDAEGLKETVKFYGVPPVCVDAIAHDMMLDVSWEKGAEVIFSWLNGSEK

SEQ ID NO: 196871 - protein, 42 aa, Glycine max
  Clone ID: PAT_MRT3847_19801C.1.pep
YRIYMMVFLFMTASGLQQRSSFESSLTPIAVWRETHSIPNSF

SEQ ID NO: 196872 - protein, 79 aa, Glycine max
  Clone ID: PAT_MRT3847_19802C.1.pep
MGMRDFHIKLKAFRVKRFFFGRRRNRWSANKPSWMIPISHGHHVVEHHVIKGGSDDSNFDSVVIQREQMGHTELWYFGI

SEQ ID NO: 196873 - protein, 42 aa, Glycine max
  Clone ID: PAT_MRT3847_19803C.1.pep
NTEDGMPQRYNQIMGSICIKGMWRAWRRYSWAVLSLRAAQQV

SEQ ID NO: 196874 - protein, 79 aa, Glycine max
  Clone ID: PAT_MRT3847_19804C.1.pep
PLLDDYSRGFFSLVVTFINNMNLITPFILRCFLYGVILIPVVVVDKPPYDEENGTTGIHQLFNDCDYVQGTLSSGLKFQ

SEQ ID NO: 196875 - protein, 34 aa, Glycine max
  Clone ID: PAT_MRT3847_19805C.1.pep
WFFFFYFFFFCNRWIHLFTNVSLNNSSLGGSHLD

SEQ ID NO: 196876 - protein, 122 aa, Glycine max
  Clone ID: PAT_MRT3847_19806C.1.pep
CREGKMQMCRSLLHEMIGNGICPDSVTCRLIVEGFARDGKLLSALNTVVELKRFRIKIPEDLYDYLIVALCIEGRPFAARSFLLRISQDGYMPKINTYNKLVESLCKFNNVEEALILKSEMV

SEQ ID NO: 196877 - protein, 112 aa, Glycine max
  Clone ID: PAT_MRT3847_19807C.1.pep
EQGNYADQKWKNSSLSFKIPHDLKKGFFFFFMGKYCKKIEGNICCYGGGLISTGPGFTNENSPSLLLGGSPSLWGLCSSSACGCGTPRSTFTMKLVVCDHPGNNSTSSDSYS

SEQ ID NO: 196878 - protein, 53 aa, Glycine max
  Clone ID: PAT_MRT3847_19808C.1.pep
RTIFFLLRHGSSSVRPCVFSMHFPCYVKSDSLDWLQYPASGPRQRSLLSAHAS

SEQ ID NO: 196879 - protein, 109 aa, Glycine max
  Clone ID: PAT_MRT3847_19809C.1.pep
SALCSRLKQEMLHPLRVIIANRGPDTELLVANPVELSGMGRPRVFYDVTFALKTVGICVFSAEVGRHSTSEREWEVYRFLLDENCEFQLTGVAARNKIVNRVRRTLMGW

SEQ ID NO: 196880 - protein, 120 aa, Glycine max
  Clone ID: PAT_MRT3847_1980C.1.pep
HRLGLPVLCKLLGNVIMLRAPPKYNVFFRTLLSEGGYIKSPPPASILIPNLPPVIKLFFFCSILFMVIVFFLFGVITYYPTTLFVGVFARILKIGLESKNIYCLKKKKTKKKGRPRTSGR

SEQ ID NO: 196881 - protein, 58 aa, Glycine max
  Clone ID: PAT_MRT3847_19810C.1.pep
FGSREKGKMSHQQHHERSFYRTSTINFPISLTRLRSRKILCIGKIFICLTGFIFIAPF

SEQ ID NO: 196882 - protein, 228 aa, Glycine max
  Clone ID: PAT_MRT3847_19811C.1.pep
EFGTRVQFMLDSDTHVWSMRRSKANWFRVVGCLSRVATLLGWVDGIRTWVHPPTTVLVHVLLSAIVLCPYLVLPTVFMYAFLILLLRFRYRQRVPQNMDPRMSYVDMVSLDELDEEFDGFPTTRPAEVVRIRYDRVRALAGRAQTLLGDMAAQGERLEALFSWRDPRATGLFAVLCLVMSLLFYAVPFRGVVLVAGFYYLRHPRFRDDMPSIPANFFRRLPSFSDQIM

SEQ ID NO: 196883 - protein, 35 aa, Glycine max
  Clone ID: PAT_MRT3847_19812C.1.pep
AIAIPEIRRLVFRGRIRSLCIRLPLPLICCITVSE

SEQ ID NO: 196884 - protein, 250 aa, Glycine max
  unsure (1)..(250): unsure at all Xaa locations
  Clone ID: PAT_MRT3847_19813C.1.pep
NFDGLEHLAKKEMVRGLPSINHPDQXCEGCLIGKQFRKSFPKESTTRATXPLELIHTDVCGPIKPNSFGKNKYFLLFIDDYSRKTWVYFLKEKSEVFENFRKFKALVEKESGLSIKAMRSDRGEFTSNKFNKYCEDHGIRRPLTVPRSPQQNGVAERKNRTILNMVRSMLKSKKMPKEFWAEAVACAVYLTNCSPTRSVHEKTPQEARSGRKPKISHLKVFGSIAYTHVPDEKRTKLDDKSEKYVFADAW

SEQ ID NO: 196885 - protein, 161 aa, Glycine max
  Clone ID: PAT_MRT3847_19814C.1.pep
PRAAHASGKVGELVDETCKGAAAHSGGVFALNWHSGGIKLATASGDKTIKIWDVPGRKLIGTVSFGSAIEDQQLAVVWLRNWIVSVSLSGFINYICPETLKVCRVLRGHNKSITALTLSEDRRMAFTADFEGHITRWNVSDGSSERVTPQVHKSQVSGLSL

SEQ ID NO: 196886 - protein, 64 aa, Glycine max
  Clone ID: PAT_MRT3847_19815C.1.pep
IFMGGKAPFLQKKAPSFPLLVRLHCHFRGFECVLIWPFEILIRGGICCNLETQKKCFVLQSKGK

SEQ ID NO: 196887 - protein, 115 aa, Glycine max
  Clone ID: PAT_MRT3847_19816C.1.pep
VPPDLQNQKLEDPPVDSVGDVGGGDPPEKKHREERISDLGGVHRRGCVLHAVSPHARHRRLALTAGDKNRERVERGESGESFRRATQQRSRPRKERRRSCRHRRRSCRWRKKVHA

SEQ ID NO: 196888 - protein, 127 aa, Glycine max
  Clone ID: PAT_MRT3847_19817C.1.pep
SIIHQTLELLHLPLPEHLLNTVNMSTSQYDAPSGDVVDDDYKSRTGQSEIPVQSDSVAVEATEYDNGGDSDKQLEKDENEAIDRSNILDERTRGATKKAGTYTEPGDEEEVDNLTAGGNDGTSSGRQ

SEQ ID NO: 196889 - protein, 83 aa, Glycine max
  Clone ID: PAT_MRT3847_19818C.1.pep
AARRHRRGKKRKIIDIIEKNRIKMKNKYIFSPFCFMLTGSSVGLFCDSRVRKCYYYLLTYFQDNFKYFFIISYVLLKIIKFCE

SEQ ID NO: 196890 - protein, 47 aa, Glycine max
  Clone ID: PAT_MRT3847_19819C.1.pep
PLGSLSRFCRAYASCGGSLSSLVVHGPPRSFLTHLYPVPRLSSSRGF

SEQ ID NO: 196891 - protein, 55 aa, Glycine max
  Clone ID: PAT_MRT3847_1981C.1.pep
VAKLRRNNIIHGRRKRMKKLGRNAYMGCLRCLFCFDLNLYNHRAHHSSYKKVFEE

SEQ ID NO: 196892 - protein, 72 aa, Glycine max
  unsure (1)..(72): unsure at all Xaa locations
  Clone ID: PAT_MRT3847_19820C.1.pep
KVLDEPNFVENYFKSSRLHFIGTWRNRYRKRFPTLSTXFNNESANNSASDISHNSVIIHVDMDCFFVSVVIR

SEQ ID NO: 196893 - protein, 44 aa, Glycine max
  unsure (1)..(44): unsure at all Xaa locations
  Clone ID: PAT_MRT3847_19821C.1.pep
YVCIVGVPLTPMGRFRLHLTSLSVTELSPMAIEAAPXRANVDPS

SEQ ID NO: 196894 - protein, 120 aa, Glycine max
  unsure (1)..(120): unsure at all Xaa locations
  Clone ID: PAT_MRT3847_19822C.1.pep
MGCXDKGGNVXRGGACSXTHXPVACMRNYIPXVXASXLFIGGAFIWXXRSXALKGAFSXFXEVXXAKVITXXDSGKVKGVXFXNFSNEEAXXXXLSXMDGKELNGGXIXGSYANEKPSXP

SEQ ID NO: 196895 - protein, 67 aa, Glycine max
  Clone ID: PAT_MRT3847_19823C.1.pep
PAEPAGLRRRRRALLAALLCPDYVGLALLIIGYIFIQFLAEPFQRMFYPSDLRIAYPHALVERVSVA

SEQ ID NO: 196896 - protein, 92 aa, Glycine max
  unsure (1)..(92): unsure at all Xaa locations
  Clone ID: PAT_MRT3847_19824C.1.pep
GWFGPGSKIIITTRDKQLLTSHEVYKKYXXKELDEKDALQLLTWEAFKKEKACPTYVEVLHRVVTYASGLPXVLKVIGSHLVGKSIQEWESA

SEQ ID NO: 196897 - protein, 80 aa, Glycine max
  Clone ID: PAT_MRT3847_19825C.1.pep
SEDNTPSRDFKEAHGNTRWGSNVCRFRVREQEQVGLLVGCCKNCGTCQIKITFNSFSAFFHNIQYKMVFYLFIYFNGCFG

SEQ ID NO: 196898 - protein, 78 aa, Glycine max
  Clone ID: PAT_MRT3847_19826C.1.pep
MAKVVFLLELVLPTLILMPQYLATYYKPINNPPLYNPPLYNPPLYKPPVYKPKPPFYKPKPPIYIPPYNNPPYNKPPY

SEQ ID NO: 196899 - protein, 111 aa, Glycine max
  unsure (1)..(111): unsure at all Xaa locations
  Clone ID: PAT_MRT3847_19827C.1.pep
YLLXISIQSSMGEEPQTTVSCEEVVSXPGDTTPSPXSEXEXDXXXXRXXIGDVVGXXEKPQXGVEDNIXHSXXHRXEHXXWWXTSPGQXXKPRDDHQGCLHQGXHQHXMML

SEQ ID NO: 196900 - protein, 217 aa, Glycine max
  Clone ID: PAT_MRT3847_19828C.1.pep
CTVRGDLVKMLLELVRKKRDKFDHIVIETTGLAKPAPVIETFCSDELVSQHVKLDGVVTLVDCKHAMKHLNEVKPRFVVNEAVEQVAYADRIILNKIDLVTESELNILTKKIKHINGMAQIKQAKFGSVDMDFVLGVGGYDLERIESEVPGECPSSSSHQDDSGHEHKGHHHHHHDHVHDSAVSSVSIVAEGTLDLDEVDDWLERVIEEKEMTLTDE

SEQ ID NO: 196901 - protein, 87 aa, Glycine max
  unsure (1)..(87): unsure at all Xaa locations
  Clone ID: PAT_MRT3847_19829C.1.pep
XXXVIMCRXXNERLPSYXVVSHSGTSVEFSVSQVDDMLTPHSVGNSXFXTIXTHFHSSCNRPCVTLLVPMELPKSITXTPLXTRLDT

SEQ ID NO: 196902 - protein, 156 aa, Glycine max
  unsure (1)..(156): unsure at all Xaa locations
  Clone ID: PAT_MRT3847_1982C.1.pep
GGHHDWEGHKPPLDKATNMVDVLDDTIEPKPPSDKDLRLTLKDGDTIGGIGTVAAERHETDVLNPGMEATLAPTELTTEVRTVEMHHASLTEAHAGDNVGFNGXNVAAKDKKRALLXHNSEDDPVQDAANYTGQDMVMNHPGPTVNGYAPXLDCHT

SEQ ID NO: 196903 - protein, 28 aa, Glycine max
  Clone ID: PAT_MRT3847_19830C.1.pep
NNVYSETCALLKSGSYIMRLLILSSCEQ

SEQ ID NO: 196904 - protein, 36 aa, Glycine max
  Clone ID: PAT_MRT3847_19831C.1.pep
VKDLKGHAIQALPLFLGLLHLAGKAAPTCLPTNGRI

SEQ ID NO: 196905 - protein, 83 aa, Glycine max
  Clone ID: PAT_MRT3847_19832C.1.pep
GDHSAHASCKVPFQSTKQKVMAPTSQVQIQIFSTLLLPSLIQFYFPNNTHFNLKRNPSSATNIIIILLFTQQKFKCNSKKKSN

SEQ ID NO: 196906 - protein, 82 aa, Glycine max
  Clone ID: PAT_MRT3847_19833C.1.pep
TLVFSGAEMRVSGERLLYRVSKGSDWVYCFTFGNSDLLGIEAYVIGHHHQQNVWMEFDLLKSRVGFTQTTCDLATQRLGLSP

SEQ ID NO: 196907 - protein, 53 aa, Glycine max
  Clone ID: PAT_MRT3847_19834C.1.pep
GASSSPFNQSKGHRSAGTLVGQFSNFRPRKKNIPVKILAGWVCYPFLWLFPNR

SEQ ID NO: 196908 - protein, 253 aa, Glycine max
  Clone ID: PAT_MRT3847_19835C.1.pep
HASGRSRSRSRSEVGGVRVGVRLDGPVPLNDDVLEKEVVFEQCVTRTLSPALTLEEGLEKLKEALQILNSPSPSSPTGFLRFQVALPPSPKAFTLFCSQPHSSSVFPLIYVSKNDADSKSLYVNGTRGVCGIGAAVSFLPPTPNHRTFLNRYISSDSTNVVAYGFMDVNLDDDGSHQERSFWVFIPQIELDELESVSILSMTLAWDEFSFSTFQEAHYSLQVSLDQVMCHVWSTIDTWKSKCTRAALEKLNLV

SEQ ID NO: 196909 - protein, 171 aa, Glycine max
  Clone ID: PAT_MRT3847_19836C.1.pep
LDRLMLNDALQNGDLYTYQVYRGCLKMDGPTMINLELFVNNEDGGKSGSLYNCLDKCVTSSGKRLLRNWICCPLVDAEIINNRLDIVDDLMANPEIVSHIAQHLRRLPDLEHLLGRIKSSLQLSGPLLLPFLGKKILKQRVKVFGSLVKGLRTALSLLLLLQKEQPLISSL

SEQ ID NO: 196910 - protein, 60 aa, Glycine max
  Clone ID: PAT_MRT3847_19837C.1.pep
SPKRFSLVSVSLVAQCVTFPLTLSIKEGVSDCCPVIFLLQVVNLCSLVLEDYQMFLPVCN

SEQ ID NO: 196911 - protein, 426 aa, Glycine max
  unsure (1)..(426): unsure at all Xaa locations
  Clone ID: PAT_MRT3847_19838C.1.pep
MTSLCRRIPVAGTGQLRLRCAPRTAAIGEVHYGCSPKWPTITLRLPPPVKCGGAWKRSGEKKAAVAAPRPCAVGRLAAESGRESGNRSAEVVLAAAVTVVMGAGNRVLYKLALVPLKNYPFFLAQLASXVIVYFSILYIRYRAGIVTDEMLSVPKTPFLVVGLLEALGAATGMAAGAMLSGASIPILSQAFLVWQILLSYFFLGRRYKVNQLVGCSLVAIGVILTVVSGSGAGHSLKEAGIFWSLLMIVSFLFQAADTVLKEVIFLDATQKLKGGSLDMFVVNSFGSAFQALFICLLLPXRAKLWGVPFGQLPNYLKDGAACFLNVGTLSRGCDGAPLLPLLFVIVNMGFNISLLHLLKISSAVVSCLASTFSVPIAIYVFTLPLPYIGVASSLPAGFVAGAIILIIGLLIYAWTPSNGSSTASIT

SEQ ID NO: 196912 - protein, 86 aa, Glycine max
  Clone ID: PAT_MRT3847_19839C.1.pep
SGNIVFPKGLKKGGLMVFPPGVLPFPISVGKKKAPPFPVFTRAFSGLPILGFALFAPHFSPPLVAQTPFLYPPLVKKLKGVFWGSG

SEQ ID NO: 196913 - protein, 57 aa, Glycine max
  Clone ID: PAT_MRT3847_1983C.1.pep
SFVIQLAIDFLFCQLKILICSNTNLRCICYLEVQVSNMLGITKKSSSTCAFRASKER

SEQ ID NO: 196914 - protein, 46 aa, Glycine max
  Clone ID: PAT_MRT3847_19840C.1.pep
EGDDGYSSYPQNDDAGLLVGSLIIVRPVILFGYKSIVQGVKWSYTG

SEQ ID NO: 196915 - protein, 54 aa, Glycine max
  Clone ID: PAT_MRT3847_19841C.1.pep
LSMTVYVFSMTDYLIKCGGKWDKWPILQKGFHSLINTKKKKTKRKKTKKDQNIN

SEQ ID NO: 196916 - protein, 72 aa, Glycine max
  Clone ID: PAT_MRT3847_19842C.1.pep
GFHSPVRAWGSLAMSTPSFRSISACPGASLGPFRLASSSRTQAASASSTSRRCQPFALSSVPVTGVKPGVSR

SEQ ID NO: 196917 - protein, 51 aa, Glycine max
  Clone ID: PAT_MRT3847_19843C.1.pep
RAKREKRQKSRWGAGCALSGLLSDFTFSRVPLLLSELASSLSDVAKRMSLT

SEQ ID NO: 196918 - protein, 132 aa, Glycine max
  unsure (1)..(132): unsure at all Xaa locations
  Clone ID: PAT_MRT3847_19844C.1.pep
QTKIRAYAHCAKQSKGITVLLINLDSNTTCXAEVTFNNNAESLRHRKMSSHSKRMELPLASETAREEYHLTPQDGDIHSQTMVLNGKALSVNSDGDIPPLEPIYVNSSEPIRVAAFSIVFAHLPDAVVSACG

SEQ ID NO: 196919 - protein, 39 aa, Glycine max
  Clone ID: PAT_MRT3847_19845C.1.pep
SRSACASKFPNCQYVLHVQQSGPLCPPLIITFRRMRLHL

SEQ ID NO: 196920 - protein, 75 aa, Glycine max
  Clone ID: PAT_MRT3847_19846C.1.pep
GCSTLLYCLIDHSFHLGNDFARQYSQSQHTQSSASTSGSALSQSNDVKHIAHDAILCDPQVDYGQIIPVNPHIVE

SEQ ID NO: 196921 - protein, 75 aa, Glycine max
  Clone ID: PAT_MRT3847_19847C.1.pep
FYFYFLVLLFDLLRYITCASDDDEFRYHVQYSKSHYRQARLSRATVRVSADKKSQKIGFNLLYITKFNTLCRAVS

SEQ ID NO: 196922 - protein, 507 aa, Glycine max
  Clone ID: PAT_MRT3847_19848C.1.pep
MQLCKGVLPLMARAVIGTIDEDFVCATLDWWPPEKCDYGRCSWGLASLLNLDLNNKIFLNAVKAFSPLKLRLGGSLQDKLIYGTEDNHQPCTPFVKNPSEMFSFTQGCLPMDRWDELNYFFEKAGAKIIFGLNALAGKSIHGGSAKGPWNYTNAESFIRYTVRNGYTIYGWELGNELSGNGVGTSITAEQYALDVAALHDVVYNAYKKIEPKPLVIAPGGFYDANWFNKFISKSGKSIDVVTHRIYNLGPGVDEHLVERILDPSYLDKEVSTFSGLKNILASTGTSATAWVGESGGAYNSGHHLVSDAFVYSFWYLDQLGMSAAYDTKTYCRQSLIGGNYGLLNTTNFLLNPDYYSALLWHRLMGRHVLSTTFSGTNKIRAYAHCAKQSKGITVLLINLDSNTTVEAEVTFNNAAKSLRHRKMSTHSKVMELPLASETAREEYHLTPQDGDIHSQIMVLNGNPLSVSSDGDIPPLEPINVNSSEPIRVAPFSIVFAHLPDAVVSACG

SEQ ID NO: 196923 - protein, 55 aa, Glycine max
  Clone ID: PAT_MRT3847_19849C.1.pep
IISKQYAGKVNNITIDKCTKIGGVFEVCDRSMPTYRAIFFGCFWTYTCVCRFFLE

SEQ ID NO: 196924 - protein, 316 aa, Glycine max
  Clone ID: PAT_MRT3847_1984C.1.pep
MDASEQGLQHLAESLLSEGTTSFLATTMTQSTVNIERALQTIAKYTQQQDVTNAAEIVGVHLEGPFISEHKVGAQHPQFVQRPTVDKIKSFQEVANGLIKIITYAPEVDGATETLKTMKNDIIFSIGHTVATFDQANTAVSHGAKHITHLYNAATGFQHREPGVFGAAWLNQGLHTEMIVDGVHSHPASIALAYRLKGNQSCYLITDAMRAKGMPEGHYDLGGQDVIVKGSEARLSSGALAGSILKMNEGLKNLIQFTGDTIEHLWRVTSLNQAITLGIDDIKGSIKIGKDADIVIIDDACNVETTIKNGKYHAFK

SEQ ID NO: 196925 - protein, 47 aa, Glycine max
  Clone ID: PAT_MRT3847_19850C.1.pep
LVNGTPVQENFRLMEKVKPFYFRFVHLTNNRYKNFYRNLDLRWLWMG

SEQ ID NO: 196926 - protein, 49 aa, Glycine max
  Clone ID: PAT_MRT3847_19851C.1.pep
NRRFCHRLIKRYCFIDLCRLSQKIWSFMQRSPLSTGLLFFYHQPRDKRS

SEQ ID NO: 196927 - protein, 37 aa, Glycine max
  Clone ID: PAT_MRT3847_19852C.1.pep
PYETMLIPWTWLWIYNASCQLHVTVYAAWNIYILQIL

SEQ ID NO: 196928 - protein, 52 aa, Glycine max
  Clone ID: PAT_MRT3847_19853C.1.pep
SSRSRAAPFFFFFETRLGRRELSTLQGVKFPFGPFFIQKLETLSRLHIQISP

SEQ ID NO: 196929 - protein, 69 aa, Glycine max
  unsure (1)..(69): unsure at all Xaa locations
  Clone ID: PAT_MRT3847_19854C.1.pep
RTYECIENDLLASFNLGLHCIAPYMSKGIERASQXFQSVGTKVNNTAVTEELDRPFVSGSTEDRGCSTR

SEQ ID NO: 196930 - protein, 76 aa, Glycine max
  Clone ID: PAT_MRT3847_19855C.1.pep
KPKVVRLKKKTQDFQKNRPEIMEIQKIQVREIMNFHQKVKKNPLKKPQIGPWKSKNWPIIPPLKKRPIIIKPNSVN

SEQ ID NO: 196931 - protein, 51 aa, Glycine max
  Clone ID: PAT_MRT3847_19856C.1.pep
KKGRQNMLAYVGFCVQQTAYPGTEHLEKLDAHLGDPWHNNIGNVIIPQSIL

SEQ ID NO: 196932 - protein, 59 aa, Glycine max
  Clone ID: PAT_MRT3847_19857C.1.pep
TLMIIRVKTILITLHTAYVAPPHIISYYFKDSLFFSFNTCKEITFKSNKILLHYYKKYI

SEQ ID NO: 196933 - protein, 110 aa, Glycine max
  Clone ID: PAT_MRT3847_19858C.1.pep
IERGKYIVKVVKDAIDKTKGFYGLEEILDPTIELGTALSGFEKFVDLAMQCVEESSSDRPTMNYVVKEIENMLQLAGSSPILSASASTSSSYNNATKGSSLHPYNNEYFD

SEQ ID NO: 196934 - protein, 78 aa, Glycine max
  Clone ID: PAT_MRT3847_19859C.1.pep
PILRNEDLPYNTEQFEMMPWVFLRRVIRESSEVKRCYVFPIPPINSIVALSLPAPFSGIFPMRILSHLLTVSLFVLIP

SEQ ID NO: 196935 - protein, 100 aa, Glycine max
  unsure (1)..(100): unsure at all Xaa locations
  Clone ID: PAT_MRT3847_1985C.1.pep
GDDXAFFXTXXSXXXDFSXGXEXAHHTQLXADHSNXCIHXXXXXXXXCSXXYXQLKRQXQWQCQPRNXNXXXXCXXXXXXDXXXXXXLEPNSELTXAXXR

SEQ ID NO: 196936 - protein, 54 aa, Glycine max
  Clone ID: PAT_MRT3847_19860C.1.pep
FELFFLTPLFLLKFFPRKISPPPSFFNEKKKKKIFFFEKTICFLKFFPHLEGCF

SEQ ID NO: 196937 - protein, 67 aa, Glycine max
  unsure (1)..(67): unsure at all Xaa locations
  Clone ID: PAT_MRT3847_19861C.1.pep
AFCPXLPLXCSSXFLXGGGVFSGLFXVFPFLCLRAFPPXCPPSGFLXVAVWAFSFLVXXLXGFCVFV

SEQ ID NO: 196938 - protein, 57 aa, Glycine max
  Clone ID: PAT_MRT3847_19862C.1.pep
PIWFVMKNKDPPKGGGPPLKLWCCPCFMKTKHHPGFEKFGGLFFPISNQPKTPLNCT

SEQ ID NO: 196939 - protein, 126 aa, Glycine max
  unsure (1)..(126): unsure at all Xaa locations
  Clone ID: PAT_MRT3847_19863C.1.pep
QKANQEQYAEGKMRGAAPGKKTSGLQQKNVEVKTKKNKQKTPGNGDGGSTSETPQPPRKKRARVDPTVENEETFMNRVEVKVKXPEELKPWLVDDWDLITRQKQLFYLPAKKNVDSILEDYANYKK

SEQ ID NO: 196940 - protein, 147 aa, Glycine max
  Clone ID: PAT_MRT3847_19864C.1.pep
MAPRDINRSNVVVVAGVSNPTHKEIRYRGVRKRPWGRYAAEIRDPGKKTRVWLGTFDTAEEAARAYDTAAREFRGTKAKTNFPTHAAAARSPSQSSTLDSSSAPPLDLTLAGPLTAAGALVFSGGASRGVLRRFCACRGARVVRSCR

SEQ ID NO: 196941 - protein, 72 aa, Glycine max
  Clone ID: PAT_MRT3847_19865C.1.pep
FALSQTFLTMLCHFKFGAFLFYTVWIAVMTLFIMFFLPETKGIPLESMYTIWGKHWFWGRFVGGAVKQDNLP

SEQ ID NO: 196942 - protein, 73 aa, Glycine max
  unsure (1)..(73): unsure at all Xaa locations
  Clone ID: PAT_MRT3847_19866C.1.pep
GENHRXXIKTQLPTDQXSXSVVQRCYDQSIVIXFRXKNHLFFSKRXKNSELTSYPKRFDRGLSFXXNLXLRGN

SEQ ID NO: 196943 - protein, 81 aa, Glycine max
  Clone ID: PAT_MRT3847_19867C.1.pep
HASAHAFDKKKKKKKKKKKKKKKKNKKKKKKKYKKNKKKIKNKKKNKKKKKKKINGGAFFKKSIFISRFLKIIIFFLVHQN

SEQ ID NO: 196944 - protein, 107 aa, Glycine max
  unsure (1)..(107): unsure at all Xaa locations
  Clone ID: PAT_MRT3847_19868C.1.pep
GSRNWYNDQNGFGFITHDDGMEELFVHQSQIKSDGFRILAEREYVQFSIESESDXRATAVDVTGPDRARVQGTRHCGDGRRSYGGGRGGAVSGYRCCIVYCDCVGSG

SEQ ID NO: 196945 - protein, 322 aa, Glycine max
  unsure (1)..(322): unsure at all Xaa locations
  Clone ID: PAT_MRT3847_19869C.1.pep
MATLTVPPVPPSPRDDAMQLYRAFKGFGCDTSAVINILAHRDATQRAYIQQEYKAMYSEELSKRLASELSGKLETAVLLWLHDPAGRDATIIRKSLTADNKTLEGATEVICSRTPSQLQYLKQIYHSMFGVYLEHDIQTNTSPGDHQKLLLAYISTPRHEGPEVNREIAQKDAKGLYKAGEKKLGTDEKTFIHIFSERSAAHLAAVSSYYHDMYGHSLKKAVKNETSGAFEHALLTIIQCAVNPGKYFAKVLHKAMKGLGTDDSTLIRVVVTRTEVDMQYIKAAYLKKHKKTLNDEVHSETSSHYRXFFSHFWALITSQDVQ

SEQ ID NO: 196946 - protein, 41 aa, Glycine max
  Clone ID: PAT_MRT3847_1986C.1.pep
FMCMHGREQMIDPDHHKQHDLLASGIPILYMSTLHYCSYVL

SEQ ID NO: 196947 - protein, 90 aa, Glycine max
  unsure (1)..(90): unsure at all Xaa locations
  Clone ID: PAT_MRT3847_19870C.1.pep
RYSARDSSHILSIFRTIPVHFCEPDSFQLLYNAMFGATKWDPLCSKTSDXIVDIYSHMKHLDQKASALSVVSALGAELQQARTRIQELET

SEQ ID NO: 196948 - protein, 37 aa, Glycine max
  Clone ID: PAT_MRT3847_19871C.1.pep
GCEKTTEGRPLFPPEALLSFKVKWLSIFLSNRSHIVF

SEQ ID NO: 196949 - protein, 299 aa, Glycine max
  Clone ID: PAT_MRT3847_19872C.1.pep
MEVAAAKALKPSLRTEFIFPQAIYDEILCFNANNVVADEDFSMDDLLDFSNGEFQVGKDFDDYEEEEDEEKNSTSGSLQSQDRAEDDNNSNSTAGGGGHDYVFAGELFLPADDVADLEWVSHFVDDSLPELSILYPIHCSKKTRVWAEPESRLSPAQTVSKVPRKSRTEKPRKPNTRVWSSFTVFAGSVGFGELVTKKQKKKVEAQSGGAQSLRRCSHCQVQKTPQWRIGPLGPKTLCNACGVRFKSGRLFPEYRPACSPTFCGHIHSNNHRRVLEMRWKKQIAESVTGSDRKQLIPNY

SEQ ID NO: 196950 - protein, 110 aa, Glycine max
  unsure (1)..(110): unsure at all Xaa locations
  Clone ID: PAT_MRT3847_19873C.1.pep
EKFIYPENAQFNITVHRATTAIKLGLSGRXHCFIHXSHFLKNNQRYNISDDTXQHVLSFSCCTRYNIPSYEPXRASPVIIHDLYEHMFTMQRTYYYNYNFHSYLCYPQSH

SEQ ID NO: 196951 - protein, 233 aa, Glycine max
  Clone ID: PAT_MRT3847_19874C.1.pep
MESSVLECLGMEIIGVMSPVSICMFLVVLLVYSLSSPSTTTTIATAANLVYAENPSDTTAQKLEGAVLNAVVFVVLIALVTFLLVLLYYYNCTAFLLHYTRFSAFFVLAAMGGSILLSLLQRFSLPLDAVTSFLLLFNFSVVGVLSVFASGGLPILLRQCYTVCLGIIVAAWFTKLPEWTTWTLLVALALYDLVAVLAPGGPLKLLVELASSRDEELPALVYEARPTVNTRNH

SEQ ID NO: 196952 - protein, 60 aa, Glycine max
  Clone ID: PAT_MRT3847_19875C.1.pep
VAYHESTALLCGVWVLGHAESLVVVTMGTRGTGSVVLGEYVASGDLVMTKEQVFDFTCVA

SEQ ID NO: 196953 - protein, 82 aa, Glycine max
  Clone ID: PAT_MRT3847_19876C.1.pep
LFFYWPVDLHSLALGLTLAVPSYSRVAPQSPFSSGRSPPFAGRDAIGIRPRPAAFPVNGTPPVANDSPPGAWRYTPTGTGPL

SEQ ID NO: 196954 - protein, 65 aa, Glycine max
  Clone ID: PAT_MRT3847_19877C.1.pep
ANQISRVFVFFFLPLSHCVSANTSSHMTQNFRTQAANVASTLFSCSLRTNTASFSHACPVNHSSS

SEQ ID NO: 196955 - protein, 85 aa, Glycine max
  Clone ID: PAT_MRT3847_19878C.1.pep
WSFQSCSTYFWSTSFAAPETLKKQPRHGVWSYLLTTASLPLVIRKPFKSGTKLLHPSFEVEQSHAEHALNLFCATFNLWLCLFTM

SEQ ID NO: 196956 - protein, 44 aa, Glycine max
  Clone ID: PAT_MRT3847_19879C.1.pep
AKRLDELVSQSISLISDHRLGYSTTSDVSVILALANTMLKNPIL

SEQ ID NO: 196957 - protein, 42 aa, Glycine max
  Clone ID: PAT_MRT3847_1987C.1.pep
IQSVDEHGTVVVTMSTGSTALPQTINTLSILIYLLAKTNLCF

SEQ ID NO: 196958 - protein, 81 aa, Glycine max
  unsure (1)..(81): unsure at all Xaa locations
  Clone ID: PAT_MRT3847_19880C.1.pep
VPSLLHQNILVEKVILDHEFNPRITDAGPPGGLGDDVVFXNYKGSGGVGYXAPQYITGGGSPHKRGGGASPLIGAKPLSRK

SEQ ID NO: 196959 - protein, 37 aa, Glycine max
  Clone ID: PAT_MRT3847_19881C.1.pep
AYNIQYQQGGLNKSILLRHFLSAYLFNFIQLTYIKTR

SEQ ID NO: 196960 - protein, 122 aa, Glycine max
  Clone ID: PAT_MRT3847_19882C.1.pep
LNFDLTEEEMMDVITNKGIPADVLAKQANESLNHVAHEGAMDQIPAVDKLFTTDVNKAGKIMNLTHSVVGELKLLTAGKLSEGTRISVSNIIAGENHVGQIPVMATEEILASNASDSTSAMA

SEQ ID NO: 196961 - protein, 60 aa, Glycine max
  Clone ID: PAT_MRT3847_19883C.1.pep
KHACIGHAVLNRQLDLYQVYKGPVPTLPLLYLTENVEFILHILGIDLSCYVTRVMDKPHL

SEQ ID NO: 196962 - protein, 90 aa, Glycine max
  Clone ID: PAT_MRT3847_19884C.1.pep
APLCNGPLALKLVIYTTITLVCSSYFILISCISNMISNYISCLSPVITSNASILHHIYLFLLCESKVLLDYSSFHVSTVALYDGTIHMPP

SEQ ID NO: 196963 - protein, 43 aa, Glycine max
  unsure (1)..(43): unsure at all Xaa locations
  Clone ID: PAT_MRT3847_19885C.1.pep
GTVVQDPXLGQVIXLQGDHRKNVLTFLVQAGFVKNEHIKIHGF

SEQ ID NO: 196964 - protein, 150 aa, Glycine max
  Clone ID: PAT_MRT3847_19886C.1.pep
RFIVVVLKRAPPPPQPEPTPEPKKEEAAANTSSSLAPTPPKEAADIPATPANRAPPISTPQAPIRNNIAPLSEENQEKLNTIVAMGYPESQALPALRAAFFDAERAVEYLINGVPDTVRAEGGYDVAMEGGDDDEGEHVGLEFLQDNEQF

SEQ ID NO: 196965 - protein, 62 aa, Glycine max
  Clone ID: PAT_MRT3847_19887C.1.pep
MTLQYMQLGNTISQAQFTCHYFQFSDAKHSYEVLRPGHSATPTLYAHSLNFCRKLSIVLLFV

SEQ ID NO: 196966 - protein, 85 aa, Glycine max
  unsure (1)..(85): unsure at all Xaa locations
  Clone ID: PAT_MRT3847_19888C.1.pep
ERRFFFFFXXIFLSHPSIGAGKFLEPPHPTLTLLRIFFSSNFFLYFMHLTLKYTPYLSVLKISWGHRYPPFFNTTPQGSHFFQFL

SEQ ID NO: 196967 - protein, 77 aa, Glycine max
  Clone ID: PAT_MRT3847_19889C.1.pep
ITPPIQISSFAFKSPTLWDPEKRGGTSSVQNPFQNSIKFVNQVVLKNWGKLKGIPPKDCSKILLRGFNFWARTFPNP

SEQ ID NO: 196968 - protein, 96 aa, Glycine max
  Clone ID: PAT_MRT3847_1988C.1.pep
TNPLTEAPGLNGPGEVPRPLNTTDLIFGLGSGAASNARVTLAGYGPASEDLKPCRWGILPAVQSNAPKFRVVFCFCYQTFFFFLAVGGIKNQLFFF

SEQ ID NO: 196969 - protein, 57 aa, Glycine max
  Clone ID: PAT_MRT3847_19890C.1.pep
PGFRVMSKFQSLKRLKECLDGPTVGMAQYAGYLLECPLNSCTRGRAKGYIFTVHFQG

SEQ ID NO: 196970 - protein, 65 aa, Glycine max
  Clone ID: PAT_MRT3847_19891C.1.pep
RLVHSSCLIWVLCLWKNLSLRVWQCSHRWAKRSENLSLIRAIIGSNWCLWCETRGHTHYHSPSWA

SEQ ID NO: 196971 - protein, 96 aa, Glycine max
  unsure (1)..(96): unsure at all Xaa locations
  Clone ID: PAT_MRT3847_19892C.1.pep
GRAASLHAWSRISDIAGVVASCADTPAQGGWCGAGAHTHXSTTSMRHDSGHKVINFDSENFGNRHGEHIATXREGNEHHLRRRQEDADINTFLRGV

SEQ ID NO: 196972 - protein, 353 aa, Glycine max
  Clone ID: PAT_MRT3847_19893C.1.pep
LTSIPDELIKNAKYIATPGKGILAADESTGTIGKRLSSINVENIEANRQALRELLFTAPDALQYLSGVILFEETLYQKTSDGKPFVEVLQENNVIPGIKVDKGVVELAGTNGETTTQGFDSLGARCQQYYKAGARFAKWRAVLKIGPTEPSELSIQQNAQGLARYAIICQENGLVPIVEPEILTDGAHDIAKCAAVTETVLAAVYKALNEQHVLLEGTLLKPNMVTPGSDSPKVPPEVIAEYTVQALRRTVPAAVPGVVFLSGGQSEEEATLNLNAMNKLEVLKPWTLSFSFGRALQQSTLKTWGGKKENVAKAQEAFLARCKANSDATLGKYVGGSGSGLTSESLYVKNYKY

SEQ ID NO: 196973 - protein, 56 aa, Glycine max
  Clone ID: PAT_MRT3847_19894C.1.pep
YSVYVHRFDVMCQSCLCEPWCLTKLCIYIVVGALTEESSLVDKVMVTLCFWITLRL

SEQ ID NO: 196974 - protein, 37 aa, Glycine max
  Clone ID: PAT_MRT3847_19895C.1.pep
SSPARRVPPHACATTLQFSLSRLSYCYVHPRGLMHIL

SEQ ID NO: 196975 - protein, 83 aa, Glycine max
  Clone ID: PAT_MRT3847_19896C.1.pep
VLTLIILFRTFAFLPLLPLSASFFLRGRVSLAFLLKRLCLMFLCDLVFGFCDGRYSESLHAFLCFGGMYHFVSGGNVRVLMAC

SEQ ID NO: 196976 - protein, 45 aa, Glycine max
  Clone ID: PAT_MRT3847_19897C.1.pep
SSSYWVVVAASLAGAFFHECVRAPVSSDLKVSPPGGPRGVRVRMG

SEQ ID NO: 196977 - protein, 93 aa, Glycine max
  unsure (1)..(93): unsure at all Xaa locations
  Clone ID: PAT_MRT3847_19898C.1.pep
AASLQAAATFMQPTKLSXXNTLQXKSTQSISKXFGXEPVGXKKVTCSLQADXXDLAHKCVDATKIXGFALAXSXLVVSGASAEGVPEXLTFDE

SEQ ID NO: 196978 - protein, 230 aa, Glycine max
  Clone ID: PAT_MRT3847_19899C.1.pep
RSSIPRHLNFIEHTSDIGWKEDQRAKPVIIDPALYSVNKSDLFWVTEKRNVPTAYKLFTGSAWMMLSRQFVEYLLWGWDNLPRIVLMYYANFLSSPEGYFHTVICNAEEFRNTTVNHDLHFISWDNPPKQHPHFLTIDNYQKMVDSNTPFARKFGRNEPLLDKIDTELLGRNEHGYVPGRWFDQANPNITESYSAIRNITELKPGPGAERLKRLINGLLSSEDFHTKQCS

SEQ ID NO: 196979 - protein, 38 aa, Glycine max
  Clone ID: PAT_MRT3847_1989C.1.pep
LRVRKKKKKKKKKKKKKKKKKKKKKKKEKNSMMKKKKN

SEQ ID NO: 196980 - protein, 169 aa, Glycine max
  unsure (1)..(169): unsure at all Xaa locations
  Clone ID: PAT_MRT3847_198C.1.pep
NVVHTLLLQTKKIPALGFPFSDVDLSLLEAIEKSQNAVEALDLRALKKHVLSFERRLKDNIEARLKYPNQPDRFADSEVELHEELQKLKVLAGAPELYPDLVNLNVVPSIVDLLNHDNTDIAIDVVQLLQDLTDEDVLDDNDDSARVLVDXAVDNSALELLVQNLHRLN

SEQ ID NO: 196981 - protein, 64 aa, Glycine max
  Clone ID: PAT_MRT3847_19900C.1.pep
FIAYPQDPQSSSLRCRPPQMARSWLTIKSDHMNAQVYNLVLKHSNAISLISYHQYEGCSTQIAS

SEQ ID NO: 196982 - protein, 66 aa, Glycine max
  Clone ID: PAT_MRT3847_19901C.1.pep
RETDEEIRKAHELTKWSFYRALITEFTATLLFLLCHGANLYRVKIKLIIDIVVRYITRKSCQLPTL

SEQ ID NO: 196983 - protein, 136 aa, Glycine max
  Clone ID: PAT_MRT3847_19902C.1.pep
GVVVPYNVTFDHSQAAKQVYERFQACLGTILTSGLPQANLSPAQLEDLPLFSIGHSNGALLQVLTGSLFSEKIPKANAIIAYNNRPATEAVPYFEQLGPAVSQMMPVVEATPFYSIARNASGDVWKMMLDAVRSTL

SEQ ID NO: 196984 - protein, 132 aa, Glycine max
  Clone ID: PAT_MRT3847_19903C.1.pep
MGRAPCCDKANVKRGPWSPEEDTKLKSYIEEHGTGGNWIALPQKIGLKRCGKSCRLRWLNYLRPNIKHGGFSEEEDNIICSLYVTIGSRWSIIAAQLPGRTDNDIKNYWNTKLKKKLLRKQKKEQQAQARKV

SEQ ID NO: 196985 - protein, 511 aa, Glycine max
  unsure (1)..(511): unsure at all Xaa locations
  Clone ID: PAT_MRT3847_19904C.1.pep
MSVSSNSKESMELCIFDLRRGQHEGQELDKILFFFPAGLPFSKQLSVIGLSEGLITFTRIFSPEAACDVIEAERHSHVFYEAEPDIWIVMVADKSNDSEPIWRVDALRKVLKEIHSLFVMFHGSIRAMLEKEPGGGLTRRHLYTFIMDYLRDFLAGKKLLLPSFRDCLKERGTVQMLTIGREAAIEVQSLVRVLESSSGNTPCYSLGVGEEXLVNWSLSIDDTIKRFAYAVLRLTPHALSSQEGTSSKWFYGSSASNVATESNMAHPSSLSESFYGSSDMSSGEDNHYHVVRPLQSDKWSKGKDGYLVTDLWGAEVGTWVFASPTVWLQHTGEKMYLCVYQHRSLTLMLLIPVSSIPNGEQGVSAVRQQVVENASLKILKVEEKLSKGWGGDNAYHVSGYRYLLVDGDRNVSRASPATKVTTLTKESLLAMNKLRQEVESEKSRAKLDSRNCEKDLEMCIRAKNNAWVISRVTRGKELYMVLEKANETLLYASDAAEKFSDRYCNGTFSLD

SEQ ID NO: 196986 - protein, 123 aa, Glycine max
  Clone ID: PAT_MRT3847_19905C.1.pep
MAEHNDPPQEPTLPSSKRKSDLDLQDLPSKIPKLDLKENDDKDLQNDHEGENDEREEDRKGKGIMRDDKGKGEMILEEEEDDDDDDDSDDGGDSDDDGSDFSDDPLMEVDLNNILPSRTRGRT

SEQ ID NO: 196987 - protein, 101 aa, Glycine max
  unsure (1)..(101): unsure at all Xaa locations
  Clone ID: PAT_MRT3847_19906C.1.pep
MGGAYLLAQASPLLRIAVREQVIPTSKMGSSLLSGMGHAEPFXSYVAAGNEHCRKKNHGGNYLGFYRAIKSAYAHMQIISNCDGSSRPLDXAADVHDYHVY

SEQ ID NO: 196988 - protein, 78 aa, Glycine max
  Clone ID: PAT_MRT3847_19907C.1.pep
PDAYALSVSSSFAFLTAALLASSVPASSSVSASADRASVSSTSRSISSWTAQTYRWPLVTMFVYACLNVLCGECSLEP

SEQ ID NO: 196989 - protein, 61 aa, Glycine max
  Clone ID: PAT_MRT3847_19908C.1.pep
AKTESLCSLCSNRVCIILSDSTFLPFFNFITKLLLLFHASKYKNLFTIIFYTNTFFLYLQS

SEQ ID NO: 196990 - protein, 71 aa, Glycine max
  unsure (1)..(71): unsure at all Xaa locations
  Clone ID: PAT_MRT3847_19909C.1.pep
MASILHYFLALSLSCSFLFFLSDSVTPTKPINLVVLPVQNDGSTGLHXHILQKRTPLMLVPVIVDIDVDHL

SEQ ID NO: 196991 - protein, 72 aa, Glycine max
  unsure (1)..(72): unsure at all Xaa locations
  Clone ID: PAT_MRT3847_1990C.1.pep
GDRAFAEKHYADLSAKPFFSGLVDYIIYGPVVAKIXHVNTVVTTGLKMIRTTNPPQSEPGTFRDDSVLVMER

SEQ ID NO: 196992 - protein, 93 aa, Glycine max
  Clone ID: PAT_MRT3847_19910C.1.pep
QTVVDTSQFLRLLAMPWMLCVAKTRPYDVQKTERVRTPSSVLHRSWHPLSTSNYPNADTKAQTCSTADFDKTRKRCPLIYKFSCATDACVEEW

SEQ ID NO: 196993 - protein, 306 aa, Glycine max
  Clone ID: PAT_MRT3847_19911C.1.pep
MLSGPSRSRTRKNMETAYRQKIAALSRVNHKNFTNLIGYCDEEEPFTRMMVFEYAPNGNLFEHLHVKEVEPLDWSARMRVIMGTAYCLQYMHHDLNPPVAHSNLNSSPSSSTSPPVNQASQQNSPNGASGKLWKYIIIIAGVAVLVIVLVIMLCIWRKRAAKVIKPWKTGISGQLQKAFITGVPKLNRGELETACEDFSNIINSFDECTVYKGTLSSGVEIAVDSTIVASANDWSKNMETAYRKKIAALSRVNHKNFTNLIGYCDEEEPFTRMMVFEYAPNGNLFEHLHGNNFHLSLKRLKLLPCA

SEQ ID NO: 196994 - protein, 40 aa, Glycine max
  Clone ID: PAT_MRT3847_19912C.1.pep
LFTTSKDCLSYHPFLLITLLVFVLADFETCQLKFQHTVHR

SEQ ID NO: 196995 - protein, 76 aa, Glycine max
  unsure (1)..(76): unsure at all Xaa locations
  Clone ID: PAT_MRT3847_19913C.1.pep
VARTRTXSSEFGSRYPXSEXXXHPXXXXSNXXXLXGXSSYYXXXCLTVKNXTRTLXXGRXRXXSRXWKLXEVMXXA

SEQ ID NO: 196996 - protein, 61 aa, Glycine max
  Clone ID: PAT_MRT3847_19914C.1.pep
GKPNCARNSGKHLLHQHVVKLSSFTSLDESFPSKCPDIDGGAEPLFLSWEGLPSRLFSIES

SEQ ID NO: 196997 - protein, 74 aa, Glycine max
  Clone ID: PAT_MRT3847_19915C.1.pep
WPIQMNFITNQGDRPMLYGSQTCDAVIRTRARKHMLHFNLPTDVTRVNFGHTHKPSTNTLISTTSTASRTCSVP

SEQ ID NO: 196998 - protein, 48 aa, Glycine max
  unsure (1)..(48): unsure at all Xaa locations
  Clone ID: PAT_MRT3847_19916C.1.pep
IXXXMKSQXSPIFLLNTFNWHPYKGEXXXSYXQXDFMSXSYXTFXEND

SEQ ID NO: 196999 - protein, 150 aa, Glycine max
  Clone ID: PAT_MRT3847_19917C.1.pep
MSRRKVREPKEENVTLGPAVRDGEHVFGVARIFASFNDTFIHVTDLSGRETLVRITGGMKVKADRDESSPYAAMLAAQDVAARCKELGITALHIRLRATGGNKTKTPGPGAQSALRALARSGMKIGRIEDVTPIPSDSTRRKSGRRGRRL

SEQ ID NO: 197000 - protein, 150 aa, Glycine max
  Clone ID: PAT_MRT3847_19918C.1.pep
MSRRKVREPKEENVTLGPAVRDGEHVFGVARIFASFNDTFIHVTDLSGRETLVRITGGMKVKADRDESSPYAAMLAAQDVAARCKELGITALHIKLRATGGNKTKTPGPGAQSALRALARSGMKIGRIEDVTPIPSDSTRRKSGRRGRRL

SEQ ID NO: 197001 - protein, 246 aa, Glycine max
  Clone ID: PAT_MRT3847_19919C.1.pep
MEAIEELVQLSDSMRQAAAVLADEDVDNYKRPSTFLNVVALGNVGAGKSASLNSLIGHPVLPTGENGATRAPISIELNRDTSLSSKSIILQIDNKTQHVSASALRHSLQDRLSKGSSGRSRDEIYLKLRTSTAPPLKLIDLPGLDQRIVDDKMISEYVEHNDAILLVVVPAAQAPEISTSRALRVAKEYDAESTRTVGIISKIDQASSEPKALAAVQALLLNQGPPKTSDIPWVALIGQSVSIASA

SEQ ID NO: 197002 - protein, 47 aa, Glycine max
  Clone ID: PAT_MRT3847_1991C.1.pep
GLIAEHLEGMSYFANTVNQPQETALWQGNFSLDSKSRSRLKTVSSTK

SEQ ID NO: 197003 - protein, 56 aa, Glycine max
  Clone ID: PAT_MRT3847_19920C.1.pep
VAAVGNVASDNVNKSWLASNSSGVQWGAKGFIRMQTDDAAKEGLCGIAVLASYPHA

SEQ ID NO: 197004 - protein, 40 aa, Glycine max
  Clone ID: PAT_MRT3847_19921C.1.pep
IDYCYFHDQITSASTILRSLWRDAHFWSGPGMVYSPALKC

SEQ ID NO: 197005 - protein, 56 aa, Glycine max
  Clone ID: PAT_MRT3847_19922C.1.pep
LITVKTCSASMIRAPDLSEATSYITLSYLLHLVARSAHIVICFMGASPTEFEYVAC

SEQ ID NO: 197006 - protein, 60 aa, Glycine max
  Clone ID: PAT_MRT3847_19923C.1.pep
HHSFLKLKFKSSALRLSLPTISLSPQQKQLQLFKLWPFSRPNFFLTEKLGGPRGSMAGNS

SEQ ID NO: 197007 - protein, 70 aa, Glycine max
  Clone ID: PAT_MRT3847_19924C.1.pep
LMSWVESVVAFINSFFTRHQTLPKNINAFISNSYFLISHNHITTPQPPFPFLTIVFPSISNFLYNPKRKN

SEQ ID NO: 197008 - protein, 88 aa, Glycine max
  unsure (1)..(88): unsure at all Xaa locations
  Clone ID: PAT_MRT3847_19925C.1.pep
GSRVLINPSHFSLEKGMKISLPSYESGGSFLPTQLDAASSFVVNTILLYKHITRSRHISPHIFSHKHVNSLHLHERYSXVQIRHQKLF

SEQ ID NO: 197009 - protein, 489 aa, Glycine max
  unsure (1)..(489): unsure at all Xaa locations
  Clone ID: PAT_MRT3847_19926C.1.pep
LGRQALAGINPLSIKRLETFPPVSDLDPSIYGAQKSALKEEHIISHLDGMPVQQAMAEKKLFMLDYHDAYLPFLNGINAREDRKAYATRTILYLTRLGTLKPIAIELSLPESKQVLTPPLDATSHWLWQIAKAHVCSNDAGVHQLVHHWLRTHACMEPFIIAAHRQLSAMHPVFKLLKPHLKHTLQINALAREALINEGGIIETDFSSGNTALRLSQXAYKDWWRFDMEALPADLIRRGLAEPDPTHPHGLRLLIEDYPFANDGLLIWFALENLVRTYVNYYYRDRIMVRSDSELQSWYSEVTNVGHADHANASWWPTLSTPSDLTSILTTLIWVASVQHSAVNFGQYPLGGYVPMRSPHMKKLLPKEDDLEYKEFLEDPEGYLLSCLPNMFETTKFLAVVNILSQHSPDEEYMGQRKDLSDWTGDPEIIKAFYEFSLDIKRIEKGIAKRNKAPPRRNKCGAGIPPYELLVASSAPGVTGRGVPNSISI

SEQ ID NO: 197010 - protein, 40 aa, Glycine max
  Clone ID: PAT_MRT3847_19927C.1.pep
LKKESCPSQFREHIVSFVFHWQGWELHLTPFFNYKNLETQ

SEQ ID NO: 197011 - protein, 72 aa, Glycine max
  unsure (1)..(72): unsure at all Xaa locations
  Clone ID: PAT_MRT3847_19928C.1.pep
RSVSMRCHAFKRLAWPPWIRQVHADARXAAQGNCGFTRIKQRLDEATQAQQQERWCLKSPSGLGASRRRSNY

SEQ ID NO: 197012 - protein, 102 aa, Glycine max
  Clone ID: PAT_MRT3847_19929C.1.pep
RGGGDDLKKAGGKGGGENHGDKGGDPEKGKELAQADEVRRDPEKREIYDQDGEDALKERKGGGGGFFAEEIGAVGFGGGSPFGAGGSRRGRRQRRGEHVGNP

SEQ ID NO: 197013 - protein, 327 aa, Glycine max
  Clone ID: PAT_MRT3847_1992C.1.pep
MAMVGGTMMAAYLRVSMPTSPQSPTTTRRRCRNLKTSCSVNRPKIPMPPLNPKDPFLSKLASVAASSPETLLNTPKNSDTLPYLDIFDSPKLMATPAQVERSVSYNEHRPRRPPPDLPSLLLHGRIVYIGMPLVPAVTELVVAELMYLQYMDPKEPIYIYINSTGTTRDDGETVGMETEGFAIYDAMMQLKNEIHTVAVGSAIGQACLLLSAGSPGKRFMMPHAKAMIQQPRIPSSGLMPASDVLIRAKEVIINRDNLVKLLAKHTGNSEETVANVMKRPYYMDATRAKEFGVIDRILWRGQEKVMADVASPDDWDKGAGIKIVDGF

SEQ ID NO: 197014 - protein, 36 aa, Glycine max
  Clone ID: PAT_MRT3847_19930C.1.pep
STWECAAELSFWHGTMTCSLGKHIQLVECDLPYDAL

SEQ ID NO: 197015 - protein, 147 aa, Glycine max
  Clone ID: PAT_MRT3847_19931C.1.pep
MQIIAHQLYRGLLRGRTMGRWLKDQKERKKQEIRTHNAHLHAAVSVAGVAAAIAAVAASTASPEMPYANPKNPPPASSAIASAAALVASHCIEIAEDMGAEHDQIQILQCCDHRRAPLGGWEAKLVMHEFPILQSIPNPHEQTRRHP

SEQ ID NO: 197016 - protein, 45 aa, Glycine max
  Clone ID: PAT_MRT3847_19932C.1.pep
EQSHFMHNSSYSIPFLLFRSLKLLHANKFNTKKTDAWVIIHELVI

SEQ ID NO: 197017 - protein, 324 aa, Glycine max
  Clone ID: PAT_MRT3847_19933C.1.pep
MKFCKKYQEYMQGQEKKLPCVGFKKLKKILKKCRRNSSSQKPLHASLAAKTCPDHCPVCDGTFFPSLLNEMSDIVGCFNQRAQKLLELHLASGVRKYFLWIRGKLQGNHTALIQEGKDLVTYALINAIAIRKILKKYDKIHYSKQGQLFKSQIQSMHKEILQSPWLCELMAFHINLRETKVKSRKAHALFDGCSLTFKDGKPALTCELFDSIKVDIDLTCSICLDTVFDPVSLTCGHIFCYICACSAASVSIVNGLKSADPKMKCPLCREGAVYEGAVHLEELNILLSRSCQEYWEQRIQTERVERVKQIKEHWDSQCRAFVGV

SEQ ID NO: 197018 - protein, 77 aa, Glycine max
  Clone ID: PAT_MRT3847_19934C.1.pep
QKCKQGWRQTPHIKTQINESKFATVDQEPSFGNNSCEKKAETSNFVRKTSSLEKKTQEGRKETRVYWDQQTLTNQPA

SEQ ID NO: 197019 - protein, 99 aa, Glycine max
  Clone ID: PAT_MRT3847_19935C.1.pep
KAKFFFTCLKGEGGKPSYFFNNFLNKILENIIRESQSNFSKLCFFSPGRGLTHLIHTFYKGLAPPQTQRILGGDFPIHGPGGYSLEKGGAGDSSPPGLF

SEQ ID NO: 197020 - protein, 34 aa, Glycine max
  Clone ID: PAT_MRT3847_19936C.1.pep
ALGNVFYPLELERASKCFSDRDSAKLCSLLMHLH

SEQ ID NO: 197021 - protein, 94 aa, Glycine max
  Clone ID: PAT_MRT3847_19937C.1.pep
VFVWILFRCCFLSLGSLQHSLLLFEFVIFISSTSTTPNILLPIPFFLNHFLDFVLFQFEPFSIEIVNVFYTTSTPKSPILTSEALFFCYPVFFS

SEQ ID NO: 197022 - protein, 92 aa, Glycine max
  unsure (1)..(92): unsure at all Xaa locations
  Clone ID: PAT_MRT3847_19938C.1.pep
EGEAFVSVFFPESSRNNLIRARSSTYDQPSLLLKKPGAAVPFLLGFAPPXTLPAASSSNLKDVLIPTPIKRPGAAFAAGTKWNQWFWKYFPA

SEQ ID NO: 197023 - protein, 55 aa, Glycine max
  Clone ID: PAT_MRT3847_19939C.1.pep
VTIYLAIDISEFRRTKLRSYGISGVRVERVKVTRSGGLVLTIALAPTLDKKTVVV

SEQ ID NO: 197024 - protein, 188 aa, Glycine max
  unsure (1)..(188): unsure at all Xaa locations
  Clone ID: PAT_MRT3847_1993C.1.pep
MSMMAAYLRVPTSTPITPQSPTATRTKCRNLKTSCSVNAAKIPMPPLNPKDPFLSKLASIAASSPAXLLNTPKTSDTPPFLDIFHSPKLMATPAQVERSVSYNEHRPRRPPPDLPSLLLHGRIVYIGMPLVPAVTELVVAELMYLQYMDPKEPIFIYINSTXTTRDDGETVGMETEGFAIYDAMMQLK

SEQ ID NO: 197025 - protein, 160 aa, Glycine max
  Clone ID: PAT_MRT3847_19940C.1.pep
PTRPPTRPPTRPPTRPDAAGCPKLKSFPPLKLTSLERFEFSDCYNLKSFPEILGKMENMTQLSWTGCAITKLPPSFRNLTRLQKLILREGRRELMDFDAATLVSNICMMPELYYISASSLQWRLLPDDVLKLTSAVCPSIEFVTLSYCELSDELLPLFLS

SEQ ID NO: 197026 - protein, 64 aa, Glycine max
  Clone ID: PAT_MRT3847_19941C.1.pep
NTNSGGHLSLSPEDGGESNYCHNNAGSSDAGSGNNGDLYQENKNYWNNILNLMNYSSPSDSPMF

SEQ ID NO: 197027 - protein, 86 aa, Glycine max
  unsure (1)..(86): unsure at all Xaa locations
  Clone ID: PAT_MRT3847_19942C.1.pep
YIGQTIAAAIDKVGPDSVLFIDSSASFXTTMNAVEGMLIDIGFSLPDXRTNHENVMCDFENARVXITDQRIPSILNIISLLENADC

SEQ ID NO: 197028 - protein, 69 aa, Glycine max
  Clone ID: PAT_MRT3847_19943C.1.pep
ERKLSYQKEGVKEFIMIHIFGVLVKVFQLGGYNVNTWVFFFWKICGILKYFFWKSLEFLFYKNKNFLLF

SEQ ID NO: 197029 - protein, 58 aa, Glycine max
  Clone ID: PAT_MRT3847_19944C.1.pep
ITSLLLAMSIFRETSTNPRGGPEPTDLSIIVNLHKRDRSTLYAQLLTYSKYLDTQYQL

SEQ ID NO: 197030 - protein, 227 aa, Glycine max
  Clone ID: PAT_MRT3847_19945C.1.pep
QLGLGSRIRMVSTPHLVPCIDSSYYVKDRSATLARGNMGSEGQTFRIPGSYIKRIACGGRHSAVITDAGALLTFGWGLYGQCGQGITDDELSPTCVSSLLGIHIEGIAAGLWHTVCTSADGDVYAFGGNQFGQLGTGADQAETLPRLVDSPSLKNLHAKNISCGARHTALVTEGGKVFCWGWNKYGQLGLGDVIDRNIPSEVTIEGCVPKNVACGWWHTLLLAESHT

SEQ ID NO: 197031 - protein, 328 aa, Glycine max
  unsure (1)..(328): unsure at all Xaa locations
  Clone ID: PAT_MRT3847_19946C.1.pep
PRVRTEQVSPRSQGSRSTGGTASSNSGEESTKRRRVSSAKQTAESSSSSDDSLTAFPCLVTLNPGIRIASVAAGGRHTLALSDTGLVWAWGYGGEGQLGLGSRIRMVSTPHLVPCIDSSYYSKDRSATLARGNMGSEGQTFRVPGSYIKRIACGGRHSAVITDAGALLTFGWGLYGQCGQGITDDELSPTCVSSILGIHIERVAAGLWHTVCTSADGDVYAFGENQFGQLGTGADQAEVCCNXTLPRLLDSPSLDNLRAKNISCGARHTALVTEGGKVFCWGWNKYGQLGLGDVIDRNIPSEVIIEGCAPKNVACGWWHTLLLAESPT

SEQ ID NO: 197032 - protein, 115 aa, Glycine max
  Clone ID: PAT_MRT3847_19947C.1.pep
GFLEKVGGWCFQEQLQQFQQLLQQLQQGLPKLQHQQPQHRVKLQHQPQVPPRFFSPPQGFYDQNCEPNEIVFGAVQEHDGSPEPLVIKAVDFGEKKYPPPHIRPRLNYVGSSPGY

SEQ ID NO: 197033 - protein, 57 aa, Glycine max
  Clone ID: PAT_MRT3847_19948C.1.pep
CSKKLTRTLSLTQPMHANAMDAMSLLRIGHVPRATTISRQVPNRLFFNQCMRISLHS

SEQ ID NO: 197034 - protein, 86 aa, Glycine max
  Clone ID: PAT_MRT3847_19949C.1.pep
NRGKGTFYVLGKGAQFIPPGGMVYFGAQKKKISKEFFGGVFFFLKKKPGEGGGPPLKNNLKGPPLFQKKKTKKKKKPQKNKNKINN

SEQ ID NO: 197035 - protein, 93 aa, Glycine max
  Clone ID: PAT_MRT3847_1994C.1.pep
LLVLLHSLSALTKLSLNFPSYYNLLHNPSLFLVSLRFRNTDFSKVLVRLPQTSKKRKKHCVITCFLFWEDKNIEFSFSLPWLRPDSTCPPLTW

SEQ ID NO: 197036 - protein, 63 aa, Glycine max
  Clone ID: PAT_MRT3847_19950C.1.pep
AEQEHNTRHRSRRRHGVAVADSPYVVERSCGGILLPFQPTPETVCFSFPISPGFMYLQVTLII

SEQ ID NO: 197037 - protein, 96 aa, Glycine max
  unsure (1)..(96): unsure at all Xaa locations
  Clone ID: PAT_MRT3847_19951C.1.pep
STNERGTRVRVYYNVDEGREVGDGLSWGNIVTFSVRPVRVANVMARLVTVCGKCVGQWLESSGCCIWQRXTRLCKEKKVLGTHRFGRTDEKRNLES

SEQ ID NO: 197038 - protein, 69 aa, Glycine max
  Clone ID: PAT_MRT3847_19952C.1.pep
IQRGSFTLGSAMSGVRQLIVIVRFVSQSDGDIGVLHVRLSRPTCCMAQVWRWRLEGSCRHRYQADISCL

SEQ ID NO: 197039 - protein, 107 aa, Glycine max
  Clone ID: PAT_MRT3847_19953C.1.pep
KYGQKVVKGTLHPRSYYKCTSAGCNVRKHVERASTDPKAVITTYEGKHNHDVPAARNSSPNTASSNSMPLKPHNVVPEKHPLLKDKDFGGNDQRPVHLRLKEEQIIV

SEQ ID NO: 197040 - protein, 144 aa, Glycine max
  unsure (1)..(144): unsure at all Xaa locations
  Clone ID: PAT_MRT3847_19954C.1.pep
EAVARLVFNEGDANXELVGVNDLQQMLNQEEEPLEEQRYRAELSEDDVFVIPAANTFAVKATSDLSYVAHGITAENNXRNFIVCEIYIVERQIXRRVQELAIPGSAHDVERLLDKQRESYCDHAQPHQNEEGSKGRKAPFPSII

SEQ ID NO: 197041 - protein, 86 aa, Glycine max
  Clone ID: PAT_MRT3847_19955C.1.pep
IHNNPHFTLWNFAKMTKDNSFHYGHPFQAIIPSLGSAWHKPDPHKSIDFIIISLFFLDFIINCWLSLTLGTVPCLTGSGGLPCEIC

SEQ ID NO: 197042 - protein, 523 aa, Glycine max
  Clone ID: PAT_MRT3847_19956C.1.pep
MSTPNTDSGTAPPPRPTITLPPRPSAEAFFSAAAGASPGPMTLVSSFFGSDAAADCRSFSQLLAGAMASPMAFSAAAAAADNSGKDDDGPHKGFKQSRPMNLVIARSPVFTVPPGLSPSGFLNSPGFFSPQSPFGMSHQQALAQVTAQAVLAQSHMHMQADYQMPAVTAPTEPPVRQLSFALNEASEQQVVSCVSSVSEPRNAQLEAPELSQADKKYQPSSQAIDKPADDGYNWRKYGQKQVKGSEYPRSYYKCTHLNCVVKKKVERAPDGHITEIIYKGQHNHEKPQANRRAKDNSDSNGNVTVQPKSESNSQGWVGQLNKFSEKIPDSSVAKSDQTSNQGAPPRQLLPGSSESEEVGDVDNREEADDGEPNPKRRNTDVGVSEVPLSQKTVTEPKIIVQTRSEVDLLDDGYRWRKYGQKVVKGNPHPRSYYKCTSAGCNVRKHVERASMDPKAVITTYEGKHNHDVPAARNSSHNTASSNSMPLKPHNVVPEKHPLLKDMDFGSTDQRPVHLRLKEEQIIV

SEQ ID NO: 197043 - protein, 77 aa, Glycine max
  unsure (1)..(77): unsure at all Xaa locations
  Clone ID: PAT_MRT3847_19957C.1.pep
HSLLHNACRGVACKTSSQPHLAIFYAEITTNDGCDFNNNVRVNXLNSWYVANDVRLDAYSCDVHLNNEQQTPDIAHG

SEQ ID NO: 197044 - protein, 49 aa, Glycine max
  Clone ID: PAT_MRT3847_19958C.1.pep
SALLCAMSVFKKIYKKNYYIIGVPFFKGKKITLCAGHRLRESFAFYTLI

SEQ ID NO: 197045 - protein, 36 aa, Glycine max
  Clone ID: PAT_MRT3847_19959C.1.pep
RVWRKKVSLNVMVYQICLGFNGERYCLYKSIWGGVL

SEQ ID NO: 197046 - protein, 31 aa, Glycine max
  Clone ID: PAT_MRT3847_1995C.1.pep
PSDWAQVYLSCLLIQIAKGCACTVICLVSQF

SEQ ID NO: 197047 - protein, 196 aa, Glycine max
  Clone ID: PAT_MRT3847_19960C.1.pep
ATSLTDPQRLARSASNLENELRHWRNTFESWITSQRSYIHALTGWLLRCVRCEHDPSKLACSPRRSSGTHPLFGLCVQWSRRLDALQETAVLDGIDFFAAGIGSLYAQQLREETRRNPDGSKEHGEIMEMLEVGQVEEVMNTEKLAEVAIKVLCAGMSTAMRSMAEFAVDYAEGYNELAKRWENVNLQQISCGAGT

SEQ ID NO: 197048 - protein, 194 aa, Glycine max
  Clone ID: PAT_MRT3847_19961C.1.pep
ALSACVLFHLVCSLQLIHFDDYGKLLQRENDVLVFMEEHIRLRFHLSKISHRFRIYLLLQFLVVTASQFVTLLQVTGFGGALTFISGGDFAVSTLVQVVGIIIVLHAAAKISHRAQGIVSLASRWHALVTCTSDSSKLRYCASTGSLEAAKHLNSMFLDYSESDLESSDYIGVPSHTQLASYMSSHNKRQAFGT

SEQ ID NO: 197049 - protein, 51 aa, Glycine max
  unsure (1)..(51): unsure at all Xaa locations
  Clone ID: PAT_MRT3847_19962C.1.pep
KSETLAQEEVLIVLEWCTKQAHLIEXPSIQPLLPEAKSRLELYQSRGRGFR

SEQ ID NO: 197050 - protein, 55 aa, Glycine max
  unsure (1)..(55): unsure at all Xaa locations
  Clone ID: PAT_MRT3847_19963C.1.pep
VKTGKENNSRSLCPAQIIIFFPLYNXXXRNXHXXSKRIIHLLTFHHTLYVKAHAY

SEQ ID NO: 197051 - protein, 173 aa, Glycine max
  Clone ID: PAT_MRT3847_19964C.1.pep
MAARATAIFNTPSSSSFFTFTLFLSLSLLLQLSLSSPSPSIHDLLRSKGLPPGLLPEEVKSYSFSETGHLEVFLDAPCLTKYENRVLFEQVVTANLTYGSLIGVEGLQQEELFVWLPVKDIIVNDPSSGLILFDIGLAHKQLSLSLFEDPPHCKNQGGLRNHVRKEKGFEALR

SEQ ID NO: 197052 - protein, 54 aa, Glycine max
  Clone ID: PAT_MRT3847_19965C.1.pep
LITSILGIISLHLGSKLVFFLLDQGELVPLICFSSGIACNLLLLIIKIWIYFCP

SEQ ID NO: 197053 - protein, 168 aa, Glycine max
  Clone ID: PAT_MRT3847_19966C.1.pep
MAARAKTPLNTLSSFTFTLFLSFSLLQLSLSSPTTIHDLLRSKGLPPGLLPEEVKSYTFSETGHLEVFLDAPCLTKYENRVLFEQVVTANLTYGSLIGVEGLQQEELFVWLPVKDIIVNDPSSGLILFDIGLAHKQLSLSLFEDPPHCKHEGGLRNHVRKEKGFEALR

SEQ ID NO: 197054 - protein, 41 aa, Glycine max
  Clone ID: PAT_MRT3847_19967C.1.pep
ERPPFFFFLNKTHWLPIYNRNFTSKRHKVFNKTLHAKKPYS

SEQ ID NO: 197055 - protein, 47 aa, Glycine max
  unsure (1)..(47): unsure at all Xaa locations
  Clone ID: PAT_MRT3847_19968C.1.pep
IREKETSTSMSGRGKGGKGLGKGGAKRHRKXLRDNISGESPSPAIAV

SEQ ID NO: 197056 - protein, 43 aa, Glycine max
  Clone ID: PAT_MRT3847_19969C.1.pep
PHVKVLFQWSSNHCVIELFLFLSFLPLQDLWIIVTVLITQSQT

SEQ ID NO: 197057 - protein, 72 aa, Glycine max
  Clone ID: PAT_MRT3847_1996C.1.pep
AAAPPCLSQGVRFELISNNPEPRKPLHCSQHRQRQGDHSQGLLRTQWAEYLSGPALTRSIPDWCLVRHLISL

SEQ ID NO: 197058 - protein, 86 aa, Glycine max
  Clone ID: PAT_MRT3847_19970C.1.pep
NGRSLAGFNIPKESPLPLVLCFRGGLQIFFKTFTGKTFSLEVESSAPIDNVKAKIPAKGGFPPAPPRFIFFWKPFEDGRAFFCFTI

SEQ ID NO: 197059 - protein, 76 aa, Glycine max
  Clone ID: PAT_MRT3847_19971C.1.pep
IGNSRTYHPTTAQHRIHFNQLKNRRFSMITMMMHTKVNMIEQSTFQFCTNKMTSNQLPIISIKKSYVLITKKNSAL

SEQ ID NO: 197060 - protein, 98 aa, Glycine max
  Clone ID: PAT_MRT3847_19972C.1.pep
KSAILSSWQKQKQAVKKKYGGLLIKNWPCLYKEHERAYFDSVNWALANHVGDKPKGPFKLFGINSTRRSSCSRCRKSPYAPSGEEGESVPAEAVPSSE

SEQ ID NO: 197061 - protein, 143 aa, Glycine max
  Clone ID: PAT_MRT3847_19973C.1.pep
VLYLGLVGFAVVCCGGAGLSGPGRWWAVRCVRVSRVAWASAGAPLSRWVSSRAWSASFVGLARRVSRLAFRGSARVSSCGWVPLVGVAGLPVFAFGWLVVWKCGGGSFSGGFRLSPLIGPALLRLVFGFYGGSVGPGAGFRAS

SEQ ID NO: 197062 - protein, 88 aa, Glycine max
  Clone ID: PAT_MRT3847_19974C.1.pep
QTTKRFITNACHRLVVTISPVQGSLATHEAVSMVNNLQTTGSIHAPCMVMSSEELAVGVMKILLGHRIVVRRFCNGVNCTTPQYGPHD

SEQ ID NO: 197063 - protein, 66 aa, Glycine max
  Clone ID: PAT_MRT3847_19975C.1.pep
KGQSSAPKLPAEKHRIKRRSTRRHPDTYNRGDATLRIRPGQNIGGTGIAELQETCNVLPIKNPGQK

SEQ ID NO: 197064 - protein, 34 aa, Glycine max
  Clone ID: PAT_MRT3847_19976C.1.pep
TVGCVKTARDMNKYATICELMSRSSAMASHHQVD

SEQ ID NO: 197065 - protein, 58 aa, Glycine max
  Clone ID: PAT_MRT3847_19977C.1.pep
YVGARIMPSKQAQEQEIETRSFIGVKREREQYPRPRRRTSVDRGEGSETKAHTRLFSL

SEQ ID NO: 197066 - protein, 56 aa, Glycine max
  Clone ID: PAT_MRT3847_19978C.1.pep
SLNFMGSGISLLSTTTTSTSQLPMYYNSSCYLIHQGSLLSPRLYINHISQFPRTQT

SEQ ID NO: 197067 - protein, 131 aa, Glycine max
  unsure (1)..(131): unsure at all Xaa locations
  Clone ID: PAT_MRT3847_19979C.1.pep
GSRETLRVREKGIGTYTASXDGPGTLIQMVYRRPRSYARGRDAXVSLCEGKMGKTLVRSYGPXQLLLTLIEELAPPVNVMLTIHRSTYAKGEHTNSVIASSFGVAASALCPDVKDITVDDDLKQIRLRCRG

SEQ ID NO: 197068 - protein, 55 aa, Glycine max
  unsure (1)..(55): unsure at all Xaa locations
  Clone ID: PAT_MRT3847_1997C.1.pep
FPPSPRVCDSPWPAQEVCPYLSHAVPPYQPQGTWLPLSLAKSAVVTPAPHIVFSX

SEQ ID NO: 197069 - protein, 59 aa, Glycine max
  Clone ID: PAT_MRT3847_19980C.1.pep
HVAFHRQLLKVIAFRIKTIPKIGIQESLKISIKNYKCVSQPSLSRWSTGRKKKEIPAGP

SEQ ID NO: 197070 - protein, 89 aa, Glycine max
  Clone ID: PAT_MRT3847_19981C.1.pep
DKMGTPKFPGQPQKPGKILGAGQKTLFSKLNFPLIQKDNPLPFLGKFQSPWKPIRANTKWGSCSTPQFFQALNFFRSFYNQRPPKKRGA

SEQ ID NO: 197071 - protein, 506 aa, Glycine max
  unsure (1)..(506): unsure at all Xaa locations
  Clone ID: PAT_MRT3847_19982C.1.pep
MASLSCSANDLAPLFNDTAAANYLCAQFDSISRKLNVTTYAVDNTYLLFSAYLVFAMQLGFAMLCAGSVRAKNTMNIMLTNVLDAAAGGLSYYLFGFAFAFGGPSNGFIGRHFFGLRDYPMGSSPSGDYSFFLYQWAFAIAAAGITSGXSIAERTQFVAYLIYSSFLTGFVYPIVSHWFWSSDGWASATRSHGNVLFGSGVIDFAGSGVVHMVGGIAVLWGALIEGPRIGRFDRSGRSVALRGHSASLVVLGSFLLWFGWYGFNPGSFLTIAKGYGSGGYYGQWSAIGRTAVTTTLAGSTAALTTLFSKRLLAGHWNVIDVCNGLLGGFAAITSGCAVVEPWAAIVCGFVAAWVLIGLNKLAAKVEYDDPLEAAQLHGGCGAWGVFFTGLFAKKVYVEEIYGVGRPFGALMGGGGRLLAAQVIQILVVCGWVTATMAPLFYGLHKMKLLRISRDDETAGMDLTRHGGFAYAYHDDEDGSSRGVGFMLRRIEPAASTTPSPPAAPQV

SEQ ID NO: 197072 - protein, 173 aa, Glycine max
  Clone ID: PAT_MRT3847_19983C.1.pep
MKENVGNPLHLKSVNHISLICTSVKESINFYQNLLGFFPIRRPGSFDFDGAWLFGYGIGIHLLQAEDPDNVPRKTKINPKDNHISFQCESMGAVEKKLGEMEIEYVHATVEEGGIKVDQLFFHDPDGFMIEICNCDSLPVIPLAASGNNNGMVRSCSRLNLQILQQIHQFLNQ

SEQ ID NO: 197073 - protein, 367 aa, Glycine max
  Clone ID: PAT_MRT3847_19984C.1.pep
MGGVTSSMAAKLAFFPPHPASYKVVKDEVTGLLLLSPFPHRENVEILKLPTRRGTEIVSMYVRHPMAASTVLYSHGNATDLGQMYELFIQLSIHLRVNLIGYDYSGYGQSSGKPSEQNTYADIEAVYKCLEESYGTKQEDIILYGQSVGSGPTLDLAARLPQLRAVVLHSPILSGLRVMYPVKRSYWFDIYKNIDKIPLVNCPILIIHGTSDEVVDCSHGKQLWELCKEKYEPLWLKGGNHCDLEQFPEYIRHLKKFIATVEKSTSQRYSFRRSMEQFEQPRKSTDVFEVSRKSTDRREKPRLSTDRPQKLKNLSNNADKLEKLRVTFDHMDRSRRSVDCLEKSRKSLDHQLEKARKSVDMLERIRT

SEQ ID NO: 197074 - protein, 129 aa, Glycine max
  Clone ID: PAT_MRT3847_19985C.1.pep
MGGMTSSMAAKLAFFPPHPASYKVVKDEVTSLLLLSPFPHRENVEILKLPTRRGAEIVSMYVRHPMAASTVLYSHGNATDLGQMYELFIQLSIHLRVNLIGYDYSGYGQSSGKPSEQNTYADIEAVYKC

SEQ ID NO: 197075 - protein, 66 aa, Glycine max
  unsure (1)..(66): unsure at all Xaa locations
  Clone ID: PAT_MRT3847_19986C.1.pep
HIGHLKNLXQQFFPLIISHISILFPIILHILQFHLILSLLLILHTINNIYPYTLNPSISSSHPFFT

SEQ ID NO: 197076 - protein, 108 aa, Glycine max
  Clone ID: PAT_MRT3847_19987C.1.pep
MAGPILHSSLVSSTDSHPAKKTSTSRASKGKLAPAGGGRLGKIDEEKAFSGNPLKSTSENTEPRRSIRRIQPTSRLLEGLQSSLIISKIPSASHEKGHKNQNRKTSRG

SEQ ID NO: 197077 - protein, 48 aa, Glycine max
  Clone ID: PAT_MRT3847_19988C.1.pep
NFQGCSIPESAFSVIGAIRTSFADTNCINCLRSEIAGDGDARAREHQG

SEQ ID NO: 197078 - protein, 127 aa, Glycine max
  Clone ID: PAT_MRT3847_19989C.1.pep
VKGWVRLMKKKLFSGNPLKSTSENIEPRRSIRRIQPTSRVRTCLPSTEICCSKLRLILFCLKYNKPFPLSYLYKKMFSYRCLLLSLMWLTFGWQLLEGLQSSLIISKIPSASHEKGHKNQNRKTSRG

SEQ ID NO: 197079 - protein, 27 aa, Glycine max
  Clone ID: PAT_MRT3847_1998C.1.pep
CIVQLKYIDLYGDCLTIYYGASEMRYR

SEQ ID NO: 197080 - protein, 33 aa, Glycine max
  Clone ID: PAT_MRT3847_19990C.1.pep
EKQKKRIRFINGNYSFLESIDSIRITVVHTKNK

SEQ ID NO: 197081 - protein, 164 aa, Glycine max
  Clone ID: PAT_MRT3847_19991C.1.pep
YTSGSTGTPKGVLIKHRNIVAAIAGVDVIVGKYLGPGDVLLAYLPAAHILEFVFENATLFWGGTLGYGTIRTLSDASVRNCAGDIRELKPTVLVGVPQVWETVKKGIMSKVQAGGAVKSNMFWGAFAAKNFLLGSGLPGSGILDAIVFNKVKEATGGKLRNLLE

SEQ ID NO: 197082 - protein, 71 aa, Glycine max
  unsure (1)..(71): unsure at all Xaa locations
  Clone ID: PAT_MRT3847_19992C.1.pep
AETFXFTXSXSVXEGQPGKLXDQISDAVXDAXLEXDPXXKVAXETCXXTNXVMVXGXIXTXAXVDYEXIVR

SEQ ID NO: 197083 - protein, 80 aa, Glycine max
  Clone ID: PAT_MRT3847_19993C.1.pep
TGKGRGHSNLSKKSEATVGPRTKPKSNIPVKTPLLMGGGGKTKENFSFKGEPPTHRMPQRGRKWGRKKKKLPDRGSQNPA

SEQ ID NO: 197084 - protein, 74 aa, Glycine max
  Clone ID: PAT_MRT3847_19994C.1.pep
EGWELDESKKEAALRETMKEAGVRGTVEGKLGKWSFKSKTHDTFYEGYMFPLLVQEQLEFWPEQNVRQRIWVGI

SEQ ID NO: 197085 - protein, 47 aa, Glycine max
  Clone ID: PAT_MRT3847_19995C.1.pep
TLFNWLLKKMQLSIIKVVHIKYYRISFKLSPLPLNYPMLPDLLVYKL

SEQ ID NO: 197086 - protein, 108 aa, Glycine max
  Clone ID: PAT_MRT3847_19996C.1.pep
MRTRTSYDEFESSMLIIAELAKLGISYIHPFAITGVVGFIGTGLPPSVALRADMDALPMHEIVDWDHNSTVPEKMHACSHYAHVAMLHDAAKILKEHDNEIRRTVVPV

SEQ ID NO: 197087 - protein, 60 aa, Glycine max
  Clone ID: PAT_MRT3847_19997C.1.pep
CIFSMVNIQRLHACIRLLSQDCRPCRESVPSGRLFAPVPICRRISPCVVLSSYGSVTRGL

SEQ ID NO: 197088 - protein, 59 aa, Glycine max
  Clone ID: PAT_MRT3847_19998C.1.pep
MGGEEVKLLSFSASPFGKRLEWSLKLQGVEYEHIGDDFFHNHIFLVIGWAPSPRVGNLF

SEQ ID NO: 197089 - protein, 90 aa, Glycine max
  Clone ID: PAT_MRT3847_19999C.1.pep
LMLLFSHPNLVLPLRLVEAACLHCKKSSTGYKKYTVLGPEPDIAPLSEGFASLVEGYVGVRVIAGSECKNRPEVTADLVVLEGGVGRHCG

SEQ ID NO: 197090 - protein, 43 aa, Glycine max
  Clone ID: PAT_MRT3847_1999C.1.pep
DATFEGIYMGGKKFYFPFYDGPKVNPKAQKFYLRYPLNTFWGL

SEQ ID NO: 197091 - protein, 67 aa, Glycine max
  Clone ID: PAT_MRT3847_199C.1.pep
MAMSVNDDTLVAAETDDQTEEMSSSESEQDQDVKLTEPSINALYNTDALPEKLGDISCPQNVQWIHR

SEQ ID NO: 197092 - protein, 61 aa, Glycine max
  unsure (1)..(61): unsure at all Xaa locations
  Clone ID: PAT_MRT3847_19C.1.pep
MSSRRRGLMACNKDGVGVILIKMYRHRRKQLVXISPYYGIVPQNTPKTRPEEKGRREXRLW

SEQ ID NO: 197093 - protein, 124 aa, Glycine max
  unsure (1)..(124): unsure at all Xaa locations
  Clone ID: PAT_MRT3847_1C.1.pep
MTDIMSAPVDPPMKLGHEIEYSEDERKKKLGSFKKVAISASSKYKHSFAKRGRNHSRVMSLSIEDDLDAEELQAVDAFLQVLILEELLPSXHDDHHMMPRFLRRRKFDIXENKTMWTDMLSGGR

SEQ ID NO: 197094 - protein, 98 aa, Glycine max
  Clone ID: PAT_MRT3847_20000C.1.pep
KKKKKKKYKKKKKKKKKKKKGRKKKKRRRIGKKEKKKKKGRRFLRGKFKLLGMGTKKARLRGAESIVTWGLVYTFFTGKDPEKTARNSHVPVPIRLSN

SEQ ID NO: 197095 - protein, 57 aa, Glycine max
  Clone ID: PAT_MRT3847_20001C.1.pep
PLPPPPFFFFLISHLQLPAGPFYMLPRIIKCYTTIKTKVVSHTGRACAHIFYTIPYK

SEQ ID NO: 197096 - protein, 129 aa, Glycine max
  unsure (1)..(129): unsure at all Xaa locations
  Clone ID: PAT_MRT3847_20002C.1.pep
FSPXXXXXHQTLXXSXNYXXXXQXISYIXNXXXXXTAXXTXXXXQYXXXLXXXXXXXSXXXTXSTXPXHXXXXXXXXXLXXXHXXXQXXXTXPXXXXXXTXXXXXNVRXXXXXXXTPXNXXXXXXXKEP

SEQ ID NO: 197097 - protein, 131 aa, Glycine max
  Clone ID: PAT_MRT3847_20003C.1.pep
MEFQRSDSSSSPPTPNNADPKKNTCSDPMHSWWESVSKARSRIHALAAILPSSSSDSLSSLADSDRPALSLLSSPAAYSAVSSSLSGSHFDPLCHWLYDTFLSSDPHLRLVVLSFVPLLAGLYLSRIHSPE

SEQ ID NO: 197098 - protein, 52 aa, Glycine max
  Clone ID: PAT_MRT3847_20004C.1.pep
LVRSIECASMFFYHFFALRIVLPRIERKSRARSGIRCKTKQSKIVLSIRACV

SEQ ID NO: 197099 - protein, 108 aa, Glycine max
  Clone ID: PAT_MRT3847_20005C.1.pep
INLIITDYCMPGMTGYDLLRKIKESKSLKNIPVVIMSSENVPSRINRCLEEGAEEFFLKPVQQADVNKLKPHLMKSRAKEEQDQPFNNKRKDMEEIHSPNKTRIKCSS

SEQ ID NO: 197100 - protein, 82 aa, Glycine max
  Clone ID: PAT_MRT3847_20006C.1.pep
YSPGPRTLRSSAPNHFQVAWESSTPVGAVSTVQSANNSSTSKRSIVGRGKQTVGICMVGRTSGMYEVTGLLCSNAIKGRDVC

SEQ ID NO: 197101 - protein, 97 aa, Glycine max
  Clone ID: PAT_MRT3847_20007C.1.pep
MEMANENGFQLSVKLSEPTLVPPAEETKKGLYFLSNLDQNIAVIVRTVYCFKTAERGNEKAGEVIKNALKKVLVYYYPLAGRLTISSEGKLIVDCTG

SEQ ID NO: 197102 - protein, 58 aa, Glycine max
  Clone ID: PAT_MRT3847_20008C.1.pep
DPIVETTFKAKGVEIATVSHQEAQGALPLHDDLSAYLDLSQKLLAIWGLQLTTRWELM

SEQ ID NO: 197103 - protein, 41 aa, Glycine max
  Clone ID: PAT_MRT3847_20009C.1.pep
TSILLTATGYLSEARHISHRTFMTEDHWSINIICMLPIYTF

SEQ ID NO: 197104 - protein, 90 aa, Glycine max
  Clone ID: PAT_MRT3847_2000C.1.pep
LSVFGSKCHIVVQKLWDGRGRDDYYSPERSRSYSRSLSPSGGKDYRKSPRLRENGRSPNDKKDQTPSRSESPRGNDRSPSRSRSRSYSPR

SEQ ID NO: 197105 - protein, 122 aa, Glycine max
  Clone ID: PAT_MRT3847_20010C.1.pep
RVRSIDLLPQHSIDHTDPPSVKEMDFFSTSSAPDPKNNTSTSDTNDDYQKRDDQHDTHDRHGSITADGSPTRATDHHVNTGLNLTCASAGMTKSDNSENPETELSSLENQLGKLQEENSKLR

SEQ ID NO: 197106 - protein, 50 aa, Glycine max
  unsure (1)..(50): unsure at all Xaa locations
  Clone ID: PAT_MRT3847_20011C.1.pep
XHSXXXRRXMXXMXTTTFXPXSLSXXGSLVLIRLSHPXKTNKPCCSTRSK

SEQ ID NO: 197107 - protein, 99 aa, Glycine max
  unsure (1)..(99): unsure at all Xaa locations
  Clone ID: PAT_MRT3847_20012C.1.pep
RDPPHITCNHREYEQIPNNMEGIIPSYENKMDLRSFFFGASDIAALRRLVPHYHRKCTSFDLITACFWRCRTXALEIDADEDVRMMVIVNARARFNPPL

SEQ ID NO: 197108 - protein, 94 aa, Glycine max
  Clone ID: PAT_MRT3847_20013C.1.pep
SKKIRKALEEHSHLAFPILLFTSIDPGVFLAGVTRVGCFLDGTGMGINDGIMLLASRLFVGLRLIGFFLALMPNPLETVIGLGICAGQCKSDSA

SEQ ID NO: 197109 - protein, 475 aa, Glycine max
  Clone ID: PAT_MRT3847_20014C.1.pep
MALSSPSLVFTVQRCQPELVAPAKPTPREVKPLSDIDDQQGLRFQIPFILFYGNEPSMAGKDPAKVIREALAQTLVFYYPFAGRIREGPGRKLVVDCTGEGVMFIEADADATLDQLGDTLQPPFPCFEQLLYDVPGSEGVIDCPLMLFQVTRFKCGGFALAVRLNHTMSDGAGIALFMNTLAEMAQGATEPSVPPVWRRELLQARDPPHITCNHREYEQIPNNMEGIIPSYENKMVLRSFFFGASDIAALRRLVPHYHRKCTSFDLITACFWRCRTKALEIDADEDVRMMVIVNARARFNPPLPAGYYGNAFAYPAAVTTAGKLCENPFGYAVELINKLKGEVTEEYMHSVADLMVTNGRCLFTTVRSFIVSDLRHFGFKQIDFGWGRALYGGVAKGGAGPFPAVFYLMAHKNAKGEEGILLPIWLPAKAMDKFANELDHMLIGNQNQPTDPHPIFYASTLENIKWTPKKLIGTQ

SEQ ID NO: 197110 - protein, 85 aa, Glycine max
  Clone ID: PAT_MRT3847_20015C.1.pep
PIPRPLGDAPLVAKIFFSPLNFQIWGDSFPGDWLKKNPFSFYPPFFFLPLGRGPLYFFWKQFKCNFFWGALQKKGRGFLGNKPLF

SEQ ID NO: 197111 - protein, 329 aa, Glycine max
  Clone ID: PAT_MRT3847_20016C.1.pep
MRILFISLQSIHIKIQDSRVAKTVRTEPRDADRRSHLHTVYRMPLSSNDSHADHPIGPESRTESRDFKESREPRFENRDTKTEKKELHGEARRDSQIAKSEKDVRVDGRGDDNKDIRYEWDGHNDSKGDIKTDKDGYGMVSSSSHLNWKESKEYRGKRFSDAPGGSLDSWHTSRGNTPTEVGKDSSMAEERDYLETHEAVGENKIDSKSEDRFKERKRKDVKHRDWGDREKERSDRRSTTPVNNNSGDNKESAKEDRDVEKWEKERKDLPKEKESSKEKEKDNSKRESLNGMEKDGLNDGKELGDGSAQNTEQENVLKQKDVDGWKNVV

SEQ ID NO: 197112 - protein, 51 aa, Glycine max
  Clone ID: PAT_MRT3847_20017C.1.pep
APRTCANQGGCLKFDKGPSKNPVLLKMILTGKTPPARPVLKVLTREGKAIG

SEQ ID NO: 197113 - protein, 65 aa, Glycine max
  Clone ID: PAT_MRT3847_20018C.1.pep
DIAYVSFLERFQIVFSEIFKHDITAGRPKLATWIQEGNKIDGYKQTKVDREEYLEAFKKKFLAWA

SEQ ID NO: 197114 - protein, 96 aa, Glycine max
  Clone ID: PAT_MRT3847_20019C.1.pep
LCWVFTMSGVPKRSHEDSVHQSSKHPHQDSGTYSKLMPSVSNDHHIPYDMSQDSRVAKTVRTEPRDADRRSHLHTVYRMPLSSNDSHADHPIGPES

SEQ ID NO: 197115 - protein, 62 aa, Glycine max
  Clone ID: PAT_MRT3847_2001C.1.pep
RKGKMCCLFINDLDAGAGRLGGTTHYTAENRMLNATPMNIAETPTTDQLTAISNQAHNSPAP

SEQ ID NO: 197116 - protein, 250 aa, Glycine max
  Clone ID: PAT_MRT3847_20020C.1.pep
MKLKVYADRMSQPSRAVLIFCKVNGIDFEEIKVDLSKRQQLSPEFRAVNPLRKVPAIVDGRFKLFESHAILIYLASAFPGVADHWYPADLSRRARIHSVLDWHHQNLRRGAASFVLNTVLAPLLGLRANQQAAAEAEKILISSLSTIENIWLKGNGQYLLGGLRPSIADLSLVCEIMQLELLDEKDRDRILGPHKKVQQWIESTRNATRPHFDEVHTILYKLKTRLSEQQSNQADGVMQSRIRTPLSSKM

SEQ ID NO: 197117 - protein, 80 aa, Glycine max
  Clone ID: PAT_MRT3847_20021C.1.pep
VQGYNSYTWCADQDLIFDKNTYFQQVIMSLLGVHPKRNDEWSRAYLDTPPTLVFTAKAKTRNHVFTNIEIAYSKIPSLAQ

SEQ ID NO: 197118 - protein, 40 aa, Glycine max
  Clone ID: PAT_MRT3847_20022C.1.pep
DREHIISSSRANDITLCRISCLKTSHRRSGSPVKCRLLFM

SEQ ID NO: 197119 - protein, 86 aa, Glycine max
  Clone ID: PAT_MRT3847_20023C.1.pep
MSYDDVEIEDMEWNEELQAYTYPCPCGDLFQITKEDLMLGEEIARCPSCSLYITVIYNLEDFLADSDQNRRNKGLQPSKQQPLTVA

SEQ ID NO: 197120 - protein, 104 aa, Glycine max
  Clone ID: PAT_MRT3847_20024C.1.pep
VMQGTQLQPLSMQGSPTIKALFFGNQKICGTLPPHDTNKMDNGSHLAAHSFSLGLLLLVVYSRNRNRNRSLVRSVIFLWLLFSSFCSLPFYGFSSWLSAVIHPR

SEQ ID NO: 197121 - protein, 98 aa, Glycine max
  Clone ID: PAT_MRT3847_20025C.1.pep
NYIKKYSSLNIMGKKKIGKKSKALQGGNLHIPEITFTTAHYTMGENIYKIQRKWRPYHITVFTSSWGQNLQGPTTGGLPNEDYSQRFSMGNAPKGRGG

SEQ ID NO: 197122 - protein, 129 aa, Glycine max
  Clone ID: PAT_MRT3847_20026C.1.pep
VGFFFFFFFFLFFLGKKNSPGPVFFFFTWFSPIPQPFKGGRLSNPLGGPPKKPPHKVLGAAYHKKTPGSVLKLGPKRGPPKTKNFLGKKPPGPKWGVSHLEKSPLFSSRFLGPQPPKGSLLGGPGFQPL

SEQ ID NO: 197123 - protein, 91 aa, Glycine max
  Clone ID: PAT_MRT3847_20027C.1.pep
KLTKGYQVYAASRWKRSVVSNFSKWIMHNKREAGIVVLSRFIILLFFFLSLAFLSYGCGMIILIASATHIEKITACDSTTVDERCVLRAFI

SEQ ID NO: 197124 - protein, 107 aa, Glycine max
  unsure (1)..(107): unsure at all Xaa locations
  Clone ID: PAT_MRT3847_20028C.1.pep
EENQYPKRRNTXLDNGSVLFNFAGWPVCSKQAFILLTPRTLRXENGKDIGPYEQXCKTCHHVTGRHQXPFGIMAGIQQYAILCLMSGKTEQLISILPHDHGQRDLRL

SEQ ID NO: 197125 - protein, 42 aa, Glycine max
  Clone ID: PAT_MRT3847_20029C.1.pep
ELYEWSFYLNSLIWFVVPFCVRLGMVCKIVLSPRNENHPLFF

SEQ ID NO: 197126 - protein, 105 aa, Glycine max
  unsure (1)..(105): unsure at all Xaa locations
  Clone ID: PAT_MRT3847_2002C.1.pep
KGKRWAVIVNPGSVFIEPKITQVANPKXNKKNPGGLWFDPMMCGKGSPYPLIVFMPKEIKNGSLARVAFGGFWLRAXYTGEGPIVNLMELLADSGHCNIFSAFAR

SEQ ID NO: 197127 - protein, 95 aa, Glycine max
  Clone ID: PAT_MRT3847_20030C.1.pep
LELARYISFSTRGRTTHYIFPFNKNKTTCLFKSNNPTLLLTYATSSPNMANFFGPLFTQPTLPVHILDFQPLVKIRLHILCCLSSFHREKQLPKK

SEQ ID NO: 197128 - protein, 53 aa, Glycine max
  Clone ID: PAT_MRT3847_20031C.1.pep
KVLNPIKATIKSLGPCSTIGRPFWLILRKIKWFGTLVNSGIKWKPFHFFPTTP

SEQ ID NO: 197129 - protein, 49 aa, Glycine max
  Clone ID: PAT_MRT3847_20032C.1.pep
RLREDDRRDIAKIKREGKKFESHGAFYFLAQLAGFSTLIHFSPKIIIFS

SEQ ID NO: 197130 - protein, 80 aa, Glycine max
  Clone ID: PAT_MRT3847_20033C.1.pep
KKKSSFYLSSQDVITILCIFACTYFPVLPNAKTNNTIPQEGFQKQSTIAIFKKPQFKTLLYRKSNIFSNRLTLLSSTSMS

SEQ ID NO: 197131 - protein, 57 aa, Glycine max
  unsure (1)..(57): unsure at all Xaa locations
  Clone ID: PAT_MRT3847_20034C.1.pep
LLTQTKYLPLPGPKVRLLGXXPFRPNFGNEQAYNSFKRMKMPFLXXPFLSYSAIHSK

SEQ ID NO: 197132 - protein, 70 aa, Glycine max
  Clone ID: PAT_MRT3847_20035C.1.pep
EALKHRISRLHLSYMRRNLNRSKDVDVKLDPIDWCTFFFVCVFFFFLYFNSFFFLIFLFLLFLFFFFFFF

SEQ ID NO: 197133 - protein, 94 aa, Glycine max
  Clone ID: PAT_MRT3847_20036C.1.pep
YCPHSRLSLSLSRSVGIRFQLSYSTRTQTLMDGRTSVCGLMNLHSLVLTASKVTTLRSLSQNFTHTHSITHSSLLRIQTSIFRYQDRRTAWEDT

SEQ ID NO: 197134 - protein, 46 aa, Glycine max
  Clone ID: PAT_MRT3847_20037C.1.pep
VIFKSPPVLQEVGYSDDDVFIKRVVAKAGDIVEVRSLDKSIHTLVS

SEQ ID NO: 197135 - protein, 36 aa, Glycine max
  unsure (1)..(36): unsure at all Xaa locations
  Clone ID: PAT_MRT3847_20038C.1.pep
GGKWRGNKRMKKDRKISXSSTPLFVRNGDQIILKSI

SEQ ID NO: 197136 - protein, 110 aa, Glycine max
  Clone ID: PAT_MRT3847_20039C.1.pep
ANRHRSKGGPHLHLVGSSNNPMMECHNQAIRRGKVFVDNETALVEAGELVGAFERGVIKKDEIGGSLVELVRGEKVGRISSEQITVFKSVGSAVVDMLAAQLVYETYTRS

SEQ ID NO: 197137 - protein, 79 aa, Glycine max
  unsure (1)..(79): unsure at all Xaa locations
  Clone ID: PAT_MRT3847_2003C.1.pep
APPPAPPRPPPPXAQPPGGRPPAPPPPPAPAAPAXPRPTPPRPRGGPRXLPPPPPPPRPPHRPQQPAPVGGYLQPDPSE

SEQ ID NO: 197138 - protein, 51 aa, Glycine max
  unsure (1)..(51): unsure at all Xaa locations
  Clone ID: PAT_MRT3847_20040C.1.pep
TEMISFIITLRRFRFDIDYLFLRQSKHLTIFSHNAHIFSRKLFFLYXFYIT

SEQ ID NO: 197139 - protein, 152 aa, Glycine max
  Clone ID: PAT_MRT3847_20041C.1.pep
VIPLNARGQAETDETLRVKGHPRIFALGDFSALRDSNGRILPATAQVAFQQADFTGWNLWAAINGRPLLPFRFQNLGEMMTLGRNDAAISPSFIDGLTLEGSIGHTARKIAYLIRLPTDEHRLKVGISWLTKSAIDSVSSLQSTLYKVLSGS

SEQ ID NO: 197140 - protein, 78 aa, Glycine max
  unsure (1)..(78): unsure at all Xaa locations
  Clone ID: PAT_MRT3847_20042C.1.pep
IQLWKDQLVPLVSLIENLNPFLPTPFQLLXRXIVLWYDKSISQWVAFDDKCXHRLAPLSEGRIDENGXLQCSYHXVVF

SEQ ID NO: 197141 - protein, 82 aa, Glycine max
  Clone ID: PAT_MRT3847_20043C.1.pep
AEPAATILLVERRLTTMTTTMMSTISPAWSICLYIPFGWSNYLNMSLPPGELQASEALRQQRGPESSLGPKLAGSFMEMAQL

SEQ ID NO: 197142 - protein, 637 aa, Glycine max
  Clone ID: PAT_MRT3847_20046C.1.pep
MAFWRSLAFSALLLSLFVHGALCFYLPGVAPQDFQKGDPLQVKVNKLTSTKTQLPYTYYSLPYCPPNKIVDSAENLGEVLRGDRIENSRYVFKMREPQMCNIVCKLKLDAKTAKAFKEKIDDEYRVNMILDNLPLVVPIKRMDADSTVYQLGFHVGLKGQYSGSKEEKYFIHNHLAFTVKYHRDTLTESARIVGFEVKAFSVKHEFEGKWDEKTTRLTTCDPHAKHTVVNSNSPQEVEENQEIIFTYDVDFQESDVKWASRWDAYLLMSDDQIHWFSIVNSLMIVLFLSGMVAMIMLRTLYRDISKYNELETQEEAQEETGWKLVHGDVFRPPNNSDLLCVYVGTGVHFFGMILVTMLFAVLGFLSPSNRGGLMTAMLLLFVFMGIFAGYASARIYKMFKGTEWKSIALRTAIMFPAIVSAIFFVLNALIWGQKSSGAVPFGTMFALIFLWFGISVPLVFVGAYVGFKKPAIENPVKTNKIPRQIPEQAWYMNPVFSVLIGGILPFGAVFIELFFILTSIWLNQFYYIFGFLFLVFVILIVTCAEITIVLCYFQLCSEDYLWWWRSYLTSGSSALYLFLYATFYFFTKLEITKLVSGLLYFGYMLIASYAFFVVTGTIGFYACFWFTRLIYSSVKID

SEQ ID NO: 197143 - protein, 125 aa, Glycine max
  unsure (1)..(125): unsure at all Xaa locations
  Clone ID: PAT_MRT3847_20047C.1.pep
SQCSGSTLCKRHICLTEHGIEVSERKHSYNXNHQDVTPNYVSKKYLAPRVQQKSFDVADTYNSNYYMDFDFTDKMDALIDTQGHRKHGEPVEPKIIPSDKNDEMLHWNEHSMRQCLRKSRFGRDQ

SEQ ID NO: 197144 - protein, 62 aa, Glycine max
  Clone ID: PAT_MRT3847_20048C.1.pep
VSSKYIYRVEILACSMLCNYWILDAMAYIYEWNSDIGICRYRNFWVEAMEEYHEMWKAVFFI

SEQ ID NO: 197145 - protein, 74 aa, Glycine max
  Clone ID: PAT_MRT3847_20049C.1.pep
FVPLELSPKLIFGGRLQKPKWASPLIFYLAEGQNCLFKKIMKYTFLICLTSDITAHINVSCLETLRKEPQGEHS

SEQ ID NO: 197146 - protein, 70 aa, Glycine max
  Clone ID: PAT_MRT3847_2004C.1.pep
FKLFDHHSLLIGNHDPLRRIRFHLVGSTKYQSACTNNIYKSLNFYYLYLFFYDINISPKYSLVNVNIIGL

SEQ ID NO: 197147 - protein, 51 aa, Glycine max
  unsure (1)..(51): unsure at all Xaa locations
  Clone ID: PAT_MRT3847_20050C.1.pep
XAXRMXRGYLETSTYANISIXGTQHKEPRDXXPXNTNIPRQYKCNXXXPYN

SEQ ID NO: 197148 - protein, 66 aa, Glycine max
  Clone ID: PAT_MRT3847_20051C.1.pep
LIATTPLSCKVVDGPFKTNTELRSNQILALIVNCPEAGLGTLKLTLARRPRLFMEINIQTGSHALS

SEQ ID NO: 197149 - protein, 66 aa, Glycine max
  Clone ID: PAT_MRT3847_20052C.1.pep
FPTGKAFNLYDLIKDGLISVKEPHSVKRRLREKCSLSDCRRMIGNVDAGGDGNVNFEEFKKMMTRS

SEQ ID NO: 197150 - protein, 90 aa, Glycine max
  Clone ID: PAT_MRT3847_20053C.1.pep
FTARRVAPVSDEAQQFFRVKAKLRSAARLSTAHMIHPSTYRSTIATNLSATTTTVRCSLSLCFSFSLQFLSLFAGRNEDMDLEKSCVCVR

SEQ ID NO: 197151 - protein, 63 aa, Glycine max
  Clone ID: PAT_MRT3847_20054C.1.pep
MDREVSLSPLSLPIFTYLASFCFLAIQDSHSPTTLIDTTTTKIQHLHNASALLDSYRSDTLNL

SEQ ID NO: 197152 - protein, 62 aa, Glycine max
  Clone ID: PAT_MRT3847_20055C.1.pep
ANALHVGSIEIIFDSFASTRYNILGAILYVTTYQSSTDNARRSIPTAPLRGGRPIRVVHFPN

SEQ ID NO: 197153 - protein, 53 aa, Glycine max
  unsure (1)..(53): unsure at all Xaa locations
  Clone ID: PAT_MRT3847_20056C.1.pep
MFLRAPEKSENTSYYXILGVSKNAAHDDLKNAYXIAAIKNHPDNVGDPEKFKE

SEQ ID NO: 197154 - protein, 63 aa, Glycine max
  Clone ID: PAT_MRT3847_20057C.1.pep
LGKVQIHSSILLSMFILTRKESFYEHMTTTCSRAPSYILFSIAWGMPLRLGTGQQTCTYWRRQ

SEQ ID NO: 197155 - protein, 70 aa, Glycine max
  unsure (1)..(70): unsure at all Xaa locations
  Clone ID: PAT_MRT3847_20058C.1.pep
KKGFKMWSSEWANLTXGHLGFLIDEPDKYTVYIILLGISQHFEIAGNTLMPAFSVPQATAKSSENAESSA

SEQ ID NO: 197156 - protein, 59 aa, Glycine max
  Clone ID: PAT_MRT3847_20059C.1.pep
MGNIKEHSYVIMKLDDSKSMLTPIMKIYNMLFIWKSHLLPLKCHEKQHSIPDWAYNNNS

SEQ ID NO: 197157 - protein, 64 aa, Glycine max
  Clone ID: PAT_MRT3847_2005C.1.pep
GTEFQSGGCICKHMAWWSQHNKGIKSTLYVKFKVSGAFSSSSICLPHGGTRANWFVDKSFMRLT

SEQ ID NO: 197158 - protein, 60 aa, Glycine max
  Clone ID: PAT_MRT3847_20060C.1.pep
LILDYFVKVHIFFFFILFVFFFFFYFFYYFFFSLLIFYPFLFYQHKTLASIRYYLKHISP

SEQ ID NO: 197159 - protein, 57 aa, Glycine max
  Clone ID: PAT_MRT3847_20061C.1.pep
DKLQAVRVSCPLFNTARWVRNPERSSCKMCHMHCSGPRPEHSKVANNDVECPYDRYT

SEQ ID NO: 197160 - protein, 103 aa, Glycine max
  Clone ID: PAT_MRT3847_20062C.1.pep
QSTQTGKRTAVGQFSKNQRRPHRISGAHCVLGAKPAGPGGPTHIRGGRTQGKMPGSWAFFCLKKKPLPSIPNYGHPWVLGETNIHWRWHRKTILMHNLKSLFC

SEQ ID NO: 197161 - protein, 173 aa, Glycine max
  Clone ID: PAT_MRT3847_20063C.1.pep
GRVGKNQLLQGFSPDDAYPSGPPLFMETPRPCSPLAQIEFPNFDEIMWADDLMEEETGPEHSGSQSDHKTSLSTNYPDVLNVNQLLDSVLETARQVASFSTSSTPLPYDQMKNQCEALVTGKQQKMSVIHSFKHQQESKAIILSSENEVKVSPLPAKVSIFYRSQFFSKKCIS

SEQ ID NO: 197162 - protein, 81 aa, Glycine max
  Clone ID: PAT_MRT3847_20064C.1.pep
LTESYESLPNATDENPMVLNNGGLHGATLTLLNQLSFNFSGKFSVLAVSHHNPDAWDIPRYLSQLMAQLQHTLLWDCSTGL

SEQ ID NO: 197163 - protein, 59 aa, Glycine max
  unsure (1)..(59): unsure at all Xaa locations
  Clone ID: PAT_MRT3847_20065C.1.pep
ADADESIGRQLTMASLXRDKDEFVTKHGGGKARTPPAIFFNKEIGPKQKEHMQYRVDHP

SEQ ID NO: 197164 - protein, 731 aa, Glycine max
  unsure (1)..(731): unsure at all Xaa locations
  Clone ID: PAT_MRT3847_20066C.1.pep
MGSKWKKAKVALGLNLCMFVPRTLDDDSPPHTVVSERLSDATLLSPANWSTSSSRPTTPVSSFHGLKLSKSSSKSSKQTCSICLTKMKQGSGHAIFTAECSHSFHFQCIASNVKHGNQICPVCRAKWKEIPLSGPSLDPIQGRVSPSPVNWPQNDALMAVVHRVPLPLPHPHRDLNRRHVVPLYQASEPGIFDDDESLNHQHAFSERSTCNKSTEDTDAARAMEIKTFPEVSAAPGSKTYSNFTVLVHLKATAAAAAAAAKRQNLSRNQTNLAQISQTPRAPVDLVTVLDVSGSMAGTKLALLKRAMGFVIQNLGSNDRLSVIAFSSTARRLFPLCRMTDSGRQKALQAVNSLVANGGTNIAEGLRKCAKIMEDRKEKNPVASIILLSDGQDNYTVNGSGTSQPQPNYQFLLPTSISGGDNSGFQIPVHAFGFGADHDASLMHSISETSGGTFSFIETEAVLQDAFAQCIGGLLSVVVQELQVGIECTHPNLNLVSLKAGSYPSHLMADGCKGLIDVGDLYADEERDFLVSVNVPATSGNETSLIKVKNVYRDPCTQETATLESEGVKIERTENVGQVVMSLEVDRQRSRLQAAEAMAQASSAAEQGDLSRAVLILENCRKMLSETVSAKSHDRLCVALDXELKEMQERMASRHVYEASGRAYILSGLSSHSWQRATARGDSTDRSSLVQAYQTPSMAEMLTRSQAMLLGSPSGQRLLQPLVSYRPQPSPR

SEQ ID NO: 197165 - protein, 56 aa, Glycine max
  Clone ID: PAT_MRT3847_20067C.1.pep
LYLLGSPLSQQSSYCLVYGNLQSYSICTNVDSGLIISVCSGIAVLAARVLNSIQRS

SEQ ID NO: 197166 - protein, 79 aa, Glycine max
  Clone ID: PAT_MRT3847_20068C.1.pep
VSFAQSGTQSDKVTLKGAKDCVEAAKKRIQEISEDLEAQVTVECSIPQAIMIKKKPFQPAAQTQPHNGLSQSDPAAGPS

SEQ ID NO: 197167 - protein, 130 aa, Glycine max
  unsure (1)..(130): unsure at all Xaa locations
  Clone ID: PAT_MRT3847_20069C.1.pep
QASFLSTTRPATTMLADGCTYLHAIVHDSTASTIPGDFVIGVKLTTINNLCVYGLNPGISGSPHLVTIPQSIRHXTVWNQMATLRTPLNSESCTQSCSALSIDLLDGRILVDKTGDXFTLIQNFPHNNLM

SEQ ID NO: 197168 - protein, 104 aa, Glycine max
  unsure (1)..(104): unsure at all Xaa locations
  Clone ID: PAT_MRT3847_2006C.1.pep
PPNEDQDIPLKFYARLRHIIDPQYNEVHAQMETRXASYSRFEDDETPKGSMLDLKISQTKMALSKNTDGGTFLRSDLLAKFLTDDNFRARHDLQRTHRIKGMIK

SEQ ID NO: 197169 - protein, 236 aa, Glycine max
  Clone ID: PAT_MRT3847_20070C.1.pep
MSDPTLAQQHLVKVHTTTHETVVTTHNHNQTPSINASGEKKKIVGVFYKGNEYAKLNPNFVGCVEGALGIREWLESQGHQYIVTDDKEGPDSELEKHIPDAHVIISTPFHPAYVTAERIKKAKNLELLLTAGIGSDHVDLKAAAAAGLTVAEVTGSNVVSVAEDELMRILILMRNFLPGYHQAVNGEWNVAGIAHRAYDLEGKTVGTVGAGRIGKLLLQKLKPFSCNLLYSDRLRI

SEQ ID NO: 197170 - protein, 375 aa, Glycine max
  unsure (1)..(375): unsure at all Xaa locations
  Clone ID: PAT_MRT3847_20071C.1.pep
MAMKRAVQSLLASSSTLTRNLHASGEKKKIVGVFYKGNEYASNPNFVGCVERALGIREWLESQGHQYIVTDDKEGPDSELEKHIPDANVIISTPFHPAYITAERIKKAKNLELLLTAGIGSDHVDLKAAAAAGLTVAEITGSNVVSVAEDELLRILVLVRNFLPGYHQAVNGEWNVAGIAHRAYDLEGKTVGTVGAGRIGKLLLQRLKPFNCNLLYYDRLRMNTDLEKEIGAKFEEDLDAMLPKCDVIVINMPLTEQTRGLFDKNXIAKCKKGVVIVNNARGAIMDTQAIADACSSGHVAGYGGDVWPIQPAPKDHPWRYMPNHAMTPHISGTTIDAQLRYAAGVKDMLDRHFKGEDFPEQNYIVKEGQLASQYR

SEQ ID NO: 197171 - protein, 241 aa, Glycine max
  unsure (1)..(241): unsure at all Xaa locations
  Clone ID: PAT_MRT3847_20072C.1.pep
MSDPTLAQPHLVEVHTTLETVVTTHNHNHRPSINASGEKKKIVGVFYKGNEYAKLNPNFVGCVEGALGIREWLESQGHQYIVTDDKEGPDSELEKHIPDAHVIISTPFHPAYVTAERIKKAQKLELLLTAGIGSDHVDLKAAAAAGLTVAEVTGSNVVSVAEDELMRILILMRNFLPGYHQAVKGEWNVAGIAHRAYDLEGKTVGTXVGAGRIGKLXLLQKLKPFNCNLLYFDRLKIDPEL

SEQ ID NO: 197172 - protein, 381 aa, Glycine max
  Clone ID: PAT_MRT3847_20073C.1.pep
MAMMKRAASSALRSLIASSSTFTRNLHASGEKKKIVGVFYKGNEYAKLNPNFVGCVEGALGIREWLESQGHQYIVTDDKEGPDSELEKHIPDAHVIISTPFHPAYVTAERIKKAKNLELLLTAGIGSDHVDLKAAAAAGLTVAEVTGSNVVSVAEDELMRILILMRNFLPGYHQAVNGEWNVAGIAHRAYDLEGKTVGTVGAGRIGKLLLQRLKPFSCNLLYFDRLRIDPELEKEIGAKFEEDLDAMLPKCDVIVINTPLTEQTRGLFDKNRIAKCKKGVLIVNNARGAIADTQAIADACSSGHVAGYSGDVWFPQPAPKDHPWRYMPNHAMTPHISGTTIDAQLRYAAGVKDMLDRHFKGEDFPEQNYIVKEGQLASQYR

SEQ ID NO: 197173 - protein, 77 aa, Glycine max
  Clone ID: PAT_MRT3847_20074C.1.pep
AEPRIRLRSMYLREEVSLGTANCYTGLGLHHTNWLVYTIISYNLHFTPGEDLVLFPLVIGVEGLIYSAAVTPYPLLP

SEQ ID NO: 197174 - protein, 381 aa, Glycine max
  Clone ID: PAT_MRT3847_20075C.1.pep
MAMMKRAASSSVRSLLSSSSTFTRNLHASGEKKKIVGVFYKGNEYAKLNPNFVGCVEGALGIREWLESQGHQYIVTDDKEGPDSELEKHIPDAHVIISTPFHPAYVTAERIKKAQKLELLLTAGIGSDHVDLKAAAAAGLTVAEVTGSNVVSVAEDELMRILILMRNFLPGYHQAVKGEWNVAGIAHRAYDLEGKTVGTVGAGRIGKLLLQRLKPFNCNLLYFDRLRIDPELEKEIGAKFEEDLDAMLPKCDVIVINTPLTEQTRGLFDKNRIAKCKKGVLIVNNARGAIADTQAIADACSSGHVAGYSGDVWFPQPAPKDHPWRYMPNHAMTPHISGTTIDAQLRYAAGVKDMLDRHFKGEDFPEQNYIVKEGQLASQYR

SEQ ID NO: 197175 - protein, 148 aa, Glycine max
  Clone ID: PAT_MRT3847_20076C.1.pep
PRVRFSDNDDRSKTAFASDDGPVDFTVRSMAARVATIDDALLLKTSPLREGWSDWFDKKSVFLRKDRMFRSNFDVLNPLNNPLLQDPDAGAATTGLTRGDRIVQKWWIHEFKKVPFPGIKKKAPLNVNVNTLTKVGIERRTLNHNHNN

SEQ ID NO: 197176 - protein, 69 aa, Glycine max
  Clone ID: PAT_MRT3847_20077C.1.pep
STTRAAALAGTLAPYASSYNASFLTLTTVYRRHAVRYCPTLGMLFSDWRRAPPMPLYPGAGIGSVPLTY

SEQ ID NO: 197177 - protein, 31 aa, Glycine max
  Clone ID: PAT_MRT3847_20078C.1.pep
IQNTVPYLIQQRDRIDDCHKLLTLVLPLFTL

SEQ ID NO: 197178 - protein, 89 aa, Glycine max
  Clone ID: PAT_MRT3847_20079C.1.pep
MEGGFFTPWKNEPWQELASEDVKESEQLISLPPLAEPPTPREPMEFLSRSWSLSASEISKALSEKQKQTFLDNKAPDTLPEPISAPQLA

SEQ ID NO: 197179 - protein, 56 aa, Glycine max
  Clone ID: PAT_MRT3847_2007C.1.pep
SITIFVPLVSLFYPFVFKKNHYYLSKIQGAHSSTILYSNKHLLYVLQNNSTLCLPK

SEQ ID NO: 197180 - protein, 61 aa, Glycine max
  unsure (1)..(61): unsure at all Xaa locations
  Clone ID: PAT_MRT3847_20080C.1.pep
MYIFSCYTRXLRTVKSFMHFYVHVCIFIHLLIFAFVDIFWISLEGYKIKNVLCIGSNDMKE

SEQ ID NO: 197181 - protein, 154 aa, Glycine max
  unsure (1)..(154): unsure at all Xaa locations
  Clone ID: PAT_MRT3847_20081C.1.pep
QKAVFESLKGGNDSMXARQSQIVFGDVQTLMDVSAEATAYLDXVMTYMGEKFSAINEQXFLSQFKSLEIQLTVRDFLNVPPSVKRVTQVKSDLHDVASQARVSSDVEVSSKRKVMEEPLAALRTVGPIHVNCFANQGIRFGSVFASIVLIMLQN

SEQ ID NO: 197182 - protein, 84 aa, Glycine max
  Clone ID: PAT_MRT3847_20082C.1.pep
FICLFMCLDKMIPVHSRDSQHRRSGIILRILGRRARRPPLPLTSIDRILLNLTPPNRHYLHYHLDHDHLKLRRDSRTRISLTFL

SEQ ID NO: 197183 - protein, 100 aa, Glycine max
  Clone ID: PAT_MRT3847_20083C.1.pep
RGTQQNQRTSLKNWQAQPKSPKTFNHELNNNNNNHKGNPTKPTPKRLILITNFPIHKKKPCGQLLKNVKLPQHSGRKPHVPQSTRKIHLFSHMQTLEPIS

SEQ ID NO: 197184 - protein, 64 aa, Glycine max
  unsure (1)..(64): unsure at all Xaa locations
  Clone ID: PAT_MRT3847_20084C.1.pep
MDIDLSPQFPNKVYCANCGSYYAWSPSELPMLHQSYICAAKLALNINAFXALPRYSDSSKSLMF

SEQ ID NO: 197185 - protein, 110 aa, Glycine max
  Clone ID: PAT_MRT3847_20085C.1.pep
IEERHHYTVDCVVAIYVGILLWKMTGFIWSHEATSSNRRLTKFEKIQSRLIQASKDSDIDEVRELLKEIELSNEESKNQTGIKYSRLFRSATIVFALVIVVLAFTLTSDG

SEQ ID NO: 197186 - protein, 57 aa, Glycine max
  Clone ID: PAT_MRT3847_20086C.1.pep
LERLEREDDRRARRWRDLAAQVAPPITDKEIITMIVDTLPVFYYEKWWVTHLQVLQI

SEQ ID NO: 197187 - protein, 87 aa, Glycine max
  Clone ID: PAT_MRT3847_20087C.1.pep
CQVCMMNGANPFPFTKNCELSTPSGKTKHGSLISSSTPNWKKEKKKGMVEKNGPFPFLLITFMRQNYSMQAYRKMTQPREENNIGFC

SEQ ID NO: 197188 - protein, 77 aa, Glycine max
  Clone ID: PAT_MRT3847_20088C.1.pep
GFRRHHTTPVSWFGKHVPSKTFPSWTLMAKEREGREPYFQSAMRIPTIQNKISRFPLFLYYKLLFRVIIVLKLWYTV

SEQ ID NO: 197189 - protein, 60 aa, Glycine max
  Clone ID: PAT_MRT3847_20089C.1.pep
WKLFCLKHGRGVNCYLSNSNKREGTRVGKPGKTGGNNLGDQKCTLWGPLGPARNLRGQTH

SEQ ID NO: 197190 - protein, 36 aa, Glycine max
  Clone ID: PAT_MRT3847_2008C.1.pep
MYAQPLASHTLSRSSLYTPTQCKYHEYTVNHTHTSN

SEQ ID NO: 197191 - protein, 44 aa, Glycine max
  Clone ID: PAT_MRT3847_20090C.1.pep
ARAQTLPAIVNFVFDTKQIQRELGGHRCINKTLAPNIPLVLDWA

SEQ ID NO: 197192 - protein, 392 aa, Glycine max
  unsure (1)..(392): unsure at all Xaa locations
  Clone ID: PAT_MRT3847_20091C.1.pep
MSLMGDPADENLETRKEMDVRNLSSSHGQEPYVHKVGIPPRQNLFKEFQSTVKETLFADDPLRSFKDQSKSRKLVLGIEAIFPIIGWGRTYNLTKLRGDLIAGLTIASLCIPQDIGYAKLANLDPQYGLYSSFIPPLIYAVMGSSRDIAIGPVAVVSLLLGTLLQSEIDPIANPVDYRRLAFTATFFAGITQATLGVLRLGFLIDFLSHAAIVGFMGGAAITIALQQLKGFLGIAKFSKKTDVISVMHSVLSSAHHGWNWQTIVIGASFLGFLLYAKYIGKKNPKFFWVPAIAPLISVILSTLFVFLIRADKHGVAIVKHIDKGLNPSSVKEIYFTGDYLGKGFRIGIVAGMIALTEATAIGIKFASMKDYQLDGNKEMVXALGAMNVVEVT

SEQ ID NO: 197193 - protein, 87 aa, Glycine max
  unsure (1)..(87): unsure at all Xaa locations
  Clone ID: PAT_MRT3847_20092C.1.pep
GVWQNDRVEIIANDXGNRTTPSYVAFTDSERLIGDAAKNQVAMNAHNTVFDAKRLIGRKFSDPIVQADIKHWPFKVTSGAGDKPQIT

SEQ ID NO: 197194 - protein, 42 aa, Glycine max
  Clone ID: PAT_MRT3847_20093C.1.pep
ASRLQLFIYELFFKYLSLFCESWRKEDVNELTYSSIIPIQLY

SEQ ID NO: 197195 - protein, 167 aa, Glycine max
  Clone ID: PAT_MRT3847_20094C.1.pep
IRHEGKTFLWVIRPDLVDENTILPYEFVLETKDRGQLSGWCPQEEVLAHPAIGGFLTHSGWNSTIESLCNGVPMICWPFFAEQPTNCRFCCKEWGVGMQIEGDVTRDRVERLVRELMEGQKGKELTMKALEWKKLAEDATILKEGSSFLNYDNMVRQVLLSDNLKST

SEQ ID NO: 197196 - protein, 65 aa, Glycine max
  Clone ID: PAT_MRT3847_20095C.1.pep
FWFKGAPLFQGRGWGPPVVFRFLLPILKKKYFLLGGKKKKKKKKKKKKKKKKKKKKKKKKKKKKK

SEQ ID NO: 197197 - protein, 207 aa, Glycine max
  Clone ID: PAT_MRT3847_20096C.1.pep
MVKHNNVIPNGHFKKHGDNYVMTLTILPARKTRRRLARQKKAVKIFPRPTAGPLRPIVHGQTLKYNMKVRSGRGFSLEELKAVGIPKKLGPTIGISVDHRRKNRSLESLQANVQRLKTYKAKLVVFPRRAHKVKAGDSTPEELANATQVQGSFLPIVREKPTVALVKVTDEMKAFKAYYKLRFERTNKRHYGARLKKAPEPKKKAKK

SEQ ID NO: 197198 - protein, 140 aa, Glycine max
  Clone ID: PAT_MRT3847_20097C.1.pep
EGNSPKARYFAAFVPLVNGLRLLVNGLSLASDEGLIKSVTREGDPLELLRGPLYYVLILILSALVFWRESPIGVISLAMMCAGDGIADIIGRRYGSMKIPYNEHKSLAGSMSMLVFGFLVSIGCVTILSNFSTQLSVFYT

SEQ ID NO: 197199 - protein, 80 aa, Glycine max
  Clone ID: PAT_MRT3847_20098C.1.pep
YRIYFLRLEEYTPAEASNTEEAGLASTLHHMITLIILFSARADSARAFSNISAVYFAVPTLINCPSFSNWLRKLRLMLTN

SEQ ID NO: 197200 - protein, 70 aa, Glycine max
  Clone ID: PAT_MRT3847_20099C.1.pep
FYWDEITFRLWLQLRICNPVCFGWGEEESMKFIFIMEGLCVSEVGCLLRKSQQERALYCAWFCTGLCVDQ

SEQ ID NO: 197201 - protein, 102 aa, Glycine max
  Clone ID: PAT_MRT3847_2009C.1.pep
KKLKNKRKKNKSTRKKKKKKGWQHWLRRAYYLAPSTDEHWALLPSRSPVFCPRLATSFLPARRLYLPLPARWVPMVGLGNSLVVPNFFPFRNFLFLSLAFIP

SEQ ID NO: 197202 - protein, 74 aa, Glycine max
  Clone ID: PAT_MRT3847_200C.1.pep
VEDILLEMDRILRPEGAVIFRDQADVLMQVKGIVKGMRWNTKMVDHEDGPLVSEKVLFAVKQYWVAGDNSTSSA

SEQ ID NO: 197203 - protein, 75 aa, Glycine max
  Clone ID: PAT_MRT3847_20100C.1.pep
FQYHIGRGHIGATMKAKLYHLLEHRASECRYFVIPLWRGSGYTTMFVQGLTKITLLFMCKKSIIVLTFKSKLCYT

SEQ ID NO: 197204 - protein, 41 aa, Glycine max
  Clone ID: PAT_MRT3847_20101C.1.pep
SYFINFSRPQTKAFKFLCLKATVCSCLHSMTLTVRFLILIA

SEQ ID NO: 197205 - protein, 57 aa, Glycine max
  unsure (1)..(57): unsure at all Xaa locations
  Clone ID: PAT_MRT3847_20102C.1.pep
MNMNVLDLLIATKLVACXCLAYNMFTLPMITDYSARTSKVKYTRYMLAVEPRNIYDL

SEQ ID NO: 197206 - protein, 101 aa, Glycine max
  unsure (1)..(101): unsure at all Xaa locations
  Clone ID: PAT_MRT3847_20103C.1.pep
YXTXEXYIIIXXFXXXXFIIMXXDXXXNLXXXLYXXEVXXXXXXDLCXKKKKMXHXVIXXTXXXFYFXMXNXXXXXXGFLXXXLXXGFNXKIIFFXMGAPK

SEQ ID NO: 197207 - protein, 193 aa, Glycine max
  Clone ID: PAT_MRT3847_20104C.1.pep
QRSRSMSVSPDRVRVRGRSPAFNALAANFESSNARNLSTPPPMIRKLYPKSVAQDTAQLATKSSAIAHLTSSFELTSARENLIPRSQKASSVTPKSNPETSDEEGSLSSRIESLTIQEDAKEGEAEDDEGLPVYPHERVNTASTDPVEDIDVTKREAYLSSAEFQEKFGMAKNEFYKLPKWKQNKLKMAVQLF

SEQ ID NO: 197208 - protein, 53 aa, Glycine max
  Clone ID: PAT_MRT3847_20105C.1.pep
LREKNPRNCVNKNKIAFRTRHSCFIIKLYTTPLDNQCEFCFDIFNSQNLFSKF

SEQ ID NO: 197209 - protein, 45 aa, Glycine max
  Clone ID: PAT_MRT3847_20106C.1.pep
HKYYFSWMREEYPKGGPLLCWSSSPSKYYHCVLLYLQTSSLNNTH

SEQ ID NO: 197210 - protein, 327 aa, Glycine max
  unsure (1)..(327): unsure at all Xaa locations
  Clone ID: PAT_MRT3847_20107C.1.pep
MEHLDMVSEVKHQRIKTNGIWIHVAEKGTGPLVLLLHGFPETWYAWRSQINFLAQHGYHVFAPDLRVYGDSDSAIDPTRFTMHHLVVEIMIFHDYFGXNRYLLIDVVXEGITVWHLSLFRHDRVKGFVALSVPYYPRSPTAKTVETIRKLIGDESHVCQFQEPGRAERAFARYDYLTVMKKFLLITRTDILASPPGMELVDFLPTPSVVPSWITEEELMVFADKFQESGFTGPLNYYRAMDLNWELLAPWQGSKITVPTKFIGGDKDIGFETAGTKTFVESDIFKSLVPNLEVVILDAHHFIHQEKAQQVSHEILSFIRKLSPNASI

SEQ ID NO: 197211 - protein, 147 aa, Glycine max
  Clone ID: PAT_MRT3847_20108C.1.pep
LEILRHQGLVKPKIMDRIKSKSEMSLCEKSMQVVVNVIRFSSFSIAQKTLGATSTTKAGPGSDMDPDEEPLVAVPDQFPAASKRSQQPQSRANPTYVIKSAGSIGSTEHLIYQERVPGDVNPKKEQCVDGLASDYISKIRNKLGRGV

SEQ ID NO: 197212 - protein, 65 aa, Glycine max
  Clone ID: PAT_MRT3847_20109C.1.pep
MEENLPPGFRFHPTDEELITCYLTRKVYDSSFTSKAIAVVDLNKCEPWDLPGSLRALSSTLFLLL

SEQ ID NO: 197213 - protein, 54 aa, Glycine max
  Clone ID: PAT_MRT3847_2010C.1.pep
NSRNIRPRQGYNGNSCLWYAHSPSSRHQAELQLIWDVNHLIRGGGSVGTAIMVS

SEQ ID NO: 197214 - protein, 177 aa, Glycine max
  Clone ID: PAT_MRT3847_20110C.1.pep
WKLDVAFLFIFLLSRGDLFVHWEKGRDVFERLLIDSDWAINNGNWMWLSCSSFFYQYNRIYSPTTFGKKYDPNGDYIRHFLPVLKDMPREYIYEPWTAPKSIQTKANCIIGKDYPMPVVSHDSASKECRRKMGEAYALNKELNGLVSEDDLKNLRRKLDESEGQEAGAKRYKQQLIG

SEQ ID NO: 197215 - protein, 89 aa, Glycine max
  Clone ID: PAT_MRT3847_20111C.1.pep
EKKMHHIAEGHFRDKEFFLNLYYGMEFVFFVHVLILIRKVIDPDLSFSFNEWHCVFNWCILIMLSFSFAYCKILHCYKGIRHILDFLYF

SEQ ID NO: 197216 - protein, 91 aa, Glycine max
  unsure (1)..(91): unsure at all Xaa locations
  Clone ID: PAT_MRT3847_20112C.1.pep
WSHGPILCFVESKKKIKKKKKNKKXKKKKKKKIKKKNKKKKIIKKKKIIQKKKRLSSKKKKRSEIWVQFVIRLSTFDRASFHYYVQSHIQF

SEQ ID NO: 197217 - protein, 50 aa, Glycine max
  Clone ID: PAT_MRT3847_20113C.1.pep
LAIINPEAMYSPGRFRVLPCILASILHISHIKGIYSMSYLCLLECYVDHI

SEQ ID NO: 197218 - protein, 73 aa, Glycine max
  unsure (1)..(73): unsure at all Xaa locations
  Clone ID: PAT_MRT3847_20114C.1.pep
EPKTSAHSSSFQKIQTKPLSPTTWRTPSRTTRISPKVSVMKPNTKSFFPQPCPDADFLPLWSLCGMSXXTYLR

SEQ ID NO: 197219 - protein, 65 aa, Glycine max
  Clone ID: PAT_MRT3847_20115C.1.pep
FQEGFPSSLYDVLLLWGGGGGGGGGGGGYKKIGPEIGESTYRKIGRGYTLRVIGLFWPVKIREKR

SEQ ID NO: 197220 - protein, 75 aa, Glycine max
  Clone ID: PAT_MRT3847_20116C.1.pep
LVTRMASLAQFQTYSSTASRKNRISFLSYDVYQSMCLSFPPRFTMRKLSTNCIWYKTHSHTDCCIMKKKLVPKQE

SEQ ID NO: 197221 - protein, 118 aa, Glycine max
  Clone ID: PAT_MRT3847_20117C.1.pep
MTLLGSLWLILVAALLGYAFLLGLLRRVNEWYYVSRLQGKLQHPLPPGHLGWPLLGNMPTFLRAFKSNPDSFIYDLVSRYGRTGMYRTYLFGSPSIIVCTPETCRKVLTDDENLKLGY

SEQ ID NO: 197222 - protein, 82 aa, Glycine max
  unsure (1)..(82): unsure at all Xaa locations
  Clone ID: PAT_MRT3847_20118C.1.pep
RSSDWKAAKTYQDSKVIYNGRVEGFNSGGLLVRFYSVMGFLPFPQLSPVHASKEPEKSIQEIAQGLIGSIMSVXGILADEDN

SEQ ID NO: 197223 - protein, 113 aa, Glycine max
  Clone ID: PAT_MRT3847_20119C.1.pep
LQRGQNWGPKKHFFFYQEKKASNSPTNQRIGRLPNKREQLKKEQGMGPFGGFWAPQKKNWKGAGAILKGLIRGDLPTPKRDKRAIFPLNKRLILQEKGGGQNSPLQNKKQKGG

SEQ ID NO: 197224 - protein, 244 aa, Glycine max
  unsure (1)..(244): unsure at all Xaa locations
  Clone ID: PAT_MRT3847_2011C.1.pep
PRVRAIIHRDIKASNILLDXEFEPKVSDFGLAKIFPNNDRCISHLTTRVMGTFGYLAPEYASSGKLTDKSDVYSYGIMLLELITGHPPITTAGSRNESLVDWARPLLAQALQDGDFDNLVDPRLQKSYEADEMERMITCAAACVRHSARLRPRMSQIVGALEGVVSLTDLVGDVTTGLTTDTVYNWSNILDYDAGHYQQDMRNFNLALSCHKYSSSGYSETTSAYGLHSSGSSSEAQQSFRDIV

SEQ ID NO: 197225 - protein, 74 aa, Glycine max
  unsure (1)..(74): unsure at all Xaa locations
  Clone ID: PAT_MRT3847_20120C.1.pep
KSQLFLFSTLKNKNPWFSFLSILGMLHGTGKCFSCQNYTYLHTYFAQXXLNFXXXFCYVHFWITQFKFLNFFLH

SEQ ID NO: 197226 - protein, 126 aa, Glycine max
  Clone ID: PAT_MRT3847_20121C.1.pep
RYLQTHVVQPFTHACRCHLRCGVQPQQPLIKPRPKNLPPFSTWTSFTLCLPHSRVSFVISIWTSFIYFLSILNLPVMLFLPLKRLLPLFHRSCSSNKQPSFTPPPPPPPPPKEGGRHTVMTGNLPG

SEQ ID NO: 197227 - protein, 56 aa, Glycine max
  Clone ID: PAT_MRT3847_20122C.1.pep
PGLITLAIPVNKPGRFESFFLSSTDSRRSYLPGFTRNILEASYDTTFEEINKVLIT

SEQ ID NO: 197228 - protein, 596 aa, Glycine max
  unsure (1)..(596): unsure at all Xaa locations
  Clone ID: PAT_MRT3847_20123C.1.pep
MAVDSAISSPLGPPACEKDAKALRFIEEMTRNADAVQERVLEEILTRNAQTEYLKRFELDGAADRQAFKSKIPVITYEDVQPEIQRIANGDRSPILSAHPISEFLTSSGTSAGERKLMPTIKEELDRRQLLYSLLMPVMNLYVXPGLDKGKGLYFLFVKSETRTPGGLLARPVLTSYYKSDHFKTRPYDPYNVYTSPNEAILCSDSFQSMYTQMLCGLIERHHVLRLGAVFASGLLRAIRFLQLNWPELAHDIQTGTLNSRITDPAIRSYMDKVLKSDPELAQFVTQQCSKDNWEGIITRIWPNTKYLDVIVTGAMAQYIPTLNYYSGGGLPLACTMYASSECYFGLNLNPMCKPSEVSYTIMPNMAYFEFLPHDPKPGSTSSKLVELADVEVGKEYELVITTYAGLYRYRVGDILRVTGFHNSAPQFHFVRRKNVLLSIDSDKTDESELQKGIENASKLLSEFNTSVVEYTSYADTTTIPGHYVIYWELLTKDSTNSPSHEVLNRCCLEMEECLNSVYRQCRVADHSIGPLEIRVVRNGTFEELMDYAISRGASINQYKVPRCVNFTPIMELLDSRVVSVHFSQELPHWTPERRR

SEQ ID NO: 197229 - protein, 199 aa, Glycine max
  Clone ID: PAT_MRT3847_20124C.1.pep
MRYYSQFKHLSHFLKTLTRRPQNPTFASARISQNLPPRPSHARDYCSSGGASLSQGSEKVAAIVDEVMGLTLLEVMDLVEVMREKRGVNELPIAMLMVPGMGVPRGIPRGAAKGGGAATGGAEVKAAEKTAFDVKLEGFDAAAKIKVIKEVRTFTSLGLKEAKDLVEKVPAVLKKGVTKEEAESIIAKMKEVGAKVSME

SEQ ID NO: 197230 - protein, 101 aa, Glycine max
  Clone ID: PAT_MRT3847_20125C.1.pep
TKKGDYFPYPKKKQGHNFFFIPHPRGGRPNFPKKNPPPGLKTLKGLILEPLLKEETPLQKKAGAANTCLALGRWNSPFFAPTTLSPILPFFKKRKGGLAPK

SEQ ID NO: 197231 - protein, 98 aa, Glycine max
  Clone ID: PAT_MRT3847_20126C.1.pep
MAMFLVDRKDRYKLVFIPQGSGMQLCAKGFPVGFMSTVVGLLLEWITHGLDRVTMVSVHRVVMIFALLVLFLPVNHVVCLEPRQSGYGIRGSWPSIWN

SEQ ID NO: 197232 - protein, 48 aa, Glycine max
  Clone ID: PAT_MRT3847_20127C.1.pep
GVYLLGKNIKLNKAALLSVHIKLPFWQLKQPCVTDFNLQNYVPLFIVC

SEQ ID NO: 197233 - protein, 96 aa, Glycine max
  unsure (1)..(96): unsure at all Xaa locations
  Clone ID: PAT_MRT3847_20128C.1.pep
PAWVTPLPPMSPVRLQVRSXPHKRVVAXKSPXXPFTSPKXCCPRSYGTPQPRNPPVYSKIFKTACPKPSSYAYDAPTRIVPCKKGKYFLPFCPHRP

SEQ ID NO: 197234 - protein, 192 aa, Glycine max
  Clone ID: PAT_MRT3847_20129C.1.pep
MAASSYAMQSILANPLIRISSGSRVNQFGVPALHMRRNVGLRVRSMAKEEQPSEPATPVTPPPSVEPKPQPVSAPSPKVSTKFSDVLAFSGPAPERINGRLAMIGFVAAMAVEVAKGQGVLEQISNGGIPWFLGTSVVLTLASLIPLFQGVSVESKSKGFMSSDAELWNGRFAMLGLIALAFTEYVKGSTLV

SEQ ID NO: 197235 - protein, 62 aa, Glycine max
  unsure (1)..(62): unsure at all Xaa locations
  Clone ID: PAT_MRT3847_2012C.1.pep
LNMKTLTQALAKTAXVIDKTVQTKEQEVTVPNALNDYQLIDQILSAXTGLNWRLYSMRTRDT

SEQ ID NO: 197236 - protein, 53 aa, Glycine max
  Clone ID: PAT_MRT3847_20130C.1.pep
FSPASSNSMAPAYFTYIGKESLCTFLWEVSLSILTNYPCFLPSSLDKKKYILP

SEQ ID NO: 197237 - protein, 128 aa, Glycine max
  Clone ID: PAT_MRT3847_20131C.1.pep
NESEIYDLMQSADVDNSGTIDYGEFIAATLHLNKVEREDHLVAAFAYFDKDGSGYITQDELQQACEEFGIGDVRLEEMIREADQDNDGRIDYNEFVAMMQKGNADLGKRVRKGSTSFRVGFREALPVC

SEQ ID NO: 197238 - protein, 66 aa, Glycine max
  Clone ID: PAT_MRT3847_20132C.1.pep
ALVLAFVVYRLRPQSPFTDLRLIAHRTAHGGERRNAYPWLLYSNIKTFNRSVASGDGCCVVTGNNH

SEQ ID NO: 197239 - protein, 43 aa, Glycine max
  Clone ID: PAT_MRT3847_20133C.1.pep
RFCREFAAATCKLCAPSGNFMGTSDECPCYRDMKNSKGKAKCP

SEQ ID NO: 197240 - protein, 52 aa, Glycine max
  Clone ID: PAT_MRT3847_20134C.1.pep
MTGGIEVWALPASPPKPLKWKFSQVFGDRPAGREVQEGVLISVLEFARFGDH

SEQ ID NO: 197241 - protein, 74 aa, Glycine max
  Clone ID: PAT_MRT3847_20135C.1.pep
KTTPFLFCFDSILCVRALAERRHSQGLSLLHTNLCIYPKLNDLMESSRDKQKSSCYNGEPILHETALRSRIENV

SEQ ID NO: 197242 - protein, 126 aa, Glycine max
  Clone ID: PAT_MRT3847_20136C.1.pep
MAYEITEIKKIGIGLIGFGIFFAFLGIILFFDRGLLALGNIFSLAGVAILLGWRSTWALFTYRANFKGSASFLLGLFFICVRWPIVGIILEIYSCVFLFSGFWSSIKVFLYHIPVVGWIIQFISPP

SEQ ID NO: 197243 - protein, 67 aa, Glycine max
  Clone ID: PAT_MRT3847_20137C.1.pep
LITSFLNSMRLQNLFYTLLLMLLVAVDFGHLSKCSSTISLLLDGLYSLSLLLDCHRRDLTDSLLVYG

SEQ ID NO: 197244 - protein, 80 aa, Glycine max
  Clone ID: PAT_MRT3847_20138C.1.pep
MITARFPLLLLGVVFLASNSVSFGIAYWEKQNPIHNKCLLSCNIEKDSYKNQSCHARCNLLKVEEEEQCEKCQIPRPRPQ

SEQ ID NO: 197245 - protein, 126 aa, Glycine max
  unsure (1)..(126): unsure at all Xaa locations
  Clone ID: PAT_MRT3847_20139C.1.pep
LYASAPLHLLPSNTQESFSVRALQSETQTYQVIXPFYGDPFIATHETTVTSTPXIAWYLSNLPAYTTAGSPLLRRIXVGLTHHYLLVGSSVKDRPLMNTEIASQASSIASGALEVILSTVLTIYGI

SEQ ID NO: 197246 - protein, 123 aa, Glycine max
  unsure (1)..(123): unsure at all Xaa locations
  Clone ID: PAT_MRT3847_2013C.1.pep
RQALTFRDVPTELNYDAVDTATGNFSIRYLIGTGGFGSTYNVELSPGFLVAIKRLSIGRFHGIQQFETEIRTLGRIRHXNLVTLDGYYVRKAEMFLIYNYLSGGNLEAFIHDRSRKNVQWPVI

SEQ ID NO: 197247 - protein, 57 aa, Glycine max
  Clone ID: PAT_MRT3847_20140C.1.pep
QRHVAIITVAILDANEHLSIQNRCLFRGSSNYQQFIVRIFQHAKRFTLTLHCLFINL

SEQ ID NO: 197248 - protein, 88 aa, Glycine max
  unsure (1)..(88): unsure at all Xaa locations
  Clone ID: PAT_MRT3847_20141C.1.pep
KSISSEDKPFNLRSRDPIYSNKLGKLFEITPEKNPQLRDWMPPQWCGYERRSSFSANFNSKXHSGTHDNEGXRNIELLALRKQQGSNR

SEQ ID NO: 197249 - protein, 48 aa, Glycine max
  Clone ID: PAT_MRT3847_20142C.1.pep
FICYKHFFRLILYFNFQKILTNVLFTFIKEYIFAVPKKKEDYIFFGLV

SEQ ID NO: 197250 - protein, 106 aa, Glycine max
  Clone ID: PAT_MRT3847_20143C.1.pep
YFRSINLICVQNMTMIALHSHIMDSGYLHSNLHSGNNKRRQRTQQNSFVLTTSGTSLTDQRLYSSKLHHSLRRNRNPTGGLESRAYTDRVLDDTDKGRTGWSRAII

SEQ ID NO: 197251 - protein, 110 aa, Glycine max
  Clone ID: PAT_MRT3847_20144C.1.pep
LLQMSVYANGVSVLKPGDEIPTFIAHPAPCYPERIFWPFHQHNNTLSLFLFPTPSPLFLSTKFERRFEHRQKFCILHQGLDSFFVKSRLFFGVCLPFIFTSGALFPVYDM

SEQ ID NO: 197252 - protein, 60 aa, Glycine max
  Clone ID: PAT_MRT3847_20145C.1.pep
KKTASKMIRFQIFDPITKHPQTKLKGCSIWFKGHKKFQTLTKTSYFLTGARTLGWEPSFF

SEQ ID NO: 197253 - protein, 84 aa, Glycine max
  Clone ID: PAT_MRT3847_20146C.1.pep
SQENGPISTRIMYMSQKHIPLSSRRSTMLVACRIRRTAIDQKGGRHVYAILYMARGAIQKRLKEGKLYEIEGLAEWKPFTLPGI

SEQ ID NO: 197254 - protein, 70 aa, Glycine max
  Clone ID: PAT_MRT3847_20147C.1.pep
LPNHGVPQDTVPQVGDTLHPPPYASSSLCQSLIVRPKNQEAGASATDGKLLVLDLFKDVSYQTYVGHVSF

SEQ ID NO: 197255 - protein, 118 aa, Glycine max
  Clone ID: PAT_MRT3847_20148C.1.pep
SGASNMLSKEGFHPISSSTFCSLLPLSISSSICSSLTPPLSFSSSISHFSSSFVSTTFMLRPFFTNPPLSSSPSSCCCFSPMVYVSMQLAMILNLQASRSSDSVSIYQYEHAAGYPPH

SEQ ID NO: 197256 - protein, 99 aa, Glycine max
  Clone ID: PAT_MRT3847_20149C.1.pep
MVLIGSHNQFVDSVCSIVVKGHWGNLLKVKNASALTSSTIHKVLLQLSLYGYGLSHSFPFFKWLDSIPHYSHSLQCSWAMIHILTEHKHFKTAQHVLEK

SEQ ID NO: 197257 - protein, 183 aa, Glycine max
  Clone ID: PAT_MRT3847_2014C.1.pep
MSQSTQSQPTQQRLYDFAKMALINIFAHPYATVCDLYCGDADADKWAHAQIGHYIGIDAPSSGIDQMRETWETHRKSYTAEFFELDPCTENIETHLEEKTNMTDVVCCLQHLQLCFETEEKARKLLHNVSSLLKPGGYFLGITPDSSTIWYESSQRPIILACSLSLLYSFLFALLMEENSFDL

SEQ ID NO: 197258 - protein, 296 aa, Glycine max
  Clone ID: PAT_MRT3847_20150C.1.pep
MEDDDEFGDLYTDVLRPFASSPSLSSAPQPHQPSPAPPSLDLSPNPDDAQIPCDAPHANSPAPTNPLPEPDPREAPTEPPIIPDAKPTTDSNLAAAAVAVDPMDREVKFDIEEDEEDGGEPVIPGLTGELAAPTEGEGDDWDSDSEDDLKIVLNENNHMAMERGGMADGDEEEEDGDEELVIVAGGDPNQGAEEPEWGENATLAAGDGERKDAAGELAKAGGAAVPPKIGYSNQGYHPFHSPFKYQYVRPGAALMPGAAASAPGGPPGQIRPLANMAGRGRGDWRPPGIKGGAAMQ

SEQ ID NO: 197259 - protein, 81 aa, Glycine max
  unsure (1)..(81): unsure at all Xaa locations
  Clone ID: PAT_MRT3847_20151C.1.pep
XSGRKFGGXXVLXAYXVNXDXTYKYXEVILVDVAHTAXRNDPRIXWLXNPVHKHRELRGLXSXXXSXRGLRXXGHLYHKNX

SEQ ID NO: 197260 - protein, 61 aa, Glycine max
  Clone ID: PAT_MRT3847_20152C.1.pep
TSLSHTLVTNDTKTMKIFLGYIPNYLRLDWLFAINNIVALGFLQINFSISIYRRRKKMRKE

SEQ ID NO: 197261 - protein, 208 aa, Glycine max
  Clone ID: PAT_MRT3847_20153C.1.pep
MGTMLVPPWLEPLLNTSFFNVCRIHGDAARSECNMFCLDCNENAFCFYCRSSKHKDHQVIQIRRSSYHDVVRVAEIQKVLDISGVQTYVINSARVLFLNERPQPKSGKGVAHICEICGRSLLDPFRFCSLGCKLVGIKRNGDASFTLDAKNEASTMEGMSRRSVSSRHHQEEELREGSQQDMYPATPSPPASNARRRKGIPHRAPFGS

SEQ ID NO: 197262 - protein, 60 aa, Glycine max
  Clone ID: PAT_MRT3847_20154C.1.pep
VSTKARNIFLSNITRDHFKVQCLNDFLCFSNLKDHFNVQRLNDSLRFLNLKHRFKVQRHK

SEQ ID NO: 197263 - protein, 88 aa, Glycine max
  Clone ID: PAT_MRT3847_20155C.1.pep
CFSLIVNNFYHYHYVHYRSIIHPKLVEGVGFDLFDMDLEFEYQEVINSSLFFQQYTPLSLSLSLSLSIYIYIYIYIYIYIFFWVWEHI

SEQ ID NO: 197264 - protein, 103 aa, Glycine max
  Clone ID: PAT_MRT3847_20156C.1.pep
YKKKPKRGSFKRRSGGFKFPILRGAPQTLGAPSLKTRKKNPKKFEFAKSGRCPFLKTNPLFFNWGGKIKKKVFWSRGIKSGPLLSFMGTRGYFFNKGDPLFLW

SEQ ID NO: 197265 - protein, 52 aa, Glycine max
  unsure (1)..(52): unsure at all Xaa locations
  Clone ID: PAT_MRT3847_20157C.1.pep
ASNRVLSHSLLIXLSPFLXFCVTSIGCXVYFLLRHXVWLVSNDVILFLXSAH

SEQ ID NO: 197266 - protein, 85 aa, Glycine max
  Clone ID: PAT_MRT3847_20158C.1.pep
ARGRIETPHLPSLRFVTLFWRFWPFSVSNIRTNFSLTLSVFNSTLRGSIFDLVLTTSLPAFCCRLDLNILCVRFFLLNSVLSVTV

SEQ ID NO: 197267 - protein, 100 aa, Glycine max
  unsure (1)..(100): unsure at all Xaa locations
  Clone ID: PAT_MRT3847_20159C.1.pep
XXXAXSXLXIXLAXXYXXXXHXQICHETNWXXTHXXXLNYVXXXXXLGXRNXAXXXHXSXXVATXXIXXXXLXMTXXQXSQFXWXXLHXIFXYXXRGXXX

SEQ ID NO: 197268 - protein, 126 aa, Glycine max
  Clone ID: PAT_MRT3847_2015C.1.pep
RREMDPDALAKAFVEHYYSTFDTNRNGLANLYQEGSMLTFEGQKIQGASNIVAKLTSLPFQQCHHSISTVDCQPSGVNAGMLVFVSGNLQLAGEQHTLKFSQMFHLIPTPQGSYYVLNDIFRLNYA

SEQ ID NO: 197269 - protein, 89 aa, Glycine max
  Clone ID: PAT_MRT3847_20160C.1.pep
IRQQTGRDARRQHCGPAARLSSSGIAAIILLTGMAARRPYMGMLVLMLTGVMCWSPLCTHPQLSFSVCSATFTSRPDDVRAQYHGHMFG

SEQ ID NO: 197270 - protein, 83 aa, Glycine max
  unsure (1)..(83): unsure at all Xaa locations
  Clone ID: PAT_MRT3847_20161C.1.pep
LHFSITHGHAKTQTPCSQHSQHIQIYHQSTTTKTTISTTSSSSTTTTTTTHSASSKPTILLLPNNTINLXXIXXSXTLFSHHI

SEQ ID NO: 197271 - protein, 56 aa, Glycine max
  Clone ID: PAT_MRT3847_20162C.1.pep
EFQLQLYGSRIRYFLCNFILFYKYHLITMMDRKQQQGKSFCSYLTFGNHKLRCHFH

SEQ ID NO: 197272 - protein, 104 aa, Glycine max
  Clone ID: PAT_MRT3847_20163C.1.pep
MIMEGYNKKVMIVGMVLGMAMIGMANGQYSFCRMPSDGLAACKPSVSGDYPADPSTACCSAIAKADLKCFCRFKDSGLLSMYGVDPNKCMELPVKCKVVDSFHC

SEQ ID NO: 197273 - protein, 56 aa, Glycine max
  Clone ID: PAT_MRT3847_20164C.1.pep
KCNARFTPVKKGRELQLFLASFLFLWAPQGFPFFFREGLMIAIGTVFSISRGSTHV

SEQ ID NO: 197274 - protein, 68 aa, Glycine max
  Clone ID: PAT_MRT3847_20165C.1.pep
STVNHCAANIIVLGCNQYPIDRYLWTTYRKTTSLSICSRQLKHLHNTLEEGLYTLDIFDQLENNVVTY

SEQ ID NO: 197275 - protein, 76 aa, Glycine max
  Clone ID: PAT_MRT3847_20166C.1.pep
VHNYGFPVYIDRLGKGYLYKLIHVTTMDRYVKYHVQDFDKAFNINFPAFTISSKRHIHSSTTILDVQSIFLNNFTK

SEQ ID NO: 197276 - protein, 79 aa, Glycine max
  Clone ID: PAT_MRT3847_20167C.1.pep
SSMAVSLVCMAAHHVDTFYGRNRCKAVSLCISQGLVRRIKSVYSLFILCSQLKGLSLHYDTIWTFENPIGTLQCNMKIK

SEQ ID NO: 197277 - protein, 49 aa, Glycine max
  Clone ID: PAT_MRT3847_20168C.1.pep
PNAALSAALYDIGLYVSRCILLKPRLPLMRAVININISTIKLIASRNWL

SEQ ID NO: 197278 - protein, 93 aa, Glycine max
  Clone ID: PAT_MRT3847_20169C.1.pep
KGIFILENLKFGITTGWCPLENQPNLVKFFWPHLGGEKKLYFSPLIGNQIGPDSFNRYFIHPPGEPIFNFTLGALTYLTCRPKKNLWVFDQFH

SEQ ID NO: 197279 - protein, 179 aa, Glycine max
  Clone ID: PAT_MRT3847_2016C.1.pep
MDPDALAKAFVEHYYSTFDTNRNGLANLYQEGSMLTFEGQKIQGASNIVAKLTSLPFQQCHHSISTVDCQPSGVNAGMLVFVSGNLQLAGEQHTLKFSQIVINAIGVGIYHGEKDELGRFSNELAIDCQFVIENLGLFIIPAFQVATWPESEFNLMFHLIPTPQGSYYVLNDIFRLNYA

SEQ ID NO: 197280 - protein, 106 aa, Glycine max
  Clone ID: PAT_MRT3847_20170C.1.pep
LLPSPQAATPQPGVAALCFAHTDTRLHGLCPLARYPPPCARPHKHSLAPPRALAPPNPPIAPIAPPQLPPVANVLPANPRPRRSGSTPVGDRTLDSSIDIARRCSV

SEQ ID NO: 197281 - protein, 73 aa, Glycine max
  Clone ID: PAT_MRT3847_20171C.1.pep
FLNPKGETPAPQPRRLKPNSFQHMDRHNIHASIMLYTLAMNMKTLTFQAYSDKSAIYYTIAMCYILAVPMQQI

SEQ ID NO: 197282 - protein, 39 aa, Glycine max
  Clone ID: PAT_MRT3847_20172C.1.pep
STYLRHKPSQNLTYQVSARTDFIQTSGNKILAPFQHFVE

SEQ ID NO: 197283 - protein, 44 aa, Glycine max
  Clone ID: PAT_MRT3847_20173C.1.pep
SSPYRKSEVSSQVGQDVVDAWKNLGQHTNCYHGEPVKLEEGRTG

SEQ ID NO: 197284 - protein, 53 aa, Glycine max
  Clone ID: PAT_MRT3847_20174C.1.pep
NQFCQSKHTHNSELLCSVFTNNYSNTINLNVKRNKFARELLAREASLLISSRH

SEQ ID NO: 197285 - protein, 160 aa, Glycine max
  Clone ID: PAT_MRT3847_20175C.1.pep
QRKYFSLMFFKVKTMFWGCCGTDAKTDIRDVDNVINVDLYHKARVDTHLKTEHDTEMQNNYLTTSEGHDETNTKPPKLRLVVLEGDVLQTGKEYVLNGRGNEFGGREKMDSFTYIGRIREAKGTNSVINDIVMNDPTVGERHCMIKYNQNLRKYFIRDQG

SEQ ID NO: 197286 - protein, 137 aa, Glycine max
  Clone ID: PAT_MRT3847_20176C.1.pep
VPRRNPTILSSQGCLTLPVIYCVDGCNINGAFTASSLLEEPSPIAQEMTGADCLARLVPLWLKVAEGEPRIIMLHHPLGPTYCLHNNRIGERDNSSWTNNIRHIDGMEWWTHSSSHISGVYCPHLDYAPSSPFEDLS

SEQ ID NO: 197287 - protein, 81 aa, Glycine max
  unsure (1)..(81): unsure at all Xaa locations
  Clone ID: PAT_MRT3847_20177C.1.pep
KIFYLNPKNFILLHQLXSPFFNFQNLFKFPHLXHLFFFKXPPLFFLTTQLLIFPCLTKNHCLPFYLLSQFNYIKPRIMSLY

SEQ ID NO: 197288 - protein, 50 aa, Glycine max
  Clone ID: PAT_MRT3847_20178C.1.pep
KKKNLYSHFHWINEGAKFSNKASRLKTMLEAAPFHWGKPTINGTIYTNAY

SEQ ID NO: 197289 - protein, 26 aa, Glycine max
  Clone ID: PAT_MRT3847_20179C.1.pep
GIVACWRMFSQCHFSTVNKSSEVLDC

SEQ ID NO: 197290 - protein, 118 aa, Glycine max
  Clone ID: PAT_MRT3847_2017C.1.pep
EVFKDFTGTIRCEDPNPNLYTFVGNLEYERQIYPLDPSQILLRDSKLRNTDYIYGVAIFTGHDSKVMQNSTKSPSKRSTIEKKMDYIIYTLFTVLILISVISSIGFIFKTKYQAPKWW

SEQ ID NO: 197291 - protein, 44 aa, Glycine max
  unsure (1)..(44): unsure at all Xaa locations
  Clone ID: PAT_MRT3847_20180C.1.pep
DHHDHSGQRAKVQVVGWSPFXYYQTSTMQQRRTVEQLGDGSGTY

SEQ ID NO: 197292 - protein, 314 aa, Glycine max
  unsure (1)..(314): unsure at all Xaa locations
  Clone ID: PAT_MRT3847_20181C.1.pep
MGEACIPTVDLSPFLREDEDGKKRAIEAITQACSEYGFFQIVNHGVSLDLVKEAMQQSKTFFXYSDEEKSKSSPSSDAPLPAGYSRQPLHSPDKNEYFLFFSPGSSFNVIPQIPPKFRDVLEEMFVQMSKMGVLLESIINECLGLPTNFLKEFNHDRSWDFLVALRYFPASNNENNGITEHEDGNIVTFVVQDGVGGLQVLKNGDWVPVVPAEGTIVVNVGDVIQVLSNNKFKSATHRVVRAEGRSRYSYVFFHNLRGDKWVEPLPQFTSDIGEPPKYRGFLYKEYQELRMRNKSHPPSRPEDEIHITHYAIDN

SEQ ID NO: 197293 - protein, 119 aa, Glycine max
  Clone ID: PAT_MRT3847_20182C.1.pep
ISFIARTERKKLVLLSLFRALLSLDVLSVVFHQSTTHSPMVSALETSHFNNTCPDYHSAVNPGGWDCIKCLKVSPDCGFCASGANKKPKDFQWKKWRRCWKEEISISSFGREVLAMQKK

SEQ ID NO: 197294 - protein, 182 aa, Glycine max
  Clone ID: PAT_MRT3847_20183C.1.pep
MGRPEPCVLFAQNFVHPHLDEYVDEVMFSEPIVITACEFLEQSASSVAQAVTLVGATSPPSFAIEVFAHCEGETRFRRLCQPFLYSHSSSNVLEVEAVVTSHLVVRGSYRSLSLVIYGNTAEDLGQFNIDIDDNALTDLVDSTEGKLEDLPPALRFTSFTIDDSRSYLNVLPIPVPATDISV

SEQ ID NO: 197295 - protein, 154 aa, Glycine max
  Clone ID: PAT_MRT3847_20184C.1.pep
ILFFDFFILFFLASEGWEELGDRDLKVYAFLLSLDGENPGVALDIAVAGARGKSVSGSKQQKNRRQKNKSQRRLRKKINHTKCKGLTARDPFGKPNRAAPLEKRTPPGGRGRGSRSRGGFWFSPRQRERQNALDRQALKQWKEGDPVNLCKPAK

SEQ ID NO: 197296 - protein, 75 aa, Glycine max
  Clone ID: PAT_MRT3847_20185C.1.pep
LYKKTINVSASKSPLTVRLIAPIYSNNFQPLRTFYYNTLVVSLSIHEDMRAGIESNKIIGLPRKYSSEKGKLKTI

SEQ ID NO: 197297 - protein, 78 aa, Glycine max
  unsure (1)..(78): unsure at all Xaa locations
  Clone ID: PAT_MRT3847_20186C.1.pep
VXXGXXCXXCCXAXRXXXXGXXXWXXXIXXVSXDXXLXXXXWWLLLXAXXXXPXXXLLCXXXXXVLAVXXFXXXSCXX

SEQ ID NO: 197298 - protein, 88 aa, Glycine max
  unsure (1)..(88): unsure at all Xaa locations
  Clone ID: PAT_MRT3847_20187C.1.pep
EYFADGVLMALSFSLAISYTTLGGAPHMFVDAYKYVLADAVXTILFFPXADKVKEYLKXDLSKISVAGDAVPSVMFSAPAASKKNEKK

SEQ ID NO: 197299 - protein, 88 aa, Glycine max
  unsure (1)..(88): unsure at all Xaa locations
  Clone ID: PAT_MRT3847_20188C.1.pep
PEPHSRELILPIEACLAPNGIXMWSSNRANQTTWHQRSPIDNTQQPTPFXDTLSTISHDRETAGYTLMPPFSDPHATARSYANAESSD

SEQ ID NO: 197300 - protein, 74 aa, Glycine max
  Clone ID: PAT_MRT3847_20189C.1.pep
MADPRLEGTQKADLHMFSFGIGPTQKNVGPSVPVGWAWDLKKGAPQAGGAYFIPNRKAAAGIRVRDPKTPAPNP

SEQ ID NO: 197301 - protein, 65 aa, Glycine max
  Clone ID: PAT_MRT3847_2018C.1.pep
GGGGSIFFITINIFILKKAGGGEHQLDGGQKFLVDALNAQMPKLLGENNQELYEKIKRLKNPEPL

SEQ ID NO: 197302 - protein, 106 aa, Glycine max
  Clone ID: PAT_MRT3847_20190C.1.pep
PALSFYRCACGTCQSPPLAVHCTTSSPTGGLIGGSFALRVVPIGCRPLTMAGVRWHGAAIIVPAVSLAPNPNQGCIISVNRRAEFIRPSIRIIVSPCLAQSSRSLH

SEQ ID NO: 197303 - protein, 55 aa, Glycine max
  Clone ID: PAT_MRT3847_20191C.1.pep
VRSVQRINALLNVMHVLYCRTAFDCLRAPTRSAQMCIDHALKYSSRYPSCIVVGH

SEQ ID NO: 197304 - protein, 60 aa, Glycine max
  Clone ID: PAT_MRT3847_20192C.1.pep
KKPPVGGPFKKNKSPKLRVSTWGEPPKLRNWNFTETPLRIHQKRHSTRNLGLPYPASKER

SEQ ID NO: 197305 - protein, 80 aa, Glycine max
  unsure (1)..(80): unsure at all Xaa locations
  Clone ID: PAT_MRT3847_20193C.1.pep
MGIFTFEDEITXPVAPATLYXPQFTNANKIIQKALDSFKIVKNFKENVGPETFRKIPSFKDEKTNLVRHRIKPFNKATLE

SEQ ID NO: 197306 - protein, 77 aa, Glycine max
  Clone ID: PAT_MRT3847_20194C.1.pep
TPKGDSVFEGLHRIATISGGKVREPKEENATLCPHVIDGEHVFGVARIYGSPNDTFIHVTDMSERETLVLLTSGMKS

SEQ ID NO: 197307 - protein, 122 aa, Glycine max
  unsure (1)..(122): unsure at all Xaa locations
  Clone ID: PAT_MRT3847_20195C.1.pep
PQRRGTRRRGQTEQDPRGPHEQSQDSRPHTKSDTXRERSSRTRTRARQGRAPPRGRQKSQNGTPTHHKEPKRETARGRDQRTRPPREAKTRNPNEGKADHTPPGKRKGARTPGARAKATPHR

SEQ ID NO: 197308 - protein, 88 aa, Glycine max
  Clone ID: PAT_MRT3847_20196C.1.pep
NYNWSETRIRNRYLDFFFNVWLTCSLSTSLSLIVYPSARDHYPLPSCLCFFLCTIFLFLEERKETKRNKKQPTPEFRCRLCRRSSPAV

SEQ ID NO: 197309 - protein, 256 aa, Glycine max
  Clone ID: PAT_MRT3847_20197C.1.pep
RGVNPFEPVNHAKSKICTRTRRRKKKRMIDRGKTSVAVVYSDGNREINVGTVVVDPTLNFKSLVTLLSQQIGISPHQLSVYLASVGTDRKIPVTSKLNLAAVRRDGAAHYFFVKRSKRNKKANGSGNGKDAMKKNYPRPPPEKVMLLRRADAGAPPFMPPVLNRAQYERRLMNLHIERQSYLMNMSLGVNGGRESPNNSAAVTAAFPAVCDECLKAKVSGNNRDFHPCVNDAVIVGFRSREGPITRPVKNADKAGT

SEQ ID NO: 197310 - protein, 64 aa, Glycine max
  Clone ID: PAT_MRT3847_20198C.1.pep
SLSGLMINILVQLQRGILRGIKTQADTTLFHLAIKHNCFQILGLYLAEQYTTHFRIYRVDPDTL

SEQ ID NO: 197311 - protein, 51 aa, Glycine max
  Clone ID: PAT_MRT3847_20199C.1.pep
ALVLFNPIDFLLYFLYKGLEYEFNLYALCKFFLHMHPIRIHPITTSSYSLI

SEQ ID NO: 197312 - protein, 48 aa, Glycine max
  Clone ID: PAT_MRT3847_2019C.1.pep
NFSRKKYKIVSCEVNLKKVCQNIIKLNVISYKRNILEGVVFISLEITL

SEQ ID NO: 197313 - protein, 222 aa, Glycine max
  Clone ID: PAT_MRT3847_201C.1.pep
FSLLNDIVVQTNTSSANKNVRALKLSFSGDNSERAKPRHEAKVVDVDLSLLEAIEKSQSAVEALDLRALKKHVLSFERRLKENIEARLKYPNQPDRFADSEVELHEELQKLKVLASAPEFYPDLVSLNVVPSIVDLLNHDNTDIAIDVVQLLQDLTNEDVLDDNDDSARVLVDALVENSALELLVQNLHRLNDSDPDKNAAVYGTLATVDNMLRRFLAIFHG

SEQ ID NO: 197314 - protein, 132 aa, Glycine max
  unsure (1)..(132): unsure at all Xaa locations
  Clone ID: PAT_MRT3847_20200C.1.pep
FPSLXGXPXXTGVLVGLGPXGASVXXEAHSXRXXLPLGPPXXXXXARPWAALXXLWPHSFSSXLXVAPXXPPXLXXXAPLXPXAXXXXLXXXLXETFXXPALSXXLXSFLFLFLXXSSPXFVSXSAACARPP

SEQ ID NO: 197315 - protein, 84 aa, Glycine max
  Clone ID: PAT_MRT3847_20201C.1.pep
RVSLLTPRFCQSVILDPAVCKLDFKLTIPLLVIVKLLAELRLTQAMHMLSNLFFIYRFQIIVSSPFIPYFEHTKVSKAILLWLN

SEQ ID NO: 197316 - protein, 53 aa, Glycine max
  Clone ID: PAT_MRT3847_20202C.1.pep
RRNILKQLTLTKLACFAFAICRFLSFGEMVYSNYRSANESHWLILIIPFPKCN

SEQ ID NO: 197317 - protein, 72 aa, Glycine max
  unsure (1)..(72): unsure at all Xaa locations
  Clone ID: PAT_MRT3847_20203C.1.pep
RYLFRKYLNIAIVKVXNAYKHPNIIAEFIAXQLKNRVSFRKAMKXAXELTXQAGXKGVQVQIAGRIDGXXIX

SEQ ID NO: 197318 - protein, 100 aa, Glycine max
  unsure (1)..(100): unsure at all Xaa locations
  Clone ID: PAT_MRT3847_20204C.1.pep
FRCFWWGVALFGGGLSLGGFVXXSVLVXGXVVXXLGXGVXXXXXXVLLXACGFRVPSFXXGPFLXXXXGXXSPFXPGXVFVXXGGGXVXLXLXXXXRFLX

SEQ ID NO: 197319 - protein, 132 aa, Glycine max
  unsure (1)..(132): unsure at all Xaa locations
  Clone ID: PAT_MRT3847_20205C.1.pep
ALHQQRALSGELGLALDVTNTTRYYAEXIGHIDGIGHVMIICTGRDAGPDDEYCELFCDKICILGSRFLLPLNXIKRYIRVHCTHGLNRTGYMMAHCLVRTESLSVTEAINXYACARHPGFYRHDYIDALYM

SEQ ID NO: 197320 - protein, 352 aa, Glycine max
  Clone ID: PAT_MRT3847_20206C.1.pep
FHAYTLLEPVGVVGHIIPWNFPSIMFVSKVSPCLAAGCTMVLKPAEQTPLSALFYAHLAKLAGIPDGVLNVVPGFGATAGAAICSDMDIDKVSFTGSTEVGREVMRAAANSNLKPVSLELGGKSPFIIFDDAGLDKAVELALMAVVYNKGEVCAAGSRVFVQEGIYDEFEKRLVEKAKAWVVGDPFDPNVQQGPQVDKKQFEKILSYIEHGKREGATLLTGGKRVGNKGYYIEPTIFFNVKEDMLIAQDEIFGPVIALMKFKTIEEAIKSANNSRYGLVAGVVTKSLDTANTMSRSIRAGVVWINCYFAFENDIPYGGCKMSGFGKDFGLEALHKYLHVKSVVTPIYNSPWL

SEQ ID NO: 197321 - protein, 55 aa, Glycine max
  unsure (1)..(55): unsure at all Xaa locations
  Clone ID: PAT_MRT3847_20207C.1.pep
SLFQFLTGKTNISGDQXTKDDIKVNATVDEKPVDTLPYAAKWYHAESSKRAQSFP

SEQ ID NO: 197322 - protein, 51 aa, Glycine max
  Clone ID: PAT_MRT3847_20208C.1.pep
SNNNNYSQKKKKHVGQVPSSFIFIPTSSEFQDLIFDLLRKEPNNFSGSWSR

SEQ ID NO: 197323 - protein, 120 aa, Glycine max
  unsure (1)..(120): unsure at all Xaa locations
  Clone ID: PAT_MRT3847_20209C.1.pep
FDGVFGFPRGPIFSGAPPGFPEKGGALPKVPKVKFLIIVGGAKFRSPPRRGQAFXSLSGPPPPFKGGPVFFPQDGGEPLESCVEPVVFPPPRGXPIPRFDFKGFKPLMGFFERIKKDVSK

SEQ ID NO: 197324 - protein, 107 aa, Glycine max
  unsure (1)..(107): unsure at all Xaa locations
  Clone ID: PAT_MRT3847_2020C.1.pep
LIRMGEGHPYPDTVKYVIEKINDFRALDRSLGYANIPVGTVEPPGTMTGNPTVIDASDVVIINTFGFWGGIAYDGSSNDTTVMTDEFNSYYNSIXFMKSRYGGTMRN

SEQ ID NO: 197325 - protein, 91 aa, Glycine max
  unsure (1)..(91): unsure at all Xaa locations
  Clone ID: PAT_MRT3847_20210C.1.pep
LTNDSLLFHVRQSWVRRHTFTRXLLEESGSDPTQISVSTKLLGRGCSLVSXYKPPPVDLWCSNYRRYISTDLPLQRPSSNNVICCVNSCHP

SEQ ID NO: 197326 - protein, 52 aa, Glycine max
  Clone ID: PAT_MRT3847_20211C.1.pep
FGNIVNATIKFVVLVDQRVQVGKIKEKLALKCSHVELYSAGSTHVRFGSSIV

SEQ ID NO: 197327 - protein, 101 aa, Glycine max
  Clone ID: PAT_MRT3847_20212C.1.pep
SREGISAVVQVVSSRFYIHPPGLVHRLNSNLRCEIRIFDYKRLTAYFNATKFRNRRRYVYLIPVFALDPSCHLNIETLMTTLISGIDLVKQLDVSRGAEWL

SEQ ID NO: 197328 - protein, 59 aa, Glycine max
  Clone ID: PAT_MRT3847_20213C.1.pep
CDFACSVEINVILIICQILDDKQFNRVQYGIMNSSSSVVFKSGLHMVHSGYDIVTRYYN

SEQ ID NO: 197329 - protein, 98 aa, Glycine max
  unsure (1)..(98): unsure at all Xaa locations
  Clone ID: PAT_MRT3847_20214C.1.pep
WSLPYHIKYLGPFSVXPPSYLTVDFPGHYGWDTAGLSVDPDTFARNRELELIHSTWAMLVALGCVFPXLLSANRVKLGYAEWFKVRSHIFNYGGLDYL

SEQ ID NO: 197330 - protein, 68 aa, Glycine max
  Clone ID: PAT_MRT3847_20215C.1.pep
GYTRMTPLCVSLLTFFDYTHNPLIDKYTHLCIYDHDIHNSLHYGLFETSFHQILIQHCTSLTTMIDFR

SEQ ID NO: 197331 - protein, 82 aa, Glycine max
  Clone ID: PAT_MRT3847_20216C.1.pep
MAKHSVAMAKKRWLIMLAAFLSVSTVTVLLMRSNNSDSCNTNHFTIAQDNNQIRSPVQLTNAAFSPLNFMKSKLVLMGSHEL

SEQ ID NO: 197332 - protein, 86 aa, Glycine max
  Clone ID: PAT_MRT3847_20217C.1.pep
MPGGKGKSSGGKSSGGKTSAAEGTKKQQSHSARAGLQFPCGRVKRFLKQNTQQKMRVGAKAAVYVTAGLEYLTAQVLELAGNAAKD

SEQ ID NO: 197333 - protein, 885 aa, Glycine max
  unsure (1)..(885): unsure at all Xaa locations
  Clone ID: PAT_MRT3847_20218C.1.pep
GLRAFPRKTLFSCAELLRSARESARANEELGSWTDLLHSSTKLLEQAAPSAQFPPLQRNLDQLEALSKKLKSKTVRTEAPSQSIAATRLLAREGINAEQLARDLKSFELKTTFEDVFPVEATSVEEYLQQVHEMAMVSAVQEAQKDNLRSFNDYMMKVLEEDWQKEKRDFLQSLSRISTLPRTNIAANSNVGTLPGQLAFVSSTSQVSSGMPSMEIVPLTGRPIVEKKASVYAEVVKKLNQARESGSPFKPAAAFKGAYENLGIDASGGKSVTMRKIWHLVQMLMGEESAVQRVSKRMSLIIGARRHLEWGHEKYIMDTIQSHPAQAALGGGVGNLQRIRAFLRIRLRDYGVLDFDAGDARRQPPVDTTWQQIYFCLRSGYYDEARNVAQSSRASHQFAPLLTEWINKGGMVPEEIAAAASEECERMLITGDRIGRTAYDKKKLLLYAIISGSRRHIDRLLRDQPSLFSTIEDFLWFKLSAVRDCPSGPSSIVLSDGLIPYSLDDLQSYLNKFEPSYYTKNGKDPLVYPYILLLSIQLLPAVLYLSKEAGDEGYNIDAAHLSIVLADHGVLSEGAGSGQKLGVMDAYAEVSTIIRQYGSMYLRLGDLQMALEYYAQAAAAVGGGQLSWTGRGNVDQQRQRNLMLKQLLTELLLRDGGIYLLLGARGAGEEGELGRFVTDPKXRQLFLIEAACHCQEAGMYDKSIEIQXRVGSFSTALDTINKCLSEAICALFRGRLDGESRTAGLIHSGNEILETYTYYPDASLQEREHVLEQQTVLRQLESILSIHKLVRLGHYVDALREVAKLPFIPLDPRGPDIAVDVLENLSPHVQACIPDLLKAALTCLDNVTDSDGSLRALRAKIASFIANNLKRNWPRDLYESVAQRL

SEQ ID NO: 197334 - protein, 83 aa, Glycine max
  Clone ID: PAT_MRT3847_20219C.1.pep
KSTSLTKLDRLYTCILEFLYQCHIKVIVIYLPLLSTCLTTKALLAVSSLEKISIQTLYVFSFFYSLLGMNFRLNCSYSYFSYL

SEQ ID NO: 197335 - protein, 66 aa, Glycine max
  Clone ID: PAT_MRT3847_2021C.1.pep
TTRHDYDDDADDSSSSHFLSPFTVLIEFYSVEQTLLLFIACLCRFTTSLRRIRKHSSLLIRSERFH

SEQ ID NO: 197336 - protein, 101 aa, Glycine max
  unsure (1)..(101): unsure at all Xaa locations
  Clone ID: PAT_MRT3847_20220C.1.pep
GRHEGIKLGVESIWLCIFDDLXGGSNAHGCVIAKGHKEYLRIRLLPNPGSYVNAKGFDFPKKTEVLLTKISPLKQKVQMIEEGAMEEYQSFQKKLGYQYQT

SEQ ID NO: 197337 - protein, 60 aa, Glycine max
  unsure (1)..(60): unsure at all Xaa locations
  Clone ID: PAT_MRT3847_20221C.1.pep
RNLEGKNYYYHYYYYHPYASFCFLLANYVCYICIFLCHRRKIERYVYDIWMMKRKXXXED

SEQ ID NO: 197338 - protein, 52 aa, Glycine max
  Clone ID: PAT_MRT3847_20222C.1.pep
RNCAVIDEQNISLASGTDKSSSQTQNIRMCKRILRKIKPRFSATNQTAPRTR

SEQ ID NO: 197339 - protein, 62 aa, Glycine max
  Clone ID: PAT_MRT3847_20223C.1.pep
RSGQEKYSNLVQSVLSSRGVAQTPGSVEEDALLCGPVSKHKLPNQDVFLQGKRFNEALERLF

SEQ ID NO: 197340 - protein, 360 aa, Glycine max
  unsure (1)..(360): unsure at all Xaa locations
  Clone ID: PAT_MRT3847_20224C.1.pep
MRLLKVATSNLNQWAMDFDCNAKQIKESIAKAKEAGAAIRLGPELEIPGYGCEDHFLELDTVNHSWECLKDLLLGDWTDGIVCSFGMPVIKGSERYNCQVFCLNRKIIMIRPKMSLANDGNYRELRWFTAWKQRDQLVDFQLPPEFSKAIGQNSVPFGYGFIKFQDTAIAAEVCEELFTPTPPHSELALNGVEVFMNASGSHHQLRKLDVRLRAFIGATHTRGGVYIYSNHQGCDGSRLYYDGCASVVVNGDVVAQGSQFSLKDVEVVVAQIDLDVVASLRGSLSSFQEQASCKTKVPSVEVPYRLCLPFNLNTRLSLPLKIKYHTPEEDIALGPGCWLWDYLRRIGCIXFLLTTSGGAD

SEQ ID NO: 197341 - protein, 342 aa, Glycine max
  Clone ID: PAT_MRT3847_20225C.1.pep
MAGSNELNPNDSKMVVPLNMWVLISNFKLAYNLLRRPDGTFNRDLAEFLDRKVPANANPVDRVFSFDVVVDRETNLLTRIYRPTEGEERSVNILDLEKPVSSEVVPVIIFFHGGSFAHSSANSAIYDTLCRRLVGICKAVVVSVNYRLEPENRYPCAYDDGWTALKWVSSTSWLQSRKDKKVHIYMAGDSSGGNIVHHVALKAMESGIEVFGNILLNPLFGGQERTESEKRLDGRYFVGVKDRDWYWRAFLPEGEDRDHHACNPFGPKGKSLEGITFPKSLVVVAGLDLVQDWQLGYAKGLEKAGQEVKLLFLEQATIGFYLLPNNEHFSPVMDEIKYICQL

SEQ ID NO: 197342 - protein, 49 aa, Glycine max
  Clone ID: PAT_MRT3847_20226C.1.pep
TFHDLIGSDILSLLVPSTTDNVVRQRRPPTWSHDMHWHLPCIAVLAEPH

SEQ ID NO: 197343 - protein, 86 aa, Glycine max
  Clone ID: PAT_MRT3847_20227C.1.pep
PDNDKPHLIGIKVTPRNRIRPSSPFWLEVRVGNHNFGGSHKHDLSSLCPKKLSPIRSTQFPHYVLRKNITQLYADYTKSHDTFSSM

SEQ ID NO: 197344 - protein, 344 aa, Glycine max
  Clone ID: PAT_MRT3847_20228C.1.pep
MAGSNELNPNDSKMVVPLNMWVLISNFKLAYNLLRRPDGTFNRDLAEFLDRKVPANANPVDGVFSFDVIVDRETNLLTRIYRLAEGEERSVNILDLEKPVNSEVVPVIIFFHGGSFAHSSANSAIYDTLCRRLVGICKAVVVSVNYRRAPENRYPCAYDDGWTALKWVSSTSWLQSRKDKKVHIYMAGDSSGGNIVHHVALKAMESGIEVFGNILLNPLFGGQERTESEKRLDGRYFVGVKDRDWYWRAFLPEGEDRDHHACNPFGPKGKSLEGITFPKSLVVVAGLDLVQDWQLGYAKGLEKAGQEVKLLFLEQATVGFYLLPNNEHFSPVMDEIKYFVGSDC

SEQ ID NO: 197345 - protein, 181 aa, Glycine max
  Clone ID: PAT_MRT3847_20229C.1.pep
MSGEMHTDSASSSRAAAASDQRHQQPAAAPLSRYESQKRRDWNTFGQYLKNQTPPVSLSQCNFNHVLEFLRYLDQFGKTKVHLHGCIFFGQPDPPAPCTCPLRQAWGSLDALIGRLRAAYEEHGGSPETNPFGSGAIRVYLREVKECQAKARGIPYIKKKKKKNQLKGPHDAPKSFKQLAT

SEQ ID NO: 197346 - protein, 313 aa, Glycine max
  Clone ID: PAT_MRT3847_2022C.1.pep
MSTFMLKIFLLISIFQISFATRRLNELVQDQTQLLRYHNGPLLSGKISINLIWYGHFKPSQKAIVSDFITSLSPSSPHSTQPSVATWWKTTEKYYHHLSNTKKTSPLSIPLNKQILDENYSLGKSLTSKHLIQLASKGDHKNAINVVLTSADVAVEGFCTSRCGTHGSSSAGHAKNKNYKFAYIWVGNSEAQCPGQCAWPFHQPIYGPQSPPLVAPNNDVGIDGMVINLASLLAGTVTNPFGNGFYQGPAEAPLEAATACPGVYGKGAYPGYAGNLNVDSSTGASYNAHGANGRKYLLPALYDPATSSCSTLV

SEQ ID NO: 197347 - protein, 45 aa, Glycine max
  Clone ID: PAT_MRT3847_20230C.1.pep
KGLVLILEIMVKFGFNAPGPTIKVPMGNHLSLLKFASIFLFFLTV

SEQ ID NO: 197348 - protein, 79 aa, Glycine max
  Clone ID: PAT_MRT3847_20231C.1.pep
TTLFHSATSARIPLPRMMGSMSSRSTMMLNQTTCQEAAFETRLCLTYAMSCVSVFAPLSHLKKIVITNSVCPVCGIKLS

SEQ ID NO: 197349 - protein, 37 aa, Glycine max
  unsure (1)..(37): unsure at all Xaa locations
  Clone ID: PAT_MRT3847_20232C.1.pep
VRPILPPENPKLFDFXIRCQEKVTPYSRSSSRPYETA

SEQ ID NO: 197350 - protein, 180 aa, Glycine max
  Clone ID: PAT_MRT3847_20233C.1.pep
MLANHFQNGIETARLVWSRIPNSEESQLLDDAVGILKKNDGGGVESLDYEVIENFAYREEQAQRGKLYVSYLLVVKWFFALLIGICTGLAAVFINIAVENFAGWKFSVTFNIIQKSYIAGFVVYVLINLALVFSSVYIITQFAPAAAGSGIPEIKGYLNGVDIHGILLFRTLIGKIFGSI

SEQ ID NO: 197351 - protein, 347 aa, Glycine max
  Clone ID: PAT_MRT3847_20234C.1.pep
TVESDDGSAVVATSGESVTEVLKIKEWEVGMFQNEVAASQGIRIRRRPPSGPPLHYVGPFQFRLQNEGNTPRNILEEIVWNKDTEVSQLKERKPLGVLKKALENAPPARDFIGALKAANERTGLPGLIAEVKKASPSRGILREDFDPVEIAKAYEKGGAACLSVLTDEKYFKGSFENLEAIRKAGIKCPLLCKEFIIDAWQLYYARTKGADAVLLIAAVLPDLDIKYMIKICKLLGLTALVEVHDEREFDRVLAIEGIELIGINNRNLETFELDISITKKLLEGERGKIIHERGIIMVGESGLFTPDDIAYVQEAGVKAILVGESIVKQSDPGKGISNLFGKDISLG

SEQ ID NO: 197352 - protein, 104 aa, Glycine max
  Clone ID: PAT_MRT3847_20235C.1.pep
HRRLDGLASLKAPFPATPFLSSRPRTSILPSQASFRKRSSFLSFSVHAQVESDDGSAVVATSGESVTEVLKIKEWEVGMFQNEVAASQGIRIRRRPPSGPPLHY

SEQ ID NO: 197353 - protein, 221 aa, Glycine max
  Clone ID: PAT_MRT3847_20236C.1.pep
MEGLASLRVPFQTTQFHSSRPRTSILPSQAIFFHKRSSFSSFSASAQVESNDGSATVATPGESVTEALKTKEWEVGMFQNEVAASQGIRIRRRPPSGPPLHYVGPFQFRLQNEGNTPRNILEEIVWNKDTEVSHLKERKPLGVLKKALENAPPARDFIGALKAANERTGLPGLIAEVKIASPSRGILRDDYDPVEIAEAYEKCGAACLRVLTDEKYDNGSF

SEQ ID NO: 197354 - protein, 193 aa, Glycine max
  Clone ID: PAT_MRT3847_20237C.1.pep
MEGLASLKAPFPATPFLSSRPRTSILPSQASFRKRSSFLSFSVHAQVESDDGSAVVATSGESVTEVLKIKEWEVGMFQNEVAASQGIRIRRRPPSGPPLHYVGPFQFRLQNEGNTPRNILEEIVWNKDTEVSQLKERKPLGVLKKALENAPPARDFIGALKAANERTGLPGLIAEVKKASPSRGILREDFDPS

SEQ ID NO: 197355 - protein, 86 aa, Glycine max
  Clone ID: PAT_MRT3847_20238C.1.pep
QWFQLPNSRSRRTECIPGIQTTHSCGQKDYSFFKESFLTRGFSKERSIVHLGRGASVRVKSEDNVKCFYTGFTLREMLFELINTRT

SEQ ID NO: 197356 - protein, 46 aa, Glycine max
  unsure (1)..(46): unsure at all Xaa locations
  Clone ID: PAT_MRT3847_20239C.1.pep
MPRPYXXARXXSASRXXASXAGXXVAXXHINXXNVAXXCXXHGXXE

SEQ ID NO: 197357 - protein, 90 aa, Glycine max
  unsure (1)..(90): unsure at all Xaa locations
  Clone ID: PAT_MRT3847_2023C.1.pep
GPARNTGPKTRAENAAAKVLELVENAQTDNKRTRKGPRHKQVADRNHQEASKLMGAGTIAXNGGGAPNIDQNSPPNKGAGNGKTDIGTAT

SEQ ID NO: 197358 - protein, 95 aa, Glycine max
  Clone ID: PAT_MRT3847_20240C.1.pep
HVHLSAESNVPQPNALLLPRICDLPCHSKAARLLFQALPRFHVLLRRRIHDISVSVSAGLMIQMIKRSDVFQYHGTIYELSKESPLAYSVSNCKS

SEQ ID NO: 197359 - protein, 106 aa, Glycine max
  unsure (1)..(106): unsure at all Xaa locations
  Clone ID: PAT_MRT3847_20241C.1.pep
XXXSXXXLXRLXXXPLGLXXXVXXXLIXWEXAXXXXXXLXXXXXSSXXXXXPXXXYXRXXXPVXXXSLXXSVPXXXLXXXXGXXXXXXXXXXCXWGLXXPVXXXFX

SEQ ID NO: 197360 - protein, 82 aa, Glycine max
  unsure (1)..(82): unsure at all Xaa locations
  Clone ID: PAT_MRT3847_20242C.1.pep
FDRENYIFFPYHIGRPFETFSLLKGTFFKALIFTVTIGTLRLHCYSPTLFSINRGIDYYQGRNVIKCPPTVKCAGDTDXXEV

SEQ ID NO: 197361 - protein, 77 aa, Glycine max
  Clone ID: PAT_MRT3847_20243C.1.pep
NNVIIILHANVLITNELITELSLQNINGKSVRKGHNYFKCYVEYLLYQKRYQQCSYKKKCLILLNYSMTSWWLQVYF

SEQ ID NO: 197362 - protein, 76 aa, Glycine max
  unsure (1)..(76): unsure at all Xaa locations
  Clone ID: PAT_MRT3847_20244C.1.pep
RPSLVLHYPAVPPPQPLWHQDMHQAGWXRHSMHRSEIEWEIMNDLRSXMARFQQGMNHMQRMLEEKKTSGVVDASV

SEQ ID NO: 197363 - protein, 35 aa, Glycine max
  Clone ID: PAT_MRT3847_20245C.1.pep
NILVEKFENELPPPNVPPLTQLSFHLIRVYFSSIT

SEQ ID NO: 197364 - protein, 65 aa, Glycine max
  Clone ID: PAT_MRT3847_20246C.1.pep
IAIVRIYMMIESESDCAVILLSAQESLTLMATIRHNKGSMTVPHALEERLSFFIICLKVLLPVTL

SEQ ID NO: 197365 - protein, 65 aa, Glycine max
  Clone ID: PAT_MRT3847_20247C.1.pep
GSSLGNELMFLRTPPLLCVGTFLATTHIITITQAKTVPPILDVSKVNPNQFTRRVWLRDSASWIP

SEQ ID NO: 197366 - protein, 71 aa, Glycine max
  unsure (1)..(71): unsure at all Xaa locations
  Clone ID: PAT_MRT3847_20248C.1.pep
IRRAIYLPXRXXLLXXGEARYAWHHYIPHHKIDKVNGKVIRRASRRVSFTFRKVREGLCKCEFPQYCDSRR

SEQ ID NO: 197367 - protein, 62 aa, Glycine max
  Clone ID: PAT_MRT3847_20249C.1.pep
QTPTSNNSFQITIGEEQPLTINHLPNYPTHIRISQRHENPTTLNSERSKPRMGIGGFRERID

SEQ ID NO: 197368 - protein, 66 aa, Glycine max
  Clone ID: PAT_MRT3847_2024C.1.pep
SRKGIPKFFSIKKRELKWSACVFYYKVRFNQGPAGKKLFINKILCGHGNCFNKKLKCKLLPPQIVL

SEQ ID NO: 197369 - protein, 61 aa, Glycine max
  Clone ID: PAT_MRT3847_20250C.1.pep
QFWKGKANTVPFDNYQATIIFDSFCKIHDYMTILSIKLHDPTIKFTIIHTLTLTILRHNFN

SEQ ID NO: 197370 - protein, 72 aa, Glycine max
  unsure (1)..(72): unsure at all Xaa locations
  Clone ID: PAT_MRT3847_20251C.1.pep
IEERQATGSLWGQTLLYTFMYAPXDYKWLEKHIVLMVPDIVMARDHPMDRIKHVDTEDVTPATGAHEHCLIH

SEQ ID NO: 197371 - protein, 51 aa, Glycine max
  Clone ID: PAT_MRT3847_20252C.1.pep
FSAGVANRGASIRIPRHVGEQGYGYLEDRRPASNVDPYRVTAILVETTLLN

SEQ ID NO: 197372 - protein, 150 aa, Glycine max
  unsure (1)..(150): unsure at all Xaa locations
  Clone ID: PAT_MRT3847_20253C.1.pep
MAPGIANQLPNILRDVGEDARRGRVYLQKMQEEXPQDELAQAGLSDDDIFRGKVTDKWRNFMKGQIQRARMFFDEAEKGVSELNSASRWPVWASLLLYRQILDSIEANDYNNFTKRAYVGKVKKLLSLPAAYGRALLGPQKLTKMVTRSM

SEQ ID NO: 197373 - protein, 112 aa, Glycine max
  Clone ID: PAT_MRT3847_20254C.1.pep
ALDEAVELFEEARVILEQENGPYHPETLGVYGNLAGTYDAIGRLDEAIEILENIVVMREEKLGTANPDVVDEKRRLDELLKETGRVRNRKTKSLEILFDANPRTIKNLVVEA

SEQ ID NO: 197374 - protein, 149 aa, Glycine max
  unsure (1)..(149): unsure at all Xaa locations
  Clone ID: PAT_MRT3847_20255C.1.pep
LEVFNDGYEFDYLILLPNSLNQNPSSLSSAKPHFSLHSPKSFSKPITFHRFQPSPPPSSSSPSASLQPIEDLPPKLQXQSVPEPKAKYEQLIFYGKNLKPLEPQFKTNDNKVQGCVSQVWVRAYLDPNRNVVYEADSDSGLTKGLAALL

SEQ ID NO: 197375 - protein, 275 aa, Glycine max
  Clone ID: PAT_MRT3847_20256C.1.pep
YGCEKTTEGGTKQQIFMAFFILSFLFLLLVSSATACDRCLYQSKASYFSKASALSSGACGYGSLALDISGGHLAAGVDSLFKNGAGCGACFQIRCKNPTLCSKEGTKVVLTDLNHNNQTDFVLSSRAFAGMAQKGMGQQILKLGIAEIEYKRVPCDYKNQNLAVRVEESSKKPDYLAIKFLYQGGQTEIVAVDVAQVGSSNWSFMSRNHGAVWDTSRVPQGALQFRLVVTAGYDGKWIWAKKVLPADWKNGLIYDSGLQITDIAQEACSPCDDGT

SEQ ID NO: 197376 - protein, 120 aa, Glycine max
  Clone ID: PAT_MRT3847_20257C.1.pep
DYKNQNLAVRVEESSKKPDYLAIKFLYQGGQTEIVAVDVAQVGSSNWSFMSRNHGAVWDTSRVPQGALQFRLVVTAGYDGKWIWAKKVLPADWKNGLIYDSGLQITDIAQEACSPCDDGT

SEQ ID NO: 197377 - protein, 101 aa, Glycine max
  Clone ID: PAT_MRT3847_20258C.1.pep
EIELAGACGYGSLALDISGGHLAAGVDSLFKNGAGCGACFQIRCKNPTLCSKEGTKVVLTDLNHNNQTDFVLSSRAFAGMAQKGMGQQILKLGIAEIEYKR

SEQ ID NO: 197378 - protein, 46 aa, Glycine max
  Clone ID: PAT_MRT3847_20259C.1.pep
RVHQLLIGSSNLSFFNLEGLISKTVVLTLSFMRIHALTQVPSLKPG

SEQ ID NO: 197379 - protein, 56 aa, Glycine max
  Clone ID: PAT_MRT3847_2025C.1.pep
KCICKFFSFEHHNFYFTINYDLHEGLIEAFLRKINYKKGRPLLTLSVVRELNSGRF

SEQ ID NO: 197380 - protein, 45 aa, Glycine max
  Clone ID: PAT_MRT3847_20260C.1.pep
PRIIDPPIISFHCIDPPIISFYCIDPPVIIRGKNLTMNKMLYKTV

SEQ ID NO: 197381 - protein, 99 aa, Glycine max
  Clone ID: PAT_MRT3847_20261C.1.pep
SIQIHNHTLINPLKVPKFLANKMRLSKPTLLLFLVFIFTTVQGQAVTNERVVGSESVVSFELRRSGGCEKQGFEYREGNGGLEDTVLENEDYIYTNSLP

SEQ ID NO: 197382 - protein, 99 aa, Glycine max
  Clone ID: PAT_MRT3847_20262C.1.pep
HCRVLFLQTKRTKKAGIVGKYGTRYGASLRKQIKKMEVSQHSKFFCEFCGKYAVKRKAVGIWGCKDCGKVKAGGAYTLNTASAVTVRSTIRRLREQTES

SEQ ID NO: 197383 - protein, 204 aa, Glycine max
  Clone ID: PAT_MRT3847_20263C.1.pep
MSADQHPEAAQPSPTRRLRHLFDGDETNVYNSEFCNLCAGTPGPDLLRRCVDIFEEATAHRMAHERKDAFLFQNGATDGPWDLREELSRFLSKRYDDQLNADDLVLTCGASHGLQLILNSYIEPDGVIFVEEVTYMIAIADFREISGMKIVSVPFCDTGVVASELERLAREEKAKRGDRSTGKPFWGVVYSIPVYHNPTRVGHQ

SEQ ID NO: 197384 - protein, 83 aa, Glycine max
  unsure (1)..(83): unsure at all Xaa locations
  Clone ID: PAT_MRT3847_20264C.1.pep
MSLKNSMMLLKVCXLLVFLAGVTDARMALSSFKSDQSSSYDDDEYSKPCCDLCMCTRSMPTQCSCEDITLNLXHSHCKSCMCT

SEQ ID NO: 197385 - protein, 250 aa, Glycine max
  Clone ID: PAT_MRT3847_20265C.1.pep
RHEQMPVLTMDYSSPLQWRNRGKVVVAESESISLWDVNSLTPQALLSVPTGGQKVSALHVSNTDAELGGGVRKRVSSSDAEGNDGVFCTSDSINVLDFRQPSGVGLRISKHGVNVQSVFSRGDSVFLGCSSTSSTGKKQTSLLQQFSLRRQGLFTTYALPESNAHSHHAAISQVWGNSDFVMGVCGLGLFVFDTVKDDALRVLNMDYSSDQSFREVIGPDDMYCPSFDYLGSRALLISRDRPAMWRHLIV

SEQ ID NO: 197386 - protein, 56 aa, Glycine max
  Clone ID: PAT_MRT3847_20266C.1.pep
DLKNKGYSIKFHKQTWKVKNTIKLYKVTNSQISPIKKLNCNTFLCSTHTNPHTHKI

SEQ ID NO: 197387 - protein, 59 aa, Glycine max
  Clone ID: PAT_MRT3847_20267C.1.pep
KIKCYFCLLRLEASLNDLVKLQQVASITDKRVATIIEDLLTLASTILELLQDTRQGSEY

SEQ ID NO: 197388 - protein, 80 aa, Glycine max
  Clone ID: PAT_MRT3847_20268C.1.pep
ESFSLTLSLISNSIVYSRLSNSGTESDSRSLWPAQRVVFIALIFRLQSSRQRFRDSLNQVSNPVVSANEVRLPVLERVSA

SEQ ID NO: 197389 - protein, 62 aa, Glycine max
  Clone ID: PAT_MRT3847_20269C.1.pep
AKHFGSLTMGPDQVSLSLGHFVFFRGINYMGNVFKKLAPPASNIWMVFTQMLLSTVPIGRDA

SEQ ID NO: 197390 - protein, 162 aa, Glycine max
  Clone ID: PAT_MRT3847_2026C.1.pep
SYYEGERLTNLLQSIRRGIQSARHLDGSSLPEKIWLKQQFSIGVNDVTRVLERMKPCTELESSTELISLRSNHTASSVKLQAVLVASDCNPRWLTKHLLSLASSRNVPLVFVRDTKQGSLRLGELVQLKTAIAIGIKVKGSTINKIIQQVIQGDRFELSPEG

SEQ ID NO: 197391 - protein, 174 aa, Glycine max
  unsure (1)..(174): unsure at all Xaa locations
  Clone ID: PAT_MRT3847_20270C.1.pep
MGISFSCPFAKYNDVEDGLDSVVVKSINFGNDEIKTPMRSVSFKNDDLEPTILKSLGSGKMTVETSVSFKRKDIDNIISTNTLSFDQEENMPISRTSKKSKEMDDLPFKSECQVETIQSALLNPNSPKHIAALKLQKVYKSFRTRRKLADCALLAEQSWWXKLLDFAELKRSSI

SEQ ID NO: 197392 - protein, 61 aa, Glycine max
  Clone ID: PAT_MRT3847_20271C.1.pep
RLSFHIVNTEQGLLYIIPLIIVCCFIVPFFYCSFFHFCFYLYFFLSFRFFSCFSNAFSLTT

SEQ ID NO: 197393 - protein, 103 aa, Glycine max
  Clone ID: PAT_MRT3847_20272C.1.pep
ESNLSKSSVGSAKSFSSDCELDQGPLQPAPLFKDPNQSSERHRYLPNEESHGRMKSPCYLSFLVGGQKIFSPIDRQRNPMALLFSCGHLVNLGARVKIVNKLK

SEQ ID NO: 197394 - protein, 47 aa, Glycine max
  Clone ID: PAT_MRT3847_20273C.1.pep
VHIGSNAFKQASMLLALLAGGDGHRVKEKTRSLMVGWHGRPLIATTA

SEQ ID NO: 197395 - protein, 43 aa, Glycine max
  Clone ID: PAT_MRT3847_20274C.1.pep
SGRFHLFILIYSLKRISTTIPFTPSKLNIGEGHHVLLQKKIKN

SEQ ID NO: 197396 - protein, 131 aa, Glycine max
  Clone ID: PAT_MRT3847_20275C.1.pep
KYNTNPLLVCFSSCTIMPNWVPFNPLQGNHHFLHFFFRGPQPHSHCFQPLVSFPLLLSPGFQVNKWAISSCRKTALPLGGGQSFPRPHGGGPVASPPLLVETGSQFPSNFPFFSFFQTCDKKKICFTYFLF

SEQ ID NO: 197397 - protein, 115 aa, Glycine max
  Clone ID: PAT_MRT3847_20276C.1.pep
IFKNVNEKKKKKKKKKKKKKKKKQKRKKKKKKKKKKKKKGGALLKDPTFLPRPSNVLFFFWGPQIQFPGPGFTNVGTGKPRGYPTLFPWHQFPFSPVGVIEKRPPPSPFPKIGPP

SEQ ID NO: 197398 - protein, 50 aa, Glycine max
  Clone ID: PAT_MRT3847_20277C.1.pep
NQHASLEPRVTGSFKGHEHNHHRVQLWPHQTKVLWKWGSRLFFLTTIMKH

SEQ ID NO: 197399 - protein, 58 aa, Glycine max
  Clone ID: PAT_MRT3847_20278C.1.pep
SVHCINKTVCNIWYANTDMEKHVRQAGSQSYKHIESLGAISQTLALFICEKGGNLGVS

SEQ ID NO: 197400 - protein, 49 aa, Glycine max
  Clone ID: PAT_MRT3847_20279C.1.pep
VIALHIMLAFSSVRVLLQCINAFLVYHISYSLNKISVDSALPFHLIYSL

SEQ ID NO: 197401 - protein, 73 aa, Glycine max
  Clone ID: PAT_MRT3847_2027C.1.pep
GVEKKRGGFFNTGFCYLSTISFGETKGGYWKKGLFIEGMAGLPKESNLTKILVSFTPRSLGKKSWVLKGKKGA

SEQ ID NO: 197402 - protein, 87 aa, Glycine max
  unsure (1)..(87): unsure at all Xaa locations
  Clone ID: PAT_MRT3847_20280C.1.pep
QSVTTLAPVYLCSPLDYLSVVALELAVNAPPDTEKNKNIPRHALLLATIDLEMLKXLASVIIAHDGVLSNIKPALLTNKTETSSKEL

SEQ ID NO: 197403 - protein, 77 aa, Glycine max
  Clone ID: PAT_MRT3847_20281C.1.pep
LLTNLSYIFQLHIHKINLSHRVQELGSDQPNGILFAQHTLYHIQQQLPVHINTLITLTCNFQLIICYMARIKPPHNV

SEQ ID NO: 197404 - protein, 206 aa, Glycine max
  unsure (1)..(206): unsure at all Xaa locations
  Clone ID: PAT_MRT3847_20282C.1.pep
MVLVASHGEEEKGAEGIAAVDFRGHPVDKTKTGGWLAAGLILGTELAERICVMGISMNLVTYLVGVLNLPSADSATIVTNVMGTLNLLGLLGGFIADAKLGRYVTVAISAIIAALGVCLLTVATTIPSMRPPVCSSVRKQHHECIQASGKQLALLFAALYTVAVGGGGIKSNVSGFGSDQFDTTDPKEERRMVFFFXRFYFFISIR

SEQ ID NO: 197405 - protein, 450 aa, Glycine max
  unsure (1)..(450): unsure at all Xaa locations
  Clone ID: PAT_MRT3847_20283C.1.pep
AREFVEFKTMSLEVKMPTVNNHLPSLLELNENEEEKVPETPTSLESLHQLHKKLLLLERKESGTEESLDGSVISDIEGGEVTIEKLKSALKSERKALSTLYAELEEERSASAIAANQTMAMINRLQEEKAAMQMEALQYQRMMEEQSEYDQEALQLLNELMMKREKEKLELEKELEVYRKXAIIKRLTRKDNDLRKMENLDNINXYASSSNAEYRDVLNIXIELLSKSXNGFYSHQGKESSIENTPVDTVLYLEESLANFEEERLQILKQLKVLEEKLVILNYDEDHCSDDAKSKPKFLEENGNGYHLGENDHDEYMCGFANGHVKEINGKHQGRKIMGAKGKRLLPLFDAMSSEADVELSGDELDFPHLQNNSVEKVNSDKKKLALEDEVDNVYERLQVLEADREFLKHCISSLRKGDKGLHLLQEILQHLRDLRNVELRLRNMGDLAV

SEQ ID NO: 197406 - protein, 95 aa, Glycine max
  Clone ID: PAT_MRT3847_20284C.1.pep
FCLSKLVLFYLALESFWDLSSFASQVYALTKYKWTGWLHLTSLHTHILIILLFPQKVMMDTTHQKFGLTWTWTKETKNREWGTLAFLSTIGWSPL

SEQ ID NO: 197407 - protein, 90 aa, Glycine max
  Clone ID: PAT_MRT3847_20285C.1.pep
QEQKAMLENEVLRKQLEEIQNKTKSQFLEFSSLDRTFSKNGSKSLFNCASEENDLSDTSLQLGLSTDYGRQRKALKMEPCNDSGSQVASH

SEQ ID NO: 197408 - protein, 60 aa, Glycine max
  Clone ID: PAT_MRT3847_20286C.1.pep
VWSIHLLKMSAIVYSLCSIKGLWCDCNGCSYFVWFHAMDFIFCSLRTLFRNDFWFQQPFK

SEQ ID NO: 197409 - protein, 503 aa, Glycine max
  Clone ID: PAT_MRT3847_20287C.1.pep
MATAESGPRAKIMATTATEPLPSSAEMPPAPPPPKQPPQPVAAASAVKPEAPLSDSKASAEANVIVVPSYSRWFSWDSIDECEVRHLPEFFESASKSPRVYKYYRNSIVKYFRYNPTRKITFTDVRKTLVGDVGSIRRVFDFLETWGLINYHPSSSLTKPLKWDDKETKSDSASNTTESSSAPAKENTKRLCSGCKVVCTIACFACDKYDLTLCARCYVRGNYRVGVNSSDFRRVEISEETKTDWNEKETTNLLEAITHYSDDWKRVSQHVPGRTEKECVAHFLKLPFVDQFQHYQQHPAVNGTDDSCNPLKRVTNADAESELDTVASAEPNKRMRLTPLADASNPIMAQAAFLSALAGSEVAQAAAQAALTTLSEVYKATKINYRSFPRNTLLQDAGIMSNGGNTSDSFQGSRLHANIQLEKEELDVEKAISEIIEVQMKNIQDKLVQFEDLDLLMEKEGQQLEQMKNMFFLDQLTLLFHKSSAPKTGECQEGNNVKTNHGY

SEQ ID NO: 197410 - protein, 66 aa, Glycine max
  Clone ID: PAT_MRT3847_20288C.1.pep
QIQKISSVLKKNPEKGPRLSQTIPLGLTPMVGWVERKSFYLPLCPFPGKGGYNNCPPEKWCWDFGV

SEQ ID NO: 197411 - protein, 222 aa, Glycine max
  unsure (1)..(222): unsure at all Xaa locations
  Clone ID: PAT_MRT3847_20289C.1.pep
IHGHRRHRTSPFHHRNASGTASTEATPASRAATSAAAAAVKPEAPLPDSKTSAEANVIVVPSYSRWFSWDSIDECEARHLPEFFESASKSPRVYKYYRNSIVKYFRYNPTRKITFTDVRKTLVGDVGSIRRVFDFLETWGLINYHPSSSLTKPLKWDDKETKSDSASNSTESSSAPVKENTRGLCSGCKVVCTIACFACDKYDLTLCAKCYVRXHYRVGVNS

SEQ ID NO: 197412 - protein, 69 aa, Glycine max
  Clone ID: PAT_MRT3847_2028C.1.pep
NTRSHKHSPSTYSNLSQTLRSSYFLKNSTPQTSFILPSFNSKHFFLIHNILIIQLHLLHFSYNSNLTYH

SEQ ID NO: 197413 - protein, 96 aa, Glycine max
  Clone ID: PAT_MRT3847_20290C.1.pep
QDAGITSNGGNTSDSFQGSRLHANIQLEKEELDVEKAISEIIEVQMKNIQDKLVHFEDLDLLMEKEGQQMEQMKNMFFLDQLTLLFHKSSAPKTGE

SEQ ID NO: 197414 - protein, 114 aa, Glycine max
  unsure (1)..(114): unsure at all Xaa locations
  Clone ID: PAT_MRT3847_20291C.1.pep
NXYXWFRWCTYSMLLSFLSTAGFWMTSLNERLSLCDAILIGPMLQITWTFFLICTGFIYFQQYQDFDALITAMFILGMIXVFMAISVLAPYESNVACSETKHSCWDSMMSSAMS

SEQ ID NO: 197415 - protein, 134 aa, Glycine max
  Clone ID: PAT_MRT3847_20292C.1.pep
IGVKEEHRVRTGGDLRARGGVPRGFGGARFFFFVFVSPPLMIDNKGLLINITSGSGLMGGTDSSAASREPNPMSPIINPNPTRSDEPGYRDKIRNHSERNPARRGIDTSGRAGNSKDGGSRVALLSSSHDHAST

SEQ ID NO: 197416 - protein, 40 aa, Glycine max
  Clone ID: PAT_MRT3847_20293C.1.pep
ITSEGLATVTDFALAIVSKLFGNGRAISVAEGLVFEYPKK

SEQ ID NO: 197417 - protein, 54 aa, Glycine max
  Clone ID: PAT_MRT3847_20294C.1.pep
HHISQLELCHLCIYNNYFLPSNLKNKRFFPPRPSSNHNNFEKQNQYFSPTTYHH

SEQ ID NO: 197418 - protein, 68 aa, Glycine max
  Clone ID: PAT_MRT3847_20295C.1.pep
KKKKGRVKLKKRGKTPPSTLYLTLFPLSYSKQLSYYTVTKIQFILHLLKTSSLKKPYLFPTKITFINS

SEQ ID NO: 197419 - protein, 37 aa, Glycine max
  Clone ID: PAT_MRT3847_20296C.1.pep
FCHYIYTLKIFFNTEIEMLDKSTQFENSLSNASVNLL

SEQ ID NO: 197420 - protein, 93 aa, Glycine max
  Clone ID: PAT_MRT3847_20297C.1.pep
QLLIPLKMRILGPGGRKDIGTLVAWWVAFGNPIPGGRLYIPSRKRKTSPFQGLKYAKTPPAHYLSPSGATIEQTFQEVIPSPKKTLTGSVIDS

SEQ ID NO: 197421 - protein, 73 aa, Glycine max
  Clone ID: PAT_MRT3847_20298C.1.pep
ENIAVRSIYCTFLPPYFLKMWNWNSPRNSDLIGLWLQDRHSEPTRQVNSYMNIFASLFLENVELEFPEGILVE

SEQ ID NO: 197422 - protein, 62 aa, Glycine max
  Clone ID: PAT_MRT3847_20299C.1.pep
PRVRERLGCPHGRLPHLAGLAPLSCLLLSSLTPGFLRHSAYGSAHDSYLFSPTSLFSPSSFN

SEQ ID NO: 197423 - protein, 52 aa, Glycine max
  Clone ID: PAT_MRT3847_2029C.1.pep
FLLLISNFEEFSTTCPLYSTLLFNCYLIIFFTLVFIKAYFTSIPLNICSVKT

SEQ ID NO: 197424 - protein, 323 aa, Glycine max
  Clone ID: PAT_MRT3847_202C.1.pep
MEVAANARNPAAKRKFDDAVSNGVAAPADVDLSLLEAIEKSQNAVEALDLRALKKHVLSFERRLKDNIEARLKYPNQPDRFADSEVELHEELQKLKVLAGAPELYPDLVNLNVVPSIVDLLNHDNTDIAIDVVQLLQDLTDEDVLDDNDDSARVLVDALVDNSALELLVQNLHRLNDSDPDENAAVYGSLATVENMIEVKPAVAELVCEKTKLLKWLLGKIKVREFDSNKQYASEILAILLQSSTVNQKKLGQMNGVDVVLQAVAMYKSKDPKSSDEEEMLENLFDCLCCLLMPLENKERFVKAEGVELMIIIMKQKNWLMGR

SEQ ID NO: 197425 - protein, 227 aa, Glycine max
  Clone ID: PAT_MRT3847_20300C.1.pep
ENRKAHVNAFGKSMDLEKQRKRAPVSNLKLEGSIKMVQNKAGKASGNNVRGVASKTQQEKSLLSGAIFKDDSSGTSVDEVDNSDASTRTPSYNPLLSDFSDGDSSSGPNARGGRVCGACCSFIAGWAGTIGLAVALGLSSPRSLSGAGAAAPLWVGSLSRPYLVPVCPAGDPHISAVVRFIDTEPLLWSVGALVCPLGPPSLCFCCPFTCRFISFLTFQNPNRKLFL

SEQ ID NO: 197426 - protein, 45 aa, Glycine max
  Clone ID: PAT_MRT3847_20301C.1.pep
WCYDLFSTFFEYIDSVLSERGSKPSYATDSDHSPLDASDASLAVL

SEQ ID NO: 197427 - protein, 296 aa, Glycine max
  Clone ID: PAT_MRT3847_20302C.1.pep
RRPTRPGGWRMNAQHGIGRKQYSNSDVFEGLWKEGVPEGSGRYTWNNGNMYVGNWKNGKIYGRGVMKWVNGDTFDGLWLNGLMHGTGVYRFGDGGLYIGTWNKGLKDGKGVFYPAGSKHPSLKKLHSPRDSDHNGFLLNVEKQEAPKARVKRSLSENMPVISRFKSFRQISHRTSSLKINLIRSDSAQDCVCHDSSLTLSNALDGDQSEASGESTLVYEREYVQGVLIMERMCECSESSREKKQHNKFSVKQVKKSSCLDIFEGRAKLLFLSLICSLASRYTVGQIDSSVCTPSSI

SEQ ID NO: 197428 - protein, 58 aa, Glycine max
  Clone ID: PAT_MRT3847_20303C.1.pep
PTRPVRSKKKKKKKKKKKKKKKKKKKKKKKKKKKKKKKKKKKKKKKKKKKKKKRGGPF

SEQ ID NO: 197429 - protein, 57 aa, Glycine max
  Clone ID: PAT_MRT3847_20304C.1.pep
GNILKIWFPPRGHGPPQILCTPHFYLSGSKFPQIESKGDRNQGPYPRRPNLAPGGGK

SEQ ID NO: 197430 - protein, 84 aa, Glycine max
  Clone ID: PAT_MRT3847_20305C.1.pep
LTLVLVSIFVIIMAIISIAWLAMHPHDPGFRLTSLYVTNFALSDSQVRGKYEVGLTITNPNKIKVQVVLHRVHTLRLYGEEWHS

SEQ ID NO: 197431 - protein, 213 aa, Glycine max
  Clone ID: PAT_MRT3847_20306C.1.pep
MGFGLSLGKKSSKQQSRSKTDKESSDLPQPNPCSKDSLKLKSKSNVDQANSDPCHKAKHDVKGKAQLLDSAKGSSTQPDELVKYMSNLPGFLKHSDGGASIQGKALNVGVLDWSQLEKWKNKQTHTKAEASYFTSFDSSEEISSRAATTSSATSGGHNKKLDGRKGSSSSRSKGSYKEDRPRSSKMSSQNVKQYQHSETEIKTIGDVYFPVWK

SEQ ID NO: 197432 - protein, 89 aa, Glycine max
  Clone ID: PAT_MRT3847_20307C.1.pep
MEEALELSRAKDTKERMAGVERLHQLLEASRKSLSSSEVTSLVDTCMDLLKDNNFRVSQGALQALASAAVLAGEHFKLHFNALLPAVVD

SEQ ID NO: 197433 - protein, 63 aa, Glycine max
  Clone ID: PAT_MRT3847_20308C.1.pep
GAFCVLQKICKLKGKKIAPELKVDLMDNKMVPKVPLRSMSSIKTRDPFGKNFLHNGLAGTFFL

SEQ ID NO: 197434 - protein, 244 aa, Glycine max
  Clone ID: PAT_MRT3847_20309C.1.pep
AIGFSRGASVYRGVTRHHQHGRWQARIGRVAGNKDLYLGTFSTQEEAAEAYDIAAIKFRGTSAVTNFDISRYDVKRICSSSTLIAGDLAKRSPKESPAPVPASDFNSCGSSPMPLVSQPPPLAITDGEHSDELSNMMWNANNSDEQAQNESGGAEFNNNVTESSSSQQVSPSSNKDALNPQSPKCSVGLPNEFGVSGADYGHGYFTLDGPKYDDGNNENDHMSTNRLGNLGLVNQVPMFALWNE

SEQ ID NO: 197435 - protein, 52 aa, Glycine max
  Clone ID: PAT_MRT3847_2030C.1.pep
RPQVRRSYPLSLSIPYAKNSQSSVKRLALHDPSLITLACNILALLDCHLNSD

SEQ ID NO: 197436 - protein, 125 aa, Glycine max
  unsure (1)..(125): unsure at all Xaa locations
  Clone ID: PAT_MRT3847_20310C.1.pep
APSQEHMPWGCVCSFGRPTGPCPFSGNAMSMLLPMDVLLVLASGGLGVHPSASPGYAPLENWAALLGXPSGALHRLERVSYSPPRFSHEKKYIFVSIPPRKTPSNNLKKNGSILLRGYPSAVFFP

SEQ ID NO: 197437 - protein, 65 aa, Glycine max
  Clone ID: PAT_MRT3847_20311C.1.pep
LTIVRTKLVLKLMQDTISNPVHPANQNPSHRTCQRIGATHLDGRPTHIIIMPITCEKILLSLMLR

SEQ ID NO: 197438 - protein, 364 aa, Glycine max
  Clone ID: PAT_MRT3847_20312C.1.pep
LFNVLIRQNKVVDAVVLFRELIRLRYKPVTYTVNILIRGLCRVGEIDEAFKLLKDLRSFGCLPDVITYNTLIHGLCLINEVDRARSLLREVCLNGEFAPDVVSYTMIISGYCKLRKMEEGSLLFDEMINSGTAPNTFTFNALIDGFGKLGDMASALALYSKMLVQGCLPDVATFTSLINGHFRVRQVHQAMDMWHKMNEKNIGASLYTYSVLVSGLCNNNRLHKARDILRLLNESDIVPQPFIYNPVIDGYCKSGNVDEANKIVAEMEVNRCKPDKLTFTILIIGHCMKGRMPEAIGFFDKMLAVGCAPDEITVNNLRSCLLKAGMPGEAARVKEVLAQNLTLGTTSSKKSYHETTYVSIPVAV

SEQ ID NO: 197439 - protein, 106 aa, Glycine max
  unsure (1)..(106): unsure at all Xaa locations
  Clone ID: PAT_MRT3847_20313C.1.pep
TXXHAYXSSEXGXSRXXXEXXXIWXSCWKXXXSEXXXXVXLXVXLIXXVXXXXSAXXXNHDXVLXXXXXLPXLXXSXRXXVXGXMVXXSGXNVXSXXIXPQSXXXG

SEQ ID NO: 197440 - protein, 48 aa, Glycine max
  unsure (1)..(48): unsure at all Xaa locations
  Clone ID: PAT_MRT3847_20314C.1.pep
QXLLVAFYKLLSVLAATLFDYHIFKPDQNFLWMGTGGPKKPLFNGLVM

SEQ ID NO: 197441 - protein, 93 aa, Glycine max
  unsure (1)..(93): unsure at all Xaa locations
  Clone ID: PAT_MRT3847_20315C.1.pep
KRGQALGCYQGDQWRGGIKERDGKFDDVLQPVCHCLPWXHGYQIGXEKALRVQQLDVRCETNTIDNVSVTGAASGQTERCLKRSDASYSYQHR

SEQ ID NO: 197442 - protein, 73 aa, Glycine max
  Clone ID: PAT_MRT3847_20316C.1.pep
AINYKYTTSDHDAFNHQTLLLFLLQVHSSLPFFLFLGVFPFFPGFLAQSLRWRLATEPGSGSCSRNFENFGWK

SEQ ID NO: 197443 - protein, 49 aa, Glycine max
  Clone ID: PAT_MRT3847_20317C.1.pep
NVILWSNPLEASFLTFHLLKDMNKAFGEAILSFSILYILTSCVMYKCQL

SEQ ID NO: 197444 - protein, 571 aa, Glycine max
  unsure (1)..(571): unsure at all Xaa locations
  Clone ID: PAT_MRT3847_20318C.1.pep
MTMEEGRVENEDYTQDGTVNIKGKPILRSKSGGWKACSFVVVYEVFERMAYYGISSNLILYLTTKLHQGTVSSANNVTNWVGTIWMTPILGAYIADAFLGRYWTFVIASTVYLSGMSLLTLAVSLPSLKPPQCFEKDVTKCAKASTLQLAVFYGALYTLAVGTGGTKPNISTIGADQFDDFHPKEKLHKLSFFNWWMFSIFFGTLFANSVLVYIQDNVGWTLGYALPTLGLLVSIMIFVAGTPFYRHKVPAGSTFTRMARVVVAALRKSKVPVPSDSKELYELDKEEYAKKGSYRIDHTPTLKFLDKACVKTDSNTSPWTLCTVTQVEETKQMIRMIPILVATFVPSTMMAQINTLFVKQGTTLXQTPSEASKFPHQVWHAVVTGALLVCIPFFYRDFVKVMQKFXGTTHLLRMVIGFVIHTLIMXLIXSSESYRLKVAREHGVVESGGQIAFQVPLSIFILLPQFILMGTADAFLEVAKIEFFYDXMKSIGTSYSNFTLHLGNFISSFLLSTVSNITKKNGHKGWILNNLNESHLDYYYAFFAIXKLPQPHLLRVCXLGTMYIGLKFQIP

SEQ ID NO: 197445 - protein, 298 aa, Glycine max
  unsure (1)..(298): unsure at all Xaa locations
  Clone ID: PAT_MRT3847_20319C.1.pep
GSRLYELDKEEYAKKGSYRIDHTPTLKFLDKACVKTDSNTSPWTLCTVTQVEETKQMIRMIPILVATFVPSTMMAQINTLFVKQGTTLDRHLGSFKIPPASLAAFVTVSLLVCIVLYDRFFVKIMQRFTKNPRGITLLQRMGIGLVIHTLIMIIASGTESYRLKVAREHGVVESGGQVPLSIFILLPQFILMGTADAFLEVAKIEFFYDQSPEHMKSIGTSYSTTTLGLGNFISSFLLSTVSNVTKKNGHKGWILNNLNESHLDYYYAFFAIXKLPQPHLLRVCXLGSMYIELKFQIP

SEQ ID NO: 197446 - protein, 61 aa, Glycine max
  Clone ID: PAT_MRT3847_2031C.1.pep
KVILLKRNVYKWKYKIFLSSQATGYSVNLYACLNERKRFTQALDLEPNPGKHIELFKHTRT

SEQ ID NO: 197447 - protein, 123 aa, Glycine max
  Clone ID: PAT_MRT3847_20320C.1.pep
MTMEEGRVENEDYTQDGTVNIKGKPILRSKSGGWKACSFVVVYEVFERMAYYGISSNLILYLTTKLHQGTVSSANNVTNWVGTIWMTPILGAYVADAFLGRYWTFVIASTIYFSGMSLLTLAV

SEQ ID NO: 197448 - protein, 46 aa, Glycine max
  Clone ID: PAT_MRT3847_20321C.1.pep
DIYKSRSLICIYFTIFSSLVSTVLVYKCVVNGFPLTLLFFVFQFGL

SEQ ID NO: 197449 - protein, 48 aa, Glycine max
  Clone ID: PAT_MRT3847_20322C.1.pep
KTKTLPDILLITSCSYIFVPNGGTTSSFGQEVSKYSQTLLWMCAHFFP

SEQ ID NO: 197450 - protein, 88 aa, Glycine max
  Clone ID: PAT_MRT3847_20323C.1.pep
LEEKPNFNKLTQKQTAGEFLMQQPVSGYVPHKRYDCNTIGQDLWYYDKTDQLSHGNRKHVLDRLETVHNMIKPGCTKTNATILDRPTI

SEQ ID NO: 197451 - protein, 88 aa, Glycine max
  Clone ID: PAT_MRT3847_20324C.1.pep
RVFFFNVFCKLFSLSTFCYYPVYISLIYHFLKKILTILNSHFNFNNQMRTIRDRQLAPACSGYFCKIFMHDFNNTFTFCNLIIQICFQ

SEQ ID NO: 197452 - protein, 149 aa, Glycine max
  unsure (1)..(149): unsure at all Xaa locations
  Clone ID: PAT_MRT3847_20325C.1.pep
MASSCASSAIATVAISTPRSQKNGSLLGSTNASFLSGRKLIVINSTVPLGARPSTTVCAAVEPDKPVWVPSRTPPPWLDGGETTHYGFDPLGLAYDPDSLRWNVQAELVHCRWAMXGADGILMPQFHTKIDILNTPXWFTAGEQEYLPD

SEQ ID NO: 197453 - protein, 99 aa, Glycine max
  unsure (1)..(99): unsure at all Xaa locations
  Clone ID: PAT_MRT3847_20326C.1.pep
LASAHAFGLELIHRTKLHCDIIXETGWTDTIMPDVQEPIDXLIPSQECDGNTYCEANPQNPLLLNQRMVKLNFQQGTSQXANRLPLCIGARSSMQRMLT

SEQ ID NO: 197454 - protein, 116 aa, Glycine max
  Clone ID: PAT_MRT3847_20327C.1.pep
MVKSDIVFLYYFYNIKENSYFFFNFILQNIKSQSTSQSLVLLDEVGGGTNPLEGAALGMALLKSFAQDICLLTMATTHHDELKTLKYSDEAFENACMEFDEVNLKPTYKFLWGVPG

SEQ ID NO: 197455 - protein, 51 aa, Glycine max
  Clone ID: PAT_MRT3847_20328C.1.pep
QLLSAAALFFFLIYFTPQDGMDREPYIAATFFLKPSLKHTGHYQTKLSTPQ

SEQ ID NO: 197456 - protein, 54 aa, Glycine max
  Clone ID: PAT_MRT3847_20329C.1.pep
PTYMELGMASIRVNSIYELFFHMHTCIIGVLKSGMESQPLGFQGDLHINQPTWS

SEQ ID NO: 197457 - protein, 136 aa, Glycine max
  unsure (1)..(136): unsure at all Xaa locations
  Clone ID: PAT_MRT3847_2032C.1.pep
TAARRRQKGEDAPEVQGTESKDECLNELHGQAICTSRGLVCFLKEDENLSPKFSSANGWEDKVPLQVQGSEVLLLPYKEESSSAAEIIGGDGEASSSVLGGGQEEVLCFGXXDXXNEXEGGAGXXPRPXTXREDXE

SEQ ID NO: 197458 - protein, 78 aa, Glycine max
  unsure (1)..(78): unsure at all Xaa locations
  Clone ID: PAT_MRT3847_20330C.1.pep
SNGLSARTFLYGLHYSAFHRMHGILNIIPAQTVNMNTKDPIYTDFAYLDLKLEXHAVTFVYLYTEQTITFGKIHNHIK

SEQ ID NO: 197459 - protein, 57 aa, Glycine max
  Clone ID: PAT_MRT3847_20331C.1.pep
DLYCGMSRPVFSFSWRAAELPYPMESETKAGPWRGQSSVLTGIAITHQYDTIYAFQT

SEQ ID NO: 197460 - protein, 44 aa, Glycine max
  Clone ID: PAT_MRT3847_20332C.1.pep
LNGRVGKFGFFKREGVFALPIFFKNPSLFFFFFFLKNKMYNLFF

SEQ ID NO: 197461 - protein, 71 aa, Glycine max
  unsure (1)..(71): unsure at all Xaa locations
  Clone ID: PAT_MRT3847_20333C.1.pep
VLMADAIQPFTDAFYQYLAARYRDIFKFQEGVVTLPLSVVNAILSSDDLHVASXDAAYDXFVFKWSPQQYT

SEQ ID NO: 197462 - protein, 98 aa, Glycine max
  unsure (1)..(98): unsure at all Xaa locations
  Clone ID: PAT_MRT3847_20334C.1.pep
KEHMAFSNDNGFPPIYVANLSXENLKGKPVLFKYVKFQNVRSFTIFIXNNQAGSQIPKVQKIVLHGPPFEATYMKGVKKSEDHLPLEKGDSTLLLTPP

SEQ ID NO: 197463 - protein, 116 aa, Glycine max
  Clone ID: PAT_MRT3847_20335C.1.pep
TYFMSFFFVGFSFFGKKLIGRASIFFLGPGHNKSKAPQEFLCSPVKNKTPLRFSLRKTRNCLKQKPICLARLTLDKPRFWSGAKNLDKKSPLKKKFYFFFPNQGEGDFLASPRIFW

SEQ ID NO: 197464 - protein, 50 aa, Glycine max
  Clone ID: PAT_MRT3847_20336C.1.pep
YSNSNTMMTRPRYTLPRNPHCHENRFYIHDLRRKNGINYDQLMFSLRHIV

SEQ ID NO: 197465 - protein, 52 aa, Glycine max
  Clone ID: PAT_MRT3847_20337C.1.pep
QESTCRRRSTAPDKRLAPSKYYDRRKCIHPQTTYQQESTSTNLKKCPPYPKS

SEQ ID NO: 197466 - protein, 388 aa, Glycine max
  Clone ID: PAT_MRT3847_20338C.1.pep
YVGKNSFIWFGRKPRVIITEPELIKDVLNKMHDFPKPDTSPLVKLLATGLLNHEGEKWNKHRRIISPAFNLEKLKNMLPIFYKSCNDLIIKWEEMLSSDGSCEIDVWPFLQNLSSDAIARTAFGSSYEEGRKIFQLLKEQAELAMKAIMKLYIPGWRFLPTANHRRMKEIDREIKASLTDMISNREKALKAGEATENDLLGILLESNHKETEEHGNSKNVGMSLEDVIEECKLFYFAGQETTSALLVWTMVLLSRYPDWQARAREEVLQVFGKQKPNFDGLSHLKIVSMILNEVLRLYPPAVGQNRNVDIDMRVLNPTNPRVSFFPFGWGPRICIGQNFSLLEAKMALSMILQNFLFELSPAYAHAPTMSITTQPQYGAHIILRKVPI

SEQ ID NO: 197467 - protein, 231 aa, Glycine max
  unsure (1)..(231): unsure at all Xaa locations
  Clone ID: PAT_MRT3847_20339C.1.pep
MASGFGESTGRSPPSPSYFNNNNNNDAANFECNICFELAQDPIITLCGHLFCWPCLYKWLHFHSQSRECPVCKALVEEEKLVPLYGRGKSSTDPRSKSIPGDNIPHRPAGQRPETAPPPETNHFHQHGFGFMGGLGGFAPPPMATTRFGNFALSAAFGGFIPSLFNFXLHGFHDAAMYGGGAGFPHGFANTFHGVHAHGFPLRTHQGQQDYYLKKLLLFVVLCVVLAFIWQ

SEQ ID NO: 197468 - protein, 118 aa, Glycine max
  Clone ID: PAT_MRT3847_2033C.1.pep
DKRTALTYLDAAGKMHRVSKGAPEQILNLAHNKSEIQQRVHAIIDKFAERGLRSLAVARQEVPEGTKDSPGGPWEFVGLLPLFDPPRHDSAETIRRALDLGVSVKMITGMCHHYLMFV

SEQ ID NO: 197469 - protein, 39 aa, Glycine max
  unsure (1)..(39): unsure at all Xaa locations
  Clone ID: PAT_MRT3847_20340C.1.pep
KIDVKPLITHRFGFSQKEVEXAFETSARGGNAIKVMFNL

SEQ ID NO: 197470 - protein, 139 aa, Glycine max
  Clone ID: PAT_MRT3847_20341C.1.pep
MLRTMQNSQILLLPSAVAQIPPSPSYFNNNNNSDAANFECNICFELAQDPIITLCGHLFCWPWLYKGLHFHSQSRECPGCKALVGEEKLVPLYGRGKSSTDPRSKSIPGVNIPHRPAGQRPETAPPPETNHFHQHGFGF

SEQ ID NO: 197471 - protein, 58 aa, Glycine max
  Clone ID: PAT_MRT3847_20342C.1.pep
VYTKTMNQDTSVLSIDKESPYYYGINSQNIQQNQEALILLNGETQKIRTIMEMENDRK

SEQ ID NO: 197472 - protein, 208 aa, Glycine max
  Clone ID: PAT_MRT3847_20343C.1.pep
KLGIRLEQLQKFREELKNRSRVLKKLGHIDADGVVQLKGRAACLIDTGDELLVTELMFNGTFNDLDHHQVAALASCFIPGDKSTEQIQLRTELARPLQQLQDSARRIAEIQHECKLDINVNEYVDSTVRPFLMDVIYSWSKGANFADVIQMTDIFEGSIIRSARRLDEFLNQLRAAANAVGEADLEKKFAAASESLRRGIMFANSLYL

SEQ ID NO: 197473 - protein, 90 aa, Glycine max
  Clone ID: PAT_MRT3847_20344C.1.pep
NPKHGAVFQPDACLCHFSMEGPACYVVMQCDDFRAQVAESGTTLELTRSVVTEIEDSTGVTYATVILLHQSRPTPELIETVMPNGNVLKK

SEQ ID NO: 197474 - protein, 103 aa, Glycine max
  Clone ID: PAT_MRT3847_20345C.1.pep
SHIQVRTKKGNKPKNCKTQISSVAALIQISSVTTLIQISLVAAQTLLLEHNGRQIVDLDFLHIDLLVEHPLAEVALNFLSHHRPSLAAKIHVTLLFHVVAKHL

SEQ ID NO: 197475 - protein, 87 aa, Glycine max
  Clone ID: PAT_MRT3847_20346C.1.pep
RHGKYMACCLLYRGDVVPKDVNAAIATMQTKRRFQFADWCPTGFKVGINYQPPTVVPGGDLAKVQRAVCMLSNTTAIAEAWARLDHK

SEQ ID NO: 197476 - protein, 167 aa, Glycine max
  unsure (1)..(167): unsure at all Xaa locations
  Clone ID: PAT_MRT3847_20347C.1.pep
NVDSKDXNDTTAIQIAMAENHVDMVHLLVMNGADVSDVHNHEFCSSTLDEMLQKREIGHLINVTEVMRSGVVLKGKHQEQELNGGRSNGLKFPRVSIYRGHPVVRREKGSVEAGKLIRLPDSLEELKTIAGEKFGFDAKDAMVTNEEGAEIDSIDVIRDNDKLFFVE

SEQ ID NO: 197477 - protein, 77 aa, Glycine max
  Clone ID: PAT_MRT3847_20348C.1.pep
ERCRKQLPLDLYAKYNYYSIVSIYLLVEHRKKKKTIWPTLPLDECWSGAARRWQGYCRRRPGYCMVVEELWWRRSPA

SEQ ID NO: 197478 - protein, 349 aa, Glycine max
  Clone ID: PAT_MRT3847_20349C.1.pep
TLTQLLRLKTNTLLEAMQIKREDNIQILKNFLQHFKQVKDLSIKDLMVENVEEEDPNMAVNLLTVASTGNAAFLEELLRAGLDPDIGDSKGKTPLHIAASNGHEGCVKVLLKHACNMHIKDMNGNTALWDAIASKHYSIFRILFQLSALSDPNTAGDLMCTAAKRNELTVMTDLLRQGLNVDSKDHRDTTAIQIAMAENHVDMVQLLVMNGADVSDVHNHEFCSSTLNEMLQKREIGHLINVTEVMLSEVVLKGRHQEQEHNGGRSNSGLKFPRVSIYRGHPVVRREKCSMEAGKLIRLPDSIEELKTIAGEKFGFDAKDAMVTNEEGAEIDSVDVIRDNDKLFFCWIS

SEQ ID NO: 197479 - protein, 63 aa, Glycine max
  Clone ID: PAT_MRT3847_2034C.1.pep
VGGQGVGRGGPLLKIAASALIKERKTKGRRAGAILPAIRPLLSSSHDQQALNKHINQPKGSKP

SEQ ID NO: 197480 - protein, 68 aa, Glycine max
  Clone ID: PAT_MRT3847_20350C.1.pep
MTLNGLNLRPISMHRSFTYQAWDHQNLTPTKESGLDTFEPTSILYKTTQPYLYIYIYIYIDIYIYIYI

SEQ ID NO: 197481 - protein, 76 aa, Glycine max
  unsure (1)..(76): unsure at all Xaa locations
  Clone ID: PAT_MRT3847_20351C.1.pep
LFKPNSHFFVRFFSARXRCFVXTXTGKTITLXVESSXTIDNVXAXIXXKEGXPXXQQXXIFAGKXLXXXRXLARQH

SEQ ID NO: 197482 - protein, 56 aa, Glycine max
  Clone ID: PAT_MRT3847_20352C.1.pep
PGHSPSLLSRSSAHLHLGVMKIYMGNVRIRIFVTCYFYFCKSTSTPYPIYNLSCLL

SEQ ID NO: 197483 - protein, 158 aa, Glycine max
  Clone ID: PAT_MRT3847_20353C.1.pep
MCCTPRCAGRDDGRRSHQGMIRCHALHRLVGNCKRMDTLSGSVTPISGARPRVVLVLQGGGALGSYQAGVYQALHEHGLTPDWVVGTSIGAINGALIAGNERANRLPRIKEFWNRVAHRDLFDMRRVPDTARRFNIWFNALDSAFRGVPGFYTMRWFN

SEQ ID NO: 197484 - protein, 35 aa, Glycine max
  Clone ID: PAT_MRT3847_20354C.1.pep
LAEASSKIEFKTPRKQSAFVFWLLVLELDGTHSHR

SEQ ID NO: 197485 - protein, 96 aa, Glycine max
  unsure (1)..(96): unsure at all Xaa locations
  Clone ID: PAT_MRT3847_20355C.1.pep
MLVYQDLLTGDELFSDSFXSRKLKNGALREVEGKWVAEGTPDVDMVADPSVDGGGPNEGAADAAVNVVDIEDTAILXERPQIDKKQCDAYITRVIS

SEQ ID NO: 197486 - protein, 162 aa, Glycine max
  Clone ID: PAT_MRT3847_20356C.1.pep
IYFYHFAVWRVAALLTLPPGLTLLTSSTLVNVRCSAKPATLSVCMSGRSLTLPTMSYYSAPRFPVGGLPLCFTLAGLGAKLCLLTGVPGRGPFFCYVLPPCLAGGHFGFPGVFYSPFRLCRQRFLCSMCLLWWLLAPHTRSPPTTKPELDRGCSGDRTLAHC

SEQ ID NO: 197487 - protein, 130 aa, Glycine max
  Clone ID: PAT_MRT3847_20357C.1.pep
DSHIRLNKDTLMNSLWKLNVVDIEVTLVHVCQMVLKENNVKKEELRLRATALKILGKIFQDKYPKGETLKKKIAADSDDEESSSDSSDDESPRAISYRTPFFTQGLGRLFKCLCNPAFDVDDEEIVYKSK

SEQ ID NO: 197488 - protein, 65 aa, Glycine max
  Clone ID: PAT_MRT3847_20358C.1.pep
MKKCNPSHTCQAGIQVGNACWELYCLEHGIGPDGQMPSDKTVGGGDDAFNTFFSETGAVKHVPRA

SEQ ID NO: 197489 - protein, 108 aa, Glycine max
  unsure (1)..(108): unsure at all Xaa locations
  Clone ID: PAT_MRT3847_20359C.1.pep
GSSKNNTQRGRTRPDKAKGDAGDTSSRKETRTGAPEKRRDRRGTXQKIQEQNPPPAAAGSQGKTPRSAGXTHPRGRQNKRENGPTTITEPRTKEQQRGRSKQKKQQHP

SEQ ID NO: 197490 - protein, 62 aa, Glycine max
  Clone ID: PAT_MRT3847_2035C.1.pep
WNQGLLMFPKKREKSYKIRVPLDVDFPPQIVLLNFRGISPWAFGFPKKKKKKKKKKKKKKKK

SEQ ID NO: 197491 - protein, 56 aa, Glycine max
  Clone ID: PAT_MRT3847_20360C.1.pep
NHQPIDVPALTLLRLHKTLDCIRTGIYLPGSGLTGETCYGVMGSLPKASPVITSEI

SEQ ID NO: 197492 - protein, 57 aa, Glycine max
  Clone ID: PAT_MRT3847_20361C.1.pep
NVYTFLIGVLLIMNYEHLVRIIRFTNALHLESICLTGIQFPIFFKQGFIKQYHTHIT

SEQ ID NO: 197493 - protein, 181 aa, Glycine max
  Clone ID: PAT_MRT3847_20362C.1.pep
MGTAILRSHDCLQGRFLHNEAFAIATSRVASRRNPNSNNNNHNSFASSANQNCRRKRSPVTDRERRRSPPNLVTGHVKILKRGEKLSLQNKNQRLAVSAENVLVKNDVGLDLLLGSTDRLGPGPLTVKKQIRVSDANNNGVYAGSAFVSSPHPSSVPVPGFLVRNGAATSNLRRLLRLDLE

SEQ ID NO: 197494 - protein, 56 aa, Glycine max
  Clone ID: PAT_MRT3847_20363C.1.pep
ACSMICSPSVTTGYRSVACIVALFTGLKSMAGFPSMNTPLDLTSIAVSGGIVQCMH

SEQ ID NO: 197495 - protein, 118 aa, Glycine max
  Clone ID: PAT_MRT3847_20364C.1.pep
TSHKTTFQFHHCLHCILNRMCNSCLPCTHQLANGSIDQRLPKKHQSMTMYQNETHIIQHKIFTLEQNYLSLPQVKLEDHPHPHHIIRLTSVLPIIIPSKPAFSEQSSPHCVSYTTHHR

SEQ ID NO: 197496 - protein, 112 aa, Glycine max
  Clone ID: PAT_MRT3847_20365C.1.pep
MMASNYPRKGLALTSSKAIANAASWYCAFVLVALALLSMFKDSSMLIPSQYASGQLLSRPCEEIYVVGEGETLHTISDKCGDPFIVENNPHIHDPDDVFPGLVIKITPSLRT

SEQ ID NO: 197497 - protein, 341 aa, Glycine max
  Clone ID: PAT_MRT3847_20366C.1.pep
MAEEKRFRIGYALLPKKQNRFIRDSLVNLARSRGIDLVRVDPNRNLTDQGPFDCVLHKLYGDDWKRQLTEFTVKYPNAVVLDSPESIERLHNRISMLQVVSELNIDDGSETFGIPKQIVIYDKETLLDRRNWEALNFPVIAKPLVADGSAKSHKMALVFNHDGLNSRAAPVVVQEFVNHGGVIFKVYVVGERVRCVKRKSLPDVREDELVRVSEDLRRFSQVSNLATDERIDDRYYKMMHLDDTEMPPLSFITQIARGLRRAMKLNLFNFDVIRDSRCGNRYLIVDINYFPGYAKMPGYETVLTDFFCDVLCKKQQWGEDCSENAGFDGMMMGNKDVRRMM

SEQ ID NO: 197498 - protein, 104 aa, Glycine max
  unsure (1)..(104): unsure at all Xaa locations
  Clone ID: PAT_MRT3847_20367C.1.pep
XXHXYAYVSSRIRXXXCTXQXXEXXTMGXYKYXXRXXXRKXXVXLSXDXLAEGXVLQXXXXKTXIXLMXXXRPXLSKARRLXXKAXQXXALXXXKIXXEXGXXD

SEQ ID NO: 197499 - protein, 84 aa, Glycine max
  Clone ID: PAT_MRT3847_20368C.1.pep
GILFWANKKHSRGHPLRGLGINKALFLWLPPPPCKRKNKIPPPQKNMGCRAGHINKIRYKTTKAPPHILGVRKKFGAGIPPLCC

SEQ ID NO: 197500 - protein, 93 aa, Glycine max
  Clone ID: PAT_MRT3847_20369C.1.pep
RECLVACSSLTDRRTPPPPRRSFYRRTGKGKSQWSNRRRQRRPYPSRPYPPADTLRSSLKRRPLHTSGAWPLLFRLSLLTGFPLTVTYPCGRT

SEQ ID NO: 197501 - protein, 53 aa, Glycine max
  Clone ID: PAT_MRT3847_2036C.1.pep
KTKPSLTLIPRQNFFILAAKLIALTPVYNALTNKNPALTNIITLPENPHLAPW

SEQ ID NO: 197502 - protein, 336 aa, Glycine max
  Clone ID: PAT_MRT3847_20370C.1.pep
MSIALNKTNSSKMSTPLFHEFKKQASFFFKEKIKTARLALTDVTPAELMTEEATSGNPWAPDARTLRSISRDAFELDDYWRIVEILHKRFLKFEKKNWRISYNSLIVLEHLLTHGPESVAEEFKSDKDVISQMKGFQYIDDTGFNWGLTVRKKSERIMKLLEKGTLLKEERKNARRLSRGIEGFGSFSHRSTPAQGVLREKSLPTTLKRYDSDLNNHEDQENHSSCSNNVVNVDTVAVKSPSHQGETFKSLGSVEAKEYQDDDLGNNQMLPKSETSSKENMEPSKEEFHLWNLNGESKALLDCGEEDSKLGIIRTEDDHPFSSAEMHATASLLSAC

SEQ ID NO: 197503 - protein, 40 aa, Glycine max
  Clone ID: PAT_MRT3847_20371C.1.pep
PISKTLFTLDESEDAEVNIPSTILSLSSQSPTSVALDASF

SEQ ID NO: 197504 - protein, 50 aa, Glycine max
  Clone ID: PAT_MRT3847_20372C.1.pep
QVVHTIITIKVYTFTQATPITIISTKTNQTHCGKPASTVRTWSVKKKKKK

SEQ ID NO: 197505 - protein, 172 aa, Glycine max
  Clone ID: PAT_MRT3847_20373C.1.pep
KMACLVSRSGRELQRYNNMGGRQVVGCIPYRYKQDIEGKMSNELEVLVVSSQKGQGLMFPKGGWELDESVEEAAYRESLEEAGVMGMIERELGQWNFISKRYGIYYEGHMFPMFVKEQLDIWPEKNLRRRIWMTVAEAREVCQHWWMKEALDILVQRIVSSQQRKEDLYSIG

SEQ ID NO: 197506 - protein, 201 aa, Glycine max
  unsure (1)..(201): unsure at all Xaa locations
  Clone ID: PAT_MRT3847_20374C.1.pep
NAAAYNVMLRFLSRRQDWEGAEKLIYEMKGSELISCNAFNTLIYACCKQSLVQLGTKWFRMMLDCGVVPNVATIGMLMGLYRKGWNLEEAEFAFSRMRGFRIVCESAYSSMITIYTRLRLYDKAEGVIELMRKDXVVPNLENWLVMLNAPSQQGKLGDAERVLEAMQEAGFSDNIVAFNTMITGXGKARRMDAAQRLFMRI

SEQ ID NO: 197507 - protein, 156 aa, Glycine max
  Clone ID: PAT_MRT3847_20375C.1.pep
FGYYNVHFRRCIPYRYKQDIEGKMSNELEVLVVSSQKGQGLMSPKGGWELDESVEEAAYRESLEEAGVLGMIERELGQWNFISKRYGIYYEGHMFPMFVKEQLDIWPEKNLRRRIWMTVAEAREVCQHWWMKEALDILVQRIVSSQQRKEDLYSIG

SEQ ID NO: 197508 - protein, 103 aa, Glycine max
  unsure (1)..(103): unsure at all Xaa locations
  Clone ID: PAT_MRT3847_20376C.1.pep
XXCXXMSXKICXXXLVXSNXXRXRXXSAXTXXXXGXIXRXXSXSXXXXXVSXXXHXXXAKXXXXXXDRXLXXMPXNSFXPXXXXXYXXXSARAEXRAYXRVXX

SEQ ID NO: 197509 - protein, 156 aa, Glycine max
  unsure (1)..(156): unsure at all Xaa locations
  Clone ID: PAT_MRT3847_20377C.1.pep
ETIKKLKEENEVHIQEEAISKETIKNLKEENDGLLHKVVSLEEVINNLQTDNELQTQKHTSLEMRIAQLKXENNSLLQKEAGLVEKTNQLLNEKVVLSLKAESLERKINLLENELSSFSEKEVGLETRIAQLQSENNSLLQKEATLVERTNQLLNE

SEQ ID NO: 197510 - protein, 361 aa, Glycine max
  Clone ID: PAT_MRT3847_20378C.1.pep
TGVVEKTNRLLKEREILSLKHESLERKINLLENELSSFSEKEVGLETRIAQLQSENNSLLQKEATLVERTNQLLNAKAVLCLKGESLEQKIYLLESDLNSLVKKENSTKETISNLNGNIAVLQAQVEELEESRNNLFLENQQLREKVSSLQSTVQNHENSNTSSCSWDASVKDLASENEDLKSEIEAAFTLVEKLMAENAELVEKVTELCVELDHRSAEVGHSGVTESNGMTEFVKPTGVAIPLPESAEYASVSSPKLNSLEETSVKDNGNSNDAKHVVGVTSNSSLVSADDAGEIVQIPLDDNEIQDIELQDAKNVENDADAVPITDAPLIGAPFRLISFVANFVSGADLVNQSSSNTAR

SEQ ID NO: 197511 - protein, 161 aa, Glycine max
  unsure (1)..(161): unsure at all Xaa locations
  Clone ID: PAT_MRT3847_20379C.1.pep
KDLASENKDLKSEIEAAFTLVEKLMAENAXLVEKVTELCVELDHQKSAEYASVSAPKLNSLEETSVKDNGNSFNDAKHVVGVMSNSSLLSDDAGEIVQIPLDDNEIQDIELQDAKNVENDADAVPITDAPLIGAPFRLISFVANFVSGADLVDPSSSNTAR

SEQ ID NO: 197512 - protein, 85 aa, Glycine max
  unsure (1)..(85): unsure at all Xaa locations
  Clone ID: PAT_MRT3847_2037C.1.pep
QMPKSFQKIHGLAGRFHFQREPAINMGMXEDLLPQSEADXIEAMLLNLKESSEFHNRSFECAVDSVQAIAASHLWQLVVVRADLN

SEQ ID NO: 197513 - protein, 89 aa, Glycine max
  unsure (1)..(89): unsure at all Xaa locations
  Clone ID: PAT_MRT3847_20380C.1.pep
MRLDGVXGNAGFRPGQGGNFGGLRKSTTQTPFEYAGRILSGPMQSMVNQGGMQRNSPDGERWQRATSFQQRGLIPSPSTPQTPLQMMHK

SEQ ID NO: 197514 - protein, 160 aa, Glycine max
  Clone ID: PAT_MRT3847_20381C.1.pep
FFLFFELGSVDELRKLLSNKDVYQQFLSSHDEVKIQNNVNDDLCKENLQLADENLRKEPRVVELRNQYKIICTTELAVAQEKLNELEKQKEEMLKLNSPLYLLQWIQEAMNNTEEESENLHQQVLDREIDLGAFLQKYKKLRTAYHRKSLIHLAARTSNI

SEQ ID NO: 197515 - protein, 76 aa, Glycine max
  Clone ID: PAT_MRT3847_20382C.1.pep
KKLAQKNLKKWGGLSKGGGFEQNRGRAYRGGKKKKNPLKKGKNQKGLLGVAGGKLKPDLKDILGEKKPMLGLVQTF

SEQ ID NO: 197516 - protein, 93 aa, Glycine max
  unsure (1)..(93): unsure at all Xaa locations
  Clone ID: PAT_MRT3847_20383C.1.pep
MNYIDALTFKVLRYDFAVYRSLGMMNENEFETHEKKKKKKKKKKKKKKKKKKKKKKKKKKKKKKKKKKKKKKKKKKKKIKKKKNKKKXXGGPF

SEQ ID NO: 197517 - protein, 62 aa, Glycine max
  Clone ID: PAT_MRT3847_20384C.1.pep
LIRPNYLHKSCVILLPIIQQQQHPLFYTPYLYHYNRIVEASIKPFSFYILSLPPFSKLLFQF

SEQ ID NO: 197518 - protein, 69 aa, Glycine max
  unsure (1)..(69): unsure at all Xaa locations
  Clone ID: PAT_MRT3847_20385C.1.pep
YXLQFLTFFIKPQKNXWVVFLKMGVTHKYYKFYKLFTYTILINFFLIIKYIYYIIKKKAINAVSGILWV

SEQ ID NO: 197519 - protein, 113 aa, Glycine max
  unsure (1)..(113): unsure at all Xaa locations
  Clone ID: PAT_MRT3847_20386C.1.pep
CAATRVLKYLKGCPRKGLSFSRESPIQILGFSDADWATCIDSSKSITWDCFFLGXSLISWKAKKQNTVSRSSSSSEAKYRALTSTTCELQWLTYLLKDLHVTLIYCDNQSALQ

SEQ ID NO: 197520 - protein, 259 aa, Glycine max
  unsure (1)..(259): unsure at all Xaa locations
  Clone ID: PAT_MRT3847_20387C.1.pep
CGAVSGLTTVVNAISLARLVMENTPHIYLAFDGAEEFXKTTSSTTYFFIPFFSTFLSYQHSSLFMIPSQGVETVDSSHFITKENIERLKQAKEANRVQIDYTQPIQNDTKKETALANGDSQIGTVGCVAVDSLGNLASATSTGGLVNKMVGRIGDTPVIGAGTYADARCAVSATGKGEAIIRGTVARDVAALMEFKGLSLVEAANCVVHERTPKGTVGLVAVSAKGEVAMPFNTTGMFRACATEDGYSEIAIWPAAKIE

SEQ ID NO: 197521 - protein, 60 aa, Glycine max
  Clone ID: PAT_MRT3847_20388C.1.pep
MANMERVISDFMSWFPLWAILVLDLLLKVSGNTEGDALTALKNSVSDPNNVLQSWDSTLV

SEQ ID NO: 197522 - protein, 79 aa, Glycine max
  Clone ID: PAT_MRT3847_20389C.1.pep
KGVIFFFGQRTRCKMKGGCLRKMGFDLRTRVRYNLGWGKTGGKIFQSPIFVCLIKKKFYRGDSRPRVKNPRDQKGVAPL

SEQ ID NO: 197523 - protein, 68 aa, Glycine max
  Clone ID: PAT_MRT3847_2038C.1.pep
QGNCKEHFKIMSPSFFQTKKLTLLVLFSSINHIKITLKMALLPLCLVDLVLVRYSRTFTLAKVKTNSR

SEQ ID NO: 197524 - protein, 54 aa, Glycine max
  Clone ID: PAT_MRT3847_20390C.1.pep
EAPNKRTLDGKGDQYFPELKRSKLTKNINPGPQKKNIFGVAIKPGKTRAKKNPA

SEQ ID NO: 197525 - protein, 63 aa, Glycine max
  Clone ID: PAT_MRT3847_20391C.1.pep
ASVLHVIGARCKEICTHLKQGLSYSPLFNEQVIRPSMDLLNGFLRRASLRLTKYCPRLCLHFL

SEQ ID NO: 197526 - protein, 124 aa, Glycine max
  Clone ID: PAT_MRT3847_20392C.1.pep
HASVAIWLCFSLFLTHLPISFLSHSFTSHNPPWIVFLRPKHELTHTQTPTCVVKTFVHYPTLLLFLFSLQNPLLQSLILHFQIGVCLSPTRTKKGSSLLFSDEILFLIPYSFFSMVFFSSNFEI

SEQ ID NO: 197527 - protein, 62 aa, Glycine max
  Clone ID: PAT_MRT3847_20393C.1.pep
VYYLKLNKRYGCLTRNSSLPENLWHVLELSNCKWSCMNNLASVNTWLFSTTTRMLDFHVSPV

SEQ ID NO: 197528 - protein, 89 aa, Glycine max
  Clone ID: PAT_MRT3847_20394C.1.pep
PLPPLASSIKAQLPTHSLVNVLARSKLTLVLAACSRLALGSQQFHSPYASTCHSFVCFSVTSFYSNVMVQSVPQLTVTPFTFYPKYTAF

SEQ ID NO: 197529 - protein, 116 aa, Glycine max
  unsure (1)..(116): unsure at all Xaa locations
  Clone ID: PAT_MRT3847_20395C.1.pep
KMFNFFFYGNSIKVFFRLHYLFVVEXQMRERERERDTDEKEIVIHRREKQWVGVRNRKEQRESERVREREGPCLNLVRKRKGGQPHQKKERRSTKLREGKLGGPSEHLFVLFHSIP

SEQ ID NO: 197530 - protein, 42 aa, Glycine max
  Clone ID: PAT_MRT3847_20396C.1.pep
LYVFYTNHDPYTNNLLTPSKNYSFNYSHLLLYMIILTTLPCS

SEQ ID NO: 197531 - protein, 59 aa, Glycine max
  Clone ID: PAT_MRT3847_20397C.1.pep
EIDHVTNSVVYEQQYGAEIPEQQIEQLVIAVPAATIQAMSTAKASMRDPHLFTVVKQFK

SEQ ID NO: 197532 - protein, 64 aa, Glycine max
  unsure (1)..(64): unsure at all Xaa locations
  Clone ID: PAT_MRT3847_20398C.1.pep
FKKRGLPAFNVIAYKDXPRFQSGVEMVXTSEKIERGLKKVFFPLFILPGGGGPVAGPSVSKALF

SEQ ID NO: 197533 - protein, 253 aa, Glycine max
  Clone ID: PAT_MRT3847_20399C.1.pep
FNTLSWTMTEFSVSVREMQEKYQVIEFQQRKCCVIFDLSCNLTRILEFCTREIPQAFLSGPDTNLRRVTELVVFILNHITSAADAEFFDLSLRRHSQPPEKVNRGMILAPLVGIILNLLDATSSAEYRENNDLLDVFASMDCPDTVQYGFQYLLPHVRPRVRPRVRAKAKYEQLENFLSLLSCRTVLQDDKVDSVGDTDLDDSLCCICYACEADAQIAPCSHRSCYGCITRHLLNCQRCFFCNATVTDVSKIG

SEQ ID NO: 197534 - protein, 45 aa, Glycine max
  Clone ID: PAT_MRT3847_2039C.1.pep
NNNRKRPTPRFAKLPHIIHPAYLCYLDTSPIKINHTGEVVPHMTH

SEQ ID NO: 197535 - protein, 83 aa, Glycine max
  Clone ID: PAT_MRT3847_203C.1.pep
MTWPCWSTPRSMEESYGRQNGNIESYMSSKLMHIGSAINVMAQDYLYTILILLHIDAILSLSMTCERFKALSISHTLWKSLCR

SEQ ID NO: 197536 - protein, 179 aa, Glycine max
  unsure (1)..(179): unsure at all Xaa locations
  Clone ID: PAT_MRT3847_20400C.1.pep
EESDGFDEELDEEEEEDEEDEEREGEGEEDEEEEEEEEMEDEEEEEENEEGGGIEDKFLKIDELTKYLEKEEEDFENGEAHREGEEEDDDEGESDEEGDFGIGDDDDEDEDEETEGIENARYEDFFGXKKERGSKRKAQALQESDYSDEDDMELDKQTKGTASAHDKQLEKIQSKIEQM

SEQ ID NO: 197537 - protein, 72 aa, Glycine max
  Clone ID: PAT_MRT3847_20401C.1.pep
LPLKLYTTWMLIAKHAVFRLILILILYFMHMIDQTHFAVKEHALMVLGSVVRKWYSQMQFAFCSTSCNLAES

SEQ ID NO: 197538 - protein, 25 aa, Glycine max
  Clone ID: PAT_MRT3847_20402C.1.pep
EKRKLNYSTFKLLLGDLGHLLRGVP

SEQ ID NO: 197539 - protein, 94 aa, Glycine max
  Clone ID: PAT_MRT3847_20403C.1.pep
GFFSSPGVILGTLWDPLAFWGKKKPPVFFKFPKNCWKKRGKKFFFKVTKNKFFQWVSPVKIKNKKNWWFCLPKKKKKKKKKKKKKKKKKKKKRA

SEQ ID NO: 197540 - protein, 77 aa, Glycine max
  Clone ID: PAT_MRT3847_20404C.1.pep
NHENAESHKECPPSPTKKIKINKFIKAMHEDCRGVSKAYQHKEFIKNEMHHWPIAEENEQFKFNQQLHYVPLPGPIF

SEQ ID NO: 197541 - protein, 74 aa, Glycine max
  Clone ID: PAT_MRT3847_20405C.1.pep
TDLPLTISYDVVIYNTSKFILIHKCDIVPIQWNHISNFILIEPNYYNKCMYYSVTQLYYIHIVINYFSNRNFFS

SEQ ID NO: 197542 - protein, 64 aa, Glycine max
  Clone ID: PAT_MRT3847_20406C.1.pep
LSILIPYNWYHIGGHDSAEWRMACMTTSTSTSGWSILLEQVLDRHCNLGRLDHPHRILCSTCSE

SEQ ID NO: 197543 - protein, 95 aa, Glycine max
  unsure (1)..(95): unsure at all Xaa locations
  Clone ID: PAT_MRT3847_20407C.1.pep
TEDDDATVADNAYSTVHEPNLKDDLTAYVNTHEFCDDAVLDEHVTNDEEYLTTYQPVIATTXERTIPTCHAYGHTXIGKTYALQPVPLRAAQDLV

SEQ ID NO: 197544 - protein, 52 aa, Glycine max
  Clone ID: PAT_MRT3847_20408C.1.pep
HITPIMTLFKSHWLHQEKTTERIAAAHENAHPSITYDLSSTDEIDLSSISLD

SEQ ID NO: 197545 - protein, 165 aa, Glycine max
  Clone ID: PAT_MRT3847_20409C.1.pep
EMITRCAENKFCKHQNLHQPALGTLPRVSSIFSCSPFFAHYLQFQLQAIAREVAVGAALLFTAPSSVFMVVLKKKIFSLMCMIHLWQLGVDHKFLPIVFFILFPSYSWSLFKRILIKKRKERKGLKCFLMVYTFFHLSFSGKLNSEFMLVLLRSREGAYVIESRY

SEQ ID NO: 197546 - protein, 112 aa, Glycine max
  Clone ID: PAT_MRT3847_2040C.1.pep
GPCGEPFWFSGRGILFPRGYPQGVLDLFEKGVLNESPFPLPGGGPNFGGVKREFGGGLRPRPKAWGGKIKKNLAKNFWGKGGFSQGGFLPLKGALLRPGRKICRSCPGGPPG

SEQ ID NO: 197547 - protein, 71 aa, Glycine max
  Clone ID: PAT_MRT3847_20410C.1.pep
GGNSEKRLFCFDLNEDGADDMAVYVKATSTPIPVVSASRPEPTSGLPVAPLQVEGTLAWYGSDGTSAFRPA

SEQ ID NO: 197548 - protein, 174 aa, Glycine max
  unsure (1)..(174): unsure at all Xaa locations
  Clone ID: PAT_MRT3847_20411C.1.pep
PRVRRCKAYINPFMKFIDQGRRFICNLCGFSDETPRDYHCNLGPDGRRRDADERPELCRGTVEFVATKEFMVREPMPAVYFFLIDVSMNAVQTGATAAACSAISRVIKDKDLPEGPRTLVGVATFDSTIHFYNLKRALQQPLMLIVPDVQDVYTPLQTDVXAPLSECRPHLELL

SEQ ID NO: 197549 - protein, 140 aa, Glycine max
  Clone ID: PAT_MRT3847_20412C.1.pep
FLMGLNMCNGPNGYLMDIFSGPMKKKKKKKKKKKKKKKKKKKKKNPKKKKKKKKKKKKKKRGGPPFWTFSPRKFFSDRFLGGNPFSLKGGLLKLGEKRGKSFSRGKMFSPQNSQKNKNRKIKGETPGGPKGGPTPLFWGG

SEQ ID NO: 197550 - protein, 184 aa, Glycine max
  Clone ID: PAT_MRT3847_20413C.1.pep
LEAIYPRDPGLDASFQKWGHTQVAVGARVACYHDEIKLSLPAMWTPTHHLLFTLFHVDLQTKLEAPKPVVIGYAALPLSSHAQLRSEINLPIMRELVPHYLQDAGRERLDYLEDGKSVFRLRLRLCSSLYPINERIRDFFLEYDRHTLRTSPPWGSELLEVAAFRAMVNIVTRYGFYLYLIQVG

SEQ ID NO: 197551 - protein, 62 aa, Glycine max
  Clone ID: PAT_MRT3847_20414C.1.pep
TGAKSRQKGLEFIFLPQIPVVSLKSRRKYLVIWFYQERFIDCLSPNFNPAPYEFCKVPNGYG

SEQ ID NO: 197552 - protein, 75 aa, Glycine max
  Clone ID: PAT_MRT3847_20415C.1.pep
EITIQKNMDGVWADPFSLFDPMNQTRQTQPDPFILPTLYKVSLLILIIYFFCLESNIMGVSHPTSYKLISFKMGA

SEQ ID NO: 197553 - protein, 72 aa, Glycine max
  Clone ID: PAT_MRT3847_20416C.1.pep
KIFYFFSNYKCLFFLSFQYLFSLNSASLHLLHPYYWGTFSYCECKKFFMAAQFSFNLINSYSITTMESLASV

SEQ ID NO: 197554 - protein, 112 aa, Glycine max
  unsure (1)..(112): unsure at all Xaa locations
  Clone ID: PAT_MRT3847_20417C.1.pep
IXIXXXXHRXTXXTHFQTCVPTSFDELCVEVQHILWHQHXCPLYLLPLPXQTSPTLVXILFWPXTFFLFSFRERPPGKKXXPPREKGPFXXNXRFXKTPXAXXGFXXXPXLK

SEQ ID NO: 197555 - protein, 67 aa, Glycine max
  Clone ID: PAT_MRT3847_20418C.1.pep
NNTHYWYDYFKNNYGYAFTHYFILIMRGRNYINGKFTHIIVMIILRTIIIIICYETILISLMISKLS

SEQ ID NO: 197556 - protein, 126 aa, Glycine max
  Clone ID: PAT_MRT3847_20419C.1.pep
MNTESSTSQFPVSQLNFSRQIKGNETEIIISRYEDHFMVIATQIGTMGTIMYARKEEGVSINPTFNVSVIFGKRDEPMLVACARQLIEHMSLSGSSRPLVLSLGLKDHSVETLKGIVSAVMDNSMW

SEQ ID NO: 197557 - protein, 105 aa, Glycine max
  unsure (1)..(105): unsure at all Xaa locations
  Clone ID: PAT_MRT3847_2041C.1.pep
XAALLKNKRRNWYRXXDXTDTCLXNFXIEXSSWLVICRRXRRGXNSHCXKXSXNGQNGXMYMXHILWXXNWKPNICXKXXHXWSXTCLPRAARAEFRAYVRVHAT

SEQ ID NO: 197558 - protein, 147 aa, Glycine max
  unsure (1)..(147): unsure at all Xaa locations
  Clone ID: PAT_MRT3847_20420C.1.pep
MSSTLKMRTRSPLKVRACIPLKARRCSPLEVRACSPLLARTCSPFKVRACSPLTVKVTKVRACSPLKARTCSPLEVRACSPLKARTXGPLMARTCSPLKLRTCSPLMARTCSPLKVIGTSTQGSTLMRKQEIDSSRGPVIPNPQDLD

SEQ ID NO: 197559 - protein, 52 aa, Glycine max
  Clone ID: PAT_MRT3847_20421C.1.pep
MRMHLRQFFREANLLNGLTLQVQARSYARRREQFPTKFLTASTVQSSLTPLD

SEQ ID NO: 197560 - protein, 240 aa, Glycine max
  unsure (1)..(240): unsure at all Xaa locations
  Clone ID: PAT_MRT3847_20422C.1.pep
MLVRMIRTRLFAAAQVKSCPGMHSSCVIASLSGCARTVGPPPISGGGPRTVWMSSTLKMRTRSPLKVRACIPLKARRCSPLEVRACSPLLARTCSPFKVRACSPLTVKVRACNPLMVRTCSPLKARTCSPLNGEXTCSPLKARTCSPXTVRVRASSPLKARTCSPLMVRACSPLMVRTCSPLKARTCSPLNGEGRAALSRRGHESSQGDRYKYPRVHPYEKARDRLIERAGHPKSTRFGH

SEQ ID NO: 197561 - protein, 123 aa, Glycine max
  Clone ID: PAT_MRT3847_20423C.1.pep
GAPKKKLFLPIPPGRKPGIWPQEKPNMSPPFLFPFGRKGVWIFSPLSPLEKKKVFPVLVFQKKIFKFVPSGRVNFYFFFLQTCQGEGSQFFFGPPPANARESSFFFFCKPPSPPRKIFHVLAQ

SEQ ID NO: 197562 - protein, 66 aa, Glycine max
  Clone ID: PAT_MRT3847_20424C.1.pep
TGQFHRTLIIPLPDSLWNPQIFCPLGVTHLHGGTSRPRIACTYNVSMAQTPLGPGVEDIKRAERTG

SEQ ID NO: 197563 - protein, 98 aa, Glycine max
  Clone ID: PAT_MRT3847_20425C.1.pep
LRVFFFFFWVSPFSYVFFDTKRQGLNLRGLVDYWSEGKMGKNALFKKARKGDHRTPKGNGGVRGPPRLNWEKRGTKGGGGRVTQKNWGQLKKSPGGDP

SEQ ID NO: 197564 - protein, 68 aa, Glycine max
  Clone ID: PAT_MRT3847_20426C.1.pep
YNWQLIGNPVIWVCWKLNETSTSETARLSSFHMVYVLLFQGLSTGYNYLNPNENKPCLMHATYKKNLT

SEQ ID NO: 197565 - protein, 54 aa, Glycine max
  Clone ID: PAT_MRT3847_20427C.1.pep
KKIKLQKGFCAFKGKRGGDPSQRVKYSKISDLFLRVLFKKKSQGKEAPPFWEKP

SEQ ID NO: 197566 - protein, 136 aa, Glycine max
  Clone ID: PAT_MRT3847_20428C.1.pep
FQRSMCIAEMHSWGSHLVVIPNLNQSSNSLDKLDSPYWSFTCGLCTPSHALDEASSEHLARIMVITESEREDLRRRDQEAADLSSDNNPAIPVGVASSRLLNSPRFGSCSHWYQRPPLSDYSRQCEQKIVKVVVRM

SEQ ID NO: 197567 - protein, 77 aa, Glycine max
  Clone ID: PAT_MRT3847_20429C.1.pep
STQGIFFFGKPKRYLAPPPMLKNLKFGKSTDSWGGEMGKNPFSDSFFSLAILGNGKLIGRVSFPTGFPQKLWIWHVF

SEQ ID NO: 197568 - protein, 115 aa, Glycine max
  Clone ID: PAT_MRT3847_2042C.1.pep
IQKTFNNIKITILCGFVTILVLRGTIGVNLGSSDNDAVNQNLIEETNRILAEIRSDADPSDPDDQQFFNPNDTFTLGPKIDNWDTERKNWLHQNPEYPNVIGEILDCGEYWEFSV

SEQ ID NO: 197569 - protein, 72 aa, Glycine max
  Clone ID: PAT_MRT3847_20430C.1.pep
KRISRSLTLTRRPISNRRVSSQLAKHGKDHDSRSLWPAQRVIFFPLVDCTPQRRQIIDRFLASSRDCFCFRF

SEQ ID NO: 197570 - protein, 76 aa, Glycine max
  Clone ID: PAT_MRT3847_20431C.1.pep
NNPCEICHQMRKKGYASNIVVQRSPKEKSLHIIKLGGVLDIEANKTAQSASGFINFRRTQIPLLSYWRGPYSNNKS

SEQ ID NO: 197571 - protein, 58 aa, Glycine max
  Clone ID: PAT_MRT3847_20432C.1.pep
IFFFCPVIDPCYLFQVLSFDGGSKYLAFLVFPVGIFSQGCSESPWISSIFRGICDFLV

SEQ ID NO: 197572 - protein, 93 aa, Glycine max
  Clone ID: PAT_MRT3847_20433C.1.pep
SCMSHFNICRGLCPGESAFTNAGIQYNAILTLNLNLSLKKNLIQCLWHKKQLNSYVFLPNSTFPMCLAPQKNDPLFFTKEKTKKKRSNIGTTS

SEQ ID NO: 197573 - protein, 110 aa, Glycine max
  unsure (1)..(110): unsure at all Xaa locations
  Clone ID: PAT_MRT3847_20434C.1.pep
MRVGSIMIAVGLNTIQVDADIYKSLHITRRVQYASILGEYLHRVLDKTXGSAAQSMRSFLCGSIEMLIKLGPGDSDGTSTVYYLYCAXSQHDEIHVEFLGNSSRQSYTVH

SEQ ID NO: 197574 - protein, 47 aa, Glycine max
  Clone ID: PAT_MRT3847_20435C.1.pep
NDEFGVENEETIRFLFRFAGWKRYRLVTSASREMLVHTAKVFCYCFL

SEQ ID NO: 197575 - protein, 193 aa, Glycine max
  Clone ID: PAT_MRT3847_20436C.1.pep
VKGIDSAQKAPAVGFPVLSRPLQKWPGLVKTRPVRGPPEKLSEKVGGGLKSPEEACLGGGGSPECPAAWDEVGEFSGAATPPRENQNQFVPLENFCKANPEIFECPPFFNLWLNSVFPKLQAGIFFFSLLLGPSAPLYFLLIFFLKTPIQNLNPSSYVGVGPTCFFFKKKKKKKKKKKKKKKKKKKKKGRAGF

SEQ ID NO: 197576 - protein, 58 aa, Glycine max
  Clone ID: PAT_MRT3847_20437C.1.pep
STNEYQLHRNSKCRFRKETHHTKKPNKNNLAERETSSFRISFMNESEVHHKRLRLKLR

SEQ ID NO: 197577 - protein, 142 aa, Glycine max
  Clone ID: PAT_MRT3847_20438C.1.pep
KDHIQEVDSPEDRVRDQNSERNNEEAKEEYYASSEGLNKTKQSDKRENNEFELESQTNGTEVAHVHENERVLNVTQRKATQVTNSVVTNITNQGNGSENQAEKKNDSQKSSIAESDKQEREPNKPSSDDVEALHSQNGTCSN

SEQ ID NO: 197578 - protein, 59 aa, Glycine max
  Clone ID: PAT_MRT3847_20439C.1.pep
IKSGKENDLMSMWTAQREIFFTLIYRAQRSSKKLKDSSNPVTIDFVPGFKVRQAVVRVD

SEQ ID NO: 197579 - protein, 469 aa, Glycine max
  Clone ID: PAT_MRT3847_2043C.1.pep
MHFAASWAPMCPKSIPREERANMGTANLHKRRTSASDDQSALRSLLLSKEDKWMDKILKTIKNFKIAYLCGFVTILVLRGTIGVNLGSSDNDAVNQNLIEETNRILAEIRSDADPSDPDDQQFFNPNDTFTLGPKIDNWDTERKNWLHQNPEYPNVIGGKPRILLLTGSPPKPCDNPIGDHYLLKSIKNKIDYCRLHGIEIVYNLAHLDVELAGYWAKLPMIRRLMLSHPEVEWIWWMDSDAFFTDMVFELPMSKYDEYNLVLHGYPDLLFEQKSWIAVNTGSFLFRNCQWSLDLLDAWAPMGPKGPVREEAGKILTANLKGRPAFEADDQSALIYLLLSKKEKWMDRTFLENSFYLHGYWAGLVDRYEEMIEKYHPGLGDERWPFVTHFVGCKPCGSYGDYPVERCLSSMERAFNFADNQVLKLYGFRHRGLLSPKIKRIRNETVSPLEFVDQFDIRRHSTENTESKS

SEQ ID NO: 197580 - protein, 111 aa, Glycine max
  Clone ID: PAT_MRT3847_20440C.1.pep
DFVFCLWDVSQVKKEKNELEVMMPKREIPKWFHYVNKGRFPDFKARGKFPAVAIAFVFGEVNAIDKANRSINVGIHLLIEDERRKFRNVPVPENHVFLCDLRGLFSLEEWE

SEQ ID NO: 197581 - protein, 58 aa, Glycine max
  Clone ID: PAT_MRT3847_20441C.1.pep
RFMPDRTHLLLACCSRMAICKKDIWRVECGIPSGYPLTGMCNSIFNEMLIRYSYEKLL

SEQ ID NO: 197582 - protein, 74 aa, Glycine max
  Clone ID: PAT_MRT3847_20442C.1.pep
SRESLTCMTNGVVSSTQTFGSIAVSFLVVPRAEHGGFLIHVRCDLASFSFQIYLFLTPHGGIMVKPICLLMLIK

SEQ ID NO: 197583 - protein, 62 aa, Glycine max
  Clone ID: PAT_MRT3847_20443C.1.pep
HNIDISFPITFKFCNYPLAGVLSLSKHVPLDTWNQWRSHIYYFSCHYAPTAPQPPKQFSTSL

SEQ ID NO: 197584 - protein, 69 aa, Glycine max
  Clone ID: PAT_MRT3847_20444C.1.pep
LAFQSLLTLFCLINAHSSEVFLEDSMRCPLCACKLPPKVLIVVMIHEKLDIKSCIYFVSGRLKGVAFFL

SEQ ID NO: 197585 - protein, 88 aa, Glycine max
  unsure (1)..(88): unsure at all Xaa locations
  Clone ID: PAT_MRT3847_20445C.1.pep
TVHQPHCLPSRSSSDIPQRTECGSSSLMMGASLPLQQCQPHPPXXHHQNPXFPHPSSISGSDTKWVSPQRIGISPHDSDLTPMLSLQC

SEQ ID NO: 197586 - protein, 54 aa, Glycine max
  Clone ID: PAT_MRT3847_20446C.1.pep
LFRGHLIQHQGFPLHKEVLISKRANSQSTNDKTYLSTILLPLFNLINSSNQLTH

SEQ ID NO: 197587 - protein, 355 aa, Glycine max
  Clone ID: PAT_MRT3847_20447C.1.pep
MGLPSTQTSTGSKRQPETSMAKPNPHTEAPSAPEPPKAVKREGNRKGTTSSSEQEAPKTPDPKTLRRLAQNREAARKSRLRKKAYVQQLESSRIKLNQIEQELQRSRAQGILMGGNTLLGGEQGFPMAMSGISSEAAMFDVEYARWLEEHHRIVCELRAVLQEHLHENELRLYVDNCLAHYDQVMNLKSMVAKTDVFHLVFGVWKTPAERCFMWIGGFRPSELIKIILGQIEPLTEQQILGICGLQQSTQEAEEALSQGLDALNQSLSETITSDSLWCPPNMTNYMGQMAVAINKLSTLESFVRQADNLRHQTIHRLHQLLTTRQAARCLVAISEYFHRLRALSSLWSTRPRQDQ

SEQ ID NO: 197588 - protein, 90 aa, Glycine max
  Clone ID: PAT_MRT3847_20448C.1.pep
TILVYVGNVAKNPREDKYRKIGLNNPLFQDRVGSLNGGVQFLELCGFERTGDFLYLPDEKVDMALLNSAGLVLNSAMTNPFFGVLSSTHN

SEQ ID NO: 197589 - protein, 59 aa, Glycine max
  Clone ID: PAT_MRT3847_20449C.1.pep
RKSSQPVEWRRRAAAEPEGERGAWDSRGREACRGRRAQVWSEWRRVPQAWVMEGYRALG

SEQ ID NO: 197590 - protein, 76 aa, Glycine max
  Clone ID: PAT_MRT3847_2044C.1.pep
EEGSRSGSRRITTCVVTRRAVPGGYLGVPLKAAHPGSGYHLHRTTWRSLRCLTQRRMHPFQGTVDSSHMCDEAQHA

SEQ ID NO: 197591 - protein, 44 aa, Glycine max
  unsure (1)..(44): unsure at all Xaa locations
  Clone ID: PAT_MRT3847_20450C.1.pep
MVSSDKEPGEEVLQAWYMDDSDXDQRLPHHIEPNEFVSLDQLAE

SEQ ID NO: 197592 - protein, 89 aa, Glycine max
  unsure (1)..(89): unsure at all Xaa locations
  Clone ID: PAT_MRT3847_20451C.1.pep
GIARGCGWQHIGAYVNLXAYYVVGIPMAAILGFWLQLRGKGLWIGILTGAFCQTIMLSLITSCTNWEKQAIKARERIFQRSFSVEDGLV

SEQ ID NO: 197593 - protein, 269 aa, Glycine max
  Clone ID: PAT_MRT3847_20452C.1.pep
MGRRPCCPKEINKGAWSREEDETLSKYVSIHGEGKWQKVAQNAGLKRCGKSCRQRWLNYLKPGIKRGHISVDEEDMIIRLHRLLGNRWALIAKRLPGRTDNEIKNYWNTNLSKKLQKHPTSSVSSLQHKRHEKEKTIQMHVSPEAPRPRRVNAVEYSKNLENGGCGNRPSTTPSPSNKVEGSSEEASFSDFLIHDIDQNQFLIADDSNSKVPQMEEDHPHNNKVELITNNSPSSSSPSDHCHHLLPEKFDPFETLLDVELASFLGFEND

SEQ ID NO: 197594 - protein, 516 aa, Glycine max
  unsure (1)..(516): unsure at all Xaa locations
  Clone ID: PAT_MRT3847_20453C.1.pep
MSTHIESLWVLALASKCIQENIAWSLLIIMVTLWLTMTFFYWSHPGGPAWGKYYYFNYWKKTTSTNTNINLKMIIPGPRGYPFIGSMSLMTSLAHHRIAAAAEACKATRLMAFSMGDTRVIVTCHPDVANEILNRSIFADRPVQESAYSLMLNRAIGFASYGVYWRSLRRIASKHLFCPRQVKASELQRLKPPNGRASLSNMMCSVFGXQDYDLDEPNTAMDELSMLVEQGYDLLGTLNWGDHIPFLKDFDLQKIRFTCSKLVPQVNRFVGSIIADHQADTTQTNRDFVHVLLSLQGPDKLSHSDMIAVLWEMIFRGTDTVAVLIEWILARMVLHPEVQRKVQEELDAVVRGGALTEEVVAATAYLAAVVKEVLRLHPPGPLLSWARLAITDTTIDGYHVPAGTTAMVNMWAIARDPEVWLDPLEFKPERFMGLENEFSVFGSDLRLAPFGSGRRTCPGKTLGLSTVTFWVAWLLHEFEWLPSDEAKVDLTEVLRLSCEMANPLIVKVRPRHGLST

SEQ ID NO: 197595 - protein, 65 aa, Glycine max
  Clone ID: PAT_MRT3847_20454C.1.pep
DPHVRPRVRPSVGPAVIGLYIGTLTNLTFPFAIRWVVYSVNGLAYDVCSIELQLVTESCVGQIAL

SEQ ID NO: 197596 - protein, 84 aa, Glycine max
  Clone ID: PAT_MRT3847_20455C.1.pep
KEVLQAPFDEELKRLAISRHDFRFSTFPPMSSYILSNSRISSEESLGNGDSVKPSFSIVAERTKCPQREMNGQNERKKKSPFPI

SEQ ID NO: 197597 - protein, 62 aa, Glycine max
  Clone ID: PAT_MRT3847_20456C.1.pep
MQHPIPSPINLFTNIRYHVFSMGPADLFGKVDTFLFQFFLLPSFIYQSMFLIVQSCEYELFF

SEQ ID NO: 197598 - protein, 52 aa, Glycine max
  Clone ID: PAT_MRT3847_20457C.1.pep
GASTSTVMYDMPIQTSSLQPYIPPCSSSPVSINRHSPCICPSMDFAIVSHKI

SEQ ID NO: 197599 - protein, 234 aa, Glycine max
  Clone ID: PAT_MRT3847_20458C.1.pep
MEKLGLTESPFPKLSSDEVRLWFKNNQRMLLGKDISSSDLLKISADLAESPLLGNGKGKQAAALDDLGFEARSTKDIAWHDVSMFLNYRVLSTGELEVRVRYAGFGKEQDEWMNVKLGVRERSIPLEPSECHKVKDGDLVLCFLEREDYALYCDARIVKIHRKIHDPTECTCTFIVRFVHDNTEVKSSILTLSDVVSYAHARKEFLLTGYAVGLHKRNLLATQILPLIPPQVPP

SEQ ID NO: 197600 - protein, 273 aa, Glycine max
  Clone ID: PAT_MRT3847_20459C.1.pep
MEKLPLTEYPFPKLSLDEILELERIYKDVVGKVFNRKLCQEIAKRFSSSSNGAGKNSLSWQQVQLWFRNSQRMLLGEDISSSDLLKISADLADSPLLGNGKGKQATDLDDMGFEARSTKDNAWHDVSMFLNYRVLSTGELEVRVRYAGFGKEQDEWMNVKLGVRERSIPLEPSECHKVKDGDLVLCFLEKEDYALYCDARIVKIQRKIHDPTDCTCTFIVQFVHDNTEEGVSFSRICCRPTQEESACFPDLALDPTQSPSLNFPLNTIESLWG

SEQ ID NO: 197601 - protein, 148 aa, Glycine max
  unsure (1)..(148): unsure at all Xaa locations
  Clone ID: PAT_MRT3847_2045C.1.pep
RXXXRCYKYRTSKGGETNLGVHPHTDSGFLTILNQKLNGLEIQLKDGEWFKVDASPNMFAVLAGDAFMVWSNDRIRGCVHQVFMNSKVDRYCLGLLSYAGKVMEPEEELVDEEHPLRYKPFDHYGYLRFFLTEEAVKSASRIKAYCGI

SEQ ID NO: 197602 - protein, 88 aa, Glycine max
  Clone ID: PAT_MRT3847_20460C.1.pep
ELTAATRNFRKDSVLGGEGDFGSVFKGWIDNHSLAAAKPGTGVVVAVKRLSLDSFQGHKDRLVSLIFFFNPFDLLLLIKNQTLPLLHV

SEQ ID NO: 197603 - protein, 52 aa, Glycine max
  Clone ID: PAT_MRT3847_20461C.1.pep
MAREQHTPTRPWIQDAVPLLVVLLIAAHVLAMIYWIYRLATQKQVQHRRKTH

SEQ ID NO: 197604 - protein, 116 aa, Glycine max
  unsure (1)..(116): unsure at all Xaa locations
  Clone ID: PAT_MRT3847_20462C.1.pep
RVGTPPVDATTNWMWHIANAHVCSNDAGGHHLGNHCIHTHADLQPFICGAXHMQIRAMHAIFTLRDXHMMHTCGINALPRQTLISCCGSSEKCCTTGDCGMENTIACYTNLYCFDM

SEQ ID NO: 197605 - protein, 128 aa, Glycine max
  Clone ID: PAT_MRT3847_20463C.1.pep
APMGISNFKKTCSKLLIKKKTPQQKKNLGQKITMAGINRIVFIQLWRFHLLSKLVYGKCQQEKFQNATFKKMEIKPVKQFAGFCFFSKKKPACFTEKKEVPVLRNKIFLLRVLFAQEFVFASLFIMPP

SEQ ID NO: 197606 - protein, 59 aa, Glycine max
  Clone ID: PAT_MRT3847_20464C.1.pep
PWILNRIKAMGIVRTLCTSLNADRGQWKSLRSPPGSRTRSNKLSPRRAILGCRSLAICC

SEQ ID NO: 197607 - protein, 39 aa, Glycine max
  Clone ID: PAT_MRT3847_20465C.1.pep
KIKFLTIPHQIISFVRNFIFFGREGFMGVNMPENFYLFS

SEQ ID NO: 197608 - protein, 38 aa, Glycine max
  Clone ID: PAT_MRT3847_20466C.1.pep
VEFWCGDSERFSLSIWWCICGLVEGCSADCSVSLQGLR

SEQ ID NO: 197609 - protein, 57 aa, Glycine max
  unsure (1)..(57): unsure at all Xaa locations
  Clone ID: PAT_MRT3847_20467C.1.pep
SMAGKXEGPAIGIDLGTXYSCVGXWQHDRVEIIAXXSGXTXYXXXVXFTDTXXXXXX

SEQ ID NO: 197610 - protein, 66 aa, Glycine max
  Clone ID: PAT_MRT3847_20468C.1.pep
GPKKKNPTLPELKVNQKNLRNPKLKKYHLFNCQIKQGLTNNKPVQGITIFLKAKKGFGPSKHFFLI

SEQ ID NO: 197611 - protein, 64 aa, Glycine max
  Clone ID: PAT_MRT3847_20469C.1.pep
SFSPLSVSTPTHSQQFSFCFSMSLIKINGIIYAPGFTLLIFFFNFCDDCKPFLNLVLSLIYIIK

SEQ ID NO: 197612 - protein, 73 aa, Glycine max
  Clone ID: PAT_MRT3847_2046C.1.pep
PGVWEYLILNVHALVFEELQPAECLHFKEELFDGSSNGNFVLELDFEPFNAAFPRPTLNKSIGNGVQFLNRHL

SEQ ID NO: 197613 - protein, 58 aa, Glycine max
  Clone ID: PAT_MRT3847_20470C.1.pep
RNTLQAVILLTYITRRGELDPLGCSHTEKARKVRELGLSRRLNHPGDAWSGLYRYSDD

SEQ ID NO: 197614 - protein, 60 aa, Glycine max
  Clone ID: PAT_MRT3847_20471C.1.pep
ESENSFHHNTPVHRTIANEINARILINLATINLPNIYQQSLPLYHFSYLQNISYNSYLLL

SEQ ID NO: 197615 - protein, 91 aa, Glycine max
  Clone ID: PAT_MRT3847_20472C.1.pep
PTSLWWQLNEFATPHTVTITLKNVIPLAGGYGGPRRRAVRVRHRGGRMLRHQGRSQRFDRFGNQYHPAFLRPPEGNLSGPQARNLSLVSAG

SEQ ID NO: 197616 - protein, 89 aa, Glycine max
  Clone ID: PAT_MRT3847_20473C.1.pep
KVQELVVSFKGVNRKGILKWLVSLVAAVVLEAWPCHGPGYQRFLLRMKPAYGERSSEVKCASLRLAVEAHNIRAFKTIPEECVDPTGVY

SEQ ID NO: 197617 - protein, 140 aa, Glycine max
  unsure (1)..(140): unsure at all Xaa locations
  Clone ID: PAT_MRT3847_20474C.1.pep
LKLDAASDDDEEVDLILFKQLIGYLRYLCNSRPNIAFSIRLVSGYMSEAKSXWWQPKTVLTYIKGILEYGVLFPSKLLQQGNELIVYSDFDSCGKSNKNNTSGYILKFLEAPISWCSKKQPVVALSTCEAKYIARSFATC

SEQ ID NO: 197618 - protein, 108 aa, Glycine max
  Clone ID: PAT_MRT3847_20475C.1.pep
QLQLPWTLPLLLFCISIIVFFFLTFYHNNNKLILRTLALPPPRFPHYVYYINLIMAAEVYYQAIGTLQSHSYLNNLNNHQKHQNNLVRLVARDFISSNGLSTRRSNRS

SEQ ID NO: 197619 - protein, 65 aa, Glycine max
  Clone ID: PAT_MRT3847_20476C.1.pep
PLEPSPPWVVLNPTAASWEVFRQGNTPVGINVGQVGSFVSGPEGVNRAFHFLQALAYPQGVRFAI

SEQ ID NO: 197620 - protein, 552 aa, Glycine max
  Clone ID: PAT_MRT3847_20477C.1.pep
MALAPPSVFALYIVIDLKIEIYMTISAMCGILAVLGCVDNSQTKRARIIELSRRLRHRGPDWSGIHCYEDCYLAHQRLAIVDPTSGDQPLYNEDKTVIVTYEEHGEEFVNMLDGMFAFILLDTRDKSFIAARDAIGITPLYLGWGHDGSTWFASEMKALSDDCERFISFPPGHIYSSKQGGLRRWYNPPWFSEDIPSTPYDPTLLRETFERAVVKRMMTDVPFGVLLSGGLDSSLVAAVVNRYLAESESARQWGSQLHTFCIGLKGSPDLKAAKEVADYLGTRHHELYFTVQEGIDALEEVIYHIETYDVTTIRASTAMFLMSRKIKALGVKMVLSGEGSDEIFGVFMALMIWQIKALHLYDCLRANKSTAAWGVEARVPFLDKEFINVAMSIDPEWKMIRPDLGRIEKWVLRNAFDDDKNPYLPKHILYRQKEQFSDGVGYSWIDGLKDHANKQVTDATMMAANFIYPENTPTTKEGYLYRTIFEKFFPKNAAKATVPGGPSVACSTAKAVEWDAAWSKNLDPSGRAALGIHDAAYDAVDTKIDEPKNGTL

SEQ ID NO: 197621 - protein, 158 aa, Glycine max
  Clone ID: PAT_MRT3847_20478C.1.pep
SIDPKWKMIRPDLGRIEKWVLRNAFDDDKNPYLPKHILYRQKEQFSDGVGYSWIDGLKDHANKQVTDATMMAANFIYPENTPTTKEGYLYRTIFEKFFPKNSAKATVPGGPSVACSTAKAVEWDASWSKNLDPSGRAALGVHAAAYDGAVDTTKNGPL

SEQ ID NO: 197622 - protein, 615 aa, Glycine max
  Clone ID: PAT_MRT3847_20479C.1.pep
MRVDPEGKSLRPEPMALAPPSVFALYIVIDLKIEIYMTIHFLFAAAMCGILAVLGCVDNSQTKRARIIELSRRLRHRGPDWSGIHCYEDCYLAHQRLAIVDPTSGDQPLYNEDKTVIVTVNGEIYNHKQLRQKLSSHQFRTGSDCEVIAHLYEEHGEEFVNMLDGMFAFILLDTRDKSFIAARDAIGITPLYLGWGHDGSTWFASEMKALSDDCERFISFPPGHIYSSKQGGLRRWYNPPWFSEDIPSTPYDPTLLRETFERAVVKRMMTDVPFGVLLSGGLDSSLVAAVVNRYLAESESARQWGSQLHTFCIGLKGSPDLKAAKEVADYLGTRHHELYFTVQEGIDALEEVIYHIETYDVTTIRASTAMFLMSRKIKALGVKMVLSGEGSDEIFGGYLYFHKAPNKKEFHEETCRKIKALHLYDCLRANKSTAAWGVEARVPFLDKEFINVAMSIDPEWKMIRPDLGRIEKWVLRNAFDDDKNPYLPKHILYRQKEQFSDGVGYSWIDGLKDHANKQVTDATMMAANFIYPENTPTTKEGYLYRTIFEKFFPKNAAKATVPGGPSVACSTAKAVEWDAAWSKNLDPSGRAALGIHDAAYDAVDTKIDEPKNGTL

SEQ ID NO: 197623 - protein, 110 aa, Glycine max
  Clone ID: PAT_MRT3847_2047C.1.pep
KLFILEMTIHCTDIANNRRVVYNLTKALIPLSDPWTASYFCQWTRAKRIPTVHHNIYILYRICVPLTTDHNWILQLMWFSLHSNRLCGALTSFANLYMLDKRCLSGITTP

SEQ ID NO: 197624 - protein, 59 aa, Glycine max
  Clone ID: PAT_MRT3847_20480C.1.pep
APPICSSRTLRPTCFKLFFFTVKHFPICRRVCVHRLYPKTILCIRRFLLGYKKKQLFFF

SEQ ID NO: 197625 - protein, 202 aa, Glycine max
  Clone ID: PAT_MRT3847_20481C.1.pep
QVEDDDDSWEVRAFAEDTRNIMGTTWPPRSYTCTFCRREFRSAQALGGHMNVHRRDRARLHQAPVPSSSSNPMTSSLPTSPFINIPPQDLVANAGLCLLYHLPKSPSSTAPPFPPSPTTPSPSTLLSISSYPTTNFLMQTSFNFPGAPATGINTTTTTTVSSLCYNSSKVEQSATSSSIDHNGHLEELDLELRLGHKPTPTS

SEQ ID NO: 197626 - protein, 65 aa, Glycine max
  Clone ID: PAT_MRT3847_20482C.1.pep
QRGLSTPLGTISAARMLLILVMSLCIHRPRPRGQPLPCLSLHYYVRLAPNCVVTAGGFGISHLTA

SEQ ID NO: 197627 - protein, 111 aa, Glycine max
  Clone ID: PAT_MRT3847_20483C.1.pep
SSRSKLIENSNSDSASKSLDSPAIRLPGTEDRIVLYFTSLRGIRRTYEDCYAVRMIFRGFRVWVDERDISMDANYRKELMSALFGENNNNNIKKGHVALPQIFIRGRHVGG

SEQ ID NO: 197628 - protein, 76 aa, Glycine max
  Clone ID: PAT_MRT3847_20484C.1.pep
NYLDAQYSGVIGIGTPTQPVICVRDACSSNLGVPSSKCYYTLACYTHSGDTANHSLSHDANGYSYIIFYRTGSGYG

SEQ ID NO: 197629 - protein, 110 aa, Glycine max
  unsure (1)..(110): unsure at all Xaa locations
  Clone ID: PAT_MRT3847_20485C.1.pep
NTGQMEANKPERXKITEPKTPYHPMIDDDRQLSHVRRSFDAYIDDQHHTMHAEAIWSAVNDVDFSSRRSTGQSGGXTSSEDVSETLEHDDDDRNLSYKEHRKAHYDEFLK

SEQ ID NO: 197630 - protein, 69 aa, Glycine max
  Clone ID: PAT_MRT3847_20486C.1.pep
SECTIAPFLVSMNFSFCITVDFGRIDCNYCTVLAFDTNGDILVQWVGGSIISFESLLGSYHSLGRRVSL

SEQ ID NO: 197631 - protein, 44 aa, Glycine max
  Clone ID: PAT_MRT3847_20487C.1.pep
LYSIHIVHSYDRFGIFLFIDLTQLFIKASSFPNYSLEILSQEIY

SEQ ID NO: 197632 - protein, 66 aa, Glycine max
  Clone ID: PAT_MRT3847_20488C.1.pep
EHSQTSISFSSVLSSPKMMTMAYRITDIIYSRINAQLNFISSTLCTVNTLRTNLQLKLSQPLGGSL

SEQ ID NO: 197633 - protein, 38 aa, Glycine max
  Clone ID: PAT_MRT3847_20489C.1.pep
DFPNQKSPLLLLPEFRTLLIIIRNPIGSSSKIMISGDL

SEQ ID NO: 197634 - protein, 75 aa, Glycine max
  Clone ID: PAT_MRT3847_2048C.1.pep
GKKKEKGPPQNGGGTKGPKFKGNLKRGGALGGFHLKGRKNPPRGAKRDIGGVKKKPPKKFGGYRGPPKRKKEKKS

SEQ ID NO: 197635 - protein, 55 aa, Glycine max
  Clone ID: PAT_MRT3847_20490C.1.pep
IHVLIRGAAMSRAITSIAGHFKSMYSYACATNIASSNTANIHHGLWLLIIVVDGM

SEQ ID NO: 197636 - protein, 46 aa, Glycine max
  Clone ID: PAT_MRT3847_20491C.1.pep
RLGLSSLDPMPFHPVAWHVWAKFTFLPHARSAVSLIRSIKPWGIAG

SEQ ID NO: 197637 - protein, 67 aa, Glycine max
  Clone ID: PAT_MRT3847_20492C.1.pep
YVHQELDKVSLIELFALFMKRHPVLAPHKRIRRLRKLLVPKAQPVPYFNIPCTPISSMCNPTYRIER

SEQ ID NO: 197638 - protein, 49 aa, Glycine max
  Clone ID: PAT_MRT3847_20493C.1.pep
DYKTRLVFFLRLILIEQEYIFCFTIMWLECQNLVMGISSIFLVISSFLL

SEQ ID NO: 197639 - protein, 52 aa, Glycine max
  Clone ID: PAT_MRT3847_20494C.1.pep
EKEGEKEPVSPPSSPEKKKKKGKGKGKKAVLGAAAPAAPVAGTVPENLTPQD

SEQ ID NO: 197640 - protein, 94 aa, Glycine max
  Clone ID: PAT_MRT3847_20495C.1.pep
TITSYPVTLSPIHHGWAIAQDRTLDITYQTCCAQGWRHHLDSVSGQDRDCLRILSHASDASECTIRVHGGTHECEQPGTFHNKAPIAVVKADET

SEQ ID NO: 197641 - protein, 56 aa, Glycine max
  Clone ID: PAT_MRT3847_20496C.1.pep
NSEPIKKKKKKKKKKKKKKKKKKKKKKKKKKKKIKKKKKNKKKGGGPPFGSSSPRE

SEQ ID NO: 197642 - protein, 51 aa, Glycine max
  Clone ID: PAT_MRT3847_20497C.1.pep
FKVMSSSSVSQRANSLLSMAGHLMHWWLVRKLKKNYRIIIWLSKSVGRSCI

SEQ ID NO: 197643 - protein, 46 aa, Glycine max
  Clone ID: PAT_MRT3847_20498C.1.pep
RGLTLLLHIRKHKLTTHSSTHNFKAPTAKKTLSAFGHFYIKLHFQF

SEQ ID NO: 197644 - protein, 44 aa, Glycine max
  Clone ID: PAT_MRT3847_20499C.1.pep
AMSMHLYFPCGIIIGALSNLEIPCAVFAYISNLPACSFVVRIKA

SEQ ID NO: 197645 - protein, 76 aa, Glycine max
  Clone ID: PAT_MRT3847_2049C.1.pep
IREGEMETEPGKRQCMSRTTTYFSSHSQFLDNIVLIAPSMLCLFPCFVLSLTIITSSLSTTSEIFSNISFSERFSH

SEQ ID NO: 197646 - protein, 71 aa, Glycine max
  Clone ID: PAT_MRT3847_204C.1.pep
DGLLDRSEIPDYLTGELPGYYGYDPYGLNLKTEDFAKYQAFDLIHATWAMLRAAGIIIPEALNRYGSHCGA

SEQ ID NO: 197647 - protein, 39 aa, Glycine max
  Clone ID: PAT_MRT3847_20500C.1.pep
LIIGDFIIQLLNIIFVFIILDHIFHPPPCLFPIILKLKI

SEQ ID NO: 197648 - protein, 136 aa, Glycine max
  unsure (1)..(136): unsure at all Xaa locations
  Clone ID: PAT_MRT3847_20501C.1.pep
AEEDYQPVVLTGDPLFSGRSGKSFKDPAGQMDQSIECAVVFVAKVNSIIXAQKYSVISLQLAVTLEPVDCRIHQELPWARNYGQGWLARSPRTIXEELKACPLMRVHQLSIQGGVGIKSPVRALVRISKQKHNCVG

SEQ ID NO: 197649 - protein, 69 aa, Glycine max
  Clone ID: PAT_MRT3847_20502C.1.pep
GKHYSLLLLTRWGVLHADTKVFTGHERYTMDLQSTIGGIGPDQNKTVTPNPGKLSTCTVGLDPKVNLFS

SEQ ID NO: 197650 - protein, 57 aa, Glycine max
  Clone ID: PAT_MRT3847_20503C.1.pep
EDMGQVGIIRSGWSAFVCFRRLYLLIRRPTPCVCCRSADKSRSESGRVGRRPSRPDP

SEQ ID NO: 197651 - protein, 76 aa, Glycine max
  Clone ID: PAT_MRT3847_20504C.1.pep
VLNQVMSKMAEMINSLCGGDEKLMREKDAPAVGFVVQRMGKFVKKRMFWRSLKCGKSPFLEFPASQVIFAIKQFFK

SEQ ID NO: 197652 - protein, 168 aa, Glycine max
  unsure (1)..(168): unsure at all Xaa locations
  Clone ID: PAT_MRT3847_20505C.1.pep
LRRHLCFLVSTERTPYRDDLFNPFGLGQVVRGFGSAVPWDAFSRLNAPIGVRWLSQSSAAAAKRHQPDKNDETVAKKRKEASPEEXCDQAVEGLTTAKAKAMAKRAQEEAQKDLQKRVAGECGTAFLGXIGPALRAVRVYXSXEDWAKKLVHWEXKFVSTLQHYWFGF

SEQ ID NO: 197653 - protein, 67 aa, Glycine max
  Clone ID: PAT_MRT3847_20506C.1.pep
FALPFHSRTPHIIPYTPSSSCTQRGIAAGRSHLLSLLIRKMAVHKPSVDWNSSFRFQGGSLDEAYDD

SEQ ID NO: 197654 - protein, 55 aa, Glycine max
  Clone ID: PAT_MRT3847_20507C.1.pep
KLLIYHTLLDRGETEKLRNPMGQPGLRKNVEEPFDPNSLRYTFTQCSLILPHSAT

SEQ ID NO: 197655 - protein, 26 aa, Glycine max
  Clone ID: PAT_MRT3847_20508C.1.pep
YHLKYTEVTLRMCTSRAHSMYVESYH

SEQ ID NO: 197656 - protein, 46 aa, Glycine max
  Clone ID: PAT_MRT3847_20509C.1.pep
QICLKNVGVLGMLQLIGTVNNLSASICKNANCSLFLFLFLFLGSVY

SEQ ID NO: 197657 - protein, 86 aa, Glycine max
  unsure (1)..(86): unsure at all Xaa locations
  Clone ID: PAT_MRT3847_2050C.1.pep
QKVPLKGIVDPIKFFPPVSKFGKKIPFWVVXPPPFKTHLLKSAPFSSKNNPSKTALVSSIGPXTNPSKPPIFFSVGPENNPSKPFF

SEQ ID NO: 197658 - protein, 215 aa, Glycine max
  Clone ID: PAT_MRT3847_20510C.1.pep
MASRCWPSDAELNELRERVSKIVDLNKEEVRVVVSPYRICPLGAHIDHQGGTVAAMTINKGILLGFAPSGSNQVVIRSGQFEGEVKFRVDEIQQPKDKTLDKDSSELQEQCNWGRYARGAVYALQSRGNNLSKGIIGYICGSEGLDSSGLSSSAAVGGACLMALLGPNDGVMAPSAILLSGRGCVIGLLGLTNGFMLLSPPLLPGHGGWGRPNAT

SEQ ID NO: 197659 - protein, 187 aa, Glycine max
  unsure (1)..(187): unsure at all Xaa locations
  Clone ID: PAT_MRT3847_20511C.1.pep
ARGWVMEKDLTIVLDPSFSNHVSSFWMIHRQSKRKLRVSIEHDMGGTSAAPKTLRLFVPYWIVDDFSLSLAYRVVEVEPLENVEMDSVLLSRAVKSAKTALKNPIGSLDRRHSNSRRSLQVLEVIEDNSPFPSMLSPQDYAGRSGVSMFQSPKDTRLGISASMQSSDVYSSGISLLEXEKKERIDVK

SEQ ID NO: 197660 - protein, 123 aa, Glycine max
  unsure (1)..(123): unsure at all Xaa locations
  Clone ID: PAT_MRT3847_20512C.1.pep
MGKKKFFIGGPKIKLPGGGLKTGEREKPGGTPNKRLGEKTPFSKWGKKKKGPPQCPFQKMAPPKGERGPPLNGAIKPGGGXVPPKGTLNFAXGLKPPPFGFFPFFFAPVGGFSPESLKRGAPF

SEQ ID NO: 197661 - protein, 73 aa, Glycine max
  Clone ID: PAT_MRT3847_20513C.1.pep
THKKLASIHTYQPSHPFSRFGGHPVLQVSSTRWFIAIVDDQTRVTSVYPIKGKSKARFIFQKFHSTITKIFLL

SEQ ID NO: 197662 - protein, 72 aa, Glycine max
  unsure (1)..(72): unsure at all Xaa locations
  Clone ID: PAT_MRT3847_20514C.1.pep
MAEQTEKAFLKQPKVFLSSNKTGKGKRPGKGGNRFCXSIGLAFKTGGGSHLMFYIDKTYPLSGGGSHPGGAP

SEQ ID NO: 197663 - protein, 64 aa, Glycine max
  Clone ID: PAT_MRT3847_20515C.1.pep
QMMCRYSPTQFEVTLQILVYPTFVCQLAPKMFWPCLLNVLYYCLLIFECMQADNDLPDHYKPLK

SEQ ID NO: 197664 - protein, 96 aa, Glycine max
  Clone ID: PAT_MRT3847_20516C.1.pep
MAESHSRTRPSGRKPSRLQSRAPSSLQINRALEWNVAIPLLSPLASSPPPLPLPPQKEDPPQQQRPTEKVVFKKWQHPAAPFCYEPPSLVPPFVNV

SEQ ID NO: 197665 - protein, 69 aa, Glycine max
  Clone ID: PAT_MRT3847_20517C.1.pep
AMATRRRLKGDVELKCNADNCWHTLMNSNEICPIAFLNDDNSIDALDVDGESPSSIPDISYVEGSTLVN

SEQ ID NO: 197666 - protein, 58 aa, Glycine max
  Clone ID: PAT_MRT3847_20518C.1.pep
KTTISMIFNTGKFCCIDSIVLFYIYTFRSRECNAFKYNNKFQKRSVVLTAFKFRSLSM

SEQ ID NO: 197667 - protein, 94 aa, Glycine max
  unsure (1)..(94): unsure at all Xaa locations
  Clone ID: PAT_MRT3847_20519C.1.pep
FNIVGALLREETDHTNPVTAALSIFVAPFRGVWTMLLVTFSITIGHIVPLMISRFXLLSTTTVGDYGHRKDLAWVKVNVXCAAVGXTSRFTPTP

SEQ ID NO: 197668 - protein, 74 aa, Glycine max
  unsure (1)..(74): unsure at all Xaa locations
  Clone ID: PAT_MRT3847_2051C.1.pep
MPIRNIAVGRPEEATQPDTLKAALAEFISTCIXVFVGSGSGIGYNKLTDNGAADPAGLIFASIGHAFALYVADS

SEQ ID NO: 197669 - protein, 126 aa, Glycine max
  unsure (1)..(126): unsure at all Xaa locations
  Clone ID: PAT_MRT3847_20520C.1.pep
PLVFVLRDAKNPSKFFKCIGSFQTIETSEGFKNGKSVFQPFQVEKYKAKNFKNPSIGKRFFNQLTLEPIVPNFPPKKTLPKKNFFKKSQIRRVLKNFLKGLFKFVLEKPGSPFKVXKTPFCNWGPF

SEQ ID NO: 197670 - protein, 104 aa, Glycine max
  Clone ID: PAT_MRT3847_20521C.1.pep
MRHKASRRDNPPHEGHHRHVPWGAQAPSCWQANARREHDSIIDRISNKRRAVIFQRLVLLGPCLVSQARCSIVRIIWFLSSVGCIILATLSSVGYYEPVSRRST

SEQ ID NO: 197671 - protein, 109 aa, Glycine max
  Clone ID: PAT_MRT3847_20522C.1.pep
STSQILEVLRQPCETLIRPRASSPTSFIFFPLNFAKFLHLSHVRFYISQVLIGISAIIPFFKRKNKVCKKKKIPSNKKIAKTKSNVMISLSLHSDTQSSGTCKQNKTSI

SEQ ID NO: 197672 - protein, 63 aa, Glycine max
  unsure (1)..(63): unsure at all Xaa locations
  Clone ID: PAT_MRT3847_20523C.1.pep
NVQIXKATSNPQMCGLXXSXSKTSXXPXXHDXXXXXDXAXXXYXFXQVXXHXXPXGVIDRXXR

SEQ ID NO: 197673 - protein, 50 aa, Glycine max
  Clone ID: PAT_MRT3847_20524C.1.pep
RVDIQTPTELDSQVILTKLICIFIIKLYISFMLIFLLLIFNQISNDLFLF

SEQ ID NO: 197674 - protein, 68 aa, Glycine max
  Clone ID: PAT_MRT3847_20525C.1.pep
LKTSVQYKVCHPLKISCICWIKLRHGFVLKKIILTSELLVFEDVLCKQFFWKYRVHSHNHDIYFSLSG

SEQ ID NO: 197675 - protein, 42 aa, Glycine max
  Clone ID: PAT_MRT3847_20526C.1.pep
GRSPLRAPRPYPLSLPAGIFVGILTGNHFPPGTTFALISPNF

SEQ ID NO: 197676 - protein, 169 aa, Glycine max
  Clone ID: PAT_MRT3847_20527C.1.pep
MDFDGRIKAYRFVAYSTVSFSIISLLSVCFTLPMLKSYVSNVGLKMDSELSSCQSNAKDIWSEVSQLKGLPLIVSGNRTARQVYGGSGGYGSCQDCCSGGGPGPAGPPGQPGRPGNPGAPGSPGQPGHSVQTPCEQVHPPPCTPCPGGQPGNPAPPGPPGQSRAPASPQ

SEQ ID NO: 197677 - protein, 93 aa, Glycine max
  Clone ID: PAT_MRT3847_20528C.1.pep
NIMFVNFLGVHRTDSRFQKHISSLVIKILGHFWQNQHACSYLGSSHACFRFLLEKKITEFQGYVTSCVHTLFLYIKWYSHTCDLPKFGSNVHH

SEQ ID NO: 197678 - protein, 97 aa, Glycine max
  Clone ID: PAT_MRT3847_20529C.1.pep
MAALGGNRDVAGSQNSLEIDGLARFAVEEHNKKQNALLEFEKVVSAKQQVVSGTLYTITLEAKDGGQKKVYEAKVWEKAWLNFKEVQEFKLVGDAPA

SEQ ID NO: 197679 - protein, 44 aa, Glycine max
  Clone ID: PAT_MRT3847_2052C.1.pep
IQLTETSYEGGWKFPKARATQEHELIQNNGAQPEKLHNPNELKP

SEQ ID NO: 197680 - protein, 304 aa, Glycine max
  Clone ID: PAT_MRT3847_20530C.1.pep
MDPPDSHQSQEQEAPKKNDVVFLILRWVLAILFPFLFFLSIPFLLGLLVLMFADFSIPNPISLPSQCKIVSTGVDIRSSKICELGLLDYIRLEVFHHFERSKFRCRYDYYWASVFKVEYKDHFSGQTQVAFAEAPNEALPLYCRPNFGAAWLTQYKFKVNETYDCWYTSGISKVRLHQDSLFGCDAHEQSTLEKSRQYSTMAMEMVISWFSSRGRTKHWRWETLAGVVTGFLTSLISITFIRFLQLLLPSLYQSFTTWIFSWRVNAVLIRRACFLLAYLSFVAWLAIEYGKRLGLMDIFRLPKS

SEQ ID NO: 197681 - protein, 207 aa, Glycine max
  unsure (1)..(207): unsure at all Xaa locations
  Clone ID: PAT_MRT3847_20531C.1.pep
VDSLKKETPQAPAPPPPPPPPPPPPPPPPPPPPPXPPPXPPPPPPPPPPPPPPPPPPPPPPSPPPPPPPQPPXPPPPPLPPPPSPPTPPPPPPPPPPPPPAPPPPPPPPPPPTTPFPAPIPPQHPTPPPPPPPPPPPPPLLFPPARXPPPPPPPPRPIPXPPPPPPPPPPPPPPPPPPPPPXPPPPPPPPPPPPPPPPPPPPPPPPP

SEQ ID NO: 197682 - protein, 95 aa, Glycine max
  Clone ID: PAT_MRT3847_20532C.1.pep
LSPFTLNYYAVFNPPSPFPLFELYMISLHGADTHLSWDKNITCCSYNITWGFNEKYLALHKNQCYDLGNLNISMRPSLFPYSITNQATKDKYAKR

SEQ ID NO: 197683 - protein, 87 aa, Glycine max
  unsure (1)..(87): unsure at all Xaa locations
  Clone ID: PAT_MRT3847_20533C.1.pep
XAGLLSFLPKQPLTSCRKLMRPQYKTFLSKGGTREEQTELSFFVILRQGYPFFNRGNKKIHTPWVFYYLMMPNRSPFSHCYHGEWCP

SEQ ID NO: 197684 - protein, 130 aa, Glycine max
  unsure (1)..(130): unsure at all Xaa locations
  Clone ID: PAT_MRT3847_20534C.1.pep
QSAHPFLLRNMHRPSTPILGSSPHRTTRPRLNGHPVGCTFIHGNHRPXLLCSQLRNLGPHQGCIWHAVSHHTTPLRNTQSTLFAVYFPATLATCFCIVLPLAQLGPLRYVACMAPYLAHLCMSSVATTAL

SEQ ID NO: 197685 - protein, 127 aa, Glycine max
  Clone ID: PAT_MRT3847_20535C.1.pep
IGMLPRAVGSSGCLPVLNIVDDEKQNQVSPCCLPVVDIIDDEKQNRVSEKEENWKLTPHGAKRDATLDLLQLDNSTVKKMRETKEFGELNNELPLQGEKGCLVVGGVWKKLTEEELLVIESSVRILV

SEQ ID NO: 197686 - protein, 251 aa, Glycine max
  Clone ID: PAT_MRT3847_20536C.1.pep
MDIAIFSPSSLFSEDDIPTREEDADSQESYVERKHQFPGMELVIREFSFHQLNANLLWPGTFAFAEWLVQHRSCIEGRRAIELGSGTGALAIFLRKSYNLDITTSDYDDQEIEKNIAHNCRANEIPIVPHIKHTWGDKFPNSDPDWDLIIASDILLYVKQYANLIQTISFLLNCYKPQERRAVSPTGNDENDGDVVLPRPAFLMSWRRRIGKEDELLFFNGCEKAGLKVKHIGSRVYCINSIENEISETKG

SEQ ID NO: 197687 - protein, 38 aa, Glycine max
  Clone ID: PAT_MRT3847_20537C.1.pep
RKECLDSVEIKLYQEVVRPQLGFIRPRRSGRARGGFTR

SEQ ID NO: 197688 - protein, 180 aa, Glycine max
  Clone ID: PAT_MRT3847_20538C.1.pep
MYKERERVGVSVSASKSEDRKRINDVLDKHLERSSPSTSRPITSASKNSNLQVEESETESEESDVSGSDGDDTSWISWFCNLRGNEFFCEVDDDYIQDDFNLCGLSSQVPYYDYALDLILDVESSHGDMFTEEQNELIESAAEMLYGLIHARYVLTSKGMAAMLDKYKNYDFGRCPRLYC

SEQ ID NO: 197689 - protein, 155 aa, Glycine max
  unsure (1)..(155): unsure at all Xaa locations
  Clone ID: PAT_MRT3847_20539C.1.pep
PTGPGPGGRPGKPGPGPGGGPGGPKGGRKKGGGKKGQKGVPGENGNRSQIHTTKEPEAKRGKPGGPKEXPNEKKRGGPKGRFPSGKPGGKTGIKKGPKRGEKGLEKWAPKGVFLSPRGRAKREGPLTAGPKRGAKRGPPRGAPRGEKTGGRGVTG

SEQ ID NO: 197690 - protein, 131 aa, Glycine max
  Clone ID: PAT_MRT3847_2053C.1.pep
HPFKPVWLIRLEGVSLLVALAGLVVAVILTKLSLPDIFASMLAFIPTGWGILSIAAAWKPVMKRLGLWKSVRSIARLYDAGMGMLIFVPIAFFSWFPFVSTFQTRLMFNQAFSRGLEISLILAGNNPNTGI

SEQ ID NO: 197691 - protein, 259 aa, Glycine max
  unsure (1)..(259): unsure at all Xaa locations
  Clone ID: PAT_MRT3847_20540C.1.pep
MYKERERGGVSVSASKSEDRKRINDVLDKHLERSSPSTSRPINTASKNSNLQVEESETESEESDVSGSDGDDTSWISWFCNLRGNEFFCEVDDDYIQDDFNLCGLSSQVPYFDYALDLILDVESSHGDMFTEEQNELIESAAEMLYGMIHARYVLTSKGMAAMLDKYKSYDFGRCPRVYCSGQPCXVGQSPSSFVRNVRCXGFEPCTFAPNSARVXDIDGAYFGTTFPHLFLMTYGQLKPQKPSQSYVPRVFGFKLHKP

SEQ ID NO: 197692 - protein, 65 aa, Glycine max
  Clone ID: PAT_MRT3847_20541C.1.pep
VLSANCILAVSFTYSCLCLSQNTDTLLFYIILFHLLPSHIYTAFEFVGPEWVHIFSMIFKTSVVI

SEQ ID NO: 197693 - protein, 253 aa, Glycine max
  Clone ID: PAT_MRT3847_20542C.1.pep
GVSVSASKSEDRKRINDVLDKHLERSSPSTSRPINTASKSSNFQVEESETESEESDVSGSDGDDTSWISWFCNLRGNEFFCEVDDDYIKDDLPVCGLSSQVPSLDYTLDLILDVESSHGDMFTEEQNELIESAAEMLYGMIHARYVLTSKGMAAMLDKYKSYDFGRCPRVYCSGQPCLPVGQSDIPRSSTVKIYCPRCEDLYYPRSKYQGNIDGAYFGTTFPHLFLMTYGQLKPQKPAQGYVPRVFGFKVHKP

SEQ ID NO: 197694 - protein, 287 aa, Glycine max
  unsure (1)..(287): unsure at all Xaa locations
  Clone ID: PAT_MRT3847_20543C.1.pep
MYRERGGVGSKSEVTSVDRKRINDVLDKQLERSSPSTSRAAGAINGKDRSSSSLLAAAKDSRSASVTAPISKNSNASDEESETDSEESDVSGSDGDDTSWISWFCNLRGNEFFCEVDDDYIXQDDFNLCGLSSQVPYYDYALDLILDVESSHGDMFTEEQNELIESAAEMLYGLIHARYILTSKGMAAMLDKYKNYDFGRCPRVYCSGQPCIPVGQSDIPRSSTVKIYCPRCEDIYYPRSKYQGNIDGAYFGTTFPHLFLMTYGQLKPQKPSQSYVPRVFGFKLHKP

SEQ ID NO: 197695 - protein, 206 aa, Glycine max
  Clone ID: PAT_MRT3847_20544C.1.pep
MYRERGGVGSKSEVTSVDRKRINDVLDKQLERSSPSTSRAAAINGKDRSSSSLLAAAKDSRSASVTAPISKNSNASDEESETDSEESDVSGSDGDDTSWISWFCNLRGNEFFCEVDDDYIQDDFNLCGLSSQVPYYDYALDLILDVESSHGDMFTEEQNELIESAAEMLYGLIHARYILTSNGMAAMLDKYKNYDFGRCPRVYCSG

SEQ ID NO: 197696 - protein, 81 aa, Glycine max
  Clone ID: PAT_MRT3847_20545C.1.pep
TQRYKQITKHNKGTSMFLVRWISHPRFRNPNHLNVRWPVNIIQYACVFHVRNHEHNNMHFPPPPPSVVFSQPVVCVGIRWV

SEQ ID NO: 197697 - protein, 58 aa, Glycine max
  Clone ID: PAT_MRT3847_20546C.1.pep
LEFLGKSRGIQRTRGVTVEHANLAAAAIDSFPESGAGDVRKSRKALIDFIPRVFSRTK

SEQ ID NO: 197698 - protein, 133 aa, Glycine max
  Clone ID: PAT_MRT3847_20547C.1.pep
MAVPLLSKKIVKKRVKKFKRPQSDRKISVKTNWRRPKGIDSRVRRKFKGCTLMPNIGYGSDKKTRHYLPNGFKKFVVHNVKDLELLMMHNRTYCAEIAHNISTRKRKDIVERAAQLDVVVTNKTARLRTQEDE

SEQ ID NO: 197699 - protein, 53 aa, Glycine max
  Clone ID: PAT_MRT3847_20548C.1.pep
SLGDGFRSLFKLVENPVTKTFYVFCRVPRLNRLNSYEFRECGSQLAILWAPFV

SEQ ID NO: 197700 - protein, 133 aa, Glycine max
  Clone ID: PAT_MRT3847_20549C.1.pep
MAVPLLSKKIVKKRLKKFKRPQSDRKISVKTNWRRPKGIDSRVRRKFKGCTLMPNIGYASDKKTRHYLPNGFKKFVVHNVKDLELLMMHNRTYCAEIAHNISTRKRKDIVERAAQLDVVVTNKTARLRSQEDE

SEQ ID NO: 197701 - protein, 590 aa, Glycine max
  unsure (1)..(590): unsure at all Xaa locations
  Clone ID: PAT_MRT3847_2054C.1.pep
RVRFTYVLTCQIYGKQKEEQKPEAADIALLMQRNEALRVAFIDVVETLKEGKVNTEYYRXSKLVKADINGKDKEIYSVKLPGNPKLGEGKPENQNHAIVFTRGNAVQTIDMNQDNYFEEALKMRNLLEEFHSDHGLRPPSILGVREHVFTGSVSSLASFMSNQETSFVTLGQRVLANPLKVRMHYGHPDVFDRIFHVTRGGISKASRVINISEDIYSGFNSTLRQGNITHHEYIQVGKGRDVGLNQIALFEGKVSGGNGEQVLSRDVYRLGQLFDFFRMLSFYFTTVGYYFCTMLTVLTVYAFLYGKAYLALSGVGETLEERARINKNTALSAALNTQFLFQIGIFTAVPMILGFILEQGFLKAIVSFVTMQFQLCTVFFTFSLGTRTHYFGRTILHGGARYQATGRGFVVRHIKFSENYRLYSRSHFVKXLEVALLLIVYLAYGYNEGGALSYILLSISSWFMALSWLFAPYLFNPSGFEWQKVVEDFRDWTNWLLYRGGIGVKGEESWEAWWEEELAHIXSLGSRIAETILSLRFFIFQYGIVYKLNMKGAASLTCYGLSILGTRSRSFSYTSLFLDSSFSLSLRGLP

SEQ ID NO: 197702 - protein, 133 aa, Glycine max
  Clone ID: PAT_MRT3847_20550C.1.pep
MAVPLLSKKIVKKRVKKFKRPQSDRKISVKTNWRRPKGIDSRVRRKFKGCTLMPNIGYGSDKKTRHYLPNGFKKFVVHNVKDLELLMMHNRTYCAEIAHNISTRKRKDIVERAAQLDVVVTNKTARLRSQEDE

SEQ ID NO: 197703 - protein, 133 aa, Glycine max
  Clone ID: PAT_MRT3847_20551C.1.pep
MKLSLFLLALFGIALVFVAAGDYGYGGYGKKKYGSGSHEYGYGKKKHYKKKHYDSGSYEYGKGSYGKKKYGDYGGKKYDDYGGYGKDYGYGGYGKKYSYCSGSHEYGKSYGGYGKSYGGYRKSYSAYGKAYDD

SEQ ID NO: 197704 - protein, 133 aa, Glycine max; identical to SEQ ID NO: 197702
  Clone ID: PAT_MRT3847_20552C.1.pep

SEQ ID NO: 197705 - protein, 168 aa, Glycine max
  unsure (1)..(168): unsure at all Xaa locations
  Clone ID: PAT_MRT3847_20553C.1.pep
DPDAYTLSRARAKALDRIEGEHGSHHPLHVLADKLLLIQLPEGHDIDKARSRKDXLTHVPVHCLFPLCETIVVYSTLYLGRALLDSMLSPCVYLLTHLNLKIAFSVQLLRXTELXEAHLSRLLYFIRLMYLDRVLEHLTVTYTTTVAADQNLDLVFYTLHLGFFDMVF

SEQ ID NO: 197706 - protein, 112 aa, Glycine max
  Clone ID: PAT_MRT3847_20554C.1.pep
ITFSFFIQQTNWRRPKGIDSRVRRKFKGCTLMPNIGYGSDKKTRHYLPNGFKKFVVHNVKDLELLMMHNRTYCAEIAHNISTRKRKDIVERAAQLDVVVTNKTARLRSQEDE

SEQ ID NO: 197707 - protein, 61 aa, Glycine max
  unsure (1)..(61): unsure at all Xaa locations
  Clone ID: PAT_MRT3847_20555C.1.pep
ERDNKKKEEEEKGKTXIKKEEDRSRSPLRLSQMKKFKSRTILTQRYQTFQGFSTSIFFFRI

SEQ ID NO: 197708 - protein, 229 aa, Glycine max
  unsure (1)..(229): unsure at all Xaa locations
  Clone ID: PAT_MRT3847_20556C.1.pep
MDDVCEGKDFTFPKQEEKILDFWSQIDAFHTQLSLTQDKPEYIFYDGPPFATGLPHYGHILAGTIKDIVTRYQSMTGHHVTRRFGWDCHGLPVENEIDKKLGIKKREDILKLGIDKYNEECRAIVTRYVSEWETVITRTGRWIDFKKDYKTMDLNFMESVWWVFAQLFKKKLVYKGFKVMPYSTGCKTPLSNFEAGQNYKDVSDPEVFITFPARGDQDDAXFVAWTTTP

SEQ ID NO: 197709 - protein, 66 aa, Glycine max
  Clone ID: PAT_MRT3847_20557C.1.pep
QQQAQTQSYGQVCHGTSHVSCSIVTRRTTTSVAVRRSSGISHSGKQLPCNGSWRHVTPCVESWWLS

SEQ ID NO: 197710 - protein, 92 aa, Glycine max
  unsure (1)..(92): unsure at all Xaa locations
  Clone ID: PAT_MRT3847_20558C.1.pep
FLLMFVVQRIVLVSXSPLLVCLLVTMCFEVLQLLFGGQGPLVKLACGCGLFVSRQILALGKKIVFKASSSQRLFRYFMCCRLSPVIRQKNPP

SEQ ID NO: 197711 - protein, 115 aa, Glycine max
  Clone ID: PAT_MRT3847_20559C.1.pep
RTTPPLPHYTYRIPSVIAFLTNETQNSAKHGEKKHCTKQWPLNLIHRPATKPPSSSSSFVTPRPSRTIQSIPGRNSRRSIAVRAAATEGAVATITAARECRLSPAKARHIADSRG

SEQ ID NO: 197712 - protein, 54 aa, Glycine max
  Clone ID: PAT_MRT3847_2055C.1.pep
LFFFTFISSLKISFNNKNYNENMLLTISNSSECLYRVYKLLICLDKLVISDCDF

SEQ ID NO: 197713 - protein, 76 aa, Glycine max
  Clone ID: PAT_MRT3847_20560C.1.pep
GVQILPVRNAVCYQLQLLIGLRSESRHASHLINDPFAAAGLACSKTRGVSDIRRCHARLARNTKRVYVNSRAKFRA

SEQ ID NO: 197714 - protein, 100 aa, Glycine max
  Clone ID: PAT_MRT3847_20561C.1.pep
LTTCHQLNPDNNNNNNNNSKITTKLKTVPVHMIFVKVVQASSILDLNTHTQNLLHYTLHLPHTHTPPNFILNHTTPKIIYTINPTQCTGTWVHWLSIDRQ

SEQ ID NO: 197715 - protein, 43 aa, Glycine max
  Clone ID: PAT_MRT3847_20562C.1.pep
LASTHFDAEPGHALMGLARLLLLLRALTLYTGHRCTSGQDIAR

SEQ ID NO: 197716 - protein, 69 aa, Glycine max
  unsure (1)..(69): unsure at all Xaa locations
  Clone ID: PAT_MRT3847_20563C.1.pep
QNGDSTNLTAAYQTFGVLLLXNTFCNNCTYXHPNKLFITGKKNLIFFHRSLLKRLFIIHIVHERADKDL

SEQ ID NO: 197717 - protein, 23 aa, Glycine max
  Clone ID: PAT_MRT3847_20564C.1.pep
FIVVSSMLNLPSSGQYYCWLGRA

SEQ ID NO: 197718 - protein, 57 aa, Glycine max
  Clone ID: PAT_MRT3847_20565C.1.pep
SLILPMQVPVAHCNQFMAHHNFCPLPNVSIPEVVTCSLLIPSLLMGAQYPPNIVCFS

SEQ ID NO: 197719 - protein, 294 aa, Glycine max
  Clone ID: PAT_MRT3847_20566C.1.pep
EPRAFGGNFPAQVRFNVASDCFPLPESIFKKAIKENYNEKNKFKTELTARQVKKLTELFRPVDVRSGLQPVRSPPKAIIPDRVAPDGVRGSWSYLHRERDPQIERQEEIPRDLFLTEKSYRAYGLQGDKRNAIPAPQVNPTLDPYERDYERDHLHHVDPLYRTNVPSYRESLHADPHHFNESEHQTYLRGGISAHADDPYHQYPYGASPRDPYLPPMSRQEISSSTYLAGGRSLTASDNLQRREAVQDRLYSTYSAADALSEYNRMQHYQESLKATAVPVSSRYSFAGPSYSLR

SEQ ID NO: 197720 - protein, 540 aa, Glycine max
  Clone ID: PAT_MRT3847_20567C.1.pep
MQRDRKKGSKYPPGESSNPQSSEKDDHNNDTNLAEGSSKPELSNKNTPQSLKAKSKIVKKSKGGKFKTIINKGSQQIGGKRRLRKNKKVVGNSDELPKEKSEKDGRNKEKESQNRSTHEKSPIENSHRAEKNKIIKVDKSEQKQKNKEKHTESDKGAGSRINRTKHGRVENTVSSEKKRGKPSGFIFMCSAKTKPDCFRYRVMGVSATKKDIVLSINPGTKLFLYDFDLRLLYGIYKASSSGGMKLEPRAFGGNFPAQVRFKIASDCFPLPESIFKKAIQENYNEKHKFKTELTARQVRKLTELFRPVDVHSGLQPVRSPPRAIIHDRDALDGVRGSWSHLHRERDPQIERQEEIPRDLFLTERSYRAYGLQGDRRNVIPASQVNPTLDPYERDYEREHLHHVDTLYHTNVPSYRESLHGDLHHLNESEHQTYLHGGISTHANNPYHPYRYGASPRDPYLPPMSREEISSSSYLAGGRSLIGSDILQRREAVQDRLYSTYSAADALSEYNRMQHYQESLEATAVPVSSRYSFAGPSYSLR

SEQ ID NO: 197721 - protein, 61 aa, Glycine max
  Clone ID: PAT_MRT3847_20568C.1.pep
SKNTAIAQTIWCLMLNANNYTFYSSRNTYSYRWHHQIQQFDVTIYLRRIRQAHYRTTERNE

SEQ ID NO: 197722 - protein, 138 aa, Glycine max
  Clone ID: PAT_MRT3847_20569C.1.pep
ECEIMDEILRRLSAVAEYRRKFYLCQIIHYRIRAAKRVLRDAKKEYATTQSLRRGGQLVTLVEGPYNDHNQRFIVKSSSGADRHIVGIHSKVEKEKLVPGTRVSLDRTTMTIMRILPSQVDPFVYNMIHEDPINANYS

SEQ ID NO: 197723 - protein, 49 aa, Glycine max
  Clone ID: PAT_MRT3847_2056C.1.pep
PAIILHLFFNYLIFQDDGKDKIFNYINNEIKLFSDCILSCQSVISSTKF

SEQ ID NO: 197724 - protein, 50 aa, Glycine max
  Clone ID: PAT_MRT3847_20570C.1.pep
SKQGISLHMYKATNRLCFCPLINTHLWASYQLLINSHDSLRFSSDIYDAP

SEQ ID NO: 197725 - protein, 215 aa, Glycine max
  unsure (1)..(215): unsure at all Xaa locations
  Clone ID: PAT_MRT3847_20571C.1.pep
VVVRGXARLFLAGPPLLKAATGEVATDEELGGAQMHAQVAGTAEYLAQNDADGVRIAREIIAQLPWNDRLPITAARTWAEPLYPIDELLGLIPDDPKKPYDVREIVARLADGSNFLEFKAEFDTQTICGHLQIQGRPCGLIGNNGPITPKGASKAAQFIQLCDQSRTPLVFLHNTTGFMVGTEAEQQGVIKHGAKMIQAVAKGRVPKITLVGGGF

SEQ ID NO: 197726 - protein, 276 aa, Glycine max
  Clone ID: PAT_MRT3847_20572C.1.pep
MDSIVVLSWFLCVLVVAARGGLGAVSRDIFILAGQSNMAGRGGVFGGKWDGDVPEECRPSPWVFRLSAGLEWEEAREPLHADIDVGKTCGVGPGMAFANEVVKARGAGGLVGLVPCAVGGTKIGQWSRGTRLYDELVQRAMQAIGGGTIRAVLWYQGESDTVRKKDAEGYKDKMERFIMDLRSDLNLPSLLVIQVALASGEGKFIEKVRRAQMGITLPNVKCVDAKGLRLKPDKLHLTTMSQVQLGIRLARAYLDSTTHHHYQFNFNINHTQVLAC

SEQ ID NO: 197727 - protein, 39 aa, Glycine max
  Clone ID: PAT_MRT3847_20573C.1.pep
GYVIHTHPIAKLYNLRCAFFLKNINQMSMNNRTIIVQVL

SEQ ID NO: 197728 - protein, 109 aa, Glycine max
  Clone ID: PAT_MRT3847_20574C.1.pep
KIIVAVGSNPRSWRVPIFSIRKWKGCLFKTLEPLFYFALEKQVSCVFEGRKQSFLLWMLENQPKNFKACCTAKWKKVCNAFRVFKINVSTKTVFFDIKVTSPSSFLGFY

SEQ ID NO: 197729 - protein, 30 aa, Glycine max
  Clone ID: PAT_MRT3847_20575C.1.pep
GQEGPVEGGKREIFTPMYFFLARKPDLDRN

SEQ ID NO: 197730 - protein, 106 aa, Glycine max
  unsure (1)..(106): unsure at all Xaa locations
  Clone ID: PAT_MRT3847_20576C.1.pep
SPNPARGKRISXTTFTIYSTPQPHGDSDHPEHRTHHLNKQPLIITPQMELYTKGDNDTPTQGNVALLRFRNPIKYNRGTHVFRRKDAQHETSTLHLSDIRHTLGTQ

SEQ ID NO: 197731 - protein, 246 aa, Glycine max
  unsure (1)..(246): unsure at all Xaa locations
  Clone ID: PAT_MRT3847_20577C.1.pep
VTSSPFRLSPSLSPLFTGTGINSLCSDRNKVVLSSAESTVSCXAAMDLASNLGGKIDKAEVLSAVQKYEKYHVCXYGGQEEERKANYTDMVNKYYDLVTSFYEFGYAYSHASAHASADAWVRESIKRHEHFLASQLGLKPGQKVLDVGCGIGGPLREISRFSLTSITGLNNNEYQITRGKELNRIAGVDKTCNFVKADFMKMPLPDNSFDAVYAIEATCHAPDAYGCYKEIFRVLKPGQCFAAYEW

SEQ ID NO: 197732 - protein, 137 aa, Glycine max
  unsure (1)..(137): unsure at all Xaa locations
  Clone ID: PAT_MRT3847_20578C.1.pep
KRQGILDIDYRWGGDPTIIGPGASGLGASIPIQLKDLRXFTIRRVIFQLXEDIPCIGGVGVALIAEPKPRIDYTLQAVGGRLTGIPALSDMIDDTGNSIATDMLQWPHRIEDPLGGVPADTNELELIPQRKLALTES

SEQ ID NO: 197733 - protein, 231 aa, Glycine max
  unsure (1)..(231): unsure at all Xaa locations
  Clone ID: PAT_MRT3847_20579C.1.pep
HASVRLISLSRSGFPIHRCLRLLLSLSPLPYRNKVVLSSAEGTVGCXAAMDLASNLGGKIDKAEVLSAVQKYEKYHVCYGGQEEERKANYTDMVNKYYDLVTSFYEFGWGESFHFAPRWKGESLRESIKRHEHFLPLQLGLKPGQKVLDVGCGIGGPLREISRFSSTSITGXLNNNEYQITRGKELNRIAGVDKTCNFVKADFMKMPFPDNSFDAVYAIEATCHAPDAYGC

SEQ ID NO: 197734 - protein, 268 aa, Glycine max
  Clone ID: PAT_MRT3847_2057C.1.pep
MASPASNPQSAETKKSRGRQRVDIKKMSNEANLQVTFSKRRSGLFKKASELCTLCGAEVALVVFSPGQKVFSFGHPSVDGVIERYLTGVAPPEADNMNYIDVHRMAKVVDLNAQLTHIKDQLEAERKRAKELGGIQKEAETHLWWARPVADITDINNLLKLKKAFQQLKQDVSGLAGMALFQSVANGNPGHQFFAGASSSAVPNVVLQSQPLPVAQVFPPAVPQMMFPPPIFENYMVNPNGFDDMGMGGGGFGGAGPSSAGGGGGGFF

SEQ ID NO: 197735 - protein, 196 aa, Glycine max
  unsure (1)..(196): unsure at all Xaa locations
  Clone ID: PAT_MRT3847_20580C.1.pep
HLLPNSRYIRLLFSLSIQHRNEVVLCSAEGTGGCSRLAAMDLASNLGGKIDKAEVLSAVQKYEKYHVCYGGQEEERKANYTDMVNKYYDLVTSFYEFGWGESFHFAPRWKGESLRESIKRHEHFLPLQLGLKPGQKVLDVGCGIGGPLREISRFSSTSITGVEXNMEYQITXXKELNRIAGVDKDLHFVKADFMKM

SEQ ID NO: 197736 - protein, 408 aa, Glycine max
  Clone ID: PAT_MRT3847_20581C.1.pep
IHSVFPRVRTAARRRQKGVPNSSLSPPSFISLSTPISKQSRFSLSLQHRNEVVLCSAEGTGGCSRLAAMDLASNLGGKIDKAEVLSAVQKYEKYHVCYGGQEEERKANYTDMVNKYYDLVTSFYEFGWGESFHFAPRWKGESLRESIKRHEHFLPLQLGLKPGQKVLDVGCGIGGPLREISRFSSTSITGLNNNEYQITRGKELNRIAGVDKTCNFVKADFMKMPFPDNSFDAVYAIEATCHAPDAYGCYKEIFRVLKPGQYFAAYEWCMTDSFDPQNPEHQKIKAEIEIGDGLPDIRLTAKCLEALKQAGFEVIWEKDLAVDSPLPWYLPLDKSHFSLSSFRLTAVGRLFTKNMVKVLEYVGLAPKGSLRVQDFLEKAAEGLVEGGKREIFTPMYFFLARKPDLDRN

SEQ ID NO: 197737 - protein, 31 aa, Glycine max
  Clone ID: PAT_MRT3847_20582C.1.pep
IIMAVAFFMICIIFLFCIYLVDYVELLVICM

SEQ ID NO: 197738 - protein, 82 aa, Glycine max
  unsure (1)..(82): unsure at all Xaa locations
  Clone ID: PAT_MRT3847_20583C.1.pep
GKALRATACATSCALAAHKLRRPVRMYLNRKTDMIMAGGRHPLKTTYXVGFKNDGKITALDLKILVNAGIYVDVSPIIPRNM

SEQ ID NO: 197739 - protein, 65 aa, Glycine max
  Clone ID: PAT_MRT3847_20584C.1.pep
ATHAVAYTLSKHPLKQYTWRVSGLMHLLYEQRLFQRLKNAYRTECTIPKTYRAPIKLHRSHEPKN

SEQ ID NO: 197740 - protein, 81 aa, Glycine max
  Clone ID: PAT_MRT3847_20585C.1.pep
RKILNSSSTTASYKLKGKNAYVPGSELPFFSGQYYCHSTARYGNKKREVLVSNFTSLTGLNLSLTSNKQFSLISCVKVYML

SEQ ID NO: 197741 - protein, 92 aa, Glycine max
  Clone ID: PAT_MRT3847_20586C.1.pep
PYEALQRLNHYPAMKSLMEGGTAIQDGTLTINERGYHSMPYAVITGRAKIGCSASFMNVPKIKGTHTTMKLRMLAPARTYGALNEGLYMNIY

SEQ ID NO: 197742 - protein, 273 aa, Glycine max
  unsure (1)..(273): unsure at all Xaa locations
  Clone ID: PAT_MRT3847_20587C.1.pep
KGEEWFPSSWKSADDPGQERLFKIDRRGFPKXVLLKGTTISTRFGPWNGFYFSGSLIDSRSPDVLFEFVLTKKETFSQFQALKKSLSYRFWVTTKRNALVSLWESQVSDWHTLYTQPSSPCEYYGKCGANSVCNASNPRCTCLDGFVAHINRXWXCVRTIRLTCNKDGFRRYTGMVLPDTSSSWYDRNLNLQQCKDLCLQNCSCTAYANLDIWXEGSGCLLWYHDLIDLRHYPQAQGGQDIYIRYSDSELDHSHNGLSKKKIEAIISCSTTFV

SEQ ID NO: 197743 - protein, 99 aa, Glycine max
  Clone ID: PAT_MRT3847_20588C.1.pep
GEAFVKPVLTPFEAEVALGVIPGWWEKNEVWAQGGGCCNKSGSCCEDAKGGEDFGGDYPMDYYAQDGGEWNSSYVKKSTRPARRVSVSSVADTAISQQP

SEQ ID NO: 197744 - protein, 87 aa, Glycine max
  Clone ID: PAT_MRT3847_20589C.1.pep
NLAADVGRNTASNRSFSTFISHSMRALLRNHLLHLSCSPARTLLVRLQACELSSSSSSPPRDSRYVRVSVWWDLRSCPVPDDVDPLK

SEQ ID NO: 197745 - protein, 166 aa, Glycine max
  Clone ID: PAT_MRT3847_2058C.1.pep
VVYCRKFSLPQWDIMSSGGSVQSVANLAKGKDRGNVVNIQKIQSKDNSVWILQDSCTSAYESMVVYAPVEFAGIQSVLTGCDSSNLAILPSGFSILPDGIEGRPLVISSRQEEKYTEGGSLFTMAFQILANPSPTAKLTTESVESVNNLVSCTLRNIRTSLQCEDG

SEQ ID NO: 197746 - protein, 42 aa, Glycine max
  Clone ID: PAT_MRT3847_20590C.1.pep
IKKKILYILEREEVEGGFMLPVKKVLNFLLTFYLVFLDCCVI

SEQ ID NO: 197747 - protein, 38 aa, Glycine max
  Clone ID: PAT_MRT3847_20591C.1.pep
GFQGFSYPFGFMVLVVVHMEFWSLKFPGVGIPMGYSCS

SEQ ID NO: 197748 - protein, 72 aa, Glycine max
  Clone ID: PAT_MRT3847_20592C.1.pep
VNHLHVRDVCIFFRMFVCFLDTVNHALTLVSVSVPLLACRTLFNVGSRCQGCVFSIPRNKSPCAAFALCAAW

SEQ ID NO: 197749 - protein, 116 aa, Glycine max
  unsure (1)..(116): unsure at all Xaa locations
  Clone ID: PAT_MRT3847_20593C.1.pep
RSFILRLHQYLKINTALPTLALXEAAVFLISQGKALSLESQIIXLAAGNPLALLKWEGSYPNLPSILLYCHTRPRPIGATSSGPTTPFNAHLDISGRIFSPGSHDMKCVGMHSSFR

SEQ ID NO: 197750 - protein, 70 aa, Glycine max
  unsure (1)..(70): unsure at all Xaa locations
  Clone ID: PAT_MRT3847_20594C.1.pep
TXXAMXXXTVXXXXXXXXXGIILCKXXXXXXXPXGQQLVGXXVTXXVXXXGDSRAEFXSLRTXXXNLKCX

SEQ ID NO: 197751 - protein, 41 aa, Glycine max
  Clone ID: PAT_MRT3847_20595C.1.pep
NLIIRASNNVITIFYETPLSSKNRPTMDLNSHTQHIVYVPP

SEQ ID NO: 197752 - protein, 564 aa, Glycine max
  unsure (1)..(564): unsure at all Xaa locations
  Clone ID: PAT_MRT3847_20596C.1.pep
MAMSTILLLTFFSFIYGSAATHHVYRNLQSLSSDSSNQPYRTAYHFQPPKNWINDPNGPLRYAGLYHLFYQYNPKGAVWGNIVWAHSVSKDLVNWTPLDPAIFPSQPSDINGCWSGSTTLLPGNKPVILYTGIDLLNQQVQNLAQLLDXTPKFYVVKRVHPSKVVXPIWSTSFCFRGFARVYISFLQNIHGHWRVLVGSKRRTRGIAILYRSKDFVNWVQAKHPLYSILGSGMWECPDFFPVLNNDQLGVDTSVNGYDVRHVLKDKAQLYAFNNGTADVKITRLSAWSMKKAQIHXKVSRXYGKYYASKTFFDDGKKRRILLGWANESSSVAADIKKGWSGIHTIPRALWLHKSGKQLVQWPVVEVEKLRAYPVNLPPQVLKGGKLLPINGVTATQADVEISFEVSNLREAEVLDYWTDPQILCSKKGSSIKSGLGPFGLLVFASEGLQEYTSVFFRIFRHQHKYLVLLCSDQSRSSLNKDNDLTSYGTFVDVDPLHEKLSLRTLIDHSVVESFGGEGRACITARVYPTLAINDEAQLYAFNNGTADVNITKLNAWSMKKAQIN

SEQ ID NO: 197753 - protein, 50 aa, Glycine max
  Clone ID: PAT_MRT3847_20597C.1.pep
PPPPKKKKINKIKYPYIKHKLRNTRTPQELQFKAENFTSMEHIKFSLQTQ

SEQ ID NO: 197754 - protein, 98 aa, Glycine max
  unsure (1)..(98): unsure at all Xaa locations
  Clone ID: PAT_MRT3847_20598C.1.pep
SVRTRPHTLLVNLGGXIEIISNGIFKSPVHRVVTNAEKERLSGVLFYSIDPEREIRPADKLIDENHPTLYKKVKVKEYTGGLYEHFSRGKLVKETAKI

SEQ ID NO: 197755 - protein, 54 aa, Glycine max
  Clone ID: PAT_MRT3847_20599C.1.pep
SCEFTVKNPQPLIGSLYVFVSEMCVCVNQFIHKHLNQFYPVPIITKMCNIQCYL

SEQ ID NO: 197756 - protein, 88 aa, Glycine max
  Clone ID: PAT_MRT3847_2059C.1.pep
TPSPLEGGFCPFLRELKGNGKPPICFFRLEESVRNFNFIFHPNGRANLQLIFSPVLKGNLTLHRAPSRIIFSGLPGGLSLIIKALGGF

SEQ ID NO: 197757 - protein, 97 aa, Glycine max
  Clone ID: PAT_MRT3847_205C.1.pep
AFKLVKPLYLVLPCAAFPMGLFFKRDGGVSKNGLNKSPFSWVSKPPFFYPLANLFGGGLFLGGGFPFSKKKPRVFFPPQGIFLGWGGGFTQGKLTWG

SEQ ID NO: 197758 - protein, 50 aa, Glycine max
  unsure (1)..(50): unsure at all Xaa locations
  Clone ID: PAT_MRT3847_20600C.1.pep
YAYTNEGWAKYSYASSLLATLRYLILISLDQGLCLGXTYGLEXCSSALQL

SEQ ID NO: 197759 - protein, 54 aa, Glycine max
  Clone ID: PAT_MRT3847_20601C.1.pep
NEASSIQKSYTFSHIYGPFNMSCMNRALQNVQVVLHIDLKFTHLVSLSPRFQGT

SEQ ID NO: 197760 - protein, 68 aa, Glycine max
  Clone ID: PAT_MRT3847_20602C.1.pep
RISPAPPLFFSKPLQNSQCLFGQNTPPNTNFFFRLGLRRTKALARLKWWLNTGSYALKKNIRSKKNKK

SEQ ID NO: 197761 - protein, 203 aa, Glycine max
  unsure (1)..(203): unsure at all Xaa locations
  Clone ID: PAT_MRT3847_20603C.1.pep
MAFILIIASLVFLWIVSLCKVLLLPRIPFGNHFTHNNGRAFRKRNALLVIAHPDDESMFFTPTINFLTSKGHNVQILCLSIGDADGKGNIRKQELFQACVALKVPMQQVKIVNHPDLQVLIQXDGFGKVWSHNLLAKIIEEEITRCCIDMIITFDSHGVSGHCNHRDVHYGVWLAPIFCANIVVQLISGCPYFLAMLHTNGTM

SEQ ID NO: 197762 - protein, 195 aa, Glycine max
  unsure (1)..(195): unsure at all Xaa locations
  Clone ID: PAT_MRT3847_20604C.1.pep
MFFTPTINFQTSKGHNVQILCLSIGDADGKGNIRKQELFQACVALKVPMQQVKIVNHPRSAGFDPXDGFGKVWSHNLLAKIIEEEITRCCIDMIITFDSHGVSGHCNHRDVHYGVCKLLHDTLQRDIEVWELVSTNILRKYSGPVDIWLSIFLTMLHTNGTMQCLVNEHSRRSGIAMAQHSSQWVWYACFTLLLL

SEQ ID NO: 197763 - protein, 70 aa, Glycine max
  Clone ID: PAT_MRT3847_20605C.1.pep
SRRASRLRGSNRPGKRLIITIHDIKQRQLQIPYIIQVSIRTLSKGSQASSTFNTNQLFTLHNGMQLNGYQ

SEQ ID NO: 197764 - protein, 61 aa, Glycine max
  Clone ID: PAT_MRT3847_20606C.1.pep
MMRSMDLFGEMDEQVSSMAMDVDDVDPLEIFAEGVIAADNKLADADFFNNFQDDFDDSDIN

SEQ ID NO: 197765 - protein, 55 aa, Glycine max
  Clone ID: PAT_MRT3847_20607C.1.pep
SLKFNHDYDRLLQLLVFNEEFLVRANNHFWLTTSHSFEHSGNGSYRLNGTYNSYD

SEQ ID NO: 197766 - protein, 722 aa, Glycine max
  Clone ID: PAT_MRT3847_20608C.1.pep
MDELNGAMTTENSNAEVVRWERFLPRMVLRVLLVEADHSTRQIIAALLRKCSYTVIAVPDGLKAWETLKKKAPELDLILTEVELPAISGFALLSLIMEHDICKNIPVIMMSSHDSVSMALKCMLKGAVDFLIKPIRKNELRNLWQHVWRRHAISTPTQNTIFSPKKLKTASEDNSASNKSSGSVASSKKNNECSERLSEAQSTCTSPIFEAESTYVENMQDVPQYVHCQVMQTLVQSTCTSPIFEAKSTYVENMQDVPPLKSSKLNKIDMVKHEKFAQFERESAEHNDETEDKSVTIVSDAARCDKTSELTELRPEQDCGVAEPETENEDEILKSELDGDNSHVSMMQGCSAERVKPSKGAIDLIATVGNLPKHLDENCSLNGGNTTKFDCETQLELSLRSDFPGSSGNQASEATEESQRLNHSNTSAFSWYSNSKLLQPHFSTPSITFPEVNNLSWDSHESHKLSGITSGNCQYGGSNQNLENMIGTVICQYGQVTPKLSNSQCGLLPVSGVISNLKSEGHGNVFTSLFYAQSGIHPMSSPKPVCQNESSPFPTSTSTQSYPESHNSDQLHDCSNDATCLNQNVKDNTDSDHARHDSPVADQSAGNSLCHDAANHVNSSAYGSMDSGNDGNATSAIVSKNAPDGFSDSGCHNYDGFRVTDPHRSSQREAVLVKFRLKRKERCFEKKVRYQSRKRLAEQRPRVKGQFVRQHDHPVAEAGGDS

SEQ ID NO: 197767 - protein, 43 aa, Glycine max
  Clone ID: PAT_MRT3847_20609C.1.pep
SSIENQLLILVKYLILHKFDFFGLIQQVLIYLFKISSINNLIH

SEQ ID NO: 197768 - protein, 308 aa, Glycine max
  Clone ID: PAT_MRT3847_2060C.1.pep
MSTNSKENLFIVFLVTLWYSSNIGVILLNKYLLSNYGFKFPIFLTMCHMSACAVLSYVSIVFFKVVPQQMIKSRSQFIKIATLSLVFCASVVGGNISLRYLAVSFNQAVGATTPFFTAVFAYLATLKREAWVTYGALVPVVAGVVIASGGEPGFHLFGFIMCLSATAARAFKSVLQSILLSSEGEKLNSMNLLLYMSPIAVLVLLPAALIMEPNVVDVILTLAKDHKSVWLLLFLNSVTAYAANLTNFLVTKHTSALTLQVLGNAKGAVAVVISILLFRNPVTVLGMGGYTITVMGVAAYGETKRRFR

SEQ ID NO: 197769 - protein, 77 aa, Glycine max
  Clone ID: PAT_MRT3847_20610C.1.pep
TIATTTLEHFWWKQVVNNFEILPQIAMLLCVNNSSIKLASIPTFYDKFKYIGIACYLIRDYISSDLLILIHIYISKY

SEQ ID NO: 197770 - protein, 116 aa, Glycine max
  unsure (1)..(116): unsure at all Xaa locations
  Clone ID: PAT_MRT3847_20611C.1.pep
RRRRRENSNAELVQWERFLPRMVLRVLLVEADHSTRQIIAALLRKCSYTVIAVPDGLKAWETLKKKASELDLILTEVELPAISGXALLSLIMEHDICKSIPVIMMASHGSVYMAFE

SEQ ID NO: 197771 - protein, 254 aa, Glycine max
  Clone ID: PAT_MRT3847_20612C.1.pep
DPRVRRNTRFLYEKTPTDVLSERDLVSLLERCIKAEIFGVALELLEHKLKDLDPVRHPQLLTDVVSGTLGALAQMPSVFSSGCCQSGPPNRNCRIRKLSYTHYQVQEILRHLKNMVAKLNNRQLIEASVYDAMLDAAKHGIVEFIEAMREANHELLWALDSHKRGVFSYAVLNRKQDVFQLIHTVNGRRDIIKSRKDRFGNNLLHLAGHLGPSSELSQTPGAALQMQREYKWFEVIHLFFLFTYIHFHITCAMY

SEQ ID NO: 197772 - protein, 90 aa, Glycine max
  Clone ID: PAT_MRT3847_20613C.1.pep
MTLWFVFALMTVAAIFAVLWPLGRSARAQNQGSEVVVYKDQLTEIERDLASGLIAAPEAEAARVEISRRLLAAAGSEPVSEPKSSLKWRR

SEQ ID NO: 197773 - protein, 49 aa, Glycine max
  Clone ID: PAT_MRT3847_20614C.1.pep
MDHQQVYRQIDLLSEYLNQQGINETLGLLRILVVDLKRANKAALTLVNF

SEQ ID NO: 197774 - protein, 50 aa, Glycine max
  Clone ID: PAT_MRT3847_20615C.1.pep
MEKIALGTFDDSFSAASFKAYFAEFHATLIFVYAGDGSAIGYNELTKDAA

SEQ ID NO: 197775 - protein, 43 aa, Glycine max
  Clone ID: PAT_MRT3847_20616C.1.pep
FEGSPLYGLELKKMEFLSIFLDQCCIIFYVGLLNLVKFFFLVS

SEQ ID NO: 197776 - protein, 94 aa, Glycine max
  Clone ID: PAT_MRT3847_20617C.1.pep
HYQNKGNHQMGRKPIPPRPHDPYPAHGDPSNTKPPKTPFPNAQFPTSLRRENPKGEHGATGGPHKNSLTSWSQNPAQMNGCDRMPLKEPRVGPH

SEQ ID NO: 197777 - protein, 199 aa, Glycine max
  Clone ID: PAT_MRT3847_20618C.1.pep
MLKLGIVFLILILTPLLPAALSKYEAIEPLLQRLDSKRAPPSVQEAAAIGLLKRLLPIHFSSFQFKIVSKDVCGGDSCFLINNHNKSSQNEPEIIIRGTTAVEIASGLHWYLKYWCGAHVSWDKTGGIQTTSIPEPGSLPSLKDEGLKITRPVPWNYYQNVATSSYSYAWGNWERWEKELDWMALHDANLPLAFTGQEA

SEQ ID NO: 197778 - protein, 38 aa, Glycine max
  Clone ID: PAT_MRT3847_20619C.1.pep
FIKSIYYSLLIWYNNKYLIYLSFVFFYNRIIFSFIFFL

SEQ ID NO: 197779 - protein, 87 aa, Glycine max
  Clone ID: PAT_MRT3847_2061C.1.pep
SPHTPDNPKETFLAGLIKGIGQWDWRQSLSFHLQVSTVWLSWGKLKQKNTPTEKEITFRNIYSSLTLYSFCAHSREYNVHPLSRGVL

SEQ ID NO: 197780 - protein, 105 aa, Glycine max
  Clone ID: PAT_MRT3847_20620C.1.pep
CPPRKGMTPGAPLTPPYYSSGPSSSLFSSIGEFPFYHLLTTMQAHKSAQRLAHYHLLTTMPFYHLLTTMPFYHLLTTMPFYHLLTTMPFYHLLTQAHQSAQRFQA

SEQ ID NO: 197781 - protein, 128 aa, Glycine max
  Clone ID: PAT_MRT3847_20621C.1.pep
EKSRTTIYALDRSFETILSSFAPPIVGALAQDVYGYKPITKGSSDEIEKDRENAASLAKALYTAISIPSVLCVSIYSFLYCTYPRDRERARMEALVESEMQQLQVEDYNDVDYPREEDDNDEKVLLSR

SEQ ID NO: 197782 - protein, 148 aa, Glycine max
  unsure (1)..(148): unsure at all Xaa locations
  Clone ID: PAT_MRT3847_20622C.1.pep
MTLPWPSSGMNLCHNSFLSLNPPFQTRIQLPFSANIPFSHPLTSISPHFNSNSLQKPRFPRASANATTNEAVIMPSMAEILDASRAQKLDLQLXTLGPFFRITARSMVTGTELGRAEGXVRFWVGGKILHLDSIKLXRETLDMEKSIF

SEQ ID NO: 197783 - protein, 48 aa, Glycine max
  Clone ID: PAT_MRT3847_20623C.1.pep
KKKQHFPPARGKSYYFFFPFSVAPIPVAFSACRLEVKYEIFSPHPHDP

SEQ ID NO: 197784 - protein, 86 aa, Glycine max
  unsure (1)..(86): unsure at all Xaa locations
  Clone ID: PAT_MRT3847_20624C.1.pep
GALAPPPAAPASPLRALSCPSPRGXSFFFPLXGPSESACVSPLLFXRSSFLCXPGAFXCFRGLFSLFPCALXRPCFPECPLPXLSP

SEQ ID NO: 197785 - protein, 54 aa, Glycine max
  Clone ID: PAT_MRT3847_20625C.1.pep
LSASSYGHASLPCFRDQPTTTFLIPFSLLSTLINIIHLINFTLEAIIIQTNYIH

SEQ ID NO: 197786 - protein, 85 aa, Glycine max
  Clone ID: PAT_MRT3847_20626C.1.pep
NSIKICGILNFLILLHLIEPSIFPPSNSHTSIETHPLQPYVMPSHAVNPENHQQNSLPPPPFLAAVALPAYVSNRKLDLGVNFRL

SEQ ID NO: 197787 - protein, 96 aa, Glycine max
  Clone ID: PAT_MRT3847_20627C.1.pep
EESMHMNMMMKTVCGFAILIVAVHLQVEVSPYAHAVTCIPVELSPCLGAITSFQLSSTICCHKVKEQMQCHCCYLKSPSPMPYANSPVSRKVASPC

SEQ ID NO: 197788 - protein, 73 aa, Glycine max
  Clone ID: PAT_MRT3847_20628C.1.pep
LLANMGVPELMFRVSFMAVLIKLASATNYIVGGPSGGWDTNSNLQSWASSQIFSVGDSLGKSLLACIKTLPLC

SEQ ID NO: 197789 - protein, 46 aa, Glycine max
  Clone ID: PAT_MRT3847_20629C.1.pep
SLYVDDMLVTRSFVKTLCIFLCRRLIYGKSLIKSLLDLASYFFILS

SEQ ID NO: 197790 - protein, 57 aa, Glycine max
  unsure (1)..(57): unsure at all Xaa locations
  Clone ID: PAT_MRT3847_2062C.1.pep
KPYYHHXRRSQTLLLXHKPYPLFQIPKQPKMLXEAXEKCXTVIFVQLLIRVVVEEVI

SEQ ID NO: 197791 - protein, 289 aa, Glycine max
  Clone ID: PAT_MRT3847_20630C.1.pep
LEGIDTWKKETIMKKEAAKMLESDSSPGYVSEEDYKSLPAGSADPRDEEVPLLKNIYWKELLVLVYVWVAFLIVQIIKTYTKTCSILYWVLNSLQVPIAISVTLYEAICLCNGTRVISSKGKENTDWMKLHKICLYCSCGIIAGIVSGLLGLGGGFILGPLFLELGIPPQVASATSTFAMVFSSSMSVVQYYLLERFPVPYASYFILVATIAALTGQHVVRKIIAIFGRASIIIFVLAFTIFLSAISLGGVGIENMVEKMENNEYMGFANICHVNLGGVFPTYRSGSFL

SEQ ID NO: 197792 - protein, 97 aa, Glycine max
  Clone ID: PAT_MRT3847_20631C.1.pep
DDPLFKLVSKLYEVVPPMRIELGKVKNPWPNVDAHSGVVLNHFGLTEAKYFTVLFGVARSIGVGPQLILDRILGLPLERPKSVTMAWLEEYCKNAAK

SEQ ID NO: 197793 - protein, 81 aa, Glycine max
  Clone ID: PAT_MRT3847_20632C.1.pep
SSHLSEKKKGVVFLNGQQQGGGVICGGPPSWNRAPEGQSWGFFYLNNLAKRVYIFWGPHSKGGWFSTPIGEIPAPNFFFFS

SEQ ID NO: 197794 - protein, 65 aa, Glycine max
  Clone ID: PAT_MRT3847_20633C.1.pep
YWTAEMRCNACWREVEGRAISTTCGHLLCIHIQSILTLSSSILIKYDQFSSYQIRLNFLHILSLK

SEQ ID NO: 197795 - protein, 62 aa, Glycine max
  unsure (1)..(62): unsure at all Xaa locations
  Clone ID: PAT_MRT3847_20634C.1.pep
VNELHYPPKYMPILNKLFYRTPYPPKSSYRVVLIHIFSIIQNVLSIVPPGRXSPGNSEKTTR

SEQ ID NO: 197796 - protein, 79 aa, Glycine max
  Clone ID: PAT_MRT3847_20635C.1.pep
ADGTIPGFTASSFPHDMLVKNPVEFWVNFAINLERGINAEGHAYYLTQYTLVHVLGMDDWPSSIDESKSWIASLAVTYS

SEQ ID NO: 197797 - protein, 291 aa, Glycine max
  unsure (1)..(291): unsure at all Xaa locations
  Clone ID: PAT_MRT3847_20636C.1.pep
MALGTVTRRLGNKLLPALSPSPRLLHSHATSFGFKQVNEEEKARMVGDVFTSVAXSSYDLMNDLMSAGLHRLWKDRLVSKLNPFPGMKHLDVAGGTGDVAFRILENIHKVKLRGLRGAFQDTLEAETQIYVCDINPKMLNVGKQRASEKGFGEDGSLVWVEGNAESLSFQNDSMDGYTIAFGIRNVTHIEKVLSEAHRVLKPGGRFLCLELSHVGIPIFKDLYDYYSFSVIPYMGELVAGDRQSYQYLVESIRRFPSQEKFASMIADAGFQKVEYENLVGGVVAIHSGLKI

SEQ ID NO: 197798 - protein, 47 aa, Glycine max
  Clone ID: PAT_MRT3847_20637C.1.pep
LFGNLEGGFPGPSYRFFIWGVLGWNFGPSKGFKNEFVFGPFARGASG

SEQ ID NO: 197799 - protein, 170 aa, Glycine max
  Clone ID: PAT_MRT3847_20638C.1.pep
MSDRDRGREMHESSSGLVSSNGNSEKYYHGSENNMMGRYSRGNSRECGHTHEFERTPPKKQVQKKSALLRIQTVKPNNNHRNRENREVEQLRYPGYGSENGNGFYRGKEQYFGHGVKGEEREESPVEIDISFESNSLVAKAKAVVAPLPPPSSSVSVPDLNVMPVSDSDL

SEQ ID NO: 197800 - protein, 72 aa, Glycine max
  Clone ID: PAT_MRT3847_20639C.1.pep
MLYQITASRQFIFIASVFHAKPYGWVEEFSGNQAFLFSYSWRSVHPENLMYTTCIFLFFLGGMNFSCFFSGT

SEQ ID NO: 197801 - protein, 119 aa, Glycine max
  Clone ID: PAT_MRT3847_2063C.1.pep
MFKFAFFFAFFLFFTTNTTSGSHNNTSSCPTNSCKNGPKISYPFWFSQGSLPDQYCGYQELGLFCDDNGNAIFSPPPGKYYYVKDIDYANHILKLVDFDTANITCPRALHSFPLGNLPL

SEQ ID NO: 197802 - protein, 75 aa, Glycine max
  Clone ID: PAT_MRT3847_20640C.1.pep
GGGAMPKKALRGWLSIIFGSGPLVCGKKFDVYMRYDLLSPRGPKCMQPDSFWAEPQNPESRQNHKEENHQKKAKE

SEQ ID NO: 197803 - protein, 100 aa, Glycine max
  unsure (1)..(100): unsure at all Xaa locations
  Clone ID: PAT_MRT3847_20641C.1.pep
TAXGXXLVSSPXFDLXVFSHXXTXXYFAXLAFQPSXMDQLCEXTVPLVARXXXLXRXHCXQXXKTNLSHDGLIXAHVPYWWVNNXTLGESRAEFRYLRVR

SEQ ID NO: 197804 - protein, 66 aa, Glycine max
  Clone ID: PAT_MRT3847_20642C.1.pep
FGFGFKEHIFLGIKVYPSPGFYEKDFFFFLGGLGFFLGPPQKGKPPFGIYPRFPKGDFFKWFPVKI

SEQ ID NO: 197805 - protein, 96 aa, Glycine max
  unsure (1)..(96): unsure at all Xaa locations
  Clone ID: PAT_MRT3847_20643C.1.pep
VNILDGKPKVQAYVYRVTSDSDKRHAAFTIEGSYAHRTYEVKXLDEYKNAVVEIKRKEANTKDVSFGIEIFQLVVHPVFDPSFAMALVLLLDQMFS

SEQ ID NO: 197806 - protein, 109 aa, Glycine max
  Clone ID: PAT_MRT3847_20644C.1.pep
MEDTIFSCFDVLVMNSEILKYWKLAIKKKVNDMEQSSMGHRHISWKHVWANYCLSCHNNKLLDDNEALQNFGVRNNSQVQFVSYVMTKESRRHSKRRKHRFFHGLNKRS

SEQ ID NO: 197807 - protein, 124 aa, Glycine max
  Clone ID: PAT_MRT3847_20645C.1.pep
YQTVYQRYVTVPAAYAANITLYSFPTQPLHFVERFYCGMCPFGMGHSLLLRYTYLFVTPTAEFIRTTGLYLFFRLSPALSLLSSLLYSMPYLLSHGDLLCPPPPPQRRRTSYSDDGKPSLERNR

SEQ ID NO: 197808 - protein, 105 aa, Glycine max
  Clone ID: PAT_MRT3847_20646C.1.pep
KFHTRFPRGYRLGYGHWCFIGVHIGFLLGRLVFWPVNQGQRGPLWVGEVSQSEIRYYSDLRRRSAVGGISSGIGKQGAICRNSNPLHRPSPWSDFLKSAQRFQAK

SEQ ID NO: 197809 - protein, 103 aa, Glycine max
  unsure (1)..(103): unsure at all Xaa locations
  Clone ID: PAT_MRT3847_20647C.1.pep
GGVENQSPNPGNTGLENGSFFFSFPGWPVCSNWAFILLTPRSLKEEDEKYIVPYGQLWKKCHHVIAGHKXPFGIMDEFQQYAFLCLPSGKTEQYFRILPHAHG

SEQ ID NO: 197810 - protein, 47 aa, Glycine max
  Clone ID: PAT_MRT3847_20648C.1.pep
YCYCRSLCIVFLEVKALTAYRVTSRTSTLVHRSSYATRGNLLWYSGP

SEQ ID NO: 197811 - protein, 112 aa, Glycine max
  unsure (1)..(112): unsure at all Xaa locations
  Clone ID: PAT_MRT3847_20649C.1.pep
GRAENVHYLSRRYHIELAVRDAVLDNYLLWLPGHLDTHLSGSPPKAPTLPLLTADLYSKCGLQNHITLLYGNPEXRPSNQLSISFLRLTLLQFIDLTVRQILLNTNIINLPS

SEQ ID NO: 197812 - protein, 184 aa, Glycine max
  Clone ID: PAT_MRT3847_2064C.1.pep
LEKNTTRKKSTLAFTGTNSKGLIVLSFSEIKSLTGDFKNQIGPKVFKGLLPNNHLIAVKDLNASIEERKFRSAVMKMGCIHHKNLVKLEGYCCEFDHRCLVYEYCKKGSVDKYIDDDALGRMLTWRKRVEICSSVAKAICYLHSGCKEFISHGNLKCKNVMLDEKLMGQGTEFGFAIANGKATY

SEQ ID NO: 197813 - protein, 270 aa, Glycine max
  Clone ID: PAT_MRT3847_20650C.1.pep
MAANLLPLSISCSSKTHILCLPSPPKPLFLCRHSLLRYRSTPRLTCKAAQVSVAEESSASGDNWVPVVPLSALPKGERRVIIQDGETILLLWYKDQVFAIENRSPAEGAYTEGLLNAKLTQDGCIVCPSTDSTFDLRTGDIKEWYPKNPVLRVLTPALRKLFIYPVKTDEQNIYISIRGGVRSDASAEIVFSGKAQPGFTATDVNVDEVKMIVDEDQEGFGFTGKNEIINGRAAVIGFLLLLDFELLTGKGLLKGTGFLDFLYSVTNAFN

SEQ ID NO: 197814 - protein, 92 aa, Glycine max
  unsure (1)..(92): unsure at all Xaa locations
  Clone ID: PAT_MRT3847_20651C.1.pep
MRLITHNMLSSNIKGVXNGFPLRIEAENVVEKTVEMNGEFLKKMFEKIDWKAFVVASRALGFTVLPWEAXSSLLXSGEFLNRFHPALLGLHL

SEQ ID NO: 197815 - protein, 189 aa, Glycine max
  unsure (1)..(189): unsure at all Xaa locations
  Clone ID: PAT_MRT3847_20652C.1.pep
MELTRLISVLFFLLVITVGSSASPQHWRKKRVREPCKKLVFYFHDIIYNGHNSKNATSAIVGTPAWGNRTILAGQNHFGDLVVFDDPITLDNNLHSPPVGRAQGFYVYDKKEIFTAWLGFSFVFNSTHHRGSINFAGADPLMNKTRDISVIGGTGDFFMTRGVATLSTDAFEGXVYFRLRADINLFECW

SEQ ID NO: 197816 - protein, 118 aa, Glycine max
  Clone ID: PAT_MRT3847_20653C.1.pep
QIRFRLRSSVYAADTVLLPGATSESSLWRSVARGTSSPVHFALLGAGGRISPVAAVCEPNRQGPPQSRNNSLREVLRIQILNIRDAIQRLGLLMTITSPHRLPTITSLYASSHDHAST

SEQ ID NO: 197817 - protein, 79 aa, Glycine max
  Clone ID: PAT_MRT3847_20654C.1.pep
PHQSILISILHFITIIIHHPSLSFPHPSLLFSSVFIFALFCFSLLFRVSKPPIPIQTLLSFYFLTSIPSILALDFGSRG

SEQ ID NO: 197818 - protein, 72 aa, Glycine max
  Clone ID: PAT_MRT3847_20655C.1.pep
PISSLLMASILLLLEALIRCCHHELVPQSPTWKEKETKDLTHIIEVKKPAGKASIGMDNLDGFWSFFSDHIE

SEQ ID NO: 197819 - protein, 97 aa, Glycine max
  Clone ID: PAT_MRT3847_20656C.1.pep
SYILLAFFCMYNPLTLLNLDLLYCLLVQTFVTLLLASIFLMIFYSYSHYKSSCKSKTEKYSFNIPHGSSQQMPPYGKSTPRSCDQEYEPMGGRTDLV

SEQ ID NO: 197820 - protein, 39 aa, Glycine max
  Clone ID: PAT_MRT3847_20657C.1.pep
HTRTNTDLMKQSLYLKHLVITHINSIKFYKILLLLTINL

SEQ ID NO: 197821 - protein, 81 aa, Glycine max
  Clone ID: PAT_MRT3847_20658C.1.pep
DLSENGTSHDNIWMMKIQPINDQTCPNYFNLLHLGQIGFERLIRFRGIRWLLTNNFGEKGGCFGIISGKKVCIIEFAGITD

SEQ ID NO: 197822 - protein, 100 aa, Glycine max
  unsure (1)..(100): unsure at all Xaa locations
  Clone ID: PAT_MRT3847_20659C.1.pep
PPPRAKGAFFSFKGGNESGNFEGWEVVIKKRLFNVKKLLEFPQEKLSWLYXIYFAPDFQETLYKIGVLNEVPSRGFPPGENFLPAAIYPGENLKILWPLL

SEQ ID NO: 197823 - protein, 86 aa, Glycine max
  Clone ID: PAT_MRT3847_2065C.1.pep
SYCISLLHQLQSQHKTLNLISIITHKQNKNRHPCPFSLLKLLTPSLPMKTLNHNTTHSTTRNPLAIWLKQTHKHTRIYIYRRGHVE

SEQ ID NO: 197824 - protein, 132 aa, Glycine max
  Clone ID: PAT_MRT3847_20660C.1.pep
SNVPICLMYGKEDPWVKPLWGLQVKRQVPEASYYQISPAGHCPHDEVPEVINFLLRGWIRNLESEGSISLPLLDGLDNLKQANARELEFMKEGSKKSVMVRFFDSKFSLWDRIRSYINPRFKLRNSATKSQI

SEQ ID NO: 197825 - protein, 75 aa, Glycine max
  Clone ID: PAT_MRT3847_20661C.1.pep
DITSYPSYTTTTTTTLKFQPSSGMMASTVGFAYASAQRMELDRQAMIYKCMMASCPDAHDLLTAYDMSCCMDEGF

SEQ ID NO: 197826 - protein, 450 aa, Glycine max
  Clone ID: PAT_MRT3847_20662C.1.pep
MSVMYSPVLNYSDVEHQLRKNQDMDSSIGHPQQHCHQPNSGLLRYCSAPSSLLASLIDNTIHGCVNEESFTSENHHHQQQQQQQHYLPSTSSEMETMLSKLLPSNNGWSNSEALQEFGGKPVKQEIGESIPQEPPQQNGYSYGGSQLIYQSQQIQGLPNGGSSSASGSAFDGSFGVVHSMASEDSIQSKMGIRNCSNLFRQKSSPAAFFSIENDLAALREVGSFKADDVSNGLVTASTGGLHSSHTFSSRPSSCLKRLPQIAENGNESLEENCDQSRNLVNDNGSSKCYIPSFTNELWESSAFNAPKTENEDEIMFSTSNILESQEADFSFQNLGLTHHLSLPSSSTKMSSIEKFLQIQGSVPCKIRAKRGFATHPRSIAERVRRTRISERIKKLQDLFPKSEKQTSTADMLDLAVEYIKDLQQKVKILSDCKAKCKCTSNEKHYTRTCA

SEQ ID NO: 197827 - protein, 140 aa, Glycine max
  Clone ID: PAT_MRT3847_20663C.1.pep
NFSRLITENCCYHHQEADFSFQNLGLTHHLSLPSSSTKMSSIEKFLQIQGSVPCKIRAKRGFATHPRSIAERVRRTRISERIKKLQDLFPKSEKQTSTADMLDLAVEYIKDLQQKVKILSDCKAKCKCTSNEKHYTRTCA

SEQ ID NO: 197828 - protein, 180 aa, Glycine max
  Clone ID: PAT_MRT3847_20664C.1.pep
ERAKRTLSSTAQTTIEIDSLYEGVDFYTTITRARFEELNMDLFRKCMEPVEKCLRDAKMDKSTVHDVVLVGGSTRIPKVQQLLQDFFNGKELCKSINPDEAVAYGAAVQAAILSGEGNEKVQDLLLLDVTPLSLGLETAGGVMTVLIPRNTTIPTKKEQVFSTYSDNQPGVLIQVYEGER

SEQ ID NO: 197829 - protein, 649 aa, Glycine max
  Clone ID: PAT_MRT3847_20665C.1.pep
MAGKGDGPAIGIDLGTTYSCVGVWQHDRVEIIANDQGNRTTPSYVAFTDSERLIGDAAKNQVAMNPVNTVFDAKRLIGRRFSDASVQSDMKLWPFKVIPGPADKPMIVVNYKGEDKQFSAEEISSMVLMKMREIAEAYLGSTVKNAVVTVPAYFNDSQRQATKDAGVIAGLNVMRIINEPTAAAIAYGLDKKATSVGEKNVLIFDLGGGTFDVSLLTIEEGIFEVKATAGDTHLGGEDFDNRMVNHFVQEFKRKHKKDINGNPRALRRLRTACERAKRTLSSTAQTTIEIDSLYEGVDFYTTITRARFEELNMDLFRKCMEPVEKCLRDAKMDKSTVHDVVLVGGSTRIPKVQQLLQDFFNGKELCKSINPDEAVAYGAAVQAAILSGEGNEKVQDLLLLDVTPLSLGLETAGGVMTVLIPRNTTIPTKKEQVFSTYSDNQPGVLIQVYEGERARTRDNNLLGKFELSGIPPAPRGVPQITVCFDIDANGILNVSAEDKTTGQKNKITITNDKGRLSKDEIEKMVQEAEKYKAEDEEHKKKVDAKNALENYAYNMRNTIKDEKIASKLSDDDKKKIEDAIESAIQWLDGNQLAEADEFEDKMKELESICNPIIAKMYQGAGAPDMAGGMDEDVPPSGSGGAGPKIEEVD

SEQ ID NO: 197830 - protein, 64 aa, Glycine max
  unsure (1)..(64): unsure at all Xaa locations
  Clone ID: PAT_MRT3847_20666C.1.pep
MXYPDRXHXLTRRVXLRQSXVAEANXHXPPLLXGRPVRQFAMYTXXSXXXGAXXXIGXXXFCKI

SEQ ID NO: 197831 - protein, 79 aa, Glycine max
  Clone ID: PAT_MRT3847_20667C.1.pep
DTLNIPESEIAPVSLVSKLTLNRNGLHLPSYSPYPRMIIIAQGKGALGVAIPGCPETFEEPQEQSNRRGSKSQKQQLQD

SEQ ID NO: 197832 - protein, 43 aa, Glycine max
  Clone ID: PAT_MRT3847_20668C.1.pep
CRSVLVGGLLNKFKECGVFQYNLKENDVEMFLKVIGCIFKCCR

SEQ ID NO: 197833 - protein, 50 aa, Glycine max
  Clone ID: PAT_MRT3847_20669C.1.pep
PYQHLHVLSNQVKQDCHPIYIDQRSAPRASTQSLSGRAHDTYRSLIEVPK

SEQ ID NO: 197834 - protein, 33 aa, Glycine max
  Clone ID: PAT_MRT3847_2066C.1.pep
TIKYQPCMSNQTECLIISSKRGRLTLQYHQLMA

SEQ ID NO: 197835 - protein, 33 aa, Glycine max
  Clone ID: PAT_MRT3847_20670C.1.pep
FDQTKTQTYPLTVEQSTFTVSNSLPLIILSPFK

SEQ ID NO: 197836 - protein, 56 aa, Glycine max
  Clone ID: PAT_MRT3847_20671C.1.pep
QLFFFSKQNFLNLFVNQFPNFFLFFLKKAFTLNFLPNRNFLNQRNHTLVLVELRDF

SEQ ID NO: 197837 - protein, 71 aa, Glycine max
  Clone ID: PAT_MRT3847_20672C.1.pep
GRVIRAHGEGSCWVLNCHTRHREGPARLRSLDLGYGIGCLNVVVTGVMHDAVRGAPLSDVGLTHPLRCKNH

SEQ ID NO: 197838 - protein, 96 aa, Glycine max
  Clone ID: PAT_MRT3847_20673C.1.pep
RHFSTSIIASHKRSAAHLIVYGIDRPNFEQSHPADRAVPSQAVLSDRRWRIVLSKRRAKVAGNYTNADLGAEQVGKDINALGDGLDVAGFKANFGN

SEQ ID NO: 197839 - protein, 55 aa, Glycine max
  Clone ID: PAT_MRT3847_20674C.1.pep
RKSYAFLYLLRHQASVVGVSSEEVDQELQLDKRLTQQKESWPLCSTQRDFMTLPI

SEQ ID NO: 197840 - protein, 363 aa, Glycine max
  unsure (1)..(363): unsure at all Xaa locations
  Clone ID: PAT_MRT3847_20675C.1.pep
MAEQHRKTTLDSGWVAARSTELSSNEHCDLNFRGINYSADVYLNGHEIILPKGMFRRHSLDVTDILHSDGTNLLAVLVHPPDHPGRIPPEGGQGGDHEIGKDVTTQYVEGWDWMAPIRDRNTGIWDEVSISVTGPVKIIDPHLVSTFSDDYKKAYLHTTTELENRSSLTAECSLSVQVTTELEDSICLVEHLQTQDLSIPANSAEQYIIPIDFFSYPNFDSSNHQGGQSLLFKVNGKPIFIRGGNWILSDGLLRLSKKRYNTDIKFHADMNFNMIRCWGGGLAERPEFYHYCDYYGLLVWQEFWITGDVDGRGDPNHPSLALWVGGNESXRQDDINASLKTDLKLPMGFGNGAEKDKRYKCCS

SEQ ID NO: 197841 - protein, 37 aa, Glycine max
  Clone ID: PAT_MRT3847_20676C.1.pep
ISPANFKLINVDRLFTLLNSLMCYQCIEATCCGLLVL

SEQ ID NO: 197842 - protein, 57 aa, Glycine max
  Clone ID: PAT_MRT3847_20677C.1.pep
YAQTTLLNFVPTLYSGDTYSFITSRAIILLLILVAANNIGTANVLLQRILCRKRRLS

SEQ ID NO: 197843 - protein, 63 aa, Glycine max
  Clone ID: PAT_MRT3847_20678C.1.pep
TCSIPFVPCSPHFHLTRRDDWSFNRYLKALRYAFQHLEFQCLKVLDECRIRIGKIGEIAQFCI

SEQ ID NO: 197844 - protein, 49 aa, Glycine max
  Clone ID: PAT_MRT3847_20679C.1.pep
GDRVEVRRVLTPPRWSGLHVDAGASSMVMIDYSHVCEGLPSGQHCFRNL

SEQ ID NO: 197845 - protein, 129 aa, Glycine max
  Clone ID: PAT_MRT3847_2067C.1.pep
MATRKVIAICQSGGEFVTDKDGSLSYSGGDAYAIDIDQQTSLSDFKSEIAEMFNCNVSTMIIKYFLPGNKKTLITVSKDKDLQRMVNFLGDANTVDVFVMSEEGAARNNNSNMPGSRSSRTTVSEAAVP

SEQ ID NO: 197846 - protein, 82 aa, Glycine max
  Clone ID: PAT_MRT3847_20680C.1.pep
GIRVEQYHPDALKWQWLLDCSPLSIVGPAASEAGRIIPGSSEGPHVAHCHYAGLLRKPILPLIPREVLRPIVLPCLVLPHWC

SEQ ID NO: 197847 - protein, 60 aa, Glycine max
  Clone ID: PAT_MRT3847_20681C.1.pep
MLQKLIKFLDIIKVTLLLKIYFSIASTSQILSCSFINVLNFASLLSSSRSRTLLSSSRSR

SEQ ID NO: 197848 - protein, 38 aa, Glycine max
  Clone ID: PAT_MRT3847_20682C.1.pep
EEIKGYNSPDSTNAKQWHNLLCQKFCSLGKNSHCKIII

SEQ ID NO: 197849 - protein, 101 aa, Glycine max
  unsure (1)..(101): unsure at all Xaa locations
  Clone ID: PAT_MRT3847_20683C.1.pep
YFDIIYIAAIIPCHYCASLRPKWFNSNNSHSKPLSYPLLGLLGFNARCFYQPLHHSESHNNHNLTLFYLKQCAISIALAXALLTRDPTLDGPTIAHSANPV

SEQ ID NO: 197850 - protein, 49 aa, Glycine max
  Clone ID: PAT_MRT3847_20684C.1.pep
PFINNECRYVLIFSRGSEKFKKARKCLVCLPKILVGSKAKKPIKFYFFL

SEQ ID NO: 197851 - protein, 54 aa, Glycine max
  Clone ID: PAT_MRT3847_20685C.1.pep
RANYIIMTQAYSIRDPIPTIHYYDPFIALPILITTNNYLPLTHHLTISHMVHMT

SEQ ID NO: 197852 - protein, 78 aa, Glycine max
  Clone ID: PAT_MRT3847_20686C.1.pep
PIHTFVVHKQIYGLQSFAVETEIQSSNNSVSQSSNGYCSYLIVQSCSTERAPTRFGHPLNMAVLEAPRQVLQSVAVRL

SEQ ID NO: 197853 - protein, 100 aa, Glycine max
  Clone ID: PAT_MRT3847_20687C.1.pep
FKKIPLFLVGRPPHQIFWYSEVKDIFFSPKTGQFGVFPNLGPFPPPEKKGFLKKRFFKTQWLTRALLGGFFKITNIGPPFLVNNREKGSAFFPQKAPPPF

SEQ ID NO: 197854 - protein, 161 aa, Glycine max
  unsure (1)..(161): unsure at all Xaa locations
  Clone ID: PAT_MRT3847_20688C.1.pep
DNRLTEKTIYTCRDXDILVDYYTIATQFKKSIPHYIKRHMHTLLIXYIMPSIITAEIKYKRNMSNXHISGLFYNGRYKFRTKHNKNLALTDKEKMEVIRNRGIPADVLAKRAHELEKHVAHESLKDQIPADDKLYSTKVNKFAKIMNHRQNVAGDLKLLLM

SEQ ID NO: 197855 - protein, 64 aa, Glycine max
  Clone ID: PAT_MRT3847_20689C.1.pep
KSTFGENHFIPLLKIVIISQGYRTSGVVSEKITCHVILPNCLPLGCKAHYTGKVKPRIQHPRQG

SEQ ID NO: 197856 - protein, 269 aa, Glycine max
  Clone ID: PAT_MRT3847_2068C.1.pep
ESKIMKPKHQISSLISVVSDTRPWFLPSSTGTPGAGSWKEISGTGSFRNWSNSYERELPPKPNQVKKGKTRRWSLQSPTQQNQMEYSHNKLPMYAAAFMLPAMEGYDKKRQGVDLLGRDFIVLGKLIYMLGVCMKSVAMHPEASMLAPSLLNMLRSREVCHHQEAYVRRAVLFAAACVLVALHPTYISSTLLEGNAEISTGLEWIRTWALDIAESDTDKECYTMAMTCIQLHAEMALQTSRALESVRSSLKAGPVLPSDASKVTIKIPY

SEQ ID NO: 197857 - protein, 206 aa, Glycine max
  Clone ID: PAT_MRT3847_20690C.1.pep
GVFTDAIKNAVGRPRPDFYWRCFPDGVENYDSWGGVVCHGNASDIKEGHKSFPSGHTSWSFAGLGFLSLYLSGKIKAFDRKGHVAKLCIVFLPLLVACLVAISRVDDYWHHWQDVFAGGILGLVVATFCYMQFFPAPYNDEGWGPYAYFRAMEESRANANINRELPVGQAMEDRVTNQEPRRNGDTTFTPYSYRSPTLEAMEMGQK

SEQ ID NO: 197858 - protein, 170 aa, Glycine max
  Clone ID: PAT_MRT3847_20691C.1.pep
VVCHGNASDIKKGHKSFPSGHTSWSFAGLGFLSLDLRGKIKAFDRKGHVAKLCMWFLPLLVACLVAISRVDDYWHHWQDVFAGGILGLVVATFCYMQFFPPPYNDEGWGPYAYFRAMEESRTNPIINRESPVGQAMEERVTNQEPRRNGDTFTPYSYHSPTLEAMEMGQK

SEQ ID NO: 197859 - protein, 75 aa, Glycine max
  unsure (1)..(75): unsure at all Xaa locations
  Clone ID: PAT_MRT3847_20692C.1.pep
RSKDXXXIKAAIGDAXLTFMXAXVXLCWXLLSGYMXNALNLQHITTMGPLRXXLXXPXXLXLYAXTQRHVXXAXQ

SEQ ID NO: 197860 - protein, 42 aa, Glycine max
  Clone ID: PAT_MRT3847_20693C.1.pep
TTRISYYLHLSLKNSVNIYYLPDTFLHMMTISITTYHTTKFI

SEQ ID NO: 197861 - protein, 48 aa, Glycine max
  Clone ID: PAT_MRT3847_20694C.1.pep
FECAKKTLGTFINRVPTWSISLSRYGHTHPGLDMFFGERGLAGAFYIF

SEQ ID NO: 197862 - protein, 90 aa, Glycine max
  Clone ID: PAT_MRT3847_20695C.1.pep
VLNAQHPMDLVCTKRMRDLPLYQTMLVLILILPQIFKIIKDPNVDFFKFHNHNLSQSEHTYTYFKYFRWGANAKNYIYSHLFETLFLSPA

SEQ ID NO: 197863 - protein, 78 aa, Glycine max
  Clone ID: PAT_MRT3847_20696C.1.pep
YTTAHFSKKFTHKPHPKTHTHQFPLIYTSFFLKPPNTIHFNLKTYIVTTFSPLFSIILNKKIQHTSTLILIHKSIHNS

SEQ ID NO: 197864 - protein, 57 aa, Glycine max
  Clone ID: PAT_MRT3847_20697C.1.pep
LEGNWEASHVTLGTVSDPRDSAPPNEALTTLEGGHTGMGLIRPAHQYEAGEHAQLST

SEQ ID NO: 197865 - protein, 120 aa, Glycine max
  Clone ID: PAT_MRT3847_20698C.1.pep
LFLAKAWYLSDQRVTRSRSSELRRRYTEMQNSQTKQGMESMSMDPQHGVDTTKQGIAHFNGFDYITMTELPSQKGSFISPSNSSLSNFPHSSNWVDADKVSSCVSMLKGTLQPQETQQPS

SEQ ID NO: 197866 - protein, 59 aa, Glycine max
  unsure (1)..(59): unsure at all Xaa locations
  Clone ID: PAT_MRT3847_20699C.1.pep
SXXNXXRXXISQXKGPCXXXEVXLXXXXXXDLYHXNXIXDXLPXMRXGQSKWDSALXDX

SEQ ID NO: 197867 - protein, 42 aa, Glycine max
  Clone ID: PAT_MRT3847_2069C.1.pep
VVIRYFGGIKLGTGGLARAYGGVASECLRNAPTCFVKTKVIK

SEQ ID NO: 197868 - protein, 154 aa, Glycine max
  unsure (1)..(154): unsure at all Xaa locations
  Clone ID: PAT_MRT3847_206C.1.pep
KKTKGFFFPPLGGGGFSGLIFKKNFPGVRFCPPQKKERFFSPKKEKNVPVFPLLFFPPFFPRVVFLKNPRRCPKKFFFSFVFLKKKKKLLGWVFFSPLKKNKKKEKKKKEKRKKKKEKKKKRKEEKEKRRRKEGGADXLXGXPXXYVRXVPCDV

SEQ ID NO: 197869 - protein, 751 aa, Glycine max
  Clone ID: PAT_MRT3847_20700C.1.pep
DEPGDEEEFRRCTRSASGGWRCKERAMRGRSFCERHFLYQQQRNRSAKKKRASGGVGVPQKRGMKQRKKPEGDLENGVVGAGVVGADGDGADGDHTGGPHVVEEFAGLFGEGHDGGVNLGLGCESFDLWGEVEGQHVHMGGFGGGCGKLGQVEGQVLGQPWSNANAGGGVFDAVLGGHASGAGVGVCENDFLDLSSGGLEADFDSLYDQGFQALLCQGGGCEEDVGFIGSDWAIPNFAALGGSTGFQGLSGENAYQFRGEEVAGCVGNPGGYGKNSDDSFGGIDVPGSNSRHHGDNASDSKMLVLGVEEGMERLLDGGLASSEEAKGVAFRPVARRGRPKGSKNKDKQFHTTLNRQSVGENVKGGTNGISSVTVSGSVFKAVDEGAVLGEIARPKKRGRQNGLNTVNNVTILESERSVFSVEEDKAGDEGVGLGEIVKPKKLGRRKGSNRISNVTVLESERSLFSGEEDKAEDEVAGLGEIVRPKKRDRPKGSNRMSIITVLKSERPLLSVEEGSADDEGAGLGEIVRPKKRGRPKGSRNKKNILHVSNNVVVMFAGPKKLGRPEGSEGRKKSVVLVGNKVVGEIAGPNKCGKTKGSKNKIKNVVEVGNEVAGAGEIAGPKKHGRPRGSTKIKKNALEVNNEVSGAGEITGFKKRGRPKGSTKKRYTVVYASSNEVACEVARQDLENKMLSNLCQKVSDELVSINNKYGPAMSTRSNSRSFVFEGQKFPGMSNDINLEGDGGSTSVWSSGL

SEQ ID NO: 197870 - protein, 78 aa, Glycine max
  unsure (1)..(78): unsure at all Xaa locations
  Clone ID: PAT_MRT3847_20701C.1.pep
VANTGVLRPSKIETXVVGSTXLNVAVAIFSIHLFSXPNHKFIGQGETEXYATENSDPALYIIVCLITYVVDKMRMVKE

SEQ ID NO: 197871 - protein, 144 aa, Glycine max
  unsure (1)..(144): unsure at all Xaa locations
  Clone ID: PAT_MRT3847_20702C.1.pep
MEKLAILIQSKVNEETWEPIKISRNGPXYISHLFFPDNCLLFVKATSSQVKLVRDVLQQFCLTXGLKAGLQKSRFLAXKNVSNRKIARFSFIIVISXRTKKEDFAHVVDMINNRLDGWKSKLLSRAERVTLAKSVLAAIPTYTM

SEQ ID NO: 197872 - protein, 75 aa, Glycine max
  Clone ID: PAT_MRT3847_20703C.1.pep
MRWPAPPANAGLGIAAMSYITVDYLRHLSPAWHSRLQPALWSLLALTAVFRVPPYRHWSAELRSAIPFIASMLFM

SEQ ID NO: 197873 - protein, 140 aa, Glycine max
  unsure (1)..(140): unsure at all Xaa locations
  Clone ID: PAT_MRT3847_20704C.1.pep
AEYAMHAPTLNAAGPYGTLLKGADLSALKIGKSSPKPALSKEXHSHLKGINKSAXTTSQNLTYKSXDAYEDFSSPQIRKEIAKRLLDIRTKLXHLYLSSDVIQDPLLSLGKGLTEQXDVKVHENDIIIKAAAAALRNVPE

SEQ ID NO: 197874 - protein, 60 aa, Glycine max
  unsure (1)..(60): unsure at all Xaa locations
  Clone ID: PAT_MRT3847_20705C.1.pep
PSQLGPSSFVRYSFWDSILLLRDCKXVCSCVRELGNKFFIMYIKRVFSGRGLFNYVLFSG

SEQ ID NO: 197875 - protein, 50 aa, Glycine max
  Clone ID: PAT_MRT3847_20706C.1.pep
LHPFILGVVTAALFSFLVSLFHSSPYSFYAQHLLYKVKLFIQFKDILKDR

SEQ ID NO: 197876 - protein, 84 aa, Glycine max
  Clone ID: PAT_MRT3847_20707C.1.pep
TEICKRNRTSLVLTPSPMSNRRVFRHVTKYGTAYASLSLWPAHRVILASILRGSPASRTKVIDSWNQVSIAFVAVLRAAQPRSP

SEQ ID NO: 197877 - protein, 51 aa, Glycine max
  Clone ID: PAT_MRT3847_20708C.1.pep
HLQSPPTPFLSLLYLHCTDYINRSLLFHNKIQLSTILTSITTPIRYQTSSK

SEQ ID NO: 197878 - protein, 55 aa, Glycine max
  Clone ID: PAT_MRT3847_20709C.1.pep
IIFNENLFIIKQNYLFFNPKETYTISTKLIKLTFPYDQINNMLNTLKPYKPKPIT

SEQ ID NO: 197879 - protein, 55 aa, Glycine max
  Clone ID: PAT_MRT3847_2070C.1.pep
HAYKVVLDQLWGTLEAIPLRSRLCMTVVSCWSEVVPLTLTILLLINIQLSNHCVF

SEQ ID NO: 197880 - protein, 53 aa, Glycine max
  Clone ID: PAT_MRT3847_20710C.1.pep
VRTPRTRNQPRLSRRRALIQQHAFSGYRTLALFPLPFPSPFQGESTSLPLSAR

SEQ ID NO: 197881 - protein, 216 aa, Glycine max
  Clone ID: PAT_MRT3847_20711C.1.pep
MSKQRLQGKVAIVTGGATGIGAEAVRIFVENGASVVIADIKDELGHNLATSLGLDKVDYRHCDVRDEKQVEETVSFTLEKYGSLEILFSNAGIAGPLSSILDFDLNEFDNTMAVNLRGAMAAIKHAARVMVARETRGSIICTTSVAGSFAGCAGHDYTASKHGLIGLVRSACSELGAKGIRVNSMSPYAVATPLTCETFDMEPGEVEAAAHALANL

SEQ ID NO: 197882 - protein, 66 aa, Glycine max
  Clone ID: PAT_MRT3847_20712C.1.pep
IFNVYTQKLSPFIFGMERETKIAIPSHFFISDALRGTGFYLKAQLEIKRADGKAANLLKKFNQFNT

SEQ ID NO: 197883 - protein, 257 aa, Glycine max
  unsure (1)..(257): unsure at all Xaa locations
  Clone ID: PAT_MRT3847_20713C.1.pep
MLRSLQLESGYRIILALRLSSLLILFSSVLSAHGYPSRAHIFIYAACSQEKYQPNSPFEGNLNSFLSSVVSSFSDVTYNSFAIGNGSSTPQEGNVYGLYQCRGDLHPVDCSKCVGRLVNQIGLVCPYALGASLQLEGCLVRYEHAGDFLGKLDTSLRYKKCSKAVTSDVEFFRRRDDVLADLQTANGFRVSSSGLVEGFAQCXGDLSVSDCSSCLADAVGKLKSLCGSAATADVFLGTCYARYWASGYYDESDSNND

SEQ ID NO: 197884 - protein, 41 aa, Glycine max
  Clone ID: PAT_MRT3847_20714C.1.pep
KGTPVFPKVKFSYMSCIITLYCYLSYAKFNFNSSVILNIRV

SEQ ID NO: 197885 - protein, 151 aa, Glycine max
  unsure (1)..(151): unsure at all Xaa locations
  Clone ID: PAT_MRT3847_20715C.1.pep
GPFXXXHXXXXIXXXXXXPXXQTXAXDFXSXLPPXXXXSLXSXXXXXXXXTXPXXLXXXSXXXSXXXTXXRPLXLXXCCXFSLXDSTXSTTHXRYIRXSLXXXYLSXPXIQXPXSPYXXXXKPLFXKTSRXXXQFXLXPFNXSLXFXXLXX

SEQ ID NO: 197886 - protein, 73 aa, Glycine max
  Clone ID: PAT_MRT3847_20716C.1.pep
SEPVSHSASIDRSPRNPLTNLISGTPRSAAILFHILHKQEFLALNTLLTKYETTTISLRAFKIQRPINSQYHH

SEQ ID NO: 197887 - protein, 143 aa, Glycine max
  Clone ID: PAT_MRT3847_20717C.1.pep
MAFCNKVGNVLRQGAARSTHAPVASMLNYIRCMSSSKLFIGGLSYGVDDQSLKDAFSGFGDVVDAKVITDRDSGRSRGFGFVNFSNDESASSALSAMDGKDLNGRSIRVSYANDKPSAPRPGGGGGYRGGDYDGDFASRSGGW

SEQ ID NO: 197888 - protein, 86 aa, Glycine max
  unsure (1)..(86): unsure at all Xaa locations
  Clone ID: PAT_MRT3847_20718C.1.pep
YVEGERVNNLVWALQRFRGLFLKRDALPGVIVTDRDQALMNAVKDVFPECTNXLCIFHINKNVKAKYKSLMRKKMLGIMSWIVGDL

SEQ ID NO: 197889 - protein, 138 aa, Glycine max
  Clone ID: PAT_MRT3847_20719C.1.pep
MAFCNKVGNVLRQGAARSTQAPVSSMLNYIRCMSSSKLFIGGLSYGVDDQSLKDAFSGFGDVVDAKVITDRDSGRSRGFGFVNFSNDESASSALSAMDGKDLDGRSIRVSYANDRPSGPQSGGGGGGGYRSGGFGGGW

SEQ ID NO: 197890 - protein, 66 aa, Glycine max
  Clone ID: PAT_MRT3847_2071C.1.pep
TYNHTNIKRKKENDKKSYQFCECRGAWQRQTKPSERGTSCSATTPPAEKLSSPPSCTQCYNSFPPP

SEQ ID NO: 197891 - protein, 122 aa, Glycine max
  unsure (1)..(122): unsure at all Xaa locations
  Clone ID: PAT_MRT3847_20720C.1.pep
SKAEKSHSGQQSLSENYWQLSADEKLTFEPPPIDCTTSGDCMXRSGMYYTRGAGDTPHYXRLCCYNDARTENIIVGCTRIDESRLXKMKTDYETDEWWANGISETHGMVLFVPKVMDQALMV

SEQ ID NO: 197892 - protein, 88 aa, Glycine max
  Clone ID: PAT_MRT3847_20721C.1.pep
GTQMNEYRKKEKDTHRTGVNLLKLSFVKTRPWDPSTHAQHLLFESSRWWILCQSSEDLQGLSHGSVKSSPLCLLSNCIDELCDGDSGD

SEQ ID NO: 197893 - protein, 47 aa, Glycine max
  Clone ID: PAT_MRT3847_20722C.1.pep
PSKDQENKIIMFLSATLSHSQSLYLSHKRYKYRHSFLSVSLSISRAL

SEQ ID NO: 197894 - protein, 43 aa, Glycine max
  Clone ID: PAT_MRT3847_20723C.1.pep
DLFLISIRDTFHIFVTKGMCIAYICHTYFNGLRKHNLRQALTP

SEQ ID NO: 197895 - protein, 53 aa, Glycine max
  Clone ID: PAT_MRT3847_20724C.1.pep
IIIFKIILTINYIFFYQFDIKFVKFIDQFVIKLFTTLIFYNFTFKTKFIFFIF

SEQ ID NO: 197896 - protein, 52 aa, Glycine max
  Clone ID: PAT_MRT3847_20725C.1.pep
PYFALVKVPKDPEPTGFIRIYIRSRTNILYFLIYTQCYISLENTQCMKTSVE

SEQ ID NO: 197897 - protein, 36 aa, Glycine max
  unsure (1)..(36): unsure at all Xaa locations
  Clone ID: PAT_MRT3847_20726C.1.pep
SYTLFFAXHXHNNNLGTKXXVDVGTMPSLLFLLPFP

SEQ ID NO: 197898 - protein, 204 aa, Glycine max
  Clone ID: PAT_MRT3847_20727C.1.pep
IRLEVSSSLLAKLCITFFRCYRKRVSAVTEQFDNCMKKQVEAIARVLHLFQSYKEDNIPCKIDEGLYLGSIATAANKPALKDCNITHVLTVAGRIPPAHPHDFVYKIIDVVDKDDEDLKQYFNECFDFIDEAKRHDGGVLVHCFAGRSRSVTIVVAYLMKTRGMSFFEALQHVRSIRPAAGPNQGFICQLQDFEKSLQGANKLH

SEQ ID NO: 197899 - protein, 105 aa, Glycine max
  Clone ID: PAT_MRT3847_20728C.1.pep
MTSSAVTEQFDKCMKKQVEAIARVLHLFQSYKEDNIPCKIDEGLYLGSIATAANKPALKDCNITHILTVAGRIPPAHPNDFVYKIIDGMVIFIEIKLLFAFHVDL

SEQ ID NO: 197900 - protein, 34 aa, Glycine max
  Clone ID: PAT_MRT3847_20729C.1.pep
VTLVSGVNNSPVPRSKSGYSVRHEKKKKRRAARA

SEQ ID NO: 197901 - protein, 256 aa, Glycine max
  Clone ID: PAT_MRT3847_2072C.1.pep
MAFSMVFIVSNIMLLFSSAFAKTASPPSLSPTPAPAPAPDYVNLTELLSVAGPFHTFLGYLESTKVIDTFQNQANNTEEGITIFVPKDSAFNAVKKTVLSNLTSDQLKQVILFHALPHFYSLAEFTSLSQTSSTPTFAGGDYTLNFTDDSGTVHISSGWSKTKVSSAVHATDPVAIYQVDKVLLPEAILGTNIPPAPAPAPTPDIAPAADSPTEHSADSKASSPSSTHDDSSSHKFISYGIWANLVLATFGVLVLF

SEQ ID NO: 197902 - protein, 55 aa, Glycine max
  unsure (1)..(55): unsure at all Xaa locations
  Clone ID: PAT_MRT3847_20730C.1.pep
KCARVDISEKESVCXMCLLELXKGADPLKMECSSKGELALSHXECALKWFNIKCN

SEQ ID NO: 197903 - protein, 43 aa, Glycine max
  Clone ID: PAT_MRT3847_20731C.1.pep
LRRKKSGKSKIFKRFPHIEEEKDQKNCSLCHKRNLESKTFCVK

SEQ ID NO: 197904 - protein, 75 aa, Glycine max
  Clone ID: PAT_MRT3847_20732C.1.pep
SIIKPFEISPTQYNGAADRIVWFSQPDILKAGTAKKRKKSVKMVQVRGSICPMHCQFCCTKSLKYYESDVEPDFF

SEQ ID NO: 197905 - protein, 144 aa, Glycine max
  unsure (1)..(144): unsure at all Xaa locations
  Clone ID: PAT_MRT3847_20733C.1.pep
NLPISXRAVEXISEVEAFALXPDDXRFVASQFXRLHSKQLQHAFRFYSSQWKTWAATFIQAAWRRYWKKKIERSLCKAEADLQDALANEEGSSLSLGATIYASRFAVNALRNLRENSRHNTMQQRLLSLLPPKPAEPDFTAQKH

SEQ ID NO: 197906 - protein, 143 aa, Glycine max
  Clone ID: PAT_MRT3847_20734C.1.pep
NNVTVNGQPISDCVRKKAEKLAGTIQPGNYWYDFRAGFWGVMGGPCLGIIPPFIEEFNHPLPDKCSGGSTGVLVNGRELHQKDLDLLSGRGLPTDIDRSYIIEISGRVLDEDTGEELDSLGKLAPTVEKVKHGFGMKAPRAAT

SEQ ID NO: 197907 - protein, 115 aa, Glycine max
  Clone ID: PAT_MRT3847_20735C.1.pep
VSSTGGSTFNMVREHDIVKVDPSYDHSCGHSQRRVDFHHLVASKRPWAPKAESGSPFHDMCETNSADKVCYVDQYIKAPFSTYQVQKECHVESVSLSRGSRSLYCSAASNKFWRG

SEQ ID NO: 197908 - protein, 102 aa, Glycine max
  Clone ID: PAT_MRT3847_20736C.1.pep
RKSELSNNTKPADCKSPLPRVWEPFLVKAVPYPPCVSSPVHLLRPGHMCRSDHAVEILNLPFPPLLRSRAMDIMRRLHIKLFFTMLRISLTDNIPLTYMLAL

SEQ ID NO: 197909 - protein, 25 aa, Glycine max
  Clone ID: PAT_MRT3847_20737C.1.pep
FKNHVSYIVAMTNEYFVGTYVVDIF

SEQ ID NO: 197910 - protein, 53 aa, Glycine max
  Clone ID: PAT_MRT3847_20738C.1.pep
GSVGPHTLCLHPKRLLYVVPPLGHFFLSDHLPRFPFLHCYLIYNPNLSRFFFP

SEQ ID NO: 197911 - protein, 36 aa, Glycine max
  Clone ID: PAT_MRT3847_20739C.1.pep
LLYYQGHTSTYGWIFKLSYIFTANAGLNYLMTILAF

SEQ ID NO: 197912 - protein, 51 aa, Glycine max
  unsure (1)..(51): unsure at all Xaa locations
  Clone ID: PAT_MRT3847_2073C.1.pep
EIRFXELNTGANIPSLGLXTWLXDPGXXGDXIXHAVXXGYRHXEXCQITIG

SEQ ID NO: 197913 - protein, 92 aa, Glycine max
  unsure (1)..(92): unsure at all Xaa locations
  Clone ID: PAT_MRT3847_20740C.1.pep
SIPQRFGWPYGGTSVFLTGSFTRWSTHMAVAATEGCPAVLQVACNSMPGFDHYKYXVYGECRHDEQLPFENGSCGVVNTINIAREPDLLPYI

SEQ ID NO: 197914 - protein, 98 aa, Glycine max
  Clone ID: PAT_MRT3847_20741C.1.pep
QSSRSHLRREERLLLNILPPRDYPFYNWGLSFFFLVRAYRNQPPLIPNIPPEHRKLFLKKKKHEHPGFFLFFNPRPFSHLGEIKTNDLWSEGPPSGWT

SEQ ID NO: 197915 - protein, 55 aa, Glycine max
  Clone ID: PAT_MRT3847_20742C.1.pep
DTQEAMSKPAHKLHTTAEDNTNDISKQDDVGYDEVRHYTILDKKAKIQSAKDGIG

SEQ ID NO: 197916 - protein, 76 aa, Glycine max
  Clone ID: PAT_MRT3847_20743C.1.pep
IVDQLIYGYSRRNRINQHACRHTYMSTKTDAKHAERDSKLKNSVSLSLTHTPHNTYVWQPARPRLLLFNHHHKLDR

SEQ ID NO: 197917 - protein, 71 aa, Glycine max
  Clone ID: PAT_MRT3847_20744C.1.pep
LIFLFFTLFYLYFVISEAFLIHLSGLIYYQFLMIFNNRHELICYSLIDLDYWYISIFTIFYFLLSKFTLFY

SEQ ID NO: 197918 - protein, 206 aa, Glycine max
  unsure (1)..(206): unsure at all Xaa locations
  Clone ID: PAT_MRT3847_20745C.1.pep
HAVRKDLKSDNYLVVCAALNAVCRLISEETIPAVLPSVVDLLAHPKDAVRKKAVMALHRFHHKSPSSVSHLISNFRKKLCDNDPGVMGATLCPLFDLIAVDPSPYKDLVVSFVSILKQVAEHRLPKSYDYHQMPVPFIQIKLLKILALLGSGDKQASEQMYTVIGEIIRKGDSSSNIGNAILYGCICCVSFIYPNAKXXEAAADVN

SEQ ID NO: 197919 - protein, 104 aa, Glycine max
  unsure (1)..(104): unsure at all Xaa locations
  Clone ID: PAT_MRT3847_20746C.1.pep
XXXXXXXXXXLILFFFFSAVLVQLRHELELLLLAPPFVLVIRQLGYPMRGAPSEESITPFVTWGFSDPNTRVFKEFARHVMRHKGRTKSLEEAVMGSLAAIISG

SEQ ID NO: 197920 - protein, 50 aa, Glycine max
  Clone ID: PAT_MRT3847_20747C.1.pep
HKALNFSPKKKKIWGCFLGAGGLFLPTPPKRIASRKTALLEHFWGVKNLA

SEQ ID NO: 197921 - protein, 78 aa, Glycine max
  Clone ID: PAT_MRT3847_20748C.1.pep
WKRNLLVVFWKRNLLVVFWKRNLLVVFWKRNLLVVFWKRNLLVVFWKRNLLVVFWNRNLLVVFWNRNLLVVFWNRNLL

SEQ ID NO: 197922 - protein, 51 aa, Glycine max
  unsure (1)..(51): unsure at all Xaa locations
  Clone ID: PAT_MRT3847_20749C.1.pep
GKVKIXINGFGKIGRLVARVALQRNXVDLLAXNDPFITTVSLTSMFKTDRV

SEQ ID NO: 197923 - protein, 132 aa, Glycine max
  Clone ID: PAT_MRT3847_2074C.1.pep
HAFAHAFESFSTSVTSLALRTLTLRAGQHLCSTQCFCSSLSLIPNSKPITIADVYLKTALTTSLPTSLSPLSGTRVFRSEQEEDTLGDSDCPTLFPYLKLFFANFHFNFDSTLLEKLFKSAVNVHEVDVFND

SEQ ID NO: 197924 - protein, 131 aa, Glycine max
  unsure (1)..(131): unsure at all Xaa locations
  Clone ID: PAT_MRT3847_20750C.1.pep
KSYGRKVDVYSFGLILWEMVTGTPRVRFTYAILXTFMMLXQNVRPVIPSNCPPAMRALIEQCWSLHPDKRPEFWQVVKVLEQFESSLAHDGTLTLVENPCCPDHKKGLLHWIQKLGPVHHNNGPVPKPKFT

SEQ ID NO: 197925 - protein, 106 aa, Glycine max
  Clone ID: PAT_MRT3847_20751C.1.pep
YEDMTPIQAAFAVVNKNARPVIPSDCPPAMRALIKQCWSLHPDKRPEFWQVVKVLEQFESSLAHDGTLTLVENPCCQDHKKGLLHWIQKLGPVHHNNGPVPKPKFT

SEQ ID NO: 197926 - protein, 95 aa, Glycine max
  unsure (1)..(95): unsure at all Xaa locations
  Clone ID: PAT_MRT3847_20752C.1.pep
NVSVPEPCPEEGTLPDAGPPSPADHLRKLFYLVGMNDQELVAFSGAHTLWPSIPHSQVWGEPDTKYTNDGPISPXRQSWTVLWLKFDNSYFMDIK

SEQ ID NO: 197927 - protein, 57 aa, Glycine max
  Clone ID: PAT_MRT3847_20753C.1.pep
EISCRKRKMKDFVYNMKKNISKYRYNLLKTLFFFSMSNVIPKAFKSLPQEFHLLTPP

SEQ ID NO: 197928 - protein, 53 aa, Glycine max
  Clone ID: PAT_MRT3847_20754C.1.pep
LSPVVVSAVVSWSSVVLSGPFSLPPSRFGLSCPLGGGNRGYFFTCPPLCRVSA

SEQ ID NO: 197929 - protein, 434 aa, Glycine max
  Clone ID: PAT_MRT3847_20755C.1.pep
MMGTNENGKRFYQVKIKGLDVTNLKELGRLMGPLQRQAFRKVYGKILDLIAAEVFTEVVVSLAQYYDQPLRCFTFGDFQMVPTVEEFEEILGCPLGGRKPYLFSGFLPSLSKIVAVVGDSARELDRMKQTRNGVVGLPRKYLECKARDMASQEKWVSFVDILALLIFGVVLFPNVDGLVDLAAIDAFLAYHHSKESPVVAILVDLFDTFDRRCEKNSARIVCCLPALCVWLILHLFQQDIRHPCPLQSYHSCVEKRRVDWDQHLAGMGGSTIDWFPRWKEGNEGVLFSCGDYPNIPLMGRALGYPMRGVPTEESLSPFLVRDFGAQSLKVVQRVHKAWRSPLRKDKELRGIRNGIIGGYHEWLRVHTQGLDWLSKLKVINEENFEAPEEDEEVQALKLELGKSMVEINSEELCGVATMSSSFGERKETSLGYMA

SEQ ID NO: 197930 - protein, 125 aa, Glycine max
  Clone ID: PAT_MRT3847_20756C.1.pep
GDYHAAVRDAITKKLFDVLLYSSRKEERCAGTVWLVSLIKYCGNHPTIQQMLPEIQEAFSHLLGEQNELTQELASQGMSIVYDIGDESMKKNLVNALVNTLTGSRKRKRAIKLVEDTEVFTDGAL

SEQ ID NO: 197931 - protein, 79 aa, Glycine max
  Clone ID: PAT_MRT3847_20757C.1.pep
MLESLIRLAQAHARLMFRNEVTRLDAITAILCIESSMTTSAIVDCIGNALHSNFTDNPDQEYARQERLILEKLGSIDDI

SEQ ID NO: 197932 - protein, 611 aa, Glycine max
  Clone ID: PAT_MRT3847_20758C.1.pep
MRMRELGFQERRSWRRRGGDTSPDSVIFTLESNLSLFSSASASVDRCSFASDAHDHDSLASEISLHLAAQDHDGDFAHSESWSGPDPDLDPNKRQQQRHADTDSDAAHTKHRRNRFSGKGEKAKVQKEEDSDGGDTEDGNQHLEFDSARNSFSLALKECQDRRSRSEALFKKHDRRRPASLDLNNAIGNGNVSSPHLGLSAMKKSTLCSRRSGSGTFPSPGTPNYLHATVAMQKGWSSERVPLHTSAARKQVGAALLPFNNGRTLPSKWEDAERWILSPVSGDGGTGRASLPAPQRRPKSKSGPLGPPGVAAVAYYSMYSPAVPLFEGANSRSFMAASPFSAAVSVPAAAADGLTASSGGSCGVLSTRTDPCMARSVSVHGCSQMHSQSSLPAQGEKFDGFKDAGTNVSPALSRRDMATQMSPEGSSCSSPSLRPSFSASTPPSLPLSEFTSLPFSKMDIRDVPVDEHVTMTRWSKKHRALFSGRGSENVDSWKIKESSSRSSSWDISEGSKTVSKAKRVEAKINAWENLQKAKAEAAIQKLEMKLEKKRASSMDKIMNKLRLAQKKAQEMRSSALANQPHHVPRTPHKAILFSRASQMGSLSGCFTCHAF

SEQ ID NO: 197933 - protein, 67 aa, Glycine max
  Clone ID: PAT_MRT3847_20759C.1.pep
ISRPNYPPFSVFSPSCTTPTKKFLVPFPFIKKIERPERESIFYYPMRIFFILVYFSFAVMGKQENWH

SEQ ID NO: 197934 - protein, 68 aa, Glycine max
  Clone ID: PAT_MRT3847_2075C.1.pep
GCYHHSPERNQENRTHPTDKNCHVGRSLNRLPHALSTLRIWKQCSWFSTAGKRKKNAEGLDGLFQNRS

SEQ ID NO: 197935 - protein, 30 aa, Glycine max
  Clone ID: PAT_MRT3847_20760C.1.pep
PLRACGRSVCLSHLLSLLIEKPKSKLGQLR

SEQ ID NO: 197936 - protein, 67 aa, Glycine max
  Clone ID: PAT_MRT3847_20761C.1.pep
NRCGNFQISRADCTSGSCLVSFSGLCKRPCGRGYKCLFIRTQARCHKIWQYTRAWDASPGILGPGPA

SEQ ID NO: 197937 - protein, 48 aa, Glycine max
  Clone ID: PAT_MRT3847_20762C.1.pep
RLIVLQEVINDRHTSWRITYYTPWRYIESLFHPSTVFSMVIPSHIYSS

SEQ ID NO: 197938 - protein, 85 aa, Glycine max
  unsure (1)..(85): unsure at all Xaa locations
  Clone ID: PAT_MRT3847_20763C.1.pep
DENSRIPGLPEKRTTVLCSATMKMDVERLGQISLKDAVHIRAAPSEKGQETVXAKDDQSFFAPAQLKQSLRMVAPKLRLVSLIPY

SEQ ID NO: 197939 - protein, 181 aa, Glycine max
  Clone ID: PAT_MRT3847_20764C.1.pep
TRPHQIAALAVALQQTMSPGFKAYAKQVKANAVAIGNYLMSKGYKMVTDGTENHLVLWDLRPLGLTGNKVEKLCDLCHITLNKNAVFGDSSALSPGGVRIGAPAMTSRGLLEKDFEQIGEFLHQAVTICLNIQKEYGKLLKDFNKGLVNNKDIENLKVQVEKFADSFDMPGFTLESMKYKE

SEQ ID NO: 197940 - protein, 138 aa, Glycine max
  Clone ID: PAT_MRT3847_20765C.1.pep
MQNSAMEASKLSSSDQNVRCHHCAGPLSKDMETSHWTVSPLIRDSFSMIGSAVGGVASAFYGFNLVMPIVQRRIKGPMWLHFLIGAPPVIVFSSACAGLAGGAVPAAAQLVSSSYHAAYSSPTSPPPSKDENIQRSRK

SEQ ID NO: 197941 - protein, 67 aa, Glycine max
  Clone ID: PAT_MRT3847_20766C.1.pep
YPFFWEGKGAPPLLGGLFLNPFVCHLCPSIWVIQWKPPPLAKNMGVHPAPRMNFLFKGRAPSPFQGA

SEQ ID NO: 197942 - protein, 77 aa, Glycine max
  unsure (1)..(77): unsure at all Xaa locations
  Clone ID: PAT_MRT3847_20767C.1.pep
LVDGVIDDGNPGLVAPIGEASPPPKTWVWGQWKIXGSRKAKKNFPSEPKFFQNASKGTQGSDGYKGPVQKGEPPVPV

SEQ ID NO: 197943 - protein, 83 aa, Glycine max
  unsure (1)..(83): unsure at all Xaa locations
  Clone ID: PAT_MRT3847_20768C.1.pep
SACRVLRCLRSLGXACGCVVFVVPRRACVRLCGVGCPFSFCRCRLAPPARSRRRLRPXRCPWGRRVFLCVSWLLRPRLGRVLM

SEQ ID NO: 197944 - protein, 61 aa, Glycine max
  unsure (1)..(61): unsure at all Xaa locations
  Clone ID: PAT_MRT3847_20769C.1.pep
HLTESHIFRRRCITMCGVLDLTFRGTIPLYLCQRLQPPREGLFDVLSRTGRVANAWWMKXG

SEQ ID NO: 197945 - protein, 42 aa, Glycine max
  Clone ID: PAT_MRT3847_2076C.1.pep
SSLRHNLCDHHVIALPESRSIETLPYMRVRETEPDCRLIAPV

SEQ ID NO: 197946 - protein, 40 aa, Glycine max
  unsure (1)..(40): unsure at all Xaa locations
  Clone ID: PAT_MRT3847_20770C.1.pep
XXRTLAYKLSIFSQQXGFXARCPXPNRGGHWXFQANXXFP

SEQ ID NO: 197947 - protein, 53 aa, Glycine max
  Clone ID: PAT_MRT3847_20771C.1.pep
RWNNNDSNNNNLLQPKHYLFGVTSNQSIGIIPESTCLMLQGQLMQVMIISLTF

SEQ ID NO: 197948 - protein, 54 aa, Glycine max
  Clone ID: PAT_MRT3847_20772C.1.pep
LRKALFFMYAAGMYCVIVSECLFNSRSKYLCHCVRLCQISLYIKIVGMHAPVGN

SEQ ID NO: 197949 - protein, 52 aa, Glycine max
  Clone ID: PAT_MRT3847_20773C.1.pep
LAWAIVMTGFTLQDGTYYYIKGLDLLLCYIDIGACFFVQRTPFNSQPDVTII

SEQ ID NO: 197950 - protein, 58 aa, Glycine max
  unsure (1)..(58): unsure at all Xaa locations
  Clone ID: PAT_MRT3847_20774C.1.pep
XRXARXRXXXXXLEAXRTXEXXXPRXXXEFXYXEYGLXSXXRXXXXXXXSXXNXPVXP

SEQ ID NO: 197951 - protein, 334 aa, Glycine max
  Clone ID: PAT_MRT3847_20775C.1.pep
MALRPIDNALPTTSPDKQTTEAGFISLIELHCNTHSPMALRPIDNALPTTPERPKKQPKVALATQKQQDRAGVNGENIVPLPSSGDATVDYVSSDNLKPLSDPEVKIQSLVEDLDSKNWTKVCESLNDVRRFAMYHSSLLFPILGKIVLVVAKTMRNPRSALCKTAIMAAADIFNAFGDKLHDPEISDAFDGLLLQLLLKASQDKRFVCEEADRALGLMVGSMTPLPLLQKMRVYGSHKNLRVRAKAAVSLSRCVSKMGLQEMEQFGLVELIEVAADLLNDRLPEARDAARSVATSMYEALTKDSEEKMELWQSFCQSKLPPIHALSILKIVKP

SEQ ID NO: 197952 - protein, 57 aa, Glycine max
  Clone ID: PAT_MRT3847_20776C.1.pep
ACDCSIWLSYSTSHCVPLVNPIVLSQPPIATKRLLHILFRYLFWESSYRKVSRDLRY

SEQ ID NO: 197953 - protein, 151 aa, Glycine max
  unsure (1)..(151): unsure at all Xaa locations
  Clone ID: PAT_MRT3847_20777C.1.pep
KFQHSGGWIKALXEESKNDRMHLMAMVELVKPSWPERLLIFPAQGVFFNALFVYGLLSPKAAHRFVGHLQEQSVISYTQHLNAIESGKVENALAPAMVMDSGRLPKDATVQDGVTVIRPDEAHHRDVNPCAFNIHQQGKGLKEAPAPIGYH

SEQ ID NO: 197954 - protein, 120 aa, Glycine max
  Clone ID: PAT_MRT3847_20778C.1.pep
ACYRELLHALVADLAEAGKARGRDADDQGAFNCLSRFLSNSNLVDTKLGLDGPKIVQKWVLFQIGPNVRLGLPKFLEGSTIRTLRLPCSLMAIDYQRLYDFFYESFGLVLDDTDRMRITR

SEQ ID NO: 197955 - protein, 166 aa, Glycine max
  Clone ID: PAT_MRT3847_20779C.1.pep
DVSTFNILIRALCKAHQLRPAILMLEDMPNYGLRPDEKTFTTLMQGFIEEADVEGALRIKELMVESGCELTSVSVNVLVNGLCKEGRIEEALRFIYEEEGFCPDQVTFNALVNGLCRTGHIKQGLEMMDFMLEKGFELDVYTYNSLISGLCKLGEIDEAVEILHHM

SEQ ID NO: 197956 - protein, 56 aa, Glycine max
  Clone ID: PAT_MRT3847_2077C.1.pep
QKAQSNTLENFCNHTLMQWKDLCSTFKVPRGIPSVNPHSNLGEKKKTIGGKKNRPK

SEQ ID NO: 197957 - protein, 128 aa, Glycine max
  Clone ID: PAT_MRT3847_20780C.1.pep
TKPNPDPFFRFKKKRSHFGNYFGISWGAPREKGFFLKRHFLPPLTVLTLGKPGPWGKLPKRKGGGFPPQGGSKVFLGFGKLFLEKRALGRGPAIGGKAIREGLCKNMGGLAPKSFWGGGGGKKKTLRE

SEQ ID NO: 197958 - protein, 53 aa, Glycine max
  Clone ID: PAT_MRT3847_20781C.1.pep
STPFCESLFPRQPSGLDSHPLPPQAYPCCQRVGTPHPRPWLLNQPTHVYERGE

SEQ ID NO: 197959 - protein, 30 aa, Glycine max
  Clone ID: PAT_MRT3847_20782C.1.pep
SRGRPFIFFFSFFIFCSPKINNILSEYQRV

SEQ ID NO: 197960 - protein, 186 aa, Glycine max
  unsure (1)..(186): unsure at all Xaa locations
  Clone ID: PAT_MRT3847_20783C.1.pep
RTRGIETVPVGPVETGALKPAMLATFAPTGLTTEDTPAEMHHEALAEALPGDNAGFDVKNVAVNDLXRGYAASNSEDDPAQEAANYPAQLIIMNHPAQIENGYAPVLDCHTYHIAVKDAELVTKIDRRSGKXLDNEPEFLKNGDAGSVKMIPTTPMAAETFSDYPPLGRSAARDMLQTVAERVLNN

SEQ ID NO: 197961 - protein, 353 aa, Glycine max
  unsure (1)..(353): unsure at all Xaa locations
  Clone ID: PAT_MRT3847_20784C.1.pep
MPPKQQQSKADLAKKQKIVEDKTFGLKNKNKSKNVQKYVQNLKQSVQPRPDAAKVDAKKKKEEDKAKEKELNELFKIAVTQPKVPVGVDPKSILCEFFKVGQCAKGFKCKFSHDLNVQRKGEKIDIYSDKRDEETMEDWDQETLEXVVESKKTEYNQNKPTDIVCKYFLDAVEKKQYGWFWACPSSGKEAICLNCHYRHALPPGYVLKSQMKALLEEESEKISIEEEIENQRAKVATTTPMTPELFFEWKKKKIEERDANIAAAKVERSKNDRMSGRXAYDGHQREPESYETEQNGNRNAAEDGPCSSATAASDGEDLDDIDDDDELDMDELDELEASLSKTSIQIKETGAEA

SEQ ID NO: 197962 - protein, 361 aa, Glycine max
  Clone ID: PAT_MRT3847_20785C.1.pep
MPPKQQSKADLAKKQKIVEDKTFGLKNKNKSKNVQKYVQNLKQSVQPRPDTAKVDAKKKKEEERAKEKELNDLFKIAVTQPKVPVGVDPKSILCEFYKVGQCGQGFKCKFSHDLNVQRKGEKIDIYSDKRDQETMEDWDQETLEKVVESKKTEYNQNKPTDIVCKYFLDAVEKKQYGWFWVCPNGGKNCHYRHALPPGYVLKSQMKALLEEESEKISIEEEIENQRAKVATTTPMTPELFFEWKKKKIEERDANIAAQQAERAKNDRMSGRELFLSNASLFVDDAEAYDVYQREPESYETEKNGSRNAAEDGPSSSATAAADGDYLDDIDDDDELDMDELEELEASLSKTSILIKETGAEA

SEQ ID NO: 197963 - protein, 94 aa, Glycine max
  unsure (1)..(94): unsure at all Xaa locations
  Clone ID: PAT_MRT3847_20786C.1.pep
MNLSIGNGSTSSSPPKAGDSVADQFPAGPRVLVVNHEPTYLMIIDTMRRACLYXVTMCHRTQVASYFSMTDDHRFDNVXSDVHMPHMDGFKLLG

SEQ ID NO: 197964 - protein, 72 aa, Glycine max
  Clone ID: PAT_MRT3847_20787C.1.pep
FPGLQRDEPYLQLDPLINHPLISNHLISIRSFTPPTQYHHGRQRFCLRRDRLPSLQDAPHTHLTFIKVLMHI

SEQ ID NO: 197965 - protein, 80 aa, Glycine max
  unsure (1)..(80): unsure at all Xaa locations
  Clone ID: PAT_MRT3847_20788C.1.pep
MGPVRGFKKKRKPEKKHDKNGSGSGSPEGEGPVDWWDDLSKRMNGLQQSPSKCLDNXESVFKISRKTFEYICSLGKDDMM

SEQ ID NO: 197966 - protein, 93 aa, Glycine max
  Clone ID: PAT_MRT3847_20789C.1.pep
IWTLFFSFFFFSVSCWRTIFSILSVIRACWSDARPNPLSPDGNRAGDHTCPIAGSIKARPRGWPKDGLREKKNAAHNARKKTDKTKKSKAWRA

SEQ ID NO: 197967 - protein, 59 aa, Glycine max
  Clone ID: PAT_MRT3847_2078C.1.pep
PKRTVTVNKRWSRRVVVSSGGFNLRTCPYNDTLTYASSLSHTPHLLIHPSPLSNNTQQK

SEQ ID NO: 197968 - protein, 149 aa, Glycine max
  Clone ID: PAT_MRT3847_20790C.1.pep
MESRGYLFFLLQGLVFAALATSAFSQLSPNYYDYSCPNALSTIKSVVEAAVQKEHRMGASLLRLHFHDCFVNGCDGSVLLDSTSSIDSEKNAAANFQSARGFEVVDDIKKAVDQACGKPVVSCADILAVAARDSVVALGGPSWKVSLGR

SEQ ID NO: 197969 - protein, 49 aa, Glycine max
  unsure (1)..(49): unsure at all Xaa locations
  Clone ID: PAT_MRT3847_20791C.1.pep
GIPRFFHRMIFVGNQLKYARTLAXYNFQKELTFHHVLCFCGGFSARCGM

SEQ ID NO: 197970 - protein, 84 aa, Glycine max
  Clone ID: PAT_MRT3847_20792C.1.pep
VTEEKAEAVGKERVCLVMVGLKRVGQRCCGKQHTEMFNARPISYLFLHSIFSSCAKEQWTDDVRDWVSIFSVIMIDSLEDGNGD

SEQ ID NO: 197971 - protein, 37 aa, Glycine max
  Clone ID: PAT_MRT3847_20793C.1.pep
KQNTFHIFLHYSHGSLQAVSQCTQVITRQIHLFITFY

SEQ ID NO: 197972 - protein, 50 aa, Glycine max
  Clone ID: PAT_MRT3847_20794C.1.pep
IIPPFFTSHTYSSDRVYFSRQCKKSLQPSLLLTTVLSSSYIAPYDLSIIR

SEQ ID NO: 197973 - protein, 128 aa, Glycine max
  Clone ID: PAT_MRT3847_20795C.1.pep
LVQCLEAAIERRASEGMELELCTEDRVGLLSDITRIFRENSLCIKRAEISTEEGKARDTFYVTDVTGNPVDPKIIDSIRRQIGDKVLKVKHNSNLSPKPSQPTTIGFLLGNFFKARSFQNFKLIRSYS

SEQ ID NO: 197974 - protein, 72 aa, Glycine max
  Clone ID: PAT_MRT3847_20796C.1.pep
TRPKFCFCPPLVGFFFFLEIINSLPGAQIKKKLSPFESRDLLIYTFGSSKNIPQIEINAFTLFSASPFSPKF

SEQ ID NO: 197975 - protein, 50 aa, Glycine max
  unsure (1)..(50): unsure at all Xaa locations
  Clone ID: PAT_MRT3847_20797C.1.pep
SVDFTXSSPASASAAXSXTDPNKWRMPSGMXVXPLTXLASPXXXHPXRFG

SEQ ID NO: 197976 - protein, 88 aa, Glycine max
  unsure (1)..(88): unsure at all Xaa locations
  Clone ID: PAT_MRT3847_20798C.1.pep
MDCRVCVATGGDLWVRVGGGGEIGGGFSHESEHDLALMVSDFLENGSSGAESWCSSDSDSGHSDFAQLAERIQICKLSVAXHESDLLS

SEQ ID NO: 197977 - protein, 38 aa, Glycine max
  Clone ID: PAT_MRT3847_20799C.1.pep
FFKIFLFAFFVFINNYKDGIIFILSPILKTCIETGEHM

SEQ ID NO: 197978 - protein, 108 aa, Glycine max
  Clone ID: PAT_MRT3847_2079C.1.pep
MIATIFLAAFALATGAAASPVEANVNAATAVATQATAAAGQAGAQGQVGAQAQVGANANLLTPYGGYPYGGYPYGGYPYGGYRYGGYPYGGYPYGGYPYGSYPYGAYP

SEQ ID NO: 197979 - protein, 43 aa, Glycine max
  Clone ID: PAT_MRT3847_207C.1.pep
LNGLRLYIILDPLQLLMRTLCWASEPSIIMLPCVSTTPVSCEG

SEQ ID NO: 197980 - protein, 44 aa, Glycine max
  Clone ID: PAT_MRT3847_20800C.1.pep
LNCITMKTLKDAGVLGKQMKDGVRLMGRGSEQIKWPIHLEVDLI

SEQ ID NO: 197981 - protein, 111 aa, Glycine max
  unsure (1)..(111): unsure at all Xaa locations
  Clone ID: PAT_MRT3847_20801C.1.pep
KKKKKKKKKKKKKKKKKKKKKGGKKKEKIKGGARFKGSKLTYACMQRISFFIGAPKLNXLAVIXKRGDWKNLGVTKINGFEENPLLASWRNIKKARTDRLSQHLPTLNGKW

SEQ ID NO: 197982 - protein, 165 aa, Glycine max
  Clone ID: PAT_MRT3847_20802C.1.pep
MANREENNEGHKFTVKYVGLNGMECEGKLPRRVVGVRNHCYLLKSKIGEGSFSAVWRAEQRPPTGVDVAVKQVFLSKLNPRLKACLDCEINFLSSVNHPNIIRLLHFFQDDGCVYLVLEFCAGGNLASYIQNHGRVQQQIARKFMQQLGSGLKVLHSHDIIHRDL

SEQ ID NO: 197983 - protein, 63 aa, Glycine max
  Clone ID: PAT_MRT3847_20803C.1.pep
KRENFDATFNKHISIQTLKYINLFYFSVFVVFNLHLTQLFAPQIIIVGACKGKFFTRENRITM

SEQ ID NO: 197984 - protein, 60 aa, Glycine max
  Clone ID: PAT_MRT3847_20804C.1.pep
SGWVGLLLLCCEIKPLPFVPVWLGLVWAKLNFLFGLNRRVRLNEFTFNQIVLFLYVWFGG

SEQ ID NO: 197985 - protein, 113 aa, Glycine max
  unsure (1)..(113): unsure at all Xaa locations
  Clone ID: PAT_MRT3847_20805C.1.pep
MVSNFYFLLVLRFLCGLYWIRGVILLMLQLMLWQHCLTFFSFKISKKLCLFMCFSLLQDATIEQLLPIFLSLLKDEFPDVRLNIISKLDQVNQVIGXINLLSQSLLPAIVELA

SEQ ID NO: 197986 - protein, 88 aa, Glycine max
  Clone ID: PAT_MRT3847_20806C.1.pep
MEGLIPFVYKAIMQSKGDKEGHPIGSWLCESPYSYMRLPGDSGRFQIQAPAAASPSSTNPNSSSATQIIVSSGVQSPHQCLTHRRIAA

SEQ ID NO: 197987 - protein, 304 aa, Glycine max
  unsure (1)..(304): unsure at all Xaa locations
  Clone ID: PAT_MRT3847_20807C.1.pep
NHCTCVWQLYENTLKYLSHVVKDAESFANDLRRSIYDPKDEEFTRAWEAMLEKYNLQQNEWLRXFIEKEKWAVVFGQNTFFVDIKGFHLGEILSKKFRNYLNPDLDVLQFFKHFERVVDEQRYKEIEASEEMSRCLPRLMGNVVLLKHASDIYTPRTFEVFQRAYEKSLNVLVNQHSRNGSLFEYKANTFWHTRQYNVTFNSSDDTVVCSCMKFERVGILCSHALKVLDHRNIKVVPSRYILDRWTGHARLGNLREIRQCKMQDNPNMVVTSCYKICATDCSSYQQEPLNLWRLISLPQGNLMK

SEQ ID NO: 197988 - protein, 92 aa, Glycine max
  unsure (1)..(92): unsure at all Xaa locations
  Clone ID: PAT_MRT3847_20808C.1.pep
RSSVLRNSKAPTKSCKSDALLGEXMIRKAYKGWLDETTLAPTKPGSGIMVAIKKMNLXSMHGLREWQSHIDSLGMISHQXVKRLSYCCDDEE

SEQ ID NO: 197989 - protein, 950 aa, Glycine max
  unsure (1)..(950): unsure at all Xaa locations
  Clone ID: PAT_MRT3847_20809C.1.pep
MQVSSSWFGTIVLSNRYSRNRSLPLEPCSTTTTSSVSATSYPPLFTRPYSSLSFLVSQRKGFTLTSLSPIRTNKKRRRASLRVSAVFERFTERAIKAIVLSQREAKALGSELVYTQHLLLGLIAEEDRSSDGFLASGVTVEYSREIVRSVWLRNAXARAGSGAARAGVDDDGSKASATQVPFSVNAKRVFEAAFEYSKSLGHKFVGPVHILFTKVKVDDGSVSRVLYRLGTNGSQLASVAFSRLQKEIAKDGREPNVISKGVPNKSISRKGSDAGASATTGEESALSQFCVDLTARASEGRIDPVVGREVEVQRIIQILCRKTKSNPILLGEAGVGKTAIAEGMALRIAKADVAPFLLTKRVMSLDIALLMAGAKERGELEERVTKLVKDIIKSGDVILFIDEVHILVQAGTIGRGNKGSGLDIANLLKPALGRGQFQCIASTTLDEYRLYFEKDTALARRFQPVWVDEPSEDDAIKILMGLREKYEAHHKCRYTAEAIKAAVDLSARYIVDRYLPDKAIDLIDEAGSRACIEAFKKKKEHETGILSKCPADYWQEIKDVKSMHEMENKLKYYGASSIDDTNELILDSYLSSTTTDNEPIEVGPEDIAAVASLWSGIPVQKLTADQRILLLDLENQLRKRVIGQEEAVAAISRAVKRSRVGLKDPDRPIAAMLFCGPTGVGKTELAKSLAACYFGSEAAMVRLDMSEYMETHTVSKLIGSPPGYVGYGEGGVLTEAIRRKPFTLLLLDEIEKAHPDIFNILLQILEDGQLTDSQGRRVSFNNALVVMTSNVGSSAIAKGRHNSIGFLIPDDKTTSYNGLKSMVIEELRSYFRPELLNRIDEVVVFQPLEKSQLLQILDLLLQDMKKRVLSLGVHVKVSEAVKNLVCQQGYNPTYGARPLRRAITSLIEDPLSEAFLYGECKQGDTVLIDLDANGNPFVTNQLDQIVNLSD

SEQ ID NO: 197990 - protein, 85 aa, Glycine max
  Clone ID: PAT_MRT3847_2080C.1.pep
LPLHLHCQHQTSPSHSPMSIMKQSLSPEIRNNLEKEALRIDEPNCACQNLTSPLLITLRGNHKGLTSVTHSTLHNTTLSKHLTLS

SEQ ID NO: 197991 - protein, 70 aa, Glycine max
  Clone ID: PAT_MRT3847_20810C.1.pep
RGKSIMIPMVIRKMLVRIIKKPSLGVLVSVVNWGTPPAKQMCFLYVSPLGFARVIFYFKVPCPTSNCGFY

SEQ ID NO: 197992 - protein, 79 aa, Glycine max
  Clone ID: PAT_MRT3847_20811C.1.pep
VYVKKKRSRRGNIYLVGNNMIGILKNPLILEMVPRDARSDNLERILYTRKEHDIIWALEVSIRFCIYIHTWNAVVCVRE

SEQ ID NO: 197993 - protein, 230 aa, Glycine max
  unsure (1)..(230): unsure at all Xaa locations
  Clone ID: PAT_MRT3847_20812C.1.pep
GTSLFFLKSQDPQQFLFGLAKAEAVCTFCYASIRTICLFKHHLPRTWVLAEYSSTVIDNIRCYCNYDCNDNGPCDEDSPVVPIGRSPRVDVLLKAENVVLEFGGCVVXRLAGLYKADRGAHNYFLEKGVVDSRPDHILNLIHYEDAASLSVAILKKNFRGQIFLGCDNHPLSRQEMMDLVNKSGKFSKKFDKFTGTDGPLGKRLNNTRTSQVVGWEPKYLSFARFLESSM

SEQ ID NO: 197994 - protein, 78 aa, Glycine max
  Clone ID: PAT_MRT3847_20813C.1.pep
IGCTSKITSQLMMSIYRIYTHVDTHQMRFTPCLSIEILDRVIAGGPIPIQLFHTAESAGTGHPNPQEIPSPSTPGNQP

SEQ ID NO: 197995 - protein, 116 aa, Glycine max
  Clone ID: PAT_MRT3847_20814C.1.pep
ITRLRVGCNIKGAMLLDDAKHTNTENAVASIMVAPLTGGRPIQVVTLPNAIVHIEPHMNARLQMLCTTTNVDFVKGKHLARLKVNDACAAVGLTSSYTPTPLVDSVLQRDSGIIED

SEQ ID NO: 197996 - protein, 62 aa, Glycine max
  Clone ID: PAT_MRT3847_20815C.1.pep
SWTARFAILLLGLVFLASVSVSFGIAYWEKEKPIPDFQELPRHEYTEFAWCELFSYHAHRDA

SEQ ID NO: 197997 - protein, 113 aa, Glycine max
  unsure (1)..(113): unsure at all Xaa locations
  Clone ID: PAT_MRT3847_20816C.1.pep
XXXXXALXXKXXEEEXXRIKAXXRRPXXXVKEVTKYFHGDAAKEEAHPXRIFMVVRDFLNSLDQVCKEVGRMQDRTVIGSARSFRIAASASLPVLNKYHARQDRSSDEEGLSP

SEQ ID NO: 197998 - protein, 39 aa, Glycine max
  Clone ID: PAT_MRT3847_20817C.1.pep
FYFLFFLFFFFFFFFFFFFFFFFFSDAWADAWADASADA

SEQ ID NO: 197999 - protein, 64 aa, Glycine max
  Clone ID: PAT_MRT3847_20818C.1.pep
KKKKKKKKKKKKKKKKKKKKKKKKKKKKKKKKKKKKKKRGGRFKESKFTSPCFQRKNFFLWPPK

SEQ ID NO: 198000 - protein, 61 aa, Glycine max
  Clone ID: PAT_MRT3847_20819C.1.pep
NQEHSAKNNGALFLKKKKVIQFSFLGRNFPAIIVRPRWSPILPPDRQEKEPIKKGPGPRLP

SEQ ID NO: 198001 - protein, 324 aa, Glycine max
  Clone ID: PAT_MRT3847_2081C.1.pep
NCSRCLIPFTAYNASYFIEVDRLLRPGGYLVISGPPVQWPKQDKEWSDLQAVARALCYELIAVDGNTVIWKKPVGESCLPNENEFGLELCDDSDYPSQAWYFKLKKCVSRTSVKGDYAIGIIPKWPERLTAIPPRSTLLKNGVDVYEADTKRWARRVAHYKNSLKIKLGTRFVRNVMDMNALFGGFAAALKSDPVWVINVVPALKPPTLDVIFDRGLIGVYHDWCEPFSTYPRSYDLIHVASIESLIKDPASGQNRCTLVDLMVEIDRMLRPEGTVVVRDAPEVIDRVARIASAVRWKPTVYDKEPESHGREKILVATKTLWKL

SEQ ID NO: 198002 - protein, 290 aa, Glycine max
  unsure (1)..(290): unsure at all Xaa locations
  Clone ID: PAT_MRT3847_20820C.1.pep
LANLEMMEPCSSVKDRIGYSMIVDAEEKGFITPGESVLIEPTSGNTGIGLAFMAAAKGYKLIITMPSSMSLERRTILRAFGAELVLTDPAKGMKGAVHKAEEIRDKTPNSYILQQFENPGSPKIHYETTGPEIWRALVGRLMLLSLGLGLEVQXTGAGKYLKEQNPDIKLYGIEPVESPILSGGKPGPHKIQGIGAGFIPGVLDVDLLDEVVQISSEEAIETAKLLALKEGLLVGISSGAAAAAAVKIAKRPENAGKLIVAVFPSFGERYLSSVLFESVKREAESLVFEP

SEQ ID NO: 198003 - protein, 63 aa, Glycine max
  Clone ID: PAT_MRT3847_20821C.1.pep
TQDTTHDPVILGPHSLHHGRYHQVEGLQRRNRVLIHERSIAPFDSASMESVNNVHIRLPLYAQ

SEQ ID NO: 198004 - protein, 131 aa, Glycine max
  Clone ID: PAT_MRT3847_20822C.1.pep
MAAEKSNIAKDVTELIGKTPLVYLNHIVDGCVAKVAAKLEMMEPCSSVKDRIGYSMIVDAEEKGLITPGESVLIEPTSGNTGIGLAFMAAAKGYKLIITMPSSMSLERRTILRAFGAELVLTDPAKGMKGA

SEQ ID NO: 198005 - protein, 49 aa, Glycine max
  Clone ID: PAT_MRT3847_20823C.1.pep
ALIIVQQDSGAINASYYARWRCCYYDERGCEYVCKLIGVSSRVSHGVPF

SEQ ID NO: 198006 - protein, 325 aa, Glycine max
  Clone ID: PAT_MRT3847_20824C.1.pep
MAVEKLSIAKDVTELIGKTPLVYLNRIVDGCVAKVAAKLEMMEPCSSVKDRIGYSMIVDAEEKGLITPGESVLIEPTSGNTGIGLAFMAAAKGYKLIITMPSSMSLERRTILRAFGAELVLTDPAKGMKGAVQKAEEIRDKTPNSYILQQFENPANPKIHYETTGPEIWKGSSGKVDALVSGIGTGGTITGAGKYLKDQNPDIKLYGIEPVESPILSGGKPGPHKIQGIGAGFIPGVLDVDLLDEVVQISSEEAIETAKLLALKEGLLVGISSGAAAAAAIKIAKRPENAGKLIIAVFPSFGERYLSSVLFESVKREAESMVFEP

SEQ ID NO: 198007 - protein, 376 aa, Glycine max
  Clone ID: PAT_MRT3847_20825C.1.pep
PFDLSKVIVVATENRAQPIPPPLLDRMEVIELPGYTAEEKLKIVMQHLIPRVLEQHGLSSEFLQIPEGMVQLVIQRYTREAGVRNLERNLAALARAAAVRVAEQEQVVPLNKGVEGLSTPLLENRLSDGAEVEMEVIPMGVNNRDISNTFRITSPLVVDEAMLEKVLGPPKFDGREAEDRVATPGASVGLVWTTFGGEVQFVEATAMVGKGELHLTGQLGDVIKESAQIALTWVRARATELRLAAAEGINLLEGRDIHIHFPAGAVPKDGPSAGVTLVTALVSLFSQRRVRSDTAMTGEMTLRGLVLPVGGIKDKILAAHRCGIKRVILPERNLKDLVEVPSSVLADLEILLAKRMEDVLEQAFDGGCPWRQHSKL

SEQ ID NO: 198008 - protein, 70 aa, Glycine max
  Clone ID: PAT_MRT3847_20826C.1.pep
FYWFFSWHLERKKKNTSFIIIVKIKLPCSQKSGGWPPFITQIYYGVRFLLNQVNTFLKFTKQFWKANPHR

SEQ ID NO: 198009 - protein, 47 aa, Glycine max
  Clone ID: PAT_MRT3847_20827C.1.pep
KFLGCYFTRYLTMQGCFKLISPIFGYNGACPPLKLRLFLLHRVLGQQ

SEQ ID NO: 198010 - protein, 35 aa, Glycine max
  Clone ID: PAT_MRT3847_20828C.1.pep
HKVAEGYFSFTIVVSLIQSKVTSAVNFKGPVAKIN

SEQ ID NO: 198011 - protein, 27 aa, Glycine max
  Clone ID: PAT_MRT3847_20829C.1.pep
LNKKAFGLINYSHPILDCLSRQLLNLY

SEQ ID NO: 198012 - protein, 51 aa, Glycine max
  Clone ID: PAT_MRT3847_2082C.1.pep
CHPIIQISPFSPTASLGSTLLISHLFYFFVYLSNFVVVFCSFCQLAYILNQ

SEQ ID NO: 198013 - protein, 103 aa, Glycine max
  Clone ID: PAT_MRT3847_20830C.1.pep
FILHSSTTQKKKNNFFHSKKTYFDICYSIEPNFPRFHNFHAQHGNKFNHSLANTHPGDKWAYIYIYMLKFYVFDLLLLLFGPLFGCRHKRAIPKQEKNEVENK

SEQ ID NO: 198014 - protein, 90 aa, Glycine max
  Clone ID: PAT_MRT3847_20831C.1.pep
ISKNTCITKTVKKEFQFLNSIHAKNDLERSIELTPTPFETTILCSRGVGVNYKSSCPVLNRMDCVLTRELFFARSRKARVHAGIQINRLV

SEQ ID NO: 198015 - protein, 55 aa, Glycine max
  unsure (1)..(55): unsure at all Xaa locations
  Clone ID: PAT_MRT3847_20832C.1.pep
PRENEGNWVISFEEDQKKGEVGTLPTCGQDYHVRCHXKWLFIKKICPICKGFALP

SEQ ID NO: 198016 - protein, 72 aa, Glycine max
  Clone ID: PAT_MRT3847_20833C.1.pep
MGGPPGFKWGFTYRPPPVVFGGALSKVQRPVCIISNSPSLAQGFGRLDPKFDFLYPQRAFVPWYVGRGMKKG

SEQ ID NO: 198017 - protein, 47 aa, Glycine max
  unsure (1)..(47): unsure at all Xaa locations
  Clone ID: PAT_MRT3847_20834C.1.pep
VAISTSLILVFVLIIDSYEPLQRLFLPVRPYKPLLLWVCXFSLGRLP

SEQ ID NO: 198018 - protein, 65 aa, Glycine max
  Clone ID: PAT_MRT3847_20835C.1.pep
DDIPTPLIHLSRCHATTCKNDRLATCLITEYPFFLPDSTRCKTSFLQQVFIHSFFHSPLSCTSAS

SEQ ID NO: 198019 - protein, 87 aa, Glycine max
  Clone ID: PAT_MRT3847_20836C.1.pep
MGKLNVVILQSHKAVGFSLFHFGGPVDLSTGHKSATASSNGDNVGDFNLKSSVDQVDDDHECNKKEATVIEEYNLFAASNTLRFSIF

SEQ ID NO: 198020 - protein, 68 aa, Glycine max
  Clone ID: PAT_MRT3847_20837C.1.pep
GTRLVPAAFVLFLVASGFLFSGGCGVAALAALSWLYNFVGGNQPAGSATLACAKGYLTAKAWAAKERA

SEQ ID NO: 198021 - protein, 77 aa, Glycine max
  Clone ID: PAT_MRT3847_20838C.1.pep
GKKKGALYYRESPFQGSFYGRKSIKPKGLKFFLAKGAFFLTIPGKKTQSLIKKRQITPPQGLGGPIFLGKNEPPFFY

SEQ ID NO: 198022 - protein, 48 aa, Glycine max
  Clone ID: PAT_MRT3847_20839C.1.pep
QHSLRNHYPLLFIAPYLHISLFYNTQFICTPLIVSKAMTKMVYHTWYS

SEQ ID NO: 198023 - protein, 367 aa, Glycine max
  unsure (1)..(367): unsure at all Xaa locations
  Clone ID: PAT_MRT3847_2083C.1.pep
MLKLSCNGLDRAHSLAQCGFAGRPACAVPRRRRSGVSGFRLPEGRSIRVSAAVSAKDGAVATRVEADPGTLADRLRVGSLTEDGLSYKEKFIVRSYEVGINKTATVETIANLLQEVGCNHAQSVGYSTDGFATTPTMRKLRLIWVTARMHIEIYKYPAWSDIVEIETWCQGEGRVGTRRDFILKDYATDEVIGRATSKWVMMNQDTRRLQKVSDDVKEEYLVFCPREPLFSCHAHNFKLLNRFTSISDPLASDSMIVIGPXREHRNPGNWYGPVIYSKIRTVSLDLQSITLDYRRECGQHDIVDSLTSVEAIQGGAEAVPELKGTNGSATAREDKHEHQQFLHLLRLSTEGLEINRGRTEWRKKAPR

SEQ ID NO: 198024 - protein, 73 aa, Glycine max
  Clone ID: PAT_MRT3847_20840C.1.pep
PTDTLYIKYANNPSSPHSCIEATPCHYRMRADQTALYTEGFIYKFGFWNCSSWKLCSFGTFHFFLLDKYKYIS

SEQ ID NO: 198025 - protein, 88 aa, Glycine max
  Clone ID: PAT_MRT3847_20841C.1.pep
PGWTKPSANASGKIARGVAFPTCVPVNNTACHFYLLASDETLLEDGDILKIDMACLLHGFIVAVAHTHVLHEGPVTGRPADAIAAANT

SEQ ID NO: 198026 - protein, 57 aa, Glycine max
  Clone ID: PAT_MRT3847_20842C.1.pep
TEFLHSLSFSFLLLSAAFQTLRNSRTPSFCNPQRTSKFLRELRVVNNSRGASRIWVV

SEQ ID NO: 198027 - protein, 396 aa, Glycine max
  Clone ID: PAT_MRT3847_20843C.1.pep
MSGAALSPPTSSKSLTQTVSGSHKFVIEGYSLAKGMGVGKHIASDVFTVGGFHWAIYFYPDGKNPEDNSAYVSVFIALASEGTDVRALFELTLLDQSGQGKHKVHSHFDRSLETGPYTLKYKGSMWGYKRFFRRSLLETSEFLKNDCLKINCTVGVVVSAIDCPQLHSINIPESDIGSHFGALLDNMEGSDITFDVAGDKFPAHKLVLAARSPEFRSKFFNGLDEEKNEIIVTDLEPKVFKAMLHFIYKDTLTEEVDTVSSTTTSDFPVSEILTAKLLAAADKYDLGRLRLMCESRLCKDICVNSVANILTLADHCHATELKAVCLKFAAQNLAAVMRSDGFEHMKEKGPWLQSEILKTIAGCEGDGCSAVEKSQSVWGQLSDGGDMNGRRVRQRI

SEQ ID NO: 198028 - protein, 136 aa, Glycine max
  Clone ID: PAT_MRT3847_20844C.1.pep
ARDDAVHYFEELKLTGLDPDTVSYNLMINGLGKSRRLEEALSLFSEMKNRGISPELYTYNALILHFGNAGMVDQAGKMFEELQFMGLEPNVFTYNALIRGHSKSGNKDRAFSVFKKMMVVGCSPNAGTFAQLPNKC

SEQ ID NO: 198029 - protein, 350 aa, Glycine max
  Clone ID: PAT_MRT3847_20845C.1.pep
MATTLSEAYRDHPLHLHHIIPLDFSSLRTLPDSHAWPQSEDGDGDDDNHGIGSSIPIIDLMDPNAMELIGLACENWGAFQLKNHGIPLSVVEEVEEEAKRLFALPADRKLKALRSATGATGYGRARISPFFPKHMWHEGFTIMGSPCDDAKKIWPNDYAPFCTIMDNYQKQMKALADKLAHMIFNLLGDISEEQKRWINGSTNNLCEAVQLNFYPRCPEPNRAMGLAPHTDTSLLTILHQSQTNGLQIFKEGAGWVPVHPHPSSLVVHTGDILHILSNSRFRCALHRVMVNSARERYSVAYFYGPPVDHVVSPLVLDSLPRFRSLTVKEYIGIKAKNLRGALSLISMLKN

SEQ ID NO: 198030 - protein, 116 aa, Glycine max
  unsure (1)..(116): unsure at all Xaa locations
  Clone ID: PAT_MRT3847_20846C.1.pep
MAIANCDDENAKALQFIEDMTRNTDSVQEGLLAEILSQXYLKRFRLNGATDRNTFKSKVPVVSYDDLKHDIQRIANGDRSPILCAHPISEFLTSSGISAGERKLRPTIRQEMERRR

SEQ ID NO: 198031 - protein, 123 aa, Glycine max
  Clone ID: PAT_MRT3847_20847C.1.pep
RAVIDGVGKGLRLNEYDLEPARMALHRWGNTSAGGLWYVLGYMEAKKRLKKGDRILMISLGAGFKCNNCVWEVMRDLSDTNVWKDCIESYPPNTLNNPFKEKYDWINDEYLSFVRLDFSRMVL

SEQ ID NO: 198032 - protein, 128 aa, Glycine max
  unsure (1)..(128): unsure at all Xaa locations
  Clone ID: PAT_MRT3847_20848C.1.pep
MKGGRSHRPRSSDPPDEWVDGSWTVDCICGVTFDDGEEMVKCDXCGVWVHTRCSRYVKGDDTFSCDKCKARHNKNNTTTNNSNNNSNSTTNPMETEVAQFLVELPTKTISMDNKKALLCRPRLWTDSP

SEQ ID NO: 198033 - protein, 100 aa, Glycine max
  Clone ID: PAT_MRT3847_20849C.1.pep
RTAARRRQKGTNKMDSSMYSVGKLAILLAFFIVASDVCMESEALGKGCDFDFECRYGCQNVPNCGCKVKCINHICRCPRSTTSNNNFLNRGPPKLSAEIL

SEQ ID NO: 198034 - protein, 40 aa, Glycine max
  Clone ID: PAT_MRT3847_2084C.1.pep
RILGDSGSVTSCELDGGRMGNLNVAERIPSRFDLNYINAE

SEQ ID NO: 198035 - protein, 253 aa, Glycine max
  unsure (1)..(253): unsure at all Xaa locations
  Clone ID: PAT_MRT3847_20850C.1.pep
MTGKKNVKAMTTAEEEDDQGKHTTSSSFSSSSSPSSSSDEREYEVQDLRDRLKSSQGSMFNLIENQLGLNSTWSKFSRQALLHGIRGFSMDLVKDFVIHSDTRWYRAWTNFILVWAVYSSFFTPMEFGFFRGLPENLFILDIIGQIAFLVDIVLQFFVAYRDSQTYRMVYKRTPIALRYLKSNFIFDLLGCMPWDIIYKACGRKEEVRYLLWIRLYRVRKVEDFFHKLEKDIRVNYIIXPIVKLIVVELYCTH

SEQ ID NO: 198036 - protein, 70 aa, Glycine max
  Clone ID: PAT_MRT3847_20851C.1.pep
GDRHSFAVFLFFILYYILDWKMGKVNGGDSKVYLSKLIRNCYYMYQTYSQKNTTQLNKFKHLLPPNQISL

SEQ ID NO: 198037 - protein, 81 aa, Glycine max
  Clone ID: PAT_MRT3847_20852C.1.pep
KELFQDRARSLRGICQLRFLLIGDSHIGCHPCWDGIRGHDTAQVGNIFSSIFILIWAHSLQRVRNIQYSPAYRVVNNQFCE

SEQ ID NO: 198038 - protein, 95 aa, Glycine max
  unsure (1)..(95): unsure at all Xaa locations
  Clone ID: PAT_MRT3847_20853C.1.pep
LXGVVXXXSXGTXWVXXXQXXXIHLXSXLRXFXXFEXXXXIXXLLXXCXSRRSISDLXHDXXFXXXDSVLXXXXLXLTYXEXYAIRXPIXLTXAX

SEQ ID NO: 198039 - protein, 149 aa, Glycine max
  unsure (1)..(149): unsure at all Xaa locations
  Clone ID: PAT_MRT3847_20854C.1.pep
FASEQVIHEEAVTISRTWGRAATTMLDGAHPYLAAMVQEATGSTEPGEXTCGDNLGSINTVSAYGLNTEMLSTCIXDTILHQIKHQTVWKQMATERTPLNVDPDEHCISEYDIDXLTEEVLXDKSGEGGTLIHNTAGSDKTRAAARKKG

SEQ ID NO: 198040 - protein, 37 aa, Glycine max
  Clone ID: PAT_MRT3847_20855C.1.pep
TLRPFTYLYNLLSSFFIFSLKYFFFYFLYRTRGRTRG

SEQ ID NO: 198041 - protein, 44 aa, Glycine max
  Clone ID: PAT_MRT3847_20856C.1.pep
YVHKEKLYKVRERLERSFMGRQLMMTMMMMVMVMGFAYKIGKSE

SEQ ID NO: 198042 - protein, 70 aa, Glycine max
  Clone ID: PAT_MRT3847_20857C.1.pep
DSSPLDLNLALAAIASTRFPFQHFTGAVLWQTLFCNTRLSYALAWAVHVALHLATIIIPLQRLTSDSDSS

SEQ ID NO: 198043 - protein, 86 aa, Glycine max
  Clone ID: PAT_MRT3847_20858C.1.pep
MGRWMKPEVYPLLAAMTFVTGMCVFQLTRNVLGNPDVRINKTRRSMAVLENREEGEKYAEHGLRKFLRTRPPEIMPTINHFFSEDK

SEQ ID NO: 198044 - protein, 118 aa, Glycine max
  unsure (1)..(118): unsure at all Xaa locations
  Clone ID: PAT_MRT3847_20859C.1.pep
HLVLGKTGGERSFLSEGNRSQALLASAIGGKMAAGGSETPTRLMAVTAAAPNKTWLPVVRGGGNSRXPQWLDGSLPHDYGIDPLGLGKDPSFLIWIRXLSLIHGRWSMAAXLGIFVGH

SEQ ID NO: 198045 - protein, 66 aa, Glycine max
  Clone ID: PAT_MRT3847_2085C.1.pep
PHCHERPPKPACSRSEHSPCYPLFTPSLSHGKPSSYPSPSEHLVSPFLHLHLSLVSHLSTSLRLTF

SEQ ID NO: 198046 - protein, 98 aa, Glycine max
  Clone ID: PAT_MRT3847_20860C.1.pep
RFKKKKTPPVKYPKAPPKQGTGGTLLSFFSCQPPLPYKICFTLTHNPVVCASKQGLPPPDTRPAPQADFPHVFPMLTVFVRLTLILVLRGRCPIPKGP

SEQ ID NO: 198047 - protein, 35 aa, Glycine max
  Clone ID: PAT_MRT3847_20861C.1.pep
GCQTSRNVGQSLVSIHVIVQQLKFLASRYKQPRYS

SEQ ID NO: 198048 - protein, 52 aa, Glycine max
  Clone ID: PAT_MRT3847_20862C.1.pep
VVVYDTVVLDNELASSDEMFLYHSCDTLSLKVAQKLVTRRFRSLSICIQCFL

SEQ ID NO: 198049 - protein, 41 aa, Glycine max
  Clone ID: PAT_MRT3847_20863C.1.pep
MAKEKAQINIVVVGHVDPEEATTMNELNNPDVEKKTPRHRR

SEQ ID NO: 198050 - protein, 74 aa, Glycine max
  unsure (1)..(74): unsure at all Xaa locations
  Clone ID: PAT_MRT3847_20864C.1.pep
LYEVDSPYYPTTRRGSGLRIFLLHPLSFRHYYFTRCRGSLGSLSFTSPLPSAFSRAVLQGSSFNFTCQVXPLXS

SEQ ID NO: 198051 - protein, 50 aa, Glycine max
  Clone ID: PAT_MRT3847_20865C.1.pep
LLNLMSRPLESSIIIMDPPLACIQASDFLRSNIHTSTYLSFSRTRSYPPL

SEQ ID NO: 198052 - protein, 80 aa, Glycine max
  Clone ID: PAT_MRT3847_20866C.1.pep
GKMCPLTLNKSSGVAFYNRIYKFAFMPPYMGINCFECHMIKGGAFNCKVKNLSHERIYICPNGLFLPLKYAISLFCMGWG

SEQ ID NO: 198053 - protein, 337 aa, Glycine max
  Clone ID: PAT_MRT3847_20867C.1.pep
ITQKTNFHVEDLNLFPIDNGHKNKAHKLNAGYHEWDFSFKLPSNLDQSVEGLPTNWVVYNIKASVDRGYMSKALSASTHIRVIRTLGRDMLESMPMEQINEDIWANKLAYKITVPQKNYIVGTHIKADFVLIPLRKGVEIATIKMELIESRQLFADYAGRRISHQQDVQVAVTEGDMPADSAQRVPDGVENGDELFDESHRFAMTLELPKSLKNCRQSVDTENIRLSHKLRLYVNLKNPEGHTSQLLVKNHVHLFISPNMPPAEDQSVLIDQHMLNQQAVQDEVNQNAPPTYGLHQLDELYNDIDPSGFMTPGGYHSMVGSGANTPFYAQSRSGSAE

SEQ ID NO: 198054 - protein, 116 aa, Glycine max
  unsure (1)..(116): unsure at all Xaa locations
  Clone ID: PAT_MRT3847_20868C.1.pep
MEEILGLLPLVLDSTTFAMTNPNFDGKGTYLILNVRDAFLITDLNSIDKDPTRXIDLTNSNPECHTFEQDANDVHDXLLVXNFGDDYSVSLRQQLHDXDKKLVAAHNYNKDWPVNN

SEQ ID NO: 198055 - protein, 84 aa, Glycine max
  Clone ID: PAT_MRT3847_20869C.1.pep
VRTVLSLAGSLHSSVSHTVWPLLPCMFICFLVSFSCTPLASQVSHSLSYRVTSSRPSYVCDSFWLDACMPAPSCDPVCACPPVT

SEQ ID NO: 198056 - protein, 192 aa, Glycine max
  Clone ID: PAT_MRT3847_2086C.1.pep
LEPVEIETWCQGEGRVGTRRDFILKDYASDAVIGRATSKWVMMNQDTRRLQKVSDDVKEEYLVFCPREPRLAIPEADSNNLKKIPKLEDPAQYSRLGLVPRRADLDMNQHVNNVTYIGWVLESMPQEIIDSHELQSITLDYRRECGQHDIVDSLTSVEEIQGGAEAVSELKSTNGSAMAREDKHEHQQFLHL

SEQ ID NO: 198057 - protein, 40 aa, Glycine max
  Clone ID: PAT_MRT3847_20870C.1.pep
QLVQLMAIVNAIFFFASHQLLVVEAFSRTIIFYDNCSRRH

SEQ ID NO: 198058 - protein, 59 aa, Glycine max
  Clone ID: PAT_MRT3847_20871C.1.pep
CPKGLQVLLSDYSVCHQTSSPSVNASRDAASQALKEKLDIRLEQDFDEAEEAELKRRKE

SEQ ID NO: 198059 - protein, 68 aa, Glycine max
  Clone ID: PAT_MRT3847_20872C.1.pep
MRLEPESNASSESIYNAALALGIANQLTNILRDVGEDARRGRVYLPLYLSLHEFPPFVCNSSAENVII

SEQ ID NO: 198060 - protein, 30 aa, Glycine max
  Clone ID: PAT_MRT3847_20873C.1.pep
SLLKVHPMNTKILTKKMRTMLQMGYMIANG

SEQ ID NO: 198061 - protein, 50 aa, Glycine max
  Clone ID: PAT_MRT3847_20874C.1.pep
FYGLLVIMFDIIHDDLMELFLGCYGVSKPSFNNTLLSGFWFGFVKEYCNG

SEQ ID NO: 198062 - protein, 79 aa, Glycine max
  Clone ID: PAT_MRT3847_20875C.1.pep
MPPEVSFFPVPWQNTICNGNKLDLNSYTMTRSFCSFSVSHFFFFLLLYFFCSNSLYSEKQDALIFLPFICYREFDLVPN

SEQ ID NO: 198063 - protein, 128 aa, Glycine max
  unsure (1)..(128): unsure at all Xaa locations
  Clone ID: PAT_MRT3847_20876C.1.pep
MAAAAAAKRCHGEVLGLPRDCAPDEIRSAYRRLALQRHPDKLVKSXYDSHRSQILFSDPNTVSNSFVPDLFSFFSNTVYSGYSDTAKGFYKVYSDVFDKIHANEINFARKLXLGVDAVRQAPVMGNLD

SEQ ID NO: 198064 - protein, 587 aa, Glycine max
  unsure (1)..(587): unsure at all Xaa locations
  Clone ID: PAT_MRT3847_20877C.1.pep
MAAAAAAKRCHYEVLGLPRDCAPDEIRSAYRRLALQRHPDKLVKSGLSQEEATAQFQELQHAYEVLSDPKERAWYDSHRSQILFSDPNTVSNSFVPDLFSFFSNTVYSGYSDTAKGFYKVYSDVFDKIHANEINFARKLGLDSDAVRQAPVMGNLDSPYAQVTAFYSYWLGFCTVMDFCWVDEYDVMAGPNRKSRRLMEEENNKVKEKATREYNYTVRRLGDFVKKRDKRVIDIKVKRSVQXERNKEDERERVEEREHELXFYCVLCKKKFKSEKQWKNHEQSKKHKERVAEFRDSIGDEEDLEEEEEEEGKEGLESEEDQVGVNDEIDNGIGDLEARIRDGVNVEEGETRNGIELNDGDEFFDASRVKEGEEANVKVNFRYDGNDEDDENGVLEAMVAGHKNRKPRASAHKPKASVAPSPIENENDELGSKEYNNRKGARKKRGAKKEKGRKNWEESQGAASSGDYENINSNGNDNSHAEESCSQHFVENEDNGIENEQVGRDDKISNQPADKKGRDKNISHQPADTKGAGKDTKTKAKVSSKGRKGKVTSKNVGNICEACGEEFDSRNKLHKHLGDSGHATIKGR

SEQ ID NO: 198065 - protein, 229 aa, Glycine max
  unsure (1)..(229): unsure at all Xaa locations
  Clone ID: PAT_MRT3847_20878C.1.pep
MQVDATAPDDERKYSGDVWDLPDLTNTLELADEFDNHCVSEEEYEVHTVSGIDYNQYFGGGVMYWNPSDYPGKGFSRPPSLSSDDSLWALRDADMNRTVDDMVAFSSSYSTNGLTSPTAATFCSPFDPVGTATQTIGYVMSGNEVPGKMLHSSSVTDAAVDEDTSGSLGNNLPGEVEGKAGDSHPYPILRPIIIPNLSGXRFDHKSPLCFLPXSGSSPRIKRPPSPVVL

SEQ ID NO: 198066 - protein, 312 aa, Glycine max
  unsure (1)..(312): unsure at all Xaa locations
  Clone ID: PAT_MRT3847_20879C.1.pep
MNLLSLTLPLPLFCSSLSVTRLPSFPSSYKCTSGAVLRRCVKEEKEEEQLLEGMPKEYYDDEWQAQQREKTKELHRLRIQEEEEEERKIGEYREIGMRLKEYPEDERXKARKLVSSFLRAAEEVEERIEEAAEKGELTELVLMVIWNRLDLARRDEEKDAIRSLDLLYRRVETEILKREATPAMRLLNDLLIMYDGYNFEEWLKKCKKVMIDTFPREDPFSILVPPGFESFDIDKHHGPLRPSLEVDNTLLRVDFVREVDELLQEVHSEENGXKNEPGFDPESVANRLKQQEKQQTIRQVEALLDLAIGLKW

SEQ ID NO: 198067 - protein, 52 aa, Glycine max
  Clone ID: PAT_MRT3847_2087C.1.pep
EGSPSYTKRCRANMSDVYIPCMILQNVERILWHNTITCLDTGWDHHYFACVV

SEQ ID NO: 198068 - protein, 84 aa, Glycine max
  unsure (1)..(84): unsure at all Xaa locations
  Clone ID: PAT_MRT3847_20880C.1.pep
XKEPEGYGNRRSWESPGLYLPQVGQEAGGPGSAITNDTFSRFSYQESLLTRHPGVERVKSAHIPLSSGPPDLCCCCFIRGVGYN

SEQ ID NO: 198069 - protein, 41 aa, Glycine max
  unsure (1)..(41): unsure at all Xaa locations
  Clone ID: PAT_MRT3847_20881C.1.pep
MGVFTFKDXINSPVTPVTLYFDLVTDPDNFIPNALNSFKNI

SEQ ID NO: 198070 - protein, 134 aa, Glycine max
  Clone ID: PAT_MRT3847_20882C.1.pep
MASTFLTLPTPFLHKTNAITFSDKRPSFLQRSSLKINAITKKWEPTKVVPQADRVLVRLEELSDKTVGGVLLPKSAVKFERYLVGEILTVGAEAGELKAGTKVLFTDMNAYEVDLGTDAKHCFCKASDLLAVVE

SEQ ID NO: 198071 - protein, 52 aa, Glycine max
  Clone ID: PAT_MRT3847_20883C.1.pep
VKLVSYNANVENTNVTHHFLINIQSYDDIGCHWVDNNVHIYVCLKESDPHHR

SEQ ID NO: 198072 - protein, 134 aa, Glycine max
  Clone ID: PAT_MRT3847_20884C.1.pep
MASTFLTLPTPFLHKTNAISFSNKRPSFLQRSSLKIHAITKKWEPTKVVPQADRVLIRLEELSDKTVGGVLLPKSAVKFERYLVGEILTVGAEAGELKAGTKVLFTDMNAYEVDLGTDAKHCFCKASDLLAVVE

SEQ ID NO: 198073 - protein, 36 aa, Glycine max
  Clone ID: PAT_MRT3847_20885C.1.pep
LCSHLAAVTLCSLLASVTFSSIIASVPISRLLAEVH

SEQ ID NO: 198074 - protein, 111 aa, Glycine max
  unsure (1)..(111): unsure at all Xaa locations
  Clone ID: PAT_MRT3847_20886C.1.pep
MDPIQHMFGNFGALKLHVSKTGTGPNAVLFLHCFPEIWDSWRHQMIALAGAGFRAVPFDYRGYGLSDPPPEPRKTSWSDLLSDLLHIMDALAFSKXFLVGKNFGARLCISI

SEQ ID NO: 198075 - protein, 207 aa, Glycine max
  Clone ID: PAT_MRT3847_20887C.1.pep
GSRLEQTCDNAKRLGKDNTSYAFIYGGNDSSWVQNFKIAIGKIEKHVINNVDSNIEPYQLGESNPDNVPSFWIGLDGKKKNKGCKDKVDCEIQEVVRTLLCLKQDPSGWVVLSRGRNLKILGHAEPMYQTVLDFEKWKNKVLEKETFDVAFKEYYDVVKEKYASLPYDHTSSVLATITCPNPLCGRVMEVTSINYRCCHGSANSCNL

SEQ ID NO: 198076 - protein, 121 aa, Glycine max
  Clone ID: PAT_MRT3847_20888C.1.pep
MATLLGLILVGFGLGVLTVVAVEALGLLWIMKRLRHKINNDEAYFSSKTPTPALLDPQQSLDFAYRKQGVVWVLESGKISKPSREQKRKKETLEVSPVKTYGQIKGQSLILRESGWFAHDD

SEQ ID NO: 198077 - protein, 29 aa, Glycine max
  Clone ID: PAT_MRT3847_20889C.1.pep
HTQIYESHKSAPLGHIFTIFHQVNNFKEK

SEQ ID NO: 198078 - protein, 101 aa, Glycine max
  Clone ID: PAT_MRT3847_2088C.1.pep
MEMKNTMDRNPQSDAPIIKPLDPEEFKRQGYMMVDFLADYIRNVSHYPVLSKVEPGYLKQRLPTSAPCGPEPIESILKDVQDHIIPGLTHWQRPNFYGYFP

SEQ ID NO: 198079 - protein, 73 aa, Glycine max
  Clone ID: PAT_MRT3847_20890C.1.pep
MAGTLSSLSIYSYNLHQHTRSMHSNQAITRSIYSTFPSYHLRDLQRMLSLQNVMHYIMRHRSHILKPTRKLKQ

SEQ ID NO: 198080 - protein, 71 aa, Glycine max
  unsure (1)..(71): unsure at all Xaa locations
  Clone ID: PAT_MRT3847_20891C.1.pep
EKYPHLVNIGKEIVKKCRGIPFPLRTLWSLLFSKFDAYEWQYVRNNEFCNFPPSKXDILPALKLNYNLLPI

SEQ ID NO: 198081 - protein, 170 aa, Glycine max
  Clone ID: PAT_MRT3847_20892C.1.pep
MGLGTLPLTPSYSGFSSNSGLIHDTTNHRRVNRSMKFRVSAKQEKQEEKKKQSLFSSVTEALDFSQVRSAEDAQLIEEAREATKSGERMSREQYGALRRKIGGTYKDFFKSYVEVDGAYVEEGWVDKTCKVCKKDTKGEARQVDKFGRYVHVACLEKANTGNFFTRLFSR

SEQ ID NO: 198082 - protein, 159 aa, Glycine max
  Clone ID: PAT_MRT3847_20893C.1.pep
GAVKAMVVALGNEGVAEEAAGALALIVRQPVGAMAVVREEAAVAGLIGMMRCGTPRGKENAVAALLELCRSGGAAATERVVRAPALVGLLQTLLFTGTKRARRKAASLARVFQRCENASLHYGGLGVGYSFASDSASTRNTTTFVSDVSLPMSISVPVL

SEQ ID NO: 198083 - protein, 76 aa, Glycine max
  Clone ID: PAT_MRT3847_20894C.1.pep
NLIACEWLNLVISKSQLLKSCIHVYYQKILMIFFSFTIYMFRYHSSSIKPIFNINSTLILLLHLCIEICKIYIQRK

SEQ ID NO: 198084 - protein, 67 aa, Glycine max
  unsure (1)..(67): unsure at all Xaa locations
  Clone ID: PAT_MRT3847_20895C.1.pep
THAYYQPFLKFLSNXLXXHFSELWPIYQLLSHSIYTGHLLLLSFFLSQLFLLGPSLKHLFHKQLTFP

SEQ ID NO: 198085 - protein, 47 aa, Glycine max
  unsure (1)..(47): unsure at all Xaa locations
  Clone ID: PAT_MRT3847_20896C.1.pep
LLQLQLRTLCYYNFGKQINFLFFVXXLAIHINHXXXLKNXXLFKXXL

SEQ ID NO: 198086 - protein, 93 aa, Glycine max
  unsure (1)..(93): unsure at all Xaa locations
  Clone ID: PAT_MRT3847_20897C.1.pep
FSLVTSVYALPLPKPGGEFVAMLTSALTAIVVLXKGRQMENETDVLGTAAAXGTLRFASNLYIIERYSLGATCNGGARAHLGKELAFNTSVNY

SEQ ID NO: 198087 - protein, 204 aa, Glycine max
  unsure (1)..(204): unsure at all Xaa locations
  Clone ID: PAT_MRT3847_20898C.1.pep
MSTDTSFPDHKLCGFLCAVLTLTPRDDTDTEIAFAERCEIFGEGGVVGFRTQNGVVLDPVLDSSQCGDSGSNKTKRRNKIGMVNGSMSVVHQLHAMVTRKFIKIDARVVCVEALPRIVVLVDVYVPVQVWSGWQFPRSGPVAGAIFHHLSCDWNERKFNAFISRXIXKKTHGENESIWNLSDWHVLWVQAPFREGNSSGKGYLN

SEQ ID NO: 198088 - protein, 61 aa, Glycine max
  Clone ID: PAT_MRT3847_20899C.1.pep
SLLPLARPWGPFFLSQVVRIFRFFCLPSLSVFPIVVVNFGTTKKNCTHMFRGRSHKKKKKY

SEQ ID NO: 198089 - protein, 45 aa, Glycine max
  Clone ID: PAT_MRT3847_2089C.1.pep
ISLRGAMMMKGPILKDKGLPTMRIRELINVMKYLPQCTRSQPKLI

SEQ ID NO: 198090 - protein, 77 aa, Glycine max
  Clone ID: PAT_MRT3847_208C.1.pep
LSFSRAHARTRGLDLGLANHNPCANAIRFLYNRVYQRFLAPRGTIFYGNQSDYVTMPQTWGITDLYTYKLLTAHRNI

SEQ ID NO: 198091 - protein, 35 aa, Glycine max
  Clone ID: PAT_MRT3847_20900C.1.pep
NKKKLKKKKKKKKKKKKKKKKKKKKKKKKKKKKKK

SEQ ID NO: 198092 - protein, 88 aa, Glycine max
  Clone ID: PAT_MRT3847_20901C.1.pep
HISRASVVVLVAFLVLPLLFSDMARATIPESDVDLLEFPLNLEYLEAEFFLFGSLGHGLDVVAPNLTEGGPPPIGGKLAKLDNFVKDV

SEQ ID NO: 198093 - protein, 885 aa, Glycine max
  unsure (1)..(885): unsure at all Xaa locations
  Clone ID: PAT_MRT3847_20902C.1.pep
TRPGDCCSQSKEVKKQQKREREMAPPIPKVLMVAEKPSIALSIASVLSHAQMFTRRGSTEVHEFDGKFLGSPAHFRVTSVIGHVFSVDFPGKYQDWAATDPLDLFQAQVIKNESNPKAHICRHLSQEARGCRYLVLWLDCDREGENICFEVIKSTGFHINDTYRARFSSVTEKDVVKALDNLVRPNRDEALAVDARQEIDLKVGVAFTRFQTSYFQGKYGNLDSRVISYGPCQTPTLGFCVQRYLQINTFKPEKFWSLHPYIIQNGYEIQLEWQRGKLFDINVAMMFQKLVSEDGLLEVTEISEKQETKSRPVGLNTVNLLKVASSALGFGPQMAMQLAERLYTQGFISYPRTESTAYPPSFDFRGVLSAQTNNPTWGNYVQGLLTNGYQKPRLGTDVGDHPPITPMRSAAEDMLGNDAWKLYQYICQHFIGTVSPDCKYIRRKVEFSIGGESFHCTGQHVVTKGFTAIMPWLAINDKNIPSFIKGQKIEVSKLELYEGSTSPPDFLTESELISLMEKNGIGTDASIPVHINNICERNYVQVQAGRKLVPTTLGITLVRGYQTIDPDLCLPDIRSFIEQQITLIAKGQVDHRHVVQHVIQQFTQKFSYFVKKIEDMDALFEAQFSTLTDSGRILSKCGKCLRYMKFISTQPSRLYCGTCEEVYYLPQKGTIXLYKELSCPLDNFELLICSMPGPDGKSFPLCPYCYINPPFEGIETLINTAKTGTSGKIGKGAGMPCNLCPHPTCPNSLVSQGVCACPECSGTPCLDPVSAPRWKLCCNMCNCLVFLAQGAHRISTTKDRCPECDSSIIEVDFNKKTTPLEDGATLHHGCILCDELLHSLVEMKHGRSFRHMSSRGRGRGARKGGRGRGRGGGKMMDPKMSFRDF

SEQ ID NO: 198094 - protein, 153 aa, Glycine max
  Clone ID: PAT_MRT3847_20903C.1.pep
MAPPIPKVLMVAEKPSIALSIASVLSHAQMFTRRGSTEVHEFDGKFLGSPAHFRVTSVIGHVFRVGAVYDFPGKYQDWAATDPLDLFQAQVIKNESNPKAHICRHLSQEARGCRYLVLWLDCDREGENICFEVIKSTGFHINDTYRARFSSVT

SEQ ID NO: 198095 - protein, 86 aa, Glycine max
  Clone ID: PAT_MRT3847_20904C.1.pep
FVSKRNRTDNLFPLPFSFSHSTHLISPLTKISTVFKNQTPPSLTHNSPDNNAIKTQISNLVSRFKHGQNGKLEKDLASKQEFLSKC

SEQ ID NO: 198096 - protein, 288 aa, Glycine max
  Clone ID: PAT_MRT3847_20905C.1.pep
MAATRAVTIASNSTCSLLAKKTFVGGTALSLNNLKFCRTRRSYTCRAIYNPLVVVKEEGQPETFDYRVFFVDKSGKKVSPWHDIPLRLGDDIFNFIVEIPKESSAKMEVATDESFTPIKQDTKKGKLRYYPYNIHWNYGLLPQTWEDPSFANSEVEGALGDNDPVDVVEIGERQRKIGEVLKVKPLGALAMIDEGELDWKIVAISLDDPKAPFVNDVDDVEKHFPGTLTAIRDWFRDYKIPDGKPANKFGLGNKAANKDYALKVITETNESWNKLIKRSIPAGELSLV

SEQ ID NO: 198097 - protein, 28 aa, Glycine max
  Clone ID: PAT_MRT3847_20906C.1.pep
NYFKTICIILKGIKYILLDIVMCLWRMI

SEQ ID NO: 198098 - protein, 305 aa, Glycine max
  unsure (1)..(305): unsure at all Xaa locations
  Clone ID: PAT_MRT3847_20907C.1.pep
MAATRAVTIASNSTCSLLAKKTFVGGTALSLNNLKFCRTRRSYTCRAIYNPLVVVKEEGQPETFDYRVFFVDKSGKKVSPWHDIPLRLGDDIFNFIVEIPKESSAKMEVATDESFTPIKQDTKKGKLRYYFXNIFFLLITLFYXDGILYNIHWNYGLLPQTWEDPSFANSEVEGALGDNDPVDVVEIGERQRKIGEVLKVKPLGALAMIDEGELDWKIVAISLDDPKAPFVNDVDDVEKHFPGTLTAIRDWFRDYKIPDGKPANKFGLGNKAADKDYALKVIKETNESWNKLIKRSIPAGELSLV

SEQ ID NO: 198099 - protein, 95 aa, Glycine max
  Clone ID: PAT_MRT3847_20908C.1.pep
MAATRAITIASNSTCSLLAKKPFVGGTALSLNNLNFCRTRRSYTCRAIYNPQVVVKEEGQPETLDYRVFFVDKSGKKVPFLFYFYWASFVFLICY

SEQ ID NO: 198100 - protein, 47 aa, Glycine max
  Clone ID: PAT_MRT3847_20909C.1.pep
IKYGSNHAHPSDKVTPTQERDHVQRENRNHLKKKHLKFRVYNKFKLL

SEQ ID NO: 198101 - protein, 74 aa, Glycine max
  unsure (1)..(74): unsure at all Xaa locations
  Clone ID: PAT_MRT3847_2090C.1.pep
TTVPRYASGVMGFRICSTQGPPVTIDHPINXIVSREQMGCAGGPKIRIYVPETQAPAFCMPSSVDKVDGSISHS

SEQ ID NO: 198102 - protein, 53 aa, Glycine max
  unsure (1)..(53): unsure at all Xaa locations
  Clone ID: PAT_MRT3847_20910C.1.pep
MLNGTGSYESRRNKTHTLCVRXGRRIFHLTDESVRRLCFPCRHAHMKYNWSLK

SEQ ID NO: 198103 - protein, 76 aa, Glycine max
  Clone ID: PAT_MRT3847_20911C.1.pep
VMKYPTHQSHNKIGVLSQYHSSWLWRHHYFLSLISWKKYSEFYNLPHIHRKINHKIFIHIKHASYKANILKHIPRS

SEQ ID NO: 198104 - protein, 107 aa, Glycine max
  Clone ID: PAT_MRT3847_20912C.1.pep
PFPKSTLSNTKDQPARLLLKNTTKKILFYPQIQSLPPFFILQLNATKLLSLIHYRFVLAGLGFLLFWLVFPPFPFIKGASLLAEEGSEKRQVTVGNHWRLLMPKIKP

SEQ ID NO: 198105 - protein, 61 aa, Glycine max
  Clone ID: PAT_MRT3847_20913C.1.pep
VQNTEKTRGGIFIEPIPRLKLVTGPDQLYETRDMNLPRGSRLLEPLEPLEPLEPIRLELEP

SEQ ID NO: 198106 - protein, 65 aa, Glycine max
  Clone ID: PAT_MRT3847_20914C.1.pep
ILYSGRPCLFLIFLISFLIHFIFLIFFFNTKIRVRPKHFNFKFKNFLLKTQTITLLFLYKITLLY

SEQ ID NO: 198107 - protein, 88 aa, Glycine max
  Clone ID: PAT_MRT3847_20915C.1.pep
KEHPWIYPWVIKTPKTPDQAFLNIIGGSRGLPIIGRNRKKLHVILGRHKLLKKPRHFVLFFLSLNNLGLFLILPHGGNTQIPVPVWTG

SEQ ID NO: 198108 - protein, 42 aa, Glycine max
  unsure (1)..(42): unsure at all Xaa locations
  Clone ID: PAT_MRT3847_20916C.1.pep
PQVXPFIPGLPKFXFKXEGLLNXPIKVXKSXXLLXFPNFXXY

SEQ ID NO: 198109 - protein, 43 aa, Glycine max
  Clone ID: PAT_MRT3847_20917C.1.pep
KDRTPFKFTIILFFFLFFFLFFFFFFFFKFFFFFFFFLKLNFF

SEQ ID NO: 198110 - protein, 133 aa, Glycine max
  unsure (1)..(133): unsure at all Xaa locations
  Clone ID: PAT_MRT3847_20918C.1.pep
MGDSSEDLDQLLDRALHDSESFNLNPPAARGEATANSKTESPSLPSEVQGXGMGLPDVRTKKDGKXRLPKTSSLYEALNKLREQARDAVKALVSICLPTDDDLRKDALTDDWVMQFEQLAGSHDMESFEETMM

SEQ ID NO: 198111 - protein, 55 aa, Glycine max
  unsure (1)..(55): unsure at all Xaa locations
  Clone ID: PAT_MRT3847_20919C.1.pep
SSPQFXXQTCXFYMNSRTGSLPDMQSWEYNSRETGSSESIIKSAQESXXXGGFNN

SEQ ID NO: 198112 - protein, 82 aa, Glycine max
  Clone ID: PAT_MRT3847_2091C.1.pep
MEKLVRSCDKEYMRMAMLKHEETFKEQVYELHRLYQIQKILMQNMDAIRGIDTACLHLLVDKAIGSSQDVMAVTLEKKQVEA

SEQ ID NO: 198113 - protein, 162 aa, Glycine max
  unsure (1)..(162): unsure at all Xaa locations
  Clone ID: PAT_MRT3847_20920C.1.pep
MPISRATYLRCIIYPFTCRRSCQMMVTTIQRGQNTVSRKGINAASKRKLQYCRISTPDEASVLIVENTNNELKSDLIDVYINSADQXDDAGNQQAAVIHVPYRLKNGYRKIHVRLXRELETEHSGKDAILSATRRILRPPKRGYAVHHSCTQALTAAHEAML

SEQ ID NO: 198114 - protein, 36 aa, Glycine max
  Clone ID: PAT_MRT3847_20921C.1.pep
QGLNTMVVCSMHLSRHPLQDCPDLKSRRQSFVDVIL

SEQ ID NO: 198115 - protein, 120 aa, Glycine max
  unsure (1)..(120): unsure at all Xaa locations
  Clone ID: PAT_MRT3847_20922C.1.pep
YFRFLRYDPYSDYAYFCTRIKSHFTKNPEGWVWRVPAVLKTXMVLRTKGXLFDGEPIFPLPLKFIELKKVVFFMEERDFYSKLKVDLRAQFQDYVDAGTVKQIFVNILLMFVRLKQAGDH

SEQ ID NO: 198116 - protein, 64 aa, Glycine max
  Clone ID: PAT_MRT3847_20923C.1.pep
KMHPIFPSVTTVKEGWGIFKLGGAPPPKGPSLVSFKGYTPAPEQIEVLYKTNMTTIMGKNDYKK

SEQ ID NO: 198117 - protein, 109 aa, Glycine max
  Clone ID: PAT_MRT3847_20924C.1.pep
KIPITIHPAKVNTFQIFYRRKIQSREFAINLSTQGGVAHPTFRGLGVFPNPSGNSEIKIFSGFTPKEKPPVGVKEETNKGGSSPFKGIFKGFWTPFPDPGADPWADPWV

SEQ ID NO: 198118 - protein, 104 aa, Glycine max
  unsure (1)..(104): unsure at all Xaa locations
  Clone ID: PAT_MRT3847_20925C.1.pep
TDSIATAHNLHANASFMHATNVYMGTHNLKISHTICKDFGSAPAVAIIICCLKPHLKDIAQKCDYATKIAGFXPCHLKLASDYXASAQGVPKTLTFDKIQSKTY

SEQ ID NO: 198119 - protein, 168 aa, Glycine max
  unsure (1)..(168): unsure at all Xaa locations
  Clone ID: PAT_MRT3847_20926C.1.pep
GRVGGRVGGRVGFASSGLKTDVTTIRGGAAWGLLCLVIFTACAGKILGTFVVAMFCMIPARESLTLAVLMNTKGLVELIVLNIGKEKKVLNDEMFAILVLMALFTTFMTTPIVMSIYKAAKTQRKLGDINSLSSKVNEFRVLACIHXPNNIPSISSSSNHLAAPPSPF

SEQ ID NO: 198120 - protein, 86 aa, Glycine max
  Clone ID: PAT_MRT3847_20927C.1.pep
QHSTRKFLAISAFSPILSESNNKQASGAHFSSSLSDLLCMHAIPFQFHAVSCVPFHSFLCLLLLLPFSPPSLTCKITMKTGHMLLN

SEQ ID NO: 198121 - protein, 66 aa, Glycine max
  Clone ID: PAT_MRT3847_20928C.1.pep
KKWLIVRNQKMLFYNFGGLKGRGVDCSPQNNRKCGPLFHMCGGFVFMSYQYQSAVARKGCFIKSGE

SEQ ID NO: 198122 - protein, 463 aa, Glycine max
  unsure (1)..(463): unsure at all Xaa locations
  Clone ID: PAT_MRT3847_20929C.1.pep
MCLKEDPSDLPRYSYSILNSLYLNTAQKMLDEICTVRKALKNSAKXKQENTGLDGSKDSDGKSTSQSMQMSSGPNGSTANASSELSSAERQNLLDKKTKLLSMLDEVDKRYRQYCHQMQIVVSSFDMVAGCGAAEPYTTLALRTISRHFRCLRDAISGQIQVTQRSLGEQEGIPRLRYVDQQLRQQKALQQLGVMRQAWRPQRGLPESSVSILRAWLFEHFLHPYPKDSEKIMLARQTGLTRNQVANWFINARVRLWKPMVEEMYKEEFGDSEMNCNLSSENNTVKCKKDDLVQESDNINNNNKWEETQDNLVTVDSVQVQPQAELDRGVNVENVVMDSGTGKLQGDQNQQRLGMNNNNNSSSNFYSISTNQNDGGLMGCSTHATYDLSELGNFTVGSHVSLALELRNCESDGFAMSDDAIRKRRNQALASSPETDLLDYHFTDSGKQQHRFGNPHLLHEFVV

SEQ ID NO: 198123 - protein, 117 aa, Glycine max
  unsure (1)..(117): unsure at all Xaa locations
  Clone ID: PAT_MRT3847_2092C.1.pep
MVEAVVSFAVERLHDLLTEEARLLIGVSGKVKRMQNELXRMQCFLRDAERKQDKNDTIKNYISEVRKLAYDAEDVIEIYAIKVALGISIGTKNPLTKTKHLHKVGTELTSINSRIDD

SEQ ID NO: 198124 - protein, 267 aa, Glycine max
  unsure (1)..(267): unsure at all Xaa locations
  Clone ID: PAT_MRT3847_20930C.1.pep
MATKILSLLALLALFASATNAFIIPQCSLAPSSIITQFLPPVTSMGFEHPAVQAYRLQQAIAASVLQQPISQLQQQSLAHLTIQTIATQQQQQFLPALSHLAMVNPAAYLQQQLLASNPLALANVVANQPQQQLQQFLPALSQLAMVNPAAYLQQQQLLSSSPLAVANAPTYLQQQLLQQIVPALTQLVVANPAAYLQQLLPFNQLTMSNYAAYLQQRQQLLNPLVVANPLVAAFLQQQXQLLPYNQFSLMNPVLSRQQPIVGGAIF

SEQ ID NO: 198125 - protein, 80 aa, Glycine max
  Clone ID: PAT_MRT3847_20931C.1.pep
SKKALPCAHLAAKPPKFLQKILSSSMRVIRRPRIGRNISHGAGRDPFPLVGEDVAQIRSETLKVPLATFSFQFLGFCRKH

SEQ ID NO: 198126 - protein, 79 aa, Glycine max
  Clone ID: PAT_MRT3847_20932C.1.pep
ASSFTNVAYERLPLDEDESMQMQQGQSSAGDGSGDHGGGVSNNSFPDPSSGLPFFNLPLNMPQLPVDCWAGNSGGRQSY

SEQ ID NO: 198127 - protein, 55 aa, Glycine max
  Clone ID: PAT_MRT3847_20933C.1.pep
LFFFCFRFCIFFSFSLILTRWICFIFCFYIVLDNHLNSKKSILNSKKTKYFKDKK

SEQ ID NO: 198128 - protein, 37 aa, Glycine max
  Clone ID: PAT_MRT3847_20934C.1.pep
NVTIAGTIPFPLTSRREDPCVTQTHLSCQREMSGNDR

SEQ ID NO: 198129 - protein, 268 aa, Glycine max
  Clone ID: PAT_MRT3847_20935C.1.pep
MAGIDLGSASHFVHHRLERPDLEDDENQQDQDNNLNNHEGLDLVTPNSGPGDVVGRRPRGRPPGSKNKPKPPVIITRESANTLRAHILEVSSGCDVFESVATYARKRQRGICVLSGSGTVTNVTLRQPAAAGAVVTLHGRFEILSLSGSFLPPPAPPGATSLTVFLGGGQGQVVGGNVVGPLVASGPVIVIASSFTNVAYERLPLDEEESMQMQQGQSSAGGGGSGGGVSNNSFPDPSSGLPFFNLPLNMPQLPVDGWAGNSGGRQSY

SEQ ID NO: 198130 - protein, 59 aa, Glycine max
  Clone ID: PAT_MRT3847_20936C.1.pep
QSENTNLYLLSNPKSKYTRYIKNFSGHILTYDTYCYLSFEGTGQIPYVLHKRTEGQNIS

SEQ ID NO: 198131 - protein, 65 aa, Glycine max
  Clone ID: PAT_MRT3847_20937C.1.pep
NEQKGLASVRVPQVIRGSNCPPSPGGKQLKNTCQRKNCLIKNLLTFSQKVFLEVHPGGLVLREKA

SEQ ID NO: 198132 - protein, 63 aa, Glycine max
  Clone ID: PAT_MRT3847_20938C.1.pep
GQTWDWVTLIPKSSISNLVRGAAWKKSCFMGKNGMSGDAAVKKGGWALLVPGVFTNSNRTKHF

SEQ ID NO: 198133 - protein, 245 aa, Glycine max
  Clone ID: PAT_MRT3847_20939C.1.pep
GCCSSIVNLPMEEGRVVSEYTQDGTVDLKGKPILKSKSGGWNACSFVVVYEIFERMAYYGISSNLILYLTRKLHQGTVTSSNNVTNWVGTIWITPILGAYVADAHLGRFWTFVIASVIYLMGMSLLTLSVSLPSLKPPECHELDVTKCEKASTLHLAVFYGALYTIGLRTVRTEANIATIGADQFDDFDPKEKLLKLSFFNWWRCCTWFLQFPALECKVHHRTQLAVVWRLWHILSHPYRSLQVA

SEQ ID NO: 198134 - protein, 104 aa, Glycine max
  unsure (1)..(104): unsure at all Xaa locations
  Clone ID: PAT_MRT3847_2093C.1.pep
VVLGPALVAQIVMTFRLVSPVSPAAIYPKKGVLGFFAPIAIVFLVGAPILLGGAFCGAAMFPSVTFGPAVVSCTWAFPCIPWAGPIIAVXFQSLFFKQVFINHN

SEQ ID NO: 198135 - protein, 194 aa, Glycine max
  Clone ID: PAT_MRT3847_20940C.1.pep
MEVVSPKDYSVASSPYSSPNIGALLKIKVITWSQQTGLPVSVRVRVKDKIFSLHKFPLTSKSGYFKKRLNDASDVELPETFPGGPETFEMIAMFVYGSSTLIDPFNVVALTCAAEFLEMTEDHCSGNLCERFDLYLNQVVLQSWDDTLIALQRCQMLLPWSEDLLIVSRCIESLAFMACMEVLDPERRRDTPVV

SEQ ID NO: 198136 - protein, 51 aa, Glycine max
  Clone ID: PAT_MRT3847_20941C.1.pep
ILGPPALPPRLNPPLLVKFGGETSPPPFFFKGLLDREIPFPIWGFFPYGTF

SEQ ID NO: 198137 - protein, 36 aa, Glycine max
  Clone ID: PAT_MRT3847_20942C.1.pep
MMMIIIMACTEGGFKRNYQRSPFRFTRLISLSRYNK

SEQ ID NO: 198138 - protein, 62 aa, Glycine max
  Clone ID: PAT_MRT3847_20943C.1.pep
FNLANMLSVISGLSNLVGRTFGLRESSFMSGLDDQIPTAFDPFADAMLMTRVLGQGVVHIRV

SEQ ID NO: 198139 - protein, 98 aa, Glycine max
  unsure (1)..(98): unsure at all Xaa locations
  Clone ID: PAT_MRT3847_20944C.1.pep
DEAARRGKVYXKYMCSFLFNLNNDFVVDATRKGNKICFANHSVNPNCYAKVMMVNGDPRIGIFAKRAIQTGEELFFDYRYSQADALKYVGIEREMEIP

SEQ ID NO: 198140 - protein, 30 aa, Glycine max
  Clone ID: PAT_MRT3847_20945C.1.pep
TSYKVYSLKIQEVKSKTFSKKVDKPQIENE

SEQ ID NO: 198141 - protein, 108 aa, Glycine max
  unsure (1)..(108): unsure at all Xaa locations
  Clone ID: PAT_MRT3847_20946C.1.pep
LNCRFFKSKTTNTQQXLKRQHFLIYYGEGVGTGQNLPRPNVGTGWFDSGXRRPTGFXFPGWDSSSFFXXPSSLQTXSSQTSVQXQGELXAKXKATXRLTWXRPIGLIX

SEQ ID NO: 198142 - protein, 116 aa, Glycine max
  Clone ID: PAT_MRT3847_20947C.1.pep
RASYLIIQVLIIIGILHGKQSTSTIHDHCLSRRALESVVINNPNYELGMRLRPKPGLLTDTPRPHKQIRRFLLTALCQKCPFCKFPNTLPAELDDNGPWFKLMIQAIPTLHPNDLL

SEQ ID NO: 198143 - protein, 55 aa, Glycine max
  Clone ID: PAT_MRT3847_20948C.1.pep
VNLSNSFLKDRLHGHTARISVRVTCTPATPSQVKALGWALIAPLFKLNAHTTAPS

SEQ ID NO: 198144 - protein, 69 aa, Glycine max
  Clone ID: PAT_MRT3847_20949C.1.pep
FHSQPLKQAGSNMPSFNQKRTSSMSSTHHFAEFMSCTMRDHSMYPLHIGKYTFPTRKFILNNLRGGGDS

SEQ ID NO: 198145 - protein, 50 aa, Glycine max
  Clone ID: PAT_MRT3847_2094C.1.pep
THIIMSNYPSLTGLSNWNLIRVRHHFMFVSELPFCFPLFPQQLKRVVNCN

SEQ ID NO: 198146 - protein, 72 aa, Glycine max
  unsure (1)..(72): unsure at all Xaa locations
  Clone ID: PAT_MRT3847_20950C.1.pep
HDHQCPAFRFLQVLITNYLQNIFRNSMTANTSIWFIFSIXGQPMYVLLYYHDLINRIGNLDSSYGHYLLLVH

SEQ ID NO: 198147 - protein, 110 aa, Glycine max
  Clone ID: PAT_MRT3847_20951C.1.pep
RYLQWTREDAGSGSRRRYSGTFGEECGGGRGGEDGEALMTHVIRKRVSGDAAVVNEKRNSIGNLEVGLICISFVSNGVDYLIVRKERNKENYDVIKGLDEIVMRERERER

SEQ ID NO: 198148 - protein, 129 aa, Glycine max
  Clone ID: PAT_MRT3847_20952C.1.pep
MAATAIQRFPQHKYVDAVRWLPLQSAFDRFAVLALFDFDSDASSIEIHSLNPNPLSLEPHSSWSSPSRVSSLKASHFLQKPLIVASTSSGSLHFLFSDSSVATLESEVSIPEGALHSVPASCVDLLDGG

SEQ ID NO: 198149 - protein, 44 aa, Glycine max
  Clone ID: PAT_MRT3847_20953C.1.pep
IRMRYTVSGLSLTSSPAGSLLAAGLIFSFCHASLNETFILFSSQ

SEQ ID NO: 198150 - protein, 83 aa, Glycine max
  Clone ID: PAT_MRT3847_20954C.1.pep
GGGFIIQIIPTLYRSDQLPTIKKKNRGCPWGLNTPFTCPTLWLLVKGETSPLYFGGACLTQNTRVAEPHHSLIACVFRHTLRV

SEQ ID NO: 198151 - protein, 88 aa, Glycine max
  Clone ID: PAT_MRT3847_20955C.1.pep
MPEVQRKHCCAIREGVQIATRPTWAFQEVPQKAPPSGGSNLARLGELGGKLLPHFPINRGGGKNKNVQPSCDFAKVFRRSSSFFGLQP

SEQ ID NO: 198152 - protein, 39 aa, Glycine max
  Clone ID: PAT_MRT3847_20956C.1.pep
LDEIVLRADFDGAHTNTVTRYWPLEVLTARYRQYSMTGK

SEQ ID NO: 198153 - protein, 213 aa, Glycine max
  unsure (1)..(213): unsure at all Xaa locations
  Clone ID: PAT_MRT3847_20957C.1.pep
GSHLSNTAVLRVINVVNREYKELDFWTPKFKFAGSLEILKDRETRGDYATNNLAGPVVWPGGLISADPIGWKMPTDTERLKVAIPTNPAFVNFLKEDSQKQYSGFCIDLFHEARKILSDKYSGMPYEFHPFNESYDKLLQNVINKSHDVIVGDVTILAERSKDVWFTQPYTESGLSLILPIETEGSAWXFMKPXSSGMWIATIGILIYTMFIG

SEQ ID NO: 198154 - protein, 94 aa, Glycine max
  unsure (1)..(94): unsure at all Xaa locations
  Clone ID: PAT_MRT3847_20958C.1.pep
XXVFXPHMVXHAELXAAXXXXEVXAXASVLHGPXQXPAYGXXXSCXXGQXSRWRXWGDDVAXIGNXGWVWXEGXAVTVPXXNXXVDASATAASX

SEQ ID NO: 198155 - protein, 241 aa, Glycine max
  unsure (1)..(241): unsure at all Xaa locations
  Clone ID: PAT_MRT3847_20959C.1.pep
DFGFNMGAHSLTDTVTESTLKEKYGEYFFXDFVALIVVLEAKVYNKSVDIAGNRQFLCVSNTHLLDLTRFQLFQTVHTRLKGWEKIAASANIPMLVCGDFNSIPGSAPHALLAMGKVDPSHPDLAVDPLNILRPHSKLVHQLPLVSAYSSFARTVGLGFEQHKGRLDNATNEPLFTNVTRDFIGSLDYIFYTADSLVVESLLELLDEESLRKDTALPSPEWSSDHIAMLAEFRCCKNRSRR

SEQ ID NO: 198156 - protein, 58 aa, Glycine max
  Clone ID: PAT_MRT3847_2095C.1.pep
IFISLWIEPTSFHRMDKEICASISFVTYRLRYGLDTYLKSTHKYPIVFHKKNKIGTYP

SEQ ID NO: 198157 - protein, 151 aa, Glycine max
  Clone ID: PAT_MRT3847_20960C.1.pep
DGLSHLKIVTMILYEVLRLYPPGIGLTRSVHRDMKLGNLTLPAGVQVSLPIIMVHHDRELWGDDAKEFNPERFSEGVSKATNGRVSFFPFGWGPRICIGQNFSLLEAKMALSMILQHFSFELSPAYTHAPFTVITLQPQYGAHVILRKVEM

SEQ ID NO: 198158 - protein, 314 aa, Glycine max
  Clone ID: PAT_MRT3847_20961C.1.pep
LAFNNVMTLFMKLGEPQKVPQLVELMKKRTIPMSPFTYHIWMNSCASSNDLGGAERVYEEMKTENEGQIGWHTYSNLASIYVKFKDFEKAEMMLKMLEKQVKPKQRDAYHCLLGLYAGTGNLGEVHRVWNSLKSVSPVTNFSYLVMLSTLRRLNDIEGLTKCFKEWEASCVSYDVRLVSVCVSAHLNQNMLEEAELVFEEASRRSKGPFFRVREEFMKFFLKKHELDAAVRHLEAALSEVKGDKWRPSPQVVGAFLKYYEEETDVDGVDELSKILKANNFDDSWIKSCITASKSSPEIDPGMKEDSQVYHAQEN

SEQ ID NO: 198159 - protein, 60 aa, Glycine max
  Clone ID: PAT_MRT3847_20962C.1.pep
TKILNFTSIHIHNIRYKLPLILLYTSMLPNHFFTNHISTPPMHILPSKIANPSSYKASLL

SEQ ID NO: 198160 - protein, 35 aa, Glycine max
  Clone ID: PAT_MRT3847_20963C.1.pep
AFILNWRASYELCKCSSCTHLGDHKIRFLHFMIRQ

SEQ ID NO: 198161 - protein, 234 aa, Glycine max
  unsure (1)..(234): unsure at all Xaa locations
  Clone ID: PAT_MRT3847_20964C.1.pep
SLLGCFHLTNCITIFSRTGGFSETTRCHIFARVFKSHHPEACHSGRLYIEIPYLISFLPYWGPAMQCARNWFDDSDVNHLASMGKYVSEILPVGEXVTYRRRAFHLWFAIVLITSVVATVYQLYWDFVKDWGFFNPKSKNPLLRDDLILKNKSIYYMSMALNVVLRVAWVETIVHLKVGPVQTRLLDFLLASLEVIRRGHWNFYRLENEHLNNVGRYRAVKAVPLPFRDIDSDS

SEQ ID NO: 198162 - protein, 132 aa, Glycine max
  Clone ID: PAT_MRT3847_20965C.1.pep
MEPQSLPPPPTMDDAQDPSSIWDFSYLLDFNLDDQDGIFTNSNSLPLPLNDDDDAAAPEISKNDRVRKRDPRMTCSNFLAGRVPCACPELDAKLEDEGLPVKKRARTARASASARCQVPGCEADISELKEYH

SEQ ID NO: 198163 - protein, 230 aa, Glycine max
  Clone ID: PAT_MRT3847_20966C.1.pep
STSACSITTGGNLWRRKHSTNNIYYASSCASKASKYKKKTQIECNILRSQQSSLNHHYKRIEGGATYQDCDKKYVVKAIPEPTFDSEPCASNPENVVDSAKKILDVFYHFCYPYSMIAIILCAISSSLLAVEKPSDISSSFLIGVLQALVPHLFVAVFANVVNQVFDYDIDKIHRPYLPLASGQLSFTAAVFIAASLLIMSFWLSLVIGSWPLIWNVVLTSSVWNVYSIN

SEQ ID NO: 198164 - protein, 253 aa, Glycine max
  Clone ID: PAT_MRT3847_20967C.1.pep
MGRKFFVGGNWKCNGTTEEVKKIVTTLNEAKVPGEDVVEVVVSPPFVFLPVVKSLLRPDFHVSAQNCWVRKGGAYTGEVSAEMLVNLGIPWVIIGHSERRQLLNESNEFVGDKVAYALQQGLKVIACIGETLEQREAGTTTAVVAEQTKAIAAKISNWDNVVLAYEPVWAIGTGKVATPAQAQEVHADLRKWVHDNVSAEVAASVRIIYGGSVNGGNCKELAAQPDVDGFLVGGASLKAEFVDIINAATVKKN

SEQ ID NO: 198165 - protein, 26 aa, Glycine max
  Clone ID: PAT_MRT3847_20968C.1.pep
EQDHYCKLKLGFITHEFFVAMRLVLS

SEQ ID NO: 198166 - protein, 92 aa, Glycine max
  Clone ID: PAT_MRT3847_20969C.1.pep
ICFYPLNLHSKSTFKRLNEIEQSQKHSRRRQFKIVAQQQIRPKSRSATKYRSHERVYWNETSTNGNSVNVANEEIASKHSCQNTVSGQSAFA

SEQ ID NO: 198167 - protein, 60 aa, Glycine max
  Clone ID: PAT_MRT3847_2096C.1.pep
GFPSAALVRRRPVHCSLVPLLRPPCLRLLAYVSLVLFVRPPFFLFSFFFFFFFSFFFFFF

SEQ ID NO: 198168 - protein, 246 aa, Glycine max
  unsure (1)..(246): unsure at all Xaa locations
  Clone ID: PAT_MRT3847_20970C.1.pep
MCASVRRQEGGGPGFFLSFSPAGALVGRVRMFYWYTDSKGGPXLFSQESVGFIFSISSVGALLGAILYQYALKDYAFRNLLFWTQLIYGLSGMLDLILVSRLNLKFGIPDYFFVVIVESIAKMTNRLKWMPMLVLSSKLCPSGIEGTFFALLMSIDNVGLLSASWGGGFVLHMLRITRTKFDNIWLAILIRNILRIAPLWLLFLVPRADRSSSILPCKSMNSEVAIDPSDTKNVELVSLVHSVDGK

SEQ ID NO: 198169 - protein, 146 aa, Glycine max
  unsure (1)..(146): unsure at all Xaa locations
  Clone ID: PAT_MRT3847_20971C.1.pep
GGREVHDNDISISRVDNTGLSNVRDYEKHGYGVEEYNEALYEEWVNKGVPPALPETVIYYNKLLYIGYKKGCLGXRFIDIMAVTEAILKNAGFHTWHQIILKDSHLITANGLXYRLPARENLMREGYCSVGIMGDQWSYLLEHHRG

SEQ ID NO: 198170 - protein, 94 aa, Glycine max
  Clone ID: PAT_MRT3847_20972C.1.pep
KAGATSSDYYERVMIHVPDTLSGIHRRTPNILHPTPPYTYTIMNTNTPSNQTLTSHSQIWTHYYDRFSQKSKATAPSDQTSHYHPPCPSSSSFQ

SEQ ID NO: 198171 - protein, 166 aa, Glycine max
  Clone ID: PAT_MRT3847_20973C.1.pep
MARRPARCYRYCKNKPYPKSRFNRGVPDPKIRIFDLGRKRANVDDFPLCIHLVSNEYEQLSSEALEAARICANKYLVKNTGKEGFHLRVRAHPFHVVRINKMLSCAGADRLQTGMRGAWGKPNGTVARVNIGQILMSVRTRDANRAIALEALRRSQYKFPGRHKII

SEQ ID NO: 198172 - protein, 215 aa, Glycine max
  unsure (1)..(215): unsure at all Xaa locations
  Clone ID: PAT_MRT3847_20974C.1.pep
MFGPTQTASQPPKSTLKFLCSYGGKILLRYPDGKLRYLGGHTCVLAVDRSIPFSELLLKLEELCGASVRHLRCQLPSEDLDALVSITSDEDLXNLIEEYDRVSSLKIRAFLSPPTPPRSPSLKVSTPPSKSASISSSSASSSSSSSSYCSPTGASDSGRRYRAPAPVSDRCVHQMSPSPAAYPVGVEKSKSSGRNIPLPRYGGHVYMIHNGNHWQ

SEQ ID NO: 198173 - protein, 116 aa, Glycine max
  unsure (1)..(116): unsure at all Xaa locations
  Clone ID: PAT_MRT3847_20975C.1.pep
DYTTGNTRTAAQTIATANSPGNNRSTETTSNKGRETDTPAAEXTKAKQPRQKPPHDXRGQPKTEPTHIRPAQRTAEEKNKRKQSNGQXHGRRNDGRHKHGTKHAKNHAXTEEEKKE

SEQ ID NO: 198174 - protein, 169 aa, Glycine max
  Clone ID: PAT_MRT3847_20976C.1.pep
MEPPPSYSYSPFPFSLERHPQIQMHDPILFFLFFASLSSLLFLSFSLFKRFSTKREHKNHTQKVPSLLEEEHRPKKKRKKPKKKRTQADDAANSGSGLRLESTCQYPFTSSSSVMQRKIKQQYDDLVKCNHLKKLTLPQVFLKSYLNSLFASCLIYVFVFFTNLLPFSF

SEQ ID NO: 198175 - protein, 46 aa, Glycine max
  Clone ID: PAT_MRT3847_20977C.1.pep
ASSVFIVCKICFFFFFFECFWLDLTEMALEKPPSAQLHLHSSLDID

SEQ ID NO: 198176 - protein, 84 aa, Glycine max
  Clone ID: PAT_MRT3847_20978C.1.pep
FRFIHMMRESENQTMFDNSISFTLAHSLCFLSFLRLSGNLAYLTTRNYMKRPDNLLLPGMKQSTAQFHLFNETYTLSLTIHFVE

SEQ ID NO: 198177 - protein, 183 aa, Glycine max
  unsure (1)..(183): unsure at all Xaa locations
  Clone ID: PAT_MRT3847_20979C.1.pep
PLVAVLVWDAVALGLAAEAEQVVDPVSXLYRLRWNGVSIMVAAFSLLAVGTSLIGTLLAFSEFFKEQLKNGTWHSLPTKKENWWGRNKINVIAATMVVAPSLFVSTTFPDAFSAATDIAGGYCMTVLYGVLPPAMAWAMHKREPELYGRKELLNANVALVVAELFACGIVVEQILQDIPALHS

SEQ ID NO: 198178 - protein, 245 aa, Glycine max
  Clone ID: PAT_MRT3847_2097C.1.pep
TDGLASTRTLDLASTLETGSGNACSAGESDSNNYNLRSVLTIAFQFTFENHLRDNVAVMARQYVRNVVRSVQRVAMAIAPSRLSTQLGPKSFPGPPEALTLARWICKSYRLHTCTELFSVESTSGDAILKQLWHHPDAILCCSVKTNASPVFTFANQAGLDMLETTLVALQDIMLDKVLDEAGRKFLCIEFSKIMQQGFAYLPAGICVSSMNRPVSYEQAIAWKVLDDDDSNHCLAFVFMNWSFV

SEQ ID NO: 198179 - protein, 143 aa, Glycine max
  Clone ID: PAT_MRT3847_20980C.1.pep
RSRACDEKIIREDLGTLERTFFPVGTQNITNSLSVMDSMSTKGVGEYDEGFQDGIPNLELALGGKTKPPPAAPKGMLPFLVGAVDRQNNHPDNLGDRQEDEGVAASLSLSLSFPSPNKEHTNAAELLPDGQRVNNPFFLFGRK

SEQ ID NO: 198180 - protein, 58 aa, Glycine max
  Clone ID: PAT_MRT3847_20981C.1.pep
ATALFHEDLDLPGSPYTEIETRPCRVLTSRNSRVVDFTSRSTDTVTAIRHSRAGGTQH

SEQ ID NO: 198181 - protein, 182 aa, Glycine max
  Clone ID: PAT_MRT3847_20982C.1.pep
MGTTILRSHDCLQGRFLHNEAFAIAASRVASRRNSNPNNNSFASSAKPNRCRKRSPVTNRDRRRSPAKATLPANLVMGHVKILKRGEKLSLQNNTNQRLAENVSMKNDMGLDLLLGSTDRLGPDPLTMQKHIRVSDANNNGVYAGSAFVSSPHPSSVPVPGFLGRNGAATSDLRRLLRLDLE

SEQ ID NO: 198182 - protein, 129 aa, Glycine max
  Clone ID: PAT_MRT3847_20983C.1.pep
ISLLTGRRSSFFFFFYILFKDHSSYHIFNRTLDDQCLIESPDVITNKLHNYKRNHTRVNHDNCLYRSQSLLDISLQILQSFNCGAASNHCCDKFCTGPFLTADDPLTTTCLGDPQCSNRHPTRPSFIGF

SEQ ID NO: 198183 - protein, 309 aa, Glycine max
  unsure (1)..(309): unsure at all Xaa locations
  Clone ID: PAT_MRT3847_20984C.1.pep
MNYSVRRVLPMSRVVLRSYATVTAKPNDIPFQPKLANSVNLIGHVQSPIQFHVSPNDGYVWASTVITRQDSSDLSFSIPVIFEGDLAHTAKFHLNLNDCIHIAGKLTTDSPQLEHLHPQSNIQVMVQTLNFVQRYPQPNTTTSIDLKPQPQPQPEHSIPSAKKNPDSSSPSPWRDLLDNPMQWRDFRESKXNGLVKPKHPDFKRKDRNSLWLGKXKSGVLPKLEGLQFDVPTAISKKGDGGEPCNDLVQNYANWWDNRLNKRNAKAPDFKHKETGKGLWLDSSSEWVLEKLPPPLKPKQSVDTERTLVS

SEQ ID NO: 198184 - protein, 130 aa, Glycine max
  Clone ID: PAT_MRT3847_20985C.1.pep
SGMESKNRDGRHTKQGKAHGSWRQRNITESTNVHDVLDHDSNSEPNVQRQTEHHHDQKSEVSFVKGQTKHFNDSGDIDGSNNSNRNDTAALASVPVIKDHSATSRGRRAPFRGHRGAGGNRDVDDKKNSG

SEQ ID NO: 198185 - protein, 96 aa, Glycine max
  Clone ID: PAT_MRT3847_20987C.1.pep
HASGGYMAGILCATVSHPADNLVSFLNNSKGATVGDAVKKLGLWGLFTRGLPLRILMVGTLTGAQWGIYDSFKVFVGLPTTGGVAPAAVLAPASAA

SEQ ID NO: 198186 - protein, 71 aa, Glycine max
  Clone ID: PAT_MRT3847_20988C.1.pep
EDDRRGSLYSITIVPYGFVTTTSISPPVSLLSRVPIILHSFRLTVDTGSNNERHFAENGGIHYTPLDTIVP

SEQ ID NO: 198187 - protein, 48 aa, Glycine max
  Clone ID: PAT_MRT3847_20989C.1.pep
EYIYRVHYCIIGLSLGFILTYSRLLLSNFSIVYTYIYFIDFHITSFIL

SEQ ID NO: 198188 - protein, 81 aa, Glycine max
  Clone ID: PAT_MRT3847_2098C.1.pep
SFKGSCHCVWGTQARPRAVGFSLPPVKDVFFPPPEKKILSVSVVLLASEGLWIFYHFPCWLTLGRFLRWERWLQTVHALGF

SEQ ID NO: 198189 - protein, 251 aa, Glycine max
  Clone ID: PAT_MRT3847_20990C.1.pep
MATSQITASLRNLPAFERFQPSALRFSSAGHVRIGTLTQPSFPSFVVKAATVVAPKHTTVKPLGDRVLVKIKDAEEKTAGGILLPANAQGKPQGGEVVAVGEGKSVGKCKVDVSVKTGAQVVHSKYAGTEVEFNGSKHLILKDDDIVGILETDEVKDLKPLNDRVLIKVAEAEEKTAGGLLLTEATKEKPSIGTVIAVGPGPLDEEGNRKPLSVMPGNTVLYSRYAGNDFKGKDGSDYIALRASDVMAILS

SEQ ID NO: 198190 - protein, 251 aa, Glycine max
  Clone ID: PAT_MRT3847_20991C.1.pep
MATSQITSSLRNLPAFERFQPSTLRFPSAGHVRIGTLTQTSFPSFVVKAATVVAPKHTTVKPLGDRVLVKIKDAEEKTAGGILLPATAQGKPQGGEVVAVGDGKSVGKSKVDVSVKTGLQVVYSKYAGTEVEFNGSKHLILKDDDIVGILETDEVKDLKPLNDRVLIKVAEADEKTAGGLLLTEATKEKPSIGTVIAVGPGPLDEEGNRKPLSVVPGNTVLYSKYAGNDFKGKDGSDYIALRASDVMAILS

SEQ ID NO: 198191 - protein, 63 aa, Glycine max
  Clone ID: PAT_MRT3847_20992C.1.pep
HISCGGEGSSSPPDLNKPFGSSDNLLRHLKPGSSPKQHPRGPVTMIWLRVWERYQPKREQRPG

SEQ ID NO: 198192 - protein, 48 aa, Glycine max
  Clone ID: PAT_MRT3847_20993C.1.pep
NFFYKYKNFIYFYLHILETNILFFFSFFLSLFNFQSLKTLALLDDSNV

SEQ ID NO: 198193 - protein, 246 aa, Glycine max
  Clone ID: PAT_MRT3847_20994C.1.pep
HQLHWSHCKKDVDFESPEAKKQVRGSTSTKRSRAAEVHNLSERRRRDRINEKMKALQELIPRCNKSDKASMLDEAIEYLKSLQLQVQMMSMGYGMVPMMFPGIQQYMPPMGMGIGMGMGMEMGMGMNRPVMPFPNMLASSTLPAATAAVHLGPRFPMPPFHMPHVATPDSSRMQGANHPDNNMLNSLGTLDPDQSCIPNFTDPYQEAHSHEEAQQQWKQTMNQPNVSKPSTSRGQENPEKHQSGKA

SEQ ID NO: 198194 - protein, 152 aa, Glycine max
  Clone ID: PAT_MRT3847_20995C.1.pep
TSTPANSNSKFVTATGETIYVTAEAEHRNSGTSSSKSSKRVMHHQPSFVEAPREIPYKEIVSATGNFSESQRVAELDFGTAYHGILDGHYHVMVKRLGLKTCPALRQRFSNELKNLAKLRHRNLVQLKRWCTEQGEMLVVYDYSASKFLSHQ

SEQ ID NO: 198195 - protein, 124 aa, Glycine max
  Clone ID: PAT_MRT3847_20996C.1.pep
GGAKQVSAGATLSHTPSRNGSNNPSPCITEPSIKPVQDKQEYKHLEAPSPSNNNSSLDTNEIEQSHKNNNVPAGDAKSETRFQSSDVLEKARAAIASADRASAAARAAAALVQSNFGSLKLEGK

SEQ ID NO: 198196 - protein, 131 aa, Glycine max
  unsure (1)..(131): unsure at all Xaa locations
  Clone ID: PAT_MRT3847_20997C.1.pep
WRNTSERGSLAYSSTIFGVSGVDMHDMLSSIXTFPPTYLPIFPPILILMLNNTSAIIGNYHITSLNSVLFNSAHLSIEVIYELCSNYPNRTILKGYTLTESTNVCDYTDSLYEITRYRTDGLLSPDTQAMI

SEQ ID NO: 198197 - protein, 315 aa, Glycine max
  Clone ID: PAT_MRT3847_20998C.1.pep
METENSHVGLKEFLNPPPVVHDMDDEEMLWRASMTAKIPDYPFDRVPKVAFMFLTRGPVFLAPLWEQFFKGHEGFYSIYVHSNPSYNGSRPESPVFKGRRIPSKEVEWGNVNMIEAERRLLANALVDISNQRFVLLSESCIPLFNFSTIYTYLMNSTQNYVMAVDDPSSVGRGRYSIQMLPEISLNQWRKGSQWFQRVVHTQLSQAPIRIPFPVFQDYCKGSCYADEHYLPTYVSIKFWEGNSNRSLTWVDWSKGGPHPTKFLRSEITVKFLESLRDQKCEYNGDSINVCFLFARKFAPGSVSKLTKIAPMVMHF

SEQ ID NO: 198198 - protein, 184 aa, Glycine max
  Clone ID: PAT_MRT3847_20999C.1.pep
FKPMVVPFPRWAQKLFFFFCSKGPPGVWGPLFHPVGMFSFPGLNGDQFFFFFKGFPITLPFYGGITLVGFGFKTVPLLGGAKQPPLTPVFLNIFPPVFNMPPGPHRGTPLFFFLKLAPPPMNPFFFCGVFKGNFFAPRGPPQKKKKKKKKKKKKKKKKKKKKKKKKKKKKKKKKKKKKKKKGVP

SEQ ID NO: 198199 - protein, 526 aa, Glycine max
  unsure (1)..(526): unsure at all Xaa locations
  Clone ID: PAT_MRT3847_2099C.1.pep
MGRAFVYVILGGGVAAGYPALEFVKKGVSHGCFVVLRCVALCGCEAGKMGRAFVYVILGGGVAAGYAALEFVKKGVSHGELCIISDEPVAPYERPALSKGFLLPEAAARLPSFHTCVGANEERLTSNWXNLGWIELVLGTGVKSVDVKRKTLLTTTGETISYKILIVATGARALKLEEFGVTGSDAENVCYLRDIADANRLVDVMQSCPGGNAVVIGGGYIGMECAASLVINKINVTMVFPEEHCMGRLFTSKIANYYEEYYKSRGVNFIKGTVLSSFEFDSNGKVTAVNLRDGTTLSVDMVVVGIGIRPNTGLFEGQLTLEKGGIKVNGMLQSSNSSVYAIGDVAAFPVKAVGETRRLEHVDSARKSARHVVSAIMEPNKTREFDYLPFFYSRIFTLSWQFYGDNVGEVVYYGDMSGSTFGAYWVSKDHLVGAFLEGGTKEEYEAIAKATRLRPVIEDLTELERQGLRFAVTVSEKPMASPPIEVRASDLLLEKPLYAWHATAGVIIAASIAGFAYFYGKKRHRW

SEQ ID NO: 198200 - protein, 94 aa, Glycine max
  Clone ID: PAT_MRT3847_209C.1.pep
GGIIFFFFFEERIFHSLDYQGLQIGETLSPLIGMNGSKYLKHKFRILHKIKNEERKKEHWWRLWEKLWGREGASGFEICLWEKGERRNLSCLMA

SEQ ID NO: 198201 - protein, 255 aa, Glycine max
  Clone ID: PAT_MRT3847_20C.1.pep
MASRSFLKNWKILDFASLLLGEFTRSIKPIKDVSSTSLTFVEFNSFKTALCFRQYHDGRPRGPLWKGKKLIGKEALFVISGFKRFNDDEDKLHKFIKTHVLRLLKMDMIAVLTELERQEQVSLALMMFKVMQKQDWYKPDAYLYKDLIIALARAKKMDEVLQLWESMRKENLFPDSQTYTEVIRGFLNYGSPADAMNIYEDMKNSPDPPEELPFRILLKGLLPHPLLRNKVKQDFEEIFPDSSIYDPPQEIFGAR

SEQ ID NO: 198202 - protein, 85 aa, Glycine max
  unsure (1)..(85): unsure at all Xaa locations
  Clone ID: PAT_MRT3847_21000C.1.pep
SPFFGTALLIHPPSIPXXRYHTFEFEYPQAGLGPTFPFTSLSRACALLVRGLLSSFWSRGLCSLFLQRXGFXPXCFFLKTCCPPN

SEQ ID NO: 198203 - protein, 119 aa, Glycine max
  Clone ID: PAT_MRT3847_21001C.1.pep
QQSNFQTQLQFNNQTSPWFPIQKEVALPSQTAHNSTGGRAPGTQLETKAAHMSARDTGGVKKPQRFRPETVALRDIRLYQKSTDLLMRKLPFQRLVRKIAQDFKTYLRFQSSAVSALQE

SEQ ID NO: 198204 - protein, 46 aa, Glycine max
  unsure (1)..(46): unsure at all Xaa locations
  Clone ID: PAT_MRT3847_21002C.1.pep
DHHYPTYLLPGISSRSQRLGSFLXMRTLSIQGNKSDXXGSDTGNSX

SEQ ID NO: 198205 - protein, 48 aa, Glycine max
  Clone ID: PAT_MRT3847_21003C.1.pep
LTVLYYKTKIPFMMPNNMIKQQLIFHTYTSSLSSSPISSYLSLKNINL

SEQ ID NO: 198206 - protein, 188 aa, Glycine max
  Clone ID: PAT_MRT3847_21004C.1.pep
LEYIWRQSWDAEETTDIFVHMMPFYSYDIPHTCGPEPAICCQFDFARMSGFAYEQCPWGQYPVETTQENVQERALKLLDQYKKKSTLYRTNTLLVPLGDDFRYINVEEAEAQFRNYQMLFDYINSNPSLNAEAKFGTLEDYFVTLREEAERINYSSPGEIGSGLVEGFPSLSGDFFTYADRQQDYWSG

SEQ ID NO: 198207 - protein, 71 aa, Glycine max
  Clone ID: PAT_MRT3847_21005C.1.pep
PFCCFLSVYLPLHFCSSTFHYSISILTCAVSESRVRQCKAPGLFFLRAWLCISILSPLIFLIQGRGKKWPC

SEQ ID NO: 198208 - protein, 191 aa, Glycine max
  Clone ID: PAT_MRT3847_21006C.1.pep
SSTASVISQSAYDRAALAREELMHKCLFDEVEVAFDARCEDMREELRGHLQVSPRIDVVFSPSGTDSQLHALFLARAVLGASPVTIVVGTDQTGSGTPHTARGHHFSTMTASGFSVRKDGAVAGLAGDSVAVPLLDTAPGIAMRPDTDEAVLRAVETSLAQGRRVLLQIMDSSKLGWRAPSVACLNEIARR

SEQ ID NO: 198209 - protein, 136 aa, Glycine max
  unsure (1)..(136): unsure at all Xaa locations
  Clone ID: PAT_MRT3847_21007C.1.pep
FTAFPMQDVQVTIDWLIASQECVPRTYGVLYPQNPFGXNRWMEKRTIPHGSFRRVKRMPVCIRGGAWAKNALLMNMPHAALSRWRYVVGDLFYEVFXMSSTYLKGTDFFFMGXEYLADDTINWEVYSRMWVHLAEI

SEQ ID NO: 198210 - protein, 93 aa, Glycine max
  unsure (1)..(93): unsure at all Xaa locations
  Clone ID: PAT_MRT3847_21008C.1.pep
XSXXXSXXGXAXMCXSNCSLNNXFPSXSHXXSILNFLCXGEXSXEAHHLXGGPXKPTWFTEFXXEXXTXXDXXXGEXGXXXXSSRIPSLRTRX

SEQ ID NO: 198211 - protein, 72 aa, Glycine max
  unsure (1)..(72): unsure at all Xaa locations
  Clone ID: PAT_MRT3847_21009C.1.pep
PNNTYILFITPHATKYSEYHLQDTPTLTLYSTRPTPSTYTPXXMLKIPSITTQTHTYHNPFSPSSPPQHTKQ

SEQ ID NO: 198212 - protein, 141 aa, Glycine max
  unsure (1)..(141): unsure at all Xaa locations
  Clone ID: PAT_MRT3847_2100C.1.pep
MGRAFVYVILGGGVAAGYAALEFVKKGVSHGELCIISDEPVAPYERPALSKGFLLPEAAARLPSFHTCVGANEERLTPKWYKEHGIELVLGTGVKSTDVKRKTLLTTTGETISYKILIVATGARALKLEEFGVSXSDAENV

SEQ ID NO: 198213 - protein, 47 aa, Glycine max
  Clone ID: PAT_MRT3847_21010C.1.pep
MNPFFSPARLRDMIRAIRACKTASEERAAVRNYCAVIRAAIDELDAR

SEQ ID NO: 198214 - protein, 69 aa, Glycine max
  unsure (1)..(69): unsure at all Xaa locations
  Clone ID: PAT_MRT3847_21011C.1.pep
QRTATHGDDRENEAAKRTAXAKQKRGGDKDTHPDEPRAPDPKAETEKTKADPSEEGDTDGEATGHRSAK

SEQ ID NO: 198215 - protein, 74 aa, Glycine max
  unsure (1)..(74): unsure at all Xaa locations
  Clone ID: PAT_MRT3847_21012C.1.pep
FXPLSLETRGSXLXXXRASSGXXDRKPSHXQLLXLVCVMGXLGSNLPYSKRCYRSXSXDXHRXXETLCSLXXVX

SEQ ID NO: 198216 - protein, 447 aa, Glycine max
  unsure (1)..(447): unsure at all Xaa locations
  Clone ID: PAT_MRT3847_21013C.1.pep
MGQGLSCRGSHEHGLFRAVQHGDLDTVAALLQTHPSLMNHTTVYDHHSPLHIAAANGQIQVLSWLLDGSVNPDVLNRQKQTPLMLAAMHGKIACVEKLLEAGANVLMFDACYGRTCLHYAAYYGHSSCLKAILSAAQSSPVAASWGFARFVNIRDGRGATPLHLAARQRRPECVHILLYSGALVSASTGRYGCPGSTPLHLAAKXGSLDCIRELLAWGADRLQRDASGRIPYVVALKHRHGACAALLNLSSAEPLVWPSSLKIISELNPDAKELLERALMDANREREKNILKGSDYSLPSPSHSDGVDDNISEVSETELCCICFEQVCTIEVQDCGHQMCAQCTLALCCHNKPNPCTSRVIPPVCPFCRSTIARLVVVKKESPDDIDQDGVDITCSKHSKSRKSRNSNEGGSSSIKGLSNVNSFGKMGGRSSGKIAAENEWEDDKQQ

SEQ ID NO: 198217 - protein, 93 aa, Glycine max
  Clone ID: PAT_MRT3847_21014C.1.pep
STLEENKKGNKNSLSPFSSEYHRPLIQIASSFYSLNRKLQPAAAAALGVSLPPLLLHSNLALTRFLKHQPILLSFFFPTFSSFDIRSRRFCFR

SEQ ID NO: 198218 - protein, 45 aa, Glycine max
  Clone ID: PAT_MRT3847_21015C.1.pep
IFDNYLSLNGEEQQFYVVANEELKNTGEYFLAQKNVGGLLALLRA

SEQ ID NO: 198219 - protein, 84 aa, Glycine max
  unsure (1)..(84): unsure at all Xaa locations
  Clone ID: PAT_MRT3847_21016C.1.pep
MERWPATCYRLIKNKPYPKAMYCRAVPHPYSRIYYLGMNSLGVDVYRYSLHLATREKXKVPIDANEAALVVCITYLTKFKGEDC

SEQ ID NO: 198220 - protein, 50 aa, Glycine max
  Clone ID: PAT_MRT3847_21017C.1.pep
FLPMFLVFLCLFHKASDHVIYSHHWCLHLAFFAHVQISEDNISMDIKLVY

SEQ ID NO: 198221 - protein, 593 aa, Glycine max
  Clone ID: PAT_MRT3847_21018C.1.pep
MDLHNNVQPELGKLEQIVHQFLLKCLHIILDSRVPLLRPHDRSGGDLSMGPRVKRSDKWFNLALGDRPSALDNLHFWHRNLMDPMIIDIILVHEEAGSSVETVIERWVVQYDCPRVVAPQTSDITSSYKKTYQKSIVLFRALYSQMRLLPAYKIFKQLSTSSHICNFDIIYKVSSFSDPFSRAEGGVIEEYNFTPVEALPGRLCISVNYCTVLSDFNLECSASLPTKIITDYVGSPNTDPLRSFPVLDKGVSATSFPLRGKAPPSSMPLDRPHSWTCGFHKAAPFVQNHPHVGSPPVYRGSPRPYDYPSPPTDSYGVRLHNYRMQNRQISPSYDEYQLSPPFSPSPSPSPPTYFCGGNPMKTRMCSETAPVTIPHSVMGKSSRNLSPNFSDPSRNSLPPLSPRRTDGSSQESPSGIRSFKKLEASRTGQKFVRDSKEDSGRFSGLLSSSDSPRIGFSRTSSRLSFQDELDDGDFSCPFDVDDVDPPDAQSSQNADLKSAAEITSTSLPMGKKSQDAEVGVLVHMLRTAPPLRQDPSCYSSHSPKAELEGGVATASGFFMPRKTADALEELRGYKEMRDLLSKSGTRILNKHKA

SEQ ID NO: 198222 - protein, 67 aa, Glycine max
  Clone ID: PAT_MRT3847_21019C.1.pep
QVAGAVPNPMANNPFFPEKKGKVGRVTDRSLPLKKLHMPLALTDLRLLRATFVHSHPSTSTSRYTLT

SEQ ID NO: 198223 - protein, 50 aa, Glycine max
  Clone ID: PAT_MRT3847_2101C.1.pep
LRGAPRLFNISSCEKGGRLVKDVPTKGVFFFSSGKKKGDLKFSPKYFVFF

SEQ ID NO: 198224 - protein, 237 aa, Glycine max
  unsure (1)..(237): unsure at all Xaa locations
  Clone ID: PAT_MRT3847_21020C.1.pep
SPQAMNIHCYLIRSGFLYRLEVASILVDIYSKCGSLGYAHQXFNIISLKDKDIIIWSAIIAAYGKHGHGKMAVKLFNQMVQSGVKPNHVTFTSVLHACSHAGLVXEGFSLFNFMLKQHQIISHVDHYTCMIDLLGRAGRLNDAYNLIRTMPITPNHAVWGALLGACVIHENVELGEVAARWTFKLEPEXTGNYVLQAKLYAAVGRWGDAERVRDMVNEVGLRKLPAHSLIEVRDXVN

SEQ ID NO: 198225 - protein, 39 aa, Glycine max
  unsure (1)..(39): unsure at all Xaa locations
  Clone ID: PAT_MRT3847_21021C.1.pep
LELHNVSALQCLQQINXTVHPLKISMAFRNIIQLDLAPT

SEQ ID NO: 198226 - protein, 33 aa, Glycine max
  Clone ID: PAT_MRT3847_21022C.1.pep
YSDRLSKLESTENVAKPHRLSFLTIFLQCPCLK

SEQ ID NO: 198227 - protein, 54 aa, Glycine max
  unsure (1)..(54): unsure at all Xaa locations
  Clone ID: PAT_MRT3847_21023C.1.pep
GRPTRXLDYPNTFSYSIHXMLNLGLSGDYDAGETHSYMPPLEDSYANSDGTKME

SEQ ID NO: 198228 - protein, 114 aa, Glycine max
  unsure (1)..(114): unsure at all Xaa locations
  Clone ID: PAT_MRT3847_21024C.1.pep
MFMLVIRREVAHERQTSQKRPVTGQFNNXYHPAIAVEDNPLGCFXTTAGKISWPSQNTAGQNKFGRLRYGCYMQRLCAMIMYHVTARLTCHRVPTWPRDLCRDCENIPVVLCGP

SEQ ID NO: 198229 - protein, 84 aa, Glycine max
  unsure (1)..(84): unsure at all Xaa locations
  Clone ID: PAT_MRT3847_21025C.1.pep
MAAKRAYQVWKRSYXFIFRGRLVFRPPSXILVVNLLLMIAPPIIFYICVPRHPTHELYSYKYGYSIFAGAILCNGALPVVPSFT

SEQ ID NO: 198230 - protein, 109 aa, Glycine max
  Clone ID: PAT_MRT3847_21026C.1.pep
SLPFLPMLTVSPRGGGLTARLLANQHSRQNKHNSRLHTPNLLYTHAHHNLKITLQMDKLAQNSYTNHIILSPHPLKKNTASISSFTRACAQSTSNMCANSSCTSCALTT

SEQ ID NO: 198231 - protein, 110 aa, Glycine max
  Clone ID: PAT_MRT3847_21027C.1.pep
SKPASLELGGKALFFFFDEAKLDKAVELDLIARLYNKGEIWAACSPVFVQEGIYEEIEKKTGENAKAWVGGDPFDTNGQKGPQGDKKQSGKILFFIAHGKRKWATLFTGG

SEQ ID NO: 198232 - protein, 125 aa, Glycine max
  unsure (1)..(125): unsure at all Xaa locations
  Clone ID: PAT_MRT3847_21028C.1.pep
MSPPVLTIGEEEGKSHVTLMVYXLTTIESVCLKSLEFWELNFVRLPDRPLVDQWQPFFCEETKSNLYLTVAELSLGLPRPQSSDRDINLXLLMXTKLDEKTLLPVHTLTDDHHVVDTTDGLVNKR

SEQ ID NO: 198233 - protein, 72 aa, Glycine max
  unsure (1)..(72): unsure at all Xaa locations
  Clone ID: PAT_MRT3847_21029C.1.pep
EEKLGEAGPGTIKGHKQMHLLXRGKREKEYALLIRRIYGTGSLRDGIHEHVEIGIEFHAWTGIDGLDLYDEP

SEQ ID NO: 198234 - protein, 399 aa, Glycine max
  unsure (1)..(399): unsure at all Xaa locations
  Clone ID: PAT_MRT3847_2102C.1.pep
MSLPTKRSGTAGSSPSPPPPMKKAKSLLLHSSSSSDAVLDPSSTPLDDDLPNARAANLARKKATPPQPAKKLLIKLHKAKPTLPTNFEEDTWAKLKSAIRAIFLKQPVSCDLEKLYQAVNDLCLYKMGGNLYQRIEKECEAHISAALQSLVGQSPDLVVFLSLVERCWQDLCDQMLMIRGIALFLDRTYVKQTANVRSLWDMGLQLFRKHLSLSPEVEHKTVTGLLRMIESERKGEAVDRTLLNHLLKMFTALGIYAESFEKPFLECTSEFYAAEGVKYMQQSDVPDYLKHVEIRLQEEHERCLIYLDASTRKPLIATAEKQLLERHIPAILDKGFAMLMDGNRIEDLQRMYLLFXGVNALESLELAISSYIRRTXGQAFVWDEEKIKYGFIPLGLRLL

SEQ ID NO: 198235 - protein, 182 aa, Glycine max
  unsure (1)..(182): unsure at all Xaa locations
  Clone ID: PAT_MRT3847_21030C.1.pep
MEAYGGFMVDEKAVRVENAFLDFLKSFKSSSQRNELYYEAEIELMKSNESNTMFIDFDHVIRFSDLLQQTISDEYLRFEPYLKNACKRFVMDLKPSLVSDDSPDKDINIAFYNMPIVKRLRELGTSEIGRLVSVTGVVTRTSEVRPELLHGTFQCLECGGVIKIVXQQFKYTEPTICTDATL

SEQ ID NO: 198236 - protein, 60 aa, Glycine max
  Clone ID: PAT_MRT3847_21031C.1.pep
DRAGIMMINIRTRMKAIHSVHTEGQSRNMNGVSNFDPTKNIVLDYWPNAEAAKCVSAKFA

SEQ ID NO: 198237 - protein, 105 aa, Glycine max
  Clone ID: PAT_MRT3847_21032C.1.pep
MWVSVFPKQPPPKSVGKFLFCLSPKHAQNDKPPLFFNNPLPPFFFVFKDPIFKNGPCKMFVFLIPPYFLSPGFLFFFHVMPNYGGIFRSGGKKTTNKLTQPNVFF

SEQ ID NO: 198238 - protein, 40 aa, Glycine max
  Clone ID: PAT_MRT3847_21033C.1.pep
NKCLLFQKKKKKKKKKKKKKKKKKKKKKKKKKKKKKRTEL

SEQ ID NO: 198239 - protein, 185 aa, Glycine max
  Clone ID: PAT_MRT3847_21034C.1.pep
VVLFFFFFFFFENFLFYYFWFFFFWTLKIFCLPPQTGEPGDTNGNPTRAHGGNPPCPKGEEFKLGVKRGIRGERGEIFDPHKSTNKTTPGEKEPTRGGKKGGPNRIKLEGPPAHFERGNLGDDDRIRNRHPPAKGGLTVGPPGGLCIKQGNRTTRGGPCPSFPEKDGTAGNVWEAHNGRKQGLSG

SEQ ID NO: 198240 - protein, 41 aa, Glycine max
  Clone ID: PAT_MRT3847_21035C.1.pep
NSKQESLSDSKCGSLLVIVVYTDGILRCQKLHFTKIIYSFI

SEQ ID NO: 198241 - protein, 43 aa, Glycine max
  Clone ID: PAT_MRT3847_21036C.1.pep
LNYINCLKLEYKLYVLCHSNYHVSHTYLYFLAHSQLFHVMGGH

SEQ ID NO: 198242 - protein, 85 aa, Glycine max
  Clone ID: PAT_MRT3847_21037C.1.pep
ASVQSLCSKLFCLQEGDPAFSHTLAPRSPSLVSSSLSKVASVCGNLTIDALRMPQIGESNSSVSRCSPLIIGSAVNTVIRSCMRK

SEQ ID NO: 198243 - protein, 118 aa, Glycine max
  unsure (1)..(118): unsure at all Xaa locations
  Clone ID: PAT_MRT3847_21038C.1.pep
YPFLSHALSRVRSGYSHCLGNISMLRSTCLQCLSAMLSQSLVSPVISTTDVHHXSYESPHPHSASRPICLHLTDPPSHGHCNATTSHHNRPHTPSTLTCRHCRSSSPQHQSLSCSSPS

SEQ ID NO: 198244 - protein, 391 aa, Glycine max
  unsure (1)..(391): unsure at all Xaa locations
  Clone ID: PAT_MRT3847_21039C.1.pep
MESTFKDAVSKFGGRIDWKSRRTQSLVEERNKLAEDFRKEEIAEELENTKKLIEELKNSLEKVEKDELEAKKEVEHVILKIEEMEQDIASEASIEAKAKLEAKKSMLTEALLEFEFVERELDSVRKEYASMASGRDIAINNAEETIATSKQIEKAVEDLTTELIATKEELNSTRTAHLEAEEQRLGVVDQDSHNLKLELEGVEKELQRVNEQVLSARVLKSKLESASSLLHDLKAELATYMESKVNEECYKEQKEKLKELKLNIEKTTSDVNSLRAASVSLKSKLEKEKSILTSLKKNEEKALAVVANLQDELEKSRLATTFIQMKENEARKMMTELPKKVQKAAQEADEAKSLAKAAQEEMIEAQEELEQAKAQSSTLEKXLLAKHKEIE

SEQ ID NO: 198245 - protein, 60 aa, Glycine max
  Clone ID: PAT_MRT3847_2103C.1.pep
TDKKYAHMNTRFKKIPNRQKSGKQPPCWSTLQKYKAAFQKSLGSQKKLGLQPGKEKQSSS

SEQ ID NO: 198246 - protein, 205 aa, Glycine max
  Clone ID: PAT_MRT3847_21040C.1.pep
FPGYEARNSSNHTPIHSLPTESSSQRSRPSFLDSLNVTRPSLGSPFHQSEQDSSMSNHLESSSNGISGSTYFHKPSEETKSALMTSTRENGMEKQHDYYSSSQNEDFSALEQHIEDLTKEKFSLRRALEASRTLAESLATENSTLTDNYNQQRSVVDQLKSDMENLQEDIKARLVEFEAIKSEYTNAQLEMYAADERAKLLASEV

SEQ ID NO: 198247 - protein, 42 aa, Glycine max
  Clone ID: PAT_MRT3847_21041C.1.pep
MNKIKPFCLGINVVDANVLSTICSVHCVGRGDKMITAQSFFL

SEQ ID NO: 198248 - protein, 169 aa, Glycine max
  Clone ID: PAT_MRT3847_21042C.1.pep
IYSSNHTPIHSLPTESSSQRSRPSFLDSLNVTRPSLGSPFHQSEQDSSMSNHLESSSNGISGSTYFHKPSEETKSMPLFSNFTTANVHSSLEQLTTPSVVDNDNQGALMTSTRENGMEKQHDYYSSSQNEDFSALEQHIEDLTQEKFSLRRALEASRTLAESLATENST

SEQ ID NO: 198249 - protein, 89 aa, Glycine max
  Clone ID: PAT_MRT3847_21043C.1.pep
LTQKMATTHGRTLAGQRADRSTWLKHSTHCRAGALRKLHDEHTGERGSLFCSSRHRFHHRLLREHEIQLKEGGNATEAANDHRGKPAGP

SEQ ID NO: 198250 - protein, 178 aa, Glycine max
  Clone ID: PAT_MRT3847_21044C.1.pep
MVTFRFHQYQVVGRALPTETDVHPKIYRMKLWATNEVRAKSKFWYFLRKLKKVKKSNGQMLAINEIFEKNPTKIKNYGIWLRYQSRTGYHNMYKEYRDTTLNGAVEHMYNEMASRHRVRSPCIQIIKTATIPAKLCKRESTKQFHNSKIKFPLVFKKVRPPTRKLKTTYKATKPNLFM

SEQ ID NO: 198251 - protein, 82 aa, Glycine max
  unsure (1)..(82): unsure at all Xaa locations
  Clone ID: PAT_MRT3847_21045C.1.pep
SKCGKVDYAHQAFLAIDKPDTVAWTAIICAHAYHGKASEALRLFKEMQGSGVRPNVVTFIGLLNACXHSGLVKEGEQWLDML

SEQ ID NO: 198252 - protein, 98 aa, Glycine max
  Clone ID: PAT_MRT3847_21046C.1.pep
LDTPENTDLLVAGLNGWELDPCIPTTGDGLVLYPVWNHLWLDPLLPLIEEECYFAANPPSASIPDLELLPTHRHCVHDFLEMINSVYPTCYSCLYYFS

SEQ ID NO: 198253 - protein, 93 aa, Glycine max
  Clone ID: PAT_MRT3847_21047C.1.pep
VCVCDLVFKARGGPGLQLECQKKKLQIKKLEKIVGLKNPKGDLFPFKAIGVKQKGEGFQIFAFPRQDLSREVFFSTFFCPRFNRGGAENRSLF

SEQ ID NO: 198254 - protein, 194 aa, Glycine max
  Clone ID: PAT_MRT3847_21048C.1.pep
QSARRRQRRELDKVTYMNNMFGQYPLFSLASLATFLVLTHAATAPENPPPPLTAAAREFLEAHNQARAEVGVEALSWSEKLGNVSSLMVRYQRNKKGCEFANLTASRYGGNQLWAGVTEVAPRVVVEEWVKEKKFYVRENNTCVGKHECGVYTQVVWRNSTEVGCAQAVCVKEQASLTICFYDPPGNVIGEIPY

SEQ ID NO: 198255 - protein, 273 aa, Glycine max
  Clone ID: PAT_MRT3847_21049C.1.pep
TAARRRQKGRLEDIGHHLKCECIVTDVFGRSGEAVCIETKPVLPGIPRIHKLEIEGRGFHTNLYAVHGIYSGGKEGKSRVQWLRSMVGSPDLISIPGETGRMYEANVDDVGYRLVAIYTPVREDGVEGQSISVSTEPIAVEPDVLKEVKQNLELGSVKFEVLCDKDQTSKKISSVGTYERRILEINRKRVKVVKPATKTSFPATEIRGSYAPPFHVELFRNDQHRLRIVVDSENEADLMVHSRHIRDVIVLVIRGLAQRFNSTSLNSLLKIES

SEQ ID NO: 198256 - protein, 488 aa, Glycine max
  Clone ID: PAT_MRT3847_2104C.1.pep
MDMKKGYSVSLTKQQHKKEPFFAVHHTRKQHQCIQANHDATEETSSQQNQYSLKLALSSTSQNTTLLLPAFVTLLLLVTSIGTAFSHPTIVSNSSSPLPPALSHSNANNQTLRPAAVLQKLRRIRTHLDKINKPAVKTIKSPDGDLIDCVLSHQQPAFDHPQLKGQRPLDPPERPKGHTHTNGETVVESFQLWSDSGEACPEGTVPIRRTTEEDILRASSIQRFGRKPRPVRRDSTGSGHEHAVVFVNGDQYYGAKASINVWAPRVTDEFEFSLSQMWVIAGSFGKDLNTIEAGWQVSPQLYGDNYPRFFTYWTTDAYQTTGCYNLLCSGFIQTNNRIAIGAAISPRSIYNGRQFDIGLMVWKDPKHGHWWLEFGSGLLVGYWPAYLFSHLRNHASMVQFGGEIVNSRSRGYHTGTQMGSGHFAGEGFRKAAYFRNLQVVDWDNNLLPLSNIHQLADHSNCYDIRVGSNNVWGTYFYYGGPGRNVRCP

SEQ ID NO: 198257 - protein, 145 aa, Glycine max
  Clone ID: PAT_MRT3847_21050C.1.pep
RAPIGWGAERFWFHCWAPNDSLWGRAGKIRGWGWHGVIPWGFVSSGREENPSKSLSAFGFPKMGVSPPDCFRIFFFWEVLFGFWVARSFCPRLLYLFFFFLKGGGARPRIIVCSWAQFSLGCFFFGGFDPFGFYFFVWLGFFLWR

SEQ ID NO: 198258 - protein, 97 aa, Glycine max
  Clone ID: PAT_MRT3847_21051C.1.pep
RFLGSPPFRSNPKKLYNAAYESASRADWAPAVATWYGPANGDGSEGGAWGYGNAGGQPPLSSSKPGGSPLIYDAGKGRGSWYEVKCTGNPASSGNPG

SEQ ID NO: 198259 - protein, 59 aa, Glycine max
  Clone ID: PAT_MRT3847_21052C.1.pep
FFFFFENKRQALLFKETNTSEWYCSSRFSFQRRYPNQSKFKFPTNNAIKPLGFQIIWLT

SEQ ID NO: 198260 - protein, 42 aa, Glycine max
  Clone ID: PAT_MRT3847_21053C.1.pep
HQKAGIFHRARVTHQHRTGYSVSVTCGSVLDSDEITGKRDCS

SEQ ID NO: 198261 - protein, 295 aa, Glycine max
  Clone ID: PAT_MRT3847_21054C.1.pep
MGAVKLNLRCSSQRVDGVAAEPEPDWTFDDLVSELNALETKLATNASSSTQRSSPLDKSISKCGKEIQRGRAFVLRADEFDMEDSESDDDDHVDRALVVTDSGKRFTCDELYLSVSDDDSDIASVFEVRPYLMDELGEVEGALLELTHEHQLRVKDEIRNKISALETALVNETQNSTSSFLRVEKYKETRLDLDKKFDTQYQRRIAEALDNHLTAVQRDRELRSQIEERKIRSDAAYEEAKRKVAFEKHQQEKAKAEAEAKLRAEEAKREAESKAAMEAKKQAAIEAEKSAAVEA

SEQ ID NO: 198262 - protein, 88 aa, Glycine max
  Clone ID: PAT_MRT3847_21055C.1.pep
APNDTTDLPAMTFDSALTLLPHSGRGKSDKEAGCEQLQRIMPASTLPHRLACLTIIPAPPEPDVIILRSTLLTGLMILLILERILTAH

SEQ ID NO: 198263 - protein, 92 aa, Glycine max
  Clone ID: PAT_MRT3847_21056C.1.pep
MATPDHLFNLRNNLYLGAYQAAINSGDVTNLSQEDSLERDTLVHRCYIALGQLQFVISEIHDDAPTPLQAVKLLALYFSSPDTKVAPSILSA

SEQ ID NO: 198264 - protein, 65 aa, Glycine max
  unsure (1)..(65): unsure at all Xaa locations
  Clone ID: PAT_MRT3847_21057C.1.pep
APLVFSCSLGPGCSLXXSFXWGVGVGSLSFLLFSRVSLGSFGVEGAVGLPCFFLVRSCWRSPFLV

SEQ ID NO: 198265 - protein, 57 aa, Glycine max
  Clone ID: PAT_MRT3847_21058C.1.pep
CINQRCPLTPLKPPTYILYLFFYIFCSLIIFPLVKLSLSLSLLHTQALQHFLWALIF

SEQ ID NO: 198266 - protein, 69 aa, Glycine max
  Clone ID: PAT_MRT3847_21059C.1.pep
HVIGAYKTCYCKNNHQLHNQIHITYLNIIIINYNQLYIYIYKNNKTKFSTYMLIEAALTLNILQQIIKT

SEQ ID NO: 198267 - protein, 76 aa, Glycine max
  Clone ID: PAT_MRT3847_2105C.1.pep
AFLVTTSQNANSLKPLVWEQKNLQIKKNITSPVFTRGGNKRLFNFVLQGWQATLTPIGLGFLGAGGGNFWTMTLNP

SEQ ID NO: 198268 - protein, 48 aa, Glycine max
  Clone ID: PAT_MRT3847_21060C.1.pep
LFRPTPRMVLQLSSCVRCGGRVRLQLDNYWESKPSQLGSIPATNREKE

SEQ ID NO: 198269 - protein, 145 aa, Glycine max
  unsure (1)..(145): unsure at all Xaa locations
  Clone ID: PAT_MRT3847_21061C.1.pep
QSYVTTTTPDFNCVSLLXRVNSANSSQSNMLIRSESCTDSTGSYVVYAPVDIVAMNVVLSGGDPDYVALLPSGFAILPDGPPALNGGPMHDGGSGGSLLTVGFQILVDSAPTAKLSLGSVATVNSLIKCTVERIKVAVIRYNNNT

SEQ ID NO: 198270 - protein, 36 aa, Glycine max
  Clone ID: PAT_MRT3847_21062C.1.pep
LCLSFFKITELGSKMTHYFFLPVSTLQVYCLTFVER

SEQ ID NO: 198271 - protein, 89 aa, Glycine max
  unsure (1)..(89): unsure at all Xaa locations
  Clone ID: PAT_MRT3847_21063C.1.pep
CIFVKTLTGKTITFEAESSDTVDDVKAKIQEKEXIPTEHQPLLFSGNXTGGXFTLADYNIHKEKFLHLVLCFQGGMSNFYNNLAGDTLS

SEQ ID NO: 198272 - protein, 116 aa, Glycine max
  unsure (1)..(116): unsure at all Xaa locations
  Clone ID: PAT_MRT3847_21064C.1.pep
FIWAFVAAFAWFWGPLGGLGPNEKSPLEVCSAGQAINVAVNKLFPFGIGQVFLVKLCPLKFGLFFFFGAFGLIMTIFIAMLLPETKNIPLXKMQTVWGSPWFWSKIVPHADYDPKP

SEQ ID NO: 198273 - protein, 53 aa, Glycine max
  Clone ID: PAT_MRT3847_21065C.1.pep
LFIVNIDIECKTMLVGESSKVLDIIYWSAIRGGILNMKMAALSFRYMSCLRLA

SEQ ID NO: 198274 - protein, 219 aa, Glycine max
  Clone ID: PAT_MRT3847_21066C.1.pep
MSGSEDEGGEEYLFKIVIIGDSAVGKSNLLSRYARNEFNMHSKATIGVEFQTQCLEIDSKEVKAQIWDTAGQERFRAVTSAYYRGAVGALIVYDISRRTTFDSVGRWLDELKTHCDTTVAMMLVGNKCDLENIRAVSVDEGKSLAEAEGLFFMETSALDSTNVKTAFEMVIREIYTNVSRKVLNSETYKAELSVNRVSLVNNGASTSKQNQPYFSCCSR

SEQ ID NO: 198275 - protein, 219 aa, Glycine max
  Clone ID: PAT_MRT3847_21067C.1.pep
MSGSEDEGGEEYLFKIVIIGDSAVGKSNLLSRYARNEFNMHSKATIGVEFQTQCLEIDSKEVKAQIWDTAGQERFRAVTSAYYRGAVGALIVYDISRRTTFDSVGRWLDELKTHCDTTVAMMLVGNKCDLENIRAVSIDEGKSLAEAEGLFFMETSALDSTNVKMAFEMVIREIYNNVSRKVLNSETYKAELSVNRVSLVNNGAATSKQNQTYFSCCSR

SEQ ID NO: 198276 - protein, 145 aa, Glycine max
  Clone ID: PAT_MRT3847_21068C.1.pep
MRTSWADLAANSAPENAGTSNSTAPSRPVYVPAHLRNRGPSESPAPPPTSNNNNNNNNNNNNNNNNNNNNAGSRWGALPARNGWGNRSCGSWDRREVNPFGDQEEAAAAFGGEEQQDNTGINFDAYEDIPVETSGENVPTAVTTF

SEQ ID NO: 198277 - protein, 416 aa, Glycine max
  unsure (1)..(416): unsure at all Xaa locations
  Clone ID: PAT_MRT3847_21069C.1.pep
FLRKPKVSKKEEDEICVPINGGYNDDDADIESLLLPRRFGNSTSLAASIPVAEYQGRLLQDLQGKGTQGRPAGSLAVPREPLDAATVAEAISVISCFYEDKTEWGKRVGWIYGSVTEDVVTGYRMHNRGWRSVYCVTQRDAFRGTAPINLTDRLHQVLRWATGSVEIFLSRNNALLASPRMKFLQRVAYFNVGMYPFTSMFLIVYCFLPAVSLFSGQFIVQSLSATFLVFLLGITITLCLLAIXSSKWSGITLHDWWRNEQFWLIGGTSAHPAAVLQGLLKVIAGVDISFTLTSKSATPEDGDDEFADLYEVKWSFLMVPPITIMMVNSIAIAVGVARTLYSPFPQWSRLVGGVFFSFWVLCHLYPFAKGLMGRRGKVPTIIYVWSGLLSIIISLLWVYINPPSGRTQDYMNFQFP

SEQ ID NO: 198278 - protein, 39 aa, Glycine max
  Clone ID: PAT_MRT3847_2106C.1.pep
MNYSKVLHLKYSVKARAVNPIIVNIAFHSYVFEDMNPLE

SEQ ID NO: 198279 - protein, 117 aa, Glycine max
  unsure (1)..(117): unsure at all Xaa locations
  Clone ID: PAT_MRT3847_21070C.1.pep
PARKPRGDPRGTPAVYAHQKGERVKKKRRRGAPEATTKGSEARHXGETAKPKSAQGGGGAEKDKGSGTKGRPYTLQAVRQGQQESGATSPQAGQDQPRPREPTPEARRGATQAEGGD

SEQ ID NO: 198280 - protein, 50 aa, Glycine max
  Clone ID: PAT_MRT3847_21071C.1.pep
QNWEGLTSILSFKIYLSTFEKTYHGSSFIHHITSKGNRASIISYPCLLRH

SEQ ID NO: 198281 - protein, 51 aa, Glycine max
  Clone ID: PAT_MRT3847_21072C.1.pep
GIGLYSVLRSLVLVHPAYWSCLQQVLCVLHSWQGSSFRQLSTVGTQECPQS

SEQ ID NO: 198282 - protein, 95 aa, Glycine max
  unsure (1)..(95): unsure at all Xaa locations
  Clone ID: PAT_MRT3847_21073C.1.pep
FGNKGDDTINYEAFPRKLVLIGEIXDKVPWIVSQEDSFTAWTTQVRTTTTMLHGGGPYSCAMVHDSTGSTIPSDXAIGVQLTTINIMCAYGLTSG

SEQ ID NO: 198283 - protein, 242 aa, Glycine max
  Clone ID: PAT_MRT3847_21074C.1.pep
MTTHIDNLWVLALVSKCTQENIAWSLLTIMVTLWLSMTFFCWSHPGGPAWGKYYSFHYWKKTTTTTTSTSNNTNSNNLKMIPGPKGYPFIGSMSLMTSLAHHRIAAAAQACKATRLMAFSMGDTRVIVTCHPHVAKEILNSSVFADRPIKESAYSLMFNRAIGFAPYGVYWRTLRRIAATHLFCPKQIKASELQRAEIAAQMTHSFRNRRGGFGIRSVLKRASLNNMMWSVFGQRYDLDETN

SEQ ID NO: 198284 - protein, 90 aa, Glycine max
  Clone ID: PAT_MRT3847_21075C.1.pep
PGWRCTLRPPFLSNAFLVMISIMLITKTLKREDRFYVWDQNRLFEPPFCYLNVFQNARVGPVYICSMFVFFIPAGNVCHCIFGCLCYMSS

SEQ ID NO: 198285 - protein, 69 aa, Glycine max
  unsure (1)..(69): unsure at all Xaa locations
  Clone ID: PAT_MRT3847_21076C.1.pep
QSNMHMTWHFIAFGVXVMMRLKVNLLISHRYEHTPNYLLPITRYFPRLWNWFISLVLSILMCEVSFFEP

SEQ ID NO: 198286 - protein, 49 aa, Glycine max
  Clone ID: PAT_MRT3847_21077C.1.pep
EDRIFRLKLDRHLQIAMMKLVEPISCIHQHDPTFVKKPLALKPSDHIQA

SEQ ID NO: 198287 - protein, 82 aa, Glycine max
  Clone ID: PAT_MRT3847_21078C.1.pep
YGVVSVELFLSGEISEKEGVLLSGEYLRQTFVLSKRSVLPLFLESTIHAPLLLFFFLLRLLIVVFVSLLKACCFIGFVGSFE

SEQ ID NO: 198288 - protein, 59 aa, Glycine max
  Clone ID: PAT_MRT3847_21079C.1.pep
LGMVHDIHVADKNISESFPLESHPAREELEINLCNFAPYIYIYHVMENRTQAIRKPFLS

SEQ ID NO: 198289 - protein, 81 aa, Glycine max
  Clone ID: PAT_MRT3847_2107C.1.pep
LWLEQHYIREYILHSTARPCRTRADPDSSDIESSQAPTACKSNICLMTEQTNAERLSPYPIPAIVCLSETTPRRTRVCKRD

SEQ ID NO: 198290 - protein, 76 aa, Glycine max
  Clone ID: PAT_MRT3847_21080C.1.pep
FPPFPLGFIFLAPWLMWGGAPRSFEPPKGPFRPFLLGPSGGFLTGTPFFGKSRVGFSPPFFREIWLGYGVEKPSIK

SEQ ID NO: 198291 - protein, 48 aa, Glycine max
  Clone ID: PAT_MRT3847_21081C.1.pep
EKEMLSEARARLANTFLMNAKRKAMEKQAEEARMPASSQNRSELQCCQ

SEQ ID NO: 198292 - protein, 64 aa, Glycine max
  Clone ID: PAT_MRT3847_21082C.1.pep
KNKIQVSNTKKPLFFYVNLAKRYIQQRDEVVLSALGMGITTGVTIAEILKNNGLATEKKISTSS

SEQ ID NO: 198293 - protein, 66 aa, Glycine max
  Clone ID: PAT_MRT3847_21083C.1.pep
YRLLSTAMFRSAVARLVTIPPHAAYSEERVVISEPIIGSGVRSIPTSLTQRVCYPTDHRVLAEHAL

SEQ ID NO: 198294 - protein, 91 aa, Glycine max
  Clone ID: PAT_MRT3847_21084C.1.pep
FNSVYYKIYASAKRGGAASGALFWQLLTEGMESFQDGYGIILGQSSSTANLIARQSRKLYLIRKIFARVANMRRWQRARARGGNGGRYIGN

SEQ ID NO: 198295 - protein, 121 aa, Glycine max
  unsure (1)..(121): unsure at all Xaa locations
  Clone ID: PAT_MRT3847_21085C.1.pep
AIMCASGMATMPGFGDQYXNEKLITEVHGFNVEVLAVDWSISPHEVKKKVASGERIESSMKRLMDDGEKGKRMRSMVKEMHENAWXAVQEGGSSYDSLTAMIHHFKTLVPNHVNVNGNIDH

SEQ ID NO: 198296 - protein, 80 aa, Glycine max
  Clone ID: PAT_MRT3847_21086C.1.pep
FNLSYLSKANIRFYGLIEFLSFYFFSFFFFFFFFFFFFFFFFNDQNRSLWITSYQNEVKPHILTCICSHIRYRKMTTLIM

SEQ ID NO: 198297 - protein, 80 aa, Glycine max
  Clone ID: PAT_MRT3847_21087C.1.pep
KVVVSDDLSPCIYVRHVPISSHSYSNLTYRLMLPNDCIEKISLQFNPTVPYNTSSLLVGPTLHKIPLNVSINSRLYQTVN

SEQ ID NO: 198298 - protein, 68 aa, Glycine max
  Clone ID: PAT_MRT3847_21088C.1.pep
TGAKLNIFHFIKFYIGEKLKNFKKKGYKLVITQSALDPKEKKRRGQHLHIHPIFFLPSINHGWHKHKQ

SEQ ID NO: 198299 - protein, 51 aa, Glycine max
  Clone ID: PAT_MRT3847_21089C.1.pep
VLELSIMVVRHSVSSIAKAHSKLLLLSHARPPLPRVHATPYPSRASIKAVV

SEQ ID NO: 198300 - protein, 284 aa, Glycine max
  Clone ID: PAT_MRT3847_2108C.1.pep
MEGKEEDVRVGANRYGERQPIGTAAQAKDYREPPSAPLFEPGELSSWSFYRAGIAEFVATFLFLYITVLTVMGVFKSKSKCSTVGIQGIAWAFGGMIFALVYSTAGISGGHINPAVTFGLFLARKLSLTRAIFYIIMQCLGAICGAGVVKGFEPHLYERLGGGANTIAKGYTNSAGLGAEIVGTFVLVYTVFSATDAKRNARDSHVPILAPLPIGFAVFLVHLATIPVTGTGINPARSLGAAIIFNKDQAWDDHWIFWVGPFIGAALAALYHQIVIRAIPFSSK

SEQ ID NO: 198301 - protein, 78 aa, Glycine max
  Clone ID: PAT_MRT3847_21090C.1.pep
VGRSMVEGKPVECWGILDFTSQESGWRKLNSKQFIENLMGKYRKLGIGMKEPVWREQSSMWSLGDYNSLCKLLENIED

SEQ ID NO: 198302 - protein, 102 aa, Glycine max
  unsure (1)..(102): unsure at all Xaa locations
  Clone ID: PAT_MRT3847_21091C.1.pep
THLITTLCTRRFPYLPRVFHKFIKMTNYYAXHTIINDTPGYFNYPFVTIVPSVKNKPLFFYDKLYKSKKIAVTHDXTLTRIMLYLTDIDLANIHMEFIDKPY

SEQ ID NO: 198303 - protein, 84 aa, Glycine max
  Clone ID: PAT_MRT3847_21092C.1.pep
HCPLLNPGIRLGSTFYNTHTPHALSTFFLGETKLKAPWEPLPHLTTLFGTVAAKFPSGGAFSVVAKFNLTNFGFNGWVKSPALK

SEQ ID NO: 198304 - protein, 100 aa, Glycine max
  Clone ID: PAT_MRT3847_21093C.1.pep
MGSNNTTKGLDSLIDDGEARGDNKFEVERVKEEMGAITSAVIAVVGVLLGWITIEIACKPCLEKGREAIDRSLDPDYDPDDTAIRAPLNPTAASATVKAV

SEQ ID NO: 198305 - protein, 140 aa, Glycine max
  Clone ID: PAT_MRT3847_21094C.1.pep
DSPVIQREPWEHIKDEDVQRNALSFSGEIWQVPPMFSAIKVGGEKMYEKARRGESIELSPRRISIFQFDIERSLDDRQNLIFRVTCSKGTYIRSLCADFGKALGSCAHLTALRRDSIGQYSADDAWEFQELEEAITKNYL

SEQ ID NO: 198306 - protein, 105 aa, Glycine max
  Clone ID: PAT_MRT3847_21095C.1.pep
MQGNILYRFPSLQRTASQKSKRKEYVGRRWADWVGIEKFFKEKKWQFSITGTSERAMVIGLGGLNLFGVIILGTMLKDMAVAPSSFIKFVADIFPLLQIYAGSFR

SEQ ID NO: 198307 - protein, 50 aa, Glycine max
  Clone ID: PAT_MRT3847_21096C.1.pep
LKQLAFECDTSNPFHVSSAFMFIVFTLYVLPAFLMCFNWLFKHASHLLNG

SEQ ID NO: 198308 - protein, 61 aa, Glycine max
  Clone ID: PAT_MRT3847_21097C.1.pep
NKKPRIVPPHTQLAVRNPEKLTQLLGDVPTANGGVMPNIPNLLLPKKAGGPPKGAAPADPP

SEQ ID NO: 198309 - protein, 138 aa, Glycine max
  unsure (1)..(138): unsure at all Xaa locations
  Clone ID: PAT_MRT3847_21098C.1.pep
IRAPIGFLRFFSQANVSLKRDLHPLMTRLVRYLNDPDITVHDAMIHIWKSLMNDSQKTIHQNLHHIXNDLLMHXVSNLLSSXEVPCLALTYIFQXRTFHDVRNHLIILWTRTLSLMDHIKETVRITVQIFYRTITSFT

SEQ ID NO: 198310 - protein, 169 aa, Glycine max
  Clone ID: PAT_MRT3847_21099C.1.pep
MNSYFPCIVAYAMDKSTFGSVIPTHENHLSSEVGPRMAIDPHLLLFLLLAPSNAHCSKLQRRHLPPFVFTDATALLVFKLKADVNNHLDFSPLTRGLRFCAWHGVECNGPKVLRLVLQNLDLGGAWAPKTLTRLDQLRVLSLQNNSLTGPIPDLTGLFNLKSLFLDNNH

SEQ ID NO: 198311 - protein, 44 aa, Glycine max
  unsure (1)..(44): unsure at all Xaa locations
  Clone ID: PAT_MRT3847_2109C.1.pep
MXPXKXEXXXEEEGGSESGDKNRVGSXSTMRVPRPXXPPXPIXS

SEQ ID NO: 198312 - protein, 189 aa, Glycine max
  Clone ID: PAT_MRT3847_210C.1.pep
RLREDDRRGDQASIIGGAIDFVKEVEQLLQSLEAQKRTRKNEEGGGGGGSSSSSSSTMLCKPPPPPLLLLSSPHGYGMRSSPSDEVNCGDEVKAENKSEAADIKVTLIQTHVNLKIECQRKPGQLLKVIVALEDLRLTILHLNITSSETSVLYSLNLKIEEDCKLCSASDIAETVHQIFSFINGVARDH

SEQ ID NO: 198313 - protein, 426 aa, Glycine max
  unsure (1)..(426): unsure at all Xaa locations
  Clone ID: PAT_MRT3847_21100C.1.pep
MNSYFPCIVAYAMDKSTFGSVIPTHENHLSSEVGPRMAIDPVRLLLFLLLASSNAHCSKLPTLVFTDATALLAFKLKADVNDHLHFSPLTRGLRFCAWQGVECNGPKVVRLVLQNLDLGGAWAPNTLTRLDQLRVLSLQNNSLTGPIPDLTGLFNLKSLFLDNNHFTASLPPSLFSLHRLRNLDFSHNNFSGPIPAAFTTLDRLHSLLLSFNSFNGSIPPFNQSSLKIFRASANNLSGAVPVTPTVFRFPPSSFALNPQLCGEIIRVQCRPAQPFFGPVAPPTAALGQNAQVHGVNGIIRQPYEKKRHDRRALIIGFSAGIFVLVCSLACLAAAVRKQRSRSKKDERTGMMAADAAAREEGAAVMRMEMEEKVKRAEVAKSGGEAQVYTLEQLMKGSQLXESXSAELLGRGCLGSTYKAVLDNPLM

SEQ ID NO: 198314 - protein, 118 aa, Glycine max
  unsure (1)..(118): unsure at all Xaa locations
  Clone ID: PAT_MRT3847_21101C.1.pep
GDQLANMTTDDVVRPYRXLATRFLFSHEEVQMTNLGIGVVTGRMNVXYERIHLNEQMRYLDGRHWGDIGNEPTRQMKGMSVVLKTYTRQTIFLPGVELVDPDMIKPGDLVGGNKDSYL

SEQ ID NO: 198315 - protein, 37 aa, Glycine max
  Clone ID: PAT_MRT3847_21102C.1.pep
PHLARPWEALESNTRDRAALKTALRPCEAVILCWRSS

SEQ ID NO: 198316 - protein, 42 aa, Glycine max
  Clone ID: PAT_MRT3847_21103C.1.pep
MLGPLILLFALILATICCNASWVLFALALEMRPPMPWASFWA

SEQ ID NO: 198317 - protein, 48 aa, Glycine max
  Clone ID: PAT_MRT3847_21104C.1.pep
GFMRRVITNLSVFSLDVKKDCECSNLEGVFYPMNVRSLFPLPTNTFLL

SEQ ID NO: 198318 - protein, 45 aa, Glycine max
  unsure (1)..(45): unsure at all Xaa locations
  Clone ID: PAT_MRT3847_21105C.1.pep
SRILLXRIXRDXXXIYNPWSKPEXTSXXEHIEAXXNMLFXXICXX

SEQ ID NO: 198319 - protein, 123 aa, Glycine max
  unsure (1)..(123): unsure at all Xaa locations
  Clone ID: PAT_MRT3847_21106C.1.pep
QIFCNATTDISGDIPESAGELSQYEKVIETLTTLFPVWVVLGAIVGIYKPTAVITLIFSATYMVDWKYVDXCCQVMAIFQVTWLATDLFSLGLGFLMLSMGLTLTFEDFRRCLQNPWTVRDNN

SEQ ID NO: 198320 - protein, 122 aa, Glycine max
  Clone ID: PAT_MRT3847_21107C.1.pep
MESSVLEWLGVEIIGVMSPVSICMFLVVLLVYSLSSPSTTATTIATAANLVYAENPSDTAAQKLEGAVLNAVVFIVFIALATFLLVLLYYYNCTDFLLHYTRFSTFFVLADMGGSILLYLLE

SEQ ID NO: 198321 - protein, 68 aa, Glycine max
  Clone ID: PAT_MRT3847_21108C.1.pep
RSPQIQDGSQRGSRRCTQEERCSGLCLSFEWMTAIFIGSVNYRSSCFCVGPGLCGSHFLSVVLISLSM

SEQ ID NO: 198322 - protein, 82 aa, Glycine max
  Clone ID: PAT_MRT3847_21109C.1.pep
TWGLVSGGFYHFYTQSFYQALDEISPLTFFVGNPIKKEVGIVSSVLVFRNPVRPFKGLGSAIAIFGAFLYFQATSQKKPMKI

SEQ ID NO: 198323 - protein, 67 aa, Glycine max
  Clone ID: PAT_MRT3847_2110C.1.pep
FLRGLVVVSSPRVLSCSSSRCFLFWVVAGPFPSAWWCGFAFAARSGLPFWCRVVSGRALVLRPSHFC

SEQ ID NO: 198324 - protein, 62 aa, Glycine max
  Clone ID: PAT_MRT3847_21110C.1.pep
SEVHQASLCTESQAFPCTGGQNPRQAQMYLDTHKVRIREEVLGTFLRFRASWEYFAPRLSIR

SEQ ID NO: 198325 - protein, 51 aa, Glycine max
  Clone ID: PAT_MRT3847_21111C.1.pep
NNSQRYDSIFQGTAKLFPTGIFKPFNPTINIFSSSPYQHKNLCSDVLTTAP

SEQ ID NO: 198326 - protein, 78 aa, Glycine max
  Clone ID: PAT_MRT3847_21112C.1.pep
TPFHQEPFLNLAPGLHLVLKPHLRHLLLHYNQYLHQELLEQNHLWKLLLQCHNGCPLALVLHKMTRGILQLILERTEC

SEQ ID NO: 198327 - protein, 64 aa, Glycine max
  Clone ID: PAT_MRT3847_21113C.1.pep
IKIGRKSCESHMKFILFFSVFIFPPKPNRVLMWDWIHLFRESLKYEYSHVSLFIFSIFFLLIFF

SEQ ID NO: 198328 - protein, 54 aa, Glycine max
  unsure (1)..(54): unsure at all Xaa locations
  Clone ID: PAT_MRT3847_21114C.1.pep
MSSNARPTRGGTXIKTRKRNIATPLDSAAVSDAEVQIYLDNARDLELIAKSIGS

SEQ ID NO: 198329 - protein, 110 aa, Glycine max
  Clone ID: PAT_MRT3847_21115C.1.pep
NQKEPTIPGSRGTEPNLYPFLLKPVNLKIKPSFIINPFLLNNLPFFHPKLLNMPSQNRYKPNELKKTFLFKSLDQHTRGTRALWSNIKSNLGERQKNTSATTGLGMIMHT

SEQ ID NO: 198330 - protein, 47 aa, Glycine max
  Clone ID: PAT_MRT3847_21116C.1.pep
SSIYKTLLSSIYTVNLDAKSSYIIDYIDQMSIQIRPYLCQRYRAELC

SEQ ID NO: 198331 - protein, 52 aa, Glycine max
  Clone ID: PAT_MRT3847_21117C.1.pep
LTLSFSCQGDIYITYLIYTWLKLLSIIREALWAMTLFCHRQAAREINHSPQH

SEQ ID NO: 198332 - protein, 76 aa, Glycine max
  Clone ID: PAT_MRT3847_21118C.1.pep
QTTCGFMKFIEHGYHRLFTKTQGVTLEFSAKEYTKAGRYSDLTRTPRVTKAQSKITCAIHKVSKMVLSEIDESRRG

SEQ ID NO: 198333 - protein, 135 aa, Glycine max
  unsure (1)..(135): unsure at all Xaa locations
  Clone ID: PAT_MRT3847_21119C.1.pep
NPETXKPXGKQPXKGQXTXGXXXGGXTXXKXXXXXXXXAPXXGRXRRKXREGQXPKXQXXAXXXTRXGRXGXXXPXTXPXXDDXXXXHRNXXXXQNXTXXXXXXPXPXXTXNPXTXEXXPPXXGKGTXRXGRGKA

SEQ ID NO: 198334 - protein, 85 aa, Glycine max
  Clone ID: PAT_MRT3847_2111C.1.pep
EFKPERWISERGEVVYAPAYKFIAFNAGPRICLGKDLAFVQMKMVAASILRKYRFQVVEGHSPTPSHSIVLLMKNGLKARIMKRL

SEQ ID NO: 198335 - protein, 96 aa, Glycine max
  unsure (1)..(96): unsure at all Xaa locations
  Clone ID: PAT_MRT3847_21120C.1.pep
KXQQQQXQXREVXIXXXTTAARSRIXIVHSKKVLXEQXTPPPPPTPMPMELELGSTXIXRSFNXXYXRHAXXSLDELPDSFSXTDASIPWXPHRXX

SEQ ID NO: 198336 - protein, 56 aa, Glycine max
  unsure (1)..(56): unsure at all Xaa locations
  Clone ID: PAT_MRT3847_21121C.1.pep
NYRGGNNKRSHAIAKTWVLKKGPSXRKALLKRIFFFFIFFFFFFFFFFFFFFPRVR

SEQ ID NO: 198337 - protein, 63 aa, Glycine max
  Clone ID: PAT_MRT3847_21122C.1.pep
SNESLKTSEFELSSFTILVAAPSEPSSLIASASKPSSSLDANANAIGIVIFKKFPNPHTYPNG

SEQ ID NO: 198338 - protein, 81 aa, Glycine max
  Clone ID: PAT_MRT3847_21123C.1.pep
LHGSHAMQLDSVKEQIFGDISHHTIHFNNIFQCHFSILLPLFIGPKTMRYALLTRLKCPLLLFKLQRYYHSKQNLYHSNHA

SEQ ID NO: 198339 - protein, 95 aa, Glycine max
  unsure (1)..(95): unsure at all Xaa locations
  Clone ID: PAT_MRT3847_21124C.1.pep
LFYVSELTSPTTGGVPASFGTLGDIINAEPNAYIACAGDRVSDHPLNKAVPQGSXAAEYLFHKGSFDSIVRGNLSKGVVSEFFHFHSLCSVTNHV

SEQ ID NO: 198340 - protein, 82 aa, Glycine max
  Clone ID: PAT_MRT3847_21125C.1.pep
SCSQRQYSIRSSCQWPHNEKQRWCIGAKVNSFLQSLFPSWLFYHAGWIYDASCISNGMSQLSSAIGRVETFDTISEFVALST

SEQ ID NO: 198341 - protein, 215 aa, Glycine max
  Clone ID: PAT_MRT3847_21126C.1.pep
MAMRVSPSASSALSLLNCKQPPPVSCIRVPCLSRSSPPSLSYTFNPLRSFIGHGGSRSPGFRVHCYAPAPLTPPNLQWISTISSVVLILARGTAVPKSYIVPLFALQAPAGVVSWIKGRYGVWTAFLALLIRLFFYIPGELELPFLALLLLMVAPYEAMKLRYTKEGAVISLLISVYLAFQHFSRTSLQQSFDQGSIVATLAVICITVVSLLLLI

SEQ ID NO: 198342 - protein, 90 aa, Glycine max
  Clone ID: PAT_MRT3847_21127C.1.pep
RKETFSSGSFSFLGELELPFLALLLLMVAPYEAMKLRYTKEGAVISLLISVYLAFQHFSRTSLQQSFDQGSIVATLAVICIAVVSLLLLI

SEQ ID NO: 198343 - protein, 148 aa, Glycine max
  Clone ID: PAT_MRT3847_21128C.1.pep
MAMRVSPSASSALSLLNCKQPPPVSCIRVPCLSRSSPPSLSYTFNPLRSFIGHGGSRSPGFRVHCYAPAPLTPPNLQWISTISSVVLILARGTAVPKSYIVPLFALQAPAGVVSWIKGRYGVWTAFLALLIRLFFYIPGMFSYLSREI

SEQ ID NO: 198344 - protein, 74 aa, Glycine max
  unsure (1)..(74): unsure at all Xaa locations
  Clone ID: PAT_MRT3847_21129C.1.pep
IFWAFVLFAAXALIRCLAVDNXLVMTLDKESCLQAXDIIKEXVKLLYKRYKITAFSLLRNIFHDCAVSSCCASL

SEQ ID NO: 198345 - protein, 82 aa, Glycine max
  unsure (1)..(82): unsure at all Xaa locations
  Clone ID: PAT_MRT3847_2112C.1.pep
AIEKNGDLALFFFFYRTLVTFGLFVEIRKAEGRAIKGGIXLTIAQWCVALCLAMWLXPTTFAXGGISLKHSNAIRPQMKFYY

SEQ ID NO: 198346 - protein, 40 aa, Glycine max
  Clone ID: PAT_MRT3847_21130C.1.pep
LISALVAHSLYYKRYATTKSLVNPSYSAQHSLHYLSFKED

SEQ ID NO: 198347 - protein, 46 aa, Glycine max
  Clone ID: PAT_MRT3847_21131C.1.pep
EDLRMPFERYCSMNDGVNGKLLHSFYYYHYHILPSFYVLFIFNHKS

SEQ ID NO: 198348 - protein, 61 aa, Glycine max
  Clone ID: PAT_MRT3847_21132C.1.pep
PSIQKQLELLDSKQNGPITITLFNRKVRSLHHLTSQRSKGGKASQISLQFRNLIVFIQNFK

SEQ ID NO: 198349 - protein, 76 aa, Glycine max
  Clone ID: PAT_MRT3847_21133C.1.pep
KSLRSENVVDMGSRRDSDYSSENHAANYSPSPRTNDDYYASSQKDYSAWDRFLGTGFHLIEFINITSSERKGSPPV

SEQ ID NO: 198350 - protein, 180 aa, Glycine max
  unsure (1)..(180): unsure at all Xaa locations
  Clone ID: PAT_MRT3847_21134C.1.pep
PSHVYRALIQSNHTTAPHHALNSPKSLINMKVFVYDLTAKXNTDWLTNERCTIHLVASEGAIHRALLTTXVRTTDPYYADYFLVHVYGYCDFSTANGFPAIGHTRSLIMHARNLMFSELPFWNRNRRYNHVLVDSHDSGSCLHTLQDLSKADGASXIETNLIVLQTFGDGCDHPCHKGDH

SEQ ID NO: 198351 - protein, 102 aa, Glycine max
  Clone ID: PAT_MRT3847_21135C.1.pep
TRGRVLKKIFEGKKRGANFFFLGKILKGLKIFEGAPPPTPFWPGPNPLLKIVLFESPLNFGLLKHIKAQAQKGGFFQFFWCPPPPPRANKRSKKLGFFSTVD

SEQ ID NO: 198352 - protein, 39 aa, Glycine max
  Clone ID: PAT_MRT3847_21136C.1.pep
LSERTRSSVTKMKDLDFYPATIFVAWQSHAYDMLTLTMN

SEQ ID NO: 198353 - protein, 52 aa, Glycine max
  Clone ID: PAT_MRT3847_21137C.1.pep
NKMVCEQFGSDNDLANRIRCFGPHTTATTIMVDACNGVQYLHAMKDAVLAGF

SEQ ID NO: 198354 - protein, 51 aa, Glycine max
  Clone ID: PAT_MRT3847_21138C.1.pep
ICLFFMEAYCGVLRTINFVFFLKQKRYIDVWHQKCRNIYKRYPLGYKVFIA

SEQ ID NO: 198355 - protein, 50 aa, Glycine max
  Clone ID: PAT_MRT3847_21139C.1.pep
NLRRLIPQKERALFASSNRKTQTALFTWWGIIAPLIARYLCFFLNSRGRS

SEQ ID NO: 198356 - protein, 117 aa, Glycine max
  unsure (1)..(117): unsure at all Xaa locations
  Clone ID: PAT_MRT3847_2113C.1.pep
LRITAQSSETYEVFAHAGCLXSDVVNPSVNLTRLIICGYDHCLGCLIGARTLRHDGXDEPSYRSTTLEDMTSVIDFYRANTHYKAAXYPVDNRSILYGTVLAPGGCEASFLMRAATL

SEQ ID NO: 198357 - protein, 74 aa, Glycine max
  unsure (1)..(74): unsure at all Xaa locations
  Clone ID: PAT_MRT3847_21140C.1.pep
NXLQQLXQXSXXQLXGSITEKVTXXMXXHPGSPASVXEAISGTCSSSXASGWSWXLRXSGXHKWDLXGSLRXRX

SEQ ID NO: 198358 - protein, 40 aa, Glycine max
  Clone ID: PAT_MRT3847_21141C.1.pep
ERQYYTILSISQYHTNYKYIPLSIEIFWCNCFIIIFNILT

SEQ ID NO: 198359 - protein, 78 aa, Glycine max
  Clone ID: PAT_MRT3847_21142C.1.pep
NLSQGRSKTYSSCVGSVWYTVIVTDLGWEILEPPHTQQILGDDRVTVRYCKNTAKNPRFPHEVPETILLPRVCLFETA

SEQ ID NO: 198360 - protein, 64 aa, Glycine max
  Clone ID: PAT_MRT3847_21143C.1.pep
VFLFRLTHSALPPAISSAPAPNSADDHLNHNHGHVFFPRCIQLFAIHFYSPWIAELALLYEMTA

SEQ ID NO: 198361 - protein, 58 aa, Glycine max
  Clone ID: PAT_MRT3847_21144C.1.pep
MAKLIKFFELNTGAKIPFVALCTLQAEPDVRAKAVTTAILPGYMHIDRCLSYNNQAYI

SEQ ID NO: 198362 - protein, 96 aa, Glycine max
  Clone ID: PAT_MRT3847_21145C.1.pep
TPQIWPKKWMDSGRPKKKSGFCIRGKPPYPFFFFLPMGGGPYPNRAQNSDYQNQNIWGKGFFLERLKNYLVPRLNIEEGGAFGKFPEGEKLKANFP

SEQ ID NO: 198363 - protein, 50 aa, Glycine max
  unsure (1)..(50): unsure at all Xaa locations
  Clone ID: PAT_MRT3847_21146C.1.pep
WLVSLNQVVQVQNWLNLRYELNRVGRRILTLCELKLLDEXLSRLKTWYQP

SEQ ID NO: 198364 - protein, 102 aa, Glycine max
  Clone ID: PAT_MRT3847_21147C.1.pep
LQKRPGSEGADHNCDRRHAHKKTSRKTKKKKDRTLKNSPQKKKRRNGLPPMLKKNGGKALPGKHEKKKLLTHPAKKRNIPGLEELKPPPPQKNGKPPPTPRD

SEQ ID NO: 198365 - protein, 66 aa, Glycine max
  Clone ID: PAT_MRT3847_21148C.1.pep
LVAWVDTFRKTRSNNVQSNQASQPSVIYVEDNNNCQEKTMNKQTQAEAKRGLAQIRDPFAKYAALA

SEQ ID NO: 198366 - protein, 40 aa, Glycine max
  unsure (1)..(40): unsure at all Xaa locations
  Clone ID: PAT_MRT3847_21149C.1.pep
YGXHHQALQXPVVLLFLGLISXXSRCLGGRRGVDAGRSGT

SEQ ID NO: 198367 - protein, 188 aa, Glycine max
  unsure (1)..(188): unsure at all Xaa locations
  Clone ID: PAT_MRT3847_2114C.1.pep
FWGSLTPNCPTSRRVIRFLNAGIXPVTSMLRTNSRASITWHTVRFPLSCLSSFHAYSSSWHGILFTGILVITVPIGRTFANSISNTLPPHPNILINPTATNTTCILRSAMGVPPLFNSCRSVECLRAKPNTLRLTSPTAFGICATIARAVLPRSPNPPTNTSCSFMTIATPPLFYACVRPPPPPKQAA

SEQ ID NO: 198368 - protein, 47 aa, Glycine max
  Clone ID: PAT_MRT3847_21150C.1.pep
SSLQKKKCDRKVVLFRNWNYHKLNGTTTEDHKHSMCAILNNHQLYLT

SEQ ID NO: 198369 - protein, 122 aa, Glycine max
  unsure (1)..(122): unsure at all Xaa locations
  Clone ID: PAT_MRT3847_21151C.1.pep
NFDSIKHSFCQFSIDLFGGGILVDKTGDWITLIQNSSISILXRVAVWKNGCXMVMIVMSGNAVFIMVXCSLLVQVFLTNIYISDLLDECKCTKFYPHFCELTFSNCGYVRPNYSFRNAEFLL

SEQ ID NO: 198370 - protein, 86 aa, Glycine max
  unsure (1)..(86): unsure at all Xaa locations
  Clone ID: PAT_MRT3847_21152C.1.pep
AKQVPFXRKKNLQYFEISAKSNFNFEKPFLFLARKLAGGPNLPFVEFPALGPPEVQIVLAAQPHPEGEFFSAVSQPLPGEDDEFFE

SEQ ID NO: 198371 - protein, 150 aa, Glycine max; identical to SEQ ID NO: 197000
  Clone ID: PAT_MRT3847_21153C.1.pep

SEQ ID NO: 198372 - protein, 86 aa, Glycine max; identical to SEQ ID NO: 194422
  Clone ID: PAT_MRT3847_21154C.1.pep

SEQ ID NO: 198373 - protein, 166 aa, Glycine max
  Clone ID: PAT_MRT3847_21155C.1.pep
MSRRKVREPKEENVTLGPAVRDGEHVFGVARIFASFNDTFIHVTDLSGRETLVRITGGMKVKADRDESSPYAAMLAAQDVAARCKYHWSIVLISCFSDFVQELGITALHIKLRATGGNKTKTPGPGAQSALRALARSGMKIGRIEDVTPIPSDSTRRKSGRRGRRL

SEQ ID NO: 198374 - protein, 297 aa, Glycine max
  unsure (1)..(297): unsure at all Xaa locations
  Clone ID: PAT_MRT3847_21156C.1.pep
MEDKDRAASSDPTADAEFAGDTSWTLAADDSDGAYLFPGDRERSILREFVWNLEPDQPNRIGTDDGLWKPVQSSLTDSIEPVAAVPSRSNNQSISSSSSEDPPEKSTVSDDKPLEIPSKRKNKGQKRIRQPRFAFMTKXEVDHLEDGCRWRKYGQKAVKNSPFPRSYYRCTNSKCTVKKRVERSSEDPTIVITTYEGQHCHHTVGFPRGGIISHEAAFAGQLAPTMSQFYYPIQLPSRENDDYNNNTLSTISQPCQAQDETGEGSSVMMPADGSSPSQPSTDEGLLGDIVPPGMRIR

SEQ ID NO: 198375 - protein, 96 aa, Glycine max
  unsure (1)..(96): unsure at all Xaa locations
  Clone ID: PAT_MRT3847_21157C.1.pep
RIFXXFNDXFIHVTDLSGXETLVRXTGXXXVKGXDRDECMLXMPAMACXRRMLLARMQGNXGITGSXICKASVATGXNKTXTPXSXXQSXLXALAR

SEQ ID NO: 198376 - protein, 78 aa, Glycine max
  Clone ID: PAT_MRT3847_21158C.1.pep
FQTMHKYFTIFVALFACHGSLFAHGRQIKPLNQHSSLNTNPILAPLSRTSIKVIEAPIVPKFKFSDVDSGDSGADPCN

SEQ ID NO: 198377 - protein, 85 aa, Glycine max
  Clone ID: PAT_MRT3847_21159C.1.pep
DVNSSTTYVACNGSSQAISGYTLDTWMEDKTCYIFSSITSLLHNRIDLILDRKLRKCIAISSAIILHTEDCNLIVSGRLIRLGTR

SEQ ID NO: 198378 - protein, 147 aa, Glycine max
  Clone ID: PAT_MRT3847_2115C.1.pep
MQNLSRMDKPKTITHYVLISSADDTVAGFTSTLAKSLEDQGFPTRVLVDHRDLKKAEIETVRVFIVVLSEHYAICPFRLDKLAEIVDGLGARQRVLPVFYYVPTSDVRYQTGSYEVALGVHEYYDERERLEKWKNTLEKAAGFGGWP

SEQ ID NO: 198379 - protein, 53 aa, Glycine max
  Clone ID: PAT_MRT3847_21160C.1.pep
RRLLMICNSLSFWKHMSVGGGVLSRNLSIYIYTRMRTPDDRNENSLPTRRALC

SEQ ID NO: 198380 - protein, 62 aa, Glycine max
  Clone ID: PAT_MRT3847_21161C.1.pep
SDTNASADTTNAPLALQNGNSQVKDIPIGIGRDIHREAVQHSKLYLTKFTGGKQEGPKTRVC

SEQ ID NO: 198381 - protein, 104 aa, Glycine max
  Clone ID: PAT_MRT3847_21162C.1.pep
NLKQNSRMFCYSDHNYIHAQVYFILIYFISNTQSSCLYKFYSVMRIMQRRLSPLSMYSKALLISSHATAALQRMTFPAVVEAIYTLLLNSLIDFLISNHSQTHK

SEQ ID NO: 198382 - protein, 58 aa, Glycine max
  Clone ID: PAT_MRT3847_21163C.1.pep
LAFCFYWLTAPVWVSIANFLRIFFSLASTRRCTHMQFFCASITSYAYDASSGKQKKTK

SEQ ID NO: 198383 - protein, 135 aa, Glycine max
  unsure (1)..(135): unsure at all Xaa locations
  Clone ID: PAT_MRT3847_21164C.1.pep
GLVDDGHRYFSGMSSVFSVTPTIEHYGCMVDLQARAGLLVEAQDLIRSMPMEANSIVWGALLGGCRLHKDTQLAEHVLKQLIELEPWNSGHYVXLXNIYSASHRWDEAEKIRSSLNQKGMQKLPXCSWVKLMGRS

SEQ ID NO: 198384 - protein, 362 aa, Glycine max
  Clone ID: PAT_MRT3847_21165C.1.pep
MQRSRKALLERRAIQKATSGRNYVYLYKVSLSLVFVLWGLVFLFSLWTSHGHGYGDHESREVPVGVSNWNEDEHRQCKKSNSADEYLTKETDDVYIPSETFSSDGAKTDGLISESLSSGESINRVETGDKENYISPDTEEHEVERSESAVKHQNDVQKYNHLSQAMPLGLDEFKSRAIGSKIKSGTNPSGSVIHRLEPGGAEYNYASASKGAKVLASNKEARGASDILSRNKDKYLRNPCSSEEKFVVIELSEETLVKTIEIANFEHHSSNFKEFELYGSLVYPTEAWIFLGNFTASNVKQAQRFVLEEQKWMRYIKLNLQSHYGSEFYCTLSIVEVYGVDAIERMLEDLIYAQDKPFASGE

SEQ ID NO: 198385 - protein, 92 aa, Glycine max
  Clone ID: PAT_MRT3847_21166C.1.pep
GPLMGFRKQNKLFVGRLAQLGLVFPFIGKIMPGKGAFAPFTIETGEPIIEIEPQGLLDVVFLLTLALNRGSGKFVKDEGEGDETVPRFLVCV

SEQ ID NO: 198386 - protein, 148 aa, Glycine max
  Clone ID: PAT_MRT3847_21167C.1.pep
MDYEARIKAYRFVAYSTVSFSIISLLSVCFTLPMLQNYVSNVAQNMDRELSACQGSAKDIWSEVNQLKSIPVVGGNRTARQADGYGGGGGALSGGGGGGGGSCSECCSGGGPGPAGPPGPPRNPGNPGAPGSPGQPGNLFPFMRQATR

SEQ ID NO: 198387 - protein, 192 aa, Glycine max
  unsure (1)..(192): unsure at all Xaa locations
  Clone ID: PAT_MRT3847_21168C.1.pep
GEYHCPVLNKVFTEFTHIVAVKTTGNVFCYEAVKELNIKTKNWKELLTDXPFTKDDLITIQNPNALDSKVLLDFDHVKNSLKVDDEELQKMSSDPTYNINMSGDIKQMLKELGTEKGKETALHGGGGGKAQKERAAALAAILAARSRVEEDSKSNPNKEVKVSQAFSIVDAASASVHGRSAAAAKASADDKT

SEQ ID NO: 198388 - protein, 68 aa, Glycine max
  unsure (1)..(68): unsure at all Xaa locations
  Clone ID: PAT_MRT3847_21169C.1.pep
FINGNREXREXCFXLXXXXRXXXQXQAFXXDGVPEWTDIVKXAKFKELAHMIXXXXMLGLPXWQXRXI

SEQ ID NO: 198389 - protein, 65 aa, Glycine max
  Clone ID: PAT_MRT3847_2116C.1.pep
MAKSKNSSQHNQRRKAHRNGIKKPKTSRYPSRKGTDPKFRRNHRHALHGNAKALKELKEGKRETA

SEQ ID NO: 198390 - protein, 63 aa, Glycine max
  Clone ID: PAT_MRT3847_21170C.1.pep
LSDKPHLHTRVFPLGKTFPINHDWGPQKLPQHSEGKTPKTLRRLPPPCGERRTSPKKIVFLTP

SEQ ID NO: 198391 - protein, 60 aa, Glycine max
  Clone ID: PAT_MRT3847_21171C.1.pep
LLRDMIGFWSFTGVGFHPRVLGGPFSKVFLIFHLLGWPNRNFIFFGKPLVFDFFRLFLPG

SEQ ID NO: 198392 - protein, 61 aa, Glycine max
  Clone ID: PAT_MRT3847_21172C.1.pep
VSLYVLSLQGLVRFNVNTSHITFVLFSRRGNSPGTRIKTAELGKQLLTSIYSKVERKSAFI

SEQ ID NO: 198393 - protein, 132 aa, Glycine max
  Clone ID: PAT_MRT3847_21173C.1.pep
HTCYVLDRSGKVKMRHRGAPEEPPQPQPSFPHRKKKRKRRATATATVGSTSVSFETSHTDAPDQLNTHIHDAAVACEQSKATAAGDGFRFGELRQRSVNGRDSFVDLAVTAVGDGYVTETVESLELKRVLAR

SEQ ID NO: 198394 - protein, 74 aa, Glycine max
  Clone ID: PAT_MRT3847_21174C.1.pep
CHFSLRVFFGFLSYGFVYYLLEPVVKFNQEFKPPPYLRQSHKIVFNKVKPPPKSKKTKIKKKKKKKIKKKTTAR

SEQ ID NO: 198395 - protein, 70 aa, Glycine max
  Clone ID: PAT_MRT3847_21175C.1.pep
AAVACRFFLFLFLFFFFFFFFFFFFFFFFFFLKQLTKRNKCMNKYQETGKLPPKFNPIQDILCYRMCIQY

SEQ ID NO: 198396 - protein, 99 aa, Glycine max
  unsure (1)..(99): unsure at all Xaa locations
  Clone ID: PAT_MRT3847_21176C.1.pep
DPVGDTRVQVHTDQLGSWVVMRTXIAIYDAFKWDAFGSGFPQDVLSXPISYAAYFLHSQVIYATSCDANIGVFDADSLRLRCRIASSICLSPAALSGSQ

SEQ ID NO: 198397 - protein, 45 aa, Glycine max
  Clone ID: PAT_MRT3847_21177C.1.pep
KYQFPGCHRIIVSRKWGFNQLSRSEYLKIESEKDIVHVWCDMISI

SEQ ID NO: 198398 - protein, 38 aa, Glycine max
  Clone ID: PAT_MRT3847_21178C.1.pep
MELGKLDFGSRILAASSRERLRPDEWSDDRSYPWAETR

SEQ ID NO: 198399 - protein, 57 aa, Glycine max
  Clone ID: PAT_MRT3847_21179C.1.pep
VIFYNLCLCPPNILYCWPCEVVCHIRTFTTVPNHCHTCTTMVISCYVTCIVCNFYYL

SEQ ID NO: 198400 - protein, 66 aa, Glycine max
  Clone ID: PAT_MRT3847_2117C.1.pep
DKTQITIIEQREYEEKHKKAFSSGLHVDSSRKYQKNESYIFFIIMMRLIRLICAIYMLKTNRVPKS

SEQ ID NO: 198401 - protein, 99 aa, Glycine max
  Clone ID: PAT_MRT3847_21180C.1.pep
PASAAEKTQTFCVASHAIIWHLSLACTAIYEGGVKGLRVSLREKRIVPLHDDPCSPITPLVHAVQPTMILCLKGGLMGYYLRQKKHSKTCDGTMRLQID

SEQ ID NO: 198402 - protein, 61 aa, Glycine max
  Clone ID: PAT_MRT3847_21181C.1.pep
SPYPPGKKGREPQAGRFPRTRSLLSVRSSFPIKVPRLQPAFWLFTAPHSSGRVTYVFSYLN

SEQ ID NO: 198403 - protein, 511 aa, Glycine max
  Clone ID: PAT_MRT3847_21182C.1.pep
TGSLPDSIVNLGQLGILDFHNNKLSGELPKGIRSWKKLNDLNLANNEIGGRIPDEIGGLSVLNFLDLSRNRFSGKVPHGLQNLKLNQLNLSYNRLSGELPPLLAKDMYKSSFLGNPGLCGDLKGLCDGRSEERSVGYVWLLRTIFVVATLVFLVGVVWFYFRYKSFQDAKRAIDKSKWTLMSFHKLGFSEDEILNCLDEDNVIGSGSSGKVYKVVLSSGEVVAVKKIWGGVRKEVESGDVEKGGRVQDNAFDAEVETLGKIRHKNIVKLWCCCTTRDCKLLVYEYMPNGSLGDLLHSSKGGSLDWPTRYKIAVDAAEGLSYLHHDCVPAIVHRDVKSNNILLDGDFGARVADFGVAKAVETTPIGTKSMSVIAGSCGYIAPEYAYTLRVNEKSDIYSFGVVILELVTGKHPVDPEFGEKDLVKWVCTTLDQKGVDHLIDSRLDTCFKEEICKVFNIGLMCTSPLPINRPSMRRVVKMLQEVSTEDQTKPAKKDRKLSPYYYDDASDHGSVV

SEQ ID NO: 198404 - protein, 75 aa, Glycine max
  unsure (1)..(75): unsure at all Xaa locations
  Clone ID: PAT_MRT3847_21183C.1.pep
LVSATASLQERVSEXDXVIHXTVXVKGXKMHIAEXGEGPVVLFLHXFPEXWYXMDXXRLSLSVPRYRXVXXDXXG

SEQ ID NO: 198405 - protein, 129 aa, Glycine max
  unsure (1)..(129): unsure at all Xaa locations
  Clone ID: PAT_MRT3847_21184C.1.pep
TTKVIVHAWLLGVDRKHRYDAXKFIPQRFDGASHHLACSNLTYIPFGAVRRMRPGISHGIPNVQLPPVALLYHFDXALPNGMLPQCLDMPQGFGAAVGRVNSRSSTQSQYDHSSRSFHSQLALLFLLST

SEQ ID NO: 198406 - protein, 66 aa, Glycine max
  Clone ID: PAT_MRT3847_21185C.1.pep
QDLVQLLNRPLGDWQNLNLNLPFSSDEATANIKKDSSYLPSRVQGLGIGLPHLRTNKNGKQKSLKD

SEQ ID NO: 198407 - protein, 138 aa, Glycine max
  unsure (1)..(138): unsure at all Xaa locations
  Clone ID: PAT_MRT3847_21186C.1.pep
EKKGKTKGKRKIIEDEKNRDKKRKIKKKPKKKQKKXSQSNKRTKKRAKNRRKKMNQKKPRILNKXKVQKEHKKKTKRQRKQKKAQPSRTKYKPDTKAQKERKKKXGEPPPNMYWTGVWTYFHCKTTNTSQRTAWADAW

SEQ ID NO: 198408 - protein, 79 aa, Glycine max
  Clone ID: PAT_MRT3847_21187C.1.pep
VHQELEHGVVEALKDQGICRWNHALRSAQHHLKTHFGSFSQANRLSASAMLSTTLKHEKPKQSEESFRNVMYFSCWGPN

SEQ ID NO: 198409 - protein, 104 aa, Glycine max
  Clone ID: PAT_MRT3847_21188C.1.pep
LEINYFWFLIFLGMAESRNDSIPVNEARKDSIRIRYHDGHLKFLLQAIKEGVNLKGYYAWSFSDSFEWDAGYTVRFGLIYVDYKNNLKRYPKFSAFWLQKFLLK

SEQ ID NO: 198410 - protein, 104 aa, Glycine max
  Clone ID: PAT_MRT3847_21189C.1.pep
LEINYFWFIIFLGMAESRNDSIPVNEARKDSIRIRYHDGHLKFLLQAIKEGVNLKGYYAWSFSDSFEWDAGYTVRFGLIYVDYKNNLKRYPKFSAFWLQKFLLK

SEQ ID NO: 198411 - protein, 48 aa, Glycine max
  Clone ID: PAT_MRT3847_2118C.1.pep
LFPFNNVYGRSTDTLLKGLSSKLFRIKLEQRHFSGSDKGLGFFHIQTK

SEQ ID NO: 198412 - protein, 53 aa, Glycine max
  Clone ID: PAT_MRT3847_21190C.1.pep
TPISYLIHFPFLNHFKLISIFPLSLFQYFVLFLLFIRVNFDSMLICEMRYHIS

SEQ ID NO: 198413 - protein, 67 aa, Glycine max
  unsure (1)..(67): unsure at all Xaa locations
  Clone ID: PAT_MRT3847_21191C.1.pep
GSTHASIQPSVRAAKGRHKGSSSHGVVQVECLAVVETSTQHSIWGSXTCHMTCPYDCHLISALTSDD

SEQ ID NO: 198414 - protein, 241 aa, Glycine max
  Clone ID: PAT_MRT3847_21192C.1.pep
MGVGISFLIALKATILFLCFAYLKNLGFTLFSLPFLYSSLISFLVSIASHPSINLPILLGKTTDGSFPLFSLIIFSPYIYFVRIFSLLRRLRSGEPAYTEVHEGLYVGGWPSSPQKLPPGDPAIVDCTCEFPRVKDFTTGLPYRCFPTWDTRSPQPADIESAVKWASRQRELNRPIFVPCAYGHGRSVAVMCALLVALGITEDWKNAEKLIRQKRPYIRMNALHRKALEEWSRHRLSAPKK

SEQ ID NO: 198415 - protein, 137 aa, Glycine max
  unsure (1)..(137): unsure at all Xaa locations
  Clone ID: PAT_MRT3847_21193C.1.pep
RLREDDRRGYLKNLGFTLFSLPFLYYSLISIASHPSINLPILLGKTTDGSFPLFSLIIFSPYIYFVRIFSLLRRLRSGEPTYTQVHEGLYVGGWPPLPQKLPPGXPAIVDCACEFPRVKDFTTGLPYLLLFDRGTRG

SEQ ID NO: 198416 - protein, 33 aa, Glycine max
  Clone ID: PAT_MRT3847_21194C.1.pep
GIFSKCPRPSIRITQEQWKEHQTVNSHLPYIGN

SEQ ID NO: 198417 - protein, 54 aa, Glycine max
  Clone ID: PAT_MRT3847_21195C.1.pep
NTTLTDDTAHQERGRMLPLDFGDVRCLSTGITDPSVLQGTQESCDKDCGSTLCG

SEQ ID NO: 198418 - protein, 77 aa, Glycine max
  unsure (1)..(77): unsure at all Xaa locations
  Clone ID: PAT_MRT3847_21196C.1.pep
NIXLKRVAESTANVDPPVLHRDSRRTMLLHDSFEDDFSKFLKFLCASIGSLGVTHDNRLHLNFAHKRFAFVVALILQ

SEQ ID NO: 198419 - protein, 68 aa, Glycine max
  Clone ID: PAT_MRT3847_21197C.1.pep
PQRRQWRCPGTAECHTQHVHSHFHDYKIVVGENLSFSKNLKKVHYFLIQELFFRNSWFLFSHLRHESH

SEQ ID NO: 198420 - protein, 36 aa, Glycine max
  Clone ID: PAT_MRT3847_21198C.1.pep
TEKNGSQFYMPRANKYLILLLQATFSLLDVFVHKKR

SEQ ID NO: 198421 - protein, 127 aa, Glycine max
  Clone ID: PAT_MRT3847_21199C.1.pep
GSPPLLPSLMVRFRGGCISQLQCCTFWQPPHSEPYQCRPTVSGFWLGTQVYFSTSRVVCFSLMGKVRPVLFCEVPHSYFLVIHERGIMTPGYLDIVLYVFFMCLFLISYSKPKIKTTKEPVQKKKIE

SEQ ID NO: 198422 - protein, 51 aa, Glycine max
  Clone ID: PAT_MRT3847_2119C.1.pep
CFLFPNYNSKFKKRTLMSIILSSYYVLIYSITYVLITSNLFFTLNTLSSPF

SEQ ID NO: 198423 - protein, 95 aa, Glycine max
  Clone ID: PAT_MRT3847_211C.1.pep
RKRLTLSMETAKDSMHHAIGDYAEGGPGCATPSGARLVWNSLSHPPISTRPNHYPLCHHIKQNFTALKRMKSCLLHNSRLLTRPLEGCIIAPEVT

SEQ ID NO: 198424 - protein, 83 aa, Glycine max
  unsure (1)..(83): unsure at all Xaa locations
  Clone ID: PAT_MRT3847_21200C.1.pep
MDQIWFTESDNSLIETLVGIQRHGRXSSRQQLNAAEXAVQVLQRAPEIPDPQKSNWNQVLWHLMVTTXPGTASPIQRTFFAVD

SEQ ID NO: 198425 - protein, 82 aa, Glycine max
  Clone ID: PAT_MRT3847_21201C.1.pep
LRTKVLNYKKKKTIQTTTKKKHKTKLNHTRNTNKNLPRSRTLTNNYVNYHRNNNALRIKLDLKIWHCTQLRLFEIVSRGIIS

SEQ ID NO: 198426 - protein, 132 aa, Glycine max
  Clone ID: PAT_MRT3847_21202C.1.pep
MPLKVLEATVSSFDVVFEKFRSEAPQNKANLILFLADNDPATSLSWCPDCVRAEPVIYKKLEASPDDIALLRAYVGDRPTWRNPQHPWRVDPRFKLTGVPTLIRWENNTVKGRLEDHEAHLENKIEALVADK

SEQ ID NO: 198427 - protein, 47 aa, Glycine max
  Clone ID: PAT_MRT3847_21203C.1.pep
QFHSLLCFIYRRLSQEKRDYFPMCVDINNMMEDMLSIYSYAVWNYLK

SEQ ID NO: 198428 - protein, 113 aa, Glycine max
  unsure (1)..(113): unsure at all Xaa locations
  Clone ID: PAT_MRT3847_21204C.1.pep
FSNLDFFDISLVGGFNVPMGFSPTSNGGTRGIRCPADINGQCPSQLKTQGGCNNPCPVFKTDQDCCNSGSCVPPDYSRFFKQRGPHAYSFPQDDPTSPFPCKGGANXRGVFCP

SEQ ID NO: 198429 - protein, 127 aa, Glycine max
  unsure (1)..(127): unsure at all Xaa locations
  Clone ID: PAT_MRT3847_21205C.1.pep
GTXLXGTPVRXINXXGXRRXLTXVXXAXXFFFCFLFLGRRSPLSFRHSVIYLHHEESLIVKPMLTLIAYIMGIEFTTLGHTLPCSIATAFLWHHRSTIQGHVHSTSYAASCCVSFCLPLTCSYIDTA

SEQ ID NO: 198430 - protein, 167 aa, Glycine max
  Clone ID: PAT_MRT3847_21206C.1.pep
TRLVPASVADTMTQYYMTSAAGTFCYIDPEYQQTGILTTKSDVYSLGIMLRQIITAKPPMGLAHIVKKAIEKGRFEEILDPVVTDWPVEEALSFAKLPLKCSELSKKDRPNLATVVLPELNRLSELELTLHNDQVFYSSEGMINSYAACPPTPPRSHYSDSETLYTI

SEQ ID NO: 198431 - protein, 44 aa, Glycine max
  Clone ID: PAT_MRT3847_21207C.1.pep
LINSNYVSSSVHFAWIDATREIKVILLSPWDLSCSVEYVEVLQI

SEQ ID NO: 198432 - protein, 67 aa, Glycine max
  Clone ID: PAT_MRT3847_21208C.1.pep
KHYIYKTAHTYAKQTNLLLSFYILLPIFGLLSLFNIFYYQTNIRLCSISLNTPLLYYGLHHLQHLAR

SEQ ID NO: 198433 - protein, 102 aa, Glycine max
  Clone ID: PAT_MRT3847_21209C.1.pep
MVQQLPSLFSWGPPLMTSKLEQLKQFTTVVCDTGDLEAISRLRPVDATTNPSLLLKAAAIPEYAELLRNAVSLSKGNVGLACDHFAVSVGAGILKVIPGRIS

SEQ ID NO: 198434 - protein, 92 aa, Glycine max
  Clone ID: PAT_MRT3847_2120C.1.pep
IYSVLWHTGTKCDCYKGPTMIDALDHITECNKPYDKQVRLTHTGCDKIVGIGTVPAGHEETSVWNNRMEMTVEHSELTTEASYVEMKTQYFT

SEQ ID NO: 198435 - protein, 99 aa, Glycine max
  Clone ID: PAT_MRT3847_21210C.1.pep
RALAWLSVQALVLLPVSSLALWLPVASVLLGRVCSVLGVVHPPGLLLRSGCSLAVPGRAGSPSFCAAWVRCLSCFPFPGGAAARPQTGKTWVFAFSLEP

SEQ ID NO: 198436 - protein, 37 aa, Glycine max
  Clone ID: PAT_MRT3847_21211C.1.pep
ARNSARDKAQLYAFNNGTADVKITRLSAWSMKKAQIH

SEQ ID NO: 198437 - protein, 263 aa, Glycine max
  Clone ID: PAT_MRT3847_21212C.1.pep
QLTSWASTSKSNPQTHTTISHGLTLLKDTHETLQHILQLPQTLETLRSHPLWVEKLLEDFLRFGDAFGMFQTSIMSLKEEHSSAQMAIRKRDESRVVAYVKAKKKISKEMEKLVSVLRCVHVTQHQQHSTLQVPSSVVDAQLRHVIADVMSVTVSVSVALFNGIGVSFASRRLSWTQMVRLSRNGGRENNNKEHEGIEELRNGVGMERLQNLKKKGDEEVRLVLKKMRDLEECVCGIETVTEKVFRALINSRVALLNILTLTQ

SEQ ID NO: 198438 - protein, 98 aa, Glycine max
  Clone ID: PAT_MRT3847_21213C.1.pep
KKATWRPTFAKYASIFLDKHLHEQCRMEKVNHSVSKRKISDRQYNIETKPLIAFIQERCTRLYPGRRKELKAQKKKPANMKDEQGVRPRENTQTEYRA

SEQ ID NO: 198439 - protein, 306 aa, Glycine max
  unsure (1)..(306): unsure at all Xaa locations
  Clone ID: PAT_MRT3847_21214C.1.pep
MDGYDATVRLGAINLKHGRAADFDSASPDVSVSSPVTRQKAAAAKQFIENHYKNYLQGLQDRKDRRRALQRKVQESQISAEEQEEMMRNLERRETEYMRLQRRKIGMDDFEQLTVIGKGAFGEVRLCRAKGTGEIFAMKKLKKSEMLSRGQVEHVRSERNLLAEVDSRCIVKLHYSFQDSDFLYLIMEYLPGGDIMTLLMREDILSEDVARFYIAESILAIHSIHQHNYVHXLSDFGLCKPLDDKYSSILLENEDLTGQESTSETXAYSGSPWLMPKERLQHWKRNRRALAYSTGGTFEYMAPDVC

SEQ ID NO: 198440 - protein, 525 aa, Glycine max
  Clone ID: PAT_MRT3847_21215C.1.pep
MDGYDGTVRLGAINLKHDRAADFDSATAAPDVSVSSPVTRQKAAAAKQFIENHYKNYLQGLQDRKDRRRALQRKVQESQVSAEEQEEMMRNLERRETEYMRLQRRKIGIDDFEQLTVIGKGAFGEVRLCRAKDTGEIFAMKKLKKSEMLSRGQVEHVRSERNLLAEVDSRCIVKLHYSFQDSDFLYLIMEYLPGGDIMTLLMREDILSEDVARFYIAESILAIHSIHQHNYVHRDIKPDNLILDKNGHLKLSDFGLCKPLDDKYSSILLENDDLTSQESTSETEGYSVSPWLMPKEQLQQWKRNRRALAYSTVGTLDYMAPEVLLKKGYGIECDWWSLGAIMYEMLIGYPPFCSDDPRMACRKIVNWKTCLKFPDEPKISAEAKDLICRLLCDVDSRLGTRGIEEIKAHPWFKGVQWDMLYESEAAYKPTVTGDLDTQNFEKFPEVDGPPSVTATVGPWRKMLTSKDNNFIGYTFKKSDILKSLESSDADIRVNGSSKTPSLITLLGRIDLQDTIIPESEQKPEA

SEQ ID NO: 198441 - protein, 61 aa, Glycine max
  Clone ID: PAT_MRT3847_21216C.1.pep
SKDNNFIGYTFKKSDILKSLESSDADIRVNGSLKTPSLITLLGQIDLQDTVIPESEQKPEA

SEQ ID NO: 198442 - protein, 192 aa, Glycine max
  Clone ID: PAT_MRT3847_21217C.1.pep
GSRTVLPSVFSKKFGSLCALDCRPGSISKIMGDELEEGEIAVSGDSHMDHQQSGSWIHDRDEGEDEQVLQQPKIKRKRSLRVRPRHAMERLEDKSGNEIISLQRGESSLLADYKYQIQTRIDPESKSFGDSNASKRDKNESSLTSLKNKQKLSSRKVANTSKLHGSPKSNRLNAHLLLQRMVMNTPEKVGGE

SEQ ID NO: 198443 - protein, 56 aa, Glycine max
  unsure (1)..(56): unsure at all Xaa locations
  Clone ID: PAT_MRT3847_21218C.1.pep
GIXXHVXDXGXGPLXLFLXXFPXLWYSWXHQILSLSXLXXRXGXDXEYGXLIVTVQ

SEQ ID NO: 198444 - protein, 73 aa, Glycine max
  Clone ID: PAT_MRT3847_21219C.1.pep
QWCIILKHLRTLLGPTLKHGSSTLMIITSWTLIISFILNLHCQMFKTLCITTILNIAQANSISTTIHISLFFT

SEQ ID NO: 198445 - protein, 79 aa, Glycine max
  Clone ID: PAT_MRT3847_2121C.1.pep
KDEISGRRVSIQRSIRNLQPHHYWWSRSLVVVCFYPRILLLGVEYNETGAVIYLRRALHIIYSLICPSQLRVREYRFHS

SEQ ID NO: 198446 - protein, 47 aa, Glycine max
  Clone ID: PAT_MRT3847_21220C.1.pep
GLNRVGQVVVFSLGKAFSTIHCALWGFWVPLWLLASLSYAPSVSATT

SEQ ID NO: 198447 - protein, 75 aa, Glycine max
  Clone ID: PAT_MRT3847_21221C.1.pep
GVEPPNLSIAVVQRVDPLPLLISKHASQIFPTASSIGLAAIRCSPTALAALIRAVAVVRVWQSMLSNHRTEHRLL

SEQ ID NO: 198448 - protein, 87 aa, Glycine max
  Clone ID: PAT_MRT3847_21222C.1.pep
FGLLGENGAGKTTTISIVTGLITPTSGTATVVGHDIRTDIGQVHLNIGICPQFSVLWDGLTVEEHLLFYARLKGIPRSTEKSHVDHC

SEQ ID NO: 198449 - protein, 302 aa, Glycine max
  Clone ID: PAT_MRT3847_21223C.1.pep
MAALMDFYSSSPEFQLHSDPFRGELMEVLEPFMKSPSPNYFPSSPSLPNLYSNGLSSNTQSLIGFGQAQPTSLVGLNHLTPSQISQIQAQIQIQAQQHQNRSNTLSFLGPKPIPMKHAGMPPKPTKLYRGVRQRHWGKWVAEIRLPKNRTRLWLGTFDTAEEAALAYDKAAYKLRGDFARLNFPNLRHQGSSVGGDFGEYKPLHSAVDAKLQAICEGLAELQKQGKTEKPPRKSRSKLAEKVVSDKENNNSCKVEAASWSSEGSSPLSDLTFADVSEAQWEGDSDNYNLQKYPSYEIDWDSL

SEQ ID NO: 198450 - protein, 314 aa, Glycine max
  Clone ID: PAT_MRT3847_21224C.1.pep
MAAMMDFYSSSTEFQFHSDPFRGELMEVLEPFMKSPFSTPSPSNSCFLSTSYSPSPNNYSPSLYSNGLSSIPNTTQNLIGFGQGQPTSLVGLNHLTPSQISQIQAQIQIQNHSNTLSFLGPKPIPMKHVGMPPKPTKLYRGVRQRHWGKWVAEIRLPKNRTRLWLGTFDTAEEAALAYDKAAYKLRGDFARLNFPNLRHQGSSVGGDFGEYKPLHSAVDAKLQAICEGLAELQKQGKTEKPPRKTRSKLASPPENDNNNDNNSCKVEAASSSSEGSSPLSVLTFADVSEPQWEGDSDNFNLQKYPSYEIDWDSL

SEQ ID NO: 198451 - protein, 78 aa, Glycine max
  Clone ID: PAT_MRT3847_21225C.1.pep
NEECMVPGTKWKTTIEEGQRHPKLPSKLLGYISRNHLKSLWLALETNFSNTSFAIHQGNAFRLVGLFLEITTLASAVN

SEQ ID NO: 198452 - protein, 219 aa, Glycine max
  Clone ID: PAT_MRT3847_21226C.1.pep
MEAHPYVPRDLHLPGYAPCFLSMSNILSVFASSSLLIVTLVWIFSGRFKKTKVDRVLMCWWAFTGLTHIILEGYFVFSPEFFKDKTGFYLAEVWKEYSKGDSRYAGRDAGVVTVEGITAVLEGPASLLAVYAIATGKSYSYILQFAISLGQLYGTAVYYITAILEGDNFSTNSFYYYAYYIGANASWIVIPLIIAIRCWRKICAAFRVQGGQTKKPKVR

SEQ ID NO: 198453 - protein, 168 aa, Glycine max
  Clone ID: PAT_MRT3847_21227C.1.pep
KVDRVLMCWWAFTGLTHIILEGYFVFSPEFFKDKTGFYLAEVWKEYSKGDSRYAGRDAGVVTVEGITAVLEGPASLLAVYAIATGKSYSYILQFAISLGQLYGTAVYYITAILEGDNFSTNSFYYYAYYIGANASWIVIPLIIAIRCWRKICAAFRVQGGQTKKPKVR

SEQ ID NO: 198454 - protein, 96 aa, Glycine max
  unsure (1)..(96): unsure at all Xaa locations
  Clone ID: PAT_MRT3847_21228C.1.pep
GVSSSSSCFLYYRRRPFIRASAGASPCEFSSLNSPLEPRSMXGKFLSAVLQNHPQMFHVAVGEELKLLAEDRDAAHARMVLGSASDEALLHSVWSS

SEQ ID NO: 198455 - protein, 68 aa, Glycine max
  Clone ID: PAT_MRT3847_21229C.1.pep
PGRRTRTTTPLPSVFLAFYEIILYCGSVSVTMAKNRCKGLETGKTTASNNDKDEDKKRPVCLSYRAEI

SEQ ID NO: 198456 - protein, 37 aa, Glycine max
  Clone ID: PAT_MRT3847_2122C.1.pep
FVKKKQLPHSEHIKGHSALSRGCYPSLTDNKKSIFNS

SEQ ID NO: 198457 - protein, 85 aa, Glycine max
  Clone ID: PAT_MRT3847_21230C.1.pep
MSEKYCCMVMRINVDCNSCCRKLRRIILRMKAIENHMIEKQQRRVFVFGRFEPGDVAIKIKKKMNRRVEILEVQEMEGEAQNEGE

SEQ ID NO: 198458 - protein, 382 aa, Glycine max
  unsure (1)..(382): unsure at all Xaa locations
  Clone ID: PAT_MRT3847_21231C.1.pep
MESCIFRYHHPTLLTLPSISHKPHFRFFTRPDLGGGGVSSSSSCFLYYRRRPFIRASAGASPCEFSSLNSPLEPRSMVGKFLSAVLQNHPQMFHVAVGEELKLLAEDRDAAHARMVLGSASEISPPSSSTVLLREINEFQFQIAVESCSYLLMFEXFLASMVPIVAKLSSLLYNGRLEILPSKDWELESIHSLEVLDMIREHITTVTGLRAKSSVTECWATTQVRQFLLARVYVASILXGYFLKSESLSNHIERKATLTSHDLHLGHTEYAIFGHLGGRVGLGQGLIRPEEEIEDLKCYVMSFHPGSLQRCARLRSKEAVNLVGSYSCALFNNKESGSVENDDVILTSFSSLKRLVLEAVAFGSFLWETEDYIDNVYKLKDD

SEQ ID NO: 198459 - protein, 79 aa, Glycine max
  Clone ID: PAT_MRT3847_21232C.1.pep
KKKKKKIPELVLFKKKPDPIPKNPSKFNKTGGLFFPQTPAGKFFLFVGDEKKGKGFFWPPPLEKGEILVPKKGVFPPPG

SEQ ID NO: 198460 - protein, 59 aa, Glycine max
  unsure (1)..(59): unsure at all Xaa locations
  Clone ID: PAT_MRT3847_21233C.1.pep
TSKDGEPPPXERNESEGATKRTHXGXRKKXTGAXQXDTTQXRXPAAGEEGQRKHRDTDN

SEQ ID NO: 198461 - protein, 118 aa, Glycine max
  unsure (1)..(118): unsure at all Xaa locations
  Clone ID: PAT_MRT3847_21234C.1.pep
AVGKNKRISKGKKGGKKKADDPFAKKDCYDFKAPFLFHVKNIVRSLISRTHGTMIASXXLKHRVFEVLLADLQWDEDHSFRKIRLRADDFQWKNVVTNFWGMDVTTDKLRSLVLQWRT

SEQ ID NO: 198462 - protein, 44 aa, Glycine max
  Clone ID: PAT_MRT3847_21235C.1.pep
RVYMEVRDLRLRDLILQFRVQKGTSIWLLCLLCSSFSLLLVLPF

SEQ ID NO: 198463 - protein, 62 aa, Glycine max
  Clone ID: PAT_MRT3847_21236C.1.pep
VEYTTNCHDPLAKVMNNRSGIVASLLTTGDAITDTQATVDGPSAKDWRCRSLLHISSLLAPW

SEQ ID NO: 198464 - protein, 91 aa, Glycine max
  Clone ID: PAT_MRT3847_21237C.1.pep
LLGRGRNKFGQIGVGNNFDCCSPMLGNFPHDQKAQTISCGWRHTIAVTERENCYFWGRGPIGQLGNGETLDRNVPTIIEAFSVDGTFRTRP

SEQ ID NO: 198465 - protein, 44 aa, Glycine max
  Clone ID: PAT_MRT3847_21238C.1.pep
VACIFFFFFFFFFFFFFLTNTNNGNSFHSLVKNQEILSSLNWHD

SEQ ID NO: 198466 - protein, 36 aa, Glycine max
  Clone ID: PAT_MRT3847_21239C.1.pep
MIQSCPYEMINILTMHQYLNSTSCKPENLTDSASIL

SEQ ID NO: 198467 - protein, 81 aa, Glycine max
  Clone ID: PAT_MRT3847_2123C.1.pep
QGFCSAPMGILIESRHHAKFKFFHPGWELSMQLKPLILRFSYEARTKYPPSGGRVSGEAVASFLVPIDTGSYSSWYCLSVC

SEQ ID NO: 198468 - protein, 111 aa, Glycine max
  unsure (1)..(111): unsure at all Xaa locations
  Clone ID: PAT_MRT3847_21240C.1.pep
CKGAQPVRQPPAKAVVXQFTRGSDLGGLPSSVXFCCAVNNRSSPITQRIRTAFGKGKKIVFLXQVLVFPVDLLAISFGVKKQILSSRAATPKGFRILLNSNSFKKLPAESP

SEQ ID NO: 198469 - protein, 69 aa, Glycine max
  Clone ID: PAT_MRT3847_21241C.1.pep
RSSTRPIFKGPFTLGPPLIKLGIYFTPSTLTVLQKEGSGGVFKIQAFGACFSFAFGILKTFLTILWLLN

SEQ ID NO: 198470 - protein, 60 aa, Glycine max
  Clone ID: PAT_MRT3847_21242C.1.pep
IYIYLLGCCPLTCQLESFEEIVCLKFSFLSYTVAVFRHQKRASDLITDGCEPPCGCWELN

SEQ ID NO: 198471 - protein, 82 aa, Glycine max
  Clone ID: PAT_MRT3847_21243C.1.pep
KLHPSSFYLEVAKTGMERRTVHNMVGFRVPLLLNLILATLGLVPFFQYRSSCDAPTRDGTLIRPNSRVYANNARIGSDLHHT

SEQ ID NO: 198472 - protein, 36 aa, Glycine max
  unsure (1)..(36): unsure at all Xaa locations
  Clone ID: PAT_MRT3847_21244C.1.pep
IVMGNIMEKVIAWYDNEWGYSQRVVDXDDIVANKWK

SEQ ID NO: 198473 - protein, 45 aa, Glycine max
  Clone ID: PAT_MRT3847_21245C.1.pep
VKEPQPRLVSKKGVPEIKLLPFFEGVNRPLIRCAPPPEIPKAVEF

SEQ ID NO: 198474 - protein, 55 aa, Glycine max
  Clone ID: PAT_MRT3847_21246C.1.pep
PLIPFHFTHRHLQGDYTQGLQLNAIHYDPRTLKIFHSLLSNDTIPQLIFIRQNIL

SEQ ID NO: 198475 - protein, 68 aa, Glycine max
  Clone ID: PAT_MRT3847_21247C.1.pep
HIRGRNAWIQYSRCPLSIPLTVKHKVRQTMLYRYGIVVNFHPCSRKSSHKPHNNSPINISPPLIKFVI

SEQ ID NO: 198476 - protein, 78 aa, Glycine max
  Clone ID: PAT_MRT3847_21248C.1.pep
LRVRLKGALKGDEGEGYTEGTSVGTSEGFPHEHGHKSGERGERRDGYGDGEKTTSIAGTADNEAYNELVNGVDTRVAT

SEQ ID NO: 198477 - protein, 151 aa, Glycine max
  unsure (1)..(151): unsure at all Xaa locations
  Clone ID: PAT_MRT3847_21249C.1.pep
HRFVVXIFRGAHSPEXMEACARWFSLAIKDQDQILFHQKLILLFNCMSERNPQLLLPHLMKTCADHGVYFKKALFVPGLSVYHKVGSHALPATDSDVDLSWQLTLQRVWENLMQGNKDMEMSASNCEHSAVFSSLPLVLKXLRDTVQQNHS

SEQ ID NO: 198478 - protein, 73 aa, Glycine max
  Clone ID: PAT_MRT3847_2124C.1.pep
TRTHACDSSRGGSRQTPLPSLYSLAQLNLCLCCSYDNTVLSPLYEDILVVAYAYVPGKIPMDHIDLKNLISDG

SEQ ID NO: 198479 - protein, 604 aa, Glycine max
  Clone ID: PAT_MRT3847_21250C.1.pep
WSAESKIIAEALNFHALFSVDFAKGDNGSSKSSSVTPYEEALDALSSLITKRTRVGDVNMEERFNVLYKYLKMLDLEEAISNMKIIHVAGTKGKGSTCTFTESILRNCGFRTGLFTSPHLIDIRERFRLDGVEISEEKFLVYFWWCYDRLKLLRGNGSQVRRQLMEKIPKSLKENTDDNVPMPTFFHFLALLAFKIFAAEQVDVSIMEVGLGGKYDATNVVPTPIVCGITSLGYDHMEILVGFTSICWILLIGNTLGEIAGEKAGIFKHRIPAFTVPQPDEAMHVLREKASQLNVPLQVVTPLDAKLLNGSRLALGGEHQYINAGLAIALCSTWLKMNGHLEDSYLKHIQHTLPEKFIKGLTTASLQGRAQIVPDQFINDEIPNELVFFLDGAHSPESMEACARWFSLAIKDQDQILFHQKLDNSNFSNQVVKMHNGETVQKKSTQILLFNCMSERNPQLLLPHLMKTCADHGVYFKKALFVPGLSVYHKVGSHALPATDSDVDLSWQLTLQRVWENLMQGNKEGKSNNSAPEELNMEMSASNCEHSAVFSSLPLVLKWLRDTVQQNQSTRFQDLTAKFVWLMHQVLVTGSIHLIGDMLKLVKK

SEQ ID NO: 198480 - protein, 493 aa, Glycine max
  unsure (1)..(493): unsure at all Xaa locations
  Clone ID: PAT_MRT3847_21251C.1.pep
MTSRMLLNTSSTATVMNILTPYEEALDALSSLITKRTRVGDVNMEERFNVLYKYLKMLDLEEAISNMKIIHVAGTKGKGSTCTFTESILRNCGFRTGLFTSPHLIDIRERFRLDGVEISEEKFLVYFWWCYDRLKEKTDDNIPMPTYFRFLALLAFKIFAAEQVDVSIMEVGLGGKYDATNVVQAPIVCGITSLGYDHMEILGNTLGEIAGEKAGIFKNRIPAFTVPQPDEAMHVLEEKASQLNVPLQVVTPLDAKLLNGSRLALGGEHQYINAGLAIALCTLPEKFIKGLTTASLQGRAQIVPDQFINDEIPNELVFFLDGAHSPESMEACARWFSLAIKDQDQILFHQKLDNSNFSNQILLFNCMSERNPQLLLPHLMKTCADHGVYFKKALFVPGLSVYHKVGSHALPATDSDVDLSWQLTLQRVWENLMQGNKGIVXSHTNYISAVFSSLPLVLKWLRDTVQQNQSTRFQVLVTGSIHLIGDMLKLVKK

SEQ ID NO: 198481 - protein, 527 aa, Glycine max
  Clone ID: PAT_MRT3847_21252C.1.pep
MAQGISFHLTYNGSSKSSSVTPYEEALDALSSLITKRTRVGDVNMEERFNVLYKYLKEAISNMKIIHVAGTKGKGSTCTFTESILRNCGFRTGLFTSPHLIDIRERFRLDGVEISEEKFLVYFWWCYDRLKENTDDNVPMPTFFHFLALLAFKIFAAEQVDVSIMEVGLGGKYDATNVLILEQADDVLIFQVPTPIVCGITSLGYDHMEILGNTLGEIAGEKAGIFKHRIPAFTVPQPDEAMHVLREKASQLNVTLGGEHQYINAGLAIALCSTWLKMNGHLEDSDSSACMKQHTLPEKFIKGLTTASLQGRAQIVPDQFINDEIPNELVFFLDGAHSPESMEACARWFSLAIKDQDQILFHQKLDNSNFSNQVVKMHNGETVQKKSTQILLFNCMSERNPQLLLPHLMKTCADHGVYFKKALFVPGLSVYHKVGSHALPATDSDVDLSWQLTLQRVWENLMQGNKEGKSNNSAPEELNMEMSASNCEHSAVFSSLPLVLKWLRDTVQQNQSTRFQVLLIHGYPGEL

SEQ ID NO: 198482 - protein, 68 aa, Glycine max
  unsure (1)..(68): unsure at all Xaa locations
  Clone ID: PAT_MRT3847_21253C.1.pep
TATKPDTGIEIAVKRLNQYGIQGHREWLAEVNYLGQLSHPHLLRXIGFCLEDEHRLVIYEFMPHGSWE

SEQ ID NO: 198483 - protein, 36 aa, Glycine max
  Clone ID: PAT_MRT3847_21254C.1.pep
PEFPYRPTLPTNPQYTIHLHFLIIQTKLPQQRSFHT

SEQ ID NO: 198484 - protein, 85 aa, Glycine max
  Clone ID: PAT_MRT3847_21255C.1.pep
QEFVVGLAMKACHVLQFFLRLSFVLSVWLLIIPFITFWIWRLAFVRSLGEAQRLFLSHLSTAVILTDCLHGFLLSASIVFIFLGA

SEQ ID NO: 198485 - protein, 48 aa, Glycine max
  Clone ID: PAT_MRT3847_21256C.1.pep
KNGDEKYDGMVGVFKEDKTLKWGKHQPVVTLSDVRASPRMCCGYKTRW

SEQ ID NO: 198486 - protein, 100 aa, Glycine max
  unsure (1)..(100): unsure at all Xaa locations
  Clone ID: PAT_MRT3847_21257C.1.pep
LLGGESXXKLNFXXFYTKSXLSXKNQXLIEXPISHLLXGTKDLDLPTKYSLSFITQXIXSFWKQHQXYWKNPPHNXIPXFMGXIIRXIXKXIFWKKRNQT

SEQ ID NO: 198487 - protein, 82 aa, Glycine max
  unsure (1)..(82): unsure at all Xaa locations
  Clone ID: PAT_MRT3847_21258C.1.pep
KNTEQLSIYIYVLQYVMVSLDLDXIYFFTIPLPQLPXACGPSSKKQVTVHSSWDSEAQMNYESNTYLILLKYLINLIDSKEN

SEQ ID NO: 198488 - protein, 72 aa, Glycine max
  Clone ID: PAT_MRT3847_21259C.1.pep
CVSCSFTHNSLLPLADCPLDPREGVVKLHPLSHHVGKSHWLCWKMTIREEFHRVAPLGSDSMCGTLGVTPHL

SEQ ID NO: 198489 - protein, 205 aa, Glycine max
  unsure (1)..(205): unsure at all Xaa locations
  Clone ID: PAT_MRT3847_2125C.1.pep
MAEFLDLESQDGVRMPWNVIPGTKQDAQNAVVPVSAVYTPIKHFTSMPLLNYSPLRCRTCRSVLNPFCIVDFAAKIWICPFCFQRNHFPPHYASISDDSLPAELFPQYTTVEYNSDAVGPTNTPSVPPVFLFVVDTCVIEEEIGFLRSALAQAVELLPENSLVGLITFGMFAHVHELGFGGVAETYXLRDLRMVPGTVARAEFFC

SEQ ID NO: 198490 - protein, 56 aa, Glycine max
  Clone ID: PAT_MRT3847_21260C.1.pep
YAYHHLCSLSSVNNLNYQVAVPPSHLFPYSSTPHALLPPPKHRDTKGMIIIKGGIK

SEQ ID NO: 198491 - protein, 251 aa, Glycine max
  unsure (1)..(251): unsure at all Xaa locations
  Clone ID: PAT_MRT3847_21261C.1.pep
MCMMEGDENIQASTKGKNVESFNSLEAPRKKSKKIENKRRFSDEQMKXLECIFESESKLGRKQQLXEAPRKKSKPRQNKRRFQNRKIRSLSSILEQESRQLKDEYDNLASRFESLKKEKDSLQLELQKLSDLVVTSQDGGREDKDGKENSIEDGGSGSGYSSWKPEAKKPRFSNDEGLEERIGVYSDDQNENSIIRGVEKSEDKGHQLLRMDDHDHADMPLASLEKWYSGVDPSGILDQSCSSSQWLDFWT

SEQ ID NO: 198492 - protein, 95 aa, Glycine max
  Clone ID: PAT_MRT3847_21262C.1.pep
PSLVIHSISSDHCPKRFLGALSPVIIKGFLQRTAPILFPTFNIAHHSNSVFFFQALAFYLNFFSEVYGHSVLSGSNVACAYSSVEALWSTFIHFS

SEQ ID NO: 198493 - protein, 47 aa, Glycine max
  Clone ID: PAT_MRT3847_21263C.1.pep
YSYFLVTSHHLFEAPNCDGSKGIEDAIRQILSRMIINRPLYTRLRLI

SEQ ID NO: 198494 - protein, 108 aa, Glycine max
  Clone ID: PAT_MRT3847_21264C.1.pep
GLMASFQNVASFEPWMLMPPVTDSWLAQLFPTNADALTRALQKTIYGAALTQDNHLTPYMHQTTITAGCPTVSSLSRSDQRISAAPTSSAYVLWEDLQDELARLEALA

SEQ ID NO: 198495 - protein, 52 aa, Glycine max
  Clone ID: PAT_MRT3847_21265C.1.pep
LGIFSFSPFFLFFVFFREQGWFFSPLVKVYGKLGFGSRLVKRLDMIYVRTRG

SEQ ID NO: 198496 - protein, 46 aa, Glycine max
  Clone ID: PAT_MRT3847_21266C.1.pep
KYLFLVLVKCFSMLLVKYVHDVLKINVRNVFFYTYFLIILLLTNIY

SEQ ID NO: 198497 - protein, 118 aa, Glycine max
  unsure (1)..(118): unsure at all Xaa locations
  Clone ID: PAT_MRT3847_21267C.1.pep
MMGKPNPNPAPEEEKSLRDELLGPILLGERVIKLAQEAESPKVDCTELARKVQVVCDNLRSVVRVVSGTQCVNERPIRRIVGEVXKNIERTLALIRKCKKHGGVLRQVFSMTTTADCP

SEQ ID NO: 198498 - protein, 95 aa, Glycine max
  Clone ID: PAT_MRT3847_21268C.1.pep
PTVISRTSGRGKTKNYETNNHLWARGTPELPFESIISRTKYISVRKRDPTIEKKKNLFRTFVTITSDNLSQPLAPVPCLSNLWEKNLGANMLSSK

SEQ ID NO: 198499 - protein, 39 aa, Glycine max
  Clone ID: PAT_MRT3847_21269C.1.pep
PGYRSRISYKIFQVLVSSKFIKCLNVTKKKCTQKKVTTN

SEQ ID NO: 198500 - protein, 114 aa, Glycine max
  Clone ID: PAT_MRT3847_2126C.1.pep
RAAENERLKVEISCLSQQVEQKEMLRNDLELMKKSLEESEARLQTQTVERNELVSEIALLKKEAERSLDELNRMKNLKDEKEMAGRVLQSELEALRAQYNDLKSSLIEDEAEKE

SEQ ID NO: 198501 - protein, 56 aa, Glycine max
  Clone ID: PAT_MRT3847_21270C.1.pep
ETNFFKSIEALVKFFYCVVNGWQKIHWNPNLLLDSRVYVSLHEFTQKNLMELTRFI

SEQ ID NO: 198502 - protein, 78 aa, Glycine max
  Clone ID: PAT_MRT3847_21271C.1.pep
GVTMPLLAFSPDSGLVGTLFRFLLVLKDGEPYSVVVLPLLLDSLPVLGLELFARVVELSQAPTFLLVFFPPCPWVWGP

SEQ ID NO: 198503 - protein, 81 aa, Glycine max
  unsure (1)..(81): unsure at all Xaa locations
  Clone ID: PAT_MRT3847_21272C.1.pep
TLSHLPFPSFXXYLHGRXCQRTYFILGRLDMDAIXTXXXXXXXLPXXTXSTXXXXXIXRXRACRXXPXIAXSXIAKMLNKX

SEQ ID NO: 198504 - protein, 69 aa, Glycine max
  Clone ID: PAT_MRT3847_21273C.1.pep
PYGNIMRVYETTSLLVESLNASWAINTWLTWGSTEARHVINVSKIMPVLQGDVHREHSIVRSLSERETC

SEQ ID NO: 198505 - protein, 80 aa, Glycine max
  unsure (1)..(80): unsure at all Xaa locations
  Clone ID: PAT_MRT3847_21274C.1.pep
PRVRSNLLPGSSSASDAPKADVASKNLRSLLCHAESLIXNFLNVHDVQLLRVFLGELQSLCTSTAFAENEVQDSRCDESL

SEQ ID NO: 198506 - protein, 51 aa, Glycine max
  unsure (1)..(51): unsure at all Xaa locations
  Clone ID: PAT_MRT3847_21275C.1.pep
LHERGRRXKNKTSLTRLSLFKPQPDRPQAQTACDFVKENTQDTEGSPPDHL

SEQ ID NO: 198507 - protein, 151 aa, Glycine max
  Clone ID: PAT_MRT3847_21276C.1.pep
REAVEVKSYFYPQIKKRGHGMYYTPSTFSQYLTQMYQYPFEGHQTNTSASEHSFGGVAETHPNFSWPTMTPSQQHDIPIPTPSAPLGTQWNVPLAIYDMNDLLGVDLRHQFSVEADQVEAERHRGRRNPDRAARRWERPCASSRHHGHHNE

SEQ ID NO: 198508 - protein, 76 aa, Glycine max
  Clone ID: PAT_MRT3847_21277C.1.pep
SELVGIVRSNDCLVEFRLERINALDPGTTILSSSDDIDRIIALSIARGIVISVHLPQRSSSFLYGLEVFRERERDI

SEQ ID NO: 198509 - protein, 68 aa, Glycine max
  unsure (1)..(68): unsure at all Xaa locations
  Clone ID: PAT_MRT3847_21278C.1.pep
XXHSXQAXVSSVFGXSAXLXCXDDXXXDXXFSCXLSCXXXXXXLYCRVYXSXGXXXCXQAXXXAXLXX

SEQ ID NO: 198510 - protein, 69 aa, Glycine max
  unsure (1)..(69): unsure at all Xaa locations
  Clone ID: PAT_MRT3847_21279C.1.pep
MATKRMLRELTDLWKDPLTYCRSGSVSEHMNHWAATKMDPPYSPCGVGVCLXAINIPPHDPCKPPKVLT

SEQ ID NO: 198511 - protein, 55 aa, Glycine max
  Clone ID: PAT_MRT3847_2127C.1.pep
ECTYVVCGRQREMAKWCMLVLVRALALAVATSSIDAPDDVGLKDYDDIHQLFLEL

SEQ ID NO: 198512 - protein, 50 aa, Glycine max
  Clone ID: PAT_MRT3847_21280C.1.pep
IWVIDYMFMVIDYSFVNQFEIQCWLLVIDYQRVKLFGKRFCENFMCYPMF

SEQ ID NO: 198513 - protein, 39 aa, Glycine max
  Clone ID: PAT_MRT3847_21281C.1.pep
SEGFVLERKIRHVSIFNEKIMKIYFNYLIYFAHACLYFF

SEQ ID NO: 198514 - protein, 90 aa, Glycine max
  Clone ID: PAT_MRT3847_21282C.1.pep
TPTRALSVITTRFFAEEARHLATALLGPRRGSKREPRRVMIAEGQVVRWNLDGTAACTGGSRGGLGVGDREDKRRNGGHDGFREKMEGIL

SEQ ID NO: 198515 - protein, 93 aa, Glycine max
  Clone ID: PAT_MRT3847_21283C.1.pep
RRIINALILLKGAHHVFFMLLITNSIHSLFEPQPTNHIILFLKRKGEGFRNDFLNTTIPLTTTPERKEEKKRAKPPPKEITPIQSLKPGVNVF

SEQ ID NO: 198516 - protein, 163 aa, Glycine max
  Clone ID: PAT_MRT3847_21284C.1.pep
LELESQQQSILQHIPAWLTNLSSDDPSAKVPRASTAPAPDSLADTASRLPRTPSRASTPRRSDRASTPVWAESTPRAASRTATLARPTPSPTSSPRARTRTPTAPVSLAARAESSTTASTTTVARPDLARTDRTAAPLEPARLVSVLVRSAPARRLVTADRRP

SEQ ID NO: 198517 - protein, 54 aa, Glycine max
  Clone ID: PAT_MRT3847_21285C.1.pep
FFGFCNIKKGQVKQHNNDVFHTFSQPMNLLSQKLLETLHMMPEYTYAEVIPQNV

SEQ ID NO: 198518 - protein, 302 aa, Glycine max
  unsure (1)..(302): unsure at all Xaa locations
  Clone ID: PAT_MRT3847_21286C.1.pep
MAFGLRTKSFGFIEGEAHEFVGALQWWNQIDDSDQWQRGTYYALCAAYTLVSFVALVQLVRIQRRVPEYGWTTQKVFHLMNFVVNGLRAVLYGIDRSVFXLYRNVFAIRPKALEQVLMEVPGLLFFSTYALLVLFWAEIYHQARSEPAQKPRPSYSCFRAVIYLIQVCPLIYMSVSRTAAGLGAAKLFLAVISFFAALGFLLYGGRLXFFLLRRFPIESRGRQKKLYEVGSVTSICCTCFLIRCALLAFSAFDENADLDVLDHPILNLVYYLLVEIVPSALVLFILRKLPPRRVSDQYHPIR

SEQ ID NO: 198519 - protein, 92 aa, Glycine max
  Clone ID: PAT_MRT3847_21287C.1.pep
LDSGIMTKIKQASMILVKMYMKRVTMELGSARNSDRSSQESLLLQGMHFAYRAHQFAGGLDAETLCAFEEIRQHVPGHLAGSRELLAGIASS

SEQ ID NO: 198520 - protein, 41 aa, Glycine max
  Clone ID: PAT_MRT3847_21288C.1.pep
MVGFVDVAALVKTVFRWACGHRKKCDTPSLAGHTIRSHGIT

SEQ ID NO: 198521 - protein, 90 aa, Glycine max
  Clone ID: PAT_MRT3847_21289C.1.pep
MPCLQIKQASMTLVKMYMKRVTMELGSARNSDRQSSQESLLLQGMHFAYRAHQFAGGLDAETLCAFEEIRQHVPAHLAGSRELLAGIASS

SEQ ID NO: 198522 - protein, 22 aa, Glycine max
  Clone ID: PAT_MRT3847_2128C.1.pep
YEAVKWWLQKDALIEVRPLWTS

SEQ ID NO: 198523 - protein, 58 aa, Glycine max
  unsure (1)..(58): unsure at all Xaa locations
  Clone ID: PAT_MRT3847_21290C.1.pep
YVMSDACGKTSAFHMTTSRTMTTLMPSXTPATLRAYLTHDNANIAIGSDDRWILSIPL

SEQ ID NO: 198524 - protein, 70 aa, Glycine max
  Clone ID: PAT_MRT3847_21291C.1.pep
KSVSKKKKKKKKKKKKKKKKKKKKKNFFVGKFFFGLGGAGGLETNVINFPNLVYGPSKVPLPVTPRNLDL

SEQ ID NO: 198525 - protein, 41 aa, Glycine max
  Clone ID: PAT_MRT3847_21292C.1.pep
EMEQILIHGTLHATVFTVDRLNAGCGGAIFLASSSITLRRL

SEQ ID NO: 198526 - protein, 39 aa, Glycine max
  Clone ID: PAT_MRT3847_21293C.1.pep
MTAINLTIQGGKYTNHTLPSYFSNNIKINRLLTSHFSFI

SEQ ID NO: 198527 - protein, 44 aa, Glycine max
  Clone ID: PAT_MRT3847_21294C.1.pep
CGYNVRGVALLGSVNDGVHSRFVAMVLMVTHVHSYVYVISSSRF

SEQ ID NO: 198528 - protein, 104 aa, Glycine max
  Clone ID: PAT_MRT3847_21295C.1.pep
LSLARETVDLEAYSPPRELLQILPPKSSIRGSDCGSQIGPNNPKFASGMQALLDLIFAVEGSVSEAAKYLGLSTGALSRLILSDDSLRKEVNDLRATKGMKPLK

SEQ ID NO: 198529 - protein, 146 aa, Glycine max
  unsure (1)..(146): unsure at all Xaa locations
  Clone ID: PAT_MRT3847_21296C.1.pep
TRTVRFGIRVEHSPTYGFLIDLIPPNIWSGHREANTMDRLKHNLTTXLADLYTDIPTAIECESAXMQFNTQKMAQTIGRLAEKTPHVGXTDRGWLVKKGSTYQIMAPDDLHVCSQLXAANVTEIITGPYSGAYNYIQHTLKRIYDS

SEQ ID NO: 198530 - protein, 103 aa, Glycine max
  Clone ID: PAT_MRT3847_21297C.1.pep
GVQHYIIKNGTCIPYKLTVAYMLLNLTHHHLCHCFKSNEPQKYLQMKNLAPFQPTYILLILHISKLSHYTHPIPNLKRKKNQLRDQAAKQTADPFKNFNKQNF

SEQ ID NO: 198531 - protein, 90 aa, Glycine max
  Clone ID: PAT_MRT3847_21298C.1.pep
SQVTCGATLWSRTFCQPEASEHIDMRGTIWSHTFFTFCHPEAAGPMTCEGTIWSRIFFFTIQRQSSPEPRELIAQRCSSILHHQVRSPMN

SEQ ID NO: 198532 - protein, 218 aa, Glycine max
  unsure (1)..(218): unsure at all Xaa locations
  Clone ID: PAT_MRT3847_21299C.1.pep
QYTFPEXFFYKPNLWWQNGMGKQSLYNVVISIDVKGFGESDSWNHHFGFRKIESHIDVATGGRLFKVNGEPIFIRGGNWILSDGLLRLSKKRYETDIKFHADMNFNMIRCWGGGLAERPEFYRCCDYYGLLVWQEFWITGDVDGRGIPVSNPNGPLDHDLFLFCARDTVKLLRNHPSLALWVGGNEQTPPDDLNVALKNDLKLHPYFGHAKRRKIANL

SEQ ID NO: 198533 - protein, 128 aa, Glycine max
  unsure (1)..(128): unsure at all Xaa locations
  Clone ID: PAT_MRT3847_2129C.1.pep
LLCSFTTSYLPSSITYLILHNKNNPLENAATYYILSDITSFDGIRSTPTLNXICPLTVIQSLNELYKWIATIISSPYRIRFIAECHPLSLKFDSFPLIMLSVGIPTXWSLLEDLPQRPLLCFKKNFCF

SEQ ID NO: 198534 - protein, 68 aa, Glycine max
  Clone ID: PAT_MRT3847_212C.1.pep
SPWEIPIRHFQGIRRQKCSDWNGNDLIPNSPYHEAKANVMGLPRGIPIPHFRAIRRHGCSYMNWNYWS

SEQ ID NO: 198535 - protein, 124 aa, Glycine max
  Clone ID: PAT_MRT3847_21300C.1.pep
MQIFVKTLTGKTITLDVEPSDSIENVKAKIQDKEGIPPDQQRLIFAGKQLEDGRTLSDYNIQKESTLHLVLRLRGGMQIFVKTLTGKTITLDVEPSDSIENVKAKIQDKEGIPPDQQRLIFAGK

SEQ ID NO: 198536 - protein, 51 aa, Glycine max
  Clone ID: PAT_MRT3847_21301C.1.pep
WLACLIGYDYGIFIYSIDVSEICCFYRIKSQSSWGLKTIYISRDLLLNVFV

SEQ ID NO: 198537 - protein, 75 aa, Glycine max
  unsure (1)..(75): unsure at all Xaa locations
  Clone ID: PAT_MRT3847_21302C.1.pep
FGQPFXTKLRMKRGKSPLLGRSLRFGKNLRTKVKNCFGKSTFGGGPVGKLVKKRFRKNYYPVWGRSFIPGSTLLV

SEQ ID NO: 198538 - protein, 440 aa, Glycine max
  Clone ID: PAT_MRT3847_21303C.1.pep
MQENYSYQSYPDSGESSPRSREIDFDNPPPWDDQNYKAKFMCSYGGKILPRSHDNQLSYVAGETKILAVDRSIKFSAMLAKLSALCDAPDNNNLTFKYQLPGEDLDALISVTNDDDLDHMMHEYDRLYRASARPSRMRLFLFPSDTLPSPPPAASAPHDSVIKPNNVDFLFGLQPQPPPIDVKFNDPLPEPVAPPPEHPLRFNFNPAVSDPSAIQRQLQQLQIAENEQAAHRRKGEDNYPAGDYYVQKVPEKFPPPNFLASSPGYWPEKHVSGDVYPPAVTATSGGGEPSVYMVPAPGTFYHAPVMRPPPPATQGYYTVQRMGSDNYREAPVYGGVPPPKAAVPASMAPAQQPIKAPAYTEGFGMVRPGGIVDNTGVPYAQVAYDSGSGRQVYYTAPGGGVTHAPPYHGVFPPVTADMRLGGVSFGQDVKVISKLTQGSV

SEQ ID NO: 198539 - protein, 334 aa, Glycine max
  Clone ID: PAT_MRT3847_21304C.1.pep
MLQEENESEIITSLKKKLEVHMARNELLLKENQELREEVVRLKSQIISLKAHNMERKSVLWKKIQKSIDDNNNSEAHQQHKAPPVQVITGEKSSQYENVHTNPNFKDTTPKKDKPAAIVTPAPPPRPSPTLLLPLHKKEKGLKVQQAIAPPPPPTPPKLSSVGLKTLRRVPEVIELYRSLTQKDANMENRIHSNGIPTVAFTRNMIEEIENRSTYLSAIKSEVQRQGEFISFLIKEVESTSFADVSEVESFVKWLDGELSSLVDERSVLKHFPQWPEQKVDALREAACNYRDLKNLESEVSSYDDNPKEPLVQTLRKIQALQDRLERSVSAKRG

SEQ ID NO: 198540 - protein, 42 aa, Glycine max
  Clone ID: PAT_MRT3847_21305C.1.pep
YDQRRPYSWFIYLAHSAYIRNKRFFYLGFHDCVSLNLNCVSL

SEQ ID NO: 198541 - protein, 205 aa, Glycine max
  Clone ID: PAT_MRT3847_21306C.1.pep
MWTSECSMFRRLLCTSLPRLSKPQSSSSLTILNSSLTQKQKQKPLSPQTIKSFSSSKMGDARRPLFVPIPTLEKAERSDLLRALEASMGSPFSSEPLSPNPNPLIIVISGPSGVGKDTLIARLRDSRRALHFVVTGTTRPRRPAEVDGKDYIFVSKEEFLGMVEREELLQYALVYGDYEAVRVEALSEFLVEAGTAHRRTRRRRR

SEQ ID NO: 198542 - protein, 92 aa, Glycine max
  Clone ID: PAT_MRT3847_21307C.1.pep
YTSYNGKWGPPPVALGKFWLYPQVHQGVRKTFSPLFPSGNKKFLAPQAKEFSFFWQKNLVKFRGETLLQNGNRPLSRLGFFLGKKCPPFCFP

SEQ ID NO: 198543 - protein, 41 aa, Glycine max
  Clone ID: PAT_MRT3847_21308C.1.pep
VEDSHSCQQCVRRIRLLLYPPPNEQLNAARKIPSAGNIYRT

SEQ ID NO: 198544 - protein, 276 aa, Glycine max
  Clone ID: PAT_MRT3847_21309C.1.pep
MDVSYSCNEQQAPEIVFFDLETTVPKKGGERFWVLEFGAIVVTPHKLTEIESYTTLIRPKDLSVVSVKSSRSDGITRKAVENAPSFEDVADRIFSILNGRVWAGHNIQRFDCVRIKEAFDDINRPAPVPVGIIDSLGVLTEKFGRRAGNMKMATLASYFGLGQQKHRSLDDVRMNLEVLKHCATVLFLESSLPNMLHSKSHGSPSVMTRSRSNGKSPCKEETSRKSPPATLGYQRTVPYARGSLGKVTESVKGLLCKAQGQPPLQQLLKHSHSLLR

SEQ ID NO: 198545 - protein, 543 aa, Glycine max
  Clone ID: PAT_MRT3847_2130C.1.pep
MAALLPCAPNIVYGPLLGNRSTSHLPHRPHSHAFSGSTTRHFLRGSLTVARFGFKPDFLPEPDEAEGVLRELFGRAEGLLYTIADAAVSSSSSSSSDTVAASYAAKQSNDWLSGIANYMETVLKVLKDGLSALHVPYAYGFAIILLTVLVKAATFPLTKKQVESSLAMRTLQPQVKAIQQRYAGDQERIQLETARLYKLANINPLAGCLPTLATIPVWIGLYRALSSVADEGLLTEGFFWIPSLAGPTTVAARQNGSGISWLFPFVDGHPPLGWSDTLAYLVLPVLLVVSQYISVQIMQSSQPNDPNMKSLEPNRLERLEMIGYFALSVPSGLSLYWLTNNILSTAQQVWLQKLGGAKNPVRQVPDDIMKNDLTQVQKSMSKLNSTTAEEARLSEKTSEGPQPGERFKLIKEQEARRKQQREEEEEKRKALEAAARETKVDKTLEETVEVENQTGGDLVVEKSRSLASDTDPSISGVVNGNPLSKDLEGNQNSTSTSETENNEGSAHFNNVEINEKILDKEPREVLTTTTTTNKQPPAEETKD

SEQ ID NO: 198546 - protein, 74 aa, Glycine max
  Clone ID: PAT_MRT3847_21310C.1.pep
PRLGKKKLIFSNQSNGFLTSYPFIDTLLTPDIYFCLCHNLSPFIISIWALFARPHKGFNGILERETHNTDWGLA

SEQ ID NO: 198547 - protein, 80 aa, Glycine max
  Clone ID: PAT_MRT3847_21311C.1.pep
NNHTTITAGARGPQQQEEHQPVEKHANIDRERIPERVDHAKGARAKGIQEVTHDISHLTSAEKQRAPEEQTPEKEQTPTD

SEQ ID NO: 198548 - protein, 228 aa, Glycine max
  Clone ID: PAT_MRT3847_21312C.1.pep
MDIGGEVEETVRELRQYFKTGKTKSVTWRKNQLTALLDLVHENEDAIFKALHQDLGKHPVEAYRDEVGGVEKSASNALSCVEKWMAPKKSDIPFLFFPAKGEVLSEPLGVVLIFSSWNFPIILTLDPIIGAISAGNVVVIKPSEQSPASSSFLATTIPRYLDSNAIKVIEGGPDVCEQLLLQKWDKIFFTGSPRVASVVMSAAAKNLTPVTLELGGKCPAILDSLPNP

SEQ ID NO: 198549 - protein, 99 aa, Glycine max
  Clone ID: PAT_MRT3847_21313C.1.pep
ENVACAALNPISERPWPWLQPSLETQFGGDSDPLGPAEFAASNQCDNQFNVGDIVQLQKTRPISKTKAFLALPVPKRSSNRPEPQPDELSIPFESQPQA

SEQ ID NO: 198550 - protein, 141 aa, Glycine max
  Clone ID: PAT_MRT3847_21314C.1.pep
MWLVQLSTPFLNGHGHSTTLLSKHSSAVTQTHWAPPSFLPQINAMKTMQGRVVCSTSDKTVAVEVVRLAPHPKYKRRVRKKKKYQAHDPDNQFKVGDIVQLQKTRPISKTKAFLALPVPKRPSSRPEAQPEELSIPFESQP

SEQ ID NO: 198551 - protein, 501 aa, Glycine max
  unsure (1)..(501): unsure at all Xaa locations
  Clone ID: PAT_MRT3847_21315C.1.pep
MARKMLIDGEAELAQGGGEEVSNFDFDLFIIGAGSGGVRAARFSSNFGAKVGICELPFHPISSETIGGVGGTCVIRGCVPKKILVYGASFGGDLEDARNYGWELSEKVDFNWKKLLQKKTDEINRLNGLYKRMLSNWGVKLFEGEGXIVGPNDSEVTQLDGTKLSYTAKHILIATGSRAQRPNIPGQELGITSDEALSLEDLPKHAVVLGGGYIAVEFASIWRGMGSTVDLVFRKELPLRGFDDEMRAAVARNLEGRGINLHPRTNLTQLIKTEDGIKVITDHGEELIADAVLFATGRAPNSKRLNLETVGVELDNTGAIKVDEYSRTSIPSIWAVGDVTNRMNLTPVALMEASYFAKTVFGGQTIKPDYSNIPYAVFSIPPLSVVGLSEEQAIEQTNGDLLVFTSTFNPMKNTISGRQEKTVMKLVVDAETDKVLGASMCGPDAPEIMQGIAVALKCGATKAQFDSTVGIHPSAAEEFVTMRSVTRRVAGTGSVKPKTNL

SEQ ID NO: 198552 - protein, 143 aa, Glycine max
  Clone ID: PAT_MRT3847_21316C.1.pep
MWLVQLSTPFLNGHGHGSSLLWKPSSAVTQTHWAPPSLLPQINAMKTMQGKVVCSTNDKTVAVEVVRLAPHPKYKRRVRKKKKYQAHDPDNQFNVGDIVQLQKTRPISKTKAFLALPVPKRSSNRPEPQPDELSIPFESQPQA

SEQ ID NO: 198553 - protein, 146 aa, Glycine max
  unsure (1)..(146): unsure at all Xaa locations
  Clone ID: PAT_MRT3847_21317C.1.pep
PSPPPPPYVYKSPPPPPYVYPSPPPPPPYVYKSPPPPPYVYSSPPPPPYVYKSPPPPPYVYPSPPPPPPYVYKSPPPPPYVYASPPPPPYVYKPPYYYTSPPPPYVYKSPPPPPSYDYKSPPPPPPYYXKSPLPPSLWPPPAYAYK

SEQ ID NO: 198554 - protein, 75 aa, Glycine max
  Clone ID: PAT_MRT3847_21318C.1.pep
GKGENIGFRWKYAEAMNKRCVDKIVKKVTFSKPSEKSMLLLLWWWWWWWKQDFDGRNTVLKISINGIVLVLMQKC

SEQ ID NO: 198555 - protein, 67 aa, Glycine max
  unsure (1)..(67): unsure at all Xaa locations
  Clone ID: PAT_MRT3847_21319C.1.pep
XDEFXEVXNXSTNXDMENMXSETYDLGXXXXFNVLXNEFEXLXMFSEAXXHSVQDDPXTGKGXPXXX

SEQ ID NO: 198556 - protein, 117 aa, Glycine max
  Clone ID: PAT_MRT3847_2131C.1.pep
PSFPRPIFCQLGPFFFGPPLILLGVYFFPRSRSLPGVFSPQVRSPLPPRLFPGVCSSGAFLAPCPAVFLLFPPLPVVSLVLLSFLVCFVFSPPLWGFFPYFSRPFVFYFLSNNQYRR

SEQ ID NO: 198557 - protein, 145 aa, Glycine max
  Clone ID: PAT_MRT3847_21320C.1.pep
GEKKTFPQKKKKKGGPEKKKKNQKGTKNPPTKKKAPKEKGGKPRGPPPFFPQAKRVRGKAGQKKGPNPPGKKKPKPGGGRPPKRGGEKKKTQNFMGPFPIPKGKSPLSPLGGKPPQKKAAPPPEKGGKNKSGRREPPFRAQIFTG

SEQ ID NO: 198558 - protein, 51 aa, Glycine max
  unsure (1)..(51): unsure at all Xaa locations
  Clone ID: PAT_MRT3847_21321C.1.pep
RRFFFFFFFFXGIFSNPSEFIKVCINIVLFQLNYHKFSHHIFIHMLKTLFH

SEQ ID NO: 198559 - protein, 61 aa, Glycine max
  Clone ID: PAT_MRT3847_21322C.1.pep
CEIYGSLCRSRSHKDPELKIGDELLKTDLLTHKYIMYYRYRNVINPFDNSHISMRGTAIPV

SEQ ID NO: 198560 - protein, 96 aa, Glycine max
  unsure (1)..(96): unsure at all Xaa locations
  Clone ID: PAT_MRT3847_21323C.1.pep
MARNYFKQEHDLEKRRAEAARIREKYPDRIPVIVEKAEXSDIPSIDKKKYLVPADLTVGQFVYGDRNRIRLRAEXAIFISVHNDLPPTVSHHPCLI

SEQ ID NO: 198561 - protein, 51 aa, Glycine max
  Clone ID: PAT_MRT3847_21324C.1.pep
CHLLPLNQMKLFFPIKIPVGWFQPKEKENLHFNSLTKPLLLMRLKLPPTLL

SEQ ID NO: 198562 - protein, 123 aa, Glycine max
  Clone ID: PAT_MRT3847_21325C.1.pep
IKKTENSFFRLYWLSTFPRRDFLSCFSLSPIKCQIELNHTYPHVHFAFPLELGQMRSHFAENPVKTLAPLTPKAAELREIHHKSSQPWKKPLSFTLKKTNCLWRNIRKRRLKTPAHLKGSEDF

SEQ ID NO: 198563 - protein, 171 aa, Glycine max
  Clone ID: PAT_MRT3847_21326C.1.pep
MPRASGSACADVAFSPPGESSDIETNYGSKISVKATAGPVLGPPWQRPENGYIVTSPQGQLSLYYEPHCVYNQSFTEKERADIVITPVIKQLLPNFTLVSGQEDAVKLAKLLQAKFIVPMKNGDLDSKGLLASLISGEGTVESFKELLLKELPDAKVVEPTPGVPVEISAN

SEQ ID NO: 198564 - protein, 101 aa, Glycine max
  Clone ID: PAT_MRT3847_21327C.1.pep
MIFNYFVFRPHTRWWQKSNYVLSHALDAGTPFMGVLIFFPPQNAAHNLKWWGSELAHCPLATCPPAPGIEVEACPVLKYQDPITIMGLAFSFFFVCPGGPS

SEQ ID NO: 198565 - protein, 69 aa, Glycine max
  Clone ID: PAT_MRT3847_21328C.1.pep
SCSINIVHMLTQATSFLPNTMHEPGIKDQDKPVGASLFPKRKQIRAVSTEDTIKPTDQGTASQVFTPGP

SEQ ID NO: 198566 - protein, 46 aa, Glycine max
  Clone ID: PAT_MRT3847_21329C.1.pep
GHNLTHFQVQISELFVSAQLPRCSYSIKLNMLQGKDYNECMAVVCN

SEQ ID NO: 198567 - protein, 63 aa, Glycine max
  unsure (1)..(63): unsure at all Xaa locations
  Clone ID: PAT_MRT3847_2132C.1.pep
LRNSSIXIXQXVALFHLGXXXXLSIQXYXVSSXXXLXXRSXTXCCXSXNLEPNSELTYACXRL

SEQ ID NO: 198568 - protein, 59 aa, Glycine max
  unsure (1)..(59): unsure at all Xaa locations
  Clone ID: PAT_MRT3847_21330C.1.pep
CVACLVPISVFLDIAXSVTLVCLGFCFSNFESQMRSETDARKTTPSNSNGNRALIIVIS

SEQ ID NO: 198569 - protein, 115 aa, Glycine max
  Clone ID: PAT_MRT3847_21331C.1.pep
YSYGVVLLELLTGRRVVDKSRSNEGKSLVEWARPLLRDQKKVYNIIDRRLEGQFPMKGAMKVAMLAFKCLSHHPNARPTMSDVIKVLEPLQDYDDVFIGPFVYVAVSETGDKHKI

SEQ ID NO: 198570 - protein, 42 aa, Glycine max
  Clone ID: PAT_MRT3847_21332C.1.pep
GTLRVQVHANCRLRRIYFSDRLYSEEEVPPEFKLYLPMQIRL

SEQ ID NO: 198571 - protein, 49 aa, Glycine max
  Clone ID: PAT_MRT3847_21333C.1.pep
SFQIVEWDLMFGLFKGSKGDDWEGHIQLRKFTQGGPKRRVGYFIIKKFF

SEQ ID NO: 198572 - protein, 59 aa, Glycine max
  Clone ID: PAT_MRT3847_21334C.1.pep
IQTYRLSLSYCPLYSLSCTTNNITKTLTDALMSIRQHTSYYTQVSKATFAETKAGFLLI

SEQ ID NO: 198573 - protein, 74 aa, Glycine max
  Clone ID: PAT_MRT3847_21335C.1.pep
LEPLEPGLTIMMRMRILVRRLHRERKRVDNGLCVLVKALGCSELILSLSLALYDHRAPHIILEETLASCLFYDN

SEQ ID NO: 198574 - protein, 48 aa, Glycine max
  Clone ID: PAT_MRT3847_21336C.1.pep
SYTLNYTHYLIFNHHWPPSLHFFLHCLHYYPVEAMIHASISFVSYQCN

SEQ ID NO: 198575 - protein, 40 aa, Glycine max
  Clone ID: PAT_MRT3847_21337C.1.pep
MPHASSIRKSLHISIEAPQVMRSYPRNLPCLIKSPYFFKK

SEQ ID NO: 198576 - protein, 54 aa, Glycine max
  Clone ID: PAT_MRT3847_21338C.1.pep
YIYIYIYIYIYIYIHIYIYIYIYIYIYIYIYIITYLKLDLMNLNVSSQMLHLIS

SEQ ID NO: 198577 - protein, 67 aa, Glycine max
  unsure (1)..(67): unsure at all Xaa locations
  Clone ID: PAT_MRT3847_21339C.1.pep
AAFYEGTTCIGSXGVILEFCDDQSLPGCTRSLEIARMEEKSKIGNPVKIKVKPHNQHVSDSPELACC

SEQ ID NO: 198578 - protein, 107 aa, Glycine max
  unsure (1)..(107): unsure at all Xaa locations
  Clone ID: PAT_MRT3847_2133C.1.pep
YNIHIFDKTLTYMTMSLDVKGSGNIDNXVRSISMTRNETSWPSSMSFFTEKQLHDHRTLDDYNIHMESTLQLVLCLCGGIQLLGWTITNXTIHLEDERSDTIDSVKG

SEQ ID NO: 198579 - protein, 40 aa, Glycine max
  Clone ID: PAT_MRT3847_21340C.1.pep
SPIPILKSPTLSPHLQFNILLIQYSIKPFTDLLYSPYPTI

SEQ ID NO: 198580 - protein, 160 aa, Glycine max
  Clone ID: PAT_MRT3847_21341C.1.pep
RLNTGPPTRPPTRPAPHIEYLVRTNQIPRERPQQKYPSWLLVLGAGTLPFGTLFIELFFIMSSIWMGRVYYVFGFLFAVLILLVAVCAEVSLVLTYMHLCVEDWKWWWKSFFACGSVAIYIFLYSVNYLVFDLKSVSSPVSATLYLGYSLFMVLAIMLST

SEQ ID NO: 198581 - protein, 140 aa, Glycine max
  Clone ID: PAT_MRT3847_21342C.1.pep
MSWSGGDWMCGACQHINFKKRDACQSCAYPKFGGPDPTTYRYNSTETLAGDWYCTAMNCGAHNFASRSSCFRCGALKDGYSCRFGGNMDGSGGYGSDCNYPPGWKTGDWICTRIGCGVHNYANRTECFKCKTPRNFGDAD

SEQ ID NO: 198582 - protein, 217 aa, Glycine max
  Clone ID: PAT_MRT3847_21343C.1.pep
SNSTGAIPFSLFVILILLWFCISVPLTIVGGYFGAKAPHIEYPVRTNQIPREIPQQKYPSWLLVLGAGTLPFGTLFIELFFIMSSIWMGRVYYVFGFLFVVLILLVVVCAEVSLVLTYMHLCVEDSLFLTNMHLCVEDWRWWWKSFFASGSVAIYIFLYSVNYLVFDLKSLSGPVSATLYLGYSLFMVLAIMLSTGTIGFLSSFWFVHYLFSSVKLD

SEQ ID NO: 198583 - protein, 103 aa, Glycine max
  Clone ID: PAT_MRT3847_21344C.1.pep
LEKGGCLEMFLGSSPQWVSPKMMPGFKKILAGLFLTKLGGPKSLLKPTDWLPEGQILGGMPWTMLYQRGEILPGIKKWLYIRVAPRGSSIPFSIREQILLAGL

SEQ ID NO: 198584 - protein, 41 aa, Glycine max
  Clone ID: PAT_MRT3847_21345C.1.pep
IYFYSPLSLLFWLCVGRWPGGQVNVLILTDFLSCHLGFWFP

SEQ ID NO: 198585 - protein, 131 aa, Glycine max
  unsure (1)..(131): unsure at all Xaa locations
  Clone ID: PAT_MRT3847_21346C.1.pep
NSARVEGELNPDGTXVNQWRLVSIQQVEEVKCLARIIPIWAAGILSLISMTQQGTFTVSQAMKMFRGTTQACFTAQQQWLLSHASPTTITPSLPTPIIIMPSLHRTSLPQTWPHGFWAPEEELGRTASPLE

SEQ ID NO: 198586 - protein, 261 aa, Glycine max
  Clone ID: PAT_MRT3847_21347C.1.pep
MDQLSAISEDLAEIDGHIADNFRALSNGFQKLEKIKDSNRQSRQLEDLTEKLRECKRLIKEFDKEVKTLENSFDRETNKMLNEKKQSMIKELNSYVGLKKQYATNIENKRIELFEGPNEGYAEENGLLASSMTNEQLMDHGNRMMDEAGLCIARGKKVVQDTINVGTDTAAALKAQTEQMSRVVNELDSIHFSMKKASKLVKEIGRQVATDKCIMALLFLIVIGVIAIIIVKLVHPDNKDIRDIPGLAPPVQNRRLLWSHN

SEQ ID NO: 198587 - protein, 72 aa, Glycine max
  Clone ID: PAT_MRT3847_21348C.1.pep
EIIKKRKIKERVIFFSWDQKKSALLDCLARHYQTVGSCWCSLDNLKMMVLVSLKLAPIYFFLEKYADPLKFV

SEQ ID NO: 198588 - protein, 141 aa, Glycine max
  Clone ID: PAT_MRT3847_21349C.1.pep
LLWLQQGEPVIKSYHLHHFLFSPLIPQKYASVEDHDYDTTTEAYRVWEEKTISLLRWLQSTISGDMLPCVIGCKSSWQLWDCLQSHFQSLTRPRVRQLRNELQWLSLGNRSIIDYLLYVQNHVNELTLIGESMASSSKSDS

SEQ ID NO: 198589 - protein, 77 aa, Glycine max
  Clone ID: PAT_MRT3847_2134C.1.pep
IALRLGNHGYFILCRKVSSIFKSELLLLAYHWGSVLRGRSISTAMNFHLHPFKHHHIPEKLARWPILVGGILLTNLL

SEQ ID NO: 198590 - protein, 85 aa, Glycine max
  Clone ID: PAT_MRT3847_21350C.1.pep
MADQLTDEQISEFKEAFSLFDKDGDGLFSQIPFLSLFLSYFIRSHSSLVFLYYPFDYFVKFLIFFPLGAFSFHFLLLDVCGCMYE

SEQ ID NO: 198591 - protein, 637 aa, Glycine max
  Clone ID: PAT_MRT3847_21351C.1.pep
LNHAHQVNSKGLVGVGKRIVHVESLLQLEAADVRIIGIWGIGGIGKTTIAQEVYNKLCFEYEGCCFLANIREESGRHGIISLKKNLFSTLLGEEYLKIDTPNGLPQYVERRLHRMKVLIILDDVNDSEQLETLARTDWFGPGSRIIVTTRDRQVLANEFANIYEVEPLNFDESLWLFNLNVFKQKHPEIEYYELSKKVVDYAKGIPFVLKLLGHRLHGKEKEIWESQLEGQNVQTKKVHDIIKLSYNDLDQDEKKILMDIACFFYGLRLEVKRIKLLLKDHDYSVASGLERLKDKALISISKENMVSMHDIIKETAWQIAPQESIEDPRSQIRLFDPDDVYQVLKYNKGNEAIRSIVVNLLRMKQLRLNPQVFTKMNKLHFLNFYSVWSSSTFLQDPWGLYLSQGLESLPNELRYLRWTHYPLESLPSKFSAENLVELHLPYSRVKKLWLKVPDLVNLKVLKLHSSAHVKELPDLSTATNLEIIGLRFCVGLTRVHPSVFSLKKLEKLDLGGCTSLTSLRSNIHMQSLRYLSLHGCLELKDFSVISKNLVKLNLELTSIKQLPLSIGSQSMLKMLRLAYTYIETLPTSIKHLTRLRHLDLRYCAGLRTLPELPPSLETLDVRECVSLETVMFPSIPQ

SEQ ID NO: 198592 - protein, 116 aa, Glycine max
  unsure (1)..(116): unsure at all Xaa locations
  Clone ID: PAT_MRT3847_21352C.1.pep
IIDKRITPRFIRYVRWDLCLGIFRVVLGAVAMMSFAAAVFAGQPEFGNYTDALGTVVGLEKYAGRLPAILFALALLEASIIXGAVVVSFGTAFAIGDVFSFKPSLLCRPKDAKGFI

SEQ ID NO: 198593 - protein, 74 aa, Glycine max
  Clone ID: PAT_MRT3847_21353C.1.pep
KKRGQKLNTLFMVVNAALWLVQWDVDIGSPRNRCGGNGQHCILKRNILVFKFAILFSCVKQRGVFSKFGGTFKG

SEQ ID NO: 198594 - protein, 88 aa, Glycine max
  Clone ID: PAT_MRT3847_21354C.1.pep
YEWLYKNFTFYKELKLSLHFEGFIIKYRQYIKRLIKLEQTCAPLFLDFLTTCTLAAKTVFEHFTIIFYILRNFLTNPDPETGKLNWNP

SEQ ID NO: 198595 - protein, 199 aa, Glycine max
  Clone ID: PAT_MRT3847_21355C.1.pep
MSNEVRSLHVFFIPFLAHGHIIPTIDMAKLFAGKGLKTTIITTPLNVPFISKAIGKAESESNDNNVIHIETIEFPYAEAGLPKGCENTNSITSMHLYPAFFKALGLLQHPFEQLLLQQHPNCVVADVMFPWATNSSAKFGVPSLVYDGTSFFSICANECTRLYEPYKNVSSDSEPFVIPNLPGEITMTRMQVSPHVMSN

SEQ ID NO: 198596 - protein, 40 aa, Glycine max
  Clone ID: PAT_MRT3847_21356C.1.pep
RFVAFPIALCLSAKKPFASQLTPSLMVVQCCSLSVKCAYK

SEQ ID NO: 198597 - protein, 158 aa, Glycine max
  Clone ID: PAT_MRT3847_21357C.1.pep
EKCILHYKEQEKNLEDQITENLSLLTAAESKLSEAKKQYDQMVENKQLELSRHLKEISQRNDQAINDIKRKYELEKMEIVNKEKEKADKAIAEIEGKCGQKIEECKEEQRQQLMRIQDEHTLLVTQMKQEHDKRQASLIAEHNEQLKRTQLQAENELR

SEQ ID NO: 198598 - protein, 463 aa, Glycine max
  Clone ID: PAT_MRT3847_21358C.1.pep
YVFLTHDGTHRFKIVEHGGWPTWVDDRTLYFHRRGQDHWWSIYRAILPSNAPFSVDSVFVERVTPPGLHAFTPATSPGNNNFIAVATRRPGSNFRHIELFDLASNEFTELTRLVSPNSHHLNPFISPDSTRVGYHKCRGEPNAHSTPQFFLENVRSPVPGLTLFRFVGSFPVFSPSGDRIAYVEMPGVYVVNRDGSNLRKVSNAMAFSTAWDRVRPGVIYTAIGETFAPESSQVDIVSIDVDHENSVKRLTLDGKNNAFPSPSPDGKWIVFRSGRSGHKNLYIMDAVDGEKKELRRLTEGPWTDTMCNWSPDGEWIAFASDRHDPGSGSFEIYLIHPNGTGLRKLIQSGSGGRTNHPYFSPDGKSLTFTSDYAGISAEPISNPHHYQPYGEIFTVRLDGSGIKRLTHNSYEDGTPAWSPKYMPPVNVPKGGPYCSFDDCHWLNNMPISTAFGVSKAKPQCAAL

SEQ ID NO: 198599 - protein, 50 aa, Glycine max
  unsure (1)..(50): unsure at all Xaa locations
  Clone ID: PAT_MRT3847_21359C.1.pep
LRELVKPEPQRVEIDDHTMQIXETQYPKTCCYKEDLHTSKTMKVQFIKPP

SEQ ID NO: 198600 - protein, 101 aa, Glycine max
  Clone ID: PAT_MRT3847_2135C.1.pep
SIRLVMFARQIFRPARTLHQQDLRYASEPPKSGGNNGVLYTCIGAAGLAGSYLYMMGGEALFGLKGNAPSLEESKKIPASTDGSVKNAFTVCDQGFGSFVL

SEQ ID NO: 198601 - protein, 100 aa, Glycine max
  Clone ID: PAT_MRT3847_21360C.1.pep
IFCPCWALVPGCGLLWSFGLFGPVSCLGSGRRPCPCPFRLVPPGSFPFVFFSVLLVSACVSCPVSVSVLALPRSAVLCPSFRVLWLLVFLFLLLRSITWA

SEQ ID NO: 198602 - protein, 133 aa, Glycine max
  unsure (1)..(133): unsure at all Xaa locations
  Clone ID: PAT_MRT3847_21361C.1.pep
NSARWIEQDVELTHGHMRVLRLDIVNMSXEQLLALKERMGTVSTALTEETLSECVKKSVYQSSPSDKEAERCKEHKDDTTRPILQEEYVAAEEVGSLQCEHMYHVACIQQWLQLKNWCPICKASVAQSNSSPS

SEQ ID NO: 198603 - protein, 38 aa, Glycine max
  Clone ID: PAT_MRT3847_21362C.1.pep
KGPLKIKLRGFTWNTPRAVQGKQTGPFWQGLIETPPSG

SEQ ID NO: 198604 - protein, 206 aa, Glycine max
  Clone ID: PAT_MRT3847_21363C.1.pep
MKLPSLLHNKPSSSSWPCHQPRTLSFRTQNDAAFKTINAAYLDTLESSETSFFTVSPDSGSFSTASEQDSRRPHSLDSVIRGLRSDRLFFEPDETSSILEAKPPPPPPPPPSPPPPPTTTTTLPFKDSVVMSVDSQDPYVDFRRSMEEMVEAQCVKDWEGLQELLCWYLKVNGKTNHGYIVGAFVDLLVGFFFFFFLFLFLGFFFF

SEQ ID NO: 198605 - protein, 132 aa, Glycine max
  Clone ID: PAT_MRT3847_21364C.1.pep
PFYSKVVELAGNSDVLVLCCPLNEQSRPLINREVMLALGKNGAIVNVGRGALIDEKELVRCLMENKIRGAGLDVFKNEPNVPNELFPLDNVVLSPHAASLTSDGFKKKCELPPEALKLFFSSKFPSIRLLEG

SEQ ID NO: 198606 - protein, 293 aa, Glycine max
  Clone ID: PAT_MRT3847_21365C.1.pep
MASSSIKHTHHLNRTKLFMKEETLLKKKHHYPKIIRIRVTDADATDSSSDDDEPSMSSTRRRVKNFVNEITIQGGGGGGGDVNVVSKKRRFKSGAGAPLCRRKTGAKKFRGVRQRPWGKWAAEIRDPSRRVRLWLGTYDTAEEAAIVYDNAAIQLRGADALTNFITPPPENRKTGYCSGEESRNNDDLRSPTSVLGRCSVSEEAVTANDVFGGSSECEYSCVSESVFPIPNEVVFDFESTLDMFDEGINNVVAETSIFLAEDLDLGFTSWHRECDNFQDIGGDLFVWDPLVAL

SEQ ID NO: 198607 - protein, 66 aa, Glycine max
  Clone ID: PAT_MRT3847_21366C.1.pep
ICSSGTSAGERKLMPTIKEELDRRQLLYSLLMPVMNLYVPGLDKGKGLYFLFVKSETRTPGGLLAR

SEQ ID NO: 198608 - protein, 317 aa, Glycine max
  Clone ID: PAT_MRT3847_21367C.1.pep
MSPFSLFLFTTLLSFLGAADARLTLDFYKDTCPQFSQIIRDTVTSKQIASPTTAAATLRLFLHDCLLPNGCDASILLSSTPFSRAERDADINLSLPGDAFDLVVRAKTAFELACPNTVSCADILSAATRDLLTMLGGPFFPVFLGRRDGRTSLASAVPDHLPTPAMPISQITQIFTHRGFSIEEFVALSGAHTVGFSHCSQFVTNLSNSSYNPRYAQGLQKACADYKTNPTLSVFNDIMTPNKFDNAYFQNLPKGLGVLKSDHGLYSDPTTRPFVETFAKDQNRFFQVFARAMQKLSLLNVQTGRKGEIRRRCDQIN

SEQ ID NO: 198609 - protein, 92 aa, Glycine max
  Clone ID: PAT_MRT3847_21368C.1.pep
NPWKKMVQYIKPIFYNKKTPNPGKFLTKIYSLIKKSMGTNPVLWPIPTGKKLPKRVKTRMGALEPFRKIPTPISPKKIPGKAGNFGLFKQVI

SEQ ID NO: 198610 - protein, 64 aa, Glycine max
  unsure (1)..(64): unsure at all Xaa locations
  Clone ID: PAT_MRT3847_21369C.1.pep
MAXXKVGLEKGPWXXEXDXKLLAXXXXHGHGXWRALXXXAXLQXCGKSCXLRWXNYLRPVXXRG

SEQ ID NO: 198611 - protein, 45 aa, Glycine max
  Clone ID: PAT_MRT3847_2136C.1.pep
THITFILENHPFHSLIQHQTDRANYEQGGHITTIHKTLALSSYTN

SEQ ID NO: 198612 - protein, 235 aa, Glycine max
  Clone ID: PAT_MRT3847_21370C.1.pep
KDQNEFYYVSKDAEDSDRNNDTKWWLPTPKVPANGLSDAARRFVQYQKDCVNQVLKAAMAINAQTLSEMEIPESYIESLPKNGRSSLGDLIYRSITDDFFDPDQLLSAMDMSSEHKIVDLKDRIEASIVIWRRKMNQKDSSKSAWGSAVSMEKREIFEDRAETILLLLKHRFPGTPQSALDISKIQFNRDVGHAVLESYSRILESLAFTVLSRIEDVLLADQTQNPSHSGTKSSI

SEQ ID NO: 198613 - protein, 64 aa, Glycine max
  Clone ID: PAT_MRT3847_21371C.1.pep
LRFFICFYLSLFVTSNTYYIHHFSSLFFSLSRCILAYEVSKKHFSFSYILTIQIFTLSNYKKSS

SEQ ID NO: 198614 - protein, 158 aa, Glycine max
  Clone ID: PAT_MRT3847_21372C.1.pep
MTLQKVENYSEILGEEVKLPHDESLIGSSSQDSQIALKFSFSHPALVETRFRTKLIKYKPMGIVKQMGAANGKNEEAFDCISLEESSNDVVKVENYSEIAGEEIKLPHDESLSGSSSQDSQIALKLSFTLPASCYATMAIRELLKTSTSVAYHKTLNQ

SEQ ID NO: 198615 - protein, 465 aa, Glycine max
  Clone ID: PAT_MRT3847_21373C.1.pep
MAELKLSESRDLTRIERVGAHSHIRGLGLDSSLEPRAVSDGMVGQTAARKAAGVILQMIKDGKIAGRAVLLAGQPGTGKTAIAMGMAKSLGLETPFAMIAASEIFSLEMSKTEALTQAFRKAIGVRIKEETEVIEGEVVEVQIDRPAVAGAAAKTGKLTLKSTEMETVYDLGAKMIEALGKEKVSSGDVIAIDKASGKITKLGRSFSRSRDFDAMGPQVKFVQCPDGELQKRKEVVHCVTLHEIDVINSRTQGFLALFTGDTGEIRAEVREQIDTKVAEWREEGKAEIVPGVLFIDEVHMLDIECFSFLNRALENEMAPILVVATNRGITTIRGTNYKSPHGIPIDLLDRLLIISTQPYTEDEIRKILDIRCQEEDVDMSEGAKCLLTKIGVETSLRYAIHLITAAALACQKRKGKTVELDDINRVYNLFLDVKRSTQYLMEYQSQYMFNETGEADEDETNAMVS

SEQ ID NO: 198616 - protein, 37 aa, Glycine max
  Clone ID: PAT_MRT3847_21374C.1.pep
IIEKPIAVCKFTTKLAPSLRQSENVYRICGKVEIVLL

SEQ ID NO: 198617 - protein, 48 aa, Glycine max
  Clone ID: PAT_MRT3847_21375C.1.pep
ILTLLQFGGYTLVQNSVDLYRSFGFDTQPILIGLIIFQVLFKIMVFPS

SEQ ID NO: 198618 - protein, 93 aa, Glycine max
  Clone ID: PAT_MRT3847_21376C.1.pep
LRVLPNQHTPFFSKWPPHLQEPGPYPRYLILHPSLLTLRTSPSNPPPSNSPISSTVPTPHSSNASPSTSIRRTEKSPSSATKSAYSRSTRPKT

SEQ ID NO: 198619 - protein, 93 aa, Glycine max
  unsure (1)..(93): unsure at all Xaa locations
  Clone ID: PAT_MRT3847_21377C.1.pep
XLPXASTLVXXIDLAXSASTFSLXLPCFSSLLXSLPTTTLVIPSSSAFSPKPFXSSTXXSNFLSCXXXXXXXXSXPLLXSSTSLSCSLQKPTS

SEQ ID NO: 198620 - protein, 69 aa, Glycine max
  unsure (1)..(69): unsure at all Xaa locations
  Clone ID: PAT_MRT3847_21378C.1.pep
LVRVLGPSEPNGRRASNLSCGCIWAEKAQDKYXQDWTVLXRPKEIETADKGPDLVHTVYNLVTNIYEWG

SEQ ID NO: 198621 - protein, 76 aa, Glycine max
  Clone ID: PAT_MRT3847_21379C.1.pep
ATAVCLHGHKFPGGFDNVVPKVLVRGGPLDRPPWGSGHRPHLPRRRSPKQGAPSEGPKSHKGYALAMRGPFNRRRV

SEQ ID NO: 198622 - protein, 54 aa, Glycine max
  unsure (1)..(54): unsure at all Xaa locations
  Clone ID: PAT_MRT3847_2137C.1.pep
NTFFFLKLSIXSRGVLFVTCSTYHTHTTLSLNTKFSNNILNTPIISPFKEHNHI

SEQ ID NO: 198623 - protein, 193 aa, Glycine max
  Clone ID: PAT_MRT3847_21380C.1.pep
QIQTKWFKPILSDSPISLVLGPNNWLWLGAIISSSFLMFLLLLGIITRYYIYPIENNSDEVYHWTFKVLWFMFLLCAVICICSSAVFLWWKRQNSLESKQIMNVEFPTPTRSPGSWIYGSERELESLPHQSLVQATNVHFGARPDLKKILFECKDKDIGVLVSGPRSMRHEVGKICASGLADNLHFESFSFTW

SEQ ID NO: 198624 - protein, 277 aa, Glycine max
  unsure (1)..(277): unsure at all Xaa locations
  Clone ID: PAT_MRT3847_21381C.1.pep
MANNNEEEEEAVAPMVKLGSYGGEVRLVVGGEESAAEETMLLWGIQQPTLSKPNAFVSQASLQLSLDSCGHSLSILQSPSSLFXILDFCFKGTPGVTGAVMWDSGVVLGKFLEHAVDSGMLVLQGKKIVELGSGCGLVGXLLGSEVIVTDLPDRLRLLRKNIETNMKHVSLRGSVTATELTWGEDPDPELIDPKPDFVIGSDVVYSEGAVVDLLETLMQLSGPNTTIFLAGELRNDAILEYFLEAAMDNFTIGRVEQTLWHPDYCSNRVVIYVLVKK

SEQ ID NO: 198625 - protein, 59 aa, Glycine max
  unsure (1)..(59): unsure at all Xaa locations
  Clone ID: PAT_MRT3847_21382C.1.pep
KAEYVKCRDRNASLNVXCSDVLKLMSLKDKIGQMTQIEWSVATPDVMIMYFNWTVLSRG

SEQ ID NO: 198626 - protein, 44 aa, Glycine max
  Clone ID: PAT_MRT3847_21383C.1.pep
GGWIEMEIQRPESLIYDSSVPRFIENTRAHMLDEGGLAKCTRLM

SEQ ID NO: 198627 - protein, 102 aa, Glycine max
  Clone ID: PAT_MRT3847_21384C.1.pep
AMAYQNYNNYGWRCPSDEYQVYDPPVEATYPRQNHHKKGHVAFRTNYEDSIAEVESNVEAREHNSRLWNHSAYKSVDQEAEAFIQYEHKRMELARLMSTRAV

SEQ ID NO: 198628 - protein, 57 aa, Glycine max
  Clone ID: PAT_MRT3847_21385C.1.pep
WKPKRAFEAMDVPVISLLRAHRYKPGEVSHCSLCITYARSDTHGYTVSCGVGTISIR

SEQ ID NO: 198629 - protein, 102 aa, Glycine max
  Clone ID: PAT_MRT3847_21386C.1.pep
HHPVLNLLFHPPIYPSFPFCDPSLSPSYPVSFYYFRHHPHLHRVFPFPFMCQCSYLGPTICRSFLCLFSLTHSCFRLSDEVLTRVSLLSPWLNVALPFKFHP

SEQ ID NO: 198630 - protein, 84 aa, Glycine max
  unsure (1)..(84): unsure at all Xaa locations
  Clone ID: PAT_MRT3847_21387C.1.pep
YYMDYMATQYKLEKGAIGYGSYSTLSMMDKHYHNGMSAEXAIDLAYXCIMEIRSMLVDAPPIWGVQIPDKDCARXYAWRESAKD

SEQ ID NO: 198631 - protein, 65 aa, Glycine max
  Clone ID: PAT_MRT3847_21388C.1.pep
IASPPFYRFSFPASRKGKFFPGGCLPPFAALFLPTLIKGGCSLCFTPFLNKMFSPPPVFFFPAPV

SEQ ID NO: 198632 - protein, 37 aa, Glycine max
  unsure (1)..(37): unsure at all Xaa locations
  Clone ID: PAT_MRT3847_21389C.1.pep
GGGRRXXXKRXPTTXSXLHYTYRRPPLTNRTISLHRK

SEQ ID NO: 198633 - protein, 69 aa, Glycine max
  Clone ID: PAT_MRT3847_2138C.1.pep
NCVKVKLKLGSVPLKHLHFTKLLVYYIQFTSVSPFIRKIILCIIDVNLYLSIFFTPFIHFYDVNKRIVK

SEQ ID NO: 198634 - protein, 121 aa, Glycine max
  unsure (1)..(121): unsure at all Xaa locations
  Clone ID: PAT_MRT3847_21390C.1.pep
SLSPQYKDAQAQMATNLFYLSLAEVETPXGPWLNLKIPQSKIALPKITVVGTILRSDLLANFLTEGNFRASVDLQRTHSIKGMIKMAATCGITENTGFALACAMNSSFTGRASSDIYTICF

SEQ ID NO: 198635 - protein, 71 aa, Glycine max
  Clone ID: PAT_MRT3847_21391C.1.pep
QQNPGDMNHSGHKHYLQGPQKRHQETQEASPHFHQMGRLSISLSLSLSLSLFYVFGFSFTLIHMYIYFRVI

SEQ ID NO: 198636 - protein, 77 aa, Glycine max
  Clone ID: PAT_MRT3847_21392C.1.pep
KPFFFLKTSKPLKYFSQKPPLHCGKKPNHIIFPLFLHITLSQNRCSTTFFKNIFPTLLQIILLQPFESITPPLKIPS

SEQ ID NO: 198637 - protein, 59 aa, Glycine max
  Clone ID: PAT_MRT3847_21393C.1.pep
NLNFLLYLPLDMITMIQIKPEFTKMKVPVSAVRTGHNFQIVVIATTQLAEHTELRCLMI

SEQ ID NO: 198638 - protein, 124 aa, Glycine max
  unsure (1)..(124): unsure at all Xaa locations
  Clone ID: PAT_MRT3847_21394C.1.pep
MKNMKIDGLWELGPTTSGQKTIGCRXVYAIKVGPNGEVDRLKAQLVAKGYTQIYGFDYXDTCYPVAKITIVRLDLAMAAMRHWPLHRLDIKNGFLHGDLEEEIHVRQPTEFAAQGEYGLVCKLH

SEQ ID NO: 198639 - protein, 166 aa, Glycine max
  Clone ID: PAT_MRT3847_21395C.1.pep
LIKFSGLALIIYQLTLYPFVEKASGPILIARFSGMLTIPLLQSYPFIALLSGLALYIVISIASILKNIMSITIITSLFLLQNRAVEQHQRGAANGISMTAMSLFKAIGPATGGAVLTWSQKRMDASFLPGTHMVFFVLNIVEALGILMMFKPFLVEKKKTHSDQLH

SEQ ID NO: 198640 - protein, 118 aa, Glycine max
  Clone ID: PAT_MRT3847_21396C.1.pep
SLLYAAPGFVWSFLLCCRPPLVLWGRPGICYLWLPFCLGGGFLVGHFSCLRCGSARFCLWVFSLSSSRSGPLLSLVFFVRVLFLSASFLWPPPFFSFFWVCLAPRPSKRMFFVGKLPK

SEQ ID NO: 198641 - protein, 46 aa, Glycine max
  Clone ID: PAT_MRT3847_21397C.1.pep
MHISGTHHHPCIPLLFGCGKVWTMSIGEEEGKIEEGLDNVMQFRYN

SEQ ID NO: 198642 - protein, 41 aa, Glycine max
  Clone ID: PAT_MRT3847_21398C.1.pep
CRCGVDESIIGMHEYVYVDRIDVVTFVVDSDNINVNGELGY

SEQ ID NO: 198643 - protein, 47 aa, Glycine max
  Clone ID: PAT_MRT3847_21399C.1.pep
GESCYRSRHGGIVKWRVRFWRKLRLRSVRWLHPEGGDWKRRTRRSVA

SEQ ID NO: 198644 - protein, 137 aa, Glycine max
  Clone ID: PAT_MRT3847_2139C.1.pep
NRGRSGEGANKYDFTVKSEGEDVSLKTKVNTASIVGTLIDQDPFVAYKINRVLMPRELFKASDALDQAPAESPKPAKKKKNAKKGSEDSDAADAPADGPSDDSEDQKAADQDSNGVSGLHVRLVMVLFGLIMGFLVL

SEQ ID NO: 198645 - protein, 85 aa, Glycine max
  Clone ID: PAT_MRT3847_213C.1.pep
EDILYICIEHQRKRHSSDQVEGKSKDTQFDNRKTGHMVRSMQLQPNVKALETRDVDEMVLSNWKSQGTMGSMSVLKDREMLFSMI

SEQ ID NO: 198646 - protein, 41 aa, Glycine max
  Clone ID: PAT_MRT3847_21400C.1.pep
QTDTTKRPLFIILWRNNILHHKSTLVTYRTRQIIDTKRLSL

SEQ ID NO: 198647 - protein, 54 aa, Glycine max
  Clone ID: PAT_MRT3847_21401C.1.pep
MVDWGNVTAEDVIDALRNVDWSSPRRMLSAFFSRFTVPRSSSDSRSRLRCNLYY

SEQ ID NO: 198648 - protein, 45 aa, Glycine max
  Clone ID: PAT_MRT3847_21402C.1.pep
RCQKTTDTEKNRHFSNFLNGTYYLSMGSYERGRGYTIIRVISKIN

SEQ ID NO: 198649 - protein, 431 aa, Glycine max
  unsure (1)..(431): unsure at all Xaa locations
  Clone ID: PAT_MRT3847_21403C.1.pep
DSRNHIAEVLAANDVDCDDLEKVNHADTMLLSNCIEEIVASAISHHLMETKHPEYRNRKLVISHKSLSHVLNIFQESESNLENKDSNKEDALATKKDGDNEFEKRMRAEVVPANEIGVTFEDIGALDDIKELLEDVVMLPLRRPDLFKGGLLKPYKGILLFGPPGTGKTMLAKAIANEAGASFINVSISNITSKWFGEDEKNVRALFSLAAKVAPTIIFVDEVDSMLGQRTRVGEHEAMRKIKNEFMTHWDGLLTGPNEQILVLAATNRPFDLDEAIIRRFERRILVGLPSVENREMILKTLLAKEKHENLDFKELATMTEGYTGSDLKNLCITAAYRPVRELIQQERMKDMEKKKREAEGQSSEDASNNKDKEEKEITLRPLNMEDMRQAKTQVAASFASEGSVFGSRKHXNDLYGEGGSRKKQQLTYFL

SEQ ID NO: 198650 - protein, 37 aa, Glycine max
  Clone ID: PAT_MRT3847_21404C.1.pep
MLTLSVKAFKPQSVPRHPGCLGAIGGVSSPLFKHLCR

SEQ ID NO: 198651 - protein, 419 aa, Glycine max
  unsure (1)..(419): unsure at all Xaa locations
  Clone ID: PAT_MRT3847_21405C.1.pep
MMASESQNWVFMVTAQTPTNIAVIKYWGKRDETLILPINDSISVTLDPSHLCTTTTAAVSPNFNQGDRNXNRISLSGGRYQSCXGDTLSCSCHLQKLKIXYSITKEDWGKLHVHIASYNNFPTAAGLASSAAGFACLAYALGKLMKVKEDEGQLSAIARQGSGSACRSLFGGFVKWIMGKYDNGSDRLAVQLTDEKHWDDLVIVIAVVSSRQKETSSTTGMRESVETSLLLQHRAKEIVPKRILQMEEAIKNRDFASFSQLTCADSNQFHAVCLDTCPPIFYMNDTSHRIISIVEKWNRSEEAPQVAYTFDAGPNAVLIARNRKAATSLIQRLLYYFPPNSDDLSSYIIGDKSIAKDAGINGIQDVEALPPPPEIKDNIPSQKYKGDVSYFICTRPGRGPVLLSDSIQALLNDETGLPK

SEQ ID NO: 198652 - protein, 141 aa, Glycine max
  unsure (1)..(141): unsure at all Xaa locations
  Clone ID: PAT_MRT3847_21406C.1.pep
QVWHSSFLLLLLVHFLFRIISIAEKWNRSEEAPXGPNAVLIARNRKAATSLIQRLLYYFPPNSDDLSSYIIGDKSIAKDAGINGIQDVEALPPPPEIKDNIPPQKYKGDVSYFICTRPGRGPVLLSDSSQALLNGETGLPK

SEQ ID NO: 198653 - protein, 518 aa, Glycine max
  Clone ID: PAT_MRT3847_21407C.1.pep
MAVANSNSSNEPCASYNCYKVAGLTETILDISHISNLKDRYILGEQLGWGQFGVIRTCSDKLTGEVLACKSIAKDRLVTSDDLKSVKLEIEIMARLSGHPNVVDLKAVYEEEGFVHLVMELCAGGELFHRLEKHGWFSESDARVLFRHLMQVVLYCHENGVVHRDLKPENILLATRSSSSPIKLADFGLATYIKPGQSLHGLVGSPFYIAPEVLAGAYNQAADVWSAGVILYILLSGMPPFWGKTKSRIFEAVKAASLKFPSEPWDRISESAKDLIRGMLSTDPSRRLTAREVLDHYWMECNQTNPEQLSECKIRNCEEWNAGGSSFSASLMSRSQDISFGASSPTCDAQSPTFTCRSSFSSFLVEPVTPCLVSGGFSFKSAGDSPDLEFCSPVPSMLSFSFLSPSSVVEQKSCKLECSANMADVNAIAGETNLGKLLMLQDSPLCVGREVKETDRKPVEAKRASGMNGHKVLGIHSKRNRTIGLGECEQLDLMVTESVIRWSSCTQLPTSLRSSLVC

SEQ ID NO: 198654 - protein, 253 aa, Glycine max
  Clone ID: PAT_MRT3847_21408C.1.pep
MMASESQNWVFMVTAQTPTNIAVIKYWGKRDETLILPVNDSISVTLDPSHLCTTTTAAVSPAFHQDRMWLNGKEISLSGGRFQSCLREIRARACDVEDETKGIKITKEDWGKLHVHIASYNNFPTAAGLASSAAGFACLAYALGKLMNVKEDESQLSAIARQGSGSACRSLFGGFVKWIMGKEDNGSDSLAVQLTDEKHWDDLVIVIAVVSSRQKETSSTTGMRESVETSLLLQHRAKENVPKADICKMERSH

SEQ ID NO: 198655 - protein, 32 aa, Glycine max
  Clone ID: PAT_MRT3847_21409C.1.pep
PSCIGDTELAVFVRTPPMLSLTLIHYYPTVMN

SEQ ID NO: 198656 - protein, 59 aa, Glycine max
  Clone ID: PAT_MRT3847_2140C.1.pep
TSDHKLRLSATGIFGTLSGQGSRALEPYRSITADGRQDIKGSSRFDPWITTRPFSHQGA

SEQ ID NO: 198657 - protein, 108 aa, Glycine max
  unsure (1)..(108): unsure at all Xaa locations
  Clone ID: PAT_MRT3847_21410C.1.pep
MSKPKVFFCMTINVESAGRIGMSALRLRLXRTVKNFRALCTGENDVRRXGKPLHYQGSTFHRVIASIMCQGGDFTAERRSSLIEADLCGHVSPSNNCRTTSPVPESAP

SEQ ID NO: 198658 - protein, 59 aa, Glycine max
  Clone ID: PAT_MRT3847_21411C.1.pep
TLQALESAASVHHKDIYPPPALHGAACDGFTEADDIWLQKGAAADPKDRWGSTPLADAY

SEQ ID NO: 198659 - protein, 38 aa, Glycine max
  Clone ID: PAT_MRT3847_21412C.1.pep
VALIAISFKQYEDNLNFTCIFFMLNLLYIYFFHWWGLF

SEQ ID NO: 198660 - protein, 107 aa, Glycine max
  Clone ID: PAT_MRT3847_21413C.1.pep
DPRVRIYSVILQKCLGQNGSCPLSIFNYALLVNSNLRPTLAYKQPGPKNPKQYSRKASRDLFVQKFCWESAVYHNCRIYANDGRLLCYCDRRKLEWCLSRGLWGACW

SEQ ID NO: 198661 - protein, 209 aa, Glycine max
  Clone ID: PAT_MRT3847_21414C.1.pep
MEEEDFDFEKKVSIKESMSMSMSTELDPAKVLLLLRGFLQIQQRRAEAYSKLKSGFSDYMASGGELAYKQLCSEITIEFNNCSKKVLEMESLFRSPDYCRVDLAQLLRAVQDQEKQKLQLTATIQVLKKAGRPSERLVSHENCKFTKPAEHECVHVQEITEASGTEEAEADAEYDNALKEAIRGVQDAVMAINEHLEEVRYEIAALEAE

SEQ ID NO: 198662 - protein, 49 aa, Glycine max
  Clone ID: PAT_MRT3847_21415C.1.pep
CNNGECRLLQATVKEEERVTVLIKYAATQNEDKYVRNRDLSFLISWKQC

SEQ ID NO: 198663 - protein, 44 aa, Glycine max
  Clone ID: PAT_MRT3847_21416C.1.pep
TSSMWLRLRVKKTKVSLKFKGRKSINTPVNVNAAHRNVLHATRM

SEQ ID NO: 198664 - protein, 552 aa, Glycine max
  Clone ID: PAT_MRT3847_21417C.1.pep
YPLYHCSSTAARRRQKGYVSCLAQPGEPVGVLASQSVGEPATQMTLNTFHLAGRGEMNVTLGIPRLQEILVAAARDIKTPFMTCPLRHDKSMKDAICLADKLKKITVADIIKSMKVSVVPVTVLGGQVCSIYKLVMKLYKSKQYPEYTDITLDDWEETLRVNFVRELEDAIQNHMTLLSKISGIKKFKTDPQSNYSNSSEDAHSNGSESEKKGQNNDDDDEDGGGVEDTEGYEDLGSDAQKRKLQGTDEVDYEDGPEEETHDGELSEEIEGDEDGSDVDANENYNNVTDANNSEGLEKPSKSKTIDEKQNLKREKKKSEPATKKYDRAIFVEAKGKHFEIHFRFTGEPHILLTQIAQRTAKKVCIQNFGKVGECKAITCKESGVIYYGKDGRKRDEISASEKEQIPALQTSGVHFKTFWELEDDLDVRYINHASVHAMLNAYGVEAARETIIREVQNVFKSYGISVNIRHLTLIADFMTHTGSYRPMNRTGSIADSTSPFIKMCFETAGKFIVEAAYHGQVDNLETPSARICLGLPVKMGTGCHDLIQKLEI

SEQ ID NO: 198665 - protein, 162 aa, Glycine max
  Clone ID: PAT_MRT3847_21418C.1.pep
RKLYPLCLRINLLISSQDFSFKMKPSFVVSLLLLSLLLAKTQGIRLGKVSSAVQQQKQHDGESTLLKRSSTDTEEASLCKDNACTGNIKNRKLVNTPVSTAQSLSKNVEESKVDPSVNGNTRNVNTLSTSKHKDVPEEHYHDLVEITEMDYSPAKRKPPIHN

SEQ ID NO: 198666 - protein, 75 aa, Glycine max
  unsure (1)..(75): unsure at all Xaa locations
  Clone ID: PAT_MRT3847_21419C.1.pep
PPIGXEESETLSYWPDLXDAQLAXDVEYLLPKRWIPCLEFELEHRFXYREHNRSSAYXEGRYWTMWKLSMYGCTD

SEQ ID NO: 198667 - protein, 79 aa, Glycine max
  unsure (1)..(79): unsure at all Xaa locations
  Clone ID: PAT_MRT3847_2141C.1.pep
SPSELLDFEEFSXDCMDSTRGTGSLHVVKPTFXYVTARNLISLFITDTGGHNPSYMNRLKAEYYSADDLVVKQKPPTES

SEQ ID NO: 198668 - protein, 45 aa, Glycine max
  Clone ID: PAT_MRT3847_21420C.1.pep
STLVPPPSKWLWLFGNHHVILPDYFSCRKVTLEHYSCGSFYSTSN

SEQ ID NO: 198669 - protein, 65 aa, Glycine max
  Clone ID: PAT_MRT3847_21421C.1.pep
MVMLGLRELVVTLKSKIRSLKLKKPYDKMEKSDSMRVEIRSRKARKLIEETLKIADSPKSKTFNL

SEQ ID NO: 198670 - protein, 69 aa, Glycine max
  Clone ID: PAT_MRT3847_21422C.1.pep
RSGPLVIWHPLLSREDIQEGLGMDALQSHANIYIWYQWECQLKLGNLVISIIGHGLSLIRPKGLAPLNK

SEQ ID NO: 198671 - protein, 56 aa, Glycine max
  Clone ID: PAT_MRT3847_21423C.1.pep
LKLNRKGNINHGSGKDIREEQSRSEMFQCRPMVFINSFHLTRFWLSLINVPLLGAI

SEQ ID NO: 198672 - protein, 50 aa, Glycine max
  Clone ID: PAT_MRT3847_21424C.1.pep
SQDVSLPVFNCALVFFKPVGKRRAFDLEHYLNLFLKKIYEEFDGISNYLE

SEQ ID NO: 198673 - protein, 93 aa, Glycine max
  Clone ID: PAT_MRT3847_21425C.1.pep
TAARRRQKGELRNRSSSRAAPLPFLSFDRTHSFPRPQCSLHQVPGSDRSTRSRTALTTPPAGRRLRPRKLLEIRSCVRLITGRCSHHRLLRRR

SEQ ID NO: 198674 - protein, 83 aa, Glycine max
  Clone ID: PAT_MRT3847_21426C.1.pep
KTIFQYISVLFSQKRLLIVLNFKTSNNNHIFLETTQISLIQHKPTFLTIHKMSRFKTYKPYENFKTLILAFPLNTKNTHFFWS

SEQ ID NO: 198675 - protein, 81 aa, Glycine max
  Clone ID: PAT_MRT3847_21427C.1.pep
KTAQETFLFTSESVNEGHPDTLCDQISDAVLDACLEQDPDSKVAWETRTQTNMVMGFGEINTNANVDHEKNGSRHIAREGG

SEQ ID NO: 198676 - protein, 53 aa, Glycine max
  unsure (1)..(53): unsure at all Xaa locations
  Clone ID: PAT_MRT3847_21428C.1.pep
NAKQRGRLTMPILMKLKGGNYIALARVWVHELYYQHXLFASVLTQALKKHPSD

SEQ ID NO: 198677 - protein, 44 aa, Glycine max
  Clone ID: PAT_MRT3847_21429C.1.pep
LYYHFDISIHALNHQNYKNQNVFLTFTMVFWNFLKIFAAIFHFL

SEQ ID NO: 198678 - protein, 376 aa, Glycine max
  Clone ID: PAT_MRT3847_2142C.1.pep
MPTLSSKPPFTNYPVGAAAATTLLFLFFAVGISTVLASNHHVINFRSPNLFPEGLAWDPTAQHFLVGSLRHRTISAVSDAGVVETLISDPSLPENVTFLGLAVDSRNNRVLVAIHATEPLPPFNALAAYDLRSRRRLFLSPLPSAAGDDKRATANDVAADFNGNAYVTNSVGNYIWKVNLNGEASILSNSPKFTVHPVVRDTVYSFCGLNGIVYNNKGYLLVVQSNTGKMFKIDKDDGTVRQVLLNEDLMGADGVALRGDGVVLVVSFSKLWFVKSNDGWAQGAVFDKIDLDEEGFPTSVVVGERDRAYVLHGRVMEGILGNSERESFMIEEVKSPKESEGENVWLYVMVGIGLAYFLFWRFQMKQLVKNMDKKIN

SEQ ID NO: 198679 - protein, 66 aa, Glycine max
  Clone ID: PAT_MRT3847_21430C.1.pep
ARKAAREPTKPLLHFSFTPENTLCCVFTLRHPHHHYCSLYFKHTYFSHLTNLINNTSNPPNRTHQL

SEQ ID NO: 198680 - protein, 240 aa, Glycine max
  unsure (1)..(240): unsure at all Xaa locations
  Clone ID: PAT_MRT3847_21431C.1.pep
PRVRAKTRSAEKAAQVDAEDRTDGLEIISIGSLYKGSWDKKYWTTSRGKDRYPYPVGYQAVRAYNGTTYKMEICEGVNGPRFLIXFXDGSSSSGKTPDQAWEEFQKKGCPRIKIWHGKRLSSKMDGLELFGFKNQFIQRLLRELVTDVNGIAERSLVSPNICDGVTRTDHDNCTNVGTYPDLLTCLGKPRVTGKRSRCELKNKKLNVRARSQSPELTCSRPSIVQNEKSLGQRSSTIHYG

SEQ ID NO: 198681 - protein, 34 aa, Glycine max
  Clone ID: PAT_MRT3847_21432C.1.pep
VWLLESRSRARMFDYTTNPTCPQRPCKCLANERP

SEQ ID NO: 198682 - protein, 76 aa, Glycine max
  Clone ID: PAT_MRT3847_21433C.1.pep
KLSCFIMFSLFSFQYCFPFLQVRSLNRVISKKIFSEKLCERPVYYLLSPRFTRIMLCLDSILARVIKQPGRLFFLG

SEQ ID NO: 198683 - protein, 71 aa, Glycine max
  Clone ID: PAT_MRT3847_21434C.1.pep
LASKISFLRLSGILRLDLARVMDNSFLNLTVDGFLNTGAGTATRAVAVDTHHIISKRSLVSNTTCLFQGIS

SEQ ID NO: 198684 - protein, 260 aa, Glycine max
  unsure (1)..(260): unsure at all Xaa locations
  Clone ID: PAT_MRT3847_21435C.1.pep
MTMKIMVAIKRVVDYAVKIRVKADKTGVVSQNVKMSMNPFCEIALEEALRIRESGLASEVVAVTMGPSQSLDTLRTGLAMGADRGIHPHPSDRAGRGPPPQGVWLGLRGCRRHHGTLGNCAIADDCNQTGQMIAGLLNWPKXTFASKVVLDKEKQVAQXGQEVDDGIETVCLNLPAMFFEFDFSLSTDLRLNQPRYATLPNIMKAKSKPIKKFTPEELNVEIKSDLEIVQVTEPPKRKAGVILSSVDELIDKLKHEANVI

SEQ ID NO: 198685 - protein, 126 aa, Glycine max
  unsure (1)..(126): unsure at all Xaa locations
  Clone ID: PAT_MRT3847_21436C.1.pep
TAAKTTEGDGTGDYVKLRANTDNGSPPGAAVELSPTTLRADGWYRVLLVVWLIXLTFLAAGELLWGGPYFRDNEIIPAINWQTKTFMTTEARVAVNASMATVRNLIMPSTPSVRVAGMTFGYGLGY

SEQ ID NO: 198686 - protein, 80 aa, Glycine max
  unsure (1)..(80): unsure at all Xaa locations
  Clone ID: PAT_MRT3847_21437C.1.pep
MGLIKDGTNLKGLYREPQRFMEHYPAYPSFISRTVXTIGGIQAMHKARCSKSNKLELRFRPEDPYCHPAFGELLTPTLCF

SEQ ID NO: 198687 - protein, 67 aa, Glycine max
  Clone ID: PAT_MRT3847_21438C.1.pep
NNKIAYKKTYTRGKFKNYLELFIYTISSMSAFTYFISFGGLKPNFPFLKKKKDSRVTTTGKCSMTTR

SEQ ID NO: 198688 - protein, 81 aa, Glycine max
  Clone ID: PAT_MRT3847_21439C.1.pep
GGGKNYFYLGGGNPGGGPVCTPLKRPSPPHFPFLDPTSKGGGGPPQKLPPPPQRGGFYTRQKTGQPKFFWPKIFVGKGSRQ

SEQ ID NO: 198689 - protein, 94 aa, Glycine max
  unsure (1)..(94): unsure at all Xaa locations
  Clone ID: PAT_MRT3847_2143C.1.pep
HIQPLVCXNGNXMVXKAGFXGXAAPXAVFXXXVGRPRXTGXMVXXGQXXAXXRDXAXPKXXILTLKYXXXXGXVSNWDXMEXIWPSHFXTTSFW

SEQ ID NO: 198690 - protein, 300 aa, Glycine max
  Clone ID: PAT_MRT3847_21440C.1.pep
MALFCLYILYMHPFSPVFILQQEFFRKLMEVFRMCEDLENIDGLHMIFKIVKGIVLLNSPAIFERIFSDDFIVDIIGAFEYDPEVPFVQHHRKFLKEHVVFKEAIPIKDPVVLSKIHQTYRVGFLKDVVLARVLDEGIGANLNSIIHSNNAYVVSLLKDDSTFIQELFARLKSPTTSQESKKNLVYFLHEFCSLSKSLQMVQQLRLFRDLMNEGIFDVVTNVLQSQDKKLVLTGTDILILFLNQDPNLLRSYFVRLEGFALLGLLVKGMLTDFGENMHCQFLEILRNLLDSCTFYPINFE

SEQ ID NO: 198691 - protein, 84 aa, Glycine max
  unsure (1)..(84): unsure at all Xaa locations
  Clone ID: PAT_MRT3847_21441C.1.pep
MSCKLGYCKANMTSYEHYDAASHAVPWPCHRARYQLFPFRMKTTSGXHSCLVKCARSMLARQAHIITAXFTTIPDECVEPTQDY

SEQ ID NO: 198692 - protein, 55 aa, Glycine max
  Clone ID: PAT_MRT3847_21442C.1.pep
LTRSSIPRLTRPRLQTFLDGKRVILCRLLRCLGMAIGRHSGHPELWLYIYHQVAV

SEQ ID NO: 198693 - protein, 65 aa, Glycine max
  Clone ID: PAT_MRT3847_21443C.1.pep
MPSVDGRLQPSWFPGDVKSKTLEPPGLWPPQHLVGGKNLWWCPLTKPMARRSVNNPTLKTPPFDS

SEQ ID NO: 198694 - protein, 182 aa, Glycine max
  unsure (1)..(182): unsure at all Xaa locations
  Clone ID: PAT_MRT3847_21444C.1.pep
MGPRYAPPDPTLPKPWRGLVDGKTGYLYFWNPETNVTQYERPSSSSASQSKFSSVPSSSVQVQQSSQGSQRGRSPDFSDRYDRNGTGGSNDAGSRNNQSSKGGSYTSHDVSNGTNVAGNGNSSVRGHGASDAGAGLSAESYRHRHEISVTGDNVPPPLASFGSTGXPSELLREVRYLLLGRS

SEQ ID NO: 198695 - protein, 58 aa, Glycine max
  Clone ID: PAT_MRT3847_21445C.1.pep
NKAPQPNSLFISSQPLIPMEALPQKAKKRDEEILKNKNQGEGGLEPTNHCNPPHWLIP

SEQ ID NO: 198696 - protein, 613 aa, Glycine max
  unsure (1)..(613): unsure at all Xaa locations
  Clone ID: PAT_MRT3847_21446C.1.pep
MAATATASLMGPRYAPADPTLPKPWRGLVDGKTGYLYFWNPETNVTQYERPSSSSTAQPKSSSVPNSSVQVQQSSQGSQCGRSPDFSDRYDRNGSGGSNEAGSRNNQSSKGGSYASHDVSNGTHVAGNVDSSVRGHGASDAGAGLSPESYRHRHEISVTGDNVPPPLASFGSTGFPSELLREVQNAGFSAPTPIQAQSWPIALQGRDIVAIAKTGSGKTLGYLVPAFIXTSSALAITPKWAPLHWYFHQQGXLATQIQDEAVKFGKSSRISCACLYGGAPKGPQLRDIDRGADIVVATPGRLNDILEMRRISLNQVSYLVLDEADRMLDMGFEPQIRKIVNEVPNRRQTLMFTATWPKEVRKIAADLLVKPVQVNIGNVDELVANKSITQHVEVLPPMEKQRRLEHILRSQDQGSKIIIFCSTKKMCDQLARNLTRHFGAAAIHGDKSQAERDHVLSQFRTGRSPVLVATDVAARGLDIKDIRVVVNYDFPTGVEDYVHRIGRTGRAGATGLAYTFFGDQDAKYASDLIKVLEGANQKVPPELRDMSSRSGGGMGRSRRWGSGGRGGHGDSGYGGRNNDSGYGGRGNDAGYGGRGSDSNYGGRNLGVKTFTCG

SEQ ID NO: 198697 - protein, 83 aa, Glycine max
  Clone ID: PAT_MRT3847_21447C.1.pep
CSPSLYIEHSMAPKFNGITLCNPLLPLLFLFPKLINTHILNPFYKHTRIPPHSLSLSPIWALSLSPTTISFLIPSTHLFPLLK

SEQ ID NO: 198698 - protein, 63 aa, Glycine max
  Clone ID: PAT_MRT3847_21448C.1.pep
AGLITHVVKKKGNLGDTKYMGCIVYGTVHIFGGTYYMNMLCHWCEELTDSCTHRIELALRRLW

SEQ ID NO: 198699 - protein, 52 aa, Glycine max
  Clone ID: PAT_MRT3847_21449C.1.pep
TGKPGPTHAYDHSYSNTSYLFLISINYCTYLSLYISLYLNIKLTYSNILYKL

SEQ ID NO: 198700 - protein, 51 aa, Glycine max
  Clone ID: PAT_MRT3847_2144C.1.pep
GVIEPGPSKFGGSTYFLDEPFLLGKRIVDEQKSNRGLRLFLTLLYLKVGLH

SEQ ID NO: 198701 - protein, 79 aa, Glycine max
  Clone ID: PAT_MRT3847_21450C.1.pep
LNTLRAIIITPGGYQLTYTATIAGPLADKVGCVVSTYGWFAIGIVGALAVNAVYLTCIVGLVGSASAERYKLWYYNTAQ

SEQ ID NO: 198702 - protein, 83 aa, Glycine max
  unsure (1)..(83): unsure at all Xaa locations
  Clone ID: PAT_MRT3847_21451C.1.pep
RRTRRTNRHKDLVLARIQTGAISPSRGHXHGKXLXSCXIXSXHPXPWISSPNTXTWSXXXRDXSYLXXXXAXYXXWXFXXXXD

SEQ ID NO: 198703 - protein, 92 aa, Glycine max
  Clone ID: PAT_MRT3847_21452C.1.pep
FVEKGSPGPLEPFGEGFGLWKLWAFKVHFFGERHRSPFLVPGHGIVGPRISQTLLSSRPEPLLLGCASPFFSQDFNAPAQRGRAFVTGAFPI

SEQ ID NO: 198704 - protein, 37 aa, Glycine max
  Clone ID: PAT_MRT3847_21453C.1.pep
KDDAGSTGRLALKALAIIVAGLSRLFTFSTMASPDEA

SEQ ID NO: 198705 - protein, 166 aa, Glycine max
  Clone ID: PAT_MRT3847_21454C.1.pep
MFLRAVARPLMAKVKASTGIVGLDVVPNAREVLIGLYSKTLKEIQKVPEDEGYRKAVESFTKHRLGVCKEEEDWENIEKRLGCGQVEELIEEAQDELKLISYMIEWDPWGVPDDYECEVIENDAPVPKHVPLHRPPPLPTEFHKTLEALTGKDTPAASSSESPSKA

SEQ ID NO: 198706 - protein, 81 aa, Glycine max
  Clone ID: PAT_MRT3847_21455C.1.pep
YCPAILVYFERFLTLTFFHLDLETSYYTPTGMMLRYTRQCSRRRLDIPILVTSTLPQLHREHQFITQIDGTWYIQPTFPSW

SEQ ID NO: 198707 - protein, 68 aa, Glycine max
  Clone ID: PAT_MRT3847_21456C.1.pep
ARCLVANVTFCGTSLKKGIAWRAPNGKICSGRFKIDAAEKEIVEKQQTDKDRWKGLAYDVSDDQQDIT

SEQ ID NO: 198708 - protein, 63 aa, Glycine max
  Clone ID: PAT_MRT3847_21457C.1.pep
YLDLYPQLKMSLFKNPYILLLTAVICILGLLIIYYTVLISLALLYNIDDFLVFYIQHFISINN

SEQ ID NO: 198709 - protein, 56 aa, Glycine max
  Clone ID: PAT_MRT3847_21458C.1.pep
VTIYQIPHLAGAGLTANISYPSYHAIWHISSVFSCDTCQMPTRSESCEYAIFTSTG

SEQ ID NO: 198710 - protein, 145 aa, Glycine max
  unsure (1)..(145): unsure at all Xaa locations
  Clone ID: PAT_MRT3847_21459C.1.pep
PGRHRPGKPGPTHRANSTPKHGEEPGGTKTHGPARQSQARDEEVGHAXWPNTPNQDKARRTKPGPAEXESDEHHTQREETQNPKTNWEKEDTHPGKTKKEQKRKPRAPQPRGGGTRTKERKDTTKEGQSPEEPRTKKEAHEGEEK

SEQ ID NO: 198711 - protein, 59 aa, Glycine max
  Clone ID: PAT_MRT3847_2145C.1.pep
LFHLVSQSPLVVITVVLVRIFVIVIVFGLCLLRLVVWSSRLLHFGSVSPSSLLMVLPHL

SEQ ID NO: 198712 - protein, 99 aa, Glycine max
  unsure (1)..(99): unsure at all Xaa locations
  Clone ID: PAT_MRT3847_21460C.1.pep
CMAAVSAPVAHAAVTCGQVTISQANGMPYLPKVEALXSXCCNRVSSLIASADTTVDRHTACNXTEXGASHICGFNANNGVWVPGRCGVCIRYNISTCSS

SEQ ID NO: 198713 - protein, 76 aa, Glycine max
  Clone ID: PAT_MRT3847_21461C.1.pep
IHEQENRSCIKARSMLHCPLSASQTQSPLIILSMGTKQVCRLKAWSLKSIVSAHRGFLAHIIFRHQDCTSRVILVG

SEQ ID NO: 198714 - protein, 35 aa, Glycine max
  Clone ID: PAT_MRT3847_21462C.1.pep
LLLKIVVYWLSAKGKTTFTSHAQRRLVAWEACDVL

SEQ ID NO: 198715 - protein, 154 aa, Glycine max
  Clone ID: PAT_MRT3847_21463C.1.pep
MDLEAVKRYLEKGGETASAVDGLPPRFLEPLIMNALKVDLIETGRVVCSMKIPPRLLNAGNSLHGGAIAALVDVVGSAAIPTVGYSAPNTGVSVEINVSYLDAAYADEEIEIEARALRVGKAVAVISVEFKKKKTGKVFAQGRHTKFLPLSSKM

SEQ ID NO: 198716 - protein, 246 aa, Glycine max
  unsure (1)..(246): unsure at all Xaa locations
  Clone ID: PAT_MRT3847_21464C.1.pep
MGRAPCCEKMGLKRGPWTPEEDQILINYINTYGHANWRALPKLAGLLRCGKSCRLRWINXSCDNYTIACRWSAIAARLPGRTDNEIKNVWHTHLKKRLPQNYKQSHDQKKTKQKTTKVRXDMMPLSPPQCSSHMSSSSLTTSDNNGSINNNHDMSLNVNDDIDTPETDAGVDEDFWSEVLSSDNSGETTSGFPTIDYDHQFLPMSPLMTEEGVLIDASSSSVCDDGMDFWCNVYARAEEFTQLLEL

SEQ ID NO: 198717 - protein, 75 aa, Glycine max
  unsure (1)..(75): unsure at all Xaa locations
  Clone ID: PAT_MRT3847_21465C.1.pep
MDPCPFLRLMIDSLALNLSFATKPPPVSGVHPFTTSCXCKIRINNFPSQTSLLSLSSFSFAHARPETATFRPGFH

SEQ ID NO: 198718 - protein, 35 aa, Glycine max
  Clone ID: PAT_MRT3847_21466C.1.pep
MSLKSGSQRSFPRSMGASLGIPTSRLVKAASELNV

SEQ ID NO: 198719 - protein, 134 aa, Glycine max
  unsure (1)..(134): unsure at all Xaa locations
  Clone ID: PAT_MRT3847_21467C.1.pep
FLRARGDLRRTYRIKGMNKMAATVGFPENTGMAFAXAMNRPFRGRARSDIYTICSQDCELWNPDCTKAMTMSLNPNPTSATSNMESLKRTGFHCDIIRVTGWTVTPMPDAKVTIDWFISCQESAPSTYCVFYPQ

SEQ ID NO: 198720 - protein, 125 aa, Glycine max
  Clone ID: PAT_MRT3847_21468C.1.pep
GSIVDPRAVFSRKIRHSVREQIVFFMAPVPANVPPMAPKLFHPLLGWKPGGSFASASGRGGHPQILVSELGPNSSPAGRFFGVYRRPIPRERKFLPRGKFRRPFCSEAPKTQKRKKFASKKKKKE

SEQ ID NO: 198721 - protein, 56 aa, Glycine max
  Clone ID: PAT_MRT3847_21469C.1.pep
GLHNFIKVVLTNIILLLTSLPETLSRKCVNITLLLRVGFEMQTYVFVSYIGTICII

SEQ ID NO: 198722 - protein, 69 aa, Glycine max
  Clone ID: PAT_MRT3847_2146C.1.pep
NLAPWRFKVSNFLQLDLKISGFAPVNWTPDDFFFGNVLKSEAEDMQSSNDKDSLIYYLELNCNMIFISS

SEQ ID NO: 198723 - protein, 232 aa, Glycine max
  Clone ID: PAT_MRT3847_21470C.1.pep
DQGIMFGYATDETPELLPLTVLLSHKLNSAMTKARKDGTLPWLRPDTKTQVTVEYAHDGGAVVPLRVDTVVVSAQHSEDITTEKLREEIKEKIIKQVIPEKMLDDKTVYHIQPSGLFIIGGPQGDAGLTGRKIIVDTYGGWGAHGGGAFSGKDYSKVDRSAAYLARWIAKSLVNAKLARRALVQLSYAIGVAEPLSLFVETYGTSDKSSDELVEIVKNNFDLRPGVIVKELN

SEQ ID NO: 198724 - protein, 135 aa, Glycine max
  unsure (1)..(135): unsure at all Xaa locations
  Clone ID: PAT_MRT3847_21471C.1.pep
GGGXWEGLFEAITGYGLGGSSMALFGRVGGGIYTKAADVGADLVGKVERNIPEDDPRNPAVIADNVGDNVXYPLLISSMGIIVCLITTLFATDFFEIKAVKEIEPALKKQLIISTVLMTVGIAIISWIALPTSFT

SEQ ID NO: 198725 - protein, 109 aa, Glycine max
  Clone ID: PAT_MRT3847_21472C.1.pep
PLVLGRRFLSHSYPIYTLLFIHIIKGISIRSIFYHQSTCLIHILTPLSQLTLNSHKHYPQSNLSNFLSLLFTYLHSQIPLYLIHPQIANSHILATSNSHPYLTLLTDTY

SEQ ID NO: 198726 - protein, 150 aa, Glycine max
  Clone ID: PAT_MRT3847_21473C.1.pep
GLMEGHAKPDYATCVKISTDASIKEMIPPGALVMLTPLIVGIFFGVETLSGVLAGALVSGVQIAISASNTGGAWDNAKKYIEAGASEHARTLGPKGSEPHKAAVIGDTIGDPLKDTSGPSLNILIKLMAVESLVFAPFFATHGGLLFKIF

SEQ ID NO: 198727 - protein, 767 aa, Glycine max
  unsure (1)..(767): unsure at all Xaa locations
  Clone ID: PAT_MRT3847_21474C.1.pep
MGAALLSELATEIVVPVCAVIGIVFSLVQWFLVSRVKLTPDRNGTTSSPRNNKNGYGDFLIEEEEGINDHSVVVKCAEIQNAISEGATSFLFTEYQYVGIFMVAFAILIFLFLGSVEGFSTKSQPCTYDKSKLCKPALATALFSTVSFLLGAITSVLSGFLGMKIATYANARTTLEARKGVGKAFITAFRSGAVMGFLLAANGLLVLYITINLFKLYYGDDWEGLFEAITGYGLGGSSMALFGRVGGGIYTKAADVGADLVGKVERNIPEDDPRNPAVIADNVGDNVGDIAGMGSDLFGSYAESSCAALVVASISSFGINHEFTAMLYPLLISSMGIIVCLITTLFATDFFEIKAVKEXIEPALKKQLIISTVLMTVGIAIISWIAPSFTIFNFGAQKEVKSWQLFLCVGVGLWAGLIIGFVTEYYTSNAYSPVQDVADSCRTGAATNVIFGLALGYKSVIIPIFAIAISIFVSFTFAAMYGIAVAALGMLSTIATGLAIDAYGPISDNAGGIAEMAGMSHRIRERTDALDAAGNTTAAIGKGFAIGSAALVSLALFGAFVSRAGILTVDVLTPKVFIGLIVGAMLPYWFSAMTMKSVGSAALKMVEEVRRQFNTIPGLMEGHAKPDYATCVKISTDASIKEMIPPGALVMLTPLIVGIFFGVETLSGVLAGALVSGVQIAISASNTGGAWDNAKKYIEAGASEHARTLGPKGSEPHKAAVIGDTIGDPLKDTSGPSLNILIKLMAVESLVFAPFFATHGGLLFKIF

SEQ ID NO: 198728 - protein, 57 aa, Glycine max
  Clone ID: PAT_MRT3847_21475C.1.pep
SKDSGLTDKSLDLSRILHTEGVEGQESSLRHHLWEATPEVQDSITEFGESNWAGSSS

SEQ ID NO: 198729 - protein, 378 aa, Glycine max
  Clone ID: PAT_MRT3847_21476C.1.pep
MAEPSKKRKGSSSTATAAAHRRHGPSGAPTAPIPPSLSSPRSSTLFSSDDQRLRYLSQFSSRIILDPKYLDVEFFNDETFDCYQVFQNSGLVDFMSFKLPYYPELVKVFYCNLKIQDGIIMSEVHGTSMVIDQSLFFSLTHLPSQGAPFEGTIVDDWKFDYSSHDARRMVCNDQADMTGRLLAGSLTFDNRIMHYIIVRILLPRSSNLAQASEEDLILMWAFLTGRQIDWAHLVRYRMHKALRANAPLPYPHLITLFLRHFQIPLDDEPFVQVKRSFAIGAGAVTSFGYRKDRNGQWLKKDALPPQDERTPSPPPQREDSALMNEVLSELRGLRSYVGDRFDSLDSRFAGMDIRLTQLEEDVGYIRQSFDLPPPPPSS

SEQ ID NO: 198730 - protein, 76 aa, Glycine max
  Clone ID: PAT_MRT3847_21477C.1.pep
ASSFSIYTTQTLEITNTHMSIIDDRYNCACMRSILSSITQRDEEHVGLIFSWEAPKVYYKSKIEKDSCLVFSWVRF

SEQ ID NO: 198731 - protein, 56 aa, Glycine max
  Clone ID: PAT_MRT3847_21478C.1.pep
LLSHRAFFSPLPCFSPPPCFMLLSPGLHFKFTTLTNPPCALACIQVNSFHFSLSRN

SEQ ID NO: 198732 - protein, 88 aa, Glycine max
  unsure (1)..(88): unsure at all Xaa locations
  Clone ID: PAT_MRT3847_21479C.1.pep
MARKSLPILKHLLLSRGIPSRFVTYMHRPGDESSXAVXTLIPGDSISPMETVTAXQVMEAMHAPVYLEKFEVHSHMKAVPTEVLDSIR

SEQ ID NO: 198733 - protein, 115 aa, Glycine max
  Clone ID: PAT_MRT3847_2147C.1.pep
IRVRLPSSSSKCLCISRFYNQREHKVKLSAAPASGSLAPAVSLTDNALKHLNKMRSERNQDLCLRIGVKQGGCSGMSYTMDFEDRANKRPDDSIIEYEGFEIGDDNANYVFRWCL

SEQ ID NO: 198734 - protein, 201 aa, Glycine max
  Clone ID: PAT_MRT3847_21480C.1.pep
MEEEKKVISEVSVTKVVEEADHKNESIKETNGDLPSEVKKEEEENAFDGEFIKVEKEENSIDDKSHKTERSSDSPSREFLEAQEKIQELEVELQRLTESLKTSEHENDQLKGEISVTKEKLEESGKKYEELDLSHKKLQEQILEAENKYNQQLSTLEEALQSQEVKQKELFQVKEAFDGMNLELENSRKRMQELQDELQLS

SEQ ID NO: 198735 - protein, 329 aa, Glycine max
  Clone ID: PAT_MRT3847_21481C.1.pep
MEEETKVISEVSVTKVAEEADHKNDSIKGTNGDLASEVKKEEEENAFDGEFIKVEKEENVIDDKSHKTERSSDSPSREFLEAQEKIQELEVELQRLTESLKTSEHENDQLKGEISVTKEKLEESGKKYEELDLSHKKLQEQILEAENRYNQQLGTLEEALHFLEVKQKELFQVKEAFDGMNLELENSRKRMQELQDELQLSADEAQKFEELHKQSGSHAESEGKKALEFERLLEEAKLTAKGVEDEMASLKEELKGVYDKIAENQKVEEALKTTTAELSTIQEELTLSKSQLLEVEKRLSSKDSLVDELTNELNLIKTSETQVKEDMLA

SEQ ID NO: 198736 - protein, 66 aa, Glycine max
  Clone ID: PAT_MRT3847_21482C.1.pep
RRLIFQLTWRTNTFDPFWMGILLTTWIDIGGPPNWIYCLFSFLGRRSLKKINFCFTQKNKFVLGRE

SEQ ID NO: 198737 - protein, 38 aa, Glycine max
  Clone ID: PAT_MRT3847_21483C.1.pep
SNRLHPLIEPPHHMILLLPATQVRSIGVTKLYFTNKIK

SEQ ID NO: 198738 - protein, 80 aa, Glycine max
  Clone ID: PAT_MRT3847_21484C.1.pep
MEMSINRSSISPNIRETQGPIIPAVGIAGTARLMWLNHNFMVHVDSHVTVDSVFLDVIDQENTFELEVFTAATGSEQRGV

SEQ ID NO: 198739 - protein, 91 aa, Glycine max
  Clone ID: PAT_MRT3847_21485C.1.pep
EKWGGLEVRVGINLGGDGVLWWGAPVFFFFLFCFLFCSFFFFFFFFVFVCFFLFFFFTLTHTSHIIATIREVWKFSNSQSILNKRVMCDFL

SEQ ID NO: 198740 - protein, 75 aa, Glycine max
  Clone ID: PAT_MRT3847_21486C.1.pep
CTVLDHSDSKNQLKYKKTQKKTHHSNRITAKYKRIKTPPRRKVTKTHRQTKRREKERKKTNDTEPQHAKAHGPLY

SEQ ID NO: 198741 - protein, 71 aa, Glycine max
  Clone ID: PAT_MRT3847_21487C.1.pep
KLEGVLKSLLQNAVFPIKNKDVMKFPIPGIKKKIKAFSEPMENLSPPADKCCPQIKKTRTVVFPNIIKKPE

SEQ ID NO: 198742 - protein, 116 aa, Glycine max
  Clone ID: PAT_MRT3847_21488C.1.pep
GSSRKFSKDETKVKKKSRSKFFAMRIFFLARFIYFFEGNKFFFFFDFFFRGFFFFFFFNQYSFHCKKMRNGNLAFPRTEILCPKILSPSPNQIGPPHLMSYVSIPVIFPKFNPVSG

SEQ ID NO: 198743 - protein, 134 aa, Glycine max
  unsure (1)..(134): unsure at all Xaa locations
  Clone ID: PAT_MRT3847_21489C.1.pep
LNNPSIQAVVQGMNGRSVSIXVDYRKNECLERHVIXLLKKKGADGLPLRAVCFSCLKXYQAVQEMVSLAARXNKAVQEXDKLPPVKRAXIGNMGRQDAKKPLEEHVSNLLSSLQRGSSAMMLDPVVLYRKHRPM

SEQ ID NO: 198744 - protein, 61 aa, Glycine max
  Clone ID: PAT_MRT3847_2148C.1.pep
GTERLRRKLQNIFQHNYTTESNPLFRAGAAFNILHSIDYSSLSLYCSLFDLTEQYKSVRIS

SEQ ID NO: 198745 - protein, 57 aa, Glycine max
  Clone ID: PAT_MRT3847_21490C.1.pep
RNRCSLVWERSQQTLNQRERAVTALILQGTEIRNPSNRVVRQSQAKIKIHYIRSVYT

SEQ ID NO: 198746 - protein, 61 aa, Glycine max
  Clone ID: PAT_MRT3847_21491C.1.pep
LVKQPSFSPITQHMEWKVGDGSLINFWKDKWLGTGSNLDQQFNQMFLIVDSRIVRFVIWVA

SEQ ID NO: 198747 - protein, 52 aa, Glycine max
  Clone ID: PAT_MRT3847_21492C.1.pep
FSKQKALFFRGGRKRRIWGHSICSLKDYEFNICWTDMFNGPIQGQEHSDFVS

SEQ ID NO: 198748 - protein, 53 aa, Glycine max
  Clone ID: PAT_MRT3847_21493C.1.pep
KFRDKSDFFFFILYLSFFVFPRLCAGEGIAMDHSISLFFSPHQCCIIFNTSGP

SEQ ID NO: 198749 - protein, 39 aa, Glycine max
  Clone ID: PAT_MRT3847_21494C.1.pep
STRSKTTKRPTNAVNYWCKRAGVLLLLNAPTNTKNPEAQ

SEQ ID NO: 198750 - protein, 68 aa, Glycine max
  Clone ID: PAT_MRT3847_21495C.1.pep
RLTFRDPFLEGNSTPPKPCLFLVKKNKKKNTNNNNNNNNKYIIVVIVIKNYDGCALVAFIHKLILFFM

SEQ ID NO: 198751 - protein, 143 aa, Glycine max
  unsure (1)..(143): unsure at all Xaa locations
  Clone ID: PAT_MRT3847_21496C.1.pep
LKWELAPFPEFEAFAPFAFVLDKGSQNPFARGPRLGGLFXQSQSGPFSGGGPIIPFFFGGKGFFGSLEMGRVREFFVGVGGFFTPNNPPFKEFFFFSKPFLGEAEVLFKGVFQGPRGLFFFRGRVEKNCFKNKKLFNSPFKFF

SEQ ID NO: 198752 - protein, 94 aa, Glycine max
  Clone ID: PAT_MRT3847_21497C.1.pep
RVEILRRLLVTSQARAVAPGGATRLTDKAVKDYSAYRPSLLLWALVDLIYNMFKNVPTSNTEGGWSCSLAEYIRHNDMPIYEAADKALKTFQEE

SEQ ID NO: 198753 - protein, 62 aa, Glycine max
  Clone ID: PAT_MRT3847_21498C.1.pep
YKEKPPEELMRCQSAGYSESQGHTFLKVFIMLVRNEGSSFCPLGVSNDDSPCQKVKPTFVEL

SEQ ID NO: 198754 - protein, 233 aa, Glycine max
  unsure (1)..(233): unsure at all Xaa locations
  Clone ID: PAT_MRT3847_21499C.1.pep
MAEDDIYTQDGTITISKKPANKKKTGNWKACYFILGNECSERLAYYGMSTNLVNYLRERFNQGNATAANNVTTWSGTCYITPLIGAFLADSYLGRYWTISSFSIVYVIGMILLTLSASAPGLKPSCDANGCHPTSAQTATCFIALYLIALGTGGIKPCVSAFGADQFDDSDEKEKIKKSSFFNWFYFSINIGALVASSVLVWIQMNVGWGWGFGVPAVAMVIAIISFFGGSRX

SEQ ID NO: 198755 - protein, 105 aa, Glycine max
  Clone ID: PAT_MRT3847_2149C.1.pep
MNLRPLGPLVRMAVVIFGGVATLNLASAATIKVLRFASEKKREKVALPCRVCRGKGFYICKLCNGNSTISWSPMFDPIAINPCVCPTCEGNRVQRCLNCLGKGYD

SEQ ID NO: 198756 - protein, 36 aa, Glycine max
  Clone ID: PAT_MRT3847_214C.1.pep
PKQIFELNSLLFSYSFLSLNNNHSLFNLQKILSHTL

SEQ ID NO: 198757 - protein, 830 aa, Glycine max
  unsure (1)..(830): unsure at all Xaa locations
  Clone ID: PAT_MRT3847_21500C.1.pep
EGVSLDPAKIMVVKNWPTXSLKQLRGFLGLAGYYRRFVRGFGGIARPLTKMLKKNNFHWSNKAKAAFQSLKDSLIQSPVLALPDFSKVFVVEVDASGYGIGAVLMQNHHPIAFISRVLDIQQQSLSTYEKELLAVVFAVQKWRHYLLNTHFIIRTNHKSLQYILSQRLTTSFQQKWLVKLMEFDFTIEFKQGRENLAADALSRHKAVDCQTITTLIPESNMLNRIIRSWKGRLVVRKDLTLQTDLLQWIHAGPTSGHSGREATLKRLKSIVYWRGMTKDKCKYDKSSYSGLLQPLPIPERIWQHITMDFIEGLPNSKGKQVIYVVVDKLSKAAHFMSLTHPYTAIEVAQSFLDNVFKLHGFPDSITSDRDPIFVSQFRKDLMAFQGVQLQLSSAYHPQTDGQSEVVNRCLETFLSCMCCDVPHEWSKWLPLAEWWYNTNHNTSIQCSPYEVMFGQPPPIYLPYLPGESKVEIKDKIGVVAYKLKLPQGSKIHDVFHVSQLKRHVGEAPVSNFLPTDSDGVMGGKEPELILDRATVKRGNRTVTKFYLHQKKPDLIALVAQTCRASMGANLPNMSEASSYSIDIAKMRNALLSSVSSRFNCYGNDEAQFEILEGSMHMNDLIDFHINGFNMESRIFNNYSQLGQGVHTQPSQSQSLIYDYNHYPGSLFAIPSSKEISQQSLLLDKDPSQYEGVCGNARKRPFEYTDNMSLWKKVKSNSKSKITIMEPKWHQAKEVSEIIPPHKTDTASVLQEASLYIKLLQAQIRTLFQMLSFTYFSTINDPHTQLVSRQECADKLEVDLRSRGLCLVPISITDKITKVDQIHHASASINT

SEQ ID NO: 198758 - protein, 86 aa, Glycine max
  Clone ID: PAT_MRT3847_21501C.1.pep
DVEFLIKPCVAGNECSERLAYYGMSTNLVNYLRERFNQGNATAANNVTTWSGTCYITPLIGAFLADSYLGRYWTISSFSIVYVIGM

SEQ ID NO: 198759 - protein, 72 aa, Glycine max
  Clone ID: PAT_MRT3847_21502C.1.pep
KHLGTSVIHKASKEVQLPFNCTMKDSTDGSTSPLIDWQNLDTMSWIRGYGIRTGLTIPSPPTQTTLDGLKSP

SEQ ID NO: 198760 - protein, 46 aa, Glycine max
  Clone ID: PAT_MRT3847_21503C.1.pep
PISINNPNQRRIPHLAPHACQCLQRHPACLLHAPTLGTYRIVYRGL

SEQ ID NO: 198761 - protein, 67 aa, Glycine max
  Clone ID: PAT_MRT3847_21504C.1.pep
AAEEHLLIGKAYLQFYFMRVNIHIPYLHIEFAASPQRGDNLMHIMSSLSSRKERLSVQKKKKKRARA

SEQ ID NO: 198762 - protein, 61 aa, Glycine max
  unsure (1)..(61): unsure at all Xaa locations
  Clone ID: PAT_MRT3847_21505C.1.pep
EVLYSARALLPEDFIFPCAQGKRGGTLKXARSNSADKTQPFKFTLLPSMQPSTELQSKAVL

SEQ ID NO: 198763 - protein, 70 aa, Glycine max
  Clone ID: PAT_MRT3847_21506C.1.pep
PRITVALAMLQQQSLSCVHRHRGNNDILRQVRLAVNAIITYMYPSNRTVLCNKLSYLFSHHRMDSSVLLQ

SEQ ID NO: 198764 - protein, 64 aa, Glycine max
  Clone ID: PAT_MRT3847_21507C.1.pep
RPRYGSRVSQSAFSPLLYENPTSRSLGKPKQAFSHTLSTNGPSKITLHVNATISLNISFLCPFD

SEQ ID NO: 198765 - protein, 74 aa, Glycine max
  Clone ID: PAT_MRT3847_21508C.1.pep
TCCQIGEALSKRMSLIAPWTETSHLLKLRDDDLFLRIRLVFYIQLRFEKETKTAVLDHASRALNHVKGLVSHDV

SEQ ID NO: 198766 - protein, 171 aa, Glycine max
  Clone ID: PAT_MRT3847_21509C.1.pep
MGGRKWSILVAIFILLLAMEAVIAQGQGNGNGNGNGNGNGKDKDKEEKEREKREKKEKKEKEKEKKEKEKKDKKQRDEATNYDKLSSLPTGQERGFCRTNTTCEFKTIVCPSECASRKPKKNKKQKACFIDCSSSTCEATCKVRKANCDGYGALCYDPRFVGGDGVMFYFH

SEQ ID NO: 198767 - protein, 128 aa, Glycine max
  Clone ID: PAT_MRT3847_2150C.1.pep
FGSSFTTFSRCNSSLELLRVCTNALEEVEKSFVSQIQDWSSHNSICWKRRLQRDQKVDEYVWQDVTLLKATLLETRAKLLARGGRLDSAKELCRTCISIRTVMLGHNHAQTLAAQETLARLVRMRSKI

SEQ ID NO: 198768 - protein, 99 aa, Glycine max
  unsure (1)..(99): unsure at all Xaa locations
  Clone ID: PAT_MRT3847_21510C.1.pep
RAVMREPNTREHDEPDMNTRYQHLSTTXTNGDFAKGKDPTMDRENVSCAGGGQTSRNTSTTMLESGGQNDRRXNGEYCGRKTYAAHNENQPQEKKILQG

SEQ ID NO: 198769 - protein, 85 aa, Glycine max
  Clone ID: PAT_MRT3847_21511C.1.pep
LGTIWSIRFTSDGQFMYMAECADFVHIYDVMSDYDKRHELDFFVEISGTSVSPYTDTLFVGVWDRMYGGLLQFRRLYNYSYLDSL

SEQ ID NO: 198770 - protein, 76 aa, Glycine max
  unsure (1)..(76): unsure at all Xaa locations
  Clone ID: PAT_MRT3847_21512C.1.pep
LHLHKHRLSTHMKXRGISSTETDXRLTFPXSTXCRVTSGQCTFMMSRTSAPPIINCYSWLXPFAQEAIQMVLEFCC

SEQ ID NO: 198771 - protein, 69 aa, Glycine max
  unsure (1)..(69): unsure at all Xaa locations
  Clone ID: PAT_MRT3847_21513C.1.pep
AAXGTPEGXXPAPPQRDKQDTEGPPATDTGSKPPDKDTTKKPPRHREDFLINLWILFRYLVIGIYVGLA

SEQ ID NO: 198772 - protein, 35 aa, Glycine max
  Clone ID: PAT_MRT3847_21514C.1.pep
GKRRFVSGDGEEMTLIPGTSVEEAYNKLIVELCEK

SEQ ID NO: 198773 - protein, 63 aa, Glycine max
  Clone ID: PAT_MRT3847_21515C.1.pep
QRRRSTFLQSAALMLQLGLLYSKWWIIASDTLSVPSLSLHVSAKRFTEFTGLCRSTCFPHLSR

SEQ ID NO: 198774 - protein, 53 aa, Glycine max
  unsure (1)..(53): unsure at all Xaa locations
  Clone ID: PAT_MRT3847_21516C.1.pep
PPENRLNRKGAGAGTKQSTKAAKDTNKPQRPPSAXFVVFMVRLQXQFKNEHPN

SEQ ID NO: 198775 - protein, 55 aa, Glycine max
  Clone ID: PAT_MRT3847_21517C.1.pep
RKVILEVYLKWSYYRAIGGSKKVILSEVYIDFDLIQIIFCLYIFIVINKRSNLFF

SEQ ID NO: 198776 - protein, 329 aa, Glycine max
  unsure (1)..(329): unsure at all Xaa locations
  Clone ID: PAT_MRT3847_21518C.1.pep
LLKQIRTKLTGAEEKNKADLGGSRDQKVTHRKPXSFKDKKKAQNWFQRQFSRTMSHDYDAEMELATFFAAAAFAIFSLEGSLIPQQKKKRETPLTRGKSKVDDTKPPISQFGGTSRQFSVDLKRPEKTMTPAPSMRRSSTFGEKVKSSTDGKKPEIQAPKRTTTFGDEHSVNTGEIKPETPLPRVAPPVHQQMPLRPPPPPLPPPPPPPIRQTSARPGTNGTKADAWEREELEKIKERYEKLLETIDSWEKRKKAKAIRKLNKHQHSESERKRAKVLKKYQDKMSYISQIAGGARAQAEERRRSXVLKAKEKKNIIRTTGKIPGPCSCF

SEQ ID NO: 198777 - protein, 57 aa, Glycine max
  Clone ID: PAT_MRT3847_21519C.1.pep
MCLDRRVHRNVRTGYTHNSLGRICSDCSLVIDQMLMTMSVGHMIGDHCASTIDRTSS

SEQ ID NO: 198778 - protein, 89 aa, Glycine max
  Clone ID: PAT_MRT3847_2151C.1.pep
MMAPLMLPGQQMGETMVVILMIVQNIRIVTNGGSIVDRGVDLCCSAIGAATVAPTIASIQLIIPTIAAAKAGGGERTTDLSAMLTVPTS

SEQ ID NO: 198779 - protein, 40 aa, Glycine max
  Clone ID: PAT_MRT3847_21520C.1.pep
FLAIVDLSTLSILKALFERHFRVMKSLYRSAKKVKGKKNG

SEQ ID NO: 198780 - protein, 132 aa, Glycine max
  Clone ID: PAT_MRT3847_21521C.1.pep
LVASMNPYPSGFSVCLFRMIFIEPTEHVFPSIGVLILLVHPVLLISDPEGTDLIGAGGFPCNRRRRRSLLLCGPHLCGLGFRWHHHVGLRLRSCVMLSGLLGRAACPEIRRNLPSRPRICNLVLAWVHTSSR

SEQ ID NO: 198781 - protein, 63 aa, Glycine max
  Clone ID: PAT_MRT3847_21522C.1.pep
HSSRTIRLRSRVAESATATDGCLCKKNCNVSSFVQDDTVDTYISLVSSQHLKSSIRIGCRTKS

SEQ ID NO: 198782 - protein, 325 aa, Glycine max
  Clone ID: PAT_MRT3847_21523C.1.pep
MIGFGGNSCSELSEMDMMNMETNNRKFLSLPLSNNNNNSGNAQMRSSSDNRRVPVTSNSNIAQEHHYSHHNPTDTCSVRDKIMAHPLFPRLLSSYLNCLKVGAPPEVVASLEESCAKCESFNASSGRTGGSIGEDPALDQFMEAYCEMLIKYEQELTKPFKEAMLFFSRIECQLKALAVSSDFGQSETSSQNEVDVHENNLDSQAEDRELKVQLLRKYSGYLGSLKKEFLKKKKNGKLPKEARQQLLDWWNRHYKWPYPSESQKQALAESTGLDLKQINNWFINQRKRHWKPSEDMQFAVMDATNYYMENVMCKPFPMDGMPMLL

SEQ ID NO: 198783 - protein, 98 aa, Glycine max
  Clone ID: PAT_MRT3847_21524C.1.pep
KSSYSSICNCLVFLPSKFVRSSVFPCVFLSILSKDSVHCLCISVIKCNCNLFILFFFFALLESVLVPFLRFLAEKCNFGFRLRYPFAFQSMPKSSKVF

SEQ ID NO: 198784 - protein, 201 aa, Glycine max
  Clone ID: PAT_MRT3847_21525C.1.pep
MAAGVTVKSEVLESSPPEGVCSNTEENHLVQTNLSDGSPNKSVPASGLNAVIPSANQLTIFYNGSVCVYDGIPAEKVHEIMLIAAAAAKSTEMKKIVTQTTLISPVPSRPSSPHGITNNIASSQKSSICRLQAEFPIARRHSLQRFLEKRRDRLGSKAPYPSSSTTKVADNIENNFCADNAPELVSLNRSEEEFQPTVSAS

SEQ ID NO: 198785 - protein, 50 aa, Glycine max
  Clone ID: PAT_MRT3847_21526C.1.pep
DFYIITTTLCDIYPFERSKRKKLSTGVNPKDFAHHPRDWEQATFFSVRRH

SEQ ID NO: 198786 - protein, 58 aa, Glycine max
  Clone ID: PAT_MRT3847_21527C.1.pep
WIVEMNDFTGSGHQQEEQHCSNESSDRNKLLMNKQIVLIFWRIRKKYFNKISDAFINQ

SEQ ID NO: 198787 - protein, 201 aa, Glycine max
  Clone ID: PAT_MRT3847_21528C.1.pep
MAAGVTVKSEVLESSPPEGVCSNTVENHLVQTNLSDGSPNKSVPASGLDAVIPSANQLTIFYNGSVCVYDGIPAEKVHEIMLIAAAAAKSTEMKKIGTQTTLISPVPSRPSSPHGITNNIGSSQKSSICRLQAEFPIARRHSLQRFLEKRRDRLGSKTPYPSSSTTKVADNIENNFCADNAPELISLNRSEEEFQPTVSAS

SEQ ID NO: 198788 - protein, 133 aa, Glycine max
  Clone ID: PAT_MRT3847_21529C.1.pep
NFPSVTLLLSSPSAFFPSLFALLLSTHFFISFDHFPWHHSFRRIFFYLFWRERYYHRHVDQCYFVLPNELHKKWSISYFASVSVSLWGSEPIGGRIFSCSFNKPKSAASKIKISQCGKKNTKRKENHKPCTNP

SEQ ID NO: 198789 - protein, 68 aa, Glycine max
  unsure (1)..(68): unsure at all Xaa locations
  Clone ID: PAT_MRT3847_2152C.1.pep
QLRCMLDMDKLILIFYRILCVSFLTGIYEYTITSPKLVLLSAWQKLHRQRTPSQSYGWSELKPRAXPF

SEQ ID NO: 198790 - protein, 320 aa, Glycine max
  unsure (1)..(320): unsure at all Xaa locations
  Clone ID: PAT_MRT3847_21530C.1.pep
VLSSLLCSMYYGHLERHVIFPFLEKTLESGSCIENNFGQTNCDDKVSSSCYLLMRFIDDFLFISTSKKQAASFFSRLERGFRGYNCYMNNKKFGANFDVEHTSDSPLNRVYVGEDGATSFLQWSGLLINCSTMEIHAXDYTKYLGSHLSSTLTVCWQGKPGINLNEKLRLFLRPRCHPIFCDSNINSAAVVRLNIYQVCLLCAMKFHCYIRDLSIMCKLHKRFCSNIIQRSLRYMYQMIKKQMHSISLNSDIQPILVLEKEEVXWLGFHAFVQVLKRKQSQHKELLSXLRSRVSSHRISESVSPELKYAINTKNSLCYGT

SEQ ID NO: 198791 - protein, 150 aa, Glycine max
  Clone ID: PAT_MRT3847_21531C.1.pep
MAGAMGMKVDKIRQIVRLKQLMTRWKHISLRRRSSDEPSAVRRPPSGFFFVYVGPERTRFAIPARFLNLALFEGLLKQTEEEFGLRGNGGLVLPCQVPFFSNVVKYLHKDEHKYGSLSLQDFVNMLSASSSDSCKENVAVFAPLLQKAEV

SEQ ID NO: 198792 - protein, 123 aa, Glycine max
  unsure (1)..(123): unsure at all Xaa locations
  Clone ID: PAT_MRT3847_21532C.1.pep
MDVIKTPYISSRPIPNVQADPLVLLSIDVIFISVSNDTCKRLFGLLLCSCFSGSVNAINRFAVPFGEDDTDPSIWALDHIYHELMFCMAXSVSADEHAVVRYGTGPDLLETDRDVLGLIDDDG

SEQ ID NO: 198793 - protein, 96 aa, Glycine max
  Clone ID: PAT_MRT3847_21533C.1.pep
TRNSARGKTSRHRLRPLQDENATEQSGCTRGYLLQEVLMPLVLECLSCTDLLRLQSRIKLVPSYLVESCHRLEDIVKNSEVSFRKAANSSAVPKGA

SEQ ID NO: 198794 - protein, 114 aa, Glycine max
  unsure (1)..(114): unsure at all Xaa locations
  Clone ID: PAT_MRT3847_21534C.1.pep
FSPTNSSSTLLLDACTXSKSEPHSQGIDLPNIGXGPNIGLEMXRSERAKQTLWTLXYLIDNPQQRSNSLLTFLLGTSSQGFXEIGGNTLMPGISVPQATARSSENAEFLCMDPG

SEQ ID NO: 198795 - protein, 143 aa, Glycine max
  unsure (1)..(143): unsure at all Xaa locations
  Clone ID: PAT_MRT3847_21535C.1.pep
DSGARADEDEDEEQDKPCLYYTRPPLKTEEHMPMDYEVMDPYXRERKSENLGFEDLRLRTFFFAGLQCRNSLYNRCGRIRVLQRYNQRSPQLENIRHYSIMEFNSXPNTILLPNHADADYLIXILNGTAILSLVNNDDRDSYR

SEQ ID NO: 198796 - protein, 69 aa, Glycine max
  Clone ID: PAT_MRT3847_21536C.1.pep
VAIKRQFHHQYNLSASRLCLPITTQGGPLSVLLKFYSQILKISKFFSSFIHTSRPFFPLTLPNKLPKLL

SEQ ID NO: 198797 - protein, 68 aa, Glycine max
  unsure (1)..(68): unsure at all Xaa locations
  Clone ID: PAT_MRT3847_21537C.1.pep
TGAMKICFYYYWHFNPRWNLLGIMVSSWIDMEQEILTRVLLIFPLPTRPMHSSTLLRIKXYKNITGQR

SEQ ID NO: 198798 - protein, 154 aa, Glycine max
  unsure (1)..(154): unsure at all Xaa locations
  Clone ID: PAT_MRT3847_21538C.1.pep
SSRFXCVNYHLKDIYAISGKFGPHKIESVLFILREWVDDPMSLRSASHAIQLLKVLDFPNHTPSIYAPISVFVAVMTLWTFTSIKSPESSYQDQLARLDSEDRGSLLTLFNNPSNLPEAIMRYGVRYLGGCKEWRIGAALALVLAKMTETRSSV

SEQ ID NO: 198799 - protein, 145 aa, Glycine max
  unsure (1)..(145): unsure at all Xaa locations
  Clone ID: PAT_MRT3847_21539C.1.pep
MKDPEEHPVKSRRPLQKSAERRRRCRRRSQCKIEKMQETELDSHLGFSSATCKSLVFHQRPGFGQLGTKCVIKANHFLADISVSDLSHYNVIITPEVTSRKTSKAIIAELVRLHRNTDLATRLPVYDGGRNXYTAGLLSFTTKCS

SEQ ID NO: 198800 - protein, 305 aa, Glycine max
  Clone ID: PAT_MRT3847_2153C.1.pep
MEFHCLPIFLYLNLMLMTANAALTPRHYWETMLPRTPLPKAITELLSLESRSIFEYAGNDDQSESRSILGYAGYNQDEDDVSKHNIQIFNRLFFLEEDLRAGKIFNMKFVNNTKATVPLLPRQISKQIPFSEDKKKQVLAMLGVEANSSNAKIIAETIGLCQEPATEGERKHCATSLESMVDFVVSALGKNVGAFSTEKERETESGKFVVVKNGVRKLGDDKVIACHPMSYPYVVFGCHLVPRSSGYLVRLKGEDGVRVKAVVACHRDTSKWDHNHGAFKVLNLKPGNGTVCHVFTEGNLLWLPN

SEQ ID NO: 198801 - protein, 66 aa, Glycine max
  Clone ID: PAT_MRT3847_21540C.1.pep
LNASHFLLRHPLTEFKFFFPSPSLLLIWRKASPKVRMHFPFCFNKYLRLRSLTSFFILFIHFSYLW

SEQ ID NO: 198802 - protein, 58 aa, Glycine max
  Clone ID: PAT_MRT3847_21541C.1.pep
FVVFSFWLFLKKIQRKCFLSFKQTYFYSFLFVFFENENRKHSTHLNQWSSNISQGFLM

SEQ ID NO: 198803 - protein, 94 aa, Glycine max
  Clone ID: PAT_MRT3847_21542C.1.pep
CRGTLIFVFFPRKKDPFKRAPFLTNEVKNGGKGVNVNPTRSIVLTKAFSGPNWLGWPFFFFTIFWGPLPFWGCFPPTKGGANKTHSIGWLIKFF

SEQ ID NO: 198804 - protein, 162 aa, Glycine max
  Clone ID: PAT_MRT3847_21543C.1.pep
LQFVMDDLYYAGFSTDDNSSSSNDFFWDNEGLNDVRQFQFSGVEDHEEYGGIDSFYSNFGFFPDDPSEEGYLLSTNHQKYHQIFDDYGLLDDNLQFDMVSPPLQFDEQYRTMVPLCNSTKDMPHSTTPLASLEILKSYGKGFKRFWNEGNNTMQPIDDETLA

SEQ ID NO: 198805 - protein, 58 aa, Glycine max
  Clone ID: PAT_MRT3847_21544C.1.pep
KHVAPEKANLEGACLRLVQYNSKMKQEQTTEFVLQLTFSRHIITHISHLQFSQNQLVR

SEQ ID NO: 198806 - protein, 82 aa, Glycine max
  Clone ID: PAT_MRT3847_21545C.1.pep
SFYQRKFHQYCSINISTYDPIQPERHNHYDGEVQLSTIVDFLALAFFVGNFTLLGLLTTLLSYSPVCSRSPPAGSHASGIPR

SEQ ID NO: 198807 - protein, 76 aa, Glycine max
  unsure (1)..(76): unsure at all Xaa locations
  Clone ID: PAT_MRT3847_21546C.1.pep
GTNHQNRSERILRSKIYDSTCWTEHCSVLTAETWVDKDLELXHLGRTYGDGRKPTPFMPTQIXMLQIDPEIEIIMN

SEQ ID NO: 198808 - protein, 60 aa, Glycine max
  Clone ID: PAT_MRT3847_21547C.1.pep
SAHSHIHCLWRACVSLRCKLRAPVRPGNLPLGPCVAGLLSWVLPVFFGSHGSNAVPIISM

SEQ ID NO: 198809 - protein, 51 aa, Glycine max
  Clone ID: PAT_MRT3847_21548C.1.pep
FVCRLMLKVRVYVDCALWSEFTLLDSVCCWGMIHSKLFAKLRLAAPIYLSE

SEQ ID NO: 198810 - protein, 264 aa, Glycine max
  Clone ID: PAT_MRT3847_2154C.1.pep
MARGLKKHLKRLNAPKHWMLDKLGGAFAPKPSSGPHKSRECLPLILILRNRLKYALTYREVIAILMQRHVLVDGKVRTDKTYPAGFMDVVSIPKTNENFRLLYDTKGRFRLHSVRDDEAKFKLCKVRSVQFGQKGIPYLNTYDGRTIRYPDPLIRANDTIKLDLEENKIVDFIKFDVGNVVMVTGGRNRGRVGVIKNREKHKGSFETIHVQDATGHEFATRMGNVFTIGKGTKPWISLPKGKGIKLSIIEEARKRIAAQQATAA

SEQ ID NO: 198811 - protein, 84 aa, Glycine max
  unsure (1)..(84): unsure at all Xaa locations
  Clone ID: PAT_MRT3847_21550C.1.pep
PRSPYTIHIFIKTLTRETMTLQVESSDTIDNVKAQIHENRSXIPPDHQRLIVAGKKFEEGRSLGDYNIXKELTHHLVLRLRGGM

SEQ ID NO: 198812 - protein, 118 aa, Glycine max
  Clone ID: PAT_MRT3847_21551C.1.pep
TFKFKRVRVVNIKATNADKDQLLAIALDAGAEDVIDPPTYEDDTEEDRYYKIVGSSENYSSILSKLREEGIDFEPDNGSELLPNTPVEVDDEAMDLNKELMSKLLELDDVDAVYTDQK

SEQ ID NO: 198813 - protein, 44 aa, Glycine max
  Clone ID: PAT_MRT3847_21552C.1.pep
ANDSGYHQLASHRLNTHAVMEPYAMATNTHLRGLHPMYERHYPH

SEQ ID NO: 198814 - protein, 120 aa, Glycine max
  unsure (1)..(120): unsure at all Xaa locations
  Clone ID: PAT_MRT3847_21553C.1.pep
DSTPSAQMLKETXVKVDNESCCTRSSYKTQTLSVRKSVLTDPDKVRKLQXSGEVFVQDDLCVNMVGEVGKCGECGXGRLGMDKDKEKECGVFCGFLELRRLQLNKGGVVGGRRVVKGRCG

SEQ ID NO: 198815 - protein, 69 aa, Glycine max
  Clone ID: PAT_MRT3847_21554C.1.pep
KIKSRNNIKRYPVIQRETPHKLCAEFYFLDLFSLSKEYICLVSSNIFFGQAERSRNNIKRYPVIQRETP

SEQ ID NO: 198816 - protein, 53 aa, Glycine max
  Clone ID: PAT_MRT3847_21555C.1.pep
PSIVGGVIQPAVHLCGNSQVHGRSNDRCKGLNEHLPVHIVETGFPLRVPLSVL

SEQ ID NO: 198817 - protein, 110 aa, Glycine max
  Clone ID: PAT_MRT3847_21556C.1.pep
MAKHHPDLIMCRKQPGIAIGRLCEKCDGKCVICDSYVRPCTLVRVCDECNYGSFQGRCVICGGVGISDAYYCKECTQQEKDRDGCPKIVNLGSAKTDLFYERKKYGFKKR

SEQ ID NO: 198818 - protein, 84 aa, Glycine max
  unsure (1)..(84): unsure at all Xaa locations
  Clone ID: PAT_MRT3847_21557C.1.pep
MAKHHPDLIMCRKQPGIAIGRLCEKCDGXGRCVICGGVGISDAYYCKECTQQEKDRDGCPKIVNLGSAKTDLFYERKKYGFKKR

SEQ ID NO: 198819 - protein, 43 aa, Glycine max
  Clone ID: PAT_MRT3847_21558C.1.pep
ILELHSFYAENTIVVNDYLLLSLNKHQIHGRDKNGLLKGEDKR

SEQ ID NO: 198820 - protein, 98 aa, Glycine max
  Clone ID: PAT_MRT3847_21559C.1.pep
MAKHHPDLIMCRKQPGIAIGRLCEKCDGKCVICDSYVRPCTLVRVCDECNYGSFQGRCVICGGVGISDAYYCKECTQQEKDRDGCPKIVNLGSAKTDL

SEQ ID NO: 198821 - protein, 84 aa, Glycine max
  Clone ID: PAT_MRT3847_2155C.1.pep
TLFRLLNVNGYEGLITLAAMTHSLSMHQLAQKPLRLNYYPDNLENIIPFGSDPTQSQPIPPYPHTSQAADAQAPSLPYSYYPMR

SEQ ID NO: 198822 - protein, 579 aa, Glycine max
  Clone ID: PAT_MRT3847_21560C.1.pep
MGNCCSDVAGGQSAIGGTAAGHLNPANAPNDAVDRFLRSRGYNGLFSQIELSFSASGLRDRDVLSKSDPMMVLYARGKNAALTELGRTEVILNSLNPTWITKHTLIYNFEVVQVLVFRVYDVDTQFHNIDVKMLKLEEQQYLGEATCALSEIITKFDRSMTLDLHRREDSIRSTQSQNCGKLLVHAEECVSSKTTIEMILRCSDLEYRDLFSRSDPFLLLSKVVEGGSHIPICKTEVIKNDHNPIWKPVFLNIQQVGSKESPLIIECYNFNSNGKHDLMGKVQKSLVELEKLYSGGQGENFISSAPAGHNSHNKVLKSQLFVDKFSESIQYSFLDYLAGGFELNFMVAIDFTASNGNPRLPDSLHYIDPSGRPNAYQRAVLEVGEVLQYYDSDKRFPTWGFGARPIDAPVSHCFNLNGSSHCCEVEGIQGIMMAYTSALLNVSLAGPTLFGPVISNAALIASQSVANGGRKYFVLLIITDGVVTDLQETKDALVKASDLPLSILIVGVGGADFKEMEILDADKGERLESSSGRVASRDIVQFVPFRDVQSGVSVVQALLAELPTQFLSYVRSRNILPSL

SEQ ID NO: 198823 - protein, 144 aa, Glycine max
  Clone ID: PAT_MRT3847_21561C.1.pep
SFRTTKCIPEGPTLFGPVISTAALIASQSVANGGRKYFVLLIITDGVVTDLQETKDAIVKASDLPLSILIVGVGGADFKEMEVLDADKGERLESSYGRVASRDIVQFVPFRELQSGFSVVQALLAELPAQFLTYVRSRNIQPSL

SEQ ID NO: 198824 - protein, 78 aa, Glycine max
  Clone ID: PAT_MRT3847_21562C.1.pep
SDPMMVLYARGKNAALTELGRTEVILNSLNPTWITKHTLIYNSEVVQVLVFRVSDVDTQFHNIHVKMLKLEEQQYLCE

SEQ ID NO: 198825 - protein, 119 aa, Glycine max
  unsure (1)..(119): unsure at all Xaa locations
  Clone ID: PAT_MRT3847_21563C.1.pep
MNRGGGFHITIQAPVNIALIKYWGKRNEELVLPLNDSIAITIDELSATTHITIGPDVSTDSVTLNGVGIDIAGSAXFRNVFQQIREYSNRKRKLKGEHASKGWHTKNESSTNFPTSAGL

SEQ ID NO: 198826 - protein, 45 aa, Glycine max
  Clone ID: PAT_MRT3847_21564C.1.pep
MASGATCVQRLDGSRDSAIHTKYRISLRSSSMQEPRYPLPRVMSR

SEQ ID NO: 198827 - protein, 354 aa, Glycine max
  Clone ID: PAT_MRT3847_21565C.1.pep
MNSGKGERSYANNSMLQRKLMIKGKHILEETITRFYSNYSPSCMKVADLGCSVGPNTLLVISNIIDIVDTTCTRLNQEPPTFQFYLNDLFGNDFNTTFKSLPDFYKRLDEDKGHKFGSCFINATPGSFHGRLFPNNSINLFHSANSLHWLSQDPLLEFTKEAESFNKGHCHIVSTSPPAVYQAYLKQFQQDFKFFLKSRSEELVPGGAMVLLFLGKNKTHRRTGWEIISLVLNDMLLEGLIEEEKLDSFNIPVYEPTVEEIRHVIQEEGSFFLQQLEILILPWDEGLNEGVDANIKAQFMAKVARAIMEPLLSAKFGREVIIEVFIRYEKKLAQLMEVEKLESTTFVISMTKNA

SEQ ID NO: 198828 - protein, 610 aa, Glycine max
  unsure (1)..(610): unsure at all Xaa locations
  Clone ID: PAT_MRT3847_21566C.1.pep
MSSSAPRNKAKPGNKNQKPRGWNRGSSGKFESAVQSASPSTANAMLMKDCELLLKRXEANEYAWVFNTPVDVVKLNLPDYFTIIKRPMDLGTVKSKLAAGEYAGPLEFADDVKLTFSNAMNYNPSGNDVHLMADTLNKYFELRWKAIEKKLPKSDVLPIPAKPDNSEGVKTKRQAPPSKKRKIASLPPQPKVMPPTKKVMSDQEKHDLGRELESLLGEMPMHIIDFLKEHSSNGRECGDDEIEIDIDDLSDDTLFTLRKLLDDFLQEKQKNKAKVEACEVEVLNDSGPSNSSLQPFKGNDPADEEVDIGGNEPPVSSYSHVEIEKDTTYRVNKSLSPGSSNDTDSDSSSDSEADDVKASPANVAKAPENLGSEAQLDEMTMAAATLERNQSVSGLDQLEDNSQHKPSSFDSDCQQDGDSAPTERQVSPDKLYRAAVLKKRFLDTILKAREKTLTQGEKGDPEKLRQEREKLEMEQKKEKARLQAEAKAAEDARKRAEEEAAAEARRKRELEREAARQALLQMEKTVEINENSRILEDLELLRAVPTEQLPSSVDETSPAHSQDGLGSFKFGSSNPLEQLGLYIKADDEEEEGEPPCIPNPVNDVEEGEID

SEQ ID NO: 198829 - protein, 55 aa, Glycine max
  Clone ID: PAT_MRT3847_21567C.1.pep
LNHLIFKRQALVHATSKVAFLSLCTHNLFIHYNKNSKNYRKRSNLVILTAKQTFF

SEQ ID NO: 198830 - protein, 75 aa, Glycine max
  Clone ID: PAT_MRT3847_21568C.1.pep
YTRSNLHRVSNSLLNVLALGSSDSLAHHRHCGSYIHCSQDHDMARGPATPSVALIALLASFRKFTICFYDTHFAL

SEQ ID NO: 198831 - protein, 52 aa, Glycine max
  unsure (1)..(52): unsure at all Xaa locations
  Clone ID: PAT_MRT3847_21569C.1.pep
RXKRFFGSNSQEECACLNTLLPNLTLALQRFTAKHILKHMTVKGKCNQIFLK

SEQ ID NO: 198832 - protein, 66 aa, Glycine max
  Clone ID: PAT_MRT3847_2156C.1.pep
EPSHEGQLFFSAFQWMQKLLSIFSALLKQLSQHDNASSYTRFFNMITEPLSVLIIPSQWLTHFFAA

SEQ ID NO: 198833 - protein, 97 aa, Glycine max
  unsure (1)..(97): unsure at all Xaa locations
  Clone ID: PAT_MRT3847_21570C.1.pep
HTSDADAQRTDLMTITRVLRNQQCIHPESRGDFSILLSHIVLDCKYLCSAVNKAGLAKLIALARQTYVHVXQHMILDVLSNDVFIKAFVSIVRTCIL

SEQ ID NO: 198834 - protein, 50 aa, Glycine max
  Clone ID: PAT_MRT3847_21571C.1.pep
FLPPLKKGVGFGLVGWGVWGPPMAQSRWRYLSLVTGLVNEDNNPIRKFMD

SEQ ID NO: 198835 - protein, 43 aa, Glycine max
  unsure (1)..(43): unsure at all Xaa locations
  Clone ID: PAT_MRT3847_21572C.1.pep
ERNIMGXXPLQQSXXRCFXFRXPKLXKXLVSLSVISEXGIXXR

SEQ ID NO: 198836 - protein, 166 aa, Glycine max
  unsure (1)..(166): unsure at all Xaa locations
  Clone ID: PAT_MRT3847_21573C.1.pep
PRVRAVAGGTTYLLFHAVGYIWQTSNCFLTASYSLTLRHVMDGAKQATKPGNLNELSMVLLNNXFFSLPSGIILVLGLNEVEYLLETSLLRMPEFXLVINASGVLGLGISFTLMVLLNNVLSLPLGIILVLGLNEVEYLLEKSLLRMPEFWLVITASGVLGLGISF

SEQ ID NO: 198837 - protein, 79 aa, Glycine max
  Clone ID: PAT_MRT3847_21574C.1.pep
KGHFFCCIFLKANVFNFKFNLCTYNNLKAPGERAWSAKDYPRPLGATTGSTDQNDLIFQTLILITLLYDFCLMVKLVYC

SEQ ID NO: 198838 - protein, 124 aa, Glycine max
  Clone ID: PAT_MRT3847_21575C.1.pep
DESSARILNKLRGNLKVEDVKLLEELLIQEGILFEPPSVEEESDIEDLTLQIISSLQAAMEKLTAAVDELKRENRILRANVDASTESLFYKGANNGSIFQNMILRIPTFFFRWLGYTSSPTGWQ

SEQ ID NO: 198839 - protein, 66 aa, Glycine max
  Clone ID: PAT_MRT3847_21576C.1.pep
WIKWQRNFRDVEDYGGSIDRLGLNSVVRRLLHEVRTWVDLSRLREALFFFFFFFFVYCVISLPFVF

SEQ ID NO: 198840 - protein, 485 aa, Glycine max
  Clone ID: PAT_MRT3847_21577C.1.pep
GSRFSLGQKKGWCFTCEFEYLIQKAKEGISPLSPIGILSKIHKIGSHLGRGKEEDAHEFLRCVVDTMQSICLKEVGVSSPLAEETTLVGYTFGGYLRSKIKCLRCLGKSERYERMMDLTVEIDGDIGTLEEALGQFTAPEILDKDNKYNCSRCKTYVKARKKLTVLEAPNILTIVLKRFQSGNFEKLNKSVQFPEVLNMAPYMSGTKDKSPLYSLYAVVVHLDIMNAAFSGHYVCYVKNIQGEWFRTDDSRVEPVELSRVLSERAYMLLYARHSPKPLGLVSSNVISSAGKFKRGNLEAIPASSKTRSNSMATSGESPSLQQKHGKYPNWNDGDDSLRNDFAYPEEWRFQYGGTNTMVDSSSESSLFSSSDASSCSTASIKDSASSADFSDYIFGEVGPSWYSHYGLSSNMGASSSHDNLDTDFLVDSSGASRRRRQDSEDKAVLYANKNKNRSGSRGVDLKRYITANHYDKNSGVHVRRISGDA

SEQ ID NO: 198841 - protein, 299 aa, Glycine max
  Clone ID: PAT_MRT3847_21578C.1.pep
FLLLLIFIHRGRVGLRAETFGIPIPDWGKNPRKMAEAVDRVIVPDFQPKKDVKIVTDEKATSLSTASIDDAAVINDLVIKLERCRANLSPVFRMKPIQFEKDDDTNYHMDVIAGLANMRARNYSIPEVDKLKAKFIAGRIIPAIATSTAMATGLVCLELYKALDGGHKVEDYRNTFANLALPLFSMAEPVPPKIIKHQDMSWTVWDRWILGDNPTLRELLEWLKAKGLNAYSISCGSCLLYNSMFPRHKDRMDKKVADLAREVAKFEILAYRRHLDVVVACEDDEDNDIDIPQISIYFR

SEQ ID NO: 198842 - protein, 48 aa, Glycine max
  Clone ID: PAT_MRT3847_21579C.1.pep
GYITVTALFKLCGELTPLAAYNRLTLLTNFNNNTLLTYFNTRPLISLF

SEQ ID NO: 198843 - protein, 273 aa, Glycine max
  Clone ID: PAT_MRT3847_2157C.1.pep
MARGLKKHLKRLNAPKHWMLDKLGGTDKTYPAGCAFAPKPSSGPHKSRECLPLILILRNRLKYALTYREVIAILMQRHVLVDGKVRTDKTYPAGFMDVVSIPKTNENFRLLYDTKGRFRLHSVIDDEAKFKLCKVRSVQFGQKGIPYLNTYDGRTIRYPDPLIRANDTIKLDLEENKIVDFIKFDVGNVVMVTGGRNRGRVGVIKNREKHKGSFETIHVQDATGHEFATRMGNVFTIGKGTKPWISLPKGKGIKLSIIEEARKRIAAQQATAA

SEQ ID NO: 198844 - protein, 160 aa, Glycine max
  unsure (1)..(160): unsure at all Xaa locations
  Clone ID: PAT_MRT3847_21580C.1.pep
IIPAIATSTAMAXGLVCLELYKALDGGHKVEDYRNTFANLALPLFXMAEPVPPKVIKHQDMSWTVWDRWILKDNPTLRELLEWLKSKGLNAYSISCGSCLLYNSMFPRHRERMDKKMVDLAREVAKVEIPSYRRHLDVVVACEDDDDNDIDIPQISIYFR

SEQ ID NO: 198845 - protein, 421 aa, Glycine max
  unsure (1)..(421): unsure at all Xaa locations
  Clone ID: PAT_MRT3847_21581C.1.pep
MLRELGLGFFLVVVPLLLSRFFGFDFDPLRDRDANSWFFFLIAFVLVLTIAFRRSSLLHYMLPTKRPCEGLVAEEEIDHNINNNNNSNSSSLKKKRIAAGTADSTVKNDESTVRSFNNSNSNNSSNSGDASEGASDMALGESNQPDIDEDLHSRQLAVYGRETMRRLFGSNVLVSGMQGLGVEIAKNLILAGVKSVTLHDEGTVELWDLSSNFVFSENDVGKNRAAASVSKLQELNNAVVVQSLTTQLTKEHLSNFQAVVFTDISLEKAFEFNDYCHSHQPPIAFIKTEVRGLFGSVFCDFGPEFTVVDVDGEDPHTGIIASISNDNPALVSCVDDERLEFQDGDLVVFSEVHGMKELNDGKPRKIKNARAYSFTLEEDTTNYGRYXKGGIVTQVXQPKVLXXKPLREALSDPGDFLLSDF

SEQ ID NO: 198846 - protein, 1105 aa, Glycine max
  unsure (1)..(1105): unsure at all Xaa locations
  Clone ID: PAT_MRT3847_21582C.1.pep
MLPRKRVREGGVVVEVDSDATTTNTNSAAASFPKKARIGSFAACSGAGAADSPVNVSGQGFSSGGGGDNSLGNSVGGMALGNSHPAEIDEDLHSRQLAVYGRETMRRLFASSVLVSGMQGLGVEIAKNLILAGVKSVTLHDEXMWSYGICPRRRQKGRSRILGRAKRLEVALGKNRAEASVSKLQELNNAVVVLTLTTKLTKEHLSNFQAVVFTEVSLEKAVEFNDYCHSHQPPIAFIKTEVRGLFGSVFCDFGPEFTVVDVDGEEPHTGIIASISNDNPALVSCVDDERLEFQDGDLVVFSEIHGMKELNDGKPRKIKNARAYSFTLEEDTTNYGMYEKGGIVTQVKQPKVLNFKXLREALSDPGDFLLSDFSKFDRPPLLHLAFQALDKFVSEIDRFPVAGSEDDAQKLISIASYINDSLRDGKLEDINPKLLRXFAFGSRAVLNPMAAMFGGIVGQEVVKACSGKFHPLFQFFYFDSVESLPTEPLDPNDLKPLNSRYDAQISVFGQKLQKKLEDAEVFVVGSGALGCEFLKNLALMGVSCGQGKLTITDDDVIEKSNLSRQFLFRDWNIGQAKSTVAASAAAAINPRLNIDALQNRVGPETENVFHDTFWENLSVVINALDNVNARLYVDQRCLYFQKSLLESGTLGAKCNTQMVIPHLTENYGASRDPPEKQAPMCTVHSFPHNIDHCLTWARSEFEGLLEKTPAEVNAYLSNPNEYTNAMRNAGDAQARDNLERVLECLDKEKCETFEDCITWARLKFEDYFANRVKQLIYTFPEDAATSTGAPFWSAPKRFPHPLQFSSSDLGHLLFLMAASILRAETFGIPIPDWVKHPKKLAEAVDRVIVPDFQPKKDAKIVTDEKATSLSSASIDDAAVINDLIVKLEGCRTKLQPEFRMKPVQFEKDDDTNYHMDLIAGLANMRARNYSIPEVDKLKAKFIAGRIIPAIATSTAMATGLVCLELYKALDGGHKVEDYRNTFANLALPLFSMAEPVPPKVIKHQDMSWTVWDRWILKDNPTLRELLEWLKAKGLNAYSISCGSCLLYNSMFPRHRERMDKKMVDLAREVAKVEIPSYRRHLDVVVACEDDEDNDIDIPQISIYFR

SEQ ID NO: 198847 - protein, 90 aa, Glycine max
  Clone ID: PAT_MRT3847_21583C.1.pep
FGAWAPLGGPRFSGFSFFPPFKKGKVFFVRGGAFSPVFGPRGVLACWPWPLFFRLREPVFFPKKKKKRKKKKQKKKKKKKKKKKKKKKKE

SEQ ID NO: 198848 - protein, 58 aa, Glycine max
  Clone ID: PAT_MRT3847_21584C.1.pep
VATHFGGLDICNLTPMKHDASSIRTHNQSHKATTLMLHQTLYKYCSNIRDHFQKEKRT

SEQ ID NO: 198849 - protein, 61 aa, Glycine max
  Clone ID: PAT_MRT3847_21585C.1.pep
NNWPAKTNALTEKTLSQPNSISLDDIPLKTPAPIAIRTRRTAFMNNGTPPMANHTPPRAGH

SEQ ID NO: 198850 - protein, 117 aa, Glycine max
  Clone ID: PAT_MRT3847_21586C.1.pep
QDTLPNDLLASVVLAGTLITNLIPAKHGYMGGDAALLPASNQRLESQMTVLNTGMPETVPLQTVNRQCTSALHAGSDIAAYIKSVFYEISIKTLLECITIYHLNHLPNINPGMKTLA

SEQ ID NO: 198851 - protein, 56 aa, Glycine max
  Clone ID: PAT_MRT3847_21587C.1.pep
HTEFMIKKNEFNSHITVKHFLSLLVSARNGLPSLTKNNKRFLSVIPRTINNNNEIS

SEQ ID NO: 198852 - protein, 91 aa, Glycine max
  Clone ID: PAT_MRT3847_21588C.1.pep
MRRSSASKKSGQSNSTPNAADLFRSASSKASSKESERIDSLFYSYANGSTGLIEVMVIDMLLFKYIMFPNVGNGHSPRCHESLHSVAWTSF

SEQ ID NO: 198853 - protein, 237 aa, Glycine max
  unsure (1)..(237): unsure at all Xaa locations
  Clone ID: PAT_MRT3847_21589C.1.pep
MRLCPAPPLSTRAAHPRHHPQPQPLRARTRHKKENVLRQCYPFLLLFIFLEFGAFRFFFFRIRESLDFLLKMRRSSASKKTGQSNSTPIAADLFRSASSKASSKESERIDSLFYSYANGSTGLIDPEGIETLCADMEVDHTDVRVLMLAWKMKAEEQGYFTLDEXLKKALPDLDKEVRRPSNFTDIYSYAFQYWFKGGKFKIFDIERIFEILTDYDPELAWPLILDNFVEWLREKQK

SEQ ID NO: 198854 - protein, 61 aa, Glycine max
  unsure (1)..(61): unsure at all Xaa locations
  Clone ID: PAT_MRT3847_2158C.1.pep
LLGLLCYXLPMLFRYSGASTGLTGNPSLHLARTSNIGMVIGYVVYIGFQLGTPKPVFETQK

SEQ ID NO: 198855 - protein, 35 aa, Glycine max
  Clone ID: PAT_MRT3847_21590C.1.pep
WMGDGLTLYVVLPRTIKDLALRVPVADRAACISRG

SEQ ID NO: 198856 - protein, 54 aa, Glycine max
  Clone ID: PAT_MRT3847_21591C.1.pep
LSKCASSKTVCFLSSIQYAYIKLHYPVVVFLIQVSNLGHGSSGRSRTIYLKNKN

SEQ ID NO: 198857 - protein, 82 aa, Glycine max
  Clone ID: PAT_MRT3847_21592C.1.pep
TQQSYKHNFSASSKASSKESKRIDSLFYSYANGSTGLIELWRSTISESDCLSYKMLKKLYWKTLYSHAPQGWLQIKYAIFFI

SEQ ID NO: 198858 - protein, 163 aa, Glycine max
  unsure (1)..(163): unsure at all Xaa locations
  Clone ID: PAT_MRT3847_21593C.1.pep
FLGGIQKYATPMMPLDEEILSKVAQDMVEEWIDCVDEDDSFEEVSLSAPLNGVEGLDYLERIPVATFEGFSHVLSRKNRXKGKRRFVFWDGAXTTLIPGTTVEEAYIMLLVALEKSVPTLIGIECPKDEKLPRRIMFDTPKTRCFTILPMEFNHLVRQKLYIV

SEQ ID NO: 198859 - protein, 118 aa, Glycine max
  Clone ID: PAT_MRT3847_21594C.1.pep
MAALSNGHDASFFKMPSIKFTKLFINGEFVDSLSGKEFETIDPRTGEVITRIAEGAKEDIDVAVKAARDAFDYGPWPRMPGAERAKIMMKWADLIDQNIEEIAALDAIDAGKLYHWCK

SEQ ID NO: 198860 - protein, 111 aa, Glycine max
  Clone ID: PAT_MRT3847_21595C.1.pep
MAALSNGHGSSFFKMPPIKFTKLFINGEFVDSLSGREFETRDPRTGEVITRIAEGAKEDVDVAVKAARAAFDYGPWPRMPGAERAKIMMKWADLVDQNIEEIAALDAIDAG

SEQ ID NO: 198861 - protein, 364 aa, Glycine max
  Clone ID: PAT_MRT3847_21596C.1.pep
MDGNKDDALKCLRIGKEAMESGDRSRALKFVTKARRLDPTLPVDDLLSTIEVDAGDQAPAAEAEGPTKPTDQPSIRRRATGAAATVSAGPSSASSSSASYTEEQVSIIREIKRKKNFYEILGLEKTCTVEDVRKSYRKLSLKVHPDKNKAPGAEEAFKAVSKAFQCLSNEESKRKYDVSGEDEAVYEQRAARPAARGYNGYYEADIDAEEIFRNFFGGMAPAANFGGFSFGPAGFNGFNGHRHAADHGSGGFNVRALIQLLPVLLIVLLNFLPSSEPLYSLSKSYPYEHRFTTPKGVNYYVKSTNFVQEYPLGSDERSKIEERVEREYFSILRQNCHFELQRRQWGYIRETPHCDMLRKFEVVN

SEQ ID NO: 198862 - protein, 130 aa, Glycine max
  Clone ID: PAT_MRT3847_21597C.1.pep
MMGRLAPLSEEPINEENEGYNNSNSKKSLQSWRNWNWIKTHFSLAFNKKSNLKILLSVLGCPLFPVPVHPILPLNEVSSSEQYIIHHFRAATGCMKLEGTVKKVFTTWKVTMDVVDELGSTSGGINLEKG

SEQ ID NO: 198863 - protein, 89 aa, Glycine max
  Clone ID: PAT_MRT3847_21598C.1.pep
RDDWLLMTLSIYEADDQSQLQSQMGRVSANGDNYACLGLIMYNNKQLNSEELLMLWDSGLSQIHSHTTKASTLLVMTILITDTALVVIH

SEQ ID NO: 198864 - protein, 57 aa, Glycine max
  Clone ID: PAT_MRT3847_2159C.1.pep
YGIRVSKGVYNGNSIWLDNSSRTALTILVSAKGAATMTSAVPSMRVGYPHARISLCS

SEQ ID NO: 198865 - protein, 55 aa, Glycine max
  Clone ID: PAT_MRT3847_215C.1.pep
FPVPEIIFPGSARLTYSGARPFFFCFWVFFYFFFFFFFLGTRHDILLLYSKRQLY

SEQ ID NO: 198866 - protein, 123 aa, Glycine max
  Clone ID: PAT_MRT3847_21600C.1.pep
ARNELQHKADVIQRKFVITKALLCKADRSSFDRLHQQIYKLELEQKRLEEDVFVYNSLQQQLKLSPAYQKMLELGACMEKEKSSELGENRDDDFAEISFEELLAQEKKDSFWQKNGKSRLSSS

SEQ ID NO: 198867 - protein, 112 aa, Glycine max
  Clone ID: PAT_MRT3847_21601C.1.pep
MATPFLAGLAVAAAALASRYGIQAWQAFKSRPPKPRLRKFYEGGFQSTMTRREAALILGVRENATADKVKEAHRKVMVANHPDAGGSHYLASKINEAKDVMLGKGRGSGSAF

SEQ ID NO: 198868 - protein, 49 aa, Glycine max
  Clone ID: PAT_MRT3847_21602C.1.pep
KRQFLTQRITFPIHFFTAFNNALFRLWFPLAWKQGGQIFEADFIGLFYF

SEQ ID NO: 198869 - protein, 56 aa, Glycine max
  unsure (1)..(56): unsure at all Xaa locations
  Clone ID: PAT_MRT3847_21603C.1.pep
NHHRKLDLALAIATNPFDNQKIQKDADKYNCRTRXIVXSFCTSYTXTSKKTIISLS

SEQ ID NO: 198870 - protein, 71 aa, Glycine max
  Clone ID: PAT_MRT3847_21604C.1.pep
QTREQKGVFDRKRATIGTNRPPLSHKIYTNACSKAGMTVSFLRSKMDLTSIIFMMATMDHLLLIMIHIPHL

SEQ ID NO: 198871 - protein, 256 aa, Glycine max
  Clone ID: PAT_MRT3847_21605C.1.pep
TAARRQKGWDLAASKTHAELMVENLILEVLLGNLLVCKSERVTEISIGIIGNLACHEVPMKHIISTEGLIEIILDKLFMDDPQCLCETCRLLTVGLQSGESIAWAEALQSEHILCQILWIAENTLNLQLLEKIIGLILAILESQQKVVDAILPPMMKLGLANILISLLTFEISKLMTERIPERYSILDLILRAIEALSVMDDHSQEICSSSELFQLLCDLVKFPDKVEVGNCCVTAAVLIANMLSDVADQASKISQ

SEQ ID NO: 198872 - protein, 182 aa, Glycine max
  Clone ID: PAT_MRT3847_21606C.1.pep
MRKLKFHEKKLLKKVNFLEWKREGGHRENLIMQRYHVTGRDDYKKYSGLCHMVQKLVNILKQMDPKDPFRVDMTDKLLEKLYNMGVIPTRQSITLCERLTVSSFCRRRLSTVLVRLKFAEHLKEAVTYIEQGHIRVGPETVTDPAFLVTRNMEDFVTWVDSSKIKRKVLQYNDKLDDYDLMN

SEQ ID NO: 198873 - protein, 68 aa, Glycine max
  Clone ID: PAT_MRT3847_21607C.1.pep
MEKGKGVIGSGGRRWGAGFAHSTTTREIPDPTGNSRTGIDQDDSTHRSQKKAPEPNWQAHKAREAAHA

SEQ ID NO: 198874 - protein, 66 aa, Glycine max
  Clone ID: PAT_MRT3847_21608C.1.pep
TAHKNITRNYIRNLKKKGNLFTRILPFKWETFFFPHIPNPVKNPCFSIYKLIKELNSNCLPPGYIE

SEQ ID NO: 198875 - protein, 66 aa, Glycine max
  unsure (1)..(66): unsure at all Xaa locations
  Clone ID: PAT_MRT3847_21609C.1.pep
MIGFSAVNNALTVEDLEALHXVFKRFSICLIEDHSIHNEDLQLSLFHTPYEKNLSLDRVYDVFHQK

SEQ ID NO: 198876 - protein, 834 aa, Glycine max
  unsure (1)..(834): unsure at all Xaa locations
  Clone ID: PAT_MRT3847_2160C.1.pep
MALGKNSRGEGRKLSNYCSTVSVAVFVAFCLVGVWIVMSSIVPIQNSVIQVSETDTINDVKNVASDSKQFEDRSGDISEESTQGDSQTKKSQSGDSHPENLDDQKGIEKVSDNTEEENQEAVGDNSDEKNDLEEGLGNTIEENDQMRNVKPSTDEKEKESDGSLNSESKETSNDQIHDDELKGSMETLDEKESDKSANDNKLGTEKSKGEVTQQDEMVGETEEEKIKKNLHSETTQSTGGSNTESHENNPALKEVSITGTPSETLIETSTENGTWSTQAAESQHEKESQKSSVSIDSRTYDWKLCNTTTGSEYIPCLDNWQAIRKLQSIRHYEHRERHCPDEATTCLVSLPEGYRSPIRWPKSREMIWYNNAPHTKLVVDKGHQNWVKVTGKYLTFPGGGTQFKHGALHYIEFIQKSLPKIAWGKRSRVILDXWCGVASFGGYLFEKDVLTMSFAPKDVHEAQVQFALERGIPATLGVMGTVRLPYPGSVFDLLHCARCRVPWHVEGGKLLLELNRVLRPGGYFVWSATPVYQKDPEDVEIWKAMGEITKSMCWDLVVIAKDKLNGVAAAIYRKPTDNECYNNRIKHEPPMCSESDDPNTAWNVSLQACMHKVPVDASERGSIWPEQWPLRLEKPPYWIDSQAGVYGRAASVEFTADYKHWKNVISHSYLNGMGINWSSVRNVMDMKAVYGGFAAALRALKVNVWVMNVVPIDSPDTLPIIYERGLFGIYHDWCESLNTYPRSYDLLHADSIFSTLKEKCNILAVIAEVDRILRPEGYLVIRDNVETIGEIESMAKSLHWDIQLTYSKNGEGFLCIQKTFWRPTKVETVASAIA

SEQ ID NO: 198877 - protein, 59 aa, Glycine max
  unsure (1)..(59): unsure at all Xaa locations
  Clone ID: PAT_MRT3847_21610C.1.pep
CSPWWYGPFGSPSSPLLTSKPSCCFPSLFSDLPSQLFXFNPPTHPFSSTLCQAFFYYCH

SEQ ID NO: 198878 - protein, 41 aa, Glycine max
  Clone ID: PAT_MRT3847_21611C.1.pep
AHFFDQRSVLYYYIWKTLRFDKWEGITGTNNEDAKDKLQNR

SEQ ID NO: 198879 - protein, 135 aa, Glycine max
  Clone ID: PAT_MRT3847_21612C.1.pep
MAKDVEQVTEQGEYSAKDYHDPPPAPLIDPDELTKWSLYRAAIAEFIATLLFLYITVLTIIGYKRQSDTKIPGNTECDGVGILGIAWAFGGMIFILVYCTAGISGAFTIIIVFFTNRTPNIIFLYTHTHKLKDKS

SEQ ID NO: 198880 - protein, 43 aa, Glycine max
  Clone ID: PAT_MRT3847_21613C.1.pep
DVRTLHNDTSNNIPHSGIWDIVHHLHTYIHYPMFKLNKYILFH

SEQ ID NO: 198881 - protein, 287 aa, Glycine max
  Clone ID: PAT_MRT3847_21614C.1.pep
MAKDVEQVTEQGEYSAKDYHDPPPAPLIDPDELTKWSLYRAAIAEFIATLLFLYITVLTIIGYKRQSDTKIPGNTECDGVGILGIAWAFGGMIFILVYCTAGISGGHINPAVTFGLFLGRKVSLVRALLYMIAQCAGAICGAGLAKGFQKSFYNRYGGGVNTVSDGYNKGTALGAEIIGTFVLVYTVFSATDPKRNARDSHVPVLAPLPIGFAVFMVHLATIPVTGTGINPARSFGPAVIFNNDKAWDDQWIYWVGPFVGAAVAAIYHQYILRGSAIKALGSFRSNA

SEQ ID NO: 198882 - protein, 72 aa, Glycine max
  Clone ID: PAT_MRT3847_21615C.1.pep
SKYILGFNPIITTNTNATSLTQYQENSCIRKLTNLCRFYRNCSISINTYVFGLNIKKDKSKHWQPKQRKVTK

SEQ ID NO: 198883 - protein, 50 aa, Glycine max
  Clone ID: PAT_MRT3847_21616C.1.pep
LFWWLMAWANNRGDSNTASFMSTLVVVFYADPHPVLPFFSFFYLSLLFSS

SEQ ID NO: 198884 - protein, 317 aa, Glycine max
  Clone ID: PAT_MRT3847_21617C.1.pep
MKNNTRMPKIEASLNNTDLHFTPKKKDQEEFYFSDSHFMDCDISNFLVSEQGKMTSSDLESHLMGAEKTGPWWRTAGKDELASLVARKSLEHIGNCDLPHPQTKHVSPRPPYPKGVDHHDKTPPSLNRKTETGSSYADGYTTGISTSDCSFQDSSKHSSSSHSKDSSSSTEGCQINSENGSMSELLKALCHSQTRAREAEKAAQRAYSEKEHILSLFFRQASQLFAYKQWLHMLQLENLCLQLRNKNQSFLNLFPASLPWDPCRGMLLKKSNSKARKRRNSNKRCVIAKCVVAAVGLGLAGAGLLLGWTMGWMFPSL

SEQ ID NO: 198885 - protein, 60 aa, Glycine max
  Clone ID: PAT_MRT3847_21618C.1.pep
VPVLCIGLPGGLVVSEFMCRAIPLIVSSLPLRSVISYMALWAGIKSSPVRSVLLLLHNSL

SEQ ID NO: 198886 - protein, 51 aa, Glycine max
  Clone ID: PAT_MRT3847_21619C.1.pep
FLKHLIYKVSFIKRQVNRVVHIFARAPRFYANYCIFFILTCMYDLILNEMQ

SEQ ID NO: 198887 - protein, 74 aa, Glycine max
  Clone ID: PAT_MRT3847_2161C.1.pep
FSFHDLSKHPHDLKISTPSNRFTFHSPTIRYGRVSSHIVQVSRRITLHGLVSLNMFPPVIFYSECISPRHHFLF

SEQ ID NO: 198888 - protein, 301 aa, Glycine max
  Clone ID: PAT_MRT3847_21620C.1.pep
IKEKSGYLRNSISLCVGQADIAVPDIDWDISVESSQIDWDIGTVEETEDNGNGLGPYEIINASDIGSDPTISNQEIGSHADISWDISVDTPQVDVIDDDNAPTVVLENQTSLPDSLSQLTGNKEERSQLLDTEYRNKILDDLYEMKSFLNQRLAELRNEETLSLQHQVQAVAPFVLQQYAADAIETMQNDISLAISLLTNRKTRDLIMILNSKRFLDRLVNSLEEKKQHEVKLKEGLKDLAAKRMELQNSLSSSWSKQDVAVAKTKELKKLCESTLSSMFDGRPVNIIGEINAILTSGIGA

SEQ ID NO: 198889 - protein, 143 aa, Glycine max
  Clone ID: PAT_MRT3847_21621C.1.pep
MATARTVKDVSPHDFVKAYASHLKRSGKMELPEWTDIVKTAKFKELAPYDPDWYYVRAASMARKIYLRGGLGVGAFQRIYGGSKRNGSRPPHFCKSSGAIARHILQQLQNMSIVEIDTKGGRKITSSGRRDLDQVAGRIVVAA

SEQ ID NO: 198890 - protein, 81 aa, Glycine max
  Clone ID: PAT_MRT3847_21622C.1.pep
SYLRATLTLLPCGDLRYLMLEFIRIQRKRYIEATTTGAFESGSWNKQRRTIRDSVLDFTRWKLDSGLRTARFLLHQPKPTT

SEQ ID NO: 198891 - protein, 52 aa, Glycine max
  Clone ID: PAT_MRT3847_21623C.1.pep
SSSEEISLPHAPSPLVKIALISPIILTGLPSNMDESVLSHSFFSSLVFATAA

SEQ ID NO: 198892 - protein, 241 aa, Glycine max
  Clone ID: PAT_MRT3847_21624C.1.pep
MAVATRGARGGSSFRSLFSFRIFISAMFSLLFVATLSVLLTTNPSTSNDDPDLPTTGNAYVHRTFLALKSDPLKTRVDLIHQQAKDHIALVNAYGAYARKLKLDISKQLKMFDELAHNFSDIASKTTYKTSLFESDGPIDEDVLRQFEKEVKDRVKIARMIIVEAKENYDNQLKIQKLKDTIFAVHESLAKAKKNGALASLISARSIPKSLHCLAMRLMGEKISNPEKYRDEEPKLEFEDP

SEQ ID NO: 198893 - protein, 72 aa, Glycine max
  Clone ID: PAT_MRT3847_21625C.1.pep
SMQVISSCPSPELLFQLVCLAIAWWNHVQHASNIVSYVNILCDHTVPGSNKVMVRRQILIKKSKVVRLRSQL

SEQ ID NO: 198894 - protein, 61 aa, Glycine max
  Clone ID: PAT_MRT3847_21626C.1.pep
FVICKLIIGGGINKMMYISSLIILNTISPLQCCNSVNGKFLLTTQYNIYERKYIRKKKRNQ

SEQ ID NO: 198895 - protein, 53 aa, Glycine max
  Clone ID: PAT_MRT3847_21627C.1.pep
CFPLMFLIANVISSKPTEYQDSNYIHSRGFASLNIVDLYRYAQFRHIVINEPH

SEQ ID NO: 198896 - protein, 100 aa, Glycine max
  Clone ID: PAT_MRT3847_21628C.1.pep
VRRLGEDTGGGPKPRKANSFGGGFSIPTGPYYYHSPFRFLGPLSSSGRKPKPKPPLFGWRAGVELTTDLVGLPWLIPDPDLLTYLEPFGFRSSRSWLFLQ

SEQ ID NO: 198897 - protein, 56 aa, Glycine max
  unsure (1)..(56): unsure at all Xaa locations
  Clone ID: PAT_MRT3847_21629C.1.pep
IKLNXKYGXXAKXLFGPHILPPSPRSFTKKILVENPVFHTSXMKXSWTSLLRGSSN

SEQ ID NO: 198898 - protein, 42 aa, Glycine max
  Clone ID: PAT_MRT3847_2162C.1.pep
TDGTYRRIHSKDYGKLIITDTHNRNLIQTDISSLGAPDAKAR

SEQ ID NO: 198899 - protein, 264 aa, Glycine max
  Clone ID: PAT_MRT3847_21630C.1.pep
MSGHITRRNSAPHKRPPSLSKKLQNGSLSEPPSKASSPPPQEFDGGERTVKKLRLSKALTISEVTTVSEACRRMATRRVDAVLLTDSNALLSGIMTDKDIATRVIAEGLRPEQTMVSKVMTRSPIFVTSDMLALEALQKMVQGKFRHLPVVENGEVIAILDITRCLYDAITRMERAAEQGSAIAAAVEGVERHRGSNVSASALIEALRERMFKPSLSTLMGENTKVAIASPADPVYVAARKMRDLRVNSAVIVSLSGTKIQGIL

SEQ ID NO: 198900 - protein, 134 aa, Glycine max
  unsure (1)..(134): unsure at all Xaa locations
  Clone ID: PAT_MRT3847_21631C.1.pep
VDRPVLLLVTAFVTALLDASLFAGSAARSLAALQGILCRWAVVRWLYNPTLYIPLGPILCLMPSAMRGRACDLVRGQRIAFXRHRHLGKELWVLHWALAQRTLAGLHPPDTXHVTARTHLNELGPMAEEPARTP

SEQ ID NO: 198901 - protein, 80 aa, Glycine max
  Clone ID: PAT_MRT3847_21632C.1.pep
PPFPWLTFGGVSLKPIQSFDPLFFLRRPRSFLLSSPPPLMIMLIPPANPEKIITEGALLGVHFPFNHGKKFSWGFPFPFG

SEQ ID NO: 198902 - protein, 87 aa, Glycine max
  Clone ID: PAT_MRT3847_21633C.1.pep
SIQRVRELTGRDRTKAGNRQSTNGAINRKWRSENERRERERDLLGLRSCTASSLALSLSYSNSTSLSISVICYVQMNILSAKQLDLL

SEQ ID NO: 198903 - protein, 70 aa, Glycine max
  Clone ID: PAT_MRT3847_21634C.1.pep
LAGTLVDNSCFTHRCQKASEPHIEVWQNLYPQSLSTLLTTFAQKMSLLSSNKVPSILKYYPLKTGLSDHS

SEQ ID NO: 198904 - protein, 83 aa, Glycine max
  Clone ID: PAT_MRT3847_21635C.1.pep
QEETGQRLGTGRARMELSTENGEVRMKGEREREICCGYAHALPLPWLCLFPIPTPFPSLFIYLFVIYGMCFSNLLSKCVKGFK

SEQ ID NO: 198905 - protein, 106 aa, Glycine max
  unsure (1)..(106): unsure at all Xaa locations
  Clone ID: PAT_MRT3847_21636C.1.pep
MTPLERRQWDRKRVIIGYEKTAINSTHLNNPDIEPIILPYTQEMRAQDITNTXAKRRVASAIWGGGLASLWETETDALDSPWMHDGMTGQTQSIIXAKKMEQRTYY

SEQ ID NO: 198906 - protein, 147 aa, Glycine max
  unsure (1)..(147): unsure at all Xaa locations
  Clone ID: PAT_MRT3847_21637C.1.pep
GQTKGSHPKQRDGPERKLGYDSLHFITCLTLKDNVHFKCGGGFRKKPKSIFYFLLLLFLFLFLFLYFVSVFVYVSIFCLCLIVFSSVFFFLYLHVVLFFVLLYLFCFXFYYFYIHKKIKILQLLFANVFIEFMHFLIFFKGFLTCIT

SEQ ID NO: 198907 - protein, 229 aa, Glycine max
  Clone ID: PAT_MRT3847_21638C.1.pep
MATTEPEHRRDENDDDSVTAEDEDTGAQVAPIVKLEEVAVTTGEEDEDPILDLKAKLYRFDKEGNQWKERGGGNVKLLKHKVTGKVRLVMRQSKTLKICANHLVHHSLTVQEHSGNEKSCVWHASDFADGELKDELFCIRFPSVENCKAFMTTMQEVAESQGEGEENKDASATADLLEKLTVGEDKSDEKEPEKVQITKKLTVGEDKSEDEEPEMATNTNEKGEHDVEA

SEQ ID NO: 198908 - protein, 186 aa, Glycine max
  unsure (1)..(186): unsure at all Xaa locations
  Clone ID: PAT_MRT3847_21639C.1.pep
LLELCVLWILTDAIHYGESERXKLKVPQALSRIDXQGVLFFLGILLSVSSLEAAGILREIANYLDAHVPSSELIASTIGLISAVIDNVPLVAATMGMYDVTSFPQDSEFWQLIAFCAGTGGSMLIIGSAAGVAFMGMEKVDFFWYLRKISGFAFAGYAAGIVAYLALHKLNISLPTLAEVPFLSGS

SEQ ID NO: 198909 - protein, 84 aa, Glycine max
  Clone ID: PAT_MRT3847_2163C.1.pep
IVYANIKGTYDIRHPPMRFACSDSVPCTNLTLSDIELLPDQGDIVLDPFCWSAYGNFETLTIPPVFCLLEGLPQSISGNDIDHC

SEQ ID NO: 198910 - protein, 79 aa, Glycine max
  Clone ID: PAT_MRT3847_21640C.1.pep
TRITPHVVEWHAFFFNSSSINFNLKPISSCFKTIACILGKLFIASLTISCFGSNINRLVTTPKNLIYENLIIILCIFFS

SEQ ID NO: 198911 - protein, 99 aa, Glycine max
  Clone ID: PAT_MRT3847_21641C.1.pep
PKLARCCFSSPSPFDVIDASHPLGHAVMQEVVNSMSEGYSTCPSSKDVLTDASFIILVEPWINVWVTVYSMIVQGLVARSERVFKKPIQGRMSTADSES

SEQ ID NO: 198912 - protein, 78 aa, Glycine max
  Clone ID: PAT_MRT3847_21642C.1.pep
VACPGVTLVVRFQAGWLSHELAVCVLSFGAALRWCLVFVFVTGIVGYVCTKAALCACPCLCYEAFVMFSPRAEYPSLR

SEQ ID NO: 198913 - protein, 104 aa, Glycine max
  unsure (1)..(104): unsure at all Xaa locations
  Clone ID: PAT_MRT3847_21643C.1.pep
VKIFFGDRFKFSLQEHSTVRSVWGRNTHIFTWLIDVVEXCTPTTFLSHIQRKLVDIALLSDLFRVQVHLTFQIHHKAVEIEALREIFIGILQVHNVQAANVDIL

SEQ ID NO: 198914 - protein, 94 aa, Glycine max
  Clone ID: PAT_MRT3847_21644C.1.pep
RIGHDVRKMETKPHPWGGKCSGSCIQRIKFVQGLRLRGNDHCLLGTFNHWLCGRKRHFPVCVCEPTIFECTISRSWRGRNPSTLQRSSKMRLPN

SEQ ID NO: 198915 - protein, 51 aa, Glycine max
  Clone ID: PAT_MRT3847_21645C.1.pep
GHELLKIPSCLVRNFCYDNLGFIYQFHYFYSLNIVHVQLANDWQPYSSAVL

SEQ ID NO: 198916 - protein, 48 aa, Glycine max
  Clone ID: PAT_MRT3847_21646C.1.pep
YMCRPAVVSSIFRSRRCSFRKEEQFFNAPILIASSQTMGLVYTTKIKY

SEQ ID NO: 198917 - protein, 55 aa, Glycine max
  Clone ID: PAT_MRT3847_21647C.1.pep
IGQSVIWHWFLFLSYSVKLNSVFVVGGCIFFFCGSNQLEFFLTTTISFSRNMALI

SEQ ID NO: 198918 - protein, 330 aa, Glycine max
  Clone ID: PAT_MRT3847_21648C.1.pep
ENLIPPSKRSWIPMEYAPQESKLLTRQVMTRDIIEFFVRNMVNEHLGAICNAHVVHADSSDYGALDEKCIHLAELAATAVDFPKTGKLVTMPPHLKPKLYPDFMGKERHQSYRSNKILGRLYRRIKDAYDEDIDAPYLNFVTGDIPYDKDLEVPGSADFIADAWEQKCSYDGQLSGLLGQYKVKREEEVVTGQIWSMPKYNSRKQGELKERLKHSYSALKKEFRHTFEKLNSDVGELSEEEKNLFYEQKASAWYQVTYHPEWVKKSLDLQDKSSENQEADSLGSTVMLSFPWIAVDYLARTKIRQRHQRCGNFDSTKPVDSLAKYLSERL

SEQ ID NO: 198919 - protein, 84 aa, Glycine max
  Clone ID: PAT_MRT3847_21649C.1.pep
RTRVTTDITTIYLKEFKAINFQRVGLILNFFQKLINKRSSLYHSTSFLVLFILLPRAFTFSSSSYLGQRTILLRHITPSMDTTN

SEQ ID NO: 198920 - protein, 47 aa, Glycine max
  Clone ID: PAT_MRT3847_2164C.1.pep
PIFISTNIINFTGLVLPEGVGAIRPRPNKTYHDHLLNGSTVDELCEW

SEQ ID NO: 198921 - protein, 157 aa, Glycine max
  unsure (1)..(157): unsure at all Xaa locations
  Clone ID: PAT_MRT3847_21650C.1.pep
MSLQRGQQSNMQKLRDGTQEQVLETDHIIICGMNSHLPFILKQLNKYQEFAVLLGTATARXMVQTRRQRILLMSDLPRKQIDRVADNIAKDLNHIDVLTKRYQXGCSLNMTKSFERAAANRARAIIILPTKGDRYEVDTDAFLSVLALQPIPNMDSV

SEQ ID NO: 198922 - protein, 42 aa, Glycine max
  Clone ID: PAT_MRT3847_21651C.1.pep
SVVKVVRWGRSVYANIRIISSVTVNVASVIMCVICWVHNDES

SEQ ID NO: 198923 - protein, 112 aa, Glycine max
  Clone ID: PAT_MRT3847_21652C.1.pep
EASSYLNLELLDLSGSSISDSGISMICNVFSETLTRLLLALCPNVTSSGIQFATAQLPHLELMDCGMTICEPNSHHPTADESNRKLQKTFATNLHLTNQKLIIKHSCLKKLN

SEQ ID NO: 198924 - protein, 60 aa, Glycine max
  Clone ID: PAT_MRT3847_21653C.1.pep
MDAAASQSLYPLHRCKTVHLVRHAQGVHNVAREKNHDAYNSYEFVDAHLTSLGWEQVNNL

SEQ ID NO: 198925 - protein, 53 aa, Glycine max
  Clone ID: PAT_MRT3847_21654C.1.pep
KDNFLQVVHVESATGKSLTSASASAGPGVFLVQLGEDRLDDLFELLVPGVVFV

SEQ ID NO: 198926 - protein, 112 aa, Glycine max
  Clone ID: PAT_MRT3847_21655C.1.pep
KKRCVLICIGGNSTTVAATAARPCMRSFRRIRGPDCGILTGYVALSTDILTELCFALFDDNPAYFILMLALMPLAVSLCRMCLLREIPAVDTNDHEQSTYVSVVNAVAVVVS

SEQ ID NO: 198927 - protein, 143 aa, Glycine max
  Clone ID: PAT_MRT3847_21656C.1.pep
SRVRNGEEMTSIAGTSDEKVYNKLIKGLDTWVATLSGMEGTMDEKLTCDKIFDKRKTSCFTILPMEVNLEVRKKVRNIVRIIIKQRCKVRCKVGIKPYSMEWTGLVNKVLSMVSENLGSDYAWFDGQVTKQDVSKMAEMLNSV

SEQ ID NO: 198928 - protein, 38 aa, Glycine max
  Clone ID: PAT_MRT3847_21657C.1.pep
VLVFMPTRHYTLNMFKYFYELLYLNVYIYTWIFSSKLM

SEQ ID NO: 198929 - protein, 114 aa, Glycine max
  Clone ID: PAT_MRT3847_21658C.1.pep
LVPGVSRGKKKQKKKIVFPPTPLGVFNIFKKFGYVFFSPPPISLFFGVWNPPLAHFLFGSPPNPKSSEGGESMIIFFFPHKFFPRKKPLFRGGPFGPFFKGPPFGEGERDPPFF

SEQ ID NO: 198930 - protein, 39 aa, Glycine max
  unsure (1)..(39): unsure at all Xaa locations
  Clone ID: PAT_MRT3847_21659C.1.pep
QVYTHIHXHLSNAXQPXGVXXLXXXXPWXSRXNNACDDQ

SEQ ID NO: 198931 - protein, 78 aa, Glycine max
  Clone ID: PAT_MRT3847_2165C.1.pep
GQYLEQDCLEKRIVVDEILHSQPKFESPSEEVPIFSARQSFEKDCPHRKILVENQINWDENPVEEVEKGGSPYLHCRS

SEQ ID NO: 198932 - protein, 42 aa, Glycine max
  Clone ID: PAT_MRT3847_21660C.1.pep
SFSGTHFAYPYQSFNKSIMLDFLSLPDGHFHPSQTLYLSLIL

SEQ ID NO: 198933 - protein, 52 aa, Glycine max
  Clone ID: PAT_MRT3847_21661C.1.pep
IPKGGQIWFLLVFKVLVFMGQCAPHIGVCPLFQKPQMGAKVVRLFGKKEKKK

SEQ ID NO: 198934 - protein, 67 aa, Glycine max
  Clone ID: PAT_MRT3847_21662C.1.pep
AKQNGSLINQVLEALITKASIHSNVTVRIGWILTFKGLGHGCKNLPEVCTMAQEIRSCPIGGHLTMG

SEQ ID NO: 198935 - protein, 65 aa, Glycine max
  unsure (1)..(65): unsure at all Xaa locations
  Clone ID: PAT_MRT3847_21663C.1.pep
MPIRNIAVGRPEEASYXDTLKAALAEFISTFIFVFXGSGSGXEXXXXTDNGAXTPXGLISAXIXX

SEQ ID NO: 198936 - protein, 85 aa, Glycine max
  unsure (1)..(85): unsure at all Xaa locations
  Clone ID: PAT_MRT3847_21664C.1.pep
PXNEGGXAGINXPXQXRPDXTWRCKSNLCXFPDHXRXRLPXXXXELNNLGVXKTKXIEGXDFGIEXGIGXATHHHRLHLLLCLCG

SEQ ID NO: 198937 - protein, 89 aa, Glycine max
  Clone ID: PAT_MRT3847_21665C.1.pep
SRQADNDCIEDEGFRGNGLPRWASHALELVELILRPPEGGPPCLPDHSEQVISALNLLRFILIIDSRGQRSAKLFRKETLHKVHSEWLT

SEQ ID NO: 198938 - protein, 51 aa, Glycine max
  Clone ID: PAT_MRT3847_21666C.1.pep
HSFFLHVTICCILQIKEPSMEGAQRSAQIHRPLTLIEYAWRIHAPIPVEKE

SEQ ID NO: 198939 - protein, 140 aa, Glycine max
  Clone ID: PAT_MRT3847_21667C.1.pep
METGSNSESLNRNVAMSVRGSTGKKKQQGGVTLAGKKVDPFVPRSEHNPRELRSWAKRTGFVSDYWLEAGTSGSAKFEALERRREGSSPKIEIDPVVGRARQNEIVPESHGGATRGENGAVLDGRGRKEKENEGGVRQGC

SEQ ID NO: 198940 - protein, 56 aa, Glycine max
  Clone ID: PAT_MRT3847_21668C.1.pep
KKFRGHPNNTTLFWDLKTLNLNKQAPPDQIHILTPGVRHTPFRAENFLPPWGCAPQ

SEQ ID NO: 198941 - protein, 97 aa, Glycine max
  Clone ID: PAT_MRT3847_21669C.1.pep
RDRAVERRILHGGFGMGPGQKNLSDIYNTPSSPVDDCPQEATAEALEMSFGAGSYARKLLKSMGWKEGEGLGSSTKGLVEPIQPVGNVGTSGLGWSR

SEQ ID NO: 198942 - protein, 67 aa, Glycine max
  Clone ID: PAT_MRT3847_2166C.1.pep
IFKLYVEGKVLDAVDERLNMEFVVDEMTSLIGVRLWCTNPNNKERPTSTQVIKVLQLVAPLATLSLD

SEQ ID NO: 198943 - protein, 593 aa, Glycine max
  Clone ID: PAT_MRT3847_21670C.1.pep
IPPQSFVSAAYNVPSKSTTLPSSLHPFSQSQSTKYRKSKHHHTPRVTCNSGNQNKGEKPDIHIEQRRNILLGLGGLCGAATLNNNPFAFAAPISPPDLTTCGPPDLPEGAEPTNCCPPFSSTIIDFKFPPSNKPLRVRPAAHLVDKNYLAKYKKAIDLMKKLPANDPRNFMQQANVHCAYCTGSYDQVGFPGLELQVHSSWLFFPYHRWFLYFYERILGSLINDPTFALPFWNWDAPKGMQLPSIYADPKSPLYDPLRNANHQPPTLVDFDFNLDNPISNGRISTNLTIMYRQLVSNGKTPTLFLGNPYRAGDAPDPGGGSVEGVPHGPVHLWTGDINQPNIENMGDFYSAARDPIFYSHHSNVDRMWSIWKTLGGKRRDFTDSDWLESGLLFYDENKNLVRVKVKDCLDTRKLGYVYQDVEIPWLKSKPSPRRSRVQKVALGPHFNTGVARAAETSRNVQFPLVLDSVVSIVVKRPKKSRSKKEKEEEEEVLVIEGVEYDSNIPVKFDVLINDEDDKQIQPEDSEYAGSFVTVPHSHKHKNKKIITCLRLGLTDLLEELEAEDDDSVVVTLVPRYGKGRVQIGGIKIDLVAD

SEQ ID NO: 198944 - protein, 276 aa, Glycine max
  Clone ID: PAT_MRT3847_21671C.1.pep
MEEITSTVAVPFTLENLIQKEPAVTTHMEITGLKLRANTSPPLILNPSIEIEKHTDIGPQPQIKASSEGTENLVGAGLVSEMVSQGDNNGLYSESLKQARKENESLQAKDFQCGGKIGPCREESSVLRTNCERNSPITIKVGDNIIDGKSGSTKPPRAREHESDNGSGPDESNKKTFAVPCAMPEKPTCLELSGGTSTNCTTPLWGCSSVCGRREEMEDAIAVKPHLFQVTSRMVRDDHVSENTKYSPTHFFGVYDGHGGIQVANYCREHLHSVLV

SEQ ID NO: 198945 - protein, 108 aa, Glycine max
  unsure (1)..(108): unsure at all Xaa locations
  Clone ID: PAT_MRT3847_21672C.1.pep
IEHVHXTXXGISXXXXQLNXGXXNXTDYIXPIXXXXHXHRRXRGXSPSVQQPRRRXIEXLRAEMXVXLAECXXPAXIRXXGDLRGVXGRQERGXAGTIGWXASYXDXI

SEQ ID NO: 198946 - protein, 123 aa, Glycine max
  unsure (1)..(123): unsure at all Xaa locations
  Clone ID: PAT_MRT3847_21673C.1.pep
PCFXXXXLCVCLCXFXLXLGWLLFXGAXXFXFAXXXXXXFXXLFXGXXLXAPLAXLALXXXXXPVLXLLVLXXXXXPSPSSVXXXXSXPXXXXAPPLLFLLFFSXXXXPSXSPFXXPFGVPLP

SEQ ID NO: 198947 - protein, 102 aa, Glycine max
  Clone ID: PAT_MRT3847_21674C.1.pep
STYPSIPTDHVFDALAPYNSLSTITFSLTSEVVRAYSATIPLCIHFFSNHVGSMYSTAGCSSRLHLSNRQHSSTILPFAHTAIVRRLLLTYLRYWERFSHTE

SEQ ID NO: 198948 - protein, 69 aa, Glycine max
  Clone ID: PAT_MRT3847_21675C.1.pep
LQQYYLHAVHPAVLLLPQQLGSRGRLILMLPLMPTLMLMGILSQIAMLLNATKFDSCPLVTGPWTVRSR

SEQ ID NO: 198949 - protein, 138 aa, Glycine max
  Clone ID: PAT_MRT3847_21676C.1.pep
METRMLRLSIQRVRKLNFLRPQISALGRSHLSTAAEPSSSKSNPPRVPNLIGGSFVDSKASTVIDVINPATQEVVSQVPLSTHEEFKAAVSAAKEAFPSWRNTPITTRQRVMLKLQELIRRDMDKLALNVTTEQGPTL

SEQ ID NO: 198950 - protein, 108 aa, Glycine max
  unsure (1)..(108): unsure at all Xaa locations
  Clone ID: PAT_MRT3847_21677C.1.pep
MGPMHSHRKGISSSALPYKRTPPSWLKISSQEVQXNIYNFANKGLTPSQIVVILRDSHGLAHVNXVTGTKILLILKAHGLTPEIPXDLYHLINKAVSIRKHLERNRKD

SEQ ID NO: 198951 - protein, 109 aa, Glycine max
  Clone ID: PAT_MRT3847_21678C.1.pep
KEKNSPNFNLGGAKNPLHPFINFYFSRKESFFYPMTPTCSRGPIYILHTKAVPMLLLLGTGKQTCPGGSSSSSASPLCKTPKKTGANGGPKKNKRFQVKGFYLSLPYLT

SEQ ID NO: 198952 - protein, 91 aa, Glycine max
  Clone ID: PAT_MRT3847_21679C.1.pep
MGPYRGDPSLGYAGPYGGGYGRGYDLGGYGGPSDGYGAYGGVGGGSSGSAYGSSYDASLGGGYGGPAGGSFYGTKGGYAGAGTGRYHPYGR

SEQ ID NO: 198953 - protein, 168 aa, Glycine max
  Clone ID: PAT_MRT3847_2167C.1.pep
HATAFANDALLKDAKIHIELFCVEKEDKSFLRRFWSGIESLFVTKAHNTVDAVTQEVQKMLSYKNETGWAVLCKGSSVVMSGHGTTILKTVAEFEKWKEFVVKKGFEPSFKEHHERIRRTHHRCIHLEIPNAAGKLPETIRCPECGRIMEIFISYKCNHSDNTSIASN

SEQ ID NO: 198954 - protein, 335 aa, Glycine max
  unsure (1)..(335): unsure at all Xaa locations
  Clone ID: PAT_MRT3847_21680C.1.pep
MGMQLSEARLQRHEMNYYSPKTLFVFGDSYVDTGNYRINQAGSSWKNPYGETFPGKPAGRFSDGRVLTDYIAKYLGLKSPVPYKFRKVMQQHLKYGMNFAFGGTGVFDTSSKNRIMHHSYFXAFCLFKENVYTTSRLYNSPVYVSVAGNDYNFYLATNGSIEGFPAFIASVVNQTATNLLRIKSLGVRKIVVGGLQPLGCLPSSTATSSFQQCNSTSNDLVVLHNNLLNQAVTKLNQQTNKDNSTFIVLDLFDTFTSVLNHPSTNNIKDPLKPCCVGLSSQDFCGKVDENNVKQYKVCDSPKSAFFWDNLHPTQAGWEAVYKKLQKTSALHQIRY

SEQ ID NO: 198955 - protein, 308 aa, Glycine max
  unsure (1)..(308): unsure at all Xaa locations
  Clone ID: PAT_MRT3847_21681C.1.pep
MESEEVMSEVHLGCPAGFSGPYISLFSFSTNLQFDQDGDLLLPRRRTAMFEANAQHSFSVRIQHNITSSIPNVGLQVWRAELLLSDFILHKASSSSQLHQVIALELGAGTGLVGLLLARVANAVFLTDHGTEILDNCAKNVQLNFGLLNYQAKIYVRELDWFGCWPPKAKTGEAPSTQKYSXTSREIEDAENASLLVAADVIYSDELTDAFFSTLERLMSRGSTKVLYMALEKRYNFSLSDLDVVANGYSHFRSYLRDEDEIESLESVSMPNFVGKQMDISQIPQYVGEYDRGRDVEIWQIKYLGSKS

SEQ ID NO: 198956 - protein, 109 aa, Glycine max
  Clone ID: PAT_MRT3847_21682C.1.pep
KTLLFQFGNINFCYSLPKFSGSLSPSAARSFKKEKTPKAAFRAVLFLMRFSNTASTFQSKTCDRVPEQEKREKAMYDIVCTPKSGSRSKPKRPFKKKNKNLTSQIKTFM

SEQ ID NO: 198957 - protein, 56 aa, Glycine max
  Clone ID: PAT_MRT3847_21683C.1.pep
KKTRAPTVHFLPYTLFLTSSPIPYLPPINLVLYLLNYNFPLPFCLIIQILSSIYGI

SEQ ID NO: 198958 - protein, 69 aa, Glycine max
  Clone ID: PAT_MRT3847_21684C.1.pep
CFYVMVRYARSTYGPMLLTGTRGGIMVSRDAFRRNMLDNGLGHTPPMGYASLSFTFPPNLLVFFLICCD

SEQ ID NO: 198959 - protein, 105 aa, Glycine max
  unsure (1)..(105): unsure at all Xaa locations
  Clone ID: PAT_MRT3847_21685C.1.pep
MAFNLWGLPPHPIVWGSEVKEILFFSKRGPIGVFPNPGPFAPPVDIGFLRIRFFXAPWFTMGLMGGFFXITHNGVPVFVNYAEKGGALFPPEAPPIFLIAGVFFF

SEQ ID NO: 198960 - protein, 55 aa, Glycine max
  Clone ID: PAT_MRT3847_21686C.1.pep
HSFQHTIHFLTSILYISPRGGYSSNITCFVILISPNSEQDLLIKYHLPYKSRRYT

SEQ ID NO: 198961 - protein, 102 aa, Glycine max
  Clone ID: PAT_MRT3847_21687C.1.pep
LLQQTLRTICTSPNSSTPSKWVYAVFWRILPRILPPPRGAVRGSALALPKGVSWVWILVWEDGFCDFNECEQRKSGSGYLNGRFGAELFFKMSHEVYNYGEG

SEQ ID NO: 198962 - protein, 71 aa, Glycine max
  Clone ID: PAT_MRT3847_21688C.1.pep
YVSGTFSYSTKDKKIAPRNFLGCRESQLLYLLYFLSTSLAKKTECSHSHFFSLLGHKGPNFHANSPEGIIC

SEQ ID NO: 198963 - protein, 72 aa, Glycine max
  Clone ID: PAT_MRT3847_21689C.1.pep
QLEAGGPQFPMKRRGGHTQKTTQWGAEKDPKNGGEVTLNNKESGVQCLPPSFKKGGTKKFCGFIKSLKHWVL

SEQ ID NO: 198964 - protein, 50 aa, Glycine max
  unsure (1)..(50): unsure at all Xaa locations
  Clone ID: PAT_MRT3847_2168C.1.pep
EDPDTINRFIGEDEASYNKWRHRDPXIVPWVPGGSKFPSNPAPPQGIEIV

SEQ ID NO: 198965 - protein, 75 aa, Glycine max
  Clone ID: PAT_MRT3847_21690C.1.pep
IRKETCTKSYPSNNKKPVGSQKALAKSVATPFTLTSTLSPSRGWTTCQVKPRPSLAMRTYARTLTNPPFPPLLIS

SEQ ID NO: 198966 - protein, 88 aa, Glycine max
  Clone ID: PAT_MRT3847_21691C.1.pep
SKNLSAAFIKSPESNSYFPFPSSFQLFCIKFSFFTTSYTHSSSFLSPKNFLPSFPSSLFQTITITTPSSSSSSYYISLIYHYNYLFTP

SEQ ID NO: 198967 - protein, 59 aa, Glycine max
  unsure (1)..(59): unsure at all Xaa locations
  Clone ID: PAT_MRT3847_21692C.1.pep
MAVLVGYIESKFGXALASRQIVDMTRIRFDGLLAIXSKIIGTGEAHTDVETENGRIAYP

SEQ ID NO: 198968 - protein, 110 aa, Glycine max
  unsure (1)..(110): unsure at all Xaa locations
  Clone ID: PAT_MRT3847_21693C.1.pep
DEQPRPIPFPRPQPRQEEEHEQREEQEWPRKEEKRGEKGSEEEDEDEDEEHDVRVFQLRRRLRXREIRRLEEDEDDEDSGESDDCVGIKVCKHEIEMLCVFGSNGCESMF

SEQ ID NO: 198969 - protein, 122 aa, Glycine max
  unsure (1)..(122): unsure at all Xaa locations
  Clone ID: PAT_MRT3847_21694C.1.pep
MQTSMLHDRIDNLCKVQAYLSKANQSLYRLLPKAPYSDXEYELQGLGFERGRTDTAXKGKQMAHPLLQILPAPXPNTLETFIRRIPMVIQRTQLXTPHGYFGRPNSLGSPEPGRQASFHKPY

SEQ ID NO: 198970 - protein, 68 aa, Glycine max
  Clone ID: PAT_MRT3847_21695C.1.pep
ATPCIFEQGALIAGADALTRMTMVANLVDGYLAEVVSDTNLNLIKFQALDDGIYHAIDVYLKVRSFWI

SEQ ID NO: 198971 - protein, 112 aa, Glycine max
  Clone ID: PAT_MRT3847_21696C.1.pep
MASNSCFILAFFIAISFSCMDFGLAARHLMQTSTAPNLPLPKPTLPPLPSLPTLPQGNVPPLPTIPSLPTIPTVPQVTLPPLAATLLPNFPTVPTTIPSFPFFSPPPSATTP

SEQ ID NO: 198972 - protein, 60 aa, Glycine max
  unsure (1)..(60): unsure at all Xaa locations
  Clone ID: PAT_MRT3847_21697C.1.pep
MDRFPIVLLFANLNTLASGARHDILRLPSESSTFFXAPGGDENHEGTMWAVLTAGFNGYW

SEQ ID NO: 198973 - protein, 294 aa, Glycine max
  Clone ID: PAT_MRT3847_21698C.1.pep
MYHSKNVPSASLIGGNSLSHGQHIDCGGSTMDPGSGGNGLSNNSNLTSKQRLRWTHELHESYLQKYRLAKYLPDSSSDKGKKADKKETGDMLSNLDGSSGMHITEALNLQMEVQKRLHEQLEVQRQLQLRIEAQGKYLKKIIEEQQRLSGVLSETPGSGVAAVAPGDACQEPDNKTDPSTPDPEKAAKDRAPAKSLSIESFSSHLEPMTPDSGCHVGSPAESPKGERSAKKQRVIMDGVYSKPEMVLPHQILESSMSSYQQPNTVFLGQDQFDPSLGISTKSGEELDKVGGGNL

SEQ ID NO: 198974 - protein, 209 aa, Glycine max
  Clone ID: PAT_MRT3847_21699C.1.pep
MYHSKNVPSASLIGGNSLSHGQHIDCGGSTMDPGSGGNGLSNNSNLTSKQRLRWTHELHERFVDAVAQLGGPDRATPKGVLRVMGVQGLTIYHVKSHLQKYRLAKYLPDSSSDEGKKADKKETGDMLSNLDGSSGMQITEALKLQMEVQKRLHEQLEVQRQLQLRIEAQGKYLKKIIEDNSGLSGVLSEAPGFGVCSGCSQGMHAKNLI

SEQ ID NO: 198975 - protein, 71 aa, Glycine max
  Clone ID: PAT_MRT3847_2169C.1.pep
WMLVGNVPWDMFVTSFKRLKIIKGSKARGLGFSVLKNPTPKNFFEQRIKKSVLGVKGKTCLKTCVFGFKRF

SEQ ID NO: 198976 - protein, 119 aa, Glycine max
  Clone ID: PAT_MRT3847_216C.1.pep
MHDFCFTIPYGLMLVGGGLFAYISKGSIASLAGGAGSGLLLIVAGYLSLNAFGKRKNSYLALFLETVCAAILTWVMGQRYLETSKIMPAGLVAGISALMTLFYLYKLATGGNHLPTKAE

SEQ ID NO: 198977 - protein, 97 aa, Glycine max
  unsure (1)..(97): unsure at all Xaa locations
  Clone ID: PAT_MRT3847_21700C.1.pep
XXXXXXLXXSXXFGSRXSYAXQKXXPVXXFXXSXAFAXRXRXAXXXXHDXLXXSXXXXSXRXXXXXXCXXQHTGXXXRXXPVXXXXXFQXXXXIXQX

SEQ ID NO: 198978 - protein, 127 aa, Glycine max
  unsure (1)..(127): unsure at all Xaa locations
  Clone ID: PAT_MRT3847_21701C.1.pep
HRIAPQFNVGQAQMETNLXKLIIDDGHTPKGPMLDPKISGXKIALLKSTVGGTILRNDLWSNIGLRSIEEQGVDFACALSXVNGDIEMVATHVYSVSSDIVETREMNSAYRGRAXSDIYTNCSQECS

SEQ ID NO: 198979 - protein, 83 aa, Glycine max
  Clone ID: PAT_MRT3847_21702C.1.pep
DIITIECNQSSTTKAQYYYYYEMMKQSNPDPKQRDNNGEQSRPNIDDEAEELHLSTLKLKGIGNSCNLVFFLKEGLCTPKAKR

SEQ ID NO: 198980 - protein, 73 aa, Glycine max
  Clone ID: PAT_MRT3847_21703C.1.pep
HLERRKGGNFYLISQLGKGGKGAKGLNWENPGICQNQGCKKPDKGKKRGGTKKKVRGHKQADVRMEPLKRPTH

SEQ ID NO: 198981 - protein, 83 aa, Glycine max
  Clone ID: PAT_MRT3847_21704C.1.pep
KIVSLLAASEAEVEQLLSERCPLTGHSCYPEALLHFRTHCFNWHSPTYEYALRRLYVLVNLCEKPYPLHRIKLSMDHVCLGHY

SEQ ID NO: 198982 - protein, 81 aa, Glycine max
  Clone ID: PAT_MRT3847_21705C.1.pep
SFNSEFMLPLPSFAKVGIQWICNVCNSFLCYNHVKKTKIVIFLEVLVGSHYEKSENLAARSKLWICILGLKVVALVMLKTP

SEQ ID NO: 198983 - protein, 61 aa, Glycine max
  unsure (1)..(61): unsure at all Xaa locations
  Clone ID: PAT_MRT3847_21706C.1.pep
KSLDICNAFSXELPRLNQRNLTLTCALDSLHSVSSKQXYHGACSLLDEGRQHDSSRNPRTE

SEQ ID NO: 198984 - protein, 162 aa, Glycine max
  Clone ID: PAT_MRT3847_21707C.1.pep
NEFNRTIQIEPPPINQMKIPENSNSGAAMKQGSQGHQPLDFYDIVKESMHRDVHGLSVKTVAKEEKKGRILKYIDSPRPLEPSKFVNTGVMVAWDSPRLSYDGRDTQDTFKSATKPKELPRLSLDSRQGSIKSFNEGTKSRSLLKGPQKGYGSSSTMHLQEP

SEQ ID NO: 198985 - protein, 54 aa, Glycine max
  Clone ID: PAT_MRT3847_21708C.1.pep
MKAAKPAAKKAMKMAKKPAAKKILVKKVLAKKPKTTKKKVVKKSTAKKTKPAKK

SEQ ID NO: 198986 - protein, 43 aa, Glycine max
  unsure (1)..(43): unsure at all Xaa locations
  Clone ID: PAT_MRT3847_21709C.1.pep
FMPVSFSSTILQASTSSKHRAYLQEHPPYDILLXPSLYIIPFL

SEQ ID NO: 198987 - protein, 119 aa, Glycine max
  unsure (1)..(119): unsure at all Xaa locations
  Clone ID: PAT_MRT3847_2170C.1.pep
XXLLXIXXXSXXRXXVXXXXXXRXXXXXSGXXCXXXIXXXSXXXXXXXRXAXXXXXPXXXXXPXXXXXXXAXXXXGVXXXXXLXXXXLXXXXSXXXXVXCCVELXLEPNSXLTYXCVRL

SEQ ID NO: 198988 - protein, 35 aa, Glycine max
  Clone ID: PAT_MRT3847_21710C.1.pep
IGFGGHYISDVACASCRLRVGTISVIYWNTVPAAC

SEQ ID NO: 198989 - protein, 50 aa, Glycine max
  Clone ID: PAT_MRT3847_21711C.1.pep
TSHPKHQKPYIHHLRKHFDNDILYTNTNYTLGTLCFLVFYTRNKTCEQLY

SEQ ID NO: 198990 - protein, 65 aa, Glycine max
  unsure (1)..(65): unsure at all Xaa locations
  Clone ID: PAT_MRT3847_21712C.1.pep
MGIDLHAGCRSTITNPCAPRCDXIYLKLSVKLYHVHGQKTGSNFNAVVSKRHCMSRVNKPSLSLS

SEQ ID NO: 198991 - protein, 66 aa, Glycine max
  Clone ID: PAT_MRT3847_21713C.1.pep
TCKQQVTQGGYYISYSNREEPVVGCEVCKGLRIDEGKSSVVPSVLYGYLNAALLVIWNPTPEGRNK

SEQ ID NO: 198992 - protein, 90 aa, Glycine max
  Clone ID: PAT_MRT3847_21714C.1.pep
GNASIFPRKGRIIQCLPTCLCTRSEGERRSLSELVTDKQNHVVVHSKCSGKNTHLLEVGLSRIAKRKKMFVKSMVEFLFELRSLWIRAPT

SEQ ID NO: 198993 - protein, 93 aa, Glycine max
  Clone ID: PAT_MRT3847_21715C.1.pep
RGQRGPPNIESASPRGVPHSLTQLARAFFFFEIFNPYLFYQSKFFAPFFPPPLTIASLGKILVSKGNGRKFLGGPRCVHKKKKNFNTKNRKSW

SEQ ID NO: 198994 - protein, 62 aa, Glycine max
  Clone ID: PAT_MRT3847_21716C.1.pep
NYLSTIMVSLIISTIMYYQSRQAFLFLRRRRIHLWLSSVNAIYVYLILEIIKHGRCIPKESH

SEQ ID NO: 198995 - protein, 71 aa, Glycine max
  Clone ID: PAT_MRT3847_21717C.1.pep
VQAPIPGRSTDRNEGSVKRCDISRYCYDLPVFVTFLPLFKSNWKTISLPEICESQNFRCIEDIRLLRRTNP

SEQ ID NO: 198996 - protein, 71 aa, Glycine max
  unsure (1)..(71): unsure at all Xaa locations
  Clone ID: PAT_MRT3847_21718C.1.pep
SVNFLXSSLRIKLIRNTHISTFRSTIYPIADNNGGXDMVTXLTSTVDGXRSSLDGGRRRCSLRKPPQCTTS

SEQ ID NO: 198997 - protein, 54 aa, Glycine max
  Clone ID: PAT_MRT3847_21719C.1.pep
TVQGYSRVLVDADHGFEPQYPDSVSELLDSMYARLSDLSVHVINKAVLVIGRFG

SEQ ID NO: 198998 - protein, 210 aa, Glycine max
  Clone ID: PAT_MRT3847_2171C.1.pep
MAKDKYRSFLHDEPDNVQWRHGGPPTYDAVNKLFEEGRTKEWTEGSLEEIVQNAIKSWEMELSHKTRLQDFKTINPEKFKLFVNGREGLSGEDTLSLGSYNALLQSSLPEDLKPYKADEETFESSHEAFKSAFPRGFAWEVIKVYSGPPEIAFKFRHWGFFEGPFKGHAPTGKMAQFYGLGTVKVLLLLCFYLFFAAKSSGELGLQDSQG

SEQ ID NO: 198999 - protein, 373 aa, Glycine max
  unsure (1)..(373): unsure at all Xaa locations
  Clone ID: PAT_MRT3847_21720C.1.pep
PRVRTAARRRQKGKVDPNAFVARRSKNSTLPDHSPLPDAFCNVADEDMWVKMNNGYIADLDSLQTTPPTNRKVQSFPTSDATVGCTSEIEKYEREVQDLRKQLELAKERINELEQKHSEEVPSSKQLFVETPKHQQETRLTHELPLRKSESKGNFXDSFEEALSVMQRFASDGTLSTAKILSTMSEIGDHLFATLEGHFAVNTGGERSSTGNGTLINEQQKVFCERIDNIITSLELSESSITEGQEWKHKCSCEPKGSDLGGETAKEDLNERYENLERELLLLKVERDSLLQKFSESSEKLSMVSSQKENALKDLNTEVNRRKNLEGEVKQIAAAFANRQKSLISFHSDLKTKIENWRAQTPILVPKSFGFQD

SEQ ID NO: 199000 - protein, 33 aa, Glycine max
  Clone ID: PAT_MRT3847_21721C.1.pep
VRKQIIFLSLCLSEQHFEIIKKYIKNTNIKNVD

SEQ ID NO: 199001 - protein, 63 aa, Glycine max
  Clone ID: PAT_MRT3847_21722C.1.pep
YTKSTSKQREKKKYYYKCLIKRVRRVKTLFSESNILIYSIKVYFPNLSLILYFIFIFSCFFSS
